United States Patent Application Publication US 2017/0009304 A1 - sequence listing, part 33

SEQ ID NO: 690710 - DNA, 51 bp, Homo sapiens
cttgatttcacacattgtgcaatgaagctcttcgtgggcggtcttgactgg

SEQ ID NO: 690711 - DNA, 90 bp, Homo sapiens
gagacagatactggaagctctacgctactgccatgataataacataattcacagggatgtgaagctccagcggcgccatgagcaaatgaa

SEQ ID NO: 690712 - DNA, 90 bp, Homo sapiens
tttttgatgaaatagatggattagctccagttcgctctagcagacaagatcagatccacagatttaatccagagactgacttcactatag

SEQ ID NO: 690713 - DNA, 75 bp, Homo sapiens
ctgcagaacccccagaccatcataaagaagcttccggttctgaggtcctggaggtgccatttccctctctgttga

SEQ ID NO: 690714 - DNA, 50 bp, Homo sapiens
ggcccttgttggggcacaaggtggcagaattaaacaaccaccatgtcgag

SEQ ID NO: 690715 - DNA, 100 bp, Homo sapiens
ccagggaaggaagcaaagcaaatggagaatggcatgctggtgacggacagtgcagggaagcaactgcagagggttcgggtttgtcacgtttgagagtgag

SEQ ID NO: 690716 - DNA, 75 bp, Homo sapiens
taccaaggttcgactccagctgcaggagagtgaagatagtccaagtcctaagagacagcgcctctctcattcagt

SEQ ID NO: 690717 - DNA, 75 bp, Homo sapiens
caataactcctatgcatgcaaacagaaacgtaaatattttcaccacgatcgattagactgggatgaacacagttc

SEQ ID NO: 690718 - DNA, 113 bp, Homo sapiens
ttctccaagctctgtctgggttctgctgtcaatggtgttgtccagttgtgaactaaaggccgacaaagattatcactttaaggtggataatgatgaaaatgagcaccagttat

SEQ ID NO: 690719 - DNA, 100 bp, Homo sapiens
ggcaaatcaagcctagtgcttcgttttgtgaaaggccaatttcatgaatttcaagagagtaccattggggtcgaaatcagctgtccgccctgcctgcctg

SEQ ID NO: 690720 - DNA, 98 bp, Homo sapiens
agtgttatttctgttcggggcccatctatcctggacacggcatgatgttcgtccgcaacgattgcaagcaattgctaaccatccaggaggagttaaac

SEQ ID NO: 690721 - DNA, 100 bp, Homo sapiens
tggcaacatgacagaggaccatgtgatgcacctgctccagcattccatggactttttgctatttcagtttggcctttgcacttttaagtatgactacaca

SEQ ID NO: 690722 - DNA, 100 bp, Homo sapiens
tcatctctcccttcgcccagttccctgcatcctaagactcgaaggcagcacaggacctggaaaaattacatatacagtttatgtaacttgatggaagaaa

SEQ ID NO: 690723 - DNA, 75 bp, Homo sapiens
cttggaagggaaagaaggaagattgtgcacaacgtgtttgattgctctgctatcagataaagacctcactgtggc

SEQ ID NO: 690724 - DNA, 100 bp, Homo sapiens
taccaacatgtctgtacctactgatggtgctgtaaccacctcacagattccagcttcggaacaagagaccctggctaatcaggcagctaggaaaccaaaa

SEQ ID NO: 690725 - DNA, 75 bp, Homo sapiens
acaccattgatgcctgccagtgccattttgatatcgaggaggagctggctaccctatctgaggaggagattgcta

SEQ ID NO: 690726 - DNA, 102 bp, Homo sapiens
tttacatcaagaattttggagaagacatggatgatgagcgccttaaggatctctttggcaagtttgatcctgataacttaagtgactctctcttttccggtg

SEQ ID NO: 690727 - DNA, 101 bp, Homo sapiens
cggaaagcgcgtgagcgctggagcttcatccgggcacttcataagggatccgcagctgctcccgctctccaggaggcagcacaggcacttccccaaccacc

SEQ ID NO: 690728 - DNA, 116 bp, Homo sapiens
gttatgcgtttgtcactttttgtacaaaagaagcagctcaggaggctgttaaactgggctagtgccacgaggtttacttgactgttgtgtgaaaagctgataagaaaaccatccag

SEQ ID NO: 690729 - DNA, 51 bp, Homo sapiens
ccaagcagtctggctgcacaggctggggagcagaataccaccgccaggatg

SEQ ID NO: 690730 - DNA, 100 bp, Homo sapiens
aaaagatccagaaaagaggcaaagcaagcgagaagtcgcgggcccagcccacagcaggatctttgtggagttcacctctgtgtttgactgccagaaagcc

SEQ ID NO: 690731 - DNA, 100 bp, Homo sapiens
gcccccgccgccgccattacggagctcccagtgaattcctagaggacctgtgcaacaacctcttgaggatcgaatcttcactcccgctgtctcagcagtc

SEQ ID NO: 690732 - DNA, 101 bp, Homo sapiens
ggcgacggcggcaaatctaagaaatttagtcactttgtggcatgtatgacagccatcttaaaccagatgggtgaccagcactactccttctacattgagac

SEQ ID NO: 690733 - DNA, 101 bp, Homo sapiens
caaataccagctcgacaaagatggggttgtcctctttaagaaggcctgggcaatatttaagggaaagtataaggagggggacacaggaggtccagctgtct

SEQ ID NO: 690734 - DNA, 75 bp, Homo sapiens
ggacgcagtctcttaaatatgataatcagttgctggatttgtgcgactcggtgaaggatgatgcccggagggtga

SEQ ID NO: 690735 - DNA, 83 bp, Homo sapiens
agcctgcggagcctgtggggcagcacagtccagaagcgtgagctggtgaatcccgccagtatgaagcaggccctgatcgcgtc

SEQ ID NO: 690736 - DNA, 100 bp, Homo sapiens
tcatccagcccttatacaaagacctttcggccctggtacctgacagtgtaaagaaggagctcctacaaagaataagaacattccttgctcagcatgccag

SEQ ID NO: 690737 - DNA, 75 bp, Homo sapiens
aaggggtctgcgggcgcaggagctggggtccgcggtctggggccgcaggacagctggcctgaagctcagagccgg

SEQ ID NO: 690738 - DNA, 101 bp, Homo sapiens
gcacagtgtttaaggatgacgacgatgtggtcattggaaaggtgttcatgcagggagaaactctggaaaccttgacaatggcaacagtgtgtctcttcagc

SEQ ID NO: 690739 - DNA, 50 bp, Homo sapiens
gtcccaccgcaaggactggagaagggtgattaaagtatacagtgaagatg

SEQ ID NO: 690740 - DNA, 88 bp, Homo sapiens
tccagccacggggagctcattccctagcagcgggccagacccaaggaagctgagagccgcccgcggtgccgccgcctgcagctgaagg

SEQ ID NO: 690741 - DNA, 115 bp, Homo sapiens
ttgaaagcgacaagtggaggcgccgctctagcggccgggactctgaactatggcgataggtgaaaatggtgatcccaaagccttcttaatagagatttcctggacagaaacatat

SEQ ID NO: 690742 - DNA, 73 bp, Homo sapiens
gagccccactgctcggggaggaggagccacggccggggacaggaacaagagttgaatgctcgagcccgggccc

SEQ ID NO: 690743 - DNA, 74 bp, Homo sapiens
ctgtactggctattggaaggaggagattctgaagataaggagagcagcccgacggccatggaggctgaagagac

SEQ ID NO: 690744 - DNA, 100 bp, Homo sapiens
gagtgaatcaacctggaccttatatcatgtatacaactgtagatgcaaatgggtatctgaaaaatggatcaggctgcatgttaaatggccaagaggtgag

SEQ ID NO: 690745 - DNA, 83 bp, Homo sapiens
cctggccaccgactcctacaagattccttttggttccaagtccaatatggcaactctaaaggatcagctgatttataatcttc

SEQ ID NO: 690746 - DNA, 98 bp, Homo sapiens
ggcagtatccttggggcactgtgcagggctttttcctggtgagtggggtctttgacctggagcccatcgtgtatacttcacagaacgttgctctccag

SEQ ID NO: 690747 - DNA, 50 bp, Homo sapiens
gggaggagcctgttcccctgagtcaggatggctaaaggtgaccccaagaa

SEQ ID NO: 690748 - DNA, 80 bp, Homo sapiens
ccgaattccaagaacctggacaacttgccgtcaagactttccatcagacaatgcagatcttcgtgaagactctgactggt

SEQ ID NO: 690749 - DNA, 83 bp, Homo sapiens
tcattaaacccatcgacaagaaggcacctggggatatgagactttctactcggaatatcctgagtgttgcgtggatgtaaaac

SEQ ID NO: 690750 - DNA, 98 bp, Homo sapiens
aaaggtcgatacgagatcacagcggaagattctcaagagaaagtggctgatgaaatttcattcaggaccagctttatccagggactctaccattccca

SEQ ID NO: 690751 - DNA, 90 bp, Homo sapiens
atcctcaaaccagaagaaaacctgaatctctgaggaaacctcgacctgtctcccagttggttgcacagcaggttactcagcagtttgtgc

SEQ ID NO: 690752 - DNA, 82 bp, Homo sapiens
aaaaatccagaagtacaagcagtctggtttggtgcacctcgatttggaggaagtagggcagggcccttatctggaaagaagt

SEQ ID NO: 690753 - DNA, 99 bp, Homo sapiens
cggcgccgccctgctctgcctctcagcgctactcgcccacggtttttcgttggaatatacgttgcacatttatggcgattctgagtgtgagggcagact

SEQ ID NO: 690754 - DNA, 83 bp, Homo sapiens
ctttgcttcagccgcagtcgccactggctgcctgagctgcttccagctgccatggtgatgccaccccagcccgtggtcctgat

SEQ ID NO: 690755 - DNA, 74 bp, Homo sapiens
tccatcttggttttgagctctgctctgcctgtgatgtcgagaacactggcctcggccttcatcatcgtcatgct

SEQ ID NO: 690756 - DNA, 50 bp, Homo sapiens
ttgaagccgcctctgtattacttaccaggagtttcggacgtggctgaggg

SEQ ID NO: 690757 - DNA, 96 bp, Homo sapiens
aaagagaggtgcctttatctgatgatgatgaaagttacacagatcccatgcgaggcccaagaaaactagaagtagtggaggtcaaatctcggcaaa

SEQ ID NO: 690758 - DNA, 50 bp, Homo sapiens
acatctacaaccttcgatctcctgacgaatttggagtccaggaatgagac

SEQ ID NO: 690759 - DNA, 100 bp, Homo sapiens
cagcccatggaggtgcaggaaggctatggctttgggtcaggagatgatcccatttgctgtggtgggcagtgaccacgagtaccaggtcaacggcaagagg

SEQ ID NO: 690760 - DNA, 83 bp, Homo sapiens
gtgggaacccaggccccgccgaggcggccagaaccgtgggtaccgatggatgtggccgagagccctgaacgggatcctcactc

SEQ ID NO: 690761 - DNA, 51 bp, Homo sapiens
gattggattggcatctttagatttggtgaggattcatcaacctccagtatg

SEQ ID NO: 690762 - DNA, 74 bp, Homo sapiens
cggcattgcacatcctgaccaccttgcaagagccacatgacaaggtgtgtgtgtgcaggccacagcagcatgcc

SEQ ID NO: 690763 - DNA, 100 bp, Homo sapiens
aggagacatcagagaaagcagaaaaacaccaggctactatctcggggtttccagaagaaaagatcaagggagaattatcaagaatagattatttttctga

SEQ ID NO: 690764 - DNA, 74 bp, Homo sapiens
ggcaatggcacaaagttctctcgatcagggcatacatctttcttcgacaaaggttttgctacttgagaagatag

SEQ ID NO: 690765 - DNA, 73 bp, Homo sapiens
cgaggacaactacaccatcgtgcctgctatcgccgagttctacaacacgaagcatcaagtgtacctgatttgt

SEQ ID NO: 690766 - DNA, 100 bp, Homo sapiens
cactgtgcgccctgtcgccgccaccgcggaaaacgtcttgcacgtgcgaggggcatttcaggagtttcctgtctgtcagagacagagtcttgctatgttg

SEQ ID NO: 690767 - DNA, 90 bp, Homo sapiens
ggcggagctgacggtggaggttcgcggctctaacggggctttctacaagtttttggctttcacccccaaccagtgaccaaagacttgacc

SEQ ID NO: 690768 - DNA, 82 bp, Homo sapiens
cgagcgcgagcggcgcgagaaagttactcactataaacaatatccacccaacacaagcaaagtttattcctactttgaatgc

SEQ ID NO: 690769 - DNA, 75 bp, Homo sapiens
gtcctggctcttgccctcatcctggttctggaatcctcagttcaaggtgaaagccagcttacgaacattaatacc

SEQ ID NO: 690770 - DNA, 96 bp, Homo sapiens
gatggaagggaggagactcctgaccctcagaatgctgaagaaaattcgatcactgcttgttgctggagctgcacagtatgattgcttttttcaaca

SEQ ID NO: 690771 - DNA, 50 bp, Homo sapiens
gttgaacaagacaacttatttgatgcgcagttgtgtagcagttgagtaat

SEQ ID NO: 690772 - DNA, 103 bp, Homo sapiens
gcggcggctggaggagccgctgggcttcatcaaagttctccagtgggggctgagctggaggagagtagcaaaaacacgaagaagttggatgccatgaccctca

SEQ ID NO: 690773 - DNA, 82 bp, Homo sapiens
gcggaccccgccgagtcctagcgcctggcctgcgcgccgctgcccgcgccacagattggatttgaggctcctcccctccagg

SEQ ID NO: 690774 - DNA, 101 bp, Homo sapiens
ctcattagtgagaatggtcatgctgccgacaccctgacggccacgaacttccgagtgggtgagcgagtgctgtgctttcatgggcctcttctttatgaagc

SEQ ID NO: 690775 - DNA, 51 bp, Homo sapiens
ctcctctccgcgcgttcttggggctaaaaggtcagattcctgaaattaaac

SEQ ID NO: 690776 - DNA, 83 bp, Homo sapiens
aggtggtggtggccaagtatgcgcccagcggattctacattgcctccggaggaaatttggtgagcggcctccacctaaacgac

SEQ ID NO: 690777 - DNA, 94 bp, Homo sapiens
aataagtgttttaagaaagtggacaaagagaggagtcagttttcggctttgtgagaaaccttaccatcaaacacgatggccagcaacgttacca

SEQ ID NO: 690778 - DNA, 50 bp, Homo sapiens
gaaaacctgtttaaactcattgtcaagtgcggtggctactaaagttcgaa

SEQ ID NO: 690779 - DNA, 50 bp, Homo sapiens
gtggaacagcctcggccaccaaggtttgtcctggttgtggtcaagactgg

SEQ ID NO: 690780 - DNA, 96 bp, Homo sapiens
cagaaatggaaagtgttttggcccagcggctacaggaagctgtgtctgttcgatttggtgggaggagatgtgcagggagctgtatcttgtcctccg

SEQ ID NO: 690781 - DNA, 75 bp, Homo sapiens
agatggaagacatgattgctgaaggatggagagcaatacatcatcatctttggagaatttagcgacggcgcctgt

SEQ ID NO: 690782 - DNA, 80 bp, Homo sapiens
taatgtaactgtgtgcaaggataacaggcccttccttctaccatgattatagtagcagtttattgtcctgtgatagctgc

SEQ ID NO: 690783 - DNA, 75 bp, Homo sapiens
gccgggcccagtcaccgaccgagactgagtgccctttgcggcttgctgtctgccagcactgtgatttagaacttt

SEQ ID NO: 690784 - DNA, 50 bp, Homo sapiens
ctggagagggggcgctgagctgttgggacaaggcgcctctgtcgaagagc

SEQ ID NO: 690785 - DNA, 98 bp, Homo sapiens
tagacgatgaggacgacagcaccttcacaataactgttgatcagaaaaccttccatttccagggagagattaaacagattctagaaaatgaacttcag

SEQ ID NO: 690786 - DNA, 101 bp, Homo sapiens
cttcctccaagtgataatccagattttgatccagaagaggatgaacccacgcttgaggcctcttggcctcacatacaggcctgctgaattagccaccaagt

SEQ ID NO: 690787 - DNA, 96 bp, Homo sapiens
aaagatcggacgtgatggacaggccaacagagcacttatggcaaggcatctcgagggggtggcaatcaccaaaacaattaccagccatactaaagg

SEQ ID NO: 690788 - DNA, 75 bp, Homo sapiens
ctcagttggaagcagccgatccagcctgcggagcctgtggggcagacttgtgtatgcggatacctgcttcagtac

SEQ ID NO: 690789 - DNA, 83 bp, Homo sapiens
ccccaaggcgctgccctgcgcaggacaatacaatggtgggtgaagagaagatgtctctaagaaaccggctgtcaaagtccagg

SEQ ID NO: 690790 - DNA, 98 bp, Homo sapiens
taagaagaatcacacctcattgcaggcagtaacgtgatgagatctattcatggcgtgggagagctgatgacccaggtggtgctccggggaggaggctt

SEQ ID NO: 690791 - DNA, 51 bp, Homo sapiens
cgccagcatgccccagtccaaagattcctgggaacaccaccatggagggcc

SEQ ID NO: 690792 - DNA, 50 bp, Homo sapiens
cttcagagacatgagaagattcatactgagtcttgctctgtcgcccaggc

SEQ ID NO: 690793 - DNA, 51 bp, Homo sapiens
gcggcagaatgctcttctggagcagcaaggactgtcttattccactcttcg

SEQ ID NO: 690794 - DNA, 100 bp, Homo sapiens
taaacaagagatttccacagaagctgcagtgagaagaggagtttgttactttaaacagaggctgaagaaactatagaattagcagagaaagtggagaagg

SEQ ID NO: 690795 - DNA, 100 bp, Homo sapiens
ccgtaaacagaaagagactgcccggttgcagggtgttaaaaagtaatcgaagtacgaagaggacatggtatcaagcagtcattcaatgactataacctct

SEQ ID NO: 690796 - DNA, 74 bp, Homo sapiens
aaccagttattgaatatcaagaggaggagttgttgggttggggtgctggaggactgcttcaccttcctgggcat

SEQ ID NO: 690797 - DNA, 98 bp, Homo sapiens
ctactgatggtgctgtaaccacctcacagattccagcttcggaacaagagaccctggtgatttgtggagctatgatttcttcagtggtgaatttgtgg

SEQ ID NO: 690798 - DNA, 76 bp, Homo sapiens
ggatctgcatggaattctgtggggctggttctctccaggacatctaccaaggtacaccaggggttggaaaaaccac

SEQ ID NO: 690799 - DNA, 100 bp, Homo sapiens
tacatagctgctatcagtgcccgctttgttcagctgcagcatggagagatagataaacggttgctgatcatctgggctgtgatccacaaacccggttctt

SEQ ID NO: 690800 - DNA, 100 bp, Homo sapiens
gcgcgcgggcacagggtgccgctgaccgttctttattggtgaaaacatgaatccagatggcatggttgctctattggactaccgtgaggatggtgtgacc

SEQ ID NO: 690801 - DNA, 100 bp, Homo sapiens
aagcaccctcgtcaccccggccggcaccgcattgaggcaggtgtgcaggtgcggttgcggcgagccaggattgtcagtggcttcgccccgaggagagctg

SEQ ID NO: 690802 - DNA, 50 bp, Homo sapiens
gctgccttgtccggtaccctgtcagagaacgccagatcaagtgtcccaag

SEQ ID NO: 690803 - DNA, 101 bp, Homo sapiens
cggggggctagcaaagagattctctcggcacagaggacatacggatcgatgagaggacagtcagccccttcctgcaattgtcagatgatcgaaagaccctg

SEQ ID NO: 690804 - DNA, 100 bp, Homo sapiens
atcatgctggctgcaaagaagggactggtatttaccttgctgtggattgctgactggatggtccatcacttctggaggaaaggaaaggacccggatagtt

SEQ ID NO: 690805 - DNA, 100 bp, Homo sapiens
tcttcccatcctgctattctgtctcgatggtttcagaacacagtagccatcaggaccccctgacagatagctgctgaggctctgtcggtggtgagcgacg

SEQ ID NO: 690806 - DNA, 87 bp, Homo sapiens
accctcaacaaacaccagcgctttggtgacctgaccaacggtgcagatgggatgctggccacaagctccaatgggtctcagtacagc

SEQ ID NO: 690807 - DNA, 90 bp, Homo sapiens
gtctgagagagggaagtcgcctctgtgctcgacttcagggccacaggtgctgccaagatgctccagggcacctgctccgtgctcctgctc

SEQ ID NO: 690808 - DNA, 75 bp, Homo sapiens
cggatttcaccacaagaagggctgccaggctggttatgatggtgagagtatcggaaattgcccgttttctcagcg

SEQ ID NO: 690809 - DNA, 110 bp, Homo sapiens
ccaacttgaatgtaccagaactaaacagtataaatatgtcaagatcacagcaagttaataacttcaccaggcagtcttgattgatatggaagaaggggtagtgaatgaaa

SEQ ID NO: 690810 - DNA, 117 bp, Homo sapiens
cttacaccctcaggactttttgtcatctgttttgttccagcaattcagtgagatgctgggctcttgcactgtttggtggaaatggtgagacaggatttgagcaaaattctacttatt

SEQ ID NO: 690811 - DNA, 100 bp, Homo sapiens
tggcgctctggctgtgctgcgcgacccccgcgcatgttgaaaccaagactgaagactgaacctgaagaagtttccatagaagacagtgcccagagtgacc

SEQ ID NO: 690812 - DNA, 50 bp, Homo sapiens
gcagcagcatcctaaaacctctcaggaatgcagagagcaaccaatgtcac

SEQ ID NO: 690813 - DNA, 112 bp, Homo sapiens
tggatcggcatctagtctttccgcttcttgaatttctctctgtaaaggagatcatcaatgctgtggtactgttgattttattgagtgccctggctgatccggatcagtataa

SEQ ID NO: 690814 - DNA, 100 bp, Homo sapiens
cctgcgccggcctcggccaccgagatcctgctgacgccggctaggttgatattcactgatggactccaaagaatcattaactcctggtagagaagaaaac

SEQ ID NO: 690815 - DNA, 74 bp, Homo sapiens
gtcatctccttcatgcagagtgacatgggtcgggaagcagcatatggagatggacaatccgtgtgggtgccctc

SEQ ID NO: 690816 - DNA, 83 bp, Homo sapiens
cgttaaccttagccacaaagtcaaagacaatgcagatcttcgtgaagactctgactggtaagaccatcaccctcgaggttgag

SEQ ID NO: 690817 - DNA, 78 bp, Homo sapiens
tgcagaaactccctctggtgatgatttcaggagagaagatgactgaggaggaggtggagaccgttctggcaggacacg

SEQ ID NO: 690818 - DNA, 99 bp, Homo sapiens
gagaaaagcgagaccgcgtgcgaggaccggacacaactcagatgggaagttcatcgcccgggcacagcggatagagtacgactgtgaactagttccccg

SEQ ID NO: 690819 - DNA, 75 bp, Homo sapiens
gaccgtggaggagtaccgcatcgcccagctgtacatgatacagaggtgtgttgcagtcactcattgaaaaacatt

SEQ ID NO: 690820 - DNA, 101 bp, Homo sapiens
ccgaaaccagctgcacatgttaccggaactgctgttccagaacaaccaggctttgtcaagactgtaagaatgattgatgttggctgatattggagtgctca

SEQ ID NO: 690821 - DNA, 117 bp, Homo sapiens
gacagccgcgcgctgagggtctcggggcgggcgccgcgggacctctccgggccatggggggatatgagactttctactcggaatatcctgagtgttgcgtggatgtaaaacccattt

SEQ ID NO: 690822 - DNA, 93 bp, Homo sapiens
ttgacgccatgtcgggttattcgagtgaccgagaccgcggccgggaccgaggcaaccatgtccaagggacctgcagttggtattgatcttggc

SEQ ID NO: 690823 - DNA, 101 bp, Homo sapiens
acttgtcacatgcatcaggaccagagtgctgcattcttacaaccctaaaatccatctgctcttaacacaccgtcaaaaagagggggaaatgcatctccgag

SEQ ID NO: 690824 - DNA, 83 bp, Homo sapiens
gtgtccggaggtttgcaggggtgcagtgtgtctggtcttatgagacaatgcagatcttcgtgaagactctgactggtaagacc

SEQ ID NO: 690825 - DNA, 137 bp, Homo sapiens
gaacgaagtaggccgtctcgctctgggtctccaggcccgcgaccgtccgccagtcgtcccgaggggcctcatccacatgctcacccacttggccgaggctctgcaccaggcccggctgctggccctcctggtcatcc

SEQ ID NO: 690826 - DNA, 95 bp, Homo sapiens
agaacatatgccagttcctcgtagagatgagagtccggagtgttgtcatgtgaagcctgccatccaggaacctccaatagttattagtgatgatg

SEQ ID NO: 690827 - DNA, 106 bp, Homo sapiens
gaaaaatccttcttagccattttaaagggatgccagatgatatgaacttcagtgatgtaaagcaaatccatcaaacagacactggcagtactttagacacaacagg

SEQ ID NO: 690828 - DNA, 100 bp, Homo sapiens
aggatgatgttgacttggggatccaaaggcacagttcttacagcagctgtgacacaagcctcactgcagtctataattcataagtttcttactgctggac

SEQ ID NO: 690829 - DNA, 50 bp, Homo sapiens
gacagttttgacaacacctatcaggtgctgtgcctgaggaacaataccat

SEQ ID NO: 690830 - DNA, 51 bp, Homo sapiens
tctgactcccaggacgggcaccaggcatcaacttctaactcatctcgccag

SEQ ID NO: 690831 - DNA, 99 bp, Homo sapiens
gcatggcggcgcggcccccggacctgcaagtgccgcctccctccggaggtgcgcggaggcttggtgtgccaggctttattgaacaactctcattattac

SEQ ID NO: 690832 - DNA, 75 bp, Homo sapiens
ccatgcaaaggcaggggaggaagccacctcgaggttcctatatgatagtggactcttcagatcacgaccctggag

SEQ ID NO: 690833 - DNA, 97 bp, Homo sapiens
tgggctccggggacactttgcgttcgggctgggagcgtgctttccacgacggtgacacgcttccctggattggggctgacgcgccactatgtagcgg

SEQ ID NO: 690834 - DNA, 74 bp, Homo sapiens
gacctcaagatgattcagtgcaagagagttgttaatggctggctcaactaccctctggagaagataggcttctg

SEQ ID NO: 690835 - DNA, 82 bp, Homo sapiens
tgggccggccgggagggcctcgggggactgactggatttttagactctgaggagcagttggagctaatccacattatggaaa

SEQ ID NO: 690836 - DNA, 100 bp, Homo sapiens
tgcagcttaggtgtttcaaatcctcatcagcagctctctgatccttctgacttaccaaggaatgccttcagaatttttaccattcttgtggaatttttat

SEQ ID NO: 690837 - DNA, 82 bp, Homo sapiens
aagccgctggcagccgcggatctcaccgccgctcagggagtcagaaataccatcagaggaggggtactgtgactttaatagt

SEQ ID NO: 690838 - DNA, 95 bp, Homo sapiens
agaaccgtcccaaaatatggcaaagaaacctattctgagccatgccagtgacggtaacccgcaccaccatcacaaccaccacgacgtcatcttcg

SEQ ID NO: 690839 - DNA, 75 bp, Homo sapiens
cgaggtgccggccccgacaggacggtgagatgctgctcggttctcttgtccccccaactttaccgcgaagccccc

SEQ ID NO: 690840 - DNA, 74 bp, Homo sapiens
aaaacacaggttctggacggaagtttacccgcttggagttatgacctacagtgatacagggaaactaagtccag

SEQ ID NO: 690841 - DNA, 75 bp, Homo sapiens
aggacatggagtatgaaagacggcaacataagctttacaacaaggagttgtatgctgacttcattgctgctcaga

SEQ ID NO: 690842 - DNA, 74 bp, Homo sapiens
gggacatcagtggagccttctcagacccacagatgatgaataaggtatttggaggtactgtgcacaaaaaaagt

SEQ ID NO: 690843 - DNA, 75 bp, Homo sapiens
gaaattcgagaagctgcaaatgccagtgctatacttggtagatcagaaactcaggagtgtcttttctttaatgct

SEQ ID NO: 690844 - DNA, 50 bp, Homo sapiens
ctcgtcgccgttcgccacccaagatattctctaagccgctttcatcatgg

SEQ ID NO: 690845 - DNA, 50 bp, Homo sapiens
gtgtgttaaagtaacagatgatttagttttggttgaatctggcgatgtgg

SEQ ID NO: 690846 - DNA, 73 bp, Homo sapiens
cttgacaaagatggcactggacaaatccaggtgaacatccaggaggttccctcggagacatggaggccagaga

SEQ ID NO: 690847 - DNA, 74 bp, Homo sapiens
ctcatctgtgctgccctcgctgcccaggctacagatgcacatgttgaatggagctcttctggcattgctgtttc

SEQ ID NO: 690848 - DNA, 75 bp, Homo sapiens
gaaagatggatgagaccttcgtcagcaaacctggaagcaagaggctactatgagcagactggagttggacctctg

SEQ ID NO: 690849 - DNA, 83 bp, Homo sapiens
gtgctaccatcgtgagagtaaggtgtctgcccaggaggtcaggaaggagaatcccctccagttcaagttccgggccaagttct

SEQ ID NO: 690850 - DNA, 100 bp, Homo sapiens
agcccatcaagctcctgccctggctgggcccctagactagagggcagagggttgatccattttctaagaaagattggtatgatgtgaaagcacctgctat

SEQ ID NO: 690851 - DNA, 87 bp, Homo sapiens
ccgaactagatgagaccaaaatcattctgttgaagcttcttgtcatgacggggatgaaacaattgaaactattgaggctgctgaggc

SEQ ID NO: 690852 - DNA, 78 bp, Homo sapiens
gcgcaagggctgtctccgcttccaggtccccttcccctgagcccatctacaatagcgaggggaagcggcttaacaccc

SEQ ID NO: 690853 - DNA, 75 bp, Homo sapiens
ccaaatcatccgagacatgattggaccggaaaagactttgggactgctgagatgtcctctattcttgaagagcgt

SEQ ID NO: 690854 - DNA, 50 bp, Homo sapiens
caggagactgaccgcaacggcaggcagggcatatacttctcttgtcttgg

SEQ ID NO: 690855 - DNA, 75 bp, Homo sapiens
acgtacctgtcctacttgaagtaccggattatatctgggtgttggcacccagccactattctgccaatgaagtac

SEQ ID NO: 690856 - DNA, 100 bp, Homo sapiens
ctgctgctgctgctgggcttctccatctgcctcatagcctgctgcgtgctcactgcagctctggcactgcagcagcagcagcagcagcagcagcagcagc

SEQ ID NO: 690857 - DNA, 73 bp, Homo sapiens
ccacgaggcagctgtcccatgctctgctgagcacggtgaatagcctaacatggcagaccagagacagcgctca

SEQ ID NO: 690858 - DNA, 75 bp, Homo sapiens
caagatggcgccgaaagcgaagaaggaagcactacagttcgtaaggagatcatcaggaataagatcagagccatt

SEQ ID NO: 690859 - DNA, 90 bp, Homo sapiens
cgagattgagcacgtgaccaagcgggccatcagcacccccgagaatggacagcaaatttgggagatggaagccacggtggataaggacaa

SEQ ID NO: 690860 - DNA, 75 bp, Homo sapiens
ttccattcttttccttattcttctgatgtggatccaggcatgcttccagaagagtggtgcatcagtggttgctat

SEQ ID NO: 690861 - DNA, 100 bp, Homo sapiens
ggacattggaaggggaagccccacatcagagctgttcagggtgcagtactagccgctgtgtcaagtcacaaattcaactcattctatggggatccccctg

SEQ ID NO: 690862 - DNA, 101 bp, Homo sapiens
aagcgggacgagtggctggcacgctggaaaagggagaaatttaagatccgcattgaagacccaccccgcagaaagcacatggtattcctgggtggtgcagt

SEQ ID NO: 690863 - DNA, 75 bp, Homo sapiens
tgttgcctatcagaagtcaattcaaaggacctgcccccagagagaaacgcctgacagacaatctcagagttggac

SEQ ID NO: 690864 - DNA, 100 bp, Homo sapiens
caaaccccaagtcctccttgccaggccttcaaccactatctcagtgcaatgggtcttaaagaaagtgcagaagagatggtcaaaaacaaattggaaggaa

SEQ ID NO: 690865 - DNA, 82 bp, Homo sapiens
ggcctgtgtgcctggaaaggaattgttttggcctaggatcatccagtgttgtacagtgttttgggcatgcacgtgatactca

SEQ ID NO: 690866 - DNA, 100 bp, Homo sapiens
ttagttctggggagcgcctcgtcgacatgagtgatgtggaggaaaacaacttcgagggcagaaaccacgaagctgccctgagacgctcactcacgctgtg

SEQ ID NO: 690867 - DNA, 75 bp, Homo sapiens
ctcttctcgccctggcggggaaggaccccaatgaggatgagccaaacatccgagtgctccttgagcaccgctttt

SEQ ID NO: 690868 - DNA, 89 bp, Homo sapiens
cggtgctggtggagcgctccacgctcaaaggtatctcgggggagctttgtgccttgatggatcaagttcatcatatgcagcactcaaaa

SEQ ID NO: 690869 - DNA, 78 bp, Homo sapiens
aagcagatgcgcattttgatggtgtcctgctatagactatactagacacacacttgatggtgctgcatgtcttctgaa

SEQ ID NO: 690870 - DNA, 73 bp, Homo sapiens
agcatccgggatgggatccacggacccctgctgtcaagtctggcaccatctttgacaacttcctcatcaccaa

SEQ ID NO: 690871 - DNA, 82 bp, Homo sapiens
ctgccgctgtcgtctttgcttcagccgcagtcgccactggctgcctgagcgccaaatcttaaaggcagaccacgcaaaaaga

SEQ ID NO: 690872 - DNA, 90 bp, Homo sapiens
tgcagcttctcctgtcatcggaaatgccaggccaagcgagtaaccagctcataaatcacatcgaacagtttttggatactaatgaaacac

SEQ ID NO: 690873 - DNA, 100 bp, Homo sapiens
agaccccttcaggttcccaaggagatctggcttctagtagatcacctattcaaatacgcctgtcaccaggctctgcagaacattgctgccatcagcctgg

SEQ ID NO: 690874 - DNA, 98 bp, Homo sapiens
cagctccggccgcctggctccccatactagtcgccggccagcactccttgcccgaggacagagatggcgagcgcccggattggggatgagtatgcgga

SEQ ID NO: 690875 - DNA, 75 bp, Homo sapiens
gagagggagccgcagctgatgtcagcttgctgcccttgaatttcctccaaagaaactatttggaaataaggatga

SEQ ID NO: 690876 - DNA, 82 bp, Homo sapiens
caccgaagcagcgtgtcctccgtgggagcccgaggagtcagaaataccatcagaggaggggtactgtgactttaatagtagg

SEQ ID NO: 690877 - DNA, 100 bp, Homo sapiens
cattcaaagctaccagaagcatcatggtccccagaccctgtacctgcctgtaactctaagcagtatccctgaatattgccgagccttagaagagaatgaa

SEQ ID NO: 690878 - DNA, 100 bp, Homo sapiens
tcatggccgcagccgctctggggcaggtgtcgtgaaaactacccctaaaagccaaaatgggaaaggaaaagactcatatcaacattgtcgtcattggaca

SEQ ID NO: 690879 - DNA, 82 bp, Homo sapiens
gggttctggtgccgcgcagctttccccgtgggtgggaggacgctactcgctgtggtcggccatcggactctccattgccctg

SEQ ID NO: 690880 - DNA, 100 bp, Homo sapiens
cagctacttaatcctactcagaagaacttgtacagagatgtgatgttggagaactatagcaatctggttttcttgggtgttgtcaaagtggattatggag

SEQ ID NO: 690881 - DNA, 112 bp, Homo sapiens
ctgcccggtgcccgaggaggcagccaagctcgtagcctgccactccgtgcggactttgaacatgtcggggatcgccctcagcagactcgcccaggagaggaaagcatggagg

SEQ ID NO: 690882 - DNA, 75 bp, Homo sapiens
tttcgaccttcaatccagttccaaggactccacgggggcaaggggacgcgagataaggtcctgatcagaatcatg

SEQ ID NO: 690883 - DNA, 97 bp, Homo sapiens
ctcctgctgtcacgtcacctggcccctcaccatcaccatcctcatctctcttgggtgggtgacatcaccatcctggtgaacaatgccgccgtggtcc

SEQ ID NO: 690884 - DNA, 100 bp, Homo sapiens
agaaccccaggactgcgcccccgggagcgggcgcccagagtgcaccaattccagctggacatcactgtgaaaatgggacgggataaagtccgagaaatgt

SEQ ID NO: 690885 - DNA, 75 bp, Homo sapiens
gaaactgctgaactctcacaatatgaagagcattttaagaggtgcagcctctggaagtggatcaaactagaactc

SEQ ID NO: 690886 - DNA, 98 bp, Homo sapiens
agttggtggcctgggcagcctgctggaccctgccaagaagtcgcccatcgcagcagctcgttctacagcgagtcgggcatgcctaccaaacatctttc

SEQ ID NO: 690887 - DNA, 74 bp, Homo sapiens
tagccacagcggcagctccagcccggcccggcagcgacatggaaggttgccaatttggcctgttccatctccaa

SEQ ID NO: 690888 - DNA, 100 bp, Homo sapiens
cttcaatgatgggaaggtggatcccgccgggaggtactttgctggaagagtctaacctgtctctgcaagctcttgagtcccgccaagatgatattttaaa

SEQ ID NO: 690889 - DNA, 75 bp, Homo sapiens
ttaaggattccaagtaactcttatttgcctggagcattggtaagcgtcacactgccaaagtgagagctgctggag

SEQ ID NO: 690890 - DNA, 90 bp, Homo sapiens
gaaaaggaacgggagctgagaggttcaggtggaaggttataattacactggcatgggaaattccaccaataaaaaagatgcacaaagcaa

SEQ ID NO: 690891 - DNA, 100 bp, Homo sapiens
aaaatgacatccagcgacaaggactttaggttcgagaacttgtcttggacaattgcaaatcaaatgatggaaaaattgagggcttaacagctgaatttgt

SEQ ID NO: 690892 - DNA, 100 bp, Homo sapiens
actcacttgtcactcactgccatagagtacagccacagccacgacaggtacctaccaggaaattggccttgcctctctgggtgcacctgatgaatacatt

SEQ ID NO: 690893 - DNA, 95 bp, Homo sapiens
ggagcgcgaacgagcgacggcggaacccgtgggcctgtggactgcagcctcggcggtcagcagaagcaaggtctcgctgtgttaccctggctgga

SEQ ID NO: 690894 - DNA, 73 bp, Homo sapiens
gaattagaaactccaatgagagaacgttttaggaatctagatgaagtttttgtcatccattggagggacactg

SEQ ID NO: 690895 - DNA, 75 bp, Homo sapiens
ccaagaacgtgctcttcgctcacctggatgacaacgagaggaggatgacgcggcatggcaagaactgcaccgcag

SEQ ID NO: 690896 - DNA, 90 bp, Homo sapiens
gcggctcctcgtgctggggctctggctggcgttgctgcgctccgtggccggggagcaagcgccaggtggtgcaaaggatcaaggctgtgg

SEQ ID NO: 690897 - DNA, 76 bp, Homo sapiens
agaagtgaagctgctgctactcggatctagtttgaagcactaagaagaataagacatcagtttgaaaagaggctct

SEQ ID NO: 690898 - DNA, 75 bp, Homo sapiens
gaccccgcggccaccactggcaaggcccagcttgtgaaaatgactcagattgatggacaacttttcttaattaag

SEQ ID NO: 690899 - DNA, 100 bp, Homo sapiens
ccgcgattacggggctgcccgccgggaaaccgtgcaggattggtggtgattttcatagccaagttcgtgctggccgtgggcagcgccgtctttgatgcca

SEQ ID NO: 690900 - DNA, 100 bp, Homo sapiens
tactacctttatttccaccataggcctgtttaaagaagaaaacccgtatgctagatttgaaaacaactaaagcgctccagcacatcagtcccgacgcttc

SEQ ID NO: 690901 - DNA, 75 bp, Homo sapiens
ggagattttccttcgggagttgatctctaatgcttctgatggcttcgtgggacacatatgcaacatgcctatgat

SEQ ID NO: 690902 - DNA, 82 bp, Homo sapiens
ttttatccaagatattggaaggctccctctgaagcgacactttggaaggccataaagaatgctgatgggagaaccattttcc

SEQ ID NO: 690903 - DNA, 97 bp, Homo sapiens
cagtgagtccagctcctctgacagcgaagactccgaaacaggaaccattaaagagatcctggggactgcccagtcagtgggctgtaatgttgatggc

SEQ ID NO: 690904 - DNA, 75 bp, Homo sapiens
atgtgtctgaactgaagaagcttgggctcacttccacaaatatatggtccggcttgctttcacagatgtttcgat

SEQ ID NO: 690905 - DNA, 100 bp, Homo sapiens
cttcaatactacctttatttccaccataggtgagaattatgaagatgatgacctagtaaattctgatgaggttatgaagaaaccatgtccagtacagatt

SEQ ID NO: 690906 - DNA, 90 bp, Homo sapiens
ggatgagtacgataccgaagcgggctgtgtgccccttctccacccagaggtagaacgtcatgacatgaataccttaagcctgcccctgaa

SEQ ID NO: 690907 - DNA, 100 bp, Homo sapiens
aaccatttcttccctttcctcttgacactgcagctgcagtcaacctcttccccaatttcaatgcggctcccagccaacctctgataaaccctcccagcgg

SEQ ID NO: 690908 - DNA, 123 bp, Homo sapiens
aaaagatccagaagcatgttagttcgacatcatcatcttttcttgaactctccttgaggaggcggcagatgcttctgttagaaaccctgaaggtgaaacagaccattctggagccaatcccta

SEQ ID NO: 690909 - DNA, 100 bp, Homo sapiens
cacggaggggactggagctggagagtgactgtagagcctcaggcaagaaaaactttgactgcagataaattggagcatttgaaatctcagctggaccatg

SEQ ID NO: 690910 - DNA, 75 bp, Homo sapiens
ggtcatcaatgttactcaggtagagaaatgcactcggtgatggaaagagagccactattctgaagaacacttggc

SEQ ID NO: 690911 - DNA, 75 bp, Homo sapiens
cctggctgtggttcacaagctcgtgaattagcaggttcttaaattccaactccacagagtgaccagagagaggac

SEQ ID NO: 690912 - DNA, 100 bp, Homo sapiens
agttggtcctgcagaactggatgctcaaggccctgcccccagccctgcaggaatggaagttggatacactttgtgacttgtacgagacactgaccattac

SEQ ID NO: 690913 - DNA, 71 bp, Homo sapiens
cctgggagcttgctgcagcttcagtacggcaagaagaagctgaaatacctgccctacaatcaccagcacga

SEQ ID NO: 690914 - DNA, 101 bp, Homo sapiens
atctggtctctcacttcaggaaaatctactgccatagttcacatacagctaaaacgtcgaaatgctgagcagcatggattctgcatcggttcgcattatca

SEQ ID NO: 690915 - DNA, 98 bp, Homo sapiens
gggtttgcattccaatggcctggatgaccggtcaaagctggagctgcctcaagagcgagttcctggggaaaaccccagggcaaaacgctcagaaatgg

SEQ ID NO: 690916 - DNA, 100 bp, Homo sapiens
gtttcttatatgtgatgccattccagcactggactcatggaggctgagcatttattcaggttaatgacccagagactgcagtaaaggaattagaagctct

SEQ ID NO: 690917 - DNA, 98 bp, Homo sapiens
ggttctggctccttggcagcaatggctgtatttgaagataagtttaggccagacatggaggtgcgcccacctcgtccacatgttgttaagagaccaaa

SEQ ID NO: 690918 - DNA, 74 bp, Homo sapiens
tgagcgtcccggccttcatcgacatcagtgaagaagatcagagcggttctggtgaggttggaaggatgcagcca

SEQ ID NO: 690919 - DNA, 98 bp, Homo sapiens
tagagctcatgcaaatgaacaaattctgaaaaagagttccacgtcctcccttatcgagtctttgttccccttcctggatccactgtaatgttgtgtga

SEQ ID NO: 690920 - DNA, 100 bp, Homo sapiens
ggtgtatggattcatctcactgactgaaacctgagttttgattcaccaggacgccaagagtgccgaggatgaggctccttccagacacttgggaaagcac

SEQ ID NO: 690921 - DNA, 101 bp, Homo sapiens
tttatcaaactagatgcacaaagaaagcgcctttctccaggctcaaaagagtatcagggtggcaattttaagcccagccagaaaggttttgcaggaggaac

SEQ ID NO: 690922 - DNA, 89 bp, Homo sapiens
tcctgcttcccgggtgttgctcgtcctccaccaggcggtgtgaagatgcctaatgtacccaatacacaaccagcaataatgaaaccaac

SEQ ID NO: 690923 - DNA, 75 bp, Homo sapiens
gttggaccttccggagcttctcagaagacagagggttttcttttgaggtgactattatatggttaaaaagatttt

SEQ ID NO: 690924 - DNA, 75 bp, Homo sapiens
ggaccactcgttgctgacagtcagaaagcggctatgagaggttttcctccgagtacccagaattctgttctaaaa

SEQ ID NO: 690925 - DNA, 50 bp, Homo sapiens
cagagctttacgatgtcacttgggaagcctcaaagagttgctgagagcta

SEQ ID NO: 690926 - DNA, 100 bp, Homo sapiens
gcagctggaggcggcggagcggaagattcctggagttctgtaaagaaaacggagggtataccgggtgtcccttccctgccaaactggacctgcaacaggg

SEQ ID NO: 690927 - DNA, 82 bp, Homo sapiens
ggcgctggtctgctcccagccggtggacgacatccttggagaaggcagcgacgacagcgacagcgagaagaggaggcctgag

SEQ ID NO: 690928 - DNA, 101 bp, Homo sapiens
atacaagggcctcagggccggctaccactgcggctactgcgattccaaggagggcaaagcgtcctgcgtttgaacgccatgaccctgtggatgggagaatt

SEQ ID NO: 690929 - DNA, 101 bp, Homo sapiens
ccgcgcgtggccggggccggcccgaggcgctgctggacctcagcgccaagcgggtagccgagagctgggccttcgagcagtcctacttcgtgtctgactac

SEQ ID NO: 690930 - DNA, 98 bp, Homo sapiens
cttgcctccctgcttcctgctgctggcactggtccttgtcccctcagtttcgagaggcccgtgccatgagaccgcctggggtgagcaaggcgacctgg

SEQ ID NO: 690931 - DNA, 89 bp, Homo sapiens
ctgtcttcggtggactccttcggcagtccacccaccgccgccgcctcccagaagctccaccatgaggcgaggtggatggaggaagcgag

SEQ ID NO: 690932 - DNA, 50 bp, Homo sapiens
tgaggaaggggaagtgggcaaagcagacagagtttcactcttgttgccca

SEQ ID NO: 690933 - DNA, 100 bp, Homo sapiens
ttcatatgatccatcttagtgaagaattaggatacagagcatgtcctttgcaacctgatcacacaaatgatgaaaaagaatagaactttctcattcatct

SEQ ID NO: 690934 - DNA, 118 bp, Homo sapiens
gttgatgaaggttttgggagcctgcaagttgttgctccgcttgttggactgctgctgcaaaacttttctgcccatacatcgtgtacatgcttcaagagatcgacatcctggaggactg

SEQ ID NO: 690935 - DNA, 100 bp, Homo sapiens
caaaagttcagactttggaggtggctgcagaaatgcgagatgctcccataatactctcagatagtgaagaagaagaaatgatcattttggaaccagacaa

SEQ ID NO: 690936 - DNA, 76 bp, Homo sapiens
gaaacctttccaacacagatgtccaagctgccaaagacagggtcttctatgttgcccaggctgtctttgaactcct

SEQ ID NO: 690937 - DNA, 100 bp, Homo sapiens
ccaccaccaccatctccatcacccaccaacaacaccacaataatccacagccaaggttctttcatgctggtgaatgcctctgggagacctgaggggcaga

SEQ ID NO: 690938 - DNA, 74 bp, Homo sapiens
ccatggccttctacgttgtgaaaatggcgtcgggtttggagttcaagtcggtagccgacagcgttctgttttta

SEQ ID NO: 690939 - DNA, 74 bp, Homo sapiens
tccacctcctggtgaagaaagcaaacaatagggccagatttgagtgtgtgaatttttgagtgaaacctggaacc

SEQ ID NO: 690940 - DNA, 51 bp, Homo sapiens
gggcagtcctcgccggcgagttcagcggccgtccccatgttgcgttttccg

SEQ ID NO: 690941 - DNA, 51 bp, Homo sapiens
aaagagatggcctggtggaaagcctggactgctgagaaggaagaatttgaa

SEQ ID NO: 690942 - DNA, 100 bp, Homo sapiens
gggcgcgtcgcctcggacgtccactgcaccctgcgcgagaaggtactccaaagattcaggtttactcacgtcatccagcagagaatggaaagtcaaattt

SEQ ID NO: 690943 - DNA, 50 bp, Homo sapiens
gtctcgaccaagagctgaagctgatcgaatgaggaaaatggggagcagga

SEQ ID NO: 690944 - DNA, 101 bp, Homo sapiens
agatggagtttgatgagaaggaactccgaagggagatcagctatgctatcaagaatatccatggcattaggctggagtgcagtggcgcgatctcggctcac

SEQ ID NO: 690945 - DNA, 75 bp, Homo sapiens
aggcccaccctggagtaaccctcactggagaatccagagttggctgattgcaattctggcccaactcaaccctct

SEQ ID NO: 690946 - DNA, 108 bp, Homo sapiens
cgcaactttttcagcatggcacggcagctccccatgaagatcaggatcaacggcagggatgcatcactgtaagcgataccgctcccctgaaccagacccgtacctgag

SEQ ID NO: 690947 - DNA, 83 bp, Homo sapiens
aacaagcccatggttctgctggtgggccagtactccactgggaagaccaccttcatcagatgcccagcctacagagtctgaga

SEQ ID NO: 690948 - DNA, 83 bp, Homo sapiens
aaaaagtatgatggattacagcaacagttgtcttcagtagaaagggtttatcaggtagaagatgtgtgtgaagaagaaatgcc

SEQ ID NO: 690949 - DNA, 50 bp, Homo sapiens
cagagaccatggagcttcttgtttggaaattttagcattcaggtgccagg

SEQ ID NO: 690950 - DNA, 75 bp, Homo sapiens
ctgttgggagaatttaggatcttgttgaatccagtccagggtggctcctatggacggaaaacagtcttaagaggc

SEQ ID NO: 690951 - DNA, 100 bp, Homo sapiens
ggaataattatgggcagaccagcaacggggtggccgatgaatcacccaacatgctggtgtacagaaaggcaagccaaaattccttccggatagaatatga

SEQ ID NO: 690952 - DNA, 129 bp, Homo sapiens
cagcgtctataggaaaagaggagtcagacacggggcaggctgagttcctcttgctcacagagctctgtaaaggtactccaaagattcaggtttactcacgtcatccagcagagaatggaaagtcaaatt

SEQ ID NO: 690953 - DNA, 100 bp, Homo sapiens
gattcgcagtggtcgcttcttctccttgatgtcagtattgaatatggtggtgaggcgtgaccctggcaacactgaacctgtgaaagccaaggaagagctc

SEQ ID NO: 690954 - DNA, 100 bp, Homo sapiens
gctgacgacacccctggtggatggcgaggatgagaggtttattcttcagtccaaggaagcaattcacagtcagctgttagagaagcagaaaatagcagaa

SEQ ID NO: 690955 - DNA, 107 bp, Homo sapiens
catcgccctgctgggctttgagaagcgcttcgtacccagccagcactatcttcctgcctgacacagctcacttcaagaagtgcacaatgtcagaacgtggaattaag

SEQ ID NO: 690956 - DNA, 100 bp, Homo sapiens
gaagggcaatcattccttctcacttggcctatggaaaacggggatttccaccatctgtcccagggtgctgccccacgtcccccaccaaagcccatgtaag

SEQ ID NO: 690957 - DNA, 100 bp, Homo sapiens
gacatgatggcgagcatgcgagtggtgaagtaagagttccctatttcattgatttgaaaaaaccacaggatcaaggtttgaatcacacgtgtaactacta

SEQ ID NO: 690958 - DNA, 93 bp, Homo sapiens
cgagatgccccctcacatctatgccatcacagacaccgcctacaggagtatgatgcaaggtcagcccaaggccaaccccactgtcactctgtt

SEQ ID NO: 690959 - DNA, 83 bp, Homo sapiens
gccgctcgtcagactccagcagccaagatggtgaagcagatcgagagcaaggtgagaaaccttaccactgtgactgggacggc

SEQ ID NO: 690960 - DNA, 100 bp, Homo sapiens
caaatatcaaaatttgtactcaggtgaaaggaccaggtatgtgaaagcaagaacagagctaacatgggattatggctatgaagctgggactgtgcctgag

SEQ ID NO: 690961 - DNA, 100 bp, Homo sapiens
tatcatcataggtcgtcatgcttatggggatcaagtctcaagaactgttttgagatgcaggaattcatctaattttcactgccgggcgaggtgtgagagc

SEQ ID NO: 690962 - DNA, 90 bp, Homo sapiens
cgcagatgatgccccctatgggagggccaccaatgggacaaaccgagacatgggtgcccggcaccgcgcccgagcccactccattcagat

SEQ ID NO: 690963 - DNA, 102 bp, Homo sapiens
ggccatgctcagggtccagcccgaggcccaagccaaggtcacgggatggatagccggcctgccatggccatctttgaactcctggactatattgtgaacgag

SEQ ID NO: 690964 - DNA, 100 bp, Homo sapiens
gtttttggcagtgccactggcctagctcgatattatccagaacttcgagaaaccaagacctctgaatacttcagcctttcccaccatcctttagactaca

SEQ ID NO: 690965 - DNA, 74 bp, Homo sapiens
ccaactcccgtatcatgatccaccagccctcaggaggcgcccggaaaatggagctggcgctggtgcctgtgagc

SEQ ID NO: 690966 - DNA, 75 bp, Homo sapiens
gaagtgcagctgcctcagttcttagcgcaggctttggagggcagtagagagcttgaaaatctcattggaatctcc

SEQ ID NO: 690967 - DNA, 50 bp, Homo sapiens
tgtccttctgctattgatcctgaaggcccagccccagcccaggggacccc

SEQ ID NO: 690968 - DNA, 50 bp, Homo sapiens
ccgccgtcagagccgccctatcagattgcagagggaatggcatacatcga

SEQ ID NO: 690969 - DNA, 98 bp, Homo sapiens
atcaacttaactgcagctgatacatgtataatttttgattctgattggaatcctcagaatgatcttcaggtgctgattgtcaggaagttccacaagat

SEQ ID NO: 690970 - DNA, 90 bp, Homo sapiens
tcgacattgccgtcgacggcgagcccttgggccgcgtctcctttgaggtgccgcaagatgactgggggggttaccccaccggtggcaagg

SEQ ID NO: 690971 - DNA, 100 bp, Homo sapiens
tggagcagatcctggaggatgtgcggggtgcgccggcagaggatccagtgttcaccatcctggccccggaagtgccgtattcacctggaccaacctgctg

SEQ ID NO: 690972 - DNA, 98 bp, Homo sapiens
ggctgcggcaagcattggtgccatctggagctccacgtccccggacttcggtgtgaattactgtcccactgaccaggctgctgcaggcacagatgctg

SEQ ID NO: 690973 - DNA, 142 bp, Homo sapiens
ggagaactgagctcgccaagaagcggctggcagaaacacaggaggaaatcagtgcggaagtttctgcaaaggccagtcggagagcgtgcgggacgtgcagttcagtatccgggactacttcaccttcgcctccacctttgag

SEQ ID NO: 690974 - DNA, 82 bp, Homo sapiens
gagaactggaaaattggcagaggctaaaaataaaggagaagtatttccaacaactgaagcggagggcattaagaacagcctc

SEQ ID NO: 690975 - DNA, 97 bp, Homo sapiens
agattcgcagtggtcgcttcttctccttggtcagccccagttgatgctgacagcaggacccagtgttgccgtccctccccaggcaccttttggttat

SEQ ID NO: 690976 - DNA, 82 bp, Homo sapiens
gctttgatgaggacgcggagccgcggcggagccggaggaagctgatggtcatcttttccaactctggattaatcgaattaca

SEQ ID NO: 690977 - DNA, 80 bp, Homo sapiens
ggccctgctggaccagctcatgggcacggctcgggacgaagtccattggaatattaagcccaggagttgctttggggatg

SEQ ID NO: 690978 - DNA, 74 bp, Homo sapiens
cctggggaacctgctcaaagccctgggtcgcttggaagaagccaaggtatatgttgtcggtggctatgatgggc

SEQ ID NO: 690979 - DNA, 132 bp, Homo sapiens
ggagaatggagaccaaacctgtgataacctgtctcaaaaccctcctcatcatctactccttcgtcttctggatgcatttttgtagaagcattttgaggatgaatgtttgcaaatcattttgaaattgccaag

SEQ ID NO: 690980 - DNA, 80 bp, Homo sapiens
agggaggcaatcatatgaagtttctgtcttaactgcagtaaatccacaagaggtctccaattgagaaacatggcactgtt

SEQ ID NO: 690981 - DNA, 75 bp, Homo sapiens
cgcaaccagccttctagggcggcggagaaccgcatgcacgagtctctcatgctcttcgactccatctgtaacaac

SEQ ID NO: 690982 - DNA, 75 bp, Homo sapiens
agaagtctggactttttgaccagtgccaaattcttatggtgtcaactctgcccgctcagttcctccttcctaccc

SEQ ID NO: 690983 - DNA, 74 bp, Homo sapiens
aattacagacttcacatcaagttcaaggagtctcttgttaatgctccccaaaaaggccacaaagacagccccac

SEQ ID NO: 690984 - DNA, 101 bp, Homo sapiens
ggtgagctggaggttggagcctgaagatggcacagctctaatttgaaagacatattggctgacctgatacctaaggagcaggccagaattaagactttcag

SEQ ID NO: 690985 - DNA, 100 bp, Homo sapiens
aggactgaggaataagatggtacaagttggactgcttcccaagctcactgcactcctaggctttaatccagtgtgaccagttgaggaaggagctggagag

SEQ ID NO: 690986 - DNA, 100 bp, Homo sapiens
atacccatctttactggcatcctaaagaaaaacacaccttgactttagtcagatacatcactgtctgttaaaggaaaccaagcgtgaagtggaagtctaa

SEQ ID NO: 690987 - DNA, 75 bp, Homo sapiens
atttgctacagcatcccacattaagtcaacggcagcctgccgcctctcattgtgtatgaccggaatggattcaga

SEQ ID NO: 690988 - DNA, 100 bp, Homo sapiens
cagatggcagtgaagatctggagcctctggcaggaggaagcccagaagcaacaagccctgagctattaagaatggcaaaggattgcatagcaagaaggaa

SEQ ID NO: 690989 - DNA, 101 bp, Homo sapiens
ctgcgaggctcggagaaacaggcgccgcgggctccgcgcccggccggacccgggcccgaggacaaatatacgtgtatgttcacttacgcctctcaaggagg

SEQ ID NO: 690990 - DNA, 98 bp, Homo sapiens
gacaaaagccaagaggaggacagttcgctacacagcaatgcatcgaggagatacaactcgtcaacgaatcaaattcagtgatgacagagtatgcaaga

SEQ ID NO: 690991 - DNA, 100 bp, Homo sapiens
cctatggaaagtaaactgacaattcaggagacccagctgggaagaccatgtactcagctgcagcttctaaatccagaacgatttgcacgtcttatcaagg

SEQ ID NO: 690992 - DNA, 83 bp, Homo sapiens
gctgaatcacacgccgccatccgggaggcccagggaagacaatgcagatcttcgtgaagactctgactggtaagaccatcacc

SEQ ID NO: 690993 - DNA, 98 bp, Homo sapiens
atgaggttccaaaataccgtgaccagattcctagcccaggaagttggtgaaccatctaaagaagagaaggctgtggccaagtatcttcgattcaactg

SEQ ID NO: 690994 - DNA, 89 bp, Homo sapiens
cagcatctaactaacacggtttttattgacagagctctgatagttgttccttgtgcagaagggtttttaatgaccacaacaagcaagca

SEQ ID NO: 690995 - DNA, 100 bp, Homo sapiens
agaatgagtttatcgatgcttcccgcctggtatatgatggcatccgggacatcaggaaagcagtgctgatgataagggttatgcctccgcctcgttgccc

SEQ ID NO: 690996 - DNA, 100 bp, Homo sapiens
cagttagaaggaaaaggtcaactcgatccaatacagaccgtgaccctggcagcaaccccaacaaacgccagaggcagccccctctcctgggagatcaccc

SEQ ID NO: 690997 - DNA, 50 bp, Homo sapiens
ggaactgtcaggtacctcaaagctggatgctgtggggcaccacctccttg

SEQ ID NO: 690998 - DNA, 98 bp, Homo sapiens
ctcggtgcgcggcggagagaagaggattccggcgggaactcgactcttggcgccaccgcctcatgcactgtgtagactgtgccctgtccacggtgcct

SEQ ID NO: 690999 - DNA, 51 bp, Homo sapiens
ccgccatgaaatctcccatgagagaatgaaaaatccccagggcgatctgca

SEQ ID NO: 691000 - DNA, 75 bp, Homo sapiens
ctgaaatacatccaggaaagacatggagattctcttaaaaaggacagtcattttgtttactcattcagccctgtt

SEQ ID NO: 691001 - DNA, 88 bp, Homo sapiens
tctatgcaagatttgctgggtatgaataatgactttcctccaagagcacattgcctggtaagatggtctgccatcatggatgttctcg

SEQ ID NO: 691002 - DNA, 51 bp, Homo sapiens
tgggttgtgactgccggccactgcatctcttgcatgctgccattagtcacc

SEQ ID NO: 691003 - DNA, 82 bp, Homo sapiens
atcgtgatcccggcgacatactacctctggccccgagatcagaatgccgattatgatgcatcattatcacagaagaaattcg

SEQ ID NO: 691004 - DNA, 76 bp, Homo sapiens
atcaacaccgagttcaagaacacccgcaccaacgagaaggggtcaccagtcgttggcacaccaagaagctgccccg

SEQ ID NO: 691005 - DNA, 98 bp, Homo sapiens
tctgtgggagacgaagaaggcagaaggagccacgttattaatgctgcactggctttagcagcaaaaccacagagtaaactggcccaagagaacatgga

SEQ ID NO: 691006 - DNA, 82 bp, Homo sapiens
cctgaagcacccaccgaagacgaccatgacgagctctagctggatgggcgcagaggtgcaggtgatggtcctaccagtgtgt

SEQ ID NO: 691007 - DNA, 88 bp, Homo sapiens
acaaacaccaaagactggacagtgacacctgagcacgtcttgcctgagtcccagacccaacatgagtgaagtttcctgcaagaaacgg

SEQ ID NO: 691008 - DNA, 100 bp, Homo sapiens
ccaaggagactgcaggctacctcaggggccgtccccaggacactgtccggatcttccctccctgtggaagtatgcgagacttaagagctcaagtgactag

SEQ ID NO: 691009 - DNA, 100 bp, Homo sapiens
caggatctcgggctcggaacgagactgcacggtagggaagacatatgagctactcaactgtgacaagcacaagtctatattgttgaagaatggacgggac

SEQ ID NO: 691010 - DNA, 88 bp, Homo sapiens
cttctccactttcgccagcccgtgccgcgagcgcggcctgcaggaggaagcggggagaggtggtgagagatgacccctgttgaggatt

SEQ ID NO: 691011 - DNA, 100 bp, Homo sapiens
gtgaccgagaccgtgaccgagagcgtgaccgagagcgcgaatatcgtcatcgttagaagaaaaccaaatatggcatcttccatgaggagcttgttttctg

SEQ ID NO: 691012 - DNA, 75 bp, Homo sapiens
cagactggcaacaagaagatggtaccgtgcatcgcacctatttaagaggttatcaagttatacccaaccagcagc

SEQ ID NO: 691013 - DNA, 80 bp, Homo sapiens
ctggaataactcttgtgacagaagacattgcattgcctcttatgaagcggttaagaagattgtctaccaaatatagaaca

SEQ ID NO: 691014 - DNA, 74 bp, Homo sapiens
tcttttctacaaactctgtgcctcaacaaccatttctaagtggatcagttcgacagcttagacaagcatacaca

SEQ ID NO: 691015 - DNA, 121 bp, Homo sapiens
ccatccccacctaccccagcggccagatcggcttcatgctgtgcagcaagaacccgggtgtccgcaatgttgccagtgtctgtctgcagattggctacccaactgttgcatcagtacccca

SEQ ID NO: 691016 - DNA, 100 bp, Homo sapiens
gcaggcggaggtgctggatctggacgaggacgaggacgacctggaggtgttcagcaaggagggtgcatctgcccggaagactcagactcctgcagcccag

SEQ ID NO: 691017 - DNA, 100 bp, Homo sapiens
aaggaccagcgggacgcctgcatcaaggaggccattctcttggaattgaatgatctggcacgggaccctccagcacagtgttcagcaggtcctgttggag

SEQ ID NO: 691018 - DNA, 100 bp, Homo sapiens
gggagatccttgttgccgtcccttcgcctccttcaccgccgcagaccccttcaagttctagtcatgaaggtgacctgctgagaaaagtggtacaaatact

SEQ ID NO: 691019 - DNA, 100 bp, Homo sapiens
gctcttctgaaggcaggagcagatgtgaataaaactgaccatagccagagaacagccctccatcttgcagcccagaagatctcacattcttgaaggtggc

SEQ ID NO: 691020 - DNA, 100 bp, Homo sapiens
gaccctgaacctctacgacacggccggtttgcatcactggttgctgtttatgttgttggggggttcctataccagcgactggtagtgggagccaaaggaa

SEQ ID NO: 691021 - DNA, 82 bp, Homo sapiens
ctccactttcgccagcccgtgccgcgagcgcggcctgcaggagcaattctgtggtgttcttggtcacacatttatggagttt

SEQ ID NO: 691022 - DNA, 75 bp, Homo sapiens
ctgctgtgcctcctcctcctgtggtggaggagaaggaaaggtgactcgaaaagccctgtttcctggtgactctga

SEQ ID NO: 691023 - DNA, 75 bp, Homo sapiens
attagattcctctagtattctctatgctagaaagctctttccaacaactgatcctgtgggtactttgctccaagt

SEQ ID NO: 691024 - DNA, 75 bp, Homo sapiens
gttattttctcttcttctgaaaaagagatcttgatccatttcactgggcttggcttcctcaagcaaaagttccct

SEQ ID NO: 691025 - DNA, 71 bp, Homo sapiens
actttgggagaactagaatctctggtttacaagttgtcctgaactccattataaaagccatggttcccctc

SEQ ID NO: 691026 - DNA, 100 bp, Homo sapiens
aggaacagggcagacgttagcgtgagtgatcactctcaatcccgggtacaggtttgcagattccgccagcagcacagcaagctctacagatgagtggctc

SEQ ID NO: 691027 - DNA, 90 bp, Homo sapiens
cgctggccggatggaaatcctaatgacagtctccaaattcgcctccatctgtaccatggatgataatgaagataattcaaatgatgggac

SEQ ID NO: 691028 - DNA, 83 bp, Homo sapiens
gttaaggattccaagtaactcttatttgctccttcgagaactcatagaacggaagaccagctccttggatcccaacgatcagg

SEQ ID NO: 691029 - DNA, 98 bp, Homo sapiens
ctccagaaaacaccatccaagcagccaggcagtatcgggagcaggaaagccagtgttgtggaccctagcacagagagaaatgttctttactaccatgg

SEQ ID NO: 691030 - DNA, 100 bp, Homo sapiens
ttccgcgcacctcagtggtacctgcacctgtctggcctgggcgccagcgcggctgcaggccaagcagctcttgccaggtaaaaagttttgggaaacagat

SEQ ID NO: 691031 - DNA, 100 bp, Homo sapiens
atctgatgtggtgcttttgaaccactggaaagtgaggaattttgaagtacaccgtggtgacattgtatcattggtgagagtgcgtagaagggctgcggga

SEQ ID NO: 691032 - DNA, 96 bp, Homo sapiens
gcctcgaggccgctgctgctggcgctcctgtcgttggggggacttgatctcatcttcatgccaggccttgggtttgacaaacatggcaaccgactg

SEQ ID NO: 691033 - DNA, 83 bp, Homo sapiens
cgagcgctgttctcgctccggagccgctgcacatttcggttggatttggtctagggagtcccagaaagaagtagaaaaagaga

SEQ ID NO: 691034 - DNA, 82 bp, Homo sapiens
caccggcggtctgataggctacatcgcggcatgagatgaagctgtgacaggttcgatacaagaggctgttttcctagcgtgg

SEQ ID NO: 691035 - DNA, 75 bp, Homo sapiens
cgctggggaggtcctccatgcgcagtcatgagtcgcttcaagtttatcgggatgggcgtgttttgggcgtgctag

SEQ ID NO: 691036 - DNA, 75 bp, Homo sapiens
tcagatatatacagatggtccaggagaagctttgaaggctgtgaaggtgacagttaagacttccttttcacaaat

SEQ ID NO: 691037 - DNA, 75 bp, Homo sapiens
gccgagctggacccggaccggttttgggttaatttggagtggcccctggagtcagtttcctacaccatccgaggc

SEQ ID NO: 691038 - DNA, 82 bp, Homo sapiens
agctggacggcgagcgcgagcggcgcgagaaaacacagaatgttcagcttaacaaagaaatgacacttgccagcaaccggag

SEQ ID NO: 691039 - DNA, 102 bp, Homo sapiens
tgcccacattcctggttgctggagggagcctggccttcggaacgctcctctgcattgccattgttctgaggaactgactcagcgcaagaagacagcttcgac

SEQ ID NO: 691040 - DNA, 98 bp, Homo sapiens
tctactgtgtcttcttcggctgtttcacaaagaagcatattcacgagcatgcgaaggcgaagcggcacaacctggctccttgctcggattgaacgtat

SEQ ID NO: 691041 - DNA, 98 bp, Homo sapiens
cgtgctgtggtcagagtcgctgttgtattccctgaatgactataaaccacccatttcgaaagcgaaaatgacccaaattactaaggcagccatcaaag

SEQ ID NO: 691042 - DNA, 98 bp, Homo sapiens
agaagatggatttttggctgtatgttcagaagctaaaggggaaaatgtagccaacatatacaaagatcttcagaaactctctcgcctctttaaagacc

SEQ ID NO: 691043 - DNA, 75 bp, Homo sapiens
cggttttatcaactgacaaaactcttggattctatgcatgaagttcaaaccttgtactactcagctgatcacaag

SEQ ID NO: 691044 - DNA, 75 bp, Homo sapiens
cattccagttaagagcacaacattttcaagaaaattcaagctgctggagccagttctgcttctcggcaaggagcg

SEQ ID NO: 691045 - DNA, 74 bp, Homo sapiens
aagtggtgaaggagtgtgtgcagcgaatctgaattatccagaacagaaagttgtgactgttggacagttcaaaa

SEQ ID NO: 691046 - DNA, 80 bp, Homo sapiens
cgagctttccacaacagctatgtgaatgagtctaattttcacaattacaccttggtctcattgaatgaagaatttaatcg

SEQ ID NO: 691047 - DNA, 75 bp, Homo sapiens
gatttaaagaagaaatggctagaacagtttgaaatggctttaccgattattgaccgacctattcgaggtcgtggt

SEQ ID NO: 691048 - DNA, 100 bp, Homo sapiens
gcaccctggaccccaactcagccttcctgcataccctggaccagcagaaacctagagtgctacagcctccgcttggcgtcccgatgctctccaccagcgg

SEQ ID NO: 691049 - DNA, 100 bp, Homo sapiens
tcctacacttgcgcaaatgtctccggtgatgatgaacagtctacacagatggctgcaagttgggaagatgataaagttacagaagcatcttcaaacagtt

SEQ ID NO: 691050 - DNA, 101 bp, Homo sapiens
caaagacgtaatcaaagacggcaacgcgcttatcagcgctatgagaagtgctggagaatctggtaaaagcaccattgtgaagcagatgaggatcctgcatg

SEQ ID NO: 691051 - DNA, 75 bp, Homo sapiens
atgccaccgtcagttttgacactgacacagggcgaccattgacgaggtggagacggacgtggtggagattgaggc

SEQ ID NO: 691052 - DNA, 98 bp, Homo sapiens
ccagatggaagaaccattgttagtgaacgtggacaaagctgttgtctcagggagcacagaacttactgaaacaaatgcaggtatcaagtgcttggact

SEQ ID NO: 691053 - DNA, 82 bp, Homo sapiens
agctcctgggccacccctcctttcaggtcaagacaatgcagatcttcgtgaagactctgactggtaagaccatcaccctcga

SEQ ID NO: 691054 - DNA, 101 bp, Homo sapiens
ttttagtacagcaacattttgacttggcttcaactactattacaaatattccaatgaaggtaacagttgacaaatgggaacctttgttgaacaacttgggg

SEQ ID NO: 691055 - DNA, 75 bp, Homo sapiens
aatgtgtgtgaattggatttgatcttccatatggataagaatccagcaactatcacaagaatactccttagccac

SEQ ID NO: 691056 - DNA, 50 bp, Homo sapiens
ccgggagaaggaggccctccaggcggtgtgatccctcacatccacaaatc

SEQ ID NO: 691057 - DNA, 97 bp, Homo sapiens
aagaagcagcgtaccaagaaaaataaagaagaggctgcagaatatgctaaacttttggccaagagaatgaagatggagtctcactctgtcgcccagg

SEQ ID NO: 691058 - DNA, 75 bp, Homo sapiens
ggctttggtccccagcgcagtgaagtggtgagcctttttgtcactgtattttcatctcagcctagtgacgatgaa

SEQ ID NO: 691059 - DNA, 75 bp, Homo sapiens
cccattcaggcacttatggccatttcagccagacttcctcgttctgcccatcttcctaacaaggctatggctgat

SEQ ID NO: 691060 - DNA, 101 bp, Homo sapiens
cgggaacagccatgcaaaggcaggggaggaagccacctcgagtgctgctgggggtgaaatctttgaccagtgtgttgcagacagagaagaagcctttaaag

SEQ ID NO: 691061 - DNA, 74 bp, Homo sapiens
gaggtggccgtggaggcagaggtggcatgggagccctgaggatgatgacaggaaggtccgaaggagagaaaaaa

SEQ ID NO: 691062 - DNA, 75 bp, Homo sapiens
gccgggcaggatggatcaccaccagccggggactgggcgctaccaggtggtcagctgttgccagcaaaccgcaat

SEQ ID NO: 691063 - DNA, 75 bp, Homo sapiens
ttccactgattctacattatgggggaagcgagtagcattatctgatgatgagacaaaggaaactgaaaacatgag

SEQ ID NO: 691064 - DNA, 82 bp, Homo sapiens
ccccggagcccctttagccatgtggatacctacggagcacgagaaatacggcgtggctgtttttgcagcagtgttgcactgg

SEQ ID NO: 691065 - DNA, 100 bp, Homo sapiens
agcacccagagtgctgcagtaactacattcactcaggacaggcagataagggccggtgcataaacttctcccgagttccatctcagtaaaagggaagcag

SEQ ID NO: 691066 - DNA, 50 bp, Homo sapiens
ggccgcccatgaaagcgcagccatggcggttgctgatcatctgggctgtg

SEQ ID NO: 691067 - DNA, 100 bp, Homo sapiens
caaaagaccatcctgctctcaactacaacatcgtttcaggggtgcagacatgaatggattaccaacaaaaggaccaacagaaatctgtgataaaaagaaa

SEQ ID NO: 691068 - DNA, 100 bp, Homo sapiens
gcgacgcagacgacgagggcgtgcgcggcacctgcgaagatgcttccctgtgcaagagggatttagtgcaagaagaagaacagttgatggaagaaaagaa

SEQ ID NO: 691069 - DNA, 96 bp, Homo sapiens
atttactaactgtgtgaccttagaaaaagtcccagactctccagaaaatgagctgaaatccagatgggaaaacctgttgggtcctgattatgaagt

SEQ ID NO: 691070 - DNA, 83 bp, Homo sapiens
ccatttctttcacaaaccttgtgtctcaatttggctacaaaagcgccggcatcggccgcacaggcaccatcattgtcatcgac

SEQ ID NO: 691071 - DNA, 75 bp, Homo sapiens
ctcgctttctccctgacgtttcaggtgccaggaccattgacaccagaaatggaggcacggcaggctacacggaaa

SEQ ID NO: 691072 - DNA, 130 bp, Homo sapiens
gggaaagtgaggcagctgcaaggagggcggcgggactgcactcgagtgtccagacctgctcgatgcaatggctgccatccggaagaaactggtgattgttggtgatggagcctgtggaaagacatgcttg

SEQ ID NO: 691073 - DNA, 90 bp, Homo sapiens
ggaggagatcccctcagttctgcgctgctcccgttccccctccccagagcaaggctaccaagcagtttctcgaagagattaacaagtgga

SEQ ID NO: 691074 - DNA, 81 bp, Homo sapiens
gccgcgcaggagcctcccggagctgggcaacaggtttgtctatgctggctctaactcgggcgtggtccaggccccgctggc

SEQ ID NO: 691075 - DNA, 152 bp, Homo sapiens
gtctgcttttccaagttatacaggcgcagggatatctactgaaggaagctcggacttctcctggggatatggtgaccaggagctgcattatctattctagacaaatttcttgaagaatcctccaaactgcagtctgattcacaagaacccat

SEQ ID NO: 691076 - DNA, 74 bp, Homo sapiens
ttaattcaacagttcaccaccattaccggtaaatatgcagaggacatttttggagagctctttactcaggcaaa

SEQ ID NO: 691077 - DNA, 82 bp, Homo sapiens
gcgtctctctgctgcggcgcggggaccgctgtgctctcggaggcaacgcacgggccacaggcatgttcctgcagtatacagt

SEQ ID NO: 691078 - DNA, 51 bp, Homo sapiens
tcatcaacatcaactacgtccctctgaagatcttccaggagcaccccctgc

SEQ ID NO: 691079 - DNA, 51 bp, Homo sapiens
cccgactctccagctctcttcaccgacatctttggacatcagacagtgcag

SEQ ID NO: 691080 - DNA, 75 bp, Homo sapiens
gacctgcgggacatcgaagccacgggcatcgcggtgcacgcgctcagcaagcttgacaaaaaggatggcatctac

SEQ ID NO: 691081 - DNA, 90 bp, Homo sapiens
acaaactggccaagaagggccttactccttcacagatcggtctcggcgcggaagatggccggcggcgtggacggccccatcgggatcccg

SEQ ID NO: 691082 - DNA, 90 bp, Homo sapiens
attcctgacgttcattgatctgatgtcgacgtacaagcgggccacgctggacgaggaggacctggtggactcgctctccgagggcgacgc

SEQ ID NO: 691083 - DNA, 83 bp, Homo sapiens
gagccgtctgcaaagtgtccccggcaagaaggtttatcaacttatgaggaaatgctgggaattccaaccatccaatcggacaa

SEQ ID NO: 691084 - DNA, 74 bp, Homo sapiens
aatgaagtagacattggtggaaacatttagtcagaatggcggcagcggagcatcgtcattcttcaggattgccc

SEQ ID NO: 691085 - DNA, 75 bp, Homo sapiens
aggcaacaagatgatgagggcgcggcagtatccttggggcactgtgcagggaaactctgatgaggaagaaagtgc

SEQ ID NO: 691086 - DNA, 82 bp, Homo sapiens
aaaggaaaacaagaggccccagagggaaaagaagcccaaagttttaaagggtgattttgtagacagaggttactatagtttg

SEQ ID NO: 691087 - DNA, 114 bp, Homo sapiens
cacatgttcctgagcttgagatgctaggaagacttgggtattttgaaggtggcgtctcatctgtctacctctgggatctggatcatggctttgctggagtgatcctcataaaga

SEQ ID NO: 691088 - DNA, 83 bp, Homo sapiens
ctgcgctgtgatgcctgcagagctgtggcttaccagacttttgacaagcagggatttcatgcagggacgcctccacctttcag

SEQ ID NO: 691089 - DNA, 75 bp, Homo sapiens
ctgtctcagcctctcaagtacctggaattacaggagaggagttcattacttcggaagtggtacaatttaatgata

SEQ ID NO: 691090 - DNA, 50 bp, Homo sapiens
gccagctcaagaaaatggtgtccaaggagccttggtcatcatttgatata

SEQ ID NO: 691091 - DNA, 97 bp, Homo sapiens
aggaggacgactgggaccgggacctgctgctggacccggcctgggagaagcagcagcgcaagcaagccctggatgaaaacatggacctcttggaagg

SEQ ID NO: 691092 - DNA, 75 bp, Homo sapiens
agatgcactgttagaccagatacgacagggtatccaactaaaatctgatcagctcagctactatttaataaaaca

SEQ ID NO: 691093 - DNA, 97 bp, Homo sapiens
ggagctcgggagcaggcgctggcagtcagtcggaactacctctcccagcctcgcctcagtatggcatttcaaatatagatacaaccattgaaggaac

SEQ ID NO: 691094 - DNA, 105 bp, Homo sapiens
gctgaatgtgcgagtccatagctgaagaggagcgccagatggtggaggaatacacttatttatgaagtcctggcattgatgtgcctgctccagacatgagcacag

SEQ ID NO: 691095 - DNA, 90 bp, Homo sapiens
cggtgttccaactgtttaaatcacattaactttgctctagaagacaactttacaaggatctaaaaggaacaggattaaagatgactgaat

SEQ ID NO: 691096 - DNA, 83 bp, Homo sapiens
aagaacgtgctcttcgctcacctggatgacaacgagaggagatgagcagcaccagcagtaagagggctccgaccacggcaacc

SEQ ID NO: 691097 - DNA, 100 bp, Homo sapiens
ccagatgatgcggtggtgggggacctgccggcacgcgactccccccgggcccaaagatcttacacatttgttccatggcttctcagctttaaaaggggaa

SEQ ID NO: 691098 - DNA, 76 bp, Homo sapiens
atcagacagaacagttaatcctcaatttaagcctgatctaacccctagaaacaggactctgagaaatacgttgagc

SEQ ID NO: 691099 - DNA, 50 bp, Homo sapiens
gcctcccgagttgctgggactacagggtaaagcatcaagtcgaatatttg

SEQ ID NO: 691100 - DNA, 100 bp, Homo sapiens
tgaagctgtacctcaggtgaagttttatgaagagatgtgtcttgctgaatcagggctctcttatccctgccatcgacttacagtgggaagaagatcttca

SEQ ID NO: 691101 - DNA, 100 bp, Homo sapiens
gaaaacggaaacagagcacccaagatgaagatgctgttagcctttgcagtctcgacataagtgcaccatgactcctgtgaggatgcagcactccctggca

SEQ ID NO: 691102 - DNA, 98 bp, Homo sapiens
gctgtctatggagccaaagatatcgaactctgtcctgaggcacaagtcaaaatagatcgttacactcagcagattcgagtgagggttgaaaaggatcc

SEQ ID NO: 691103 - DNA, 100 bp, Homo sapiens
tggtacttttggaaatcaggttggatttgtgaagctggcagaaggagatcatgtaaactcacttttggagatagcagagtttggccaggcggaatcagca

SEQ ID NO: 691104 - DNA, 50 bp, Homo sapiens
cagcaggaagcttggagacatgaggtacatgtcccagagcaagcacacgg

SEQ ID NO: 691105 - DNA, 76 bp, Homo sapiens
aaaaaactagatccaggttggaatcctcaggacacagcattgttggttttgccatgtactattttacctatgaccc

SEQ ID NO: 691106 - DNA, 98 bp, Homo sapiens
gcaggtttccccgcaaatgactggtcacgcgggactgaacaccgcacaggcaggaggcatggccaagggacccagacatggagctgcgggaagaagcc

SEQ ID NO: 691107 - DNA, 75 bp, Homo sapiens
gtgtcaagcattaggttttattctaggtccaggagaaatgctctcatatggagacaggcaagaggtggaaatcag

SEQ ID NO: 691108 - DNA, 83 bp, Homo sapiens
ggttaccgctgctgcccctgctgtcgctcctggtcggcgcgtggctcaagctagactctggtggagcaacgttcaggtggttc

SEQ ID NO: 691109 - DNA, 89 bp, Homo sapiens
tgatccagcaaggtcggcagagcaaggggcttacgcagaaggacctggccacggttttaaaatcaaagatgggaaaatcggagaaaatt

SEQ ID NO: 691110 - DNA, 98 bp, Homo sapiens
ggagtgttcagccttggaaaggaaaaactcctctccaccaaactgccatattgccgtgagaatgtgtgtctggcttatggtagtgaatggtcagttta

SEQ ID NO: 691111 - DNA, 96 bp, Homo sapiens
ggcggctgcaggatgggggactccaaagtgaaagtggcggtgcggatacgacccatgaaccggcgaggcggctatgagaggttttcctccgagtac

SEQ ID NO: 691112 - DNA, 85 bp, Homo sapiens
cactccggggctttgaccaggagctgaacgtggactggcgagatgagccagaggtgctgtccctggacaccaacatcacaaacca

SEQ ID NO: 691113 - DNA, 82 bp, Homo sapiens
cgggtggagctgagccggagacagacctattcaacgaattgcttgaaaactgaacaggcttttcccctgcaaaacaaaatca

SEQ ID NO: 691114 - DNA, 107 bp, Homo sapiens
atttgatttttggaaggatatagttgctgctatacaacacaattataaaatgtcagcttttaaggatgccatggctagtccagggaaagataactatagaatgaaaa

SEQ ID NO: 691115 - DNA, 90 bp, Homo sapiens
gaatggaacgaagcttaagtagctacaggggaaaatattctgagaatgtgacagtgatgataacatgggtgccaaaaatacttcaatagg

SEQ ID NO: 691116 - DNA, 90 bp, Homo sapiens
aagcaaccagcatttagagctgtttatgaagcactgagaaatctgcggataaccgtctggtccttgtgcacaaaatccgtgtcttacatc

SEQ ID NO: 691117 - DNA, 74 bp, Homo sapiens
ggggttcgggtgtctcgtgtgtgaacatcacagcctgaactctttgcttccggaatccgggattgttgctgaca

SEQ ID NO: 691118 - DNA, 74 bp, Homo sapiens
cagagcgtgaagatcaagatcgagaggtggagaagagcgagtacttgagaaagaagaggaagaagatgatgatg

SEQ ID NO: 691119 - DNA, 101 bp, Homo sapiens
ctcttgtctcacatgctagcaacataccaggagctgtttgatcagtgtgagaacaagaggcggactttatttaaactcgccagtgagactgaggacaatga

SEQ ID NO: 691120 - DNA, 100 bp, Homo sapiens
gttgctgagcagggagaggatattacctccaaaaaagacaggggagtattaaagtatcaccttttgccatgatagcatttctttcattggacagttcctt

SEQ ID NO: 691121 - DNA, 100 bp, Homo sapiens
caaggaaggccaacgtggaggcctcacgcagctccacagacagccccagctcggtgttcctcaggtgtcatggagaaactccagctgggcccagagattc

SEQ ID NO: 691122 - DNA, 98 bp, Homo sapiens
ccagagccatgcaagcgcagttctcttcggacagggtgtgggccgaagatatgctcatgtggtgttgaggaaagcagacattgacctcaccaagaggg

SEQ ID NO: 691123 - DNA, 100 bp, Homo sapiens
ggaaaagcaacgtggggcattccaggtgtgttccagagaacaagccttcagacatttgctatattgacgctgagctgtcaggggactcaggcttatgagg

SEQ ID NO: 691124 - DNA, 100 bp, Homo sapiens
cccgcctcgcccgccgtgagcgcccggagcggtccgcgagccaccgaggcccaggtgtcgcgcatcctgaggaaggcggcggcggagcgcagcgccgagg

SEQ ID NO: 691125 - DNA, 90 bp, Homo sapiens
caggaggccaggggtgtcgccatgtttttcagtgaatatgagaagttacttcattcagaaaattatgtgacaaaaagacagtcactgaag

SEQ ID NO: 691126 - DNA, 75 bp, Homo sapiens
cttcttcaacaccccggagaagagcgtggtgagcctcttccacgacccgccaggagaagtacagcatcggggagc

SEQ ID NO: 691127 - DNA, 75 bp, Homo sapiens
agcttaatgcccaaactgattgatttggaagattcagcaggaatgaagccaagagtgatgaaagaagctgtatct

SEQ ID NO: 691128 - DNA, 100 bp, Homo sapiens
cttacctccagcagcaaacagcacacagtctttcctgcgaaaggatcaagggataaaccatgaatagctgaaacctttggacttcaagaaaattatatca

SEQ ID NO: 691129 - DNA, 82 bp, Homo sapiens
gggataccttctcacttggaaattaatactaactttcttcaaagctgcatcatcacaggataagggagatcttgaaggcatc

SEQ ID NO: 691130 - DNA, 100 bp, Homo sapiens
cttgcagcatattacctatcaggagaggaggatcacctgctgttaccagctaccacccataacaagaccacaagaccaaaaatgtcaattgtgttaccag

SEQ ID NO: 691131 - DNA, 75 bp, Homo sapiens
caggaattcccataccaaccacagaggttggcaggtttgactgttcctctgcaccagacatctgtagtaatctgt

SEQ ID NO: 691132 - DNA, 100 bp, Homo sapiens
ctactctcaggcagtgttctcagtagtccgaactctaatatgagcagcatggtagttacagatggaacttgctaaggaagaaaagtgtgaatttctgcca

SEQ ID NO: 691133 - DNA, 96 bp, Homo sapiens
aacaggaactggatgccaactctgcccttatggaattggacaaagagtgatcagcagctggactgtgccttggacctaatgaggcgcctgcctccc

SEQ ID NO: 691134 - DNA, 75 bp, Homo sapiens
ctgcccagcatgtgacaaatcgttcaagacagaaaaggcattgttaaaggaaatgggctggcaggaagacagtga

SEQ ID NO: 691135 - DNA, 100 bp, Homo sapiens
ccaccgcaagtcgccacctaccacagagccatcaaaatcacagtggatgggccccgagaacctcgaaacagaaccaagttgtattgttagacacactgga

SEQ ID NO: 691136 - DNA, 75 bp, Homo sapiens
gtcttcgcctcccgaagggaaactagagactaaagctggacacccgcccgccgcaatgttcacagcatctttacc

SEQ ID NO: 691137 - DNA, 100 bp, Homo sapiens
ggctgcgcgggggctgtggctccgggactgcggtgctgctagctgaggaggggatagctcctctttcttctgcaggaccagggaaagaggagaaactcct

SEQ ID NO: 691138 - DNA, 101 bp, Homo sapiens
aggagggcggcgggactgcactcgagtgtccagacctgctcgatgatcgcccaggaccacaccgcagcgtaactgcaggcctctcagcgaaaaagggggaa

SEQ ID NO: 691139 - DNA, 97 bp, Homo sapiens
aatctattcaacacgtcctgatgttaagtgtgtgatacacatccatacccttgcaacagcagctgtctatgttaacaatgaatgggcaaccagtgtt

SEQ ID NO: 691140 - DNA, 100 bp, Homo sapiens
ggcttcagcctggaggagctcaggtgacttatcagatgccctggtcatcttccagctctatgaaaagatcaaagttcctgttgactggaacagagtaaac

SEQ ID NO: 691141 - DNA, 75 bp, Homo sapiens
ttttcaaggaagaaaatcttaggatcaagcttctgaaattcaggtgacaatgatgctcactgaaagttgtaagct

SEQ ID NO: 691142 - DNA, 108 bp, Homo sapiens
ttggtggaggggtggtgaccatcgaaaggagcaagagcaagatcaccgtgacatccgaggtgcctttctccaaaagcgagtgatagacagccaagcagagaaactgaa

SEQ ID NO: 691143 - DNA, 74 bp, Homo sapiens
gacattacaccatctgaattgcctgcaaacccaggtatagacacgtgtggccgtttacgctgtaggatcctcat

SEQ ID NO: 691144 - DNA, 90 bp, Homo sapiens
tgctgccgccgcccccggagctgctggtttcattcgaggtttcgggccggtgatgtgtccaatctagatcccaacttctcatttgaaggc

SEQ ID NO: 691145 - DNA, 82 bp, Homo sapiens
tgacctctctgatgagatggatcggaatcccttggcaccatgtcctgtgtgcattataaattttcctctaaactcaactatg

SEQ ID NO: 691146 - DNA, 100 bp, Homo sapiens
aagcaggtgtctgtggggcccaagagaagtaccatctcgactgtacaatttgttcaaggaatttttgtagaaaaatacgatcctacgatagaagattctt

SEQ ID NO: 691147 - DNA, 97 bp, Homo sapiens
ctgcccacatctcatccaaacagaaaatggacccaagtggggtcaaagtgctggaaacagcagaggacatccaggagaggcggcagcaggtcctaga

SEQ ID NO: 691148 - DNA, 50 bp, Homo sapiens
gcaccatccggaagtgaaggctgatgggctgaccccgcactacatctacc

SEQ ID NO: 691149 - DNA, 100 bp, Homo sapiens
ggcggctccagcgtcctaagagccaaaagaatgcaatggtgtaaagattccagttgatgccagtaaacctaatccaaatgatgtggagtttgataatctg

SEQ ID NO: 691150 - DNA, 82 bp, Homo sapiens
gatgacggtgatggctgatgatccagaaacgtttgagcatctttttatcaagcatacagcatcagtgacatgtggtcctctt

SEQ ID NO: 691151 - DNA, 100 bp, Homo sapiens
cgtggtccgcgcccttcctcggcgggccggactgggggtggcccgattctacaggtcacggaaaaagcacttgatcaccacccagacagaacacaaatgt

SEQ ID NO: 691152 - DNA, 75 bp, Homo sapiens
tgaagttggagatgctgaaaatgttgcttcatatgaaactgataaatttcaaacggaagagagtggcagcattta

SEQ ID NO: 691153 - DNA, 100 bp, Homo sapiens
aaaaaggagaagaaatctctagactcagatgagagtgaggatgaagaagatgactaccagggtggagagattcaaccagttagcgtgaaagttggagata

SEQ ID NO: 691154 - DNA, 75 bp, Homo sapiens
aaggagaaacctgtggaaatgcagaaaagcttgcagaatatatttgttccagagcagggaaaacctgaggtgctt

SEQ ID NO: 691155 - DNA, 147 bp, Homo sapiens
tgctggccctcgggctgcgggagccgggctaggacgccgagcggtgactccccgccgctcccgggggccgtgacggtggatcatccatgccatggagtatgaacttcagatccgtggcggagacaagccagccttggacttgtatca

SEQ ID NO: 691156 - DNA, 51 bp, Homo sapiens
gagcattcagctgtctcaaatgcagttgtctgagggaagtcaaaagcatgc

SEQ ID NO: 691157 - DNA, 100 bp, Homo sapiens
aaaatagctacaaaccatactaaattattccatttgcaacttatccccaacaggtggtatgcagatcttcgtgaagaccctgaccggcaagaccatcacc

SEQ ID NO: 691158 - DNA, 98 bp, Homo sapiens
gacatcctgtgaaagcctttgttgactcaggttccaagttccccatcaagtggacagccccagaagctgccctctttggcagattcaccatcaagtca

SEQ ID NO: 691159 - DNA, 100 bp, Homo sapiens
atggcacatggcccaggcagaccttgcagtcaaagtagagatggattcctggaaatacctcctcaaggccagtgtagagccctcaatcacccactgcccc

SEQ ID NO: 691160 - DNA, 135 bp, Homo sapiens
ctatagtgcggataatgaaatctagaaagaagatgcagcacaatgttctagtagcggagatgtgttcagagcaacattgttttgttgacacaagcatttagaagaaagtttgtgattcctgactttatgtctttt

SEQ ID NO: 691161 - DNA, 90 bp, Homo sapiens
cttcttggggaaggtgtgtttcctcgccacaggtggtcctggctataagtcaccatggcacagcaagctgccgataagtatctctatgtg

SEQ ID NO: 691162 - DNA, 100 bp, Homo sapiens
agaaaagcgagaccgcgtgcgaggaccgtttgtttcgacgccggaccgcgtaagagacgatgatgttgggcacggaaggtggagagggattcgtggtgaa

SEQ ID NO: 691163 - DNA, 98 bp, Homo sapiens
cttcgatggacctgttgaaaaaaatctgggaggttgaacttattaatgcaaaaatagacatcttattagttggagatgtcactgtgggctacctggct

SEQ ID NO: 691164 - DNA, 100 bp, Homo sapiens
ccacgcggcatcacgggatcgaaccccgctcccagcggccgcgattcggggaggtaggcgctgggccgaggaggtgaaaggtgtagcagtcactcggcct

SEQ ID NO: 691165 - DNA, 75 bp, Homo sapiens
ggcaaaagttgtgcattggcccgatcaagcctgacttctagccaagattgctatgctatgccttgtatgactaag

SEQ ID NO: 691166 - DNA, 78 bp, Homo sapiens
tatctttcacagaatttgttaaggtgatagagaaggacctgccccactatttctagctccacaagtgtgtggccccgc

SEQ ID NO: 691167 - DNA, 96 bp, Homo sapiens
cagaataaagctcgagccgaaggacatatgtgagaaagatcagtctaaagaaaaggagaagaaagtgaaaaaaacaattccttcctgggctaccct

SEQ ID NO: 691168 - DNA, 50 bp, Homo sapiens
gatggatgtgatgcctgctagccaaaaggtttgaaggatgacctctagga

SEQ ID NO: 691169 - DNA, 100 bp, Homo sapiens
ccaagagcactagtgtctagaaggcactaaggactgcaaaattcaaaatggggctcaaggtattcgtttcatctacaccagagaaggcagaccaagtggc

SEQ ID NO: 691170 - DNA, 51 bp, Homo sapiens
actgcattgacaggctaaaaagggactatcggacaaaacctttctgctgca

SEQ ID NO: 691171 - DNA, 100 bp, Homo sapiens
gcctgtgcagaacttagcattgggcaaagaagagctaattggaactatggaacagctcactgttaatgaagcggctgctcaactctgtgtgaaggataat

SEQ ID NO: 691172 - DNA, 98 bp, Homo sapiens
ggagatggggaccgccctggacatcaagattaaaagagcgaataaagtttatcacgccgggtgctcttaaagttccgtacagataaaggaagagatcc

SEQ ID NO: 691173 - DNA, 82 bp, Homo sapiens
tccagcaacccatacctgatccggagaatcgaggagctcaacaagatgtgaagttcatttccaatccgccctccatggtggc

SEQ ID NO: 691174 - DNA, 82 bp, Homo sapiens
accgccgccacaccgccgccacaccgccgctgcctcagtcatgccgcccgatggcaccagcaaggagtgtgtgttcatcgag

SEQ ID NO: 691175 - DNA, 90 bp, Homo sapiens
cacctgtgcgggatggaacaaaagggctcctcgcacctaccccagcaactcaaattcaccacctcggactcctgcgaccgcatcaaagac

SEQ ID NO: 691176 - DNA, 100 bp, Homo sapiens
caaggtccagagaaggtggaggaatcctgatactgagcgaaaaaaccgggaagatcctgacggagttcctccagttctatgaagaccagtatggcgtggc

SEQ ID NO: 691177 - DNA, 100 bp, Homo sapiens
cagatcctgtttcagccccctgtgcgccaccattgcagccaaaggaatcccgttctgcttccagaagtggaagtgctcacggatcggggaaatctgcaag

SEQ ID NO: 691178 - DNA, 51 bp, Homo sapiens
gaagggccttactccttcacagatcggtgctcatggaaacaacctcattgc

SEQ ID NO: 691179 - DNA, 100 bp, Homo sapiens
cagcgccgcgcccggggccgtgcgctctcgggccactcggccgcaggttaaagtattgcacaatcagctggtccttttccacaatgccattgccgcttac

SEQ ID NO: 691180 - DNA, 100 bp, Homo sapiens
tggaaccggcaccatgtggagcgggtggagatcatcatgaaagagaccgtggatgctgaagatcaactactatgcggacaccatctacacatctgcgggc

SEQ ID NO: 691181 - DNA, 51 bp, Homo sapiens
tttccccaacatatcttcagatgagtcttcatttacgaggtttcttctcag

SEQ ID NO: 691182 - DNA, 90 bp, Homo sapiens
ttccaaatgaaaatcaagtagtgtttgccagagttgattgtgatcagcactgggcagagttaccagggcaggttatctccatggcagctt

SEQ ID NO: 691183 - DNA, 100 bp, Homo sapiens
ggcctaagggtcattttttcctcatgtcaaggttctgccattacaggaccagtagcaaaggagtgtgcagacttgtggccccggattgcatccaatgctg

SEQ ID NO: 691184 - DNA, 100 bp, Homo sapiens
cgatattctggctcaagaaacgaggactgatgcctggcctcacattttctaatgaacttattagcagagatgagacagtgtttaagaatgaaagcctcaa

SEQ ID NO: 691185 - DNA, 99 bp, Homo sapiens
tgcatcacctggacggccgtggtggccgggctcatctgctgggattgtcaatgaggcagatcagattccgatttgacgggcaaccaatcaatgaaacag

SEQ ID NO: 691186 - DNA, 75 bp, Homo sapiens
gcatgttctgcatggttaccattaattggccttggtcctcacagctccaaaaagaaacaggatctcgataagctc

SEQ ID NO: 691187 - DNA, 82 bp, Homo sapiens
ggagttcctctgcatgggggtgatgaagacagaccctttccagggacttacccttttgtaacctcttcaaattgtactgttg

SEQ ID NO: 691188 - DNA, 100 bp, Homo sapiens
gcggcagctggagactctgggccaggagaagctgaagctggaggcggagcttggcaacatgcaggggctggcggtaaggctggaaaggactccggaaagg

SEQ ID NO: 691189 - DNA, 98 bp, Homo sapiens
agcgacccaagcgccgcggttaaccacgtctcgtccacgacctccctaggtgaaaatgagttcttcagtaagaagaaaaggcaagccaggcaaaggag

SEQ ID NO: 691190 - DNA, 50 bp, Homo sapiens
tggaccaggagctcataaaagctgctggttttaacctacgcaaagttaac

SEQ ID NO: 691191 - DNA, 90 bp, Homo sapiens
gcgagtaagatggaagatgaggaggtcgctgagagctgggaagaggcggcagacagcggggcctcccgaggagcccagacagctgcagcc

SEQ ID NO: 691192 - DNA, 90 bp, Homo sapiens
ctctggaccccaatggcaaaacctgcagccgtaacctggatgaggacatcattgcagaagagaacatcgtttcccgaagtgagttcccag

SEQ ID NO: 691193 - DNA, 110 bp, Homo sapiens
gagggtctccagggttctttggggcccgagtgtctttacatccaaaatgcaaagcagacaaatgggcatatcagggaagaacatgacaaaaagcaccagcatcagtggag

SEQ ID NO: 691194 - DNA, 99 bp, Homo sapiens
gagaacctaagtctgtttgcaaagcacctgaactggcaatggtcgagacagttaacaacctccttcagccacaagctttgaatgcatggagagacctga

SEQ ID NO: 691195 - DNA, 83 bp, Homo sapiens
caaaagactcagagactatataagtagcttaaagatgacaccttgcattccctatttagagacaaggtcttgctctgtcaccc

SEQ ID NO: 691196 - DNA, 108 bp, Homo sapiens
cgggtgggccatgaccacggctgccaccagcagcccttctgcaacgcgcccctccctggccctggaccctatcggactcctagaaggaccccacccccctcccccaac

SEQ ID NO: 691197 - DNA, 83 bp, Homo sapiens
cataagtggaattttggagatattcaaagtactgccaaatctgtcgaaagggagataatgaagaactgcttcttctttgtgat

SEQ ID NO: 691198 - DNA, 75 bp, Homo sapiens
gacagtctccagtgcaagtaggatgtttaccaaccctgataatgcttcagaggatgattccgaagaagacggaga

SEQ ID NO: 691199 - DNA, 98 bp, Homo sapiens
cgacatgaagaaagacgtgcggatcctgctggtgggagaacgtacccactgatggtaatgctggcctgctggctgaaccccagattgccatgttctgt

SEQ ID NO: 691200 - DNA, 84 bp, Homo sapiens
catcgtcatcctgctgctgaagatctggaagacgcgctcctgcgccgggactttgaacatgtcggggatcgccctcagcagact

SEQ ID NO: 691201 - DNA, 75 bp, Homo sapiens
tggttgaaagttttccttcttacagagatgtgactctgtttgaggaacgtcaaggtcgtgggaaataaaaggcag

SEQ ID NO: 691202 - DNA, 75 bp, Homo sapiens
gcgcatttaatcctaaggggccaaagggagaagaaacggcacattctgtattgggctcagatgcaaatgatgtag

SEQ ID NO: 691203 - DNA, 75 bp, Homo sapiens
cgggctgaagcgactgagtccgcgatggagatggggtcgaggatttggtcttttgggttccatttttggaaagga

SEQ ID NO: 691204 - DNA, 99 bp, Homo sapiens
tctactggaccctcaccaacaatgacacccacacgcaggagccctctgcccagcaggtgggcaccatgtccttgaagcttcaggcaagcaatgtaacca

SEQ ID NO: 691205 - DNA, 90 bp, Homo sapiens
gaacctggctctggggatgaaaatgggactaagcgtgctcggcggccaggaccagctgcgcgtccgtgtgacggagctggaggacgaggt

SEQ ID NO: 691206 - DNA, 101 bp, Homo sapiens
attttttctgggaactacaaacaaacgtgccaaaacagtggttttgcatatagatggccttgatgatacggttcagattttgcttaaactgtggagcaatg

SEQ ID NO: 691207 - DNA, 100 bp, Homo sapiens
accctcgaagtgcgcaaacttgacactcaccctgaccgggaaatcctcattgacgattcaatttgttgaaggccaatttgtggactcctacgatccaacc

SEQ ID NO: 691208 - DNA, 100 bp, Homo sapiens
caagtgtatggcagtctggagtgaagatggacagctgaactagaagcttttgaaaacagactgaagggtcgtcggaagaagaacaggaaaagagatgaag

SEQ ID NO: 691209 - DNA, 83 bp, Homo sapiens
cggcgccgctctccgagctcgatccgctgctcgcacgggagccagctgggtgaattaaatgtgagggagtctgacgtaagagt

SEQ ID NO: 691210 - DNA, 95 bp, Homo sapiens
aaaagatgctctccaaacctgaacttcacagagaatgcagttgtcttgacttcaggtctgtctgttctgttggcaagtaaatgcagtactgttct

SEQ ID NO: 691211 - DNA, 80 bp, Homo sapiens
cgaggccacgtggacccggccaacgacacatttgacattgatccgatggtggttactgtttgctattggctccctgatgg

SEQ ID NO: 691212 - DNA, 100 bp, Homo sapiens
ttctagcttcaccttcacgatgtttcccttggtcaaaagcgcactaaatcgtctccaagaaccctctgcaggtcctggtgaacgccatcatcaacagtgg

SEQ ID NO: 691213 - DNA, 110 bp, Homo sapiens
aggcgaataagctgcaagacatgttggatggattcattaaaaaatttgttctctgtcctgaatgtgagaatcctgaaacagatttgcccatcatgaaccacaacccctgg

SEQ ID NO: 691214 - DNA, 95 bp, Homo sapiens
ctcagggagcaggagcttcaggttgtccgagcatctgggaattgatggaaatacctgggcacaagtaattgccttatacccaactttagtagaat

SEQ ID NO: 691215 - DNA, 75 bp, Homo sapiens
tgtggatcgctgtgatcgtcacttggattcctatcagaaaattcttcttgccatatgtgagcaagcagctgaaac

SEQ ID NO: 691216 - DNA, 82 bp, Homo sapiens
gtacacgtcataagcaaaatactgagttgatgcggatgaaattaaaaggctaggaaagagatttaagaagcttgatttggac

SEQ ID NO: 691217 - DNA, 83 bp, Homo sapiens
gtgccccaccatgtcagacgcagccgtagacaccagctccgaaatcaccaccaaggccttttccctcagaggagaccacagag

SEQ ID NO: 691218 - DNA, 83 bp, Homo sapiens
cttcacagcacagttcctgggaaggtggagccaccagcctctccttgggatgacttgtcaagctcgaacatcatatactgaag

SEQ ID NO: 691219 - DNA, 101 bp, Homo sapiens
tcaacctgcagttgcggcccagcctcataacagggatcatgaaagacagtggtgtcccagatgacctggcactgggcttggagctgagccgtcgcgagcag

SEQ ID NO: 691220 - DNA, 50 bp, Homo sapiens
tggggctgaacgcggctttctgggagaaaagatccatgaggacatttttg

SEQ ID NO: 691221 - DNA, 100 bp, Homo sapiens
caaatccgaatcggagtgaagttcaggcaaacctttctctgttcctagaggcagctagtggcttctatactcaggcccaggaagtacacgagaagctccg

SEQ ID NO: 691222 - DNA, 101 bp, Homo sapiens
ggaaaatggagcagacctggacgaggcagaaggagaagacagcctgaagaagatgcagctgatggagcttgcgattctgaatggcacctacagagatgcca

SEQ ID NO: 691223 - DNA, 100 bp, Homo sapiens
acgtgtgccgcgctctgggcacagccttggaaagtcaggaccgcgacggcagcagagcattccctgtattgaacactgatatacaaggaatgaatagaag

SEQ ID NO: 691224 - DNA, 100 bp, Homo sapiens
ggatcggattcctcagctacgaggaggcgctgaggagagttctgcacggagctaaaccagccgaccctgcccaacatccgcaagtggaaggggccccggg

SEQ ID NO: 691225 - DNA, 75 bp, Homo sapiens
cgcgtgtcctcggagcgcggtccctgtattggtctcctgctcctagaggtttctagaccaactggggagattccc

SEQ ID NO: 691226 - DNA, 96 bp, Homo sapiens
accagccataaacgtcagtgtgcccaccacccttccctctgccacgcaggtgccgatggaagtccttaaggcctctctgctgatggtggtgccaag

SEQ ID NO: 691227 - DNA, 100 bp, Homo sapiens
gaaagccagcctaatccaaagactgtggaacttttaagtggagtggtggatcagaccaaagatggccctggttgttgctatgaaacagctatgacaagac

SEQ ID NO: 691228 - DNA, 75 bp, Homo sapiens
ctcgggttctgacaagatggccgggctgccccgcaggatcatcaaggtcatgtttactggtgaaaatattcctgt

SEQ ID NO: 691229 - DNA, 108 bp, Homo sapiens
cgggacgcgagcggcgagccggagcgcggagcccggctcccgcaccatggaggaggacgacagctacgcattttgaaagcgaagcagaagccgtagaatcagcggcga

SEQ ID NO: 691230 - DNA, 75 bp, Homo sapiens
gcctcctccacaccccccgccgcagcagcaccggcgacagacaaatttacatgtattggagaccagaccagaagc

SEQ ID NO: 691231 - DNA, 75 bp, Homo sapiens
catacccaaaaacatgcattggtatagcccaccagaaaggacagtccaatcagtgaaagtcgaagagtactacag

SEQ ID NO: 691232 - DNA, 50 bp, Homo sapiens
cttttgccctagagcaattgaaggtgagaggctatgacttcaaggctgac

SEQ ID NO: 691233 - DNA, 74 bp, Homo sapiens
agaggagcgccagatggtggaggaatacacttatttatgaattctgcagaatcagaagatttggcagtacattt

SEQ ID NO: 691234 - DNA, 100 bp, Homo sapiens
aagagatatctgcaatgatgtactggtcagggaagtcaaagatgcatccctgagttcttcctagcaggcaagcagccgtgcaccaatgacatggccaaaa

SEQ ID NO: 691235 - DNA, 90 bp, Homo sapiens
tgatccagactatgacccaaaggaaacccagcgtttgctggcagaaccagttcctggcatcaaagccgaaccagatgagagcaacgcccg

SEQ ID NO: 691236 - DNA, 50 bp, Homo sapiens
cgactcctcggaccagcaggacaggtaaatgtggtgcctctcaccatcca

SEQ ID NO: 691237 - DNA, 101 bp, Homo sapiens
actcgagtgtccagacctgctcgatggtcctcaagtatgttccacataatgaagcacaatcattacagctctcgattcggcagcaaacttgggctgcagtg

SEQ ID NO: 691238 - DNA, 76 bp, Homo sapiens
tgccttttcaacacagctcagtacaagtgccctgttgccatggaagaggctgagcagttgtgaaaaacttcaggac

SEQ ID NO: 691239 - DNA, 99 bp, Homo sapiens
gcatcctgtgctgtgggggctacgaggaaagcggagcgggcactggacacaatgaactttgagatgctcaaaggccagcctattcgcatcatgtggtcc

SEQ ID NO: 691240 - DNA, 100 bp, Homo sapiens
atcctggcgagcctgcaggatggcgcggccgagtccccgtacggccacccggcgggtacggttcctggagcagcagaacaagatgctggagaccaagtgg

SEQ ID NO: 691241 - DNA, 96 bp, Homo sapiens
gtggaaaccgtcagtgatttgtgtctgcaacgtgtgtgagagaatggaggccctcagtctccgaggaggatctcaaggtcctgttttccagcaatg

SEQ ID NO: 691242 - DNA, 100 bp, Homo sapiens
cggacactttgttattggagaaacatgcagattatatcgcatcctatggctcaaagaaagatgattatagaaactccagaaaatcttgccaaacttctga

SEQ ID NO: 691243 - DNA, 83 bp, Homo sapiens
gagaaacctggatctgcgatctgtttgtggacagcccatgtactctcgtgaacatggtgctgctgcatctgagcgacttcagt

SEQ ID NO: 691244 - DNA, 75 bp, Homo sapiens
tggagaactacagaaacctcgtctccctggggatcatagacggtatttctatgtaaacgaacagtcgggcgagtc

SEQ ID NO: 691245 - DNA, 87 bp, Homo sapiens
aaaagctcgatttgcatctgaatatggatatcagtcctggccgtccttcagtacattagaaaagttggaggagagcagattagtgcc

SEQ ID NO: 691246 - DNA, 75 bp, Homo sapiens
agacagtgacgattatagcacaatatcaacctgaagttcacacaaaagatgttggacaatttctacaattttgct

SEQ ID NO: 691247 - DNA, 51 bp, Homo sapiens
ctggtggctccgcggattataacaggtggagattctggacgcaaagacaag

SEQ ID NO: 691248 - DNA, 101 bp, Homo sapiens
gcacgcgctcaagaccaaggaaaagctggcacagaccgccacggatgtgaagttcatttccaatccgccctccatggtggcagcggggagcgtggtggccg

SEQ ID NO: 691249 - DNA, 98 bp, Homo sapiens
ttctctgccttgctgatctgagctcagacctgccaatttaccagagataattgataacaccctgtaacagctgagactgcgcccggggcacggccaac

SEQ ID NO: 691250 - DNA, 82 bp, Homo sapiens
tctgccctgcacgtggctgctgccaagggctacattgaggtgatgagtgtcctcagcctgcgggggctgcgtggaggtggac

SEQ ID NO: 691251 - DNA, 90 bp, Homo sapiens
cttcagctggccaacagcaccatcattgcatttacctcggatcatggtcggatcatgctaaaaggagataatattactctgctacaaagt

SEQ ID NO: 691252 - DNA, 100 bp, Homo sapiens
gtaaagtcaccaacgagatcttccgccactacgagttatgggaagctggctggaagcagcggtactacaagaacaaatttgatgtggatgcagctgatga

SEQ ID NO: 691253 - DNA, 75 bp, Homo sapiens
tgtggtcagtttcgctttgattgctaccctggtatatgcacttttcaggcatcataggcgagtattagtggaatg

SEQ ID NO: 691254 - DNA, 75 bp, Homo sapiens
tggaggattgtgcttgtgtaagcaagatttatctgaataccctaggagaagtttctgcctggattgaaacaaaaa

SEQ ID NO: 691255 - DNA, 83 bp, Homo sapiens
caatctctggaaaaacttcttgccaaccaaagatgtctcagtggtacgaacttcagcagcttgactcaaaattcctggagcag

SEQ ID NO: 691256 - DNA, 100 bp, Homo sapiens
ggtaccaggcagacatcaccgacttgttaaaagaagggactttgaacatgtcggggatcgccctcagcagactcgcccaggagaggaaagcatggaggaa

SEQ ID NO: 691257 - DNA, 83 bp, Homo sapiens
caaaagtgaaattttacgaactcaggaagaggatcacctagcccgggtagaagaggcaatcacccgtatgcttgtgtgtgccc

SEQ ID NO: 691258 - DNA, 83 bp, Homo sapiens
ctgtgagatgtttcatcccaacagtcaagaaatccctgaggagggacgggaagtagaggaattttcagaggacgatgatgaag

SEQ ID NO: 691259 - DNA, 100 bp, Homo sapiens
gaagctttggagcagtgtattttgtatatgtggatattcctggagctatggatttatttcttaatttgccacttgtcatcggtaccattcctctacatcc

SEQ ID NO: 691260 - DNA, 98 bp, Homo sapiens
ctggggtgaggatgccacggctacccggctgtatccgcccccagatcatgaacggccccctgcacccccgccccctggtggcgctgctggacggccgc

SEQ ID NO: 691261 - DNA, 82 bp, Homo sapiens
ggcggccgcgaccccggccccggcctcggccgtggcgagcggaaatgcactcggtgatggaaagagagccactattctgaag

SEQ ID NO: 691262 - DNA, 48 bp, Homo sapiens
gctagcatcactcctgtccttgaccctgatgctcccataagacagaaa

SEQ ID NO: 691263 - DNA, 83 bp, Homo sapiens
cttccgcggtgtcattctgacctcgtgtcttgggacaaggtgcgcattcctggtgtgctgcagcgattgggagtgacatactt

SEQ ID NO: 691264 - DNA, 98 bp, Homo sapiens
ctgaggaagccatggagaggctgcaggaaaactgtggtgtgcaaagaagaataaaaagaagaggaaaaaggttttatataatgccaataaaaatgatg

SEQ ID NO: 691265 - DNA, 100 bp, Homo sapiens
ctgcagcaccagatggacatctaccagaagcggtgcgaggccttcggcaagccacccgaggggactgcctggccttccagatgcgagctgggttgcttcc

SEQ ID NO: 691266 - DNA, 83 bp, Homo sapiens
cagcaagcaggacatcttgaccatcttcaagcgcctccgctcggtgcccactaacaagaaatctatgacaagttcaagcagag

SEQ ID NO: 691267 - DNA, 49 bp, Homo sapiens
ggaatcccttgcatggctctcagcctctgagcccaagtctgcacgtatt

SEQ ID NO: 691268 - DNA, 75 bp, Homo sapiens
agctgtgtactttgccctcagcatctcccttcatgtctgggtcatggagatgaccaggatagtgaaaagtcaaaa

SEQ ID NO: 691269 - DNA, 50 bp, Homo sapiens
gcagaatatgatgaactcggcttcagagactctccaacatgtgccttctg

SEQ ID NO: 691270 - DNA, 100 bp, Homo sapiens
tggaccccacatcggggcagctgtatggcctggccagagaactctcggatgagatccaagtccagggctattcacgaaaagcagcagctctagagttctt

SEQ ID NO: 691271 - DNA, 75 bp, Homo sapiens
aataaccgaaaaattgcagaagcacaagccaaactgggggagctgatcaccttctattactattggaagaagacc

SEQ ID NO: 691272 - DNA, 100 bp, Homo sapiens
tcagacattggagaagggattagagaagtaactgttaaagaatgatagcagactccttgaaagcagggtccttgtttagtgcatctttgcccacatacac

SEQ ID NO: 691273 - DNA, 100 bp, Homo sapiens
cgcctctcccaggacccgcctggctgcgagatatggtgcgctggctctggccctgcctgtgggttccggtgtggtgcagtcgctggcctaccacccaaca

SEQ ID NO: 691274 - DNA, 96 bp, Homo sapiens
ttagatctagaaggagtcaagaggaagatggaccaagggaattacacatctgtgattatgcggatcaaacctcaccaaggccagcacataggagag

SEQ ID NO: 691275 - DNA, 90 bp, Homo sapiens
cagccatacccatggggaccacgcgactcaatggacggagagcttggattagactctggccctaactccctgcgacaaggactgtgtact

SEQ ID NO: 691276 - DNA, 75 bp, Homo sapiens
ggcgggaaggcggcgccccggccgaggtggcggcggctcctcaggtttggtgcacctcgatttggaggaagtagg

SEQ ID NO: 691277 - DNA, 100 bp, Homo sapiens
gggaagtcactcataagcgcgctcaagacggggatctgatgagcttctttcttctggcatcattaacggaccttttaccatgaatagttctactccttct

SEQ ID NO: 691278 - DNA, 76 bp, Homo sapiens
caggctgaccacgagcttttcctccaggcctttgagagaatcctgcaatatggcgaacataagagaatattatgag

SEQ ID NO: 691279 - DNA, 75 bp, Homo sapiens
acgaggtggatgaggccgagggcggcgacaagaaccggtgacttaagagattaaaattaatttggttgctgttgg

SEQ ID NO: 691280 - DNA, 100 bp, Homo sapiens
tgcagttccttaaaagctgcttccagtgggaatccacattaagaagtacaatagcattcgcggtaagaatgattgatgttggctgatattggagtgctca

SEQ ID NO: 691281 - DNA, 144 bp, Homo sapiens
agcaagattacaaagtttgagaatgctttcttgtctcatgtcgtcagccagcaccaagccttgttgggcactatcagggcagcaattgaagagaggtatggcaaagatctgctcaacctctctaggaagaagccgtgtggacag

SEQ ID NO: 691282 - DNA, 82 bp, Homo sapiens
tggtcttggtagcggaggcacccgaatgctgcccgggtgagatatccttggaacagaagatcttattgtggaagtgacttcc

SEQ ID NO: 691283 - DNA, 74 bp, Homo sapiens
attcgggaagcgtcgggattaggtgaaagtggcagaaagagcactctattattggaataatgaatacatcatga

SEQ ID NO: 691284 - DNA, 108 bp, Homo sapiens
ggcagcccaggcgcggagggagcgagtccgccccgaggttatgatgtgattgctcaagcccaatctgggactgggaaaacggccacatttgccatatcgattctgcag

SEQ ID NO: 691285 - DNA, 75 bp, Homo sapiens
cttatggcggcgctggagagggggcgctgagctgttgggaacaaaatccagtctcatagcagaggagaatataat

SEQ ID NO: 691286 - DNA, 115 bp, Homo sapiens
tgaccgagaccgtgaccgagagcgtgaccgagagcgcgaatatcgtcatcgttagaagcatcaaagctaagccagaagatttatcacattttcatcatcagctacaggattagaa

SEQ ID NO: 691287 - DNA, 82 bp, Homo sapiens
cagtcccgggagaacctgcggcggccggagcggtttggtgcacctcgatttggaggaagtagggcagggcccttatctggaa

SEQ ID NO: 691288 - DNA, 98 bp, Homo sapiens
aactggaactggttccagctgaggtgtatgcaggtcggcgggaatgccaatgcggtcctgtatggtggaagagtcggggaccctcgaatcccagcttg

SEQ ID NO: 691289 - DNA, 98 bp, Homo sapiens
aataggtgtatcaagtaatggtgcaaagcctgaagccaagaataaggagacgggtgctttggctgcggccaaagtcattgaaaccaagagtgaggagg

SEQ ID NO: 691290 - DNA, 75 bp, Homo sapiens
atttcgttttgcctccggttggggctgctgtttctcttcgccgacgcagcatctggaatcaagagacccatggca

SEQ ID NO: 691291 - DNA, 74 bp, Homo sapiens
ctgagtacgacagcctcaaacaggagctggagcagctcaaagaggaagaagccatggatttaataaatagagaa

SEQ ID NO: 691292 - DNA, 83 bp, Homo sapiens
gtcagagcccggggacggcgaggccctcatgtaccacacggtgattgaattactcagatatgaagatcatcatctaggttttg

SEQ ID NO: 691293 - DNA, 75 bp, Homo sapiens
cttgaaagcccaactcctgaatcacagaagagttttaagcatgattatgatatgagggtggatgatttccttcgt

SEQ ID NO: 691294 - DNA, 96 bp, Homo sapiens
tttccacctcctgacacaacaccactcagattgcttctgcacttcaagaacacaagttgaatcactcagacctgaaaaacagtctgaaaccagtat

SEQ ID NO: 691295 - DNA, 101 bp, Homo sapiens
tcactggatctgctgccagcattagcctggctcaatatctaatcaatgtcagtggcttgttgtcagaggccccaaatgaaaaactcttcttcgtggacact

SEQ ID NO: 691296 - DNA, 96 bp, Homo sapiens
gaggagccgaagcccaaaaagctgaaggtggaggcgccgcaagcgctgaggcagcggaggaggaaatggcaggtcctaatcaactctgcattcgcc

SEQ ID NO: 691297 - DNA, 95 bp, Homo sapiens
cattgagaagagagaagaacattctcgaatacctagaatggggttggtcaaagaaaaagtgatgtatgaaaaagaggcaaaacaacaagaagaaa

SEQ ID NO: 691298 - DNA, 75 bp, Homo sapiens
caggctctcatgccccgctgctgactggttgctgacattgatagctctcccagtaaggaggaggaggaagaagat

SEQ ID NO: 691299 - DNA, 74 bp, Homo sapiens
aacaaaaaccacaaaaattcccaaaccatacttgctaaaaattctgcccgacggccatggaggctgaagagacg

SEQ ID NO: 691300 - DNA, 75 bp, Homo sapiens
ggacactgaaaccaccgtggaagtcgcctggtgtgaactgcaggtcaccattctccaaaagactatccaggctgt

SEQ ID NO: 691301 - DNA, 82 bp, Homo sapiens
ggagccgccttctgcctcagaacggcgtgactcggaggaccaagaatcgccttcagccctgtctggtgcatccttggcagaa

SEQ ID NO: 691302 - DNA, 81 bp, Homo sapiens
tcggccgcatccccatgcgcttctcggtgctggaagttctactacatcaccctgctacgagaccccgtgtcccgctacctg

SEQ ID NO: 691303 - DNA, 101 bp, Homo sapiens
ctgaagcccatccagactgtttgatgctgaacttcaccgttaaggactattggaaatgcacttcatgcaatgaaatgaatcccccccttccatcacattgc

SEQ ID NO: 691304 - DNA, 75 bp, Homo sapiens
ccatcgcaaacccaaagatccccgttcctggagattctgattgaggttgcgaggggcggtgttgaagaatgtgtg

SEQ ID NO: 691305 - DNA, 98 bp, Homo sapiens
ggcgaatggctttcttgctggccacttgcggagtgatgagaagctacaaggcgaccatccagcagaccttggacatcctgttcctccgggaaggctcc

SEQ ID NO: 691306 - DNA, 98 bp, Homo sapiens
ttcacaatctcgccactgtatttgggccaaattgctttcagtgtgatgaatgcagactctgctaccattttggctgtttggatcctcctttgaaaaag

SEQ ID NO: 691307 - DNA, 120 bp, Homo sapiens
ctggcattgaatgatttatagctaagactccaggacacccctgaagccgagaaatggggaggtaactccaggactatctcaggtggaatatgcacttcgcagacacaaactaatgtctct

SEQ ID NO: 691308 - DNA, 97 bp, Homo sapiens
tcagatctataaatactgaagtggtagcatgctctgttgattcacagtttacccatttggcctgcagcgtcaccctttacaccagaaagctggcggg

SEQ ID NO: 691309 - DNA, 100 bp, Homo sapiens
gcacgtgtggttctcaaatataggcattctgatgggaacttgtgtgttaaagtaacagatgatttagttgaacgtcaaggtcgtgggaaataaaaggcag

SEQ ID NO: 691310 - DNA, 90 bp, Homo sapiens
accgacgagcaggcactggaagaccacttcagcagtttcggacctatctctgagggcccattgctagaagactgggacataatcagcccc

SEQ ID NO: 691311 - DNA, 74 bp, Homo sapiens
gctgcagatgctgtgcaaaacaggcactcttaaaagacccattttacatgggcttgtaccagaaacgagatcgc

SEQ ID NO: 691312 - DNA, 104 bp, Homo sapiens
ctccctgagtctttgaggacacagcctcgctggaggcagtttctggtactccaaagattcaggtttactcacgtcatccagcagagaatggaaagtcaaatttc

SEQ ID NO: 691313 - DNA, 125 bp, Homo sapiens
ggagcgttttcggggctgtaaagggagaatggcgcatgcgcatattcagggcggaaggcgcgctaagagcaggcaccacactgtaactcgaggcatcaccaaaggcgtgaaggaggactttcgcc

SEQ ID NO: 691314 - DNA, 95 bp, Homo sapiens
ttggttaccatgtatattttttgctggaggcataacaatgggaaacattggtcgacaactggcaatggtaaaataccatgaagattttgaaaaaa

SEQ ID NO: 691315 - DNA, 137 bp, Homo sapiens
aagagcaaagctacttccattccagaaagatggcatcatttttgccctcaaaagaaatggcagggtatatttacttctggcacatgggaagagaaatcagatgaaatttcctttgctgacttcaagttctcagtcac

SEQ ID NO: 691316 - DNA, 82 bp, Homo sapiens
tctgctgaatcctattcctaaggtgaagtattacagacacttagcacctgatcacttgctgcaaatatgtcatcgactagga

SEQ ID NO: 691317 - DNA, 87 bp, Homo sapiens
atctcaagctcatattttgaagtgtttacgggtgtggatgtggaagcagccaagcgggcagaagaggaattgctccttcatgacacg

SEQ ID NO: 691318 - DNA, 73 bp, Homo sapiens
gactacgtgggcaccttgcgcttcttgcagtcgaacccaagcaaacctcactttaatcactacatgtttgaag

SEQ ID NO: 691319 - DNA, 75 bp, Homo sapiens
ctcacggtcccgccgccgctgctgctgctgctgtgctcaggcctggccggacagtaaaatgattaacctttcagt

SEQ ID NO: 691320 - DNA, 75 bp, Homo sapiens
ccgcgttcccagcccgggtccccgcgttcacagccccagcgcagcagcctcccgcgacgatgcccctcaacgtta

SEQ ID NO: 691321 - DNA, 75 bp, Homo sapiens
caggcagccaaagagaagaagaagaggaggaggaggaagaagaaaagagtctcatcgtggaaggcaagagggaaa

SEQ ID NO: 691322 - DNA, 100 bp, Homo sapiens
cacggaaagcagcgtcaggagccatagtacctacagcagcactccagatacaagaaacccactgactttaaaagaaagaaattgcaattattgaccaaga

SEQ ID NO: 691323 - DNA, 100 bp, Homo sapiens
ctggtccacggagtgtatgaccacaaacagccatcaagatctgactgcagccatgagcagcaatgagtgcttcaagtgtggacgatctggccactgggcc

SEQ ID NO: 691324 - DNA, 82 bp, Homo sapiens
atgatttatagctaagactccaggacacccctgaagccgagaaatggttatggaaacaaaggacatgctttacatcgtcact

SEQ ID NO: 691325 - DNA, 75 bp, Homo sapiens
cagaaactgatccgcaaagtgtctacctcggggcagatccggaccaagactacaaactcacacatacggtgtccc

SEQ ID NO: 691326 - DNA, 83 bp, Homo sapiens
agcgggcggcttcctggcctgggcgctccggtggcggcggagtgcccatgacgcttccggagacaaccctggaaacactgaag

SEQ ID NO: 691327 - DNA, 74 bp, Homo sapiens
gcggatctacgagatcgaggacaggacgcgggtgaccaagaatatggcccaggtgaccaaagccctggacaagg

SEQ ID NO: 691328 - DNA, 100 bp, Homo sapiens
aagaattggaggaacagtgtgtccagcatgggagagtacatgagacgatgaagcaaagtgcttagatgagtacgaagatgatgaagcagggcagaaagag

SEQ ID NO: 691329 - DNA, 83 bp, Homo sapiens
ccgagaagagcagagcggagggagccccagacacgatctgggcggaccccggcaaatacgccctgatgggagctgctgcccag

SEQ ID NO: 691330 - DNA, 98 bp, Homo sapiens
caccaccaaactttgttcttgctcttgttttgccctcaattgtaattctggatgttccatttaagcagacctcttccatagctgtagctggagcggta

SEQ ID NO: 691331 - DNA, 87 bp, Homo sapiens
gagatcctggacctatgaatatccagtttgagccatcggatctaagatccaaaaggttcttagactctgtgagtaaagacagcttca

SEQ ID NO: 691332 - DNA, 99 bp, Homo sapiens
ccggttcgtcgcctccttgcccgtgaccgtcgctagaactcagttgtgcgttgcggccagtcgccactgctgtgctgcagggtgcacagctgatcgccg

SEQ ID NO: 691333 - DNA, 97 bp, Homo sapiens
caactgctggattgctgcaaggctgagggacgagaacgaggacttggactaaagtctgatgaacttcccaatcagatgagcatggatgattggccag

SEQ ID NO: 691334 - DNA, 96 bp, Homo sapiens
agagatggagatgggcagacggattcatttagagctgcggaacaggacgccctctgatgccggtctaattgaagccaacggagaactcaaggtctt

SEQ ID NO: 691335 - DNA, 74 bp, Homo sapiens
ggagtgggagagattggactgggagactcagcagaccttagctggatctccaaaatacaagtgaatcacccggc

SEQ ID NO: 691336 - DNA, 117 bp, Homo sapiens
aggggggccttagagggcctccccaggccgcctccgcccgtgaagaaatacaaacctggtcgatgtgatgatattttgaaatggaagcctcccagtctgaattctgtggattttcgt

SEQ ID NO: 691337 - DNA, 74 bp, Homo sapiens
gttttggttcccggttggtgcttcctgttcgcagctgcggcagctcgcttctcatatgtgcggatgaaatatct

SEQ ID NO: 691338 - DNA, 98 bp, Homo sapiens
agagcggtcggtgacagcctcaagggcttcagcaccgcgcccatggcagagccagaccgttcggttgactccaccaggtagttgtggattctatgatg

SEQ ID NO: 691339 - DNA, 90 bp, Homo sapiens
tgcgcagaccagacttcgctcgtactcgtgcgcctcgcttcggttgatggacggatggctacatggatgtgatggagatggtttactatc

SEQ ID NO: 691340 - DNA, 100 bp, Homo sapiens
tcagccccccagtgcggaggctggtccgcttcctgggtcccaggtgtgacaccttcagcaggtctcagggaagatggcagccctaggggacattcaggag

SEQ ID NO: 691341 - DNA, 99 bp, Homo sapiens
ggcggacgggaaggcgggagacgagaagcctgaaaagtcgcagcgagctggagccgccggagtggggtgctgacctacggactgaacatgaaaagtacc

SEQ ID NO: 691342 - DNA, 76 bp, Homo sapiens
cagggacgtgatgttggagaactactggaaccttgtttctctgggacaaggacacactcagcattcactacctcat

SEQ ID NO: 691343 - DNA, 100 bp, Homo sapiens
ggcttgtggtgcggcctcaccatacaggaacagggcagacgttagcgtgagtgatcactctcaatcccggatggcgtcccgcaaggaaggtaccggctct

SEQ ID NO: 691344 - DNA, 100 bp, Homo sapiens
gggatttttgagctggtggaagtggttggaaatggcacctatggacaagtctataagagctccaaacgagaatggaagccgctggaggaccgtagctgca

SEQ ID NO: 691345 - DNA, 96 bp, Homo sapiens
tacttgcaagaaacctcaggacttgagtaacagcaacatgggttgcttttgtaatgaagaagcacttaaatactcatctactaggcaagcatggag

SEQ ID NO: 691346 - DNA, 90 bp, Homo sapiens
taaagcctggaatttcagaggggggaacttatgacattttagtaacaaaagataatcaaacccgctctgttggtcaatatgacaaccgtg

SEQ ID NO: 691347 - DNA, 96 bp, Homo sapiens
cgaccagctgcgccaacatgccctggctgaaggccttaccgaggaggagtatcaggatgctgaaaacgccattcaacagatgggtggccagtggct

SEQ ID NO: 691348 - DNA, 80 bp, Homo sapiens
cgtctgtgggttacgccatctttaaggcctcattgctacgatttcagagtaccctggtaatagctgagcatgcaaatgat

SEQ ID NO: 691349 - DNA, 83 bp, Homo sapiens
gcaaaattttggactgtgaagcaaggcattggccatcactggtgcaagctatatttaacggagatcctgatgaagttcgagca

SEQ ID NO: 691350 - DNA, 75 bp, Homo sapiens
tgtgcatctccgtgctggccgatgagtaccagctctcctttgggtggaacacagtgaagatcgacatgagtgcag

SEQ ID NO: 691351 - DNA, 50 bp, Homo sapiens
caagattgaccacattgatcacacccaaaatggagttaatcctgactggg

SEQ ID NO: 691352 - DNA, 60 bp, Homo sapiens
agagtgagacttttacagctcttgaatctccagaatctggtctccagaaacattattcta

SEQ ID NO: 691353 - DNA, 90 bp, Homo sapiens
cggtccctgtgacctgtggagacacggccagatctgccctccagattttgcctaccattttacagtatttgtcttctattttggagcctt

SEQ ID NO: 691354 - DNA, 100 bp, Homo sapiens
gagtttggcgttgaaagaagtggttcttgggtgtctctggggagtccctgggccagaccttcctccagactccagcccacctcttcggagcagctctgct

SEQ ID NO: 691355 - DNA, 100 bp, Homo sapiens
caaactccagctttgcctgtgagaggaacaagcgtccctgatccagaaggtgacatatctgaagagatggattaagaatgctttggattaaggattgtgg

SEQ ID NO: 691356 - DNA, 74 bp, Homo sapiens
caagatttaacattccaacacataaaaattatttatccaacagctcctcccagagttgatctctctaatgtatt

SEQ ID NO: 691357 - DNA, 96 bp, Homo sapiens
tctccgttggcccaaccagtcccagcgctgtcgtgctcctctactcggcaaactcttccacatagactttggatatattttgggtcgggatccaaa

SEQ ID NO: 691358 - DNA, 80 bp, Homo sapiens
gaagtgattattacaccaaattctgcatggggtggagaaggcaggaaggtgtcttgctgcaggtaactaatgaagaagtg

SEQ ID NO: 691359 - DNA, 100 bp, Homo sapiens
cggatggccccaggtgtaagcgcagaaagcaggcgaacccgcggcgcaataacggtgcggccgggaacttcctgtgccccgctggcgccttgtccttcaa

SEQ ID NO: 691360 - DNA, 82 bp, Homo sapiens
aaatttggagtgtgcgtgcgcgccgagcggggcctagaagacagttcccaggaggccgaggacgaggcatcggggctggggc

SEQ ID NO: 691361 - DNA, 51 bp, Homo sapiens
aaccagacgaaagaaagatctctgggtgacaaccaaagccaagcaactgaa

SEQ ID NO: 691362 - DNA, 75 bp, Homo sapiens
caacagtgtaccagcagggcgttggctatgtgcccatcacagccatctgtgagaaagacacactgcagtggaagg

SEQ ID NO: 691363 - DNA, 97 bp, Homo sapiens
atttgttaaggattccaagtaactcttatttgtatttgataggtacaagagttacagcccttatgacatgttggaaagcatcaggaaagaggttaaa

SEQ ID NO: 691364 - DNA, 96 bp, Homo sapiens
gttcgaatgcccggacttctccacgtgctgtgttatggtcgatggctcctgggggtgctgccccatgccccaggcccctgagaatcagggtttgag

SEQ ID NO: 691365 - DNA, 105 bp, Homo sapiens
gacaaacagcccgcccgaccccgtcccgaccctggccgccccgagcggagcctggaggtacatgtcccagagcaagcacacggaggcccgggagctcatgtactc

SEQ ID NO: 691366 - DNA, 75 bp, Homo sapiens
atgccatctacaaagaattctccttccacaattttaatcagagcaatggtggaacaaagcggcaaaagatatccc

SEQ ID NO: 691367 - DNA, 100 bp, Homo sapiens
cttggactatgactttcaacgggactattatgatagcgcaaatctgtccaaggctgcctggggagcattggagaagaatggcacccagctgatgatccgc

SEQ ID NO: 691368 - DNA, 88 bp, Homo sapiens
ggcggtgacagagtggagccatggctagaggttcgtgctggccgtgggcagcgccgtctttgatgccatgttcaacgggggaatggcc

SEQ ID NO: 691369 - DNA, 90 bp, Homo sapiens
taactcctggagaagggattgcccagtcagcaaaggttcagccctccaagattcacaatcgctatgaaggcaaggatgtttcaaagcaca

SEQ ID NO: 691370 - DNA, 100 bp, Homo sapiens
ctggaatatggagagacatgagatggtggccaaacccccaggatgccggaccagatctctgtctcggagttcatcgccgagaccaccgaggactacaact

SEQ ID NO: 691371 - DNA, 100 bp, Homo sapiens
aggcgatcttcctgtttgtggataagacagtcccacagtccagtctgaacaggaattaagaataactcaaagtgaatttgatcgtcaagcagagattacc

SEQ ID NO: 691372 - DNA, 100 bp, Homo sapiens
agagacttgacaatacaaaaagctgatgaagttgtttgggtacgtgcaagagttcatacaagcagagctaaaggtactccaaagattcaggtttactcac

SEQ ID NO: 691373 - DNA, 100 bp, Homo sapiens
ttcgtcgtggcaacgttgctggtgacagcaaaaatgacccaccaatggaagcagctggcttcactgctcagtggcggcttatttggcctccccaggacgg

SEQ ID NO: 691374 - DNA, 82 bp, Homo sapiens
gaaaatctaaaagatgattctcttccttcaaatccaatagcctcccacatgcttagtgttcagttctgcctactgagcgtct

SEQ ID NO: 691375 - DNA, 141 bp, Homo sapiens
gtcctcattgcgcccagacgggccggcccagagctcccgggtcgtctttcgtgtggccgcgaggctgctttgaatgctgcatcaagtgtctgggaggagtcccctacgcctccctggtggccaccatcctctgcttctccg

SEQ ID NO: 691376 - DNA, 98 bp, Homo sapiens
ttggtgccctcaacatctctcagagacgaaagctgaaggacacttgtatattgtgatggaatactgtgatggaggggatctaatgcaaaagattaaac

SEQ ID NO: 691377 - DNA, 100 bp, Homo sapiens
aagactgcaggcgatcataaagaaaatcgacttggactcagatggctttctcactgaaagagccctctggcacaaatggaagaagaaagaagggagcaag

SEQ ID NO: 691378 - DNA, 90 bp, Homo sapiens
gggatgtttttggcaaggacttaatttatacactttattattggaaatcttcaagttcaggaaagatggcaagattattttatcataaac

SEQ ID NO: 691379 - DNA, 99 bp, Homo sapiens
tctgagtattgtctttatatcctgacactatgaatgctacttggatgcctcttaagggattgttcattgctgctggaggaagatcatggactgtcgcgg

SEQ ID NO: 691380 - DNA, 100 bp, Homo sapiens
ggggaggcgggcagctctgcccggcagaaacctgtcttaggcctaacatcgtgtcccagctcagccaagcctgcgatggagccataacgagtcgtccagg

SEQ ID NO: 691381 - DNA, 82 bp, Homo sapiens
gcaaaccaacctcctggctccaaagctgcagttccaggttatctgggatacactaggaaacaagcaattttgttccttcaaa

SEQ ID NO: 691382 - DNA, 90 bp, Homo sapiens
gtgctccagcgcaccaacggcgaccggatccggttcattctggacgtgcttctgcccgaggaagaggatcacctagcccgggtagaagag

SEQ ID NO: 691383 - DNA, 74 bp, Homo sapiens
agtctgctatcgtacattaggcctgacgttaaaggtatgggaggacatggctatggtggagctggtgatgcaag

SEQ ID NO: 691384 - DNA, 109 bp, Homo sapiens
ctttgggaggccgaggcaggcggatcacgaggaagaaaatacttcagggatcttaacccaaaagcatggaggtccacaccatcctccaggatactacagttgacaactg

SEQ ID NO: 691385 - DNA, 75 bp, Homo sapiens
cagcacttggagcgcagaaccggccgcgcccgtcatccgtccttggctcaggatttggagagcttgcaccaccaa

SEQ ID NO: 691386 - DNA, 119 bp, Homo sapiens
gtcaaaactttacaagttaattgaagagtcttgtccacagctggcaaattcagtgcagatcaggtgagaagccccacaagtgtgagctgtgtgacttcacatgccgagacgtgagctac

SEQ ID NO: 691387 - DNA, 82 bp, Homo sapiens
caccagctgaacaggccaaagccagactacagctggttcttgaagctgctgtgagtccattcttgcacaccgagaaaatatg

SEQ ID NO: 691388 - DNA, 100 bp, Homo sapiens
gagctggaaattcctgacgttcattgatctgtcccaagaggaattacaagagtactgcagacatcatgaaatcacctatgtggcccttgtctcggataaa

SEQ ID NO: 691389 - DNA, 74 bp, Homo sapiens
cactcttatacccagttattgtctggtgctcaaagttccaaatttcattggacagtattacaaatggaagaaaa

SEQ ID NO: 691390 - DNA, 80 bp, Homo sapiens
gtggatcgctgtgatcgtcacttgaccatggtgaatccgggcagcagctcgcagccgcccccggtgacggccggctccct

SEQ ID NO: 691391 - DNA, 83 bp, Homo sapiens
tctggtgaaattgccggcaagagggagttaaggacattccaggcagaggcaaggtcaagagcaatctgaatccaaatgcaaag

SEQ ID NO: 691392 - DNA, 100 bp, Homo sapiens
cctttggtgtggacatctgctgccggaaggggtcccgaagccccctgcaggaactctacaacccaatccagacgtgcggcaggccagctcttcctgtcct

SEQ ID NO: 691393 - DNA, 51 bp, Homo sapiens
aagtccccattccaaattatcaaggccctgggcagtgacggggttcgggtg

SEQ ID NO: 691394 - DNA, 75 bp, Homo sapiens
ctttgcagctgacctacatctcgaaggttactttgacgcgcacgcccttgctatggactatcggagtttgggatt

SEQ ID NO: 691395 - DNA, 82 bp, Homo sapiens
ccactttcgccagcccgtgccgcgagcgcggcctgcaggagggccctcctccccagttcagaatgcagcccacagccaccat

SEQ ID NO: 691396 - DNA, 90 bp, Homo sapiens
ctgatttgcaacccttccgggaagccatagctctgcatgtatgagcccagaggacctggtcggcccttgtaccaaagaagaatctcatct

SEQ ID NO: 691397 - DNA, 75 bp, Homo sapiens
gggaggctgtctttcccttccagcctggaagtgttgcagaggtggaaccgtcccaaaatgtcccttgctcagaag

SEQ ID NO: 691398 - DNA, 100 bp, Homo sapiens
cttgtcaactgctcacgacagaaggcgtctcatggcgttggaataccggctctcagcggctaaatagatgatgaattcatcaaaaacttgaaaatactga

SEQ ID NO: 691399 - DNA, 83 bp, Homo sapiens
acgggatccagagcgccgcgcacttcgtcatgttcttcgcgccctgggtttgccttcccggattgggcctacaagccagagtc

SEQ ID NO: 691400 - DNA, 100 bp, Homo sapiens
ttgcttcagcgttctgtggttgtcaacagatacgatgaatggattaaagcagataaaatagtaagacctgctgataaaaatgtgccaaagataaaacatc

SEQ ID NO: 691401 - DNA, 50 bp, Homo sapiens
actcatggaggctgagcatttattcaggctgttcggctcttgaatcccag

SEQ ID NO: 691402 - DNA, 87 bp, Homo sapiens
ttgctcaacaagggcctgccgcttgggcagcgggtggcatgagacgtgggaacatgggccacctcacacggatcgccaacgcggtgg

SEQ ID NO: 691403 - DNA, 98 bp, Homo sapiens
cgtctagtgtggaccctattcctggtttgcagctccttcagctagattttgactttgaaaaaattcctttggaaaaacatgatgaagagtatcgaagt

SEQ ID NO: 691404 - DNA, 75 bp, Homo sapiens
gttcaagagttggagagagtgccccacaacacccctgtggggacaagaaaagtacattccacaagttgcagtttt

SEQ ID NO: 691405 - DNA, 101 bp, Homo sapiens
cttccgcaggccgtttccaccgaggaaaaggaatcgtatcgtatgtccgctatccagaacctccactctttcgttttcggctttgtgagaaaccttaccat

SEQ ID NO: 691406 - DNA, 75 bp, Homo sapiens
cttgccgccctgcactgccgcttcggtcactaaactgatagtgcatcagctgacccaggtaatttaaaatattct

SEQ ID NO: 691407 - DNA, 74 bp, Homo sapiens
ttccagatggggggtagcagcagccataacaggttggatggcaagcatgtggtgtttggcaaagtgaaagaagg

SEQ ID NO: 691408 - DNA, 100 bp, Homo sapiens
cgtcaaccttgaaggcatcgtgtggcaggaaacagaagatgatcacacgcgctgcaacgtgtggattctggatggagacttgtaccacaaaggcctgctg

SEQ ID NO: 691409 - DNA, 90 bp, Homo sapiens
tgaaaagaaggtggcagacccggtttgctgatcgccccagggatcaggaggttcgaatgaaatccatgtttgctattggcttttgtttta

SEQ ID NO: 691410 - DNA, 50 bp, Homo sapiens
gcctcccgagtggctgggattacagagagttctactgtttcgaaccatgg

SEQ ID NO: 691411 - DNA, 96 bp, Homo sapiens
gccgccacccgatggaagattcgatggacatggacatgagccccctgaggccccagaactatcttttcgcattaaaagacacctcagagaagctca

SEQ ID NO: 691412 - DNA, 95 bp, Homo sapiens
taggagacaagtgtatggcagtctggagtgaagatggacagtcttgggcgtctttggtactggcttttttaggggtctgcctggggattaccctt

SEQ ID NO: 691413 - DNA, 80 bp, Homo sapiens
ccggagagaatatcagcgacaggactacatggatgccatggctgagaagatataacgtcgaggtcaagcacattaaaatc

SEQ ID NO: 691414 - DNA, 111 bp, Homo sapiens
gaggcaccgggatcgtgaccgagaccgtgaccgagagcgtgaccgagagcgcgaatatcgtcatcgttagaagggaaattggttacagtaaaatatttacgactagataga

SEQ ID NO: 691415 - DNA, 73 bp, Homo sapiens
ggctccgcagcaagatggcggacgagaaggacagggaagttggcttaaataactgtgattgatggccatgcag

SEQ ID NO: 691416 - DNA, 75 bp, Homo sapiens
atcactgactggcacaggtgttggggcctctcttctgtggaaactctgaagccgaccagttgggcaaaatctttg

SEQ ID NO: 691417 - DNA, 75 bp, Homo sapiens
tgaagaatgtgacatgaaaaaaatgcattatgtggaccctgaccatgtaaaggtgtttggagaagagggattgac

SEQ ID NO: 691418 - DNA, 74 bp, Homo sapiens
agtcttcaagctctgtaagacatgtctgagaaacatcttacctattacaacagcaaaggtgccaattgtgaagt

SEQ ID NO: 691419 - DNA, 76 bp, Homo sapiens
cgatctggagcttttcccctccccggttgccaccttccagagaagaggtacgagatgacaagacaaccataaagtg

SEQ ID NO: 691420 - DNA, 75 bp, Homo sapiens
actactagatgactttaaaatatcaggagttaatggaacacattcagccatgctgtttattcaggctgctgtctc

SEQ ID NO: 691421 - DNA, 100 bp, Homo sapiens
ctggactcttttacactcaactaattggcatcatcacaccaaaagaatgcaatggtgtaaagattccagttgatgccagtaaacctaatccaaatgatgt

SEQ ID NO: 691422 - DNA, 98 bp, Homo sapiens
ggagaatgaggtgcgaacaatggtggatccaaactcacgcagtgaccccaagcttcaagaactgatgaaggcagtcgatgatgtgaagaaaggttaca

SEQ ID NO: 691423 - DNA, 75 bp, Homo sapiens
aaaaccctgctgatgtcagtgttatatcctccaggaatactggccagagtctccaaaggcacaggcctcctcagt

SEQ ID NO: 691424 - DNA, 100 bp, Homo sapiens
gtcacttcctctctgtggttgtcagtcttctcatccctaaggtccggcgggcggtggcctccgtggtgggcggctggctgctgtgtctgcgtgaccgtta

SEQ ID NO: 691425 - DNA, 50 bp, Homo sapiens
aagctgttcaacaattcctccagtattctctactgccgctgatggtcaaa

SEQ ID NO: 691426 - DNA, 98 bp, Homo sapiens
tctaggaaacatatgttacgatagccctcggtcaaggagtgtgatgactggcgagcagatggctgccttccatccatcgtccacccccaacccgctgg

SEQ ID NO: 691427 - DNA, 89 bp, Homo sapiens
ctgacaagacgctcccagagtgttcaaaattacctatgcctgaaaacttcatgcctcctgttcccatcacatcaccaatcatgaacccg

SEQ ID NO: 691428 - DNA, 100 bp, Homo sapiens
aacgagagctcatgaaaaccccttccatctcgaaaaagaaccgcgcgggaagccccagcccgcagccctcggggtgtaaactggagttgctggtgggcag

SEQ ID NO: 691429 - DNA, 75 bp, Homo sapiens
aattttgtcagtcctgttcgaaaccaagatatgaagagcattttaagaggtgcagcctctggaagtggatcaaac

SEQ ID NO: 691430 - DNA, 75 bp, Homo sapiens
cggggttcgggtgtctcgtgtgtgaacatcacaggtaagaatgattgatgttggctgatattggagtgctcattc

SEQ ID NO: 691431 - DNA, 100 bp, Homo sapiens
gtggctcccaactttgaggccaataccaccgtcggccgcatccgtttccacgactttctgggagactcagccgctcccgaggccccggcgcggcgcgagg

SEQ ID NO: 691432 - DNA, 98 bp, Homo sapiens
agacgagtggtgggagaaccagccgactggagcaggcagcagcccagatttatcatagaatccccgactcagacccatcttctagcaaaacaaggcag

SEQ ID NO: 691433 - DNA, 82 bp, Homo sapiens
gagtatttgaagtctgtgtcaaacatccatatcataagtggaattttggagatattcaaagagagtaatgccttctagcttt

SEQ ID NO: 691434 - DNA, 75 bp, Homo sapiens
cgccgcgatgtcagctcagtgctgtgcgggccaggatgacgacctcaggcgcgctctttccaagcctggtgccag

SEQ ID NO: 691435 - DNA, 82 bp, Homo sapiens
gccgtccttctccactttcgccagcccgtgccgcgagcgcggcctgcaggaggtactggctgtgatcgaacttctcaaccct

SEQ ID NO: 691436 - DNA, 75 bp, Homo sapiens
agagtgtttgcttcggcagaaaacgttgcacactgacaagaaacagatcagtgttgggttcattggctatccaaa

SEQ ID NO: 691437 - DNA, 98 bp, Homo sapiens
atgatctggctggacctgaaggaggccggtgactttcacttccagccagctgtgaagaagcacctggctgcagtggaagaaagaaagatcaagtccct

SEQ ID NO: 691438 - DNA, 83 bp, Homo sapiens
ggcatttccagcccgcccacccagatgaccgcacctcgagcaggagtggggatgccacgtctgcccccagcgcccggccctct

SEQ ID NO: 691439 - DNA, 107 bp, Homo sapiens
ggagtatcaaatatgagaaagctaggccatctgaataactttactaagttgctgaacagaagacttttgagagtcagcagaaatcttccactttgcatggttctctt

SEQ ID NO: 691440 - DNA, 100 bp, Homo sapiens
aagccgacgcccatccagctgaacccggcccccgacggctctgcagttaacgggaccagctctgcggagatctgcataaagtattacaaacaaaatcctc

SEQ ID NO: 691441 - DNA, 95 bp, Homo sapiens
tgatccagaggagatccggatgctcatccataaaactgaagatgtgaatactctgaggaatttgcccagagtgccatacgctatggacaagtcac

SEQ ID NO: 691442 - DNA, 101 bp, Homo sapiens
gctgcctcgccgcgtctcgccacggatgatccactcacaaatctgaatacggcttttgacgtggcagagaagtacctggacatccccaagatgctggatgc

SEQ ID NO: 691443 - DNA, 90 bp, Homo sapiens
cccaggaaccatttcggcgtgggcaggtcgacagtgaccactaaagtgaccctgtatgaggatacatgggctgcacttcacagaagagcc

SEQ ID NO: 691444 - DNA, 100 bp, Homo sapiens
ggcaatgctggatagataccgaattcttatcacaaaggaatcacatgcagcccaactacagattcttatggaattcctcaaggttgcaagaagaaataag

SEQ ID NO: 691445 - DNA, 82 bp, Homo sapiens
ctcacgattgagtgtcaaagaaggtgaaatgacaatggatgctctgttggctcgattgaaacttctgaatccagatgacctt

SEQ ID NO: 691446 - DNA, 88 bp, Homo sapiens
tcagcctagtagttcactacaatactggaggaattccaaggatatttcaggatacaatgtctctttgctatatgaccttgaaaatctt

SEQ ID NO: 691447 - DNA, 74 bp, Homo sapiens
gcgcggcttttggcggcctttctgctcctcgcggcccagatgctgtgggccctgagggaaaggatcacagaggc

SEQ ID NO: 691448 - DNA, 100 bp, Homo sapiens
gttcggaatcctataattgaaaaacagtaaagatggaaaaccagttattgaatatcaagaggaggagttgttgtgagaaagatcagtctaaagaaaagga

SEQ ID NO: 691449 - DNA, 75 bp, Homo sapiens
tcatttcacagctgattcctgggagcacatccatttcattggcaaggtgttgacagctcttctaccacaagcagt

SEQ ID NO: 691450 - DNA, 100 bp, Homo sapiens
tgaaaattcatgctgaaaaactgagtgaatatgatcagatttctccaccaaattctcagcctgataagggaggcaaaaccttcaactgaggacttggggg

SEQ ID NO: 691451 - DNA, 100 bp, Homo sapiens
agacatactccatagatattaatggctatattcttgtgtattctgttacatcaatcaaaagatactagagtaaaaggatggtttcttctggacaattata

SEQ ID NO: 691452 - DNA, 75 bp, Homo sapiens
tgctggtgttagcgctcagtcaagggggcttgatcatgggcacaggcatcgagtcatcatcccacaagtacggcc

SEQ ID NO: 691453 - DNA, 100 bp, Homo sapiens
agcgttttacggggtttgctgcatactatgttgccacaggctcacgaggcccagggaatcctctggaccatcagattaccaatgaaagaggagaatcaag

SEQ ID NO: 691454 - DNA, 82 bp, Homo sapiens
accaagttcgttttgatgattgcagttctaaggcctatgaaaggaggttccctacatgtcctttgattccgatgttcgtggg

SEQ ID NO: 691455 - DNA, 100 bp, Homo sapiens
ctaccactggtggcaggctgtggccatcttcaccgtgtacctgggctcgagcctgcacatgaaggtgtccaagtcacacagagccacggaatctcacagg

SEQ ID NO: 691456 - DNA, 75 bp, Homo sapiens
aaacaaatcaaactgcaaatctgggatacgctgactttggtgtgtctgccaagaatctgaagactctacagaaac

SEQ ID NO: 691457 - DNA, 100 bp, Homo sapiens
cgttctccgctacggcgaggaacagctcaagacccacaagaagatctcaggaaacaggctcgacagctggaaaatgaacttgacctgaaactagtttcct

SEQ ID NO: 691458 - DNA, 75 bp, Homo sapiens
tggccgcacagtatagtgaagataaagccaggcaaggggtactggctcctgtatcacccagctctggagttgaaa

SEQ ID NO: 691459 - DNA, 100 bp, Homo sapiens
gtcacagagtgcaccgtatcctgtcacttctggatgtgaggaaaaagtagaatatgccttcctgattatttttacagtcgagacatttttgaagattata

SEQ ID NO: 691460 - DNA, 100 bp, Homo sapiens
gaatactgccctgtagaagtgatttctgcaaaggatgtcccaacaggaggaatcttccagctccggcagaatgatatggaacctagcaaagctgttccac

SEQ ID NO: 691461 - DNA, 82 bp, Homo sapiens
aaggaacgaggcaaggagctaaagcagcgtgcgttcagccctggggcttaacagcattgcgcagtgatgaagtgattgattt

SEQ ID NO: 691462 - DNA, 78 bp, Homo sapiens
aggacccgaagacaggaaagctgaggacttcaccagcgctgcaacatggatggaattggaggacattatcatatgcga

SEQ ID NO: 691463 - DNA, 74 bp, Homo sapiens
gctgaatagctggggctacaggcgtgtgtcactgcgcccaggttggaagcgaagtggaagcactgaacctccag

SEQ ID NO: 691464 - DNA, 96 bp, Homo sapiens
ggagccctgggctggggcaggagccgatgagtataggatcaaaccagtggaagaggtcaaatacatgaaaaatggggcagaagaagagcagaaaat

SEQ ID NO: 691465 - DNA, 100 bp, Homo sapiens
gcgcccgcagccgcagccccctgctccggaggctggtgcagtctctgctggatgaaccgaatcctaacagtccagccaatagccaggcagcacagcttta

SEQ ID NO: 691466 - DNA, 112 bp, Homo sapiens
cccggccggcccggagcaccgagctcgcggcacggtaggaggtgctggagaatctggtaaaagcaccattgtgaagcagatgaggatcctgcatgttaatgggtttaatgga

SEQ ID NO: 691467 - DNA, 142 bp, Homo sapiens
gatggtgttgtgagagatttctgcagtgaagattgctgtaaaaaatttcaggattggtactacaagattctgacaatggagatattaattatgattatgttcatgaattgtcattggaaatgaagcgtcagaagatacagag

SEQ ID NO: 691468 - DNA, 80 bp, Homo sapiens
cttgcagcatattacctatcaggagaggagagtgtaccatggcttccagtaacactgtgttgatgcggttggtagcctcc

SEQ ID NO: 691469 - DNA, 90 bp, Homo sapiens
caaaaggtgatctggacaaaggaacaggtatctcaggttgtacggctctccaggtgacattgacctctggcccgcccttatggttgaaga

SEQ ID NO: 691470 - DNA, 83 bp, Homo sapiens
gagcgggagaggcccggggcacgtgcagaaaggagccccgcgagtggcgcgccggggatgattatatctgtccaagatgcgag

SEQ ID NO: 691471 - DNA, 83 bp, Homo sapiens
accgcttcagcctgctgcccacggagcagccccggctacgggtgcctggttggtgaccctggcaaagatgagagtgcacattt

SEQ ID NO: 691472 - DNA, 101 bp, Homo sapiens
ggctgaatgaatgtatttcaccagtagcaaatgagatgaaccatcttcctgcacacagccacgatttgcaaagctgccgggccgcaagtacagccctgggt

SEQ ID NO: 691473 - DNA, 74 bp, Homo sapiens
ccgcccgcaggtgctatgctgtgggccccgctcagttaatatgatcctctgttgaagcaagaagacaaactgta

SEQ ID NO: 691474 - DNA, 101 bp, Homo sapiens
caacctgggattcaaatgaaagtgaaaatgttagaagaactcgtgagccggattgatggcctccccatggccacccatggaccagtcggcattcacttcct

SEQ ID NO: 691475 - DNA, 74 bp, Homo sapiens
gagccctccggccagcggggaggcaaccaagttgttaaaagccttgaaaggctacattaaacatgaggcaagaa

SEQ ID NO: 691476 - DNA, 82 bp, Homo sapiens
ctggagcgcgccgccaaggcggcgcgcgagctggagcactcgcgttctgcggggagtgtctccagccctgcctgcaggtgcc

SEQ ID NO: 691477 - DNA, 134 bp, Homo sapiens
gttcagcttccaaagagatacagggcagaggaaaatgcaagaagactgatggagcaggcttgcaatattaaaaaatgacatcagatgtaccatcactgggtccagccattgcctctggaaactctggacctgga

SEQ ID NO: 691478 - DNA, 82 bp, Homo sapiens
gctggatttttttcgggtagtggaaaaccaggaagcggggagaggtggtgagagatgacccctgttgaggatttcattggtg

SEQ ID NO: 691479 - DNA, 82 bp, Homo sapiens
cgaaaagttctcaattttgaacaagctatcaaggattttttatcaagcagaaatgcatcgaacaacgagaatcaagatcact

SEQ ID NO: 691480 - DNA, 107 bp, Homo sapiens
tcagaaggatatcgacgtcgtgatccagaagtccagagctgaggactgcctgtttgcaggttttaaaatcaaagatgggaaaatcggagaaaattgcccttccccat

SEQ ID NO: 691481 - DNA, 83 bp, Homo sapiens
gccgggtggccgccctgttccccgcgctgcggcctggcggcttccaggcgcactaccgcggtaaaaaagagtgtcaagtggac

SEQ ID NO: 691482 - DNA, 90 bp, Homo sapiens
tttttattcaacttagaaaagaattggaaatgattgaggaactccagaaacgttgcatccacctggagtaccctctgttggcagaatatg

SEQ ID NO: 691483 - DNA, 97 bp, Homo sapiens
attttgtgtggattcctcagagagtgaacttggaatcttggacctcatccagcagttcctacagaggttgacagctaccatagcctattccctctag

SEQ ID NO: 691484 - DNA, 90 bp, Homo sapiens
tgataccaatgatcctgaaaacagaaggaaattgaaggaacttggagttaatggtctaatttatgatagtgctgggcctaaaggagataa

SEQ ID NO: 691485 - DNA, 75 bp, Homo sapiens
cccttctgctcctttcctggcagcaggggtttcaatgggaggaccatctgcctgtgggacatcagtgccgttcca

SEQ ID NO: 691486 - DNA, 75 bp, Homo sapiens
ttaatattcctgccatcacaaaagctggacaagcgaagattgtgaagaggtctcttgaagtttggggtagtcaag

SEQ ID NO: 691487 - DNA, 100 bp, Homo sapiens
gatccagcctgcggagcctgtggggcaggccagattacctgtccctaatactgagcagaagctggtgaatgaaacaggagatccctcagtcaaaacaaaa

SEQ ID NO: 691488 - DNA, 100 bp, Homo sapiens
ttctcttccttttttctctccggtttctcatcactccaaccaggtaaagtcagtgataaatcttttgtttgctgcatatactggagatgtgtctgcactt

SEQ ID NO: 691489 - DNA, 74 bp, Homo sapiens
aaatgggaacctttgttgaacaacttggggcatgtctgcagaaaacttaaattatgagcctcaaacaatttgtg

SEQ ID NO: 691490 - DNA, 74 bp, Homo sapiens
ggacaacttgtccatcgtttcactgtaccagcgggctacattgagagacctcagctgattcgagcaaaagtgcc

SEQ ID NO: 691491 - DNA, 100 bp, Homo sapiens
attgattgtcttatatttcaagttaaggtccaaaaaaactccagctgtgaaagcaacataaatgtgacttttttgaacgaaccattctgtgcaacagcct

SEQ ID NO: 691492 - DNA, 71 bp, Homo sapiens
gagcttggttaacttgggagaaagtttcatctgtggatggagtattggggacccccggagaccctacccaa

SEQ ID NO: 691493 - DNA, 100 bp, Homo sapiens
tgggattcaaatctggagtgaagttttcactgtggagaagccaggtgggaagaagatcctaagtgtgaacgtgaagtccccagccctgctgctgagccag

SEQ ID NO: 691494 - DNA, 100 bp, Homo sapiens
ggctgtggtggttcccgcagagtggataaagaactgggagaaatcagggagaggcgaattgcatagaatgtcaagctaaccaggcgtccgctacttcaga

SEQ ID NO: 691495 - DNA, 74 bp, Homo sapiens
cgcggccatggcgtacgcctatctcttcaagtacatcataatcggcgacacagacaaagtttacatggggccag

SEQ ID NO: 691496 - DNA, 71 bp, Homo sapiens
aaattactcggaggcagcaaaggtggctgctaatgcaccaaagtgctgtccccggcataggtccatctctg

SEQ ID NO: 691497 - DNA, 74 bp, Homo sapiens
aagattctctgctccaatccaaacacaggagaggtgggatgcagatcttcgtgaagaccctgactggtaagacc

SEQ ID NO: 691498 - DNA, 97 bp, Homo sapiens
tagccactttgcattgactggaaacaatggcatttacagaaagagtcaacagcagtggcaacaggggactcaagaaataatagttcagttgaagacc

SEQ ID NO: 691499 - DNA, 100 bp, Homo sapiens
ctcaaagcgggaaatgcgtcaaaggaaccattggcactggcaagtggggctctgccagactggtgtgaacaattaaccagcaaatgtccttttctaatac

SEQ ID NO: 691500 - DNA, 123 bp, Homo sapiens
gaaggagtcagtcagagagccttgggccagagttccaggggctctgggagtggctgccagcatacgtatcaaggacagtaactaccatggctcccgaagttttgccaaaacctcggatgcgtg

SEQ ID NO: 691501 - DNA, 100 bp, Homo sapiens
gcgagcaccagagtcggcgtaactatcgcctgacagggacccagatgatgtggtaccagttggccaaagaagagcctggtgttggtgcatgtgctttgga

SEQ ID NO: 691502 - DNA, 100 bp, Homo sapiens
ctgagcaagcggaggacctacgccggcctggcccgtgctttgaagaagaggagcacttcaaggtgctggtgaagatgaccgcccaggagctcgccaatgg

SEQ ID NO: 691503 - DNA, 75 bp, Homo sapiens
gtgctttgcaacgctaattagactcatgccacttgaggtttaccgacaagactgtgaaactttcgggatggtggt

SEQ ID NO: 691504 - DNA, 96 bp, Homo sapiens
tagttgcttctcttccttttttctctccggtttctcatcactccaaccaggcttcaacggaccacaccaaaatgccatctcaaatggaacacgcca

SEQ ID NO: 691505 - DNA, 104 bp, Homo sapiens
aaatacgtggttggagagctcatctggaattttgccgatttcatgactaaccagttgagaaagatcagtctaaagaaaaggagaagaaagtgaaaaaaacaatt

SEQ ID NO: 691506 - DNA, 98 bp, Homo sapiens
atttgagtcctgcagtgtaccacgaaaaatcaatgtcagcccaacaacttacagaaccttgatgctctgcacgaccaccttgctaccatctacccagg

SEQ ID NO: 691507 - DNA, 75 bp, Homo sapiens
tttgacagcaggaaaggagcgtagcacccaggcctccccaaagccagtcctgtgtcaccaatcaaaggaaaggaa

SEQ ID NO: 691508 - DNA, 105 bp, Homo sapiens
atttgaaatgatggagaaggatgagctatgacttgctaaacaatctgttgatccaaacgatcaaagatgttgctggagataaataggcagaaggaagaagaggac

SEQ ID NO: 691509 - DNA, 100 bp, Homo sapiens
tttaaaattcatgcttcaatatccaaagggataatgggattacagtgggcaaaacatcttggaaatgcagtcaaagttacaatcaatgacttgaatgaaa

SEQ ID NO: 691510 - DNA, 75 bp, Homo sapiens
tcaaacctgaaagaccccagttatggatgggaggaagcccttagtgtatacaaggaagcaattcagaaaatgcca

SEQ ID NO: 691511 - DNA, 100 bp, Homo sapiens
tgaccttgcttatcaccgagaggcagcagaagcactgcctggccttcaggtatcccatccagaccccacgagaggcctgttacggagacatggatggctt

SEQ ID NO: 691512 - DNA, 98 bp, Homo sapiens
aagaaaccgaccctgattacgaggatgtatctgtggcccttccaaataagcggcataaagcaattgagaattcagaaggcgacccaaataagtagcag

SEQ ID NO: 691513 - DNA, 113 bp, Homo sapiens
gtcagacgcagccgtagacaccagctccgaaatcaccaccaagggcgtgatggtgggcatgggtcagaaggattcctatgtgggcgacgaggcccagagcaagagaggcatcc

SEQ ID NO: 691514 - DNA, 75 bp, Homo sapiens
gccagggaaccctggtcaccgtctcctcagtggctttgaagcgtatgttgaatttcaatgtgcctcatattaaaa

SEQ ID NO: 691515 - DNA, 75 bp, Homo sapiens
tcttctccagcgccctggcctccctcaccttggacacctcgcttgggagcaggccgggctctcgccatgggtcac

SEQ ID NO: 691516 - DNA, 51 bp, Homo sapiens
ctcggaacccgtggtcctccgcttcatgaaaatgtttataggaggccttag

SEQ ID NO: 691517 - DNA, 97 bp, Homo sapiens
atacatgtgggagtacccaattgcaaagcattttgttcccaacatcacctttggtcaccctgtggtagaaagccttcgaaagcagctaggccaggac

SEQ ID NO: 691518 - DNA, 97 bp, Homo sapiens
ctctgacaggcattgatctaagtgtgtgcacacaatgttacagaatgtctgaaggggacagtgtgggagaatccgtccatgggaaaccttcggtggt

SEQ ID NO: 691519 - DNA, 75 bp, Homo sapiens
gttctggaagaagattatgatgagacctacattcctagtgagcaaggtttgacatctacaggaaggtgcccaagg

SEQ ID NO: 691520 - DNA, 95 bp, Homo sapiens
ctggtggagaagatgaactaatgagagcagcaggatcagatggtactgaactttttgatcagcaagatgagaagatgaagtgaatttatggattc

SEQ ID NO: 691521 - DNA, 75 bp, Homo sapiens
tgaaaactcatcctctgtaacatcttgtcaggctagtctttggatgggaaggagtccaatgtgctgattgctgct

SEQ ID NO: 691522 - DNA, 88 bp, Homo sapiens
cagagaaattcagaacctcaagcttttcaggcatcctcatataattaaactttggactaaatgctcttccttcagaggattatccggg

SEQ ID NO: 691523 - DNA, 100 bp, Homo sapiens
tcatggagccgctggggtcccttttgcctcagatactattttgaagaaaactacccctgagtgtggtcccacaggatatgtagagaaaatcacatgcagc

SEQ ID NO: 691524 - DNA, 100 bp, Homo sapiens
ttgttaaggattccaagtaactcttatttgataactggtggtctcaggtatgcccgaaatatttcatgaagctggtaaacctctataaaggtgcagtcct

SEQ ID NO: 691525 - DNA, 100 bp, Homo sapiens
attgtccaggcctgcagaggtgaaggggacatcagaaaagtgtgaagcatgagaagggttagaggcactgttgttggcttgaaaatggaggaaccacatg

SEQ ID NO: 691526 - DNA, 75 bp, Homo sapiens
tcaaacaattcctggacttcgattatatctgggtgttggcacccagccactattctgccaatgaagtacatcctg

SEQ ID NO: 691527 - DNA, 74 bp, Homo sapiens
ctcaataccctgttcccagagatgtgactccaaccgggaagactttgacccagcacctgtaaagagcaaatttg

SEQ ID NO: 691528 - DNA, 51 bp, Homo sapiens
tgaacgtctagagccttctaggcagcattgagacggggttttaccatgttg

SEQ ID NO: 691529 - DNA, 90 bp, Homo sapiens
gggagactgagcacttgctgcacggtgccagaacctacgatcacctcaagaagacacgggaggaagagcgccttaaacgcactatgctct

SEQ ID NO: 691530 - DNA, 100 bp, Homo sapiens
gattgcacccttgcacttcctggaggtgaaactgggcaagaggccccagcccgtgaaaagtgaggctgagggtaaaaagctgggattggtaggctgggtc

SEQ ID NO: 691531 - DNA, 100 bp, Homo sapiens
gccgaacaatgaagctcctgaagccgacctgggtcaaccacaatgttaatcagctgtgttcagcgaatacttatgaacagaaggctccagcagcagtaca

SEQ ID NO: 691532 - DNA, 51 bp, Homo sapiens
ggggtgtgcaaacccgagagaactggccactgtagtctgcagatcaaagct

SEQ ID NO: 691533 - DNA, 74 bp, Homo sapiens
ctcctccttcttcctcaactatctcgctgacacgcaggtaatattaacggctgctatttgaactattacttttt

SEQ ID NO: 691534 - DNA, 75 bp, Homo sapiens
ctcgccagcagccgtccggagccagccaacgagcgcggaaagaacacccggaaatgaaaggccaccaagaagaaa

SEQ ID NO: 691535 - DNA, 101 bp, Homo sapiens
cttcattggccacctacagaaacaaaatgtcaacaaattgatggacctcctgccccccgaggtctgcagtctcctgaacccagcagccatctacgccaaca

SEQ ID NO: 691536 - DNA, 98 bp, Homo sapiens
caacctttccctggtggtgcacggaccgggggacttgcgcctgaaattccgggtagatatgcctggctcaggcagtgcattcatccccaccatcaacg

SEQ ID NO: 691537 - DNA, 75 bp, Homo sapiens
ctgtcttcggtggactccttcggcagtccacccaccgccgccgcctcccaggtcgggaaagaggttaaagaagac

SEQ ID NO: 691538 - DNA, 74 bp, Homo sapiens
ccagcattggcctctgcagcgtggatctcccggccaggctctcagctgtcaggggcaccaccacgaggcgattt

SEQ ID NO: 691539 - DNA, 75 bp, Homo sapiens
gcaccgcggtgcggacccagcacgcctgggccgggggctgcagcatggcccataatgaggatcttacaactagag

SEQ ID NO: 691540 - DNA, 137 bp, Homo sapiens
gcactacaagggtcctgaagtcagttgttgcatcaaatacttcatatttggcttcaatgtcatattttggccatcactggtgcaagctatatttaacggagatcctgatgaagttcgagcactaatatttaagaaag

SEQ ID NO: 691541 - DNA, 100 bp, Homo sapiens
ccgtggaggcagaggtggcatgggccatgaagatggacctacagctaaaaaattaaagactgagcaagggggagcccacttcagcgtctccagtctggct

SEQ ID NO: 691542 - DNA, 102 bp, Homo sapiens
tggacgaccaggagaagctgcccttcaccgttgtgcatgaaagagagattcctctgaaatcacctccttttgtggctcgggagacgctaagggcctggcaag

SEQ ID NO: 691543 - DNA, 122 bp, Homo sapiens
ggatgggctgctggggacagctgctggtgtggttcggagccgcgggtactccaaagattcaggtttactcacgtcatccagcagagaatggaaagtcaaatttcctgaattgctatgtgtct

SEQ ID NO: 691544 - DNA, 100 bp, Homo sapiens
tttgaatatcgtaagcgcacgtttaaacatctcaaggaactttatattgctgttggaatatctggagccatccaacatttagctgggatgaaagacagca

SEQ ID NO: 691545 - DNA, 100 bp, Homo sapiens
cccggtaccaagaaggggagtgcccgcggcaggttatgatgtgattgctcaagcccaatctgggactgggaaaacggccacatttgccatatcgattctg

SEQ ID NO: 691546 - DNA, 100 bp, Homo sapiens
tgacctgaccatggacgacattcgaaggatggaagaagagacgaagagacagctggatgaacctgtaactgcaacctgcatgcccggcgctgccgcttca

SEQ ID NO: 691547 - DNA, 96 bp, Homo sapiens
tatggctcaaagaaagatgattatagttcttcgtaagtacatcttaaagctgtcaagatggttctagcagaccttggaagaaaaataacatcagca

SEQ ID NO: 691548 - DNA, 82 bp, Homo sapiens
tcagctcctggggctcctgctgctctggctcccagacatgggtccctcggcttcctgcctcggaagcgcagcagcaggcatc

SEQ ID NO: 691549 - DNA, 75 bp, Homo sapiens
acaaaggcattagtcctatcttgtaagggttacacatcattttggaatgactgtatatcatctggattacgtggc

SEQ ID NO: 691550 - DNA, 78 bp, Homo sapiens
gagtctctacttttatggaatcctgcaaagtgatgcctcagcttaaccagctcgaaaaagcagtggaagcagctcaca

SEQ ID NO: 691551 - DNA, 74 bp, Homo sapiens
ccgacttcgatgatcgtgtgtcggatgaggagaagtgaagttattgccagtggactgtgagagaaaaacagatg

SEQ ID NO: 691552 - DNA, 95 bp, Homo sapiens
cagcctcctgccagaactacttcctcatgattgtttcagatcagaagaaggaggaggaggaggaggcggcagcggcagcggcgatggctacagaa

SEQ ID NO: 691553 - DNA, 100 bp, Homo sapiens
ccctatggaagcagaagaagctgaggatgaagaagatgagacagaagagatgggtgatgaagaagttttctcctggttgaagtgtgcaaagggacagtcc

SEQ ID NO: 691554 - DNA, 82 bp, Homo sapiens
ccaaaggtctcgtacctctcagaggaatacctcaatagcattctccagcatgccaaggatttcaaggaatatcacagatccg

SEQ ID NO: 691555 - DNA, 83 bp, Homo sapiens
cgaagccttcaaatccatcaagctcatcaaaagtgatgagccctcctcttcagctaggaaaatgacggtgttcagaaagttaa

SEQ ID NO: 691556 - DNA, 98 bp, Homo sapiens
gggagattacacagaagcaaaagccttgatagcatggatttctgtgagctcactgacaaggagactggctttcacagaggtttgggttgggttcagtt

SEQ ID NO: 691557 - DNA, 121 bp, Homo sapiens
aacacacggtccacagctcatcatgatggacttggagctgccgccgccgggactcccgtcccagcaggggccacctacagatgctcctgcagtggacacagcagaacaagtctatatctct

SEQ ID NO: 691558 - DNA, 50 bp, Homo sapiens
gggcatcaccgtgaagcagaagaggtacctggagtacaagagggtcccta

SEQ ID NO: 691559 - DNA, 100 bp, Homo sapiens
gagaggggccgccccccccggacggacatgggctcctgaagttgcgccgctgccggtcgggggaagagacctgacaggtcacctcatcatctcaaggagg

SEQ ID NO: 691560 - DNA, 96 bp, Homo sapiens
cagagttcgaggtggtgggactcaccgctctggccagggtgcttttggaaacctatggtgtgtcagaaacttcctagtccccttgatattacagct

SEQ ID NO: 691561 - DNA, 87 bp, Homo sapiens
gcagaagatgaagctttgagtaacattgccagagagctgagtccagattggcaggtggactacgagtcatacacatggcggaaactg

SEQ ID NO: 691562 - DNA, 83 bp, Homo sapiens
cggcggagggagctgaccgaccgactccaggcgaatccacattcatctcaatggaaggatcctgccttaagtcaacttatttg

SEQ ID NO: 691563 - DNA, 83 bp, Homo sapiens
tctcgatggaaccaaggatgacagcactaattctaggctccgctgatcctctaaatagtgctttccatttgacctacaacatg

SEQ ID NO: 691564 - DNA, 100 bp, Homo sapiens
ctggaggcagggagactggggtggagacttcggagactgcagttgcagattgcagatttgaaggcagccaggcagcttgcgtctgaaatcacctccaaag

SEQ ID NO: 691565 - DNA, 83 bp, Homo sapiens
gtccctggcacgggctgtctgattctccttcgctgtggcgggaagatggccggatttgaagagtactgtggacaaactcatta

SEQ ID NO: 691566 - DNA, 75 bp, Homo sapiens
tcatggtgcggctcatcttcgagagggtctcactgtgtcacccagcggtggagtgacacggagtgtcagcggtgc

SEQ ID NO: 691567 - DNA, 82 bp, Homo sapiens
gcactccgcacctcggggacattattgcgcgtggaacggctgcttttggaaggtttggtgcacctcgatttggaggaagtag

SEQ ID NO: 691568 - DNA, 50 bp, Homo sapiens
agacggaaagagctacttgctgagccttggcccctccaccagaggaaggt

SEQ ID NO: 691569 - DNA, 100 bp, Homo sapiens
cgcagatcggcgcccagcaatcacagaagccgacaaggcgttcaagcgaaaacatgaccgctgagcccatgaggatctaaacgctcttcccacagcaatg

SEQ ID NO: 691570 - DNA, 100 bp, Homo sapiens
cgacgcatgagtggcaggcccttcagccagattctggaaaccaaaatggaggaaatgatgataagactaagaatgctgagaggaactatttaaatgtttt

SEQ ID NO: 691571 - DNA, 100 bp, Homo sapiens
cccgagtggaagtggttcatcgagcagaggctgctcatgttctccttcgtcaacgaccggtcaaaatgcagatcttcgtgaaaacccttaccggcaagac

SEQ ID NO: 691572 - DNA, 77 bp, Homo sapiens
atcaagatggctcttcatggaaatgcattgtcaggaactgtggctgcaccatctgtcttcatcttcccgccatctga

SEQ ID NO: 691573 - DNA, 101 bp, Homo sapiens
accagatgcttcgggacctcataaaggaaaggtgctggagaatctggtaaaagcaccattgtgaagcagatgaggatcctgcatgttaatgggtttaatgg

SEQ ID NO: 691574 - DNA, 87 bp, Homo sapiens
agcccctgtacttttggtggttggatcatttgaagtggtgtctacacttataaaataccatgcggagaccatcaagaatgtgcgcac

SEQ ID NO: 691575 - DNA, 100 bp, Homo sapiens
atcatatggctgtagcattcgtgctatccctgggggttgcagctttgtataagcctgatagactaaagcagtttagtgtggcaccaagacactttgaaga

SEQ ID NO: 691576 - DNA, 46 bp, Homo sapiens
ccgagtcaacaaccgcttcgagctgagtctcactgtcgcccaggct

SEQ ID NO: 691577 - DNA, 100 bp, Homo sapiens
tgttacaagttggcttatgagtggaacatggctagcaggaatgcttactgttgcgtggttcgttattaacaggcattgggatcccgtggcagttgcagca

SEQ ID NO: 691578 - DNA, 100 bp, Homo sapiens
tgacggctccaccatcgtccccggcgagcagggagcggagtaccagcacttcatccagcagtgcacagaggtctcattgccagcagtttcacggaaaccc

SEQ ID NO: 691579 - DNA, 97 bp, Homo sapiens
gggcagcggagccaagctgacccggcgagcggagccggggctggagagcggcgaccactgcggatctcggagtgcctggtgaagaatgtgatgggat

SEQ ID NO: 691580 - DNA, 100 bp, Homo sapiens
gtggagatcgtcccgcgcctgccgtctctgctttctatccgtcaagatgataaagtcgtgtgcccgagaaccaaagaagtcttccacttctcacaagccg

SEQ ID NO: 691581 - DNA, 82 bp, Homo sapiens
ctaactaacacggtttttattgacagagctctgatagttgttccttgtgcagaaggcgataggaagaactatgcctctgcca

SEQ ID NO: 691582 - DNA, 75 bp, Homo sapiens
gaggagaataagaaggagtatgtacacctggtatgccagatgagaatgacagatgtatcggcaagcagtgtaaac

SEQ ID NO: 691583 - DNA, 75 bp, Homo sapiens
ctccggggcagctccggcgggcggtatcacgctcattgctgtggatgaggctcactgtatttctgagtgggggca

SEQ ID NO: 691584 - DNA, 88 bp, Homo sapiens
acgatggttctgcttaacaagcagagagctcacctaccacaaacagccaggcaacatttcatttgttgcatttccagtttccaatacc

SEQ ID NO: 691585 - DNA, 74 bp, Homo sapiens
gtgtgcgtcatgcacttgaagcacctgaggaccctgctgagccctcaggtggtgggtgtctctgctgttctggg

SEQ ID NO: 691586 - DNA, 100 bp, Homo sapiens
tatgtaccaaatacatttataataggagtccagctattgctgctgttggccaagtggaggtgactggtgatgaatacaatgtggaaagcattgatggtca

SEQ ID NO: 691587 - DNA, 144 bp, Homo sapiens
cacaattctctttctcttcatattttctcacatatacaacacgattcttctaatggatgggaacatggggcattgcttctatgacagtgccagtgtacattgcggaggtctcaccacccaatttaagaggccgattagtcacca

SEQ ID NO: 691588 - DNA, 75 bp, Homo sapiens
catggagcgatttcagcttcactatcagtaagcaatggcatcaaccattctcctcctaccctgaatggtgcccca

SEQ ID NO: 691589 - DNA, 101 bp, Homo sapiens
actatgtgaagatacaagacacaaatgtaacttctgaggacaaaaaggttgcccccaagtttcctggcagtgtgtgatactgaggaggtgagcttgtttct

SEQ ID NO: 691590 - DNA, 49 bp, Homo sapiens
ctggggacgccgccctcccggtacctggtgtgtaagaggaagctggaga

SEQ ID NO: 691591 - DNA, 75 bp, Homo sapiens
accaaacattccgcataaacgaggtggtcaaggaatgtcaggaactgtggctgcaccatctgtcttcatcttccc

SEQ ID NO: 691592 - DNA, 50 bp, Homo sapiens
gaaaggactgttcttgaggtattcagggcctttgccaagaagcagcagca

SEQ ID NO: 691593 - DNA, 139 bp, Homo sapiens
ccacgccagccgcaccatgccgctcctaagcctgcacagccgcggcggcagcagcagtgagaggtcgcaatggaagaagagatcgccgcgctggtcattgacaatggctccggcatgtgcaaagctggttttgctgggg

SEQ ID NO: 691594 - DNA, 82 bp, Homo sapiens
gcactcccggccgggtggtgggcgcatatcctgggtagcctctaggaagcgctagacacattccaaggacaaaatgatgaga

SEQ ID NO: 691595 - DNA, 74 bp, Homo sapiens
gagaatccactcaccggagagatgtcgagtgacatctatgtgaagagtgccaggcggtcatcgagagttcctac

SEQ ID NO: 691596 - DNA, 83 bp, Homo sapiens
attgttcgggcaagacagttgaattatactattggcgaggaagtgggaaaactcttgcctttgccatcccaatgattcatgcg

SEQ ID NO: 691597 - DNA, 90 bp, Homo sapiens
cctgcctggtgctggtgctcaacacgcagccggccgaggaggggtcagtcctgcatcaagaccttctccaggaacgcccaccagccccag

SEQ ID NO: 691598 - DNA, 98 bp, Homo sapiens
gtattgtgctgtatatgaatggatcaggagaaggtctggggaaaataatccagagatttccacagaaggactgggatgatacaccttttccacaggga

SEQ ID NO: 691599 - DNA, 110 bp, Homo sapiens
ggattatcctgcatcagcttcaatgtcttaatggttcataagcgaagccatactggacttcctccgtcaggcagctggcaggacctgaaggatcacatgcgagaagctgg

SEQ ID NO: 691600 - DNA, 82 bp, Homo sapiens
aaagcaacgttttgagccacaactgtcacaactccagatgcagcagcttttttatgagaattacgagcagaacaaaaagggg

SEQ ID NO: 691601 - DNA, 98 bp, Homo sapiens
aaaactggagagcttcatcaaaaatagtgatagctttgataacgtggggtagagcagcggctgccatgctcttctgtggcttcatcatcctggtgatc

SEQ ID NO: 691602 - DNA, 100 bp, Homo sapiens
aaaatatgacaaatggaagcttcaggagctcaggcaatttgtaaaaagcaggtggtcctcccccgggcggcggtgccccctggcaccttcgaaatgtcct

SEQ ID NO: 691603 - DNA, 100 bp, Homo sapiens
tgttggcattgagtcaaaccatcttctcccaaggtttttgcaggtggatcatccatgccatggagtatgaacttcagatccgtggcggagacaagccagc

SEQ ID NO: 691604 - DNA, 100 bp, Homo sapiens
gtcccatcactccaaggagagaagggctacaccaagtccattgatatttggtctgtaggctgcattctggcagaaatgctttctaacaggcccatctttc

SEQ ID NO: 691605 - DNA, 83 bp, Homo sapiens
cagttcctccgccaagcgcggccgccgcccccgcctcaggagcatcagatccatgctgctgctgactcggagccccacagctt

SEQ ID NO: 691606 - DNA, 100 bp, Homo sapiens
cagaaaattttcagagacaagcagtgatagcagaccccacgttagctgaaatgggaaaaaacttgaaggaggcagtgaagatgctggaggacagtcagag

SEQ ID NO: 691607 - DNA, 100 bp, Homo sapiens
aatctcttcctgaaaattgatgctactcaggtggaagtgaatccctttggtgaaactccagaaggacaagcccagctcaacattggcaatgtgctccctg

SEQ ID NO: 691608 - DNA, 96 bp, Homo sapiens
tctcagtatgacaaggaagtcggacagtggaacaaattccgagacgagtctaccatggctcaagaatctcccaaaaattcagcagcagaaattcca

SEQ ID NO: 691609 - DNA, 74 bp, Homo sapiens
gttccatcagctcagccaggtcttagtgcgatgacatggatcctgcggacaaaccgccccagggcgtacctagc

SEQ ID NO: 691610 - DNA, 100 bp, Homo sapiens
cttgcggaaaggatgttggcggtccctgtgacctgtggagacacggccagatctgccctccagcgtggtgtccctcgtggccgttcacccctccaccgtc

SEQ ID NO: 691611 - DNA, 101 bp, Homo sapiens
gacactgcagctcggccagagtggtagaaatgtcctggtgtagatggattttaactaggaattacaaagccctcagcaaaggttccaagggcagtacctca

SEQ ID NO: 691612 - DNA, 90 bp, Homo sapiens
gtttttcctaagctcaactctagccagctaggttcctggtgctttggggcttttccttccctccatgagaaagaagccagctctgtctga

SEQ ID NO: 691613 - DNA, 98 bp, Homo sapiens
tgaaagcactgctgcttggcatacttcttgtagtaaccctgtcaccgtctgctttttgaagctaaactaggtggttccaggaaagaaatcactgaaca

SEQ ID NO: 691614 - DNA, 82 bp, Homo sapiens
atttgaagtctgtgtcaaacatccatatcataagtggaattttggagatattcaaaggttttgggatttgagattgacgcgg

SEQ ID NO: 691615 - DNA, 75 bp, Homo sapiens
ggcaaacaaggactctctgtataagccatccagtccaatggatcagatgggcaagatgagacctcagccatatgg

SEQ ID NO: 691616 - DNA, 100 bp, Homo sapiens
gccagagcctgcagtcccacacggcgcccagacaccatgtcacaaccctccagaactgacgttggcaggaagtagagactttgttgcctgtgtcccccat

SEQ ID NO: 691617 - DNA, 99 bp, Homo sapiens
agcttcatcctcggcggcggtggccgctagctccaaggaagaatttggtgttcacttggcagaactgactgtagatccccagggggcactggcaatccg

SEQ ID NO: 691618 - DNA, 74 bp, Homo sapiens
atcaatggtatccttgcagatgaaatggtgtcattccacacatccacaaatctctgattgggaagaaaggacaa

SEQ ID NO: 691619 - DNA, 90 bp, Homo sapiens
cttaaaaagcagtctaaacctgtgaccacccctgaagaaattgcacaggtacggttcctggagcagcagaacaagatgctggagaccaag

SEQ ID NO: 691620 - DNA, 100 bp, Homo sapiens
ggagtacccccacctgaagccagcccgctaccgccgtggcttcatccacaatggcatcatgtttgggagagcccatggtgactgcgtgagtggagcccag

SEQ ID NO: 691621 - DNA, 100 bp, Homo sapiens
ggatgtcctgcgtgtcgcagagcaccgggcagatccagtgcaaagtctttgactccttgctgaatctgagcagcagctggctaagagtcttgggcaggct

SEQ ID NO: 691622 - DNA, 75 bp, Homo sapiens
tgaatccttgcagcactaaaatttgccgccaccggcaactaacctatgaccttctgacctctgaactcttcaccc

SEQ ID NO: 691623 - DNA, 75 bp, Homo sapiens
ctgagtagagacgggacatctgtgcagccctgggatgtgatggtgcagtagacattgttgcaatcatgatcggca

SEQ ID NO: 691624 - DNA, 76 bp, Homo sapiens
cgtagatggggtggcagtgaccctcacttcctgctgtatccccagacccaaagggttccgagtctgaggaagacat

SEQ ID NO: 691625 - DNA, 96 bp, Homo sapiens
cacagacaaagccaacagcggcctttctatggaactgtggaaggtgcatcagtgaagaaatggaccaatgtgtataatcatggaatctccttgcta

SEQ ID NO: 691626 - DNA, 82 bp, Homo sapiens
cccgtggccgctgtccaggagctctgctctcccctccagccttcacagttgttgatcacatagcatggtcatccactcacag

SEQ ID NO: 691627 - DNA, 101 bp, Homo sapiens
ggctcgccccgccccacacgacacgcctgccactcctgcccccaggtgcaagttcttcagtctgactgagacaccagaggattacactatcattgtcgatg

SEQ ID NO: 691628 - DNA, 96 bp, Homo sapiens
ctgagctaaacatctaactagaagggatacccttccatttcaaagaacagaatgctaaggaagctgtggcaagaacgagtctttgggaacgtggtc

SEQ ID NO: 691629 - DNA, 50 bp, Homo sapiens
agagggatccttcacccgtgtctgggccgagaactactggtggcgtggcc

SEQ ID NO: 691630 - DNA, 98 bp, Homo sapiens
acctgacagcatctattacctttgccttggaatacaggagaattctccactttaccaatacttacaggatctgggacacacagactttgaaatatgtt

SEQ ID NO: 691631 - DNA, 101 bp, Homo sapiens
gagagttgttctgttccctgcctttgtgacccggaggagcttttggggtgcgtcaagcccctggcctgaggcagcgctaatcttccagtaccaacaattgc

SEQ ID NO: 691632 - DNA, 75 bp, Homo sapiens
gaacggtgcttctatggcaggatatggacaaacagaggatgtgcagatgctcctgcgctttggggcagatcccac

SEQ ID NO: 691633 - DNA, 75 bp, Homo sapiens
gctcctttgtcttctgggctttcgtcgcgagatggaacgctggattattcagctgattgaaggcaaagcctctgc

SEQ ID NO: 691634 - DNA, 75 bp, Homo sapiens
tctcctccgccggtcccatacggaaagaaaccttgactggttccccaggatgagagccatgtcattggtcagcag

SEQ ID NO: 691635 - DNA, 82 bp, Homo sapiens
ggcgccttcacccccgtggtgcggcagcgcacgctgcagtccagaaccacgtgaatgttgagggggcgacacacaagcaggt

SEQ ID NO: 691636 - DNA, 90 bp, Homo sapiens
accgaatggacgagttctcccggggaaatgtaccgtccagcgagttgcagatctacacttgaacagccctgtggcccccacagcccagcc

SEQ ID NO: 691637 - DNA, 100 bp, Homo sapiens
gacaacttggaccggatcggccagctggccaacatagccgaggtagaggtctccatccctgccaagctgcacaactccctcattggcaccaagggccgtc

SEQ ID NO: 691638 - DNA, 100 bp, Homo sapiens
ttgcctgccccgctgagcgcagcggccacgtagccgtcagcgacgggcgccacatgttcgtctggggcggctacaagtgggctcgggatgagtttgaagg

SEQ ID NO: 691639 - DNA, 100 bp, Homo sapiens
cttctttgccttcctacaaacaggaaattacaaagaggccaagaagatcattgaggcagtagaagaactgtttaacctgatgcagctgtttatagctcag

SEQ ID NO: 691640 - DNA, 97 bp, Homo sapiens
ttgcagctgattaaggactatcgggagaaagtggagtccgagctgagatccatctgcaccacggtgctggtagtaaacctattgatggcaattttgc

SEQ ID NO: 691641 - DNA, 98 bp, Homo sapiens
gggcctgggcaggcggagcagggccttggaccccgcggcgcccctcggcctcggagcaacgagcgcagcgccggtgagcgagtgctgtgctttcatgg

SEQ ID NO: 691642 - DNA, 83 bp, Homo sapiens
gggccgtggaaaccgcaaccgagggaaccgaggcagcggaggtggtggtggaggtggaggtactccaaagattcaggtttact

SEQ ID NO: 691643 - DNA, 98 bp, Homo sapiens
tgttctgccggcgcctgtccggacccgggcccctctccgctttcggccggcctcgggcaccgggcttctggaggaccagaggagcgagagcagcaaga

SEQ ID NO: 691644 - DNA, 101 bp, Homo sapiens
ttttggagattttagccctgatgaattcaatcaattctttgtgactcctcgatcttcagttgaggtgaatgaaaactttgccattgatttgatagcagagc

SEQ ID NO: 691645 - DNA, 49 bp, Homo sapiens
cggaaatgtagccagtggggccgccaggatattgtacctgtggatgcat

SEQ ID NO: 691646 - DNA, 100 bp, Homo sapiens
cacggcctttgtccttgctacctctcagagtcggtatttcttcaatagatatatctcaaagcagaagctggctaacatcatcctggaacttcaattttcc

SEQ ID NO: 691647 - DNA, 101 bp, Homo sapiens
tgactgatgagatcagacgaaaagtgtggcccaagctcctcaatgtcaatgccaatgacccacctcctatatcaggtgctgacctggaggggaagcggcag

SEQ ID NO: 691648 - DNA, 100 bp, Homo sapiens
tgcacttcgtgcccgaaacgccgaatataatcccaagttgtgaagttatccgagactggaagacaggagagtccctctgttacgcttttattgaatttga

SEQ ID NO: 691649 - DNA, 75 bp, Homo sapiens
ggcctccggcgcagcccggaaatgtccggcaagatcgagaaagcagatcaccacgcttattaatcataaagataa

SEQ ID NO: 691650 - DNA, 90 bp, Homo sapiens
caaattcgtcattggccacttaaagggtcccctcctaaccgcaagcgtcctgctaacgagaaggcaactgatgactatcattatgagaag

SEQ ID NO: 691651 - DNA, 82 bp, Homo sapiens
catgaggccaaaggcagttgtattgaggcagctcagatcacgggcaaaaaagcgtgtgagcggatgaaagatgccatcagaa

SEQ ID NO: 691652 - DNA, 100 bp, Homo sapiens
ctgagtggcgtgtgtattccatgtgaggggaagggtccaacagtcctggtcattcagactgcagttccccagatttgagagggaagatctgatctcctag

SEQ ID NO: 691653 - DNA, 74 bp, Homo sapiens
ccccgagcactgtggccgaggcccacctgctgacatctacctgccagctctggcaggctgccctgagcacgctc

SEQ ID NO: 691654 - DNA, 82 bp, Homo sapiens
caggcggtgacagagtggagccatggctagagtcaccacgttctgcgcttttccgagtcggacatatgagcagcgtggagct

SEQ ID NO: 691655 - DNA, 82 bp, Homo sapiens
ggcgagggctccacgtgcagcgtctctccgggcctgcacagctgaccacagttgggaaacgttgctgtctttggattcagga

SEQ ID NO: 691656 - DNA, 50 bp, Homo sapiens
ctgcgctcgcgcccggatccctcagaagtttccaagggtcacttgtgtct

SEQ ID NO: 691657 - DNA, 82 bp, Homo sapiens
gaacccgccaatgctggggaacggaaaatgagggagttcaactctggtgatgagatttccatccatgctgactttgagaata

SEQ ID NO: 691658 - DNA, 101 bp, Homo sapiens
cctggggctgcctgccgggcggccgggcgcggcgagcccagatgtgtcttgctgaatcagggctctcttatccctgccatcgacttacagtgggaagaaga

SEQ ID NO: 691659 - DNA, 75 bp, Homo sapiens
cgggcggagagaactcagcgaggattctgaggaacggcagagtcgaaacaaacaatgagggcgaaccagtttctt

SEQ ID NO: 691660 - DNA, 100 bp, Homo sapiens
tttaaattcatcattcctaatgttgtaaaatacagcccgaactgcaagttgcttattgtttcaaatccaggtcctcaaaggcttcccttccctactggtt

SEQ ID NO: 691661 - DNA, 90 bp, Homo sapiens
tgcatccaaccgaggcaactgtgtcatcaggagatgacaagtatgggcggaagatcattgtgtttagtgcctgtcgaatgccccccagcc

SEQ ID NO: 691662 - DNA, 100 bp, Homo sapiens
acacccggagccgcagtctcagcatgaacttgggaatgttttcttaaaattcaaactggcgatggaatatgagaggagccctctggaaagaaaaggacag

SEQ ID NO: 691663 - DNA, 100 bp, Homo sapiens
tttcagatgaaacattcggatcaaatattccaaagcagtttgtgcctgctgtagaaaaggactcagagaccagcagatgtgatatttgccaccgtccgtg

SEQ ID NO: 691664 - DNA, 73 bp, Homo sapiens
cgggatctcaggtcctcgggggcggcggccacgccaaggacgggatctggagtgggagagcaggatgggggac

SEQ ID NO: 691665 - DNA, 83 bp, Homo sapiens
cggcatctgctacctttgagagtgccaggtttttagaacttcagccataaaaatgggcagaattttccttgatcatatcggtg

SEQ ID NO: 691666 - DNA, 100 bp, Homo sapiens
cacaggacaccgggatgcagtgtcgacgtgaaacggagctatgcgagcattgggaagagcataccaggcagagggaactgccactgcgagggcccctggg

SEQ ID NO: 691667 - DNA, 100 bp, Homo sapiens
tcaagtttgcacgccacgtggagcccggcaatgccgccatccgggagaagctggcctgggccaaggatcacagtcaccttctatatagcaccatccccag

SEQ ID NO: 691668 - DNA, 82 bp, Homo sapiens
ctgcggtccgtgcggaggctgagccggccgcgggcgcgaccggaggcagctctaagcgaaagacatgaggcctcagcctgaa

SEQ ID NO: 691669 - DNA, 82 bp, Homo sapiens
tgaacaaagacaacattgttcctggaacgccctctttttaaaaaaggatcaaaatacttgctggatggtggactcagagacc

SEQ ID NO: 691670 - DNA, 82 bp, Homo sapiens
gatgccaccaatatgccagctgtcaaagccatcatatatcagtatatggaagaggcaacaagattgacctggctgaaaggag

SEQ ID NO: 691671 - DNA, 90 bp, Homo sapiens
tttgccaaacaccctcgacttggttacctgcctgtccagacagttcttgaaggtgacaacttagagacggtgactgtcgttcctacagtt

SEQ ID NO: 691672 - DNA, 97 bp, Homo sapiens
gatcgcatggcagaaagggggcatctttaagctggaaaacctcatgctggacaaagatggccacatcaagatcactgactttggcctctgcaaagag

SEQ ID NO: 691673 - DNA, 100 bp, Homo sapiens
ggcgatgtctccgccgcatggagcggctcaggccggagcctggtaccgtcgaggagtgatttgggccccgatgttggctatgaagctattggtcttgtgg

SEQ ID NO: 691674 - DNA, 75 bp, Homo sapiens
ctcggcctcggagcaacgagcgcagcgccgattgtctaaagccccaggaaaaatggtggaaaattcaccgtcgcc

SEQ ID NO: 691675 - DNA, 98 bp, Homo sapiens
tggttgttggtagaatgttacatgtatcgaagaattcatgaagcaattatccagaggtgcactttacaggtccccgatgaaccaagagaaccctccac

SEQ ID NO: 691676 - DNA, 90 bp, Homo sapiens
ccgcccagtgggcctggagcagctgcggcggctcggggtgctctactggaagttgggtatccctggtcagtaagaattatgagattgaac

SEQ ID NO: 691677 - DNA, 114 bp, Homo sapiens
gggcattcccgacggcccgcccctcaaggacaacctcggcctgagacaccggaggaccggggggatatgagactttctactcggaatatcctgagtgttgcgtggatgtaaaac

SEQ ID NO: 691678 - DNA, 100 bp, Homo sapiens
gagggccacagtgggattaaaaagaccactgaggagcaggtgcaggtcccaggtgtgacaccttcagcaggtctcagggaagatggcagccctaggggac

SEQ ID NO: 691679 - DNA, 101 bp, Homo sapiens
aatcccagaggaaactgacggagacgcagatgtggacttgaaagaagctgcagcggaggaaggcgagggctccgtaggcaccaactgcaaggacccctccc

SEQ ID NO: 691680 - DNA, 100 bp, Homo sapiens
cgagaggaggccgtccagcagatggcggatgccctgcagtacctgcagaaggtctctggagacatcttcagcagtatttgattttcatcaagcagctgat

SEQ ID NO: 691681 - DNA, 97 bp, Homo sapiens
ccatggcgtttggcaagagtcaccgggatccctacgcgacctccgtgggccacctcatagaaatgcactcggtgatggaaagagagccactattctg

SEQ ID NO: 691682 - DNA, 97 bp, Homo sapiens
gcttgtccctgtttcgccacagttcctaccttatgagctcggttttcttatgcttataagagtggaacaggtcgtccttggtggaaggaaccatgaa

SEQ ID NO: 691683 - DNA, 50 bp, Homo sapiens
taggagctctgctcaaagccagacggaacatcatttacagcgagcaattt

SEQ ID NO: 691684 - DNA, 100 bp, Homo sapiens
ctctgaaggtgatcaggctgcaggaagaagaagggacacctttcacagctatcagggaaggtgtaatcctgagagattcacatggtgttgcacaagtacg

SEQ ID NO: 691685 - DNA, 95 bp, Homo sapiens
gtatttgaagataagtttaggccagacatggagtctaaagtagggggaaccaagcctgctggtggtgattttggagaagtcttgaattcggctgc

SEQ ID NO: 691686 - DNA, 100 bp, Homo sapiens
aaacattcaagaatgagagcgagaacacctgtcaagagattgccatctgccccaacaaccatgaggtgcatatctatgaaaagagcggtgccaaatggac

SEQ ID NO: 691687 - DNA, 90 bp, Homo sapiens
cttcgaggaggtcatgaaggacctgagcctgacgcgggccgcgcggaaaaggtgtgagcggtactgggcccaggagcaggagccactgca

SEQ ID NO: 691688 - DNA, 50 bp, Homo sapiens
attgctttgaaagcaaggaagtctggttcttcacacacccccattcggcg

SEQ ID NO: 691689 - DNA, 100 bp, Homo sapiens
agcatggggctaactccagaatcccccattggtagcctttccagtaaatatatgactcagggaaaagcctcagcgaagaggacccagcaggaatcatgag

SEQ ID NO: 691690 - DNA, 90 bp, Homo sapiens
cgagcctagccgcctggccttcggcatttgcaggcagcattaggtggtctcttcagtcagcctacacaagctcctacccagtccaaccag

SEQ ID NO: 691691 - DNA, 50 bp, Homo sapiens
ggatttaagcactgctgcactttatgaggacagttcgtgtttggttaaag

SEQ ID NO: 691692 - DNA, 100 bp, Homo sapiens
cttgtaggaggagaagttggaggcttggagtttggcaagttaccatttggtgcctgcgaagatcctattagcactgttgcaagaattcaattccgtcttc

SEQ ID NO: 691693 - DNA, 99 bp, Homo sapiens
cagagacagtgcctgccttttcagagcgtacctgtgccactgtcaccattggaggaatgggactcagaagaagatccttgacattgccaacatgctggg

SEQ ID NO: 691694 - DNA, 98 bp, Homo sapiens
tagaggtagacggcatcaaagtgcggatacagatctgatcatgaatcggttcagtggtgttatgacaacttcattaactacaggtccctgatgtccgc

SEQ ID NO: 691695 - DNA, 100 bp, Homo sapiens
tcaagaaacccaagctgctgaggttggacacgagttgccgctggttgtccaaatcaacaaccaggtcgtccagctcctgctgaagcctgttcttggtctt

SEQ ID NO: 691696 - DNA, 103 bp, Homo sapiens
aaggagagagcccgagaggagcggccagaggagacggagaaggccccgccctccccggagcagctgccgagaggtaccccaagaagctagtgcagacttattc

SEQ ID NO: 691697 - DNA, 100 bp, Homo sapiens
ttcaggaccccaacttctgccagtgagagcactaaatgaagtcttcattggggagagtctgtcatccagggacatcaaagacgtcagactggatggcgag

SEQ ID NO: 691698 - DNA, 75 bp, Homo sapiens
taaaactgtcacttcaagtacagaaaagggcttgattggtcttcccagagtttgctgctgcccattcaaatttag

SEQ ID NO: 691699 - DNA, 75 bp, Homo sapiens
gaatacgtgcccactgtgtttgaccactatgcagagatctgaaactggacaatgtcctgttggaccacgagggtc

SEQ ID NO: 691700 - DNA, 90 bp, Homo sapiens
tcaacgttcacagcaagctcaagctggcccagtttgacctggcctttgtcgtccgctacaagcctgatgagcagccctcactgatgccac

SEQ ID NO: 691701 - DNA, 50 bp, Homo sapiens
ggagaaaatacggcattgctaggaactgtggctgcaccatctgtcttcat

SEQ ID NO: 691702 - DNA, 100 bp, Homo sapiens
attggggaaaaatccagagaccccctgaagattcggactggaatgtcacgtggaataccagcaaccccgacttcaccaagtgctttcagaacacggtcct

SEQ ID NO: 691703 - DNA, 107 bp, Homo sapiens
agccctgcgagaggcagcagcggagacgcggtgctcctcgggcgccaagcgacaatgcagatcttcgtgaagactctgactggtaagaccatcaccctcgaggttga

SEQ ID NO: 691704 - DNA, 100 bp, Homo sapiens
cactctgttaaagctggtctgttctaactgagggtgataaaagaaaatgtggctgaagttacccgaagttcagcttgcagtgtaattcagaagagttaag

SEQ ID NO: 691705 - DNA, 88 bp, Homo sapiens
gcgaacgaccaagagggtgttcgactgctagagccgagcgaagcaagtccattggaatattaagcccaggagttgctttggggatggc

SEQ ID NO: 691706 - DNA, 75 bp, Homo sapiens
ccaaatattatggatcctatctgaaggatggtgatgggaatctttgcaaattgtatcttctgtttgaaagtgaag

SEQ ID NO: 691707 - DNA, 100 bp, Homo sapiens
cgggactgaacaccgcacaggcaggaggcatggccaaggatcccaaaatggctgggcgaaaacttgctctaaaaaccattgactgggtagcttttgcaga

SEQ ID NO: 691708 - DNA, 90 bp, Homo sapiens
atgaaatctacaaatacgacaagaaacagcagcaagaaatcctggcggcgaagccctggactaaggatactcttccaacccaagaggaga

SEQ ID NO: 691709 - DNA, 85 bp, Homo sapiens
tgattttgaagtcatttcacatcgaagccatgatttaaatatcggcgttaaggcctcaggagtgcaagtagctgatgaagtatgt

SEQ ID NO: 691710 - DNA, 98 bp, Homo sapiens
gggaatcgcaaggctcttccctgaccattttctactgtccctgcgcgaggttccagtacaatggtcagatatggtcactttgaaagccaggatgacaa

SEQ ID NO: 691711 - DNA, 100 bp, Homo sapiens
caaagcctttgcttcagagcaggaatgctgcggagtgacagttcatttagattctttgtattcttcttcgtctatatttgtcagtttgctgtacatgtac

SEQ ID NO: 691712 - DNA, 118 bp, Homo sapiens
ctcgatcttgggacccaccgctgccctcagctccgagtccagggcgaggtgtcgtgaaaactacccctaaaagccaaaatgggaaaggaaaagactcatatcaacattgtcgtcattg

SEQ ID NO: 691713 - DNA, 100 bp, Homo sapiens
cgactgccgaggaacgagagcgcgaagctaaggaaaaagaagtgtgactactggatcaggacttttgttccaggttgccagcccggcgagttcacgctgg

SEQ ID NO: 691714 - DNA, 98 bp, Homo sapiens
tggcggatggcccccggtgcaagaggcgcaaacaagccaatcccaggaggaaaaacgtcattgaagtcaacaagagagacatagtcttcctggtggat

SEQ ID NO: 691715 - DNA, 90 bp, Homo sapiens
gtcggagctgggcgcggagcccctcacagtgcaggctccatggtccccttctcgatgcgcatcttgcacgcggagcttcagcagtacctg

SEQ ID NO: 691716 - DNA, 100 bp, Homo sapiens
agatgctagagcatcgagaagttcgtgatagacaccacagtcttggcggccgggagaacaagatgcctattctcatttccaagatcttcaagggattggc

SEQ ID NO: 691717 - DNA, 100 bp, Homo sapiens
tgtcatccttgcagacctcaacctctcagatccaggtccagagagcatcgcagacatcgatctcgctccatgtcacgtgaacgcaagaggagaactcgat

SEQ ID NO: 691718 - DNA, 100 bp, Homo sapiens
catttgaagaaaattccttcttggaacaatttatgatagagctggtcctatagtacccctcctcaggaatgtctccccagtgcaaggacaaagactgaag

SEQ ID NO: 691719 - DNA, 114 bp, Homo sapiens
aatcatggtgcagaaataccagtccccagtgagggtgtacaaatacccctttgaattaattatggctgtggagataagtaattaacatttcgaaacaggaaatgaaaggattta

SEQ ID NO: 691720 - DNA, 75 bp, Homo sapiens
ctacttgcagcatattacctatcaggagaggagttggcccgccacaataaactgttgcagcagatgctcaaacca

SEQ ID NO: 691721 - DNA, 75 bp, Homo sapiens
tggaactgtgtttgggagcctcatcattggttatgccagaaacattattccatcatttgtgttgatggatatcca

SEQ ID NO: 691722 - DNA, 90 bp, Homo sapiens
gtgggtattgctgcggctggtgcgtcgtcgctctagaaccacgaccatgcctgcatcgcctgtcggatcatctatcggtcagacgagcac

SEQ ID NO: 691723 - DNA, 100 bp, Homo sapiens
caaatgacattcttcggctgtttgtggctctgcagggctgtatgacattcactactttcactgcctaagaatcctggaccttctcaaaggcacagaggcc

SEQ ID NO: 691724 - DNA, 75 bp, Homo sapiens
tttgtatattttgaaaatgtagatgatgccaaggaaacaggtgctctagttcacagctataggggaacaggtgga

SEQ ID NO: 691725 - DNA, 101 bp, Homo sapiens
ccagagggagagtcaaggcaattctttggttgctaaggtactccaaagattcaggtttactcacgtcatccagcagagaatggaaagtcaaatttcctgaa

SEQ ID NO: 691726 - DNA, 90 bp, Homo sapiens
cctttatatagaagggagagtagatcctcgttcctagctgcctgccagcgtcctcggcccggccctgaggatggacccaggagatcccgc

SEQ ID NO: 691727 - DNA, 75 bp, Homo sapiens
ccttgagcctgtcccaagccctggtgccaggtgtccatccccgtgctgagctccaaagacaacaggccctccctc

SEQ ID NO: 691728 - DNA, 90 bp, Homo sapiens
tgctgacctcggtttcctggacccattccgactcagggaagaaggagaaagggccaacccctgaagaagcaatacagaaactgaaggaga

SEQ ID NO: 691729 - DNA, 83 bp, Homo sapiens
ccaaagaggatagatttatacttggcactgttatctgctgtttctgcttcaaaatcatctcccctgccccacaaacatgaaag

SEQ ID NO: 691730 - DNA, 100 bp, Homo sapiens
attggtctaaacttgatccaaagacaatgaaggcatcgccgaatggaggctgtgcgactgcgaaaagagaaccagatctacagtgctgatgagaagagag

SEQ ID NO: 691731 - DNA, 98 bp, Homo sapiens
tcctggaagtgttggcggaggaagataaccctccttcctccacctcacaaaaactcacaagctgcaacccttctgatgtccactcccacacaaaccag

SEQ ID NO: 691732 - DNA, 98 bp, Homo sapiens
cgcgatccccgggacttaccactgaataaatccagtccagcgtgcgacgacttactggcttcatgggtggtgacttcacacgccataatggcactggt

SEQ ID NO: 691733 - DNA, 100 bp, Homo sapiens
gaccggagctgttcctattcggccatctttgctcctccctgcaactaactccattcttaattgagcaatggtggaacaaagcggcaaaagatatcccatc

SEQ ID NO: 691734 - DNA, 75 bp, Homo sapiens
aactaccaaatgggcgagacacacctgcactcttcaacttcaccactcaaggcctctataaaaccaaaatgtggg

SEQ ID NO: 691735 - DNA, 75 bp, Homo sapiens
ggcactgctgctcctgctcctggtagccgctggccggcgcgcagcaggggctttgaccacgacctttgaagagct

SEQ ID NO: 691736 - DNA, 75 bp, Homo sapiens
aaaatccagagttctatgatgaggaatttcgtgaggatatgccctccattcttgctgatgtattctgcatattag

SEQ ID NO: 691737 - DNA, 90 bp, Homo sapiens
cagatatagaacatttcttttatcacactttggggccatttggatcacacgatgttttttcaagattttagaccctttctaagtagcagt

SEQ ID NO: 691738 - DNA, 51 bp, Homo sapiens
cagcttttacagaatcctcctgctggaaatgaatgttccattgaacagatg

SEQ ID NO: 691739 - DNA, 140 bp, Homo sapiens
cctgtctggagcaaggaaaagagccctggaatatgaagagacatgagatggtagctaaacatttagctgttatttcaagaaaccaagaagggccaggagaaatgggaaaagctgtgttgattcctaaagatgaccaggag

SEQ ID NO: 691740 - DNA, 98 bp, Homo sapiens
caaaagcattagaacatcacagaagtgaaatacaggctgaacaggacagaaaggtgctgaaggtcgccatcctggctgagaagtacgcggtggactac

SEQ ID NO: 691741 - DNA, 100 bp, Homo sapiens
cgggccgccgcggctggtgggcgctgctggcgctgcagctgcacttgctccgggcgctggcgcaagacaaggcgcctctgtcgaagagccttctgctggt

SEQ ID NO: 691742 - DNA, 88 bp, Homo sapiens
acgtggcctgtggcgctaaccacacggaccacggaggggtgatcgtgaacatcactgccaccctggggaaccgggggcaggcgctcca

SEQ ID NO: 691743 - DNA, 75 bp, Homo sapiens
cgccgacgtcgaccagcagagactggtcagcccaaggccaaccccactgtcactctgttcccgccctcctctgag

SEQ ID NO: 691744 - DNA, 100 bp, Homo sapiens
atggaggcacctgtcggcagactggtgacttcacttttgagtgcaactgccttccagaaacccttgaaactctcatcaaacaagcagaaaattacaccag

SEQ ID NO: 691745 - DNA, 100 bp, Homo sapiens
ctagccattgaagtatttgaagcacatttgggaagccacattttgcaggcatattctcaagatgcctacctgaaaggcaacgaagcttatagcggcaatg

SEQ ID NO: 691746 - DNA, 82 bp, Homo sapiens
attggagattccacccaaacttgctggtcactgggaggatgataatgaagataattcaaatgatgggacccagccatccaaa

SEQ ID NO: 691747 - DNA, 75 bp, Homo sapiens
tgataccgcttgcagaagggaattgaatagatgtctccctattggattacagcaatgactggagccccagtgata

SEQ ID NO: 691748 - DNA, 100 bp, Homo sapiens
cttctatatctacaagggggtccgcaaggttccagcaacagatagaaatgctttaagttcactctggggaaagctggcctctgaaatcttaatgcagaat

SEQ ID NO: 691749 - DNA, 100 bp, Homo sapiens
tacatatcccacgtgaggaaggagcacgggaaggttaacattcaagatggtacatgctgaagccttttctcgtcctttgagtcggaatgaagttgttggt

SEQ ID NO: 691750 - DNA, 90 bp, Homo sapiens
gtggcttccccggaagacctcactgaccccagagtggcagaaaggctgatgcagcagaaataggaaggttgttgattactcacagtttca

SEQ ID NO: 691751 - DNA, 97 bp, Homo sapiens
cggagccagacccggagccggagcaggaggccccaggttacaccgtgacctggctgccctcccggcaaaagacttcgttgctggcctcgggagcccc

SEQ ID NO: 691752 - DNA, 100 bp, Homo sapiens
aagctttcaaccacattgccaagttatgcagccttaaacgacttgttctctatcgaacaaaagtagaggtgtgatgaatgcagactctgctaccattttg

SEQ ID NO: 691753 - DNA, 101 bp, Homo sapiens
gggtgagcggcggccacggcatcctgtgctgtgggggctacgaggaaaggtccagacatcatctggtctccctgaacctgaaatcacaccatggatgattt

SEQ ID NO: 691754 - DNA, 97 bp, Homo sapiens
gttcgccgtgcacaagcccaaagggcccacttcagccgagctgctgaatcggttgaaggagaagctgctggcagccttgttgtcctcctggtgcgaa

SEQ ID NO: 691755 - DNA, 100 bp, Homo sapiens
gctaccttctcccatcaccccagacttcagattttcctgtccttgatcccagctggactgctcaagaagaaatggcccttttagaagctgtgatggactg

SEQ ID NO: 691756 - DNA, 83 bp, Homo sapiens
caaaaagatgcttgtggaagccacccgggagtttgaggaggttgtggtgtacacttaaagcgttctgggaatatgaatccctt

SEQ ID NO: 691757 - DNA, 100 bp, Homo sapiens
tgtggattggtggagtttgggagcattaatgtatgacatgctgactggagcagtcagcaatctgaagatggtcttacggagcctagtagagtactcccag

SEQ ID NO: 691758 - DNA, 101 bp, Homo sapiens
aaaggctcctgtgaacactgcagaactaacagatctcttaattcaacagaaccatattgggagtgtgattaaggtggaataacactcccatggatgaagca

SEQ ID NO: 691759 - DNA, 82 bp, Homo sapiens
ccgagttccgcgcattggaaagaagcgaccgcggcggctgatcatctctgttaatgcccatgttagaatggagcagtctggg

SEQ ID NO: 691760 - DNA, 75 bp, Homo sapiens
cacccaattcaaggcctgccgttggctatagcaaatgccccagatcaggcctttgtgacactaaccacaaacgat

SEQ ID NO: 691761 - DNA, 101 bp, Homo sapiens
ctggcctggaggctatccagcagcccaagctgtgaccagtgacgcagactggaagtcccgtttactgggagagaagaggttaaggaacacccaggtgaaca

SEQ ID NO: 691762 - DNA, 98 bp, Homo sapiens
tggcggccacacctgacaaactcaataagggcttccgttacaagatgaggtctgtgtatgctcacttccccatcaacgttgttatccaggagaatggg

SEQ ID NO: 691763 - DNA, 100 bp, Homo sapiens
gctgcgcatccccgcggacgccacagcgctgactggaatgtcacgtggaataccagcaaccccgacttcaccaagtgctttcagaacacggtcctcgtgt

SEQ ID NO: 691764 - DNA, 86 bp, Homo sapiens
aaaactgaagatcggagccaaatccaagaaaggtgctggtggatgtgccctgtaccacagaccgccactcccttcatgaggaggag

SEQ ID NO: 691765 - DNA, 74 bp, Homo sapiens
atgtagttatcatttaatgagaggagagaggcgaccactttggagaagatggtataaactggtccatcagtgac

SEQ ID NO: 691766 - DNA, 51 bp, Homo sapiens
gttagaaggaagctttggatcttcggtggggggatatgagactttctactc

SEQ ID NO: 691767 - DNA, 98 bp, Homo sapiens
gaatgaaaagagtaaacacaagtttatggtacagacaatttttgctccaccaaacacttcagatatggaagctgtggacagtcattttgtttactcat

SEQ ID NO: 691768 - DNA, 100 bp, Homo sapiens
gctcctgctgccgctcctgctggtgctcctggcggcggcgcccgcagccagcaaggtagcacaggcggagtgcagcggaggcccctgccgctgccgtcat

SEQ ID NO: 691769 - DNA, 82 bp, Homo sapiens
ccgagggcaggtgaacagggagaggccatgaaacagtttgacctgaactatggaaggtggttctcttcccaaagtggaagcc

SEQ ID NO: 691770 - DNA, 75 bp, Homo sapiens
ctctgcaccctggatggaaagcagctggtgagcgacctgctggaattctgcttctacaccttccgagagtcccat

SEQ ID NO: 691771 - DNA, 100 bp, Homo sapiens
ccacagcttccgccacatcctgccggggttccggagcgccgccgccgccgccgcggacaatgagagagcagcccgacggccatggaggctgaagagacga

SEQ ID NO: 691772 - DNA, 100 bp, Homo sapiens
atgaagtgctttttcccggtgctgagctgtctggctgtgctgggaaggatcagaatgttctctctccagtcaactgctggaatctcctcttaaaccaggt

SEQ ID NO: 691773 - DNA, 75 bp, Homo sapiens
agaatctgcaggagctgaactgagggcctgcagcatcaggcggggcaggccccacacttgggcagtggacagcca

SEQ ID NO: 691774 - DNA, 100 bp, Homo sapiens
gaattcagaaggatatcgacgtcgtgatccagaagtccagagctgaggactgcctgtttgcagggctcatcgttggggtgatcctgaggtatggtacccc

SEQ ID NO: 691775 - DNA, 90 bp, Homo sapiens
agcaagcggcggagctgcgcctcggcccgctcttctccctgcttaacgagaaccataggtatgagcagcagcgggacaatcttgcccaac

SEQ ID NO: 691776 - DNA, 90 bp, Homo sapiens
cggccggcgggggcggcgtgcggcctagcgtctcaggtgatgtgtccaatctagatcccaacttctcatttgaaggcaccaaactggatg

SEQ ID NO: 691777 - DNA, 100 bp, Homo sapiens
ggccccttagcgcccgggcgtcggggcggtaaaaggccggcagaagggaggcacttgaggtgctggagaatctggtaaaagcaccattgtgaagcagatg

SEQ ID NO: 691778 - DNA, 82 bp, Homo sapiens
acatgggacttggaaaaacagtacagacgccatcgtagtagaagcagggagcggaagaagtctcgatccaggagtagggagc

SEQ ID NO: 691779 - DNA, 50 bp, Homo sapiens
acttctggccagtttgacctggcttgtttcagtcccgatggagcccggct

SEQ ID NO: 691780 - DNA, 76 bp, Homo sapiens
cagtaccaccctgttgtacatccactggacctaaaatatgaccctgatccaggtaagcaaactatgggctttccac

SEQ ID NO: 691781 - DNA, 100 bp, Homo sapiens
aagatgttgaagattttgctagagctgaaggctgtgataatgaggaagatcttcaaatgggcattcacaagcatgtgcagtctttgccaacaaaaaaaat

SEQ ID NO: 691782 - DNA, 101 bp, Homo sapiens
tttatctggagtgaggtggccggttcttggtgggatctgagcagtaagactttgaccccgacgcaggcttcagtgattgccgcggatcagaagcctgagca

SEQ ID NO: 691783 - DNA, 51 bp, Homo sapiens
ggggccgctccggcccgctccgaggggcttcaagaagcgtgcacctcgggc

SEQ ID NO: 691784 - DNA, 83 bp, Homo sapiens
ccagttctcaggatatcggaatccggtgcacagcagcttcttcagctccggagttgggctgctcacaaaccaagctgtctgtt

SEQ ID NO: 691785 - DNA, 100 bp, Homo sapiens
tgactgtcccagaagtgaatcgcaggttttgacctgtagcagagaaccaattctggagaacagcctcacttctttgattgaatacttacataatgcattg

SEQ ID NO: 691786 - DNA, 50 bp, Homo sapiens
cgaaggttcaattatgtggtcaaagttttgagcaaaattttggactgtga

SEQ ID NO: 691787 - DNA, 75 bp, Homo sapiens
gttcttacaacatggcagacattgacaaggctgatcccttatccaacatggttctaaccttcagtactaaagaag

SEQ ID NO: 691788 - DNA, 100 bp, Homo sapiens
catctggtcagatagctccttcctgtggctccagatccagtctccgaattcaatcctttgacgttcaccagcgtgatcgaatgcgagaagccaaacaacg

SEQ ID NO: 691789 - DNA, 100 bp, Homo sapiens
caaactgactttgcagccacggagagtattctaccttgtaaatactgttatttgtatatactgtaaatgatgacatcggtgggcactaaccgagcccggg

SEQ ID NO: 691790 - DNA, 100 bp, Homo sapiens
tgtggagggtgcaggaggaaggcatggactcggagattggctgcctcatccgcttctatgcaggacttcctgatccatttgctaaggtggtggttgatgg

SEQ ID NO: 691791 - DNA, 76 bp, Homo sapiens
gattctgcaaccaagcacctgaaacagcaggtgtctgtctctcagtgctggtcagacaacgctgtcaagagaacga

SEQ ID NO: 691792 - DNA, 83 bp, Homo sapiens
cccaaaggacttgattggagttgtgccgctggctatgacaatgcagatcttcgtgaagactctgactggtaagaccatcaccc

SEQ ID NO: 691793 - DNA, 96 bp, Homo sapiens
aggccactagcagccagttccggcccgaggacaccgactaccagcagctgtacctcccacaaggattaccccttccatgaagagttttgaagctgt

SEQ ID NO: 691794 - DNA, 100 bp, Homo sapiens
agattaataaagaactcttcagaattcctggtgtttcatcatatatacgactaagatatcacaccagcctacaggcccttgggaacagccttctgagcca

SEQ ID NO: 691795 - DNA, 100 bp, Homo sapiens
ccggcgcggtcgcagccctcagcccacttaggataatggcgacagctgaggtgcatctgggggaggtgttgtagccattgacaacaaaatagaacaagca

SEQ ID NO: 691796 - DNA, 100 bp, Homo sapiens
ggtcttcgggattcagcgttctggtttggctggtttggattggatgcagaagaagtatcaaatccgctgctaaattacattggagctgggctatcagtag

SEQ ID NO: 691797 - DNA, 100 bp, Homo sapiens
gtgggcaggaagaacccatcgggcagctacacatcttgaaagagaagctcttcctgtgaggccataggaaaaggatacagagtagagtttcatgaacctg

SEQ ID NO: 691798 - DNA, 98 bp, Homo sapiens
cgccgagccgcaggagagacacgctgggccgaccccagagaggcgctggacaggaatgtaagaagcacttggcaggcttgggggctttggggctgggc

SEQ ID NO: 691799 - DNA, 75 bp, Homo sapiens
gcggaagatggcggccggcgaaaggagctggtgcctgtgcaagttgttgagatcaccggggaacccttgatccgt

SEQ ID NO: 691800 - DNA, 74 bp, Homo sapiens
ctacctgcaagctctatttttaccagatgctcttggctgtgcagagtgatgacagacctaatgctctattaagt

SEQ ID NO: 691801 - DNA, 98 bp, Homo sapiens
gccgtgtcagtttggggcatctccgcggtccggcccggggccccgggatctcggctgtccttcctcccgctcaaatctaatccaagtgaaaatgaaga

SEQ ID NO: 691802 - DNA, 75 bp, Homo sapiens
ggaacctgggatggttgtgagggaagggacaagaagatactgccctgtggctgcttcaacccccaactccactgc

SEQ ID NO: 691803 - DNA, 100 bp, Homo sapiens
gtcttagaggctcccggagtgtatgtctttggagaacttctggagctggccaacgtgcaggagcctcctgctcttcatggatgaagcagacgccttcctt

SEQ ID NO: 691804 - DNA, 88 bp, Homo sapiens
gcctccgggcccggcgccgccgcccgcagattgatatcagtaaatgccattatttagtggatttggacaccatgagagaaacaccccg

SEQ ID NO: 691805 - DNA, 74 bp, Homo sapiens
tcttcggcaacatcctggacaagcaccggcagacgaaggccttcatccaccacgagctgctggcctacctatac

SEQ ID NO: 691806 - DNA, 100 bp, Homo sapiens
gctcatctccacagccgccaaccactccaatgctgccattcggaaagtgctcccacgtgggacaagatggtgtcttcggcgcagatgggcttcaacctgc

SEQ ID NO: 691807 - DNA, 100 bp, Homo sapiens
ccataattgaggatgaagatgatgaagccgaggtagaagaagatgaacccacagatttgggtacagctctgccggggggggaaaaagtggtaccattttg

SEQ ID NO: 691808 - DNA, 100 bp, Homo sapiens
ccagttggagttgcggcggcgggaacgattgggctgagcagaggacgacatgttgcttttcgtggagaagatggcagtgaacgtatactcaacgtcagtg

SEQ ID NO: 691809 - DNA, 102 bp, Homo sapiens
cctcgctccggaaaggggacacctgaccgagacatgggtgcccggcaccgcgcccgagcccactccattcagatcatgaaggtggaggagatcgcggccagc

SEQ ID NO: 691810 - DNA, 75 bp, Homo sapiens
atggattacaggttgatgtgggagatgccttcaattaagttgcagagttctgatggagagatatttgaagttgat

SEQ ID NO: 691811 - DNA, 75 bp, Homo sapiens
tggctgatggaagtgactgacagcttggaccgctgcatccagaggctcaggcaatttgagaaaaagtacgaaagg

SEQ ID NO: 691812 - DNA, 80 bp, Homo sapiens
tgttggtagaaaaagcaagagtttgttatatagcaagtctaacgtgaagacattttgctccaagaatatcctagccatcc

SEQ ID NO: 691813 - DNA, 75 bp, Homo sapiens
tgcatttcatggctatcatctacacagacgaggtcttgctacattgtccaggatggagaagtaggaattcttaag

SEQ ID NO: 691814 - DNA, 100 bp, Homo sapiens
cagtgctgccgacaggaacgtggagatctggaagatcaagaagctcattaagagcttggaggcggcccgcggaaatttctgaataaattggcagaagaac

SEQ ID NO: 691815 - DNA, 50 bp, Homo sapiens
gggattttgtcagcttgtcgtcaaggttttggaactgaaagaacacaaac

SEQ ID NO: 691816 - DNA, 96 bp, Homo sapiens
taatggtatcatcaaggccttcagaaacatccctgatgtagccgcctgtcccgggagcctggactgtgccctgaagaggcgggcaaggtgtcctcc

SEQ ID NO: 691817 - DNA, 100 bp, Homo sapiens
tggatgcctacggcgtgggccgctaccaggaggtcaaccccggtacaggtttgcagattccgccagcagcacagcaagctctacagatgagtggctcttt

SEQ ID NO: 691818 - DNA, 90 bp, Homo sapiens
tgaatcttcgcccccacttcctctaagctccctgccgccagaagccagccaaggctggacgactgtggcctcacggaagcacggtgcaag

SEQ ID NO: 691819 - DNA, 98 bp, Homo sapiens
aagaggtatatcaggtgccaccatcagtgcagagaagcattgggggaaccagtgggccccacgtgggtaaaaaggtgtactagccctctcttggtacc

SEQ ID NO: 691820 - DNA, 90 bp, Homo sapiens
caatttccattcgcatccaaaatggaatccgagacagaaagaggaccttagagaactcaatttcctgtatctactgagtctcaaaaaccc

SEQ ID NO: 691821 - DNA, 100 bp, Homo sapiens
cgtagctgaatccagtaccaaaaacgtcaacaacagttttacgggcaaatgtgagaaacgagtacaggatgtaattgaacgattttgggatttcattgac

SEQ ID NO: 691822 - DNA, 129 bp, Homo sapiens
gtggcaggggcgggcgcggccaccgggaccggcgtgggagcgacgccagcgcctcaacaggtgagcagaagtggcctatatcgctccccgtcgatgccagagaacttgaacaggccaagactgaagcag

SEQ ID NO: 691823 - DNA, 101 bp, Homo sapiens
tgcttggggagtgtctaaaggaactagaggaatcccatgaccagcatgcggtgctaggacaatccggggctcagagctgcctgttttggagcggatttgcc

SEQ ID NO: 691824 - DNA, 95 bp, Homo sapiens
gctgattaaacccttggaaaatttccggaaggaacaaataggcttcaccaagggcagaaatttagcatctggagaggttggattttttccaagtg

SEQ ID NO: 691825 - DNA, 100 bp, Homo sapiens
cccaggagtaagagcccatagcagtctgccagacaatagagcatatgggaaatctgaaatagagtactatgctatgttggctaaaactggtgtccatcac

SEQ ID NO: 691826 - DNA, 75 bp, Homo sapiens
gcgtatttcgtcgagaatttttgggtaccttgtggtctataatcctttagaacaagaccgaatctcgttggtctc

SEQ ID NO: 691827 - DNA, 101 bp, Homo sapiens
tcaggaatcgatctcgtgaagcccgcaaggaccgaacacccccaccccgatttagacctgcgggtgctgacaaccagggtgcaggagaacaaggtagacca

SEQ ID NO: 691828 - DNA, 74 bp, Homo sapiens
ttgtcttcaattaaaaaatttattaaaggaagcacacctaaggtgatttgtggagctatgatttcttcagtggt

SEQ ID NO: 691829 - DNA, 116 bp, Homo sapiens
ccaccctccgtggcaaggcgaggccccgggggcgggccggggtcaccacgcctgccccagggaaccgcacagtttcaccagtgatcattaaagaatgggcagcttacaaaggaaag

SEQ ID NO: 691830 - DNA, 75 bp, Homo sapiens
ttgaatagaggaaatgggatatcatctggactatctgctgccaaactcttgactgaatatggcgttagtgttttg

SEQ ID NO: 691831 - DNA, 75 bp, Homo sapiens
cagaggtggaggcgctttgaaaggacatggacatcttccagcaacagatctcgagaagacagctggctaaaatcc

SEQ ID NO: 691832 - DNA, 100 bp, Homo sapiens
ggagaatgaaccagccgcagaggatggcgcctgtgggcacagacaaggagctcagtgacctcctggacttcagcatgaaaactttagaaactgttccttt

SEQ ID NO: 691833 - DNA, 90 bp, Homo sapiens
gctcagaattctcggggcggcacagttccagggtatggatcctggcgggagccagtcaacccctattatgtcaatgccggctatgccctg

SEQ ID NO: 691834 - DNA, 75 bp, Homo sapiens
cgcccatgaagccagatttctcccaggagcagccaaaccaagtgaactatgggaatatctgcacgggcctagaag

SEQ ID NO: 691835 - DNA, 100 bp, Homo sapiens
ccgagagagaatatttgcccgagagaaactaattctgaagcaagcccttatagttgtgctgcagtggtgtttcaatcacaattttagtgttcgactgtat

SEQ ID NO: 691836 - DNA, 80 bp, Homo sapiens
gaccatccaggacctgcgggacaagtaccatgcggagaccatcaagaatgtgcgcacagccacggaaagctttgcttctg

SEQ ID NO: 691837 - DNA, 75 bp, Homo sapiens
ccagacacatgctaacaggatctacaggatgatcaaacttggtctgggccctcgggaccaaggatcacgtcatga

SEQ ID NO: 691838 - DNA, 82 bp, Homo sapiens
ccgactcgctacgcgggtcttgcgagatatctggccgcctctgccgcagctggaggctgaaggtgatgtggccgccctcaac

SEQ ID NO: 691839 - DNA, 50 bp, Homo sapiens
tgagcaccagggagcaggaaagccaagaccctgatgctcccataagacag

SEQ ID NO: 691840 - DNA, 90 bp, Homo sapiens
tttacgcgcacgttggaaccgaagagagctctgttgttgcagtccagtgcacgtgccaacattacactgtcagggaagaagcgcagaaaa

SEQ ID NO: 691841 - DNA, 90 bp, Homo sapiens
ctcctgagtagctggcattacaggagcctagtaataaacgggtcaaacccctttcccgagtcacgtcgctagcaaacctcatcccgcccg

SEQ ID NO: 691842 - DNA, 75 bp, Homo sapiens
tgtgagggatgagaaaagaagatggactctagacatgcaagaaagcacttcagccaagcagaagggagccagctg

SEQ ID NO: 691843 - DNA, 75 bp, Homo sapiens
atgacatcacagcaaaagagaggttctctcccctcactaccaatctgatcaaagatgcttataagatcaggatcc

SEQ ID NO: 691844 - DNA, 82 bp, Homo sapiens
ctcaaacagaatttcacacagggtattccatggagaatgaggagaaatggcttccctgaggcaagtgtaacctacattccca

SEQ ID NO: 691845 - DNA, 100 bp, Homo sapiens
cggagcccggcgctttccccgcaagatggacggtttcgccggcagtctcggtacaagttatggaagataaattaaaagcagctaatattcaaaccagtga

SEQ ID NO: 691846 - DNA, 75 bp, Homo sapiens
ctgttctacagacctctctcctcttcctgctcatggttccagtgtctcgccccatcctcaccctcagggttccca

SEQ ID NO: 691847 - DNA, 101 bp, Homo sapiens
cagatgccagctctgaaaaactcttcaacactgttattgtaaacaaaggagtaccgggcgtcaaagcagaacgctttgaagaaggaatgacggtaaagcac

SEQ ID NO: 691848 - DNA, 96 bp, Homo sapiens
cagaagaaccctcttggactggacgatttgggaattcaaaacttgggacaaactgtcagccttggttttgacacaagggcgcatatcttcaaagca

SEQ ID NO: 691849 - DNA, 83 bp, Homo sapiens
gacctcactgagatcagggacatgttgctggccaataagtttgcttgcctaaactggacttgaagcaatttaaactactggag

SEQ ID NO: 691850 - DNA, 100 bp, Homo sapiens
caaattcatcaaagacgtaatcaaagacggcaacgcgcttatcagcgctatgagaatgaaattggagcgatttgaaattccaatcaaggttcgattaagc

SEQ ID NO: 691851 - DNA, 51 bp, Homo sapiens
aaaggctgtggctgaggcgcccttcaacttagagtatacttgcgaacatca

SEQ ID NO: 691852 - DNA, 75 bp, Homo sapiens
tagaattacctggaacttcatcatcatctacttcacaggaattgccatttactcatgatagtaaagagcacctgg

SEQ ID NO: 691853 - DNA, 88 bp, Homo sapiens
agaggaacggcacatgacccaggcctatgccaatcagcatttcacattcctcatggttggttcaaagaggatattcctcaaagcagaa

SEQ ID NO: 691854 - DNA, 100 bp, Homo sapiens
cagggacctgaggactccccttcccgacagtcccgccgctatgactggtgagggccccgggccctcagcctctcttcttctcagatgaccaagatggtgc

SEQ ID NO: 691855 - DNA, 75 bp, Homo sapiens
agaggctggactcggattcgttgcctgagcaactgatttggtgctgagaaaggttatcaatttttctgactgtac

SEQ ID NO: 691856 - DNA, 50 bp, Homo sapiens
gacggcgtgaccgacccgagccggaacttagtgatttggcccgtgaccct

SEQ ID NO: 691857 - DNA, 100 bp, Homo sapiens
ctttcctcttctgaccatgcacccccagcagccaccggcaggacagtcattttgtttactcattcagccctgttgcaggtcccaataaactcttcataag

SEQ ID NO: 691858 - DNA, 90 bp, Homo sapiens
cttccagttacaaattcagtgccttctgcagtttccccagagctcctcaagaataacggaagggagggaaatcgtggaacacatggtcca

SEQ ID NO: 691859 - DNA, 75 bp, Homo sapiens
tcaaaacatcctgaggacagtgcctggaggtttggtgcacctcgatttggaggaagtagggcagggcccttatct

SEQ ID NO: 691860 - DNA, 101 bp, Homo sapiens
tccagattcaaatatattagaaagcagccgtggagacaaccatcttcattttgggagaaataactaaaggctgactgtgctgtcctgattgttgctgctgg

SEQ ID NO: 691861 - DNA, 95 bp, Homo sapiens
tgggagtgggctagaaggggaccacctgtctgacacctccacaacgtcgctggagctcgattcacggtacatgtcccagagcaagcacacggagg

SEQ ID NO: 691862 - DNA, 82 bp, Homo sapiens
ggaactcaatcaaaccagtattcttttcacacagggaaatcctcattgacgattcaatttgttgaaggccaatttgtggact

SEQ ID NO: 691863 - DNA, 98 bp, Homo sapiens
taactctcaaataccccattgaacacggcatcatcaccaactgggatgacatggagaaggacctgaaggagaagaaggagaaggtggaggagaaggca

SEQ ID NO: 691864 - DNA, 99 bp, Homo sapiens
ccgcacccgcctccggcggggctctcaggtatccgttacagcactgatgtgagtgtagatgaagtaaaagctttggcttctctgatgacatacaagtgt

SEQ ID NO: 691865 - DNA, 97 bp, Homo sapiens
gaggggcggagccgctgctcgagctgctgctggattgaactcagagaagccgggggcatggactggaactcccaatacccctgacatgggctgagtc

SEQ ID NO: 691866 - DNA, 83 bp, Homo sapiens
gccgtgttccgtgtctctggattcaagtcccaggagtcctgaccagagagcaggtgctgggaatacagcaaggaattagacca

SEQ ID NO: 691867 - DNA, 75 bp, Homo sapiens
tctacaatgtccaggtgtttgactggggcagcacctactccgtgtcagtggtggagaccgactacgaccagtacg

SEQ ID NO: 691868 - DNA, 96 bp, Homo sapiens
aggcctggcttggggcggggcgactccactacctcatgcaggaagacgagctggtggagctgtgcctgcaggcagcgtccactatggccactacac

SEQ ID NO: 691869 - DNA, 100 bp, Homo sapiens
ctggcgattcgtgttcgtgagggccttttctgatatgaatgccacaatacgaaggattgaccagttaaccaacatcttagcccccatggctgttggccag

SEQ ID NO: 691870 - DNA, 50 bp, Homo sapiens
atttaacaacatctcattatctcaggtgcaacaacgagagtgagtggtcc

SEQ ID NO: 691871 - DNA, 83 bp, Homo sapiens
caacagcttccataaatcctgcttcctgtgcacaattctgtggtgttcttggtcacacatttatggagtttctgaagggcagt

SEQ ID NO: 691872 - DNA, 50 bp, Homo sapiens
caagaacatatgccagttcctcgtagagtggaggaagaagcgaatgcgca

SEQ ID NO: 691873 - DNA, 100 bp, Homo sapiens
acgaagtaggccgtctcgctctgggtctccaggcccgcgaccgtccgccagtcgtcccgaggattcctacatccagagtcgggcagacaccatgcagaac

SEQ ID NO: 691874 - DNA, 73 bp, Homo sapiens
agagcgtcacggcgtacgccctcatggggaaaatctccccggtgactttcagtacatggaaaaagaggatgca

SEQ ID NO: 691875 - DNA, 100 bp, Homo sapiens
ctccctcccttacgtccccgagtgcggcagtaccgcctccttcccagccgcgcggcttcctccagacctctcggcgcggaaactcccacgttaacccacg

SEQ ID NO: 691876 - DNA, 97 bp, Homo sapiens
agctggttgccggggcaggggcggaggcggaggcagaggtggaggcgctttgaaagaggctgaggggatctggcggtggagcgctaggatcagacgc

SEQ ID NO: 691877 - DNA, 83 bp, Homo sapiens
agtgaggggcgcagccatgatcacctcggccgagtaacagattccctggataccctttcagaaatttcttcaaataaacagaa

SEQ ID NO: 691878 - DNA, 75 bp, Homo sapiens
ccgaggagaaaacagcaggcacccaagcgggcggcaggaaacctggacaagcatgaagaactagaggagcttgta

SEQ ID NO: 691879 - DNA, 118 bp, Homo sapiens
gcgacctgcgagactcacaagaggggaagctgacagagatacctacagacggagtgctgtgccaccatcccagccatcactcttccacctgctccttagagaagggaagatgagtgag

SEQ ID NO: 691880 - DNA, 50 bp, Homo sapiens
ttcagagagtccacacaccctttgaaagttcctaagaagccagaatctac

SEQ ID NO: 691881 - DNA, 120 bp, Homo sapiens
cgcgcgagccgagtgtgagcggaaaggggcccggcgtctgcctcgagactgaagaccgggcccacctttcctgtcctttgaggaggacccgcggcagcaggcactggagctggtggtgca

SEQ ID NO: 691882 - DNA, 83 bp, Homo sapiens
ctcgctgtacgccgagcacccaggcgactgcctcatcttcaagggatccaggtccggcacgatcaagacccaggctacatgca

SEQ ID NO: 691883 - DNA, 75 bp, Homo sapiens
tctcactaaaatgaaagaaaccgctgaggcttatttgggaaagaaggaacgtccttgtgaagacctttatctgag

SEQ ID NO: 691884 - DNA, 100 bp, Homo sapiens
cacatcctcattcttatactgcttttcgtggccactttggacaaggttttacagacatttcaccagaggaattgaggcttgaataccataacttcttaac

SEQ ID NO: 691885 - DNA, 87 bp, Homo sapiens
cgcgctccctccgccgccgccgccttgctgctgctcaaagctgctgccgccccttgggctaaaagaatcagcatgattcttcagagg

SEQ ID NO: 691886 - DNA, 75 bp, Homo sapiens
atgaggagacagccatccaaagagtcctgcagcaggtcaccagcaccctcggaacccagaggcccgcgctctgaa

SEQ ID NO: 691887 - DNA, 83 bp, Homo sapiens
tctttctgttcaggccagaccctctgggagcttctcagccattttccacagatcaggtgagaagccctaccactgcaactggg

SEQ ID NO: 691888 - DNA, 94 bp, Homo sapiens
gagcgggtgcgtctgccgcagagtcggcacctgaaggacatggaggtgctggagaatctggtaaaagcaccattgtgaagcagatgaggatcct

SEQ ID NO: 691889 - DNA, 101 bp, Homo sapiens
cttgtcagccagggctgaacccccgcagtgtaaacaggaacatcgataagtagtgtaaaaacttgcacaatgaaatccgaagccaaggatggagaggagga

SEQ ID NO: 691890 - DNA, 98 bp, Homo sapiens
acacctgccaaggactttggtggtatctttgcaacacttccccagatcaaaaggagccaacacctttcatcatcgagtggatcccagatatccttccc

SEQ ID NO: 691891 - DNA, 96 bp, Homo sapiens
ttttagcacaactccggacacttgttttccagtgtgatcttacccttaaagctaaggactccatgaaagatgacagaagaagttattgtgatagcc

SEQ ID NO: 691892 - DNA, 82 bp, Homo sapiens
atcaaacttgccttcctgttctccaagaccagacaatgcagatcttcgtgaagactctgactggtaagaccatcaccctcga

SEQ ID NO: 691893 - DNA, 82 bp, Homo sapiens
ggctcttcccggcgctctcctggctcccttctgccccagctccgtctcggcggcggcgggttgacatcatggacatatgtga

SEQ ID NO: 691894 - DNA, 100 bp, Homo sapiens
tattgggaaggttcacgaaaagttcacgttgattgatggcatccgcgtggcaacaggctcctacaggtgcataaggcaaatccaatacgcaagtaccagg

SEQ ID NO: 691895 - DNA, 88 bp, Homo sapiens
gcgaggcagctgtactaggactgggaacggctgttccatttcctccaagtcaccggcttacagcaaaagaagtgtttgataatgatgg

SEQ ID NO: 691896 - DNA, 96 bp, Homo sapiens
tgctacatgctctgatgacggcactgttagaatctgggactttcttcgttgccatgaggaaagaattctccgagcttgatccaaggattattcgac

SEQ ID NO: 691897 - DNA, 82 bp, Homo sapiens
ccggctgccatcttagtctagggactgaggagtcgccgccgccccgagtcccgggggatatgagactttctactcggaatat

SEQ ID NO: 691898 - DNA, 90 bp, Homo sapiens
ctgaaggagaccatcaaaggattccagcagattttggcagggagtttcaaggcagctgccaatggcaggatcctgaagaagcactgtgag

SEQ ID NO: 691899 - DNA, 75 bp, Homo sapiens
tcacctcagtctctcagatcttccacagcccaggtgaaaggtgtagcagtcactcggcctacacccacagcatcg

SEQ ID NO: 691900 - DNA, 100 bp, Homo sapiens
caaggaaacaggatgctgatagtctccagcgggcctggactgtgggctggtgtgtggaactgctgaagaaatcaggggagaaacccctgcttggtggaag

SEQ ID NO: 691901 - DNA, 75 bp, Homo sapiens
ctcggaaaccggtagcgcttgcagcatgagacaagaggagcagcagcggcaccgcccctcaccctggagggtcct

SEQ ID NO: 691902 - DNA, 50 bp, Homo sapiens
cgaaggcgggcggcagaggcgatcagtcaccttcaggccattcagaggag

SEQ ID NO: 691903 - DNA, 98 bp, Homo sapiens
ccagacaggcggcgccatcttcgaacttagacttccggaaggactttggcgagggtgacttaagagattaaaattaatttggttgctgttggttctga

SEQ ID NO: 691904 - DNA, 100 bp, Homo sapiens
agtttcatctgtggatggagtattgtgaaacaaagagtcctcttcgtggaaaagaaaaaaatacgctccctttaaacggtggattgaaaatgactttgat

SEQ ID NO: 691905 - DNA, 82 bp, Homo sapiens
atgttcctctatatttctctggcagatatggaacttagtgatttggcccgtgaccctccagcacaatgttctgcaggtccag

SEQ ID NO: 691906 - DNA, 83 bp, Homo sapiens
aatgcaaactgaaacctgggaaacagtgcagaaagggctattgcaagacacgaagtccgagaaattgagcagcgacatacaat

SEQ ID NO: 691907 - DNA, 82 bp, Homo sapiens
ggagattcagacatagacaagaatgattacccagctgataccccaatgtccttctttgactttgtggttgatcctcattctt

SEQ ID NO: 691908 - DNA, 100 bp, Homo sapiens
gattgagtccagctcttgggatggtgcaggtggtaccattataacgaattttgagaggttggtaaaaggagattggaaaccagaaggtgatgaatggctg

SEQ ID NO: 691909 - DNA, 73 bp, Homo sapiens
acaagagcctcatccacaccgtgttgctgcaaaaggactatcagacctttgaagacaatttaattgaagcaag

SEQ ID NO: 691910 - DNA, 100 bp, Homo sapiens
ggccttgaatggcaactgatacataataagacacaatctattctgctgattcacaattatggagactgtactctgctaacaccagatagtggaaagaaac

SEQ ID NO: 691911 - DNA, 75 bp, Homo sapiens
gccgagcaggctgagcgatacgacgttgacctgatcatgaagacctgctttagccccaacagagtgattggactc

SEQ ID NO: 691912 - DNA, 95 bp, Homo sapiens
gaaactggaagaaaaaagaaaagaaactgacaaaaacatttctgagtgtgaaaaaaaaggtgcagtttgatggaacaaattccgcatttaaagag

SEQ ID NO: 691913 - DNA, 82 bp, Homo sapiens
gttccccacccccgggactctccaagttcgagctctgcccaaagccgccatggcatcagatgaaggcaaactttttgttgga

SEQ ID NO: 691914 - DNA, 100 bp, Homo sapiens
cagcactggactcatggaggctgagcatttattcagagctccttaataagcatttatagtcagtttttggcagcaatagaatcactaaaggcattctggg

SEQ ID NO: 691915 - DNA, 90 bp, Homo sapiens
tgggacgctccgtggatgaggctctgcggctggtccaggccttccagtacacagacgagcatggggaagtgcacagccagaggacaacac

SEQ ID NO: 691916 - DNA, 100 bp, Homo sapiens
gttatattctcttttctcaacagcataatgcagtgaagatgggtgaagagagatgtgtttcatctgaaatttgaagggctttacaactcttctcctttaa

SEQ ID NO: 691917 - DNA, 75 bp, Homo sapiens
aagatggcgactgtcgaaccggttggattatctcaagatgcccaggatcaaatgagaaagatgctttgccaaaaa

SEQ ID NO: 691918 - DNA, 101 bp, Homo sapiens
agacggctcacctgtgcgggatggaacaaaaggtcatctttctgtccaagggcaaggatgccatgcagtccttcatgatgccattttatctcatgaaagac

SEQ ID NO: 691919 - DNA, 75 bp, Homo sapiens
gccgcaggcgcagacccacccgccatgaagccccccgcagggtgagaactctgtctcagtcgacgggaagtgcag

SEQ ID NO: 691920 - DNA, 60 bp, Homo sapiens
agctttattaccagacatgatctttcaggaccctgatgcttggtgtgacctgagtaaatt

SEQ ID NO: 691921 - DNA, 83 bp, Homo sapiens
ctgtctgctccgaggactgccactgcccggggatggggttatcaggaactgttgccgttattacatcagatgggagaatgatt

SEQ ID NO: 691922 - DNA, 100 bp, Homo sapiens
tcaagaaaaatttgaaagtagcaaaatagaaaataaagaattaacagcagatacagaggacagcatggaaatagggatgaggaagaaatgaccaaacgag

SEQ ID NO: 691923 - DNA, 50 bp, Homo sapiens
acatctgcttctcctcctcagagtctgagcacttcaagacgacatcgcag

SEQ ID NO: 691924 - DNA, 90 bp, Homo sapiens
gcggactaataaaggccatggcgccagcagaaatcctgaacgggaaggagatctccgcgttttgagagattacctgaagttgcactcaaa

SEQ ID NO: 691925 - DNA, 90 bp, Homo sapiens
cgaacgcccgcggcgcgggactccatcgtcagggaatgtgcagcaatcagttaaccgcaaacagagctggaaaggttctaaagaatcctt

SEQ ID NO: 691926 - DNA, 100 bp, Homo sapiens
tcacatcagggactccacggccagagccctggatgtcatttggaaaaacactagagacagacggctggcaggacctggtgtcaaagatgcttcatgtaga

SEQ ID NO: 691927 - DNA, 112 bp, Homo sapiens
tggccagcgagagccagggctccaaagaactcgccggcacagtcttcactaccgtagaagaccttggctccaagatactcctcacctgctccttgaatgacagcgccacaga

SEQ ID NO: 691928 - DNA, 90 bp, Homo sapiens
cggcaagtaacatgactaaaaagaagcgggagaatctgggcgtcgctctagagcatcgagagtaaacatgaggttacgatcctgggagga

SEQ ID NO: 691929 - DNA, 106 bp, Homo sapiens
tggagacactggcattggaacttcctgttctgatagcgtggaaggagaagaaaacctcctggcaattttacgacgaagatggtggaagtacatgattttgggactc

SEQ ID NO: 691930 - DNA, 108 bp, Homo sapiens
cacaaaatctgttcccatgcaaaccaatgagggagaagtatcggaagaaagcagttccaaggcacagatcttgagggatctgggtggcattgtcctggccaatgcttg

SEQ ID NO: 691931 - DNA, 98 bp, Homo sapiens
aaataaagaaacttcgagaactggaaggctatgataagggaacaagctaccctctgagtcagcactggacttgaagataaatcctacaattcatgaaa

SEQ ID NO: 691932 - DNA, 100 bp, Homo sapiens
tggatcttcattcattaagcagtgcagaaacacaggagaatacttatctctggcgcacatcactatatttggctgcctctgccagtgctgaattctttgc

SEQ ID NO: 691933 - DNA, 90 bp, Homo sapiens
cacacgtgttcaatacacctcccacctgtcctcaggcatatcaaagccccttcatgaataagttttttccagccagctttccaaatcgac

SEQ ID NO: 691934 - DNA, 103 bp, Homo sapiens
gtgcacccttacagatcaaacaatgggttttgaatatagccgttctggaaatcccactaggaattgccttgaaaaagcagtggcagcactggatggggctaag

SEQ ID NO: 691935 - DNA, 75 bp, Homo sapiens
cagctacagagggtaccgggatgcctgcaccattactgatactcatttcaaagaacttccaactcttctccactg

SEQ ID NO: 691936 - DNA, 50 bp, Homo sapiens
tcctcctgtttcatcacagccaaagcttgaagaagcaaacagcatgctaa

SEQ ID NO: 691937 - DNA, 100 bp, Homo sapiens
ggacgcgcccgccaccgacatctactttagacacctatggctgccgatgaaggctcagcagagaaacaggcaggagaggcccacatggctgcggacggtg

SEQ ID NO: 691938 - DNA, 51 bp, Homo sapiens
tggtttcgctttttacacatgttaaggacgccaagagtgccgaggatgagg

SEQ ID NO: 691939 - DNA, 74 bp, Homo sapiens
gacatgagtgatgtggaggaaaacaacttcgagggcagagtggtcctcccccgggcggcggtgccccctggcac

SEQ ID NO: 691940 - DNA, 83 bp, Homo sapiens
cagcaggtcctgatagtcgatcaaaaattgtgcttctggtagatgcttcacagcaaactgagatcctgagtcatgtgttccag

SEQ ID NO: 691941 - DNA, 74 bp, Homo sapiens
gagcattaccacgacccttgcaaagccggtatgctgccccacaaaaccaagcgaggccaggccgctctggaccg

SEQ ID NO: 691942 - DNA, 74 bp, Homo sapiens
gccagtccgggcaggggcagcgggagccggccgggtttggtgcacctcgatttggaggaagtagggcagggccc

SEQ ID NO: 691943 - DNA, 50 bp, Homo sapiens
tggcaataaagaatgttggcaagcaggcaccccacacagggcacagaccc

SEQ ID NO: 691944 - DNA, 96 bp, Homo sapiens
gtacgccctcatggggaaaatctccccggtgactttcagcttatttctgacgcagggtaccagggggagatcaccagtgtgtccacagcatgccag

SEQ ID NO: 691945 - DNA, 99 bp, Homo sapiens
ccaacccacctaactacggaaaacctgatcccaaaattattgaaaacactcgaaggaaactggcgatggaatatgagaggagccctctggaaagaaaag

SEQ ID NO: 691946 - DNA, 85 bp, Homo sapiens
cccctgaagtggaagacagcattggtactaatggccaactcaaggttggatggcaagcatgtggtgtttggcaaagtgaaagaag

SEQ ID NO: 691947 - DNA, 90 bp, Homo sapiens
cggccggctgcgaagacgcggtgggccgcccctccgagtttccaggatggcttctgcatcaacttctaaatataattcacactccttgga

SEQ ID NO: 691948 - DNA, 101 bp, Homo sapiens
gagaggaagccgaaaacaccctgcaatctttcagacaggatcagttccatgacaagaccccttatacgattatgtttggtccagataaatgtggagaggac

SEQ ID NO: 691949 - DNA, 50 bp, Homo sapiens
ccggaccccggcgcgctgaatgcaggtgccagaaccctgtggagcatcat

SEQ ID NO: 691950 - DNA, 50 bp, Homo sapiens
actcgatccgcctgcctgcgcacctgcttcccagtgacctgacagcagag

SEQ ID NO: 691951 - DNA, 75 bp, Homo sapiens
gttatcctttggaaatgtgctcacactcaaattgtggctactaatttgccccctgaagatcaagatggctctggg

SEQ ID NO: 691952 - DNA, 89 bp, Homo sapiens
tgtgcattcagccgaagggagcgagttctggagcgccctgctggagaaggcatacgccaagtgcgtttttgcaagactgcgcactcaca

SEQ ID NO: 691953 - DNA, 73 bp, Homo sapiens
tggcattcttattatttggcacatatattcagaagaagactgacaaacaacccctgcagaagccctcacattg

SEQ ID NO: 691954 - DNA, 51 bp, Homo sapiens
ccttctgctattgatcctgaaggtctctgcatggattcccccagccctatg

SEQ ID NO: 691955 - DNA, 82 bp, Homo sapiens
ccacggcacggaaggtggggcggcctgggaggaagcgcaagcaccccccggtaatttgtgaaagaagcaaaaataaatctgt

SEQ ID NO: 691956 - DNA, 100 bp, Homo sapiens
ttggtgtcctgtaaaatcacagattatgtcgtgagatggagaataaagaaactctcaaagggttgcacaagatggatgatcgtccagaggaacgaatgat

SEQ ID NO: 691957 - DNA, 83 bp, Homo sapiens
cccacagatccctctatgactgcaatgtgaggtgtcgtgaaaactacccctaaaagccaaaatgggaaaggaaaagactcata

SEQ ID NO: 691958 - DNA, 100 bp, Homo sapiens
ctgccgtgccacctgctgcacccacgaatctgcccacccctcctgtaacccagcctgtttcacttcttgggaaactgaacagccaagactcctataacaa

SEQ ID NO: 691959 - DNA, 50 bp, Homo sapiens
ttcgaccgctacggggaggaaggttttgagcaaaattttggactgtgaag

SEQ ID NO: 691960 - DNA, 90 bp, Homo sapiens
cgaccccgaactccaggacagcatccaggcctcattggacagcattcgagctgcagaaccttggcctgaaaatgctacattatatcagca

SEQ ID NO: 691961 - DNA, 95 bp, Homo sapiens
gactctctgaccccagagatagaggctgaccgcagtggcggcagaacagatgctgaaaggacaatacaaggacccagatgatgtggtaccagttg

SEQ ID NO: 691962 - DNA, 75 bp, Homo sapiens
agtcatccttttagctgtcacaggtggccccagcagatggcttctctgatcttgccatgcaagtaatgacgtctc

SEQ ID NO: 691963 - DNA, 75 bp, Homo sapiens
cggacactgaaagcagagaccatggagcttcttgggtaggagtcaatgaagacatcttagtcttaacaagttaca

SEQ ID NO: 691964 - DNA, 102 bp, Homo sapiens
gcgaggaggcgcgggaggtgttcgagaacgaccccgagacgggggggccctcagcctcttggccttgaacgggctgttcatcttgattcacaaacacaacct

SEQ ID NO: 691965 - DNA, 125 bp, Homo sapiens
gaacttactgcgtctagctggaggattgtaaatgcaccaatcagcatgctgtgtctagctcaagatgcctttgagtaatggacagatgggccagcctctcaggcctcaggcaaattatagtcaaa

SEQ ID NO: 691966 - DNA, 96 bp, Homo sapiens
aaagaaggccctgagtcaaagaagatgcctcgaactaaacaaattcatcccagaaatctaagagggttcatagtggcgtcatgcacgcagactcct

SEQ ID NO: 691967 - DNA, 100 bp, Homo sapiens
gacgcagatgcccgggccgtggctctagcaggctccactaactggggctacgactctgatgggcagtggaatgcagtagccctctgggcctgggatattg

SEQ ID NO: 691968 - DNA, 83 bp, Homo sapiens
gaaagaaggttgggttcagaagagggttacagctcttttgaggaagcttaagcagcaatccagggaaagtgttgaagaaaaac

SEQ ID NO: 691969 - DNA, 101 bp, Homo sapiens
gccaacgcgcaggtgctagcggccccttcgccctgcagtactatactggcaattgctggagaagattttgcaattgttgcttctgatactcgattgagtga

SEQ ID NO: 691970 - DNA, 97 bp, Homo sapiens
tgaagtgtgtttccttgtgtatatatactgtggttcctttatcccttcatctgtggatagacagccaaaagaatgcaatggtgtaaagattccagtt

SEQ ID NO: 691971 - DNA, 74 bp, Homo sapiens
cgagacctcattcatacaggggtagccaatgatcacaggagaaaacgacgctccacacctttaacttcttccac

SEQ ID NO: 691972 - DNA, 98 bp, Homo sapiens
gagctcgtaccgcggggccggtcacggggagcgcgtccagaggtccagcccgcggcccgaagggattctttctactaatccagatacttgttgaagtg

SEQ ID NO: 691973 - DNA, 80 bp, Homo sapiens
gagcaggacagcggcccggaggacctgcctctcgtcagggggatatgagactttctactcggaatatcctgagtgttgcg

SEQ ID NO: 691974 - DNA, 100 bp, Homo sapiens
acctctcggggcagggcaagcacgggaagaagcagctggacccgctcaccatctacggcatccggtgcacttccgttccggcgcccctccggtcatcaac

SEQ ID NO: 691975 - DNA, 97 bp, Homo sapiens
aaacaatggtataagcctcattatcaagctggtcgtctgatgataaggaaattagttgcagagaaattgaatatcccttggaatcatattcgtttgc

SEQ ID NO: 691976 - DNA, 82 bp, Homo sapiens
ttgcggtcaagatgctgcaaaacgtgactccccacaataaatctgactgcagccatgagcagcaatgagtgcttcaagtgtg

SEQ ID NO: 691977 - DNA, 103 bp, Homo sapiens
cttcgactacttcaaccaggaggttttccgagacaacaacggcaccgcgacaatgcagatcttcgtgaagactctgactggtaagaccatcaccctcgaggtt

SEQ ID NO: 691978 - DNA, 97 bp, Homo sapiens
gagctggtggaagtggttggaaatggcacctatggacaagtctataaggtatggcccatctcctgtacgcttggagcgacctttggctacgtggctg

SEQ ID NO: 691979 - DNA, 90 bp, Homo sapiens
agcccgagaaaccgcagcactacacgtttggtgcacctcgatttggaggaagtagggcagggcccttatctggaaagaagtttggaaacc

SEQ ID NO: 691980 - DNA, 83 bp, Homo sapiens
tctgcgatggactattccctggctgcagccctcactcttcatggtcactgtgcatttgcacagtataacttggaccagtttac

SEQ ID NO: 691981 - DNA, 58 bp, Homo sapiens
acacgctctgcttcgacaaggacgagttcatgaagtattctaccttgtaaatactgtt

SEQ ID NO: 691982 - DNA, 75 bp, Homo sapiens
ggcaggttgggaggagcggccgaagtttgcagaaaaaacttcagcatgtgccaggaacacaacctcaccttgatc

SEQ ID NO: 691983 - DNA, 90 bp, Homo sapiens
cgccccgaacgggggtcttcctcctccgccgttgacaggaaagatgaatgggagggctgattttcgagagccgaatgcagaggttccaag

SEQ ID NO: 691984 - DNA, 97 bp, Homo sapiens
gatgatttccaacaaggatgagatgcatgctacaagtgaaaactgatgagaaactgaatgtgtctgatgagaatacagcaagttgccctttgagccc

SEQ ID NO: 691985 - DNA, 100 bp, Homo sapiens
gcgccagctctgcaggagaggcctctgagaaggaacccttgaaagagatgtgtataagctgttgctacgatactacaatgaagaatgcagaaactgttcc

SEQ ID NO: 691986 - DNA, 75 bp, Homo sapiens
aaaagccgttgagaggaccatcacaacctgagcagcacagataaggagtcaggccagggcgggatgacactcatt

SEQ ID NO: 691987 - DNA, 83 bp, Homo sapiens
cttcgcgagcgtctgggcgggtggtagagcagtcattatggcgaaccttggctgctggatgctggttctctttgtggccacat

SEQ ID NO: 691988 - DNA, 75 bp, Homo sapiens
gtgggtttgactcaattcaatgggacacagcaggccaggaaagatttcgaacaatcacctccagttattacagag

SEQ ID NO: 691989 - DNA, 75 bp, Homo sapiens
attccaagtaactcttatttgatattgctatatggagatttgccaaaaaataaagaaaatataatatatttagca

SEQ ID NO: 691990 - DNA, 102 bp, Homo sapiens
gagcaagaaaagcctctgggagcagaagggaggctccaagacctcatcaacaattaagagctggtggagttgagatctataatggagatcgtaaaataaagg

SEQ ID NO: 691991 - DNA, 97 bp, Homo sapiens
accatgaatagttctactccttctacaggtgattgatgtaaagcgaagttatgtaactatgactgcaacaaagattgaaatcactatgagaaaagct

SEQ ID NO: 691992 - DNA, 87 bp, Homo sapiens
ctagagtggttcagccacaaggagcctgatctagttgaatctgaagatgtggacctgctgatgaagagggctgactgtatctaactt

SEQ ID NO: 691993 - DNA, 75 bp, Homo sapiens
gaatgatgccgcagatgatgccccctatgggagggccaccaatgggacaagactttgcctcccgggccaaactgg

SEQ ID NO: 691994 - DNA, 98 bp, Homo sapiens
gccggcgccgcggcctcttcggctgcggaccctgccattccggaggaggagtgaaaaggctctcagtgtctgagttaaatgaaatcctggaagaaatt

SEQ ID NO: 691995 - DNA, 80 bp, Homo sapiens
ggcgcatcaaagagctcatcagcgagggggcagacgtcaacgtcaaggacttcgcaggtctataagaaggagaaagctcg

SEQ ID NO: 691996 - DNA, 83 bp, Homo sapiens
cagccagtgttgcccttggccccctcgtcgtctgccccagatgtcgtgatctcaacagcttgtcacccaacagaaaacatcat

SEQ ID NO: 691997 - DNA, 75 bp, Homo sapiens
gtggacaaagctgttgtctcagggagcacagaagcatgaatcatacaaaactcaatatagagcaatgtttgtaat

SEQ ID NO: 691998 - DNA, 88 bp, Homo sapiens
cgaacctctatatccgaggactgcctccccacaccaccgaccaggacctggtgaagctctgtcaaccaaatgtatgtcccagaaccaa

SEQ ID NO: 691999 - DNA, 90 bp, Homo sapiens
ggagtgcagcaggacactatcctggccgagggccttcacttcagaccactctgcttcatttttgggagaaaacttctcacactatggcag

SEQ ID NO: 692000 - DNA, 75 bp, Homo sapiens
cagcaggaggacaatgttgatgaacagtaccaggaagaggcagaagaggaggtcttccgaccccgaactccaccg

SEQ ID NO: 692001 - DNA, 88 bp, Homo sapiens
agattccattttacaggcattaacaaatacatctcctacatattttgaagacattttggctacaatatattttttgatgcacaagaat

SEQ ID NO: 692002 - DNA, 75 bp, Homo sapiens
atttgtgcattcagatgctgctaaacaaggccagctctatgtggtaggtggatcaaatggccactcagatgacct

SEQ ID NO: 692003 - DNA, 75 bp, Homo sapiens
tttgtgaggcccgggatgggagttctcccagcaggaggagaagaggcagaagtcggagcggctgcagcaacagca

SEQ ID NO: 692004 - DNA, 100 bp, Homo sapiens
gggtctccctggctcgagaggtgaacgtggtctaccaggtgttgctggtgctgtgggtgaacctggtgctcctggcagcaaaggagacactggtgctaag

SEQ ID NO: 692005 - DNA, 100 bp, Homo sapiens
ttcaaccagagcctttcatcctcaaactggattgcctcttctttcaagccctagtgaacacaacatgctcccttggtctctgcaaccatcgattcctaac

SEQ ID NO: 692006 - DNA, 75 bp, Homo sapiens
tcccttcggaggattcaaacagtctggatttggcaaagatctagggctgccaggcgcccagctgtgcccagatgg

SEQ ID NO: 692007 - DNA, 100 bp, Homo sapiens
tttggagatcatattcattggaggacactggaagatgggaagaaagaagcagctgccagaataatccagaatggctactctgatctatgttgataaggaa

SEQ ID NO: 692008 - DNA, 75 bp, Homo sapiens
ggattataggcgtgagccaccgtgcctggctgaagggctcaatcaagacatcacagatgtgtgtttttcccctga

SEQ ID NO: 692009 - DNA, 96 bp, Homo sapiens
ctacggtgtctttgaggggaaactcaacgtcattaagctacagggccccttctccccggaggaggacccctccagaaggagaggacttgggtgagg

SEQ ID NO: 692010 - DNA, 100 bp, Homo sapiens
cgcgacgctatggcgcactggagtaccctgttcctggcattgctgagacaaaggaaaacccactcccttggaggagcatgaccttttcctgtaattcttc

SEQ ID NO: 692011 - DNA, 80 bp, Homo sapiens
aacctgggaccagtgtgaatttggaagggatcgtgtggcatgaaacagaagaagggggatatgagactttctactcggaa

SEQ ID NO: 692012 - DNA, 51 bp, Homo sapiens
aaaagtatcgtcgagaagcctatcatcgccctggaacagctgctgacagag

SEQ ID NO: 692013 - DNA, 100 bp, Homo sapiens
gtggataagcacaaagtcaagagacagcgattggacagaatttgtgaaggtcgcgtggggcaggcagtggcgctgcgggccaaggccttcggcttcaacg

SEQ ID NO: 692014 - DNA, 101 bp, Homo sapiens
ttttaccgaaaaagctgcttgaatgtctgccgaaatgttcaagtttaccaaaagagaggcaccgctggaacactaatgagcctgcctagggtagttaaaag

SEQ ID NO: 692015 - DNA, 83 bp, Homo sapiens
gagctggacggcgagcgcgagcggcgcgagaaaattacctaaaacctcgggcagaagaggagaggaggatagcagcagaagag

SEQ ID NO: 692016 - DNA, 83 bp, Homo sapiens
cttgccttgagtcagtgcgccgctctccagcccgcttgaacggatattagaaatggctactccccagtcaattttcatctttg

SEQ ID NO: 692017 - DNA, 100 bp, Homo sapiens
gaggcggcgacggaggaaacagaagatgtgtgtcccggcatggatatccggaacaacctcactaggttgcatgagctggagaattgctctgtcatcgaag

SEQ ID NO: 692018 - DNA, 83 bp, Homo sapiens
gggtccgagccagccgctgttttgccggaggagcccctcaggccgcaggagatgctgcatgcttctacgatataaagttggga

SEQ ID NO: 692019 - DNA, 95 bp, Homo sapiens
gctcatggcatcatcgtggtgtatgacgtcactgaccaggacagcagaactgcattgcactgggcatgctcagctggacatacagaaattgttga

SEQ ID NO: 692020 - DNA, 75 bp, Homo sapiens
tagagaacggagcccagctgcaggtgagagcacagtaaggactattgctatggatggtacagaaggcttggttag

SEQ ID NO: 692021 - DNA, 96 bp, Homo sapiens
gagctctcggattccttatgcagagtggccgacttggagtccttcaataatgttaaacagtggctgcaggaaatagatcgttatgccagtgaaaat

SEQ ID NO: 692022 - DNA, 98 bp, Homo sapiens
gggggctccgggctctgggctctgggtgcgcggaccgggccaggctgcttgaagagtgtgaacatggctacgcctcttcattcccgtccatgccgagc

SEQ ID NO: 692023 - DNA, 100 bp, Homo sapiens
tttgggtattcccttggaaatggtccacaaaggcctccgtgtggggctggtgtacctggcaggagtgattgcaggcaaacacagagcagcccaagctgag

SEQ ID NO: 692024 - DNA, 100 bp, Homo sapiens
ccgcccggccgcgggagcctcgtggctgcgtcaccgccgcccccccagacaagatggacaccgcggaggaagttgatcatggccttgccaggttggtgac

SEQ ID NO: 692025 - DNA, 77 bp, Homo sapiens
gcctggcatcaggaggagcccaatgtgcacctggtgattgtgggtcctgaagttaaagatcgaggtccggaagccac

SEQ ID NO: 692026 - DNA, 96 bp, Homo sapiens
attgactcctcctgtgttccagttaataaagcatctacaaatgaggcagcctggggcaggagtagatcccataatagatcacgttcaagacagaaa

SEQ ID NO: 692027 - DNA, 74 bp, Homo sapiens
cttcgtgaatggttcggctgaaatcatggatgaccatgaaagctgtggttctaattctaccaaccgtagtactg

SEQ ID NO: 692028 - DNA, 103 bp, Homo sapiens
aaagcaaacacaggattcaccacagtacttcacatcgtcgttcacatgggaatgtgcagctctcactgctaacagaaagagggatgggtgaagcagtacaaga

SEQ ID NO: 692029 - DNA, 82 bp, Homo sapiens
ctccgcagccgcagaggaggagcgcagcccggcctcgggaggaggacctggttgatagaagaatttatctcgtagtcttaac

SEQ ID NO: 692030 - DNA, 99 bp, Homo sapiens
ctgcagcgaagcacctctttactgttatccaagataaattctgtgggattataaacatttcagtagaaggcctgcatgatgtcatgacggaagatcctg

SEQ ID NO: 692031 - DNA, 90 bp, Homo sapiens
ctcatcgtttgcgacgttccctcagcctctgcccaaagaaagaaggagtgaaagcaagttgaatacattggtgcagaagcttcatgactt

SEQ ID NO: 692032 - DNA, 100 bp, Homo sapiens
gcatgttcaagcaattcaacaagttaactgaggactaatggggagtcggggaatatttgtgggtattttttttacttcctcttggttcccagctgtgaca

SEQ ID NO: 692033 - DNA, 82 bp, Homo sapiens
ccagcttcggaacaagagaccctggacttcgcaggtgagcagtaacggaaatcagccccgtttattcctcccagcacctgcc

SEQ ID NO: 692034 - DNA, 82 bp, Homo sapiens
gacaagccgctggcagccgcggatctcaccgccgctcagggtcagctggccgccggcacctgtgagattgtgaccttggacc

SEQ ID NO: 692035 - DNA, 75 bp, Homo sapiens
gaggggattgcgagtcaccgagtttcccgcgcggcttgagatcgctggcctccccaacgacacactgtcagtgga

SEQ ID NO: 692036 - DNA, 100 bp, Homo sapiens
cggaggaggaggggagaggcctggaggacaccaacatggtgtggagctgatgagtctgccctaccgcctggtgtttgctgtggcctcggaggattccgtg

SEQ ID NO: 692037 - DNA, 120 bp, Homo sapiens
tggggatgaagactgtgttgacggcagtgatgaaaagaactgtggaagccctcctatgacactgaaacagatcctagtgagggattgatgaatgttctaaagaaaatttatgaagatgga

SEQ ID NO: 692038 - DNA, 100 bp, Homo sapiens
cttgaagcagaggagcagcaggaccagatgccatggacaatattaccaggcagaaccaattctacgatacccaagtcatcaaacaagaaaacgagtcagg

SEQ ID NO: 692039 - DNA, 97 bp, Homo sapiens
tccgccatgtcatccacttcgcccaacctccagcaagtcaagccagagatctgttatcaaaaatgttagtgattgatcctgacaagcggatctctgt

SEQ ID NO: 692040 - DNA, 100 bp, Homo sapiens
cctcattgccgaggcctggtgctctgtgcgagacctgcccgccctgcaggaggccctgcgggacagctcggggctgaggaagctgccctcgaaaccctcc

SEQ ID NO: 692041 - DNA, 90 bp, Homo sapiens
cacaagcaagctcagtcacaagttcaaagaggagtttcggacgtggctgagggaggaatgggggcgcacgctggaggacatcttccacga

SEQ ID NO: 692042 - DNA, 80 bp, Homo sapiens
ctggccacggggactctcttctggatggtgggatgtgtgtgggctgaaattccgagctgcggttgtgcatgagaatacac

SEQ ID NO: 692043 - DNA, 121 bp, Homo sapiens
gagaggatctggtgtaccaggcgaagctggccgagcaggctgagcgatacgacggtgttggagcgggccggagagaagtagagtgggctgcgaggagaaggaaacaggcctttcggaggct

SEQ ID NO: 692044 - DNA, 123 bp, Homo sapiens
catcctggataacccggtggtgcagctgggcctgaccaacccgaaaacattgctaggtgtcatggagaaactccagctgggcccagagattctgcagcgggaaaatccaaggcttatttatgc

SEQ ID NO: 692045 - DNA, 75 bp, Homo sapiens
ccgcctcctacctccttctgcttcggaggaatacccacacaccgaagttgggtgaggaagattcgttttgctcct

SEQ ID NO: 692046 - DNA, 75 bp, Homo sapiens
gacgaagtgtactgccttaacgactttgaagaagatgacacaggccgggtgctcgtccactgccgggaaggttat

SEQ ID NO: 692047 - DNA, 97 bp, Homo sapiens
gtggcacctgcgcgaagctggccaaagcctgcccagacggctcacctgtgcgggatggaacaaaaggtctggtccgagagcaggaggctgggctgct

SEQ ID NO: 692048 - DNA, 87 bp, Homo sapiens
aaaatctccccggtgactttcagggccggatcgtggcacccagaggctgccaggactttggctgggacccctgctttcagcctgatg

SEQ ID NO: 692049 - DNA, 75 bp, Homo sapiens
gtttatccggaagaagcagcaggagcagcagctgcagctctactccaaggagagcaacaggtgtgccctggggct

SEQ ID NO: 692050 - DNA, 80 bp, Homo sapiens
ggaggccatcatcatgaaggacgtgcccgactggaaggccctgggaggagcggggacactgaggacctctctccaaattg

SEQ ID NO: 692051 - DNA, 90 bp, Homo sapiens
cacctgtggagctctgggtacagtctggctcttgctgattgaattcctttggtgcagtttagcatgttcctctgtgttctgcatctcctg

SEQ ID NO: 692052 - DNA, 74 bp, Homo sapiens
aagacgccacagacagcagcgcagtaccaccttccagagatgtagaacgtcatgacatgaataccttaagcctg

SEQ ID NO: 692053 - DNA, 50 bp, Homo sapiens
cacgcacctggcggtcatcagcaacgatcccattgaagataccacgctgc

SEQ ID NO: 692054 - DNA, 74 bp, Homo sapiens
gtgagattcagtggtccatgcgtgcgtttgtcgtagtggtggacatgacaacagagtcaactgcatacagtggc

SEQ ID NO: 692055 - DNA, 100 bp, Homo sapiens
agttccggcccgaggacaccgactaccagcaggaggagataagcaaggacctcagagccacactgaacgccttcctgtaccacatgggccaacacagcaa

SEQ ID NO: 692056 - DNA, 90 bp, Homo sapiens
aaggatttcacggacattcagcaagattttactgatgggaagaagagttactataagaaggtgtgcattgatgcggaaaccctggaagtg

SEQ ID NO: 692057 - DNA, 100 bp, Homo sapiens
tgcagatcaagaccctggagggcgagttctcggtcaccatgtggtcctcaggtttacccaaggtccagcctagcccctaggcaccatgtcggacagtgat

SEQ ID NO: 692058 - DNA, 83 bp, Homo sapiens
caagaaaatcaaaagaaacttttgcccttatcagtaacacctgagtaattgtgtaagtgactgcattggaactggatgtccag

SEQ ID NO: 692059 - DNA, 83 bp, Homo sapiens
aaggctgacgtggagcggtacatcgcctcggtgcagggctccaccccgtcgcctcgacagaaatgagccgtcagactgctaca

SEQ ID NO: 692060 - DNA, 100 bp, Homo sapiens
tgaccagcaccagccctgatccaggtgaaagacccctgacaaaagacaatcatcttctgggtacatttgatctgactggaattcctcctgctcctcgtgg

SEQ ID NO: 692061 - DNA, 83 bp, Homo sapiens
ccctacggcctcgttgccccccgtttccagcgaaagttcaaggccaagcaggcccgctgcccaggtatgcacaagtcaaggcc

SEQ ID NO: 692062 - DNA, 82 bp, Homo sapiens
tgctgagctatctggagacagctgactactccatccgagaagagattgagtgtggccatctggggccgtgtggtatttgcca

SEQ ID NO: 692063 - DNA, 100 bp, Homo sapiens
tatcaaggacggcaagctgatcaagaacaatgcctccactgactatgacctatctgacaagagcatcaaccctctggaagcagtgtggttcctctccaac

SEQ ID NO: 692064 - DNA, 75 bp, Homo sapiens
ggcagaggatccagtgttcaccatcctggccccggaagcatttgacattgtgcagcaaagaaatggttatggaga

SEQ ID NO: 692065 - DNA, 82 bp, Homo sapiens
ccgagcgcgagtgtgtaggtgacaggacagcggccaggcccgcccctcccctcgggaggagctgtgcagtgagaagcaaagc

SEQ ID NO: 692066 - DNA, 87 bp, Homo sapiens
ggcgtccatctgagcttcatcaggcttatgcatctggatgtgacattgtaatactgggaagcgattttgaaagattacagataatcc

SEQ ID NO: 692067 - DNA, 139 bp, Homo sapiens
catcttttatgaccaaaactgtgccttgtggaaatgaacttcacaagttcctcatctgggacactgctggtcaggaacggactggatgttgaatttgttctctcagcacctatttctgaatggaatggcaaacagggac

SEQ ID NO: 692068 - DNA, 100 bp, Homo sapiens
gaggggacgtcacatgtcattataccttcacccagcatttcatccctcgtcgaaaggattggattggcatctttagaccgtttccctggggagatggtaa

SEQ ID NO: 692069 - DNA, 100 bp, Homo sapiens
accgactactgtcagcagctgtgccaggcagttcaattaacctccagaagatggctgaacctgcaggaataccagagcaagaaactgatgtctgacaacg

SEQ ID NO: 692070 - DNA, 75 bp, Homo sapiens
tcaagccaagaacagcccaatctcctttctgggcaaacgttccaagttacatgggaattggtctttctgctcaag

SEQ ID NO: 692071 - DNA, 98 bp, Homo sapiens
cggctcagttgtccatgaccctgaaggtccaggagtacccgaccctcaagaacaatggttccctggtttggtgccagaatcacaagcaatgttctaag

SEQ ID NO: 692072 - DNA, 100 bp, Homo sapiens
cttgggtgcgccttcccggcgtctaggggagcgaaggctgaggtggcagcggcaggagagtccggccgcgacaggacgggcagccactgatcacaatgtg

SEQ ID NO: 692073 - DNA, 74 bp, Homo sapiens
cggtccgacagagtcctccgtgtcctcccccgcatgacccccttggcacggaagacatatgcttgtgagacaaa

SEQ ID NO: 692074 - DNA, 100 bp, Homo sapiens
ggcgcctagagggaaagcgagagggagacggacgttgagagaacgaggaggaaggagagaaaatggcgtccacggtattttcatctcagcctagtgacga

SEQ ID NO: 692075 - DNA, 100 bp, Homo sapiens
atggctcactccccggtgcagtcgggcctgcccggcatgcaggttgcccgaagctcagcagagagtcggaggctgctttttaaacctgatgccacagatg

SEQ ID NO: 692076 - DNA, 80 bp, Homo sapiens
gaaggaagagagattcctatagttcaccgagtcttgaagattcatgaaaagtaatctgtaagtcagatgctccaacaggg

SEQ ID NO: 692077 - DNA, 50 bp, Homo sapiens
ccggtggccgcgctcggacccgtttccagccagagacgacactcttccat

SEQ ID NO: 692078 - DNA, 100 bp, Homo sapiens
ttttcttcctgcccctcgttgatgagagcattcgaagtgacctcagcagggcatccaggggaaagacgcctcagccttcgccgccaagatgagggggggc

SEQ ID NO: 692079 - DNA, 75 bp, Homo sapiens
atgccgacatcgacgccgcctggcaggccctgcgcaccaggttttagctaaagaagatactgaggcagctattca

SEQ ID NO: 692080 - DNA, 49 bp, Homo sapiens
aaagcggaagaatttagacgcacactggctgccccagagcacatcagct

SEQ ID NO: 692081 - DNA, 100 bp, Homo sapiens
ttcttcaggggcttattctcttgtcctatgctgggctcttgcactgtttggtggaaatggtgagacaggatttgagcaaaattctacttattcagtgttc

SEQ ID NO: 692082 - DNA, 98 bp, Homo sapiens
tcggaaaggaaacaaaattcgatttgcaaatcattcagtgaatcccaactgttatgccaaaggtctattctggataagcaggttttgtgaagacattt

SEQ ID NO: 692083 - DNA, 60 bp, Homo sapiens
ccaatccccggcagctctctcagctgtgtgactggctacgtgttaatgaaagctatttta

SEQ ID NO: 692084 - DNA, 90 bp, Homo sapiens
cgcgcttatcagcgctatgagaagtgaatacagcagtccagttaatcttggtggcagcttctttggcagctccagttttcaactatgctg

SEQ ID NO: 692085 - DNA, 89 bp, Homo sapiens
ccggcacccccatgtttgtggtcaaggcctatctgcccgtcaacgagtcctttgggtccccagccccaccccagccccaaaggaggctg

SEQ ID NO: 692086 - DNA, 90 bp, Homo sapiens
ctcaactccaaccacgacggggccgacgagacctcaggagcagccctgggccccctgctggctgggctcctctccccgtccggctggagc

SEQ ID NO: 692087 - DNA, 82 bp, Homo sapiens
tgagagtcacagaggaaggacagtggagtctggcatcttattgtttcactgttacatgccttgaagtgatgaggaggtttct

SEQ ID NO: 692088 - DNA, 100 bp, Homo sapiens
ggagcagatgccctggagttaaatttatcatgtccacatggcatgggagaaagaggaatgggcctggcctgtgggcagctgtatgcaggagctattcttg

SEQ ID NO: 692089 - DNA, 95 bp, Homo sapiens
gcacctgcgcgaagctggccaaagcctgcccagacggctcacctgtgcgggatggaacaaaagtccgggaccatgtctggagaactaccaccaaa

SEQ ID NO: 692090 - DNA, 75 bp, Homo sapiens
agtgcggaggtcaaactggcaatatttgggagagcaggcgtgggcaagtcaggcttctggctgtgatgggtcgga

SEQ ID NO: 692091 - DNA, 100 bp, Homo sapiens
ctgaataccctgatgggtggtacacagacatacggtttagcttggattcttctgatgtagagcgactggaaagattcttcgactcagaagatgaagactt

SEQ ID NO: 692092 - DNA, 100 bp, Homo sapiens
acttctgcaaccccgcagagcgcatccatcaaagctttgcgcaacgccaacctcaggcgagatgaacgtactcaggaaaagtggggatttccaatgtgcc

SEQ ID NO: 692093 - DNA, 87 bp, Homo sapiens
ctgcccgcccgggagctgtcggccccggcccgactctatcacaagaagatggagaaggatgaaactgtgagtgactgctccccacac

SEQ ID NO: 692094 - DNA, 100 bp, Homo sapiens
tctcctcaggcctctgcactttactatgatgaatttgccaacctgatccaacatgaaaagctggatccaaaagccctggagctctggaagatcatcgcag

SEQ ID NO: 692095 - DNA, 100 bp, Homo sapiens
ttgcccttagtggccgtcttttgcctctttctctcaggctttcctacaactcatgcccagcagcagcaagcagcaaaatctggtggaaagaagtctctag

SEQ ID NO: 692096 - DNA, 82 bp, Homo sapiens
gaaagtattgcaggacaagagatttaaggccatgcaggacgcgttggcagaccttccagaatggtatggaataaaaggcatg

SEQ ID NO: 692097 - DNA, 100 bp, Homo sapiens
atctgtgtcgccgccgcccgcggcgtccccggtttggtgttgcggcgcccaccttcgggaggatcagatgaccactctagagtccacctgacaccggttg

SEQ ID NO: 692098 - DNA, 100 bp, Homo sapiens
ggttggtgctttcacaaagataatagaagccatgggattcacgggacctttgaaatacagtaaatgggtcgttgaggacttccacatggagattggcaca

SEQ ID NO: 692099 - DNA, 82 bp, Homo sapiens
gaacaatgaggcctacgcagagctcatcgtccttgggatggaagcttcctggcgccaggtggccggtggccgaggccgatcc

SEQ ID NO: 692100 - DNA, 101 bp, Homo sapiens
tactggccgaaggggcgtctgcggctctccgccgtccccagccctgcctctccctgggctctgatggagaggagaaaacctatggtggctgtgaaggacct

SEQ ID NO: 692101 - DNA, 73 bp, Homo sapiens
cggcaggaccagcgggcgggggcccacgagtgtgggcaagagcagtttactgttgcgttttgcagacaacact

SEQ ID NO: 692102 - DNA, 90 bp, Homo sapiens
tgatgctggagaccttgacacttatatcctccctggcagctgcagctactggaggttctgttctcaatgttgctgccctgttggcatcag

SEQ ID NO: 692103 - DNA, 90 bp, Homo sapiens
attttggcattgacatttaattttagggtcctttatatagaagggagagtagctacctgaacgacctggagcgtattgcacagagtgact

SEQ ID NO: 692104 - DNA, 100 bp, Homo sapiens
aggtgcccgagccccggcgccgccgccatctctgccttcggtcgagttggacccccggatcaaggattctcagcaagttacagaagtatctttgacaact

SEQ ID NO: 692105 - DNA, 75 bp, Homo sapiens
tactgtgaatcatttgcttatcatcttcatagatgacagtccagaccttttttctatcagtgcttatgtttatgc

SEQ ID NO: 692106 - DNA, 75 bp, Homo sapiens
cagggaggatgtcgggacaccccggaagctgggaaatggtacagcagggaagaactggaaactcagagaaagaaa

SEQ ID NO: 692107 - DNA, 50 bp, Homo sapiens
cgatcagtccccagtccgacaaggatgctgatatgctaactggtgatgag

SEQ ID NO: 692108 - DNA, 74 bp, Homo sapiens
agaatactgaatggctcttctaacaggaaacatgccctgaactgtcacagaatgaaaccagcgctcttcagcgt

SEQ ID NO: 692109 - DNA, 82 bp, Homo sapiens
atcgaccgggacagctaccggcgcatccttatgcgagcagctgatgcagctgtacagtgcgcgccagcggcggcggctgaac

SEQ ID NO: 692110 - DNA, 75 bp, Homo sapiens
gccgcggcctcggacgactcgccttcagaagttttagaaagagcgttttcgctacgtaaagcacattcgataaag

SEQ ID NO: 692111 - DNA, 101 bp, Homo sapiens
ctgagctcgaggaggtggcgcgatggagggactggaaggcggctatgagaggttttcctccgagtacccagaattctgttctaaaaccaaggccctggcag

SEQ ID NO: 692112 - DNA, 100 bp, Homo sapiens
cggggaagtgtctgtagcgtccctccctctcaaccacaataacaggcggagggtcggcgtagctgatcttgcatctttaatggataaaacatttgagaga

SEQ ID NO: 692113 - DNA, 82 bp, Homo sapiens
cgccatggagggggtgctgtacaagtggaccaactatctgagcggttttaaaatcaaagatgggaaaatcggagaaaattgc

SEQ ID NO: 692114 - DNA, 82 bp, Homo sapiens
gttctcaaatataggcattctgatgggaacttgtgtgttaaagtaacagatgatttagttgactatcggacaaaacctttct

SEQ ID NO: 692115 - DNA, 100 bp, Homo sapiens
gaagcttctgtcagaatgccaatacaagcagttgctattgtacagggggatacgctggaagacatttacaaccaagtgaaacagatcatagaagaacaat

SEQ ID NO: 692116 - DNA, 101 bp, Homo sapiens
ctacactgccgcagcctgcacaagggtctaaaattcccaggactccacagctttgcaccagataagcctggaggaatactaatgatggatctaaaagaaga

SEQ ID NO: 692117 - DNA, 96 bp, Homo sapiens
agctcaggaccaggcaccttctgtggaaggcgaggattaaatccaccacacagggtgaaatctatctccatgacaacattcacacaacaggaaatt

SEQ ID NO: 692118 - DNA, 100 bp, Homo sapiens
gacttgctgctggctgccgccgccgccactggaaagctgaaatccttcgcccggaaattcatcaagacatggtctgctatacagctcagactctcgtccg

SEQ ID NO: 692119 - DNA, 98 bp, Homo sapiens
gatgatgttcactggaaggaaaatgggacattagttcaagtagcaactatatcaggtgcaactgacatgggtgaaccccagggatccatgcggattct

SEQ ID NO: 692120 - DNA, 82 bp, Homo sapiens
gcaggggcggcggccttacgggttttaaaatcaaagatgggaaaatcggagaaaattgcccttccccatggccagcttgttc

SEQ ID NO: 692121 - DNA, 100 bp, Homo sapiens
caaaatatgcaaaatgatatcaagttagcatttacagatatggctgaggagaatatccattattatgaacagaaactgccaagttttggaccttatctgg

SEQ ID NO: 692122 - DNA, 100 bp, Homo sapiens
ctgcccacaaaaatgagagagaaaacaccatcttatggttttctcacgatgagtcggaggaggatatcgtgtaaagatctgggccatgctgactgccaag

SEQ ID NO: 692123 - DNA, 145 bp, Homo sapiens
ggcatcagctgacacttcaggtgcttgattttgtgcaggatccgtgctttgcccaaggagatggtctcattaaggcagccctgaagcagcttcctaggaacaaggtccccaacatggcggtgatgatcaagtccctgactcggag

SEQ ID NO: 692124 - DNA, 126 bp, Homo sapiens
agtcctgaaaagatatatgaaagaacaatggccgtccttcagattgaagctgaaaaggctgaattacgatctagatactgatgacgatttaaatagcgacgattatgaatatgaagatgaagccaa

SEQ ID NO: 692125 - DNA, 97 bp, Homo sapiens
gccatggatattagaggaaaaatttccaagccagagtcatctggctatcatggtgaacttacttcagattgtgcgggaccactgggttcatgttctt

SEQ ID NO: 692126 - DNA, 131 bp, Homo sapiens
tggaggtcgacgactccgtcgcagactacggacctgtctgggtctcagccgccaaagaccccgtccgggcagtaaacaagagctctgaaaggggaaggaagccaggagaaagccagctccattagtcacgc

SEQ ID NO: 692127 - DNA, 75 bp, Homo sapiens
ccccatcaaagtgaaaactgaacccacagaagattctggctcaaaactgaaggagatctttgacaagatccacag

SEQ ID NO: 692128 - DNA, 100 bp, Homo sapiens
aggacagcgagcgcagcagtgacggcgaggaggccgagccatcgtcagccagtggcagcaggagtccaaagagaaggtggtgtccctcctgctgtcccac

SEQ ID NO: 692129 - DNA, 100 bp, Homo sapiens
ccagcatgtatcagccgaggtggagctgcggggccctggcatgaaagactcgagccttacgcagacccttattatgactatgaaattgagcggttttggc

SEQ ID NO: 692130 - DNA, 90 bp, Homo sapiens
tggcccaaaacccacagaagttgtattagatgatgacagagaagatctttttgcaggtatgggcgacattgaaggactgatagataaagt

SEQ ID NO: 692131 - DNA, 75 bp, Homo sapiens
tcatcaaaaatagtgatagctttgataaactctaaaatagagctcaagcttgagaagagagaaccactaaagggc

SEQ ID NO: 692132 - DNA, 95 bp, Homo sapiens
ccagcatgtatcagccgaggtggagctgcggggccctggcatgaaagtaatagctcttcaagtctgcaataaaaaatggcctccaacaaaactac

SEQ ID NO: 692133 - DNA, 87 bp, Homo sapiens
tttatggttatgacaatgttaaggaatatctggagagcttccagtgtgctaggtctacctctaaaaggcctaaggctgatgaggaag

SEQ ID NO: 692134 - DNA, 75 bp, Homo sapiens
aaggctgcgagggactaagagcagagaagtcctggctgagcaaggttggaagccctagttctcgcattgaccgca

SEQ ID NO: 692135 - DNA, 90 bp, Homo sapiens
aggcggccgccccgggcaccgcggtgctgctggtcacggccaacgtgggctcgctcttcgacgacgtgaccaaaagccagccccactgtg

SEQ ID NO: 692136 - DNA, 82 bp, Homo sapiens
ctggacaccaccccaggtactgcagggtggggcacttccgccacaggagccgatgctgtgtgctgtggacccacctggggtt

SEQ ID NO: 692137 - DNA, 75 bp, Homo sapiens
gctggagagagtcagggggcgcgtgctgaaggactttccttatcccagttgattgtgcagaatacactgcctgtc

SEQ ID NO: 692138 - DNA, 88 bp, Homo sapiens
tctagacaatggtacaatctcagtgtacctgaaggaaatcttaaaagaaattggtgttcagaatgtaaaagggatccacaaaaacaca

SEQ ID NO: 692139 - DNA, 75 bp, Homo sapiens
gccctccacttggcttgtagcaagagtactcctgattgtgacatcacattcatcccctgggcgatggagcttgtc

SEQ ID NO: 692140 - DNA, 75 bp, Homo sapiens
gcttgttatgttttcatcacttctctccagaagaagcatcaagtgtacctgatttgtgaacctatcttgcttcag

SEQ ID NO: 692141 - DNA, 55 bp, Homo sapiens
tcctcctggctgtgctcatatacacctgctctgtctgatctggagctcatggccc

SEQ ID NO: 692142 - DNA, 51 bp, Homo sapiens
cccaaggatgaagaacggagacgctgcagaaccttggcctgaaaatgctac

SEQ ID NO: 692143 - DNA, 83 bp, Homo sapiens
cacaccgtcttcggtctcctggggtcggcgccgagtgggaggatggcggaaatgaaggatttgggggcagagcacttggcagg

SEQ ID NO: 692144 - DNA, 97 bp, Homo sapiens
ctgccgctgctgctgctgctaatgctagaggaagttcagaagcagaaggaactttccaaagctgaaatccagaaagttctaaaagaaaaagaccaac

SEQ ID NO: 692145 - DNA, 87 bp, Homo sapiens
cgtgccatgaaggaggacagtgaaaaagttccgagcttgttaactgattatattctgaaagaagagaagccagattgctccaaggcc

SEQ ID NO: 692146 - DNA, 80 bp, Homo sapiens
gagctgagtggttgtgtggtcgcgtctcggaaaccggtagcgcttgcagcatgggtcggcactcttcaccctcccgagcc

SEQ ID NO: 692147 - DNA, 100 bp, Homo sapiens
cagccctgcctctccctgggctctggatggtgccatgacaatggtgtgaactacaagattggagagaagtgggaccgtcagggagaaaatggccagatga

SEQ ID NO: 692148 - DNA, 75 bp, Homo sapiens
tgccgccctgggcgcggccctgctcctgtcttccattgaggcagaagccattcattctactattcatctgttgaa

SEQ ID NO: 692149 - DNA, 75 bp, Homo sapiens
tatgagaggacagaggctatatgaaaaatgaacgacaatctccttgagagctggagcgacctcgacgagctgaag

SEQ ID NO: 692150 - DNA, 100 bp, Homo sapiens
tcagcctcagagacacgaagagggctttagcaacctagaagatatcaatgatgtcaaacggctgaaacctggctacttagaagctactgtggactggttt

SEQ ID NO: 692151 - DNA, 75 bp, Homo sapiens
cgtcaatgacttacgccaagaagaattccaacaatgtctcacccatcttggctgccacccaaaagcactggtgag

SEQ ID NO: 692152 - DNA, 100 bp, Homo sapiens
cacttaatctgggccaaaaggaatgaccctagccagactcagggatcaaagagcaaacagattcagtggcctgcattgatacagatgaatatagacctcc

SEQ ID NO: 692153 - DNA, 100 bp, Homo sapiens
cgcgacgactaaatacccgtgtctgaagtcttcaggcgagctcaccacatgctacagcaggaaccgaatattgtatctgacgcatcctgtaatactgaag

SEQ ID NO: 692154 - DNA, 75 bp, Homo sapiens
tctatgccagtgagaggcccaagtccctagaggacgggaggggcaagctgcggccaaccaaggccaagagcgagc

SEQ ID NO: 692155 - DNA, 100 bp, Homo sapiens
aagagcagtaagggactgagctgctgttcctccaggagtgatccaaaatggagcgcgggtcctgagccgagggctgtttcctggcgtgcggccgctgcca

SEQ ID NO: 692156 - DNA, 75 bp, Homo sapiens
gggacctgcacaaccagaccctggtcaggccctggccaacgtcaacattgggagcctcatctgcaatgtaggggc

SEQ ID NO: 692157 - DNA, 100 bp, Homo sapiens
ggcgaaggagcggccgggagcccgccgcgctggtagcgatactctggatgaatattttgaatatgatgcagaggagttcttggtctctttggccttgctg

SEQ ID NO: 692158 - DNA, 80 bp, Homo sapiens
gacgccgcctggcaggccctgcgcaccaggcccttctgcgatgttttacctggctgcggctgtgtcagatttctatgttc

SEQ ID NO: 692159 - DNA, 97 bp, Homo sapiens
ccataaggacttcattccaaatatgattacaggagcagcccagctctgctggccgtccgctctgactaccactgtgccgtgtggaagtttggtaaac

SEQ ID NO: 692160 - DNA, 100 bp, Homo sapiens
ggccgctcgcggagggagaggctgcagagcgagggcaggagacacaggcagccatgccgcgcagcccaacatccagcgaggacgagatggcccagagctt

SEQ ID NO: 692161 - DNA, 49 bp, Homo sapiens
tctactgtcagaccacacacagatgcacagccagagaacaacacatcac

SEQ ID NO: 692162 - DNA, 90 bp, Homo sapiens
gtattcactacctgcatgctaactgggtgttgcacagagatttgatgtaaaaaaagattggtctgaccatgctctctggtgggaaaagaa

SEQ ID NO: 692163 - DNA, 83 bp, Homo sapiens
gggtggccctaggggcagcgagcaagacagcaagcagatgagcagcaccagcagtaagagggctccgaccacggcaacccaga

SEQ ID NO: 692164 - DNA, 127 bp, Homo sapiens
tggaggtgtcagtgttaaaggaacctctacaacgaaggtgaagccacggaagataagaagaaaaagtcagcactttttgaagtgtctgaggttataccagtcatgacaaataattatgaagaaaata

SEQ ID NO: 692165 - DNA, 131 bp, Homo sapiens
gaagaaacaggaagaagaagaaacgatgcagcaagcgacatgggtaaaatacacatttccagttaagcatcagctgtgttccagatcatctccctggtaatttaccccgtgaagtacacccagaccttcac

SEQ ID NO: 692166 - DNA, 50 bp, Homo sapiens
cactgaagggggactacaggttcgagagaattcaaaatgtcctcagcctc

SEQ ID NO: 692167 - DNA, 100 bp, Homo sapiens
cagctgctggaggactataagcatgggaccctgcgcccgggggtcaccaatgaacaggtcacaagacacccacttcaggagtcctgcctcacacccacag

SEQ ID NO: 692168 - DNA, 74 bp, Homo sapiens
gaaagtgctcctgcggctgtatggagcgattttgcagatggagagacatccaggagacagcaaaaactataatg

SEQ ID NO: 692169 - DNA, 51 bp, Homo sapiens
ccgagctggacccggaccggttttgggtattggcatactccacacatctgt

SEQ ID NO: 692170 - DNA, 100 bp, Homo sapiens
aatctccttttccttggctacccaagctcctcctggggtagagacagatcttattgatgttggattcacagatgatgtgaagaaaggaggccctggaaga

SEQ ID NO: 692171 - DNA, 101 bp, Homo sapiens
gaccgtgtgggccgtgaggatgaggacggctgggagacgcgaggggaccgcaagaacaccaccgatagccacaccgaagagttctcccatttgctggttcc

SEQ ID NO: 692172 - DNA, 144 bp, Homo sapiens
tgattttatgggaaaattaagcagatgctccagtttgagaaacctggatctgcgatctgtttgtgggtggatgctgatatactgcttgacttactgcgtatttgaagattatcctgtttgattttccatctaaactgatccagg

SEQ ID NO: 692173 - DNA, 101 bp, Homo sapiens
gggatcccagcctcaggcgtgcgcggacggtgtgcggtttcagagactcctccactctctgggaatgacacggactccctctcctgcgacagtggcagttc

SEQ ID NO: 692174 - DNA, 100 bp, Homo sapiens
cagaactactatattcagtggctaaatggctccctgattcatgagctccttaataagcatttatagtcagtttttggcagcaatagaatcactaaaggca

SEQ ID NO: 692175 - DNA, 90 bp, Homo sapiens
accagccggaaagtacgagtcggctcagcctggagggagccaggtgtgccgcccgcctctgcttcatggatccctaccctggctggacgg

SEQ ID NO: 692176 - DNA, 83 bp, Homo sapiens
cccaggcgcagatgcgggccctgctggaccagctcatgggcacggctcgggacgcctcccggcatggtgctcaaggccttctt

SEQ ID NO: 692177 - DNA, 101 bp, Homo sapiens
caataggcagctatttcacacttcagatgctgaagcgagtccctgagctcccgtatcttaaatagcgaagatggagaaatactcaataatgaagagcatga

SEQ ID NO: 692178 - DNA, 88 bp, Homo sapiens
gcgcgcagcccgcccgcccggcgaccagcaagatgccttcaattaagttgcagagttctgatggagagatatttgaagttgatgtgga

SEQ ID NO: 692179 - DNA, 75 bp, Homo sapiens
ctatttgcagtggagtcttggaggagccagtacagtgtgctggaattgatgttcgtctgtgtgatgttggtgagg

SEQ ID NO: 692180 - DNA, 90 bp, Homo sapiens
agagacattttctctagctgtgaatttactggacagattcctgtctaaaatgaaggtactcagctggcccactccacagccaggcctggc

SEQ ID NO: 692181 - DNA, 138 bp, Homo sapiens
ggcaaggcaggcggcgcggccggcctcttcgccaagcaggtgcagaagaagtttagcagggcccaggagaaggaatcagagatcattgatttcttcctgggggcctctctcaaggatgaggttttgaagattatgcca

SEQ ID NO: 692182 - DNA, 52 bp, Homo sapiens
ccaaaagacagctccagttttacaggatcttagaaatgaagttgaaaaatta

SEQ ID NO: 692183 - DNA, 90 bp, Homo sapiens
aagaaagggaagctattgctgggattttgaggaggtggtttttccccatcatcggccacatgggcatctgcacatccacaggagtcattc

SEQ ID NO: 692184 - DNA, 75 bp, Homo sapiens
cagtcgacactctcgcgcccggaggcaagttggacaaatgcaagtaaaaagcaacgtgaaaagctccttgagttg

SEQ ID NO: 692185 - DNA, 100 bp, Homo sapiens
tcttaatgaagtaactatccctgaacactgggatcaatactcagcatccagctgtcaaatcaacaccaaggaaaggcagactacaagttactgagcacct

SEQ ID NO: 692186 - DNA, 83 bp, Homo sapiens
ctttaatgcactaaacctttaatattgtattctcctaaatgagacgtctcgcatttgagcagattgactggggcgactttggg

SEQ ID NO: 692187 - DNA, 83 bp, Homo sapiens
ctctcttctgagggctcccagacatatataatggtaaatgtctgctctaagaagcagacaaccggacatgcgcattcatagca

SEQ ID NO: 692188 - DNA, 98 bp, Homo sapiens
gataccagcactgtaccccaggatgctgccaccatccccagctcagccatgcaggccccaacaggtgcagctgaatgccggccagctgcagtatatcc

SEQ ID NO: 692189 - DNA, 98 bp, Homo sapiens
aactgtcaccttgatgctggcgatgctgagctccctactggctgagggcagagactctcccggttgctgtgagtctaggtactccaattatgaagcca

SEQ ID NO: 692190 - DNA, 100 bp, Homo sapiens
cttgtccacgacaccggctacttctcagctttaccatccctggaggagacctggcagcagaggcccacggcgttggccaaaattcttggagtttacagaa

SEQ ID NO: 692191 - DNA, 90 bp, Homo sapiens
tcttattcccaggacatcaaggagactttcaataggtgtgttccttattccctacgtcctgatcgccctggttggaggaatccccatttt

SEQ ID NO: 692192 - DNA, 50 bp, Homo sapiens
cggagatgcagctcaaggggaagaaaggaagcggggagaggtggtgagag

SEQ ID NO: 692193 - DNA, 123 bp, Homo sapiens
gttttggccaaattgggcgagggcacaaaataaccacttaccccttctcaccgaggaagagcgggagaaaggatttggagcaagaggtggtggtggccttcccccgaagaaatttggtaatcc

SEQ ID NO: 692194 - DNA, 82 bp, Homo sapiens
gagagcgtgaccgagagcgcgaatatcgtcatcgttagaagatttcctctacatgacaaagaaagactggaaaagtggttaa

SEQ ID NO: 692195 - DNA, 98 bp, Homo sapiens
aaaaactccaacagcttcatatggacagatggacttcaaatgctgtttgtattccagagactaggagctatgaagacatgattggtgaggaggtgcca

SEQ ID NO: 692196 - DNA, 75 bp, Homo sapiens
agtacatgtttgtaactacctggcattgccttttgttgaggattacttccttaggatagattgccagaagtggag

SEQ ID NO: 692197 - DNA, 51 bp, Homo sapiens
gtggagaggcaagcacggattccagcctccatcttccaagaagagcgatgg

SEQ ID NO: 692198 - DNA, 82 bp, Homo sapiens
ccttgtggagccggagctgggcgcggattcgccgaggcaccgaggcactcagaggaggatattagaaatggctactccccag

SEQ ID NO: 692199 - DNA, 100 bp, Homo sapiens
ccgagacacaccaggccggcaggctgagaaaagcgagaccgcgtgcgaggaccggtgctggagaatctggtaaaagcaccattgtgaagcagatgaggat

SEQ ID NO: 692200 - DNA, 83 bp, Homo sapiens
agcgtcacttggggaaaacaaggtggacccgggaagaggaatcactctgcatgatgaacctgtcgactgggcggcagcaggcg

SEQ ID NO: 692201 - DNA, 88 bp, Homo sapiens
aagcaaacctcagcctggaggcacttttccaggtcctgagaagtatttctcgttttcattggagatcacagcatacaaaagccaatcg

SEQ ID NO: 692202 - DNA, 101 bp, Homo sapiens
caagttctgtagagaaactcgggcaacctttgtgatatttctgggggtaaacccctagaagtggagatggcagggatagaatacatgaatgatgatcctgg

SEQ ID NO: 692203 - DNA, 100 bp, Homo sapiens
catcatgagcgatgttaccattgtgaaagaaggttgggttcagaagagggattatgatgcatcattatcacagaagaaattcgtgtctatagcttttaag

SEQ ID NO: 692204 - DNA, 100 bp, Homo sapiens
caggcccacaagaagcagctggactctctgcgggagaggctgcagcggaggcggaagcaggactcggggcacttggagttcacccagggcatgatcttac

SEQ ID NO: 692205 - DNA, 75 bp, Homo sapiens
cacaggaggctgtgcgggccccgctccgcttcgaatgggacaagaaatggattctcagtcatgaagatgtcatat

SEQ ID NO: 692206 - DNA, 50 bp, Homo sapiens
gctcttcctcctcctcccgcgacggcctacaatgggcaccatcaagcctt

SEQ ID NO: 692207 - DNA, 100 bp, Homo sapiens
tcgccgcccccagtgtccgagctggatcgtgcggacgcctggctcctccgaaaagcgcacgagacaggaagaaatgttggctatttggcgatgagaggtg

SEQ ID NO: 692208 - DNA, 51 bp, Homo sapiens
cgggtggagtgtaggtcatatcgccgcggttctaagctggtctatgtccat

SEQ ID NO: 692209 - DNA, 90 bp, Homo sapiens
gtggaggaggctcttcagtctccatgagtccctccagcaccacccctccaattgagatcagctcctctcgtctgaccaagttgacccgcc

SEQ ID NO: 692210 - DNA, 75 bp, Homo sapiens
gcggcggcagcggcggcggcggcggccctccgcatcctgaggttagcattacacttctcccagtggagcccatga

SEQ ID NO: 692211 - DNA, 100 bp, Homo sapiens
tatcatcagattccatttcaacttctgccgacaacttttctcctgatttgaggtttttcccctacatcctgctgctctttgcgatcctcctgtacctgcc

SEQ ID NO: 692212 - DNA, 100 bp, Homo sapiens
gctaaggagcccctagcttctgactccaggaacagccatgaactggggccctgccctgaggatggagtttaccagctacttccaaagacatgacgaggtc

SEQ ID NO: 692213 - DNA, 75 bp, Homo sapiens
ggggatggcgcatcacacaccaaagctaaagatgtgattaaagagattgaagactttgacagcttggaggctctg

SEQ ID NO: 692214 - DNA, 98 bp, Homo sapiens
gcggtgcggtgtgcctcgggtcggtgcaccgtccgggattttatccaccggcactgccaagatcagaaatgcatcttctgcagacaccgggttaagag

SEQ ID NO: 692215 - DNA, 98 bp, Homo sapiens
ccccgatctacggggctgacatcagcggctctttgtatgatgacgtgagaagccctaccactgcaactgggacggctgcggctggaagtttgcgcgct

SEQ ID NO: 692216 - DNA, 75 bp, Homo sapiens
ctatcatcttcattgatgagttggatgccatcggcaccaagcgtccctagagcgtccaagatttttggtttcaaa

SEQ ID NO: 692217 - DNA, 82 bp, Homo sapiens
caacaagcggcgcttcccggggctgcggctcttcgggcacaggtgcaccctttgctcccgggctcatccaccatcatgatcc

SEQ ID NO: 692218 - DNA, 98 bp, Homo sapiens
cactcttctccttcacagtaaagtggctggtctggctctgggagaggagtggacagcagctggttgagatacatccccatctggagacaggactgcca

SEQ ID NO: 692219 - DNA, 75 bp, Homo sapiens
gaaggcctctctcctgatacagcaggcgctcaccatgttccctggaggtagaagatgtgttacaacgttgtcgag

SEQ ID NO: 692220 - DNA, 112 bp, Homo sapiens
gatgtgtgattaccatggcgaggagtctctgtccgggggcctggctaaggaaaccctattacctccagtgaaagagtttctagccaaagccaaagaagactttttgaaaaaa

SEQ ID NO: 692221 - DNA, 51 bp, Homo sapiens
taaggattccaagtaactcttatttggagccggcatcatggattccttcaa

SEQ ID NO: 692222 - DNA, 75 bp, Homo sapiens
ggacatcttcatttacagagcaacttgatgaagtttttcagaagaagtgaagtcaagatgaagaaccatttgctt

SEQ ID NO: 692223 - DNA, 76 bp, Homo sapiens
ggatgcattcttgcccactgtatgggccttggtaagactttacaggcagtagtaatgttggggacacactccccac

SEQ ID NO: 692224 - DNA, 75 bp, Homo sapiens
tgtgggctcctggggagatggaggggccggggctgggctcgcagggtgcaaatagctatgggcaacttggcctcg

SEQ ID NO: 692225 - DNA, 134 bp, Homo sapiens
ttcagttggagttggaatttgtgcaatgtttagccaacccaaattaccttaattgacccagatgatgtggtaccagttggccaaagaagagcctggtgttggtgcatgtgctttggactagcatttatgcttgc

SEQ ID NO: 692226 - DNA, 70 bp, Homo sapiens
agccacagaaggcagcaaagtcacggagccctcagaatccacgccagtacaagatcccagactggttctt

SEQ ID NO: 692227 - DNA, 75 bp, Homo sapiens
ataatggatatgcctggtcagagtccatgctgcaaaggaggtacttggaaggctccatcgcccctgaagacaaag

SEQ ID NO: 692228 - DNA, 98 bp, Homo sapiens
aggcggtgagagacacagccacactcagcggccccaggtggtatggtcaggaaaaagactacaatgtactagtcatggatcttctgggacctagcctc

SEQ ID NO: 692229 - DNA, 76 bp, Homo sapiens
agaccgtcatctacctgctcaacccctgtcacctggtcaccatgatgcatgtccacagaactcgaccctggaagag

SEQ ID NO: 692230 - DNA, 75 bp, Homo sapiens
cattgctgcatcaagaaacccaagctgctgagttgctgagacaaaggaaaacccactcccttggaggagcatgac

SEQ ID NO: 692231 - DNA, 98 bp, Homo sapiens
atcaatcttaccagagggccctcagtgtctcaatgagatcttggagtcagcagatgcacccttagaagtcactgaaggattcattcagtcaatttccc

SEQ ID NO: 692232 - DNA, 96 bp, Homo sapiens
tgactttcttcaaaatagcagccaccttaaagtgagtccattcttgcacaccgagaaaatatgcgacagatgataagaagtttttctgaacccttt

SEQ ID NO: 692233 - DNA, 98 bp, Homo sapiens
cgggtgtgagagtccgtaaggagcagcttccaggatcctgagatccggagcagccggggtcggagcgggtttccctatttggatccacctaatgagag

SEQ ID NO: 692234 - DNA, 136 bp, Homo sapiens
gcccctgctgctactggccctgctgggctggctgctgctggccgaagcgaagggcgacgccaagccggaggaaatccagcatcctcacccgggctggcgagcagcgcaaacggagccagtccatgaagtcctaccc

SEQ ID NO: 692235 - DNA, 80 bp, Homo sapiens
ggtcccccgacctctcctcactctcgctcgccgtttccaggagcacaggtgacaaaccgatacctgtcccagctgaagga

SEQ ID NO: 692236 - DNA, 75 bp, Homo sapiens
atgctcctggatgtaatgccaaggttattctgggccggtaccagattttcttcaatcacatctgaataaatcact

SEQ ID NO: 692237 - DNA, 100 bp, Homo sapiens
ccgcggcggggtgggtgcaagatgccgctgccggttcaggtgtttaacttgcagccgattcgaagacagtctcttacacctcctcctcagaacactatta

SEQ ID NO: 692238 - DNA, 90 bp, Homo sapiens
cacttcggtcacgaaaactggacaaagttgcccccaagtttcctggcagtgtgtgatactgaggaggtgagcttgtttctggagctgtgc

SEQ ID NO: 692239 - DNA, 74 bp, Homo sapiens
gctgccgccatacgcgctctccctgtttaggaattgaatgatctggcacgggaccctccagcacagtgttcagc

SEQ ID NO: 692240 - DNA, 83 bp, Homo sapiens
tggccctggccctgatcatcctgctgggcttcgtccagatcgggaaggaagggagagaaggtacccaaagggaaaaagggaaa

SEQ ID NO: 692241 - DNA, 75 bp, Homo sapiens
attctatgctgtggaaaagaaagcatactgcgagccctgctacattttggttaccacagagaagcgcttcctcaa

SEQ ID NO: 692242 - DNA, 85 bp, Homo sapiens
gctctgctggaggtcttgggccggctccccccggacacaatggtgtcgggcaccaacgtgtacggcatcctgcgggccccgcgtg

SEQ ID NO: 692243 - DNA, 100 bp, Homo sapiens
gttgagccttccaagaagaggcagctttgccagaacagataaagcccagtgtaagccagcctcagcctgccaactctaataacggcacttccacagcaac

SEQ ID NO: 692244 - DNA, 100 bp, Homo sapiens
cttcacttagctctacaatcaacccatgtgttgctgccaaacaaggtgaatccgacccagagaggaaagaaacaaggcagaaagtagacgacgacagaaa

SEQ ID NO: 692245 - DNA, 50 bp, Homo sapiens
tgaagagaaaggcccggagactctccatggtgcaatgtatggaagtggaa

SEQ ID NO: 692246 - DNA, 100 bp, Homo sapiens
cggcagaggctgctgaagggcgaggccagcctggaggtgatgcggcaggagatggaggtacagcttggatttcccaagagtcctttgatgtagatgaaac

SEQ ID NO: 692247 - DNA, 100 bp, Homo sapiens
gattccagcttcggaacaagagaccctgaatgaggagaaacctgtgcaaatgatgtttaagcaatctacttttaagaagacctatataggagaaatattt

SEQ ID NO: 692248 - DNA, 100 bp, Homo sapiens
acctgttttgaccaacggaaaagagcaaatgcagcatttttgataggtgcctatgcagtgcgtatagcagcaaaattcatcattcatgcccctcctggag

SEQ ID NO: 692249 - DNA, 74 bp, Homo sapiens
ccgagctgacaagtcaactctaaggctataccaaccaggatccaaatgaagagaactcttttaaatatttgata

SEQ ID NO: 692250 - DNA, 101 bp, Homo sapiens
tgtcatatgtactgtgtcagccatcatgtgtgtcagcatgagaggttcttgctcaagtaccaactctatggacccaggacaggtttgtcccatgacctgct

SEQ ID NO: 692251 - DNA, 74 bp, Homo sapiens
ggcagccgagggcagcagctcccagtttcttcttttcgaggcctcttcttaggaattccctggatgatcttgtt

SEQ ID NO: 692252 - DNA, 50 bp, Homo sapiens
ccataaaagttgatggagattacctttggtctgcgctcctcagaccaccg

SEQ ID NO: 692253 - DNA, 115 bp, Homo sapiens
ccctgctccgcagcgacatcaccaagctggaggtggacgccatcgtcaacgccgacttcccaagtaagaagcggaagaggagccgctggaaccaagacacaatggaacagaagac

SEQ ID NO: 692254 - DNA, 101 bp, Homo sapiens
cttggcccagctggcagcccagcgggaggatctggagacagccatggagttctacttagagatggcgattttgctgacagctgccaagaaaatgcttcact

SEQ ID NO: 692255 - DNA, 80 bp, Homo sapiens
ttcttagctccgtcactgactccaagttcatcccctctgtctttcagtttggcaatgtttttggaacagtgccagtggtt

SEQ ID NO: 692256 - DNA, 82 bp, Homo sapiens
ggaccccgggcactgttgctgctgcgggaggccgagaaatccgtctgcccctccgaatcaaaggggaaggcatgggacctaa

SEQ ID NO: 692257 - DNA, 82 bp, Homo sapiens
cgacgacgaagacagcggagaggagagcggtgcggaggactgaggtcaaaatgcagatcttcgtgaaaacccttaccggcaa

SEQ ID NO: 692258 - DNA, 100 bp, Homo sapiens
tgataatattgttaaggcagcggggtggaatggcagagcttgggtgtacaagcaacatggtgccggcacctgctcagcttttggaaaggactcaggaagc

SEQ ID NO: 692259 - DNA, 100 bp, Homo sapiens
ctgctctcccgcctgaaggcaccttggccaggtccccgtccattgatagcattcagaaagatcccaggaaagaccacagcaagattctttcattcgtctc

SEQ ID NO: 692260 - DNA, 83 bp, Homo sapiens
gtcccgggccgggggacccgcccgccatggccaccaaggatttttagactctgaggagcagttggagctaatccacattatgg

SEQ ID NO: 692261 - DNA, 83 bp, Homo sapiens
gaaaacggctcgagcagcgacaacccgtcctctcccgagtttttcatgtatcatgatattagctggtttgacatcaagtcatt

SEQ ID NO: 692262 - DNA, 100 bp, Homo sapiens
ggaagatcgcttaaaggagagcaaggtctgtggctcaggacatccccaagctgcagaaactaggcatcacccatgtgctgaacgcggctgagggcaggtc

SEQ ID NO: 692263 - DNA, 76 bp, Homo sapiens
cgttatcctcctcactctgtccagtatacatttcccaacacccgccaccagcagattttcgacaatgaagccaaag

SEQ ID NO: 692264 - DNA, 100 bp, Homo sapiens
ctgtcacagagccggatctgaaaaataaccgcatattagatgaactggtaaaaagcttgaattttgcacgatggtcctagaacaattggagattcatacg

SEQ ID NO: 692265 - DNA, 90 bp, Homo sapiens
gaagagtgagagatggaacccgaagaagaaaggattcgttacagccagagattgggtgtcaaattgagaaccaggtagatccccaccacc

SEQ ID NO: 692266 - DNA, 75 bp, Homo sapiens
gtattcgagctcaatttggtggtaaaatcttaagaaaggccccatggacgccagcgtggaggaggagggtgtgcg

SEQ ID NO: 692267 - DNA, 98 bp, Homo sapiens
aaaaattggaacctgttgtttttgagaaggtgaaaatgctgcaagctttcttcctggtggcagatgacatcatggattcatcccttacccgccgggga

SEQ ID NO: 692268 - DNA, 90 bp, Homo sapiens
ctcctgcgctactacagcaagaaccgcccaaccgaggctgtcaggtgcgcaccctgtggcatgaccctcgtcacataggctggaaagatt

SEQ ID NO: 692269 - DNA, 96 bp, Homo sapiens
ggagccgacagcgacgggcagcccgggcccggcgaggcagaccactgccgccgcatactggtgcgaggtgctgcagggtgcacagctgatcgccgt

SEQ ID NO: 692270 - DNA, 50 bp, Homo sapiens
cgctggttataatccttcaatattcagtactgctccccagcctaaaccag

SEQ ID NO: 692271 - DNA, 100 bp, Homo sapiens
aaaggggaaagcaaggccaaagacagggagaagggagtggtacgggtatcactttccggagctggtgaagatcatcaacgacaatgccacatactgccgt

SEQ ID NO: 692272 - DNA, 50 bp, Homo sapiens
gtcagccttcccagtagctgggaccacagaaactgttcaggttccattat

SEQ ID NO: 692273 - DNA, 100 bp, Homo sapiens
agcgatggcagcgatgaggaggagtgcagcctgaagacggaagaagggagtgtcagaggcgccctgccagctgtgtcatctcccccagctccagtttcac

SEQ ID NO: 692274 - DNA, 100 bp, Homo sapiens
cacggataacattccacctgaaagggtctcactccattgcccaggccagagtgcggggatatttgataagaaacttcagtgaaggccgggcgcggtggct

SEQ ID NO: 692275 - DNA, 80 bp, Homo sapiens
atagtctacacagagctccccttgctgcccagacaagctgaaggaccacagtaaaacgatgtttgcagaaatggaaatca

SEQ ID NO: 692276 - DNA, 82 bp, Homo sapiens
gagaatctgtacgcagggaggaagtgcctgctgattgtcatggaatgcactgccagtgaaagatgtagaagataaacctgaa

SEQ ID NO: 692277 - DNA, 135 bp, Homo sapiens
gtcctcggttctccatacccgtgacctggggatcgctacggaccttaaaatacccgcaacagccccttcgtcccaaggcctcggcttccctcacgatattgcagaaagacacagctttcctcttcctctccaaac

SEQ ID NO: 692278 - DNA, 96 bp, Homo sapiens
aagaactcataaacttggcttcctcgcttctgctcctcagtttctcctgaactgctcttggtctccatgaaggctactggcaggagcacatgagag

SEQ ID NO: 692279 - DNA, 96 bp, Homo sapiens
gtccggttcccgtggcggccggacagcaaggacatttccaaggcagctggtggaatttttgaagaaaatggaatctcgaggccccctttcgtgcga

SEQ ID NO: 692280 - DNA, 100 bp, Homo sapiens
ctcgcatcttgcccgaagccgggcggaggagagctcaagctaagcggtcttgcgagtggctggttccctgcagaagagcacagaagtgatgaaggccatg

SEQ ID NO: 692281 - DNA, 100 bp, Homo sapiens
cggcgacctgaggggagagggaacgcagctgaaagcgtgaactgtgagcgggacggtatgcgggccatcctggggtcctacgacagcgagctgaccccgg

SEQ ID NO: 692282 - DNA, 75 bp, Homo sapiens
tggaggacttgcttttgttgaactgattttacctgattggtggtggtatccccatcattgtttgcggcataactg

SEQ ID NO: 692283 - DNA, 75 bp, Homo sapiens
gagtccactctggccttccagcagagccgcagagcacacaacattgacctgaaggggacagtcgtgatctttgac

SEQ ID NO: 692284 - DNA, 95 bp, Homo sapiens
ggctgctgctgtacctctgtgactcttttgtgggagctagctttttgaaaaagtttcattttctgaaaggtgccggaagctgcgaaggtgacaca

SEQ ID NO: 692285 - DNA, 50 bp, Homo sapiens
ccgcaccgagaaggccaccgagggagccatagagatgggatttcactgtg

SEQ ID NO: 692286 - DNA, 100 bp, Homo sapiens
agctcaatgagaaaatctccctgctccgcagcgacatcaccaagctggaggtggacgccatcgtcaacgccgggactggtgattgcagctggaagtgccc

SEQ ID NO: 692287 - DNA, 100 bp, Homo sapiens
gtcctggaagctgttttttccttcccagaggagccttcatttataatacgcttacagatttcatacgaataaaccgagaaaactggtgtacaatagagcc

SEQ ID NO: 692288 - DNA, 90 bp, Homo sapiens
gtacggagacacactgcatttctgtcggcactgcagcattctcttttggaagactagacgcttgaagcaaagctgccatcccagaagacg

SEQ ID NO: 692289 - DNA, 83 bp, Homo sapiens
cacagctgagaagtttccagatgaaaaatcctaaatcccgacagctttatagagcccaggcctggcaggctcccagaacttga

SEQ ID NO: 692290 - DNA, 89 bp, Homo sapiens
ggtggacccagtctacatccacttggctgagcgattgggacagaactgtaccgctctctttttggccagctccaccctcccgacgaagg

SEQ ID NO: 692291 - DNA, 75 bp, Homo sapiens
catagtatctttaaactacacaaaagtggaacagctttgttcaggtgtgttcatcctcgaggtggtgtgattcag

SEQ ID NO: 692292 - DNA, 75 bp, Homo sapiens
tggcggagaagactcgaacggctcccacagccgggcgttgggggaaagagatgtgaactttgtccccataaggat

SEQ ID NO: 692293 - DNA, 110 bp, Homo sapiens
ctagtgcagcagtacgaagggcaacaaaggtccccgtctgaatccagctgctccaggaatttatgttgatgcagttaactccttgggccaaacagcactttttgttgcgg

SEQ ID NO: 692294 - DNA, 51 bp, Homo sapiens
cacccgggagtttgaggaggttgtgattgctcgctgtaagcagctcatctg

SEQ ID NO: 692295 - DNA, 75 bp, Homo sapiens
ggaggcaaggccgaggataaggagactctgtccctacctgtggttgtcatcgtccacggcagccaggaccacaat

SEQ ID NO: 692296 - DNA, 75 bp, Homo sapiens
ggaatttccaaggggattcaaacttcaacagaatgtggcaaccagtttttcccaggtcatgagtctcgggctaca

SEQ ID NO: 692297 - DNA, 87 bp, Homo sapiens
gtcaacatgtgcgtggctacggtcctcacggccggcgcttacctctgctacagggtggacccaagagccatatcagtgctagcaaaa

SEQ ID NO: 692298 - DNA, 100 bp, Homo sapiens
ttgactttcaatatctttgactggttgggccggagcctcacagctgtattcatgtggatatttctccctcgagtggctgggaaacttggcaagagaccag

SEQ ID NO: 692299 - DNA, 88 bp, Homo sapiens
atttaaagctgagctgcgaggaaaatggcggcgggagaattcccgtactgattagtcaacagtggaaaatctgaagagatgcaagcag

SEQ ID NO: 692300 - DNA, 82 bp, Homo sapiens
gcaaaagcagtacaaggtgcacctggacctctgggttaaggaccttctaccgctttgaggctgtgtgggatagctctctgca

SEQ ID NO: 692301 - DNA, 74 bp, Homo sapiens
gaaaaaggaatcattgacccaacaaaggagtccttcaataatgttaaacagtggctgcaggaaatagatcgtta

SEQ ID NO: 692302 - DNA, 100 bp, Homo sapiens
gaggctgcgggaccccaggatgggggacaggaggctgcggggcctcagcggagctggagttcgcccaaatcatcatcatcgtcgtggtggtcacggtgat

SEQ ID NO: 692303 - DNA, 93 bp, Homo sapiens
tatgtccccacttcatatgtcgaagtctgtttggacaaaaatgccaaaggtcaaaatgcagatcttcgtgaaaacccttaccggcaagaccat

SEQ ID NO: 692304 - DNA, 100 bp, Homo sapiens
ggaccgtccagcccagcgattctcagtcagacatgcacatgatggtgtccaagccagaacagtgggtaaagccaatggctgtagcaggagccaatcagta

SEQ ID NO: 692305 - DNA, 127 bp, Homo sapiens
aatttgaaaaccttgtggaagagacaagccattttgtgcgcaccacttttgtgtccaggcataagaaatttgacgcttagaaatgttggacaaagttgagcctccaactatacctgaaggttacgcc

SEQ ID NO: 692306 - DNA, 90 bp, Homo sapiens
caggagtccctctccgcccagttacaaggtaaagaggatgaatatccaaagaagcccttggggcagcttccacctgaacttcagtcttgg

SEQ ID NO: 692307 - DNA, 83 bp, Homo sapiens
atttgccatacggatgggaacaagaaactgatgagaacggacaagtgttttttgttgaatgcctttggtgcttcatgaagaat

SEQ ID NO: 692308 - DNA, 90 bp, Homo sapiens
gttcgaactgtctcaccacttccctgcagctcccgttcaaaccttgtactactcagctgatcacaagctgcttgatgggaacctactaga

SEQ ID NO: 692309 - DNA, 100 bp, Homo sapiens
acaccagatagtggaaagaaaccatgtgctgaaatgtttgacgacactgatggtttgtgctgggcctaaaggagataacatttatgaatggagatcaact

SEQ ID NO: 692310 - DNA, 100 bp, Homo sapiens
gaaaatacaaatcacacgcataatggatgaaaggaaccgacagaccttgacagaaaacttgctgaaaaaagaacaagactatactaagttagaggagaaa

SEQ ID NO: 692311 - DNA, 100 bp, Homo sapiens
cgtcccgctggatctgacccgaggcaagagtacagcactgcatctgctctgtagccagtgaccactcagtaggacttctaagtttgcgagagaaaaaatg

SEQ ID NO: 692312 - DNA, 138 bp, Homo sapiens
tgggaatctgagacaagctgttatgttgcctgagggagaggatctcaatgaatggattgctgtgaacaacaggcatggtacattgtgatacagcagttggaacaccggattatatatcacctgaggttctgaaatcac

SEQ ID NO: 692313 - DNA, 82 bp, Homo sapiens
tttgggagatccaagagattcagtatcactcgctcccttgatgatcttgaggtcagccatgtcatctgagcctcccccacca

SEQ ID NO: 692314 - DNA, 83 bp, Homo sapiens
ctagaaacaccagccaccagtgaacaggttacccatgcagttgttactgtaccagcctattttaatgatgcccaacgccaagc

SEQ ID NO: 692315 - DNA, 112 bp, Homo sapiens
gagaaggaggggtatgagccacacatccccgaccacttgcggcctgagtatggctttatcctgtggataaacgcagagtgaacgagtttggggagtcctacgaggagaaggc

SEQ ID NO: 692316 - DNA, 88 bp, Homo sapiens
aagcttaacttttccaatgtggaatcctgggccttcattggatcaaaatggtttcaatcccagaatactatgaaggcaagaacgtcct

SEQ ID NO: 692317 - DNA, 100 bp, Homo sapiens
gccatgagctggggcacggagctgtggttgaccagatataccatctggcatctccagcctcccctccaaactacatgtataatcctatcaagacattaaa

SEQ ID NO: 692318 - DNA, 50 bp, Homo sapiens
atgaggaccggagcggaaaaccttctgaatgtgctcatgggagcttagaa

SEQ ID NO: 692319 - DNA, 100 bp, Homo sapiens
cgggccccggctcgcccttcccaggcgccggctgcagcagagacgaagttatacggaagcgtctcctcattgatggagatggtgctggagatgatcggag

SEQ ID NO: 692320 - DNA, 82 bp, Homo sapiens
cgtcccccagtaggagaatgactccgattcgtgaccctcagcgccggtgcatgtcgatgtgacttaagagattaaaattaat

SEQ ID NO: 692321 - DNA, 98 bp, Homo sapiens
aagggtcaccaacggggagctgctggctcagtacatggcagacgcggccagtgagctggggccgaccaccccctatgaaatgcactcggtgatggaaa

SEQ ID NO: 692322 - DNA, 100 bp, Homo sapiens
gagctgggttctattttccctcctcaaactgactttgcagccacggagaggtgtaccttgaaagacttttaacatacgcagagatagatatctgtccggc

SEQ ID NO: 692323 - DNA, 100 bp, Homo sapiens
cgaacggggggagattctgctcacggaactgcagcaggaacgaatgcaggaatttgggaactgagctgtgcaagtgctgaagaaggagatttgtttggag

SEQ ID NO: 692324 - DNA, 128 bp, Homo sapiens
cagaatcctccaaaaccagtcatgaccactagacccacagctgttaaagcaacaggcaagtgaaccggagcaaacgacttccgatccagtctgcgctgttgcggctcccgtttgggatttgatttgca

SEQ ID NO: 692325 - DNA, 71 bp, Homo sapiens
gccgtgcccgtcgcgggcggcctcgcgcctgttccgctgcaggtgatggcccgctccctctccccaccccc

SEQ ID NO: 692326 - DNA, 100 bp, Homo sapiens
ccttaacccaaggaagtgactcaaactgtgagaacttcagaccatatttgaagatgttagtggttttggtgcctggcatcgaagatggtgtgttctttct

SEQ ID NO: 692327 - DNA, 97 bp, Homo sapiens
tcagcgggccaggaagcgcatccaggaggcaaaagaatggaccccagcaggaaaagcaaagcaagagaattctgctaagaagttttattctgaatct

SEQ ID NO: 692328 - DNA, 82 bp, Homo sapiens
agcatgggctcgcctgtcaacgcgcagatgcagaggccaggatgtgggcccagccctgtgccaggaggctggctggaataaa

SEQ ID NO: 692329 - DNA, 90 bp, Homo sapiens
cggcaggcgagattgcctgacccaggcctgctcggccctcacagggacctcagcagccatgtcgaagccccatagtgaagccgggactgc

SEQ ID NO: 692330 - DNA, 94 bp, Homo sapiens
ctgtgcgcgcctccatctgggccatggatgggaggctggcaggatgtacagtttttatcacaggtgcaagccgtggcattggcaaagctattgc

SEQ ID NO: 692331 - DNA, 75 bp, Homo sapiens
gtggatcgctgtgatcgtcacttgttattttaccaagaaaatggtttgcacgactttgaacatatactatccatg

SEQ ID NO: 692332 - DNA, 100 bp, Homo sapiens
tggtcatttctcccttgttggtttgggatttgaagaacacggaaatattgccttgtttgaagcatgttgtaaggaaagaatacaacagtttgatgatggt

SEQ ID NO: 692333 - DNA, 100 bp, Homo sapiens
gtaaactcttagataaaatgacgacgtccttctggaagaggcgaaactggtatcttctgtatgacgtcaaccccccggaaggcttcaacctgcgcaggga

SEQ ID NO: 692334 - DNA, 99 bp, Homo sapiens
gacaaaaccataataaatgcagataaggatggagatggaagaatatcctttgaagaattctgtgctttcacagacattgggaccttcgagacagtgtgg

SEQ ID NO: 692335 - DNA, 100 bp, Homo sapiens
atcacaaccaagtagaactggctcttcaaattgaagttatcaggacaccccatgggagagacttcgatgactctttagaaaaatgtgaagagtatttgag

SEQ ID NO: 692336 - DNA, 75 bp, Homo sapiens
aaggacagacatttttggcagagaatacagatatggtccagaaatcagtcagcaaaaccttgccctctacttggt

SEQ ID NO: 692337 - DNA, 82 bp, Homo sapiens
agccgaagtactcgtcaaaaatagccagggtttgttacctcgaggtgagaaacccaatcctttgaggcaaaagaacgccaag

SEQ ID NO: 692338 - DNA, 98 bp, Homo sapiens
caatttccatcaaaaagtgattaagcagagaatggagaagaaggttgattccagaaaccaatagagccatggcgactccctctgctgccttcgaggcc

SEQ ID NO: 692339 - DNA, 100 bp, Homo sapiens
ctttgtctctgatgagctgagaaacaaagccacccagccaatgaaggttggatggcaagcatgtggtgtttggcaaagtgaaagaaggcatgaatattgt

SEQ ID NO: 692340 - DNA, 50 bp, Homo sapiens
cggacctgcacgagctgtctggcctcctcgctggggaggcagagtcctcg

SEQ ID NO: 692341 - DNA, 100 bp, Homo sapiens
ctgggattggcatgctttagctatctgaacgaaacttccctttggggagttaagttttccagcacccagtcagcttgaagagtttcaaatggaccctacc

SEQ ID NO: 692342 - DNA, 80 bp, Homo sapiens
ctcctgtgaaggccatatttgataaacaggaacttgaggtactccaaagattcaggtttactcacgtcatccagcagaga

SEQ ID NO: 692343 - DNA, 75 bp, Homo sapiens
cgaggagggcacaaggccaggttcccaagagctcagtcgggtggtttcatggacatgtttgggatgatgaatgac

SEQ ID NO: 692344 - DNA, 98 bp, Homo sapiens
gggactgcaccgcaccgagggcgagctccagggtgaggtggctttgaccccgggttgcccggccagcacgaccgaggaggtggctggacagctggagg

SEQ ID NO: 692345 - DNA, 83 bp, Homo sapiens
gtgttcgcgggtgtgtgctgcgttcacaggtgtttctgcggcagaaacgatggaaagaactttctaaggaagacttatctcct

SEQ ID NO: 692346 - DNA, 75 bp, Homo sapiens
tcctgacactatgaatgctacttggatgcctcttaagataaagccaccaatccttccaaccgccaggaggactgg

SEQ ID NO: 692347 - DNA, 75 bp, Homo sapiens
actcccgcggcgggaggagcctgttcccctgagggctgcagactcctgttccagaggtcattgttgatgtggaat

SEQ ID NO: 692348 - DNA, 113 bp, Homo sapiens
ggaaggtacacccaggcatgacaatagcttctctcctcacagaaatttaactgtttcccagcgaggtggtcattcagagcctacacatctgttctgtattttaacccatggat

SEQ ID NO: 692349 - DNA, 100 bp, Homo sapiens
tggctcattgtagcctcaaactcccaggctcaagcagtcctaccatgtcagccttcccagtagctgggaccacaggaaccactgtgtctcttgaaacaac

SEQ ID NO: 692350 - DNA, 83 bp, Homo sapiens
ggggaggcaagatgatccaccagcggttccatcctacacttggcaaaaagatggcacctttgcagcagggggctacatgcccc

SEQ ID NO: 692351 - DNA, 118 bp, Homo sapiens
tgaaaagctggcccgtgacctgaaggctgtcaagtatgtggagtgttctgcacttacacaggctggcagtgatggtgaaagcataggaaactgccccttttcccagaggctcttcatg

SEQ ID NO: 692352 - DNA, 101 bp, Homo sapiens
ctcaaatatctcttcttaacacctacctgattctggcatacagtctgagaaacatcttacctattacaacagcaaaggtgccaattgtgaagttcttccat

SEQ ID NO: 692353 - DNA, 83 bp, Homo sapiens
ctgcggctctcggtgccctctccttttcgtttccggaaacatggctgaccccgcactacatctacccaccagccatcgtgcag

SEQ ID NO: 692354 - DNA, 103 bp, Homo sapiens
gcttcaaggagttcctgcggcagtaccgagtgggcaccgaccgcacgggcttcaccttcaaatacaggtttgggtacccagaccccacctacctgacccgggt

SEQ ID NO: 692355 - DNA, 96 bp, Homo sapiens
tgcaggcagcaccggaggcccaggtctccgtgcagcccaacttccagcaggacaaggctacgaggaacaccggcaagagtatcgccaataagaaca

SEQ ID NO: 692356 - DNA, 100 bp, Homo sapiens
tctatttctctagctattgccttattttttctcatggatgttcttcttcgagtatttgtagaaggaccgtgctggaattcatggacctccacttataatt

SEQ ID NO: 692357 - DNA, 106 bp, Homo sapiens
gggcggtgggccccagccccacagaccagcccagcattcagcattccagctggagatgcgtgaccttcggtctgcggcaggcggaagggcgagagacttggacagg

SEQ ID NO: 692358 - DNA, 100 bp, Homo sapiens
ccgattcctcctccttggtcgccgcgtccttggctggcgtgacagagcgggatgccaccagcttgtccaaagggaagttccaggagctcctggtgggcat

SEQ ID NO: 692359 - DNA, 75 bp, Homo sapiens
gtcgccctcaaggccatgatcaaaacgaaacctatgagaatatcccaggccagtcaaagatcacattcctcttac

SEQ ID NO: 692360 - DNA, 143 bp, Homo sapiens
gtattgcaatcatggtgcagaaataccagtccccagtgagggtgtacaaatacccctttgaattaattatggctgtcaaaatgcagatcttcgtgaaaacccttaccggcaagaccatcacccttgaggtggagcccagtgac

SEQ ID NO: 692361 - DNA, 50 bp, Homo sapiens
ggaggggcaggaaattctttgaagtttgtgatggacgcctctgaccccac

SEQ ID NO: 692362 - DNA, 75 bp, Homo sapiens
ccctggctgctggagagttgaatgccagccaccagccatgggtggtgctgtcacaggggacccactgggaccgcc

SEQ ID NO: 692363 - DNA, 80 bp, Homo sapiens
ccaatggtctctacgtcctggcaggagttgcagaaagcatccacctgtgggaggttttaaaatcaaagatgggaaaatcg

SEQ ID NO: 692364 - DNA, 51 bp, Homo sapiens
tatctgacaagagcatcaaccctctggtacaaacccgtagtgctgatgaac

SEQ ID NO: 692365 - DNA, 75 bp, Homo sapiens
cgctgaataagcttccaaaatgatggaatcaacagtgagacaattatgaaaccagcttcaatttcagaggaagaa

SEQ ID NO: 692366 - DNA, 50 bp, Homo sapiens
caaaagcattcagtctcaacccagagaattctgcttggtcagaatcgtga

SEQ ID NO: 692367 - DNA, 82 bp, Homo sapiens
gatggccgcgtcccctcccgctgcggacgggtcctttggtacatgcagtccgaggccaagactaaggggctgcagagcgggg

SEQ ID NO: 692368 - DNA, 100 bp, Homo sapiens
agtgaggcagctgcaaggagggcggcgggactgcactcgagtgtccagacctgctcgatggacctcagcagccatgtcgaagccccatagtgaagccggg

SEQ ID NO: 692369 - DNA, 100 bp, Homo sapiens
acccaggaaggagctgtgtatttcatcaaatgcggaaaacgccatgcggtacataaatgggacgcgtctggatgaccgaatcattcgcacagactgggac

SEQ ID NO: 692370 - DNA, 82 bp, Homo sapiens
ctggggccagggaaccctggtcaccgtctcctcaggatgaccgagtgggagacagcagcaccagcggtggcagagaccccag

SEQ ID NO: 692371 - DNA, 82 bp, Homo sapiens
cctcggagcaacgagcgcagcgccgatggaccacacatccccgacctacatgcttgctaacttaacccacttgcattctgaa

SEQ ID NO: 692372 - DNA, 75 bp, Homo sapiens
aagaacagctcgagagagcattacaagccagcctctgggaccgaggtatctctgatgaatatataacacctatgt

SEQ ID NO: 692373 - DNA, 87 bp, Homo sapiens
atacttgggttcagccagcaattgcccaaacccaaagtgtggaggtcctgggaactccaacaagggagcaaatcagagaaatgaacc

SEQ ID NO: 692374 - DNA, 100 bp, Homo sapiens
ggggccggcaagaccaccaccctgtagatgatgagctggagatcaaggcctactatgcaggccacgtgctgggggcagccatgttccagattaaagtggg

SEQ ID NO: 692375 - DNA, 82 bp, Homo sapiens
ctcggattctcgtagctgtgccggtaagactttgaccccgacgcaggcttcagtgattgccgcggatcagaagcctgagcac

SEQ ID NO: 692376 - DNA, 98 bp, Homo sapiens
ctccatccagcagtttcttcaccaagaacatgttcttcaagtatacatggaataactttttgcatacacaagtggaaatttgtattgcactgattctt

SEQ ID NO: 692377 - DNA, 100 bp, Homo sapiens
ctgggattcgcgctgctgggcacccacggagcctccggggctgctatcatggtgaacttacttcagattgtgcgggaccactgggttcatgttcttgtcc

SEQ ID NO: 692378 - DNA, 75 bp, Homo sapiens
tacaagccagcctctgggaccgagctgctctgttaaaagcgaaaatgaaacaattgcctgcggcaacagttcgac

SEQ ID NO: 692379 - DNA, 90 bp, Homo sapiens
taccaacagtgcgctgcagatcctacgaggacaagcagaaactcaagcggaccgagatcatcagccgctcctggttcccctctgcccccg

SEQ ID NO: 692380 - DNA, 75 bp, Homo sapiens
ctcagttacttcatcgtctccatcctctacctcaagtatgagccaggacaggaagatgtcacccaagcgcatagc

SEQ ID NO: 692381 - DNA, 90 bp, Homo sapiens
atcgtatgtccgctatccagaacctccactctttcggcccctggctactgacttatgggaagctttaggataaggacatacctggtgttc

SEQ ID NO: 692382 - DNA, 108 bp, Homo sapiens
cgcccgcagagcaagcgcggggaaccaaggagacgctcctggcactgcaggttatcaatactctggctgaccatcatcatcgtgggactgactttggtggaagtcctt

SEQ ID NO: 692383 - DNA, 98 bp, Homo sapiens
caggagaccgtcgttgccttgtatttccagagaacagggaactctaatgatccaggacaaagaagttaccctggagtatgtatcaagcctggattttt

SEQ ID NO: 692384 - DNA, 83 bp, Homo sapiens
gggcggcggcgccggcaggaaggtactgtgtgcagaaatgtgattgagattcaagtcagggcctctctgcccttttccctcca

SEQ ID NO: 692385 - DNA, 71 bp, Homo sapiens
agctgcctggtgcaatttgttccttgacttgtggtggagcagatattggtaagcactatcctttgtactcc

SEQ ID NO: 692386 - DNA, 100 bp, Homo sapiens
ccgggcccaggagcagcactggtggatcggcctgcacacctctgagagcgatgggcgcttcagcctcctccaaaactgcccagtggagtgttcagtctgg

SEQ ID NO: 692387 - DNA, 90 bp, Homo sapiens
cattgttagtgaacgtggacaaagctgttgtctcagggagcacagaagcgcattctacattctaaaggggagctcagtgaagatagacat

SEQ ID NO: 692388 - DNA, 83 bp, Homo sapiens
aagcaacccgatcccggaggcggcggcggcggggggagccggagccgcctgggatgttcacaaaatgatgcttcaacacccag

SEQ ID NO: 692389 - DNA, 75 bp, Homo sapiens
tgctgaggagctcctggtcgatgaagaggatgatgtttttggtgaagaggagttttctcgggtccgggaggaggt

SEQ ID NO: 692390 - DNA, 90 bp, Homo sapiens
gcatgattgtcggcatctcacagcgagcatgtttgcggtgggctgcagcatgggtcccttcctgcactactggtacttgtcgctggaccg

SEQ ID NO: 692391 - DNA, 75 bp, Homo sapiens
gcagtatcatgctggccaagaagatcatcattaaggacggaggcacggttactataacaacagtaccaaggtggc

SEQ ID NO: 692392 - DNA, 96 bp, Homo sapiens
ggactgggctaatgctaatgtcagcagacagattgaggacactgtattatacggttactatagatcttagaaatgaagttgaaaaattacgcaatg

SEQ ID NO: 692393 - DNA, 75 bp, Homo sapiens
acgactaccaacctgtgtaagtgagcccatggatttcagaaaattatctacattcagagaaagttttaagaaaag

SEQ ID NO: 692394 - DNA, 101 bp, Homo sapiens
gccagaatttcctgcgctgttccacctcattcaacttcagggaaatcctcattgacgattcaatttgttgaaggccaatttgtggactcctacgatccaac

SEQ ID NO: 692395 - DNA, 75 bp, Homo sapiens
cttctcaaccttgtgggatgtgaaaactctgttactgaaggcaacatcaacatctgtctgatgggggatcctggt

SEQ ID NO: 692396 - DNA, 104 bp, Homo sapiens
aagagatacagggcagaggaaaatgcaagaagactgatggagcaggcttgcaatattaaagctgaggctgaggtggcctccttgaaccgtaggatccagctggt

SEQ ID NO: 692397 - DNA, 100 bp, Homo sapiens
agtggaagatgatcacatcccagtggccctcagattctcagcttgattctaaggaactttcagctggttctcaatttgtaggactcatggcagttctcac

SEQ ID NO: 692398 - DNA, 50 bp, Homo sapiens
aggtggccacctatggcttttgggataaccagatgcaacgtgaagatcta

SEQ ID NO: 692399 - DNA, 101 bp, Homo sapiens
ctggcagccaaatgcatcctggcaggacttccaatagtagtcagacattatcatcctgtcatactatggagccatgtacatcagatgaatttttccaagcc

SEQ ID NO: 692400 - DNA, 100 bp, Homo sapiens
gaggttggggtcatggcgccccgaagcctcctcctgctgctctcaggggccctggccctgaccgatacttgggcgggggccggaagccaggcagcggcgg

SEQ ID NO: 692401 - DNA, 51 bp, Homo sapiens
tgctcgacgaccaagaggcgaagagacgaagggaacgtcatcgtttggaaa

SEQ ID NO: 692402 - DNA, 74 bp, Homo sapiens
tgtcctactacaggaaaataattgaaggcactgaagttgtccaggttgcagtattttacagagctagcccaagg

SEQ ID NO: 692403 - DNA, 97 bp, Homo sapiens
ttgacttcacacccggctcggagctgctcatcaccaaggccaagaacgggcacctggctgtggacagtcattttgtttactcattcagccctgttgc

SEQ ID NO: 692404 - DNA, 74 bp, Homo sapiens
ataatcagagtggaggaagtacagccagcactcctatgacttctagaagtacatctacttggagaatacccagc

SEQ ID NO: 692405 - DNA, 75 bp, Homo sapiens
gcgggcggacggccggcgggggcggcgtgcggcctagcgtctcagactgtgccctgtccacggtgcctcctgcat

SEQ ID NO: 692406 - DNA, 50 bp, Homo sapiens
cccggacagtggcagtgaaacagacagtggagatgcaccctgcctacacc

SEQ ID NO: 692407 - DNA, 75 bp, Homo sapiens
atgatttagatttgatttgtcgagctcatcaggtaatgagagatccaaacaccaagcgctccaggggctttgggt

SEQ ID NO: 692408 - DNA, 98 bp, Homo sapiens
cggctcctcggctggtggcaagtattgctgtgggtgctgggacttcccgtccgcggcgtggaggggcagctttggaagaagtagaaggtgatgtggca

SEQ ID NO: 692409 - DNA, 74 bp, Homo sapiens
cctgcctcagcctcccaagaagctgggattacaggagattccaggtatccattacttggccagccactgcagta

SEQ ID NO: 692410 - DNA, 108 bp, Homo sapiens
cccggggttgaggcgaggagcccgcgggcggccggtcgggcggggcggcggcgctgacaggaatgtatcctgtcaggtataatgtcagtgaatggcaagaaagttctt

SEQ ID NO: 692411 - DNA, 100 bp, Homo sapiens
gttagcctgatcatcttcacctactacaccgcctgggtgattctcttggtgccccacgcccggctgtgacggctctggccacatcacagggaactacgct

SEQ ID NO: 692412 - DNA, 128 bp, Homo sapiens
aagcgctgcggcatggcgcgcgcctgcctccaggccgtcaagtacctcatgttcgccttcaacctgctcttctggcttcggaaccaaaaagaagcttcccagagccggggccaggagccccaagcgcc

SEQ ID NO: 692413 - DNA, 75 bp, Homo sapiens
tgtggtctacgagctgtttctcatctttatactcttccaggctactgcagcactggggtgtcagttgttggtccg

SEQ ID NO: 692414 - DNA, 75 bp, Homo sapiens
ggagcagaagggaggctccaagacctcatcaacaattaagtctcacagaaagttctccgctcccagacatgggtc

SEQ ID NO: 692415 - DNA, 75 bp, Homo sapiens
aaccgagtcagtgctcttacccaggaattgaatgatctggcacgggaccctccagcacagtgttcagcaggtcct

SEQ ID NO: 692416 - DNA, 75 bp, Homo sapiens
tttccgatttaaagctgagctgcgaggaaaatggcggcgggagagaggagtctgcaatgccgagtggaggaagga

SEQ ID NO: 692417 - DNA, 98 bp, Homo sapiens
agctggccaggggggcccgtctgggccagccacctggtgtccggccaggagacaagcttctcaagtctttacagccgagaagattccttgaagaatca

SEQ ID NO: 692418 - DNA, 100 bp, Homo sapiens
cgcttcagttctcccggtgtggccacgagtcgggctcgggctcaagttcactacaggtcacaaaacatgatgtcttgttggctactttaaaatctaacct

SEQ ID NO: 692419 - DNA, 50 bp, Homo sapiens
aggacacgacgcgcttaaagggctattcagcttgaccctgaagaaactcg

SEQ ID NO: 692420 - DNA, 90 bp, Homo sapiens
cagcagcggaggctggacgcttgcatggcgcttgaggtacaggtgaacaaaggcagagtaaactgtcaccccagatgcaggtacatcaag

SEQ ID NO: 692421 - DNA, 100 bp, Homo sapiens
tggaggtctgcgttgctcttgcttttcctcgctggggtgtacggtgatgatgaacagtctacacagatggctgcaagttgggaagatgataaagttacag

SEQ ID NO: 692422 - DNA, 74 bp, Homo sapiens
agctggctaagctcatcattgttactggcaagtgaaccggagcaaacgacttccgatccagtctgcgctgttgc

SEQ ID NO: 692423 - DNA, 82 bp, Homo sapiens
ccgccgcgcaggagcctcccggagctggttaatttggagtggcccctggagtcagtttcctacaccatccgaggccccaccc

SEQ ID NO: 692424 - DNA, 82 bp, Homo sapiens
ccggcgtttgggctacggttgttgttggcgactgtgcttcaagcgactctcagcgttctcatctctcttccttcaccatgaa

SEQ ID NO: 692425 - DNA, 82 bp, Homo sapiens
cgcgggaggtgttcgagaacgaccccgagacggctggcgcccatgcggctctacacgctctccaagcgccactttgtcctcg

SEQ ID NO: 692426 - DNA, 101 bp, Homo sapiens
acatgatggcagccagcttaggtacacagatacactgcctctaggactgggacagatagccactgagtacctgcttcaaatcaccctgcacgttttctctt

SEQ ID NO: 692427 - DNA, 90 bp, Homo sapiens
ctctttgtgatgggaacttctggaaagaagacaagcccacacttccagaaatttcagggaaatcctcattgacgattcaatttgttgaag

SEQ ID NO: 692428 - DNA, 76 bp, Homo sapiens
agacagtctgtgtaagaagtactccagggaaacctcccaggcttgcagtaaggttgggctgctggcacgaccctta

SEQ ID NO: 692429 - DNA, 113 bp, Homo sapiens
ctagtaaacggggctgctggtgggccgcgtcgaagacatggaccagggctacggaggaggctactcacagtcgaactacaactccccggggtccggccagaactacagtggcc

SEQ ID NO: 692430 - DNA, 75 bp, Homo sapiens
catcttccatgagctgaagcagccaagaggtattattaacccaaagaatccaaaggaagctccaaagtccttcag

SEQ ID NO: 692431 - DNA, 76 bp, Homo sapiens
gcgcggggcaagtggctcggaacacagagcttgtggacaaatgtataggatcaagaattcacatcgtgatgaagag

SEQ ID NO: 692432 - DNA, 98 bp, Homo sapiens
ccgtctctgctgccccaggctctgcagcccctgctgctggttctgcccctgctgcagcaaattgctcgaccctcgcaagaagaaaaagtagaagaaaa

SEQ ID NO: 692433 - DNA, 90 bp, Homo sapiens
gaaagaccgaccattcttccctgggctggtgaagtacatgaactcagggccggttgtggccatggaagacctggaagcgctcatagccca

SEQ ID NO: 692434 - DNA, 75 bp, Homo sapiens
cagacagcatatttgagtcatttccttcgtacccacagtgcttcatgagaggactgatcctttgaaatactccag

SEQ ID NO: 692435 - DNA, 98 bp, Homo sapiens
gcctcccaaagtgctggggttacagtctcttccagttgcgcctcttctccttggtggtcttcttaagcaacagactcttccacaagacagtctacctg

SEQ ID NO: 692436 - DNA, 100 bp, Homo sapiens
ggatagaccccaacaatataaaaacaaatgctaaactctactgtaatcggggtacggttaattccaagttggaggtccccctccccactaagtgcctctt

SEQ ID NO: 692437 - DNA, 58 bp, Homo sapiens
aggagctggaggaggagccgccgccgccaggaattgaatgatctggcacgggaccctc

SEQ ID NO: 692438 - DNA, 101 bp, Homo sapiens
gggaccgccgccgccgccgccaccatgactcagcccacctgcacccaggtgaaataaacagctttattgctcacacgaagcctgtttggtggtctcttcac

SEQ ID NO: 692439 - DNA, 100 bp, Homo sapiens
aagaggcagtgaagactctgccaacaggtgaatgaactggtgcaggtagaaacgtacctccgcagtgaaggtgtgctggtgcgatactggtatcctattg

SEQ ID NO: 692440 - DNA, 100 bp, Homo sapiens
tactgcactgagatctttgactacctcagcctgtcagccatcatcgatggcaagcggatttcggcctggcccgggcctatggtgtcccagtaaagccaat

SEQ ID NO: 692441 - DNA, 100 bp, Homo sapiens
gaaataggaacaatgatctcggtatcatctgcagaatatggtactaatgcaaagtgataatatgcagcatgcatactgggaactgaagagagaaatgtct

SEQ ID NO: 692442 - DNA, 82 bp, Homo sapiens
aatttatacaaggagaagcactggatccaaagcatgtctgcaacccagccattttcagtactgccaaatctgtcgaaaggga

SEQ ID NO: 692443 - DNA, 75 bp, Homo sapiens
ggccaatgtcagagaaatctttgacaagcaaaagcgaaagcttcggatctacatttccaatacgttcagtcccag

SEQ ID NO: 692444 - DNA, 105 bp, Homo sapiens
gccggcagaggatccagtgttcaccatcctggccccggaagggtttccaggcctgaggtgcccgccctggccccaggagaatgaaccagccgcagaggatggcgc

SEQ ID NO: 692445 - DNA, 100 bp, Homo sapiens
aaagttttgaaaacatcagcaaatggcttagaaacatagatgagggaagtcgagataacatgagtattgtactagtttgcttttcaaatgctcccaaggt

SEQ ID NO: 692446 - DNA, 74 bp, Homo sapiens
cagagcttcacgtttgatgatgcccaacaggaggaccggaaggccaagacccatgttcttgacattgagcagcg

SEQ ID NO: 692447 - DNA, 100 bp, Homo sapiens
tgtgacttggcaaggagtggaagacaacaaaaacaactgcattgtgtacagcaaaggcagccttaagtgccttgaaacaattttctgaacaaggactgga

SEQ ID NO: 692448 - DNA, 96 bp, Homo sapiens
cgcagactggcgcgtccaggtggccgtgaagcacctgcacatccacactccgctgctcgacagatattctctaagccgctttcatcatgggagaaa

SEQ ID NO: 692449 - DNA, 83 bp, Homo sapiens
gttaattcaacagttcaccaccattaccgtactgtcaagatgataagcatggaataaagcttcagaagggtctttaccaatct

SEQ ID NO: 692450 - DNA, 100 bp, Homo sapiens
tgtgtatctctacatgcgctctttgaaagcgccccggaatgacctgtcgcctgccagctctgaggaatgcagtagcatggatagttgatggtgaatttgg

SEQ ID NO: 692451 - DNA, 80 bp, Homo sapiens
tgtggatcgctgtgatcgtcacttgtctccctttatggcaagattgtcatgagttatggagtaaaaagcgaagaagacag

SEQ ID NO: 692452 - DNA, 75 bp, Homo sapiens
tacagatctctgcagttacaggaacatcgtctgcttcatgagtgggcccaacgacctacggcactttgaccccga

SEQ ID NO: 692453 - DNA, 75 bp, Homo sapiens
aaagaagtctaactatgaagtattagaggacttgccatgaggtgttgaagccttgtttcactgagttggagagac

SEQ ID NO: 692454 - DNA, 83 bp, Homo sapiens
gtgagggtgtacaaatacccctttgaattaattatggctgtggtataagttgaaatccaaaccaggaaagaaggacaaggagc

SEQ ID NO: 692455 - DNA, 74 bp, Homo sapiens
agctgaaggaaagcggaatcgatctgacaccgagcagggcaagcgacttggtaatgaaggtggatgctcttctg

SEQ ID NO: 692456 - DNA, 99 bp, Homo sapiens
ctgcctcagaacagactgtcacagtggaggaaggtgtgaaccgacacttccacatgatttgtattcgggacaagttcagccagaacatcgggcggcagg

SEQ ID NO: 692457 - DNA, 89 bp, Homo sapiens
tgtctcttcatctccgtgagaaaggtgcccccgaagtgaaagagatggcctggtggaaagcctggctgatggatgtgctgactagtgag

SEQ ID NO: 692458 - DNA, 100 bp, Homo sapiens
tgcagggccaagtggccatcgtcaccggcggggccacgggcatcggaaaagccatcgtgaaggagctcctggagctggatggaattactctgatcaccaa

SEQ ID NO: 692459 - DNA, 96 bp, Homo sapiens
ataaaactgaccatagccagagaacagccctccatcttgcagcccagaaggtgtgttccagagaacaagccttcagacatttgctatattgacgct

SEQ ID NO: 692460 - DNA, 100 bp, Homo sapiens
catttacgaatatcagcctggcaagtcttccgttctgaccaacgaaaagatgctccattttcagtccggcagcacacattactctgcgtacaaaacgatt

SEQ ID NO: 692461 - DNA, 73 bp, Homo sapiens
agtacttgggatcccccagttccaaagtgtcttaaagctttcaccaacaatcaccagtggtttacacaacatt

SEQ ID NO: 692462 - DNA, 87 bp, Homo sapiens
accagtgaaatttgttccacaggatgtgccaccagaacccaagaagattccgataagaaacacggagtgtccatcaggacagcttca

SEQ ID NO: 692463 - DNA, 90 bp, Homo sapiens
cagattcgcagtggtcgcttcttctccttgcctggcagtgagctggacaacttggaggagattttggatgatttgcagaatagtcaatta

SEQ ID NO: 692464 - DNA, 100 bp, Homo sapiens
caagaaaataaatcctgcacatttgatgtactgctttaaacttaaagacctctttggacccgaaattgtaagaattctgcttggtcagaatcgtgatggc

SEQ ID NO: 692465 - DNA, 94 bp, Homo sapiens
gttaaggattccaagtaactcttatttgttgttcaggggatgaaggaagctcaggaaaggctgacgggtgatgccttcagaaagaaacatcttg

SEQ ID NO: 692466 - DNA, 83 bp, Homo sapiens
gaccgcgcccccgggccccggctccggcccgggacggaggagccggcgctcgacacagaggacctgaaggagaagaaggagaa

SEQ ID NO: 692467 - DNA, 100 bp, Homo sapiens
aagatccattggtaaattgatcaggatttttggcctaccctccaaagaaaagttgaaatggatgcagtcagaactgaatgttgaagaagtggtaaatgac

SEQ ID NO: 692468 - DNA, 150 bp, Homo sapiens
tgagctgaaatggcagacgatctcggagacgagtggtgggagaaccagccgactggagcaggcagcagcccagataccttgactatgaataatagtttcaataaggaagacagaatgagttctgacacgatggttgggagctgtgacagg

SEQ ID NO: 692469 - DNA, 75 bp, Homo sapiens
ctctggatcatcgaactgaatactggtattgctcgagttccacttgctggagctgccgggggcccagggatcggc

SEQ ID NO: 692470 - DNA, 105 bp, Homo sapiens
ttttcacaactttataagttggcaagacttaagagctgttgaacttgtaaaatcttggaataattctcttcttatgaagaaggagtctcgctctgtcgccaggct

SEQ ID NO: 692471 - DNA, 75 bp, Homo sapiens
cccaaaattgcaagacctttcatagaggtgctgtccctggacaccaacatcacaaaccaggtgaataagctgaac

SEQ ID NO: 692472 - DNA, 100 bp, Homo sapiens
gggaaactggaacgagtgaagaagttaaaagattatgcgttcattcattttgatgagcgagatggtgctgtcaaggctatggatgaaatgaatggcaaag

SEQ ID NO: 692473 - DNA, 100 bp, Homo sapiens
ttttttgataataagagaagttggtatggatcctggcgggagccagtcaacccctattatgtcaatgccggctatgccctggccccagccaccagtgcca

SEQ ID NO: 692474 - DNA, 76 bp, Homo sapiens
tgggatttggaggatttaatacacagcagcagcagcaaactagtgactaataaaggtaccagaagaatatggctgc

SEQ ID NO: 692475 - DNA, 75 bp, Homo sapiens
gccagacactatagtcgagccaaacagacgctccctgtgatttatgtcaaggcattctggagctgcaagagcagg

SEQ ID NO: 692476 - DNA, 98 bp, Homo sapiens
gaagagatagatcatgcagagtattacctttacaagtgactgaacttgaatgtgttagtagccaagcaaatgcagtacatactcataagacagaatta

SEQ ID NO: 692477 - DNA, 100 bp, Homo sapiens
tatgaagcacggacagaagatgacctgagttttcacaaaggagaaaaatttcaaatattgaacagctcgcgctggatccagggcaaaaatgaagacataa

SEQ ID NO: 692478 - DNA, 90 bp, Homo sapiens
ctttcttgtcaactgctcacgacagaaggcgtctcatggcgttggaataccggctctcagcggctggcagctgcaatgactctccgcacg

SEQ ID NO: 692479 - DNA, 100 bp, Homo sapiens
actcaagtaggtagtgaataccgggagtcctggccccctaactcaagagacctgtcttctggttacctggatgatactaagcaggaaacagctaatgggc

SEQ ID NO: 692480 - DNA, 82 bp, Homo sapiens
ctccaatgggcctttccagcccgtggtccttctccatattcgaggtaatactgcattgcatgattgtgcagaatctggaagt

SEQ ID NO: 692481 - DNA, 75 bp, Homo sapiens
agcaggcacccaagcgggcggcaggcccgcgatgctcccagcccggtgagacctgcctgaatggcgggaagtgtg

SEQ ID NO: 692482 - DNA, 75 bp, Homo sapiens
cacatggtgggggccacaccatttgccgtggccaggctagaggttccaattgtggacaagataaggaccattgct

SEQ ID NO: 692483 - DNA, 83 bp, Homo sapiens
tgataatgtaaattgccgcgatacccaaggcagacattcaacacctttacatttagcaggaaaatgtttcaacgtgcgcaaga

SEQ ID NO: 692484 - DNA, 75 bp, Homo sapiens
ccgttggatatccacaccatccttctcgctgcagggtttattgttggccaaaaccaggctttgattgaaccagga

SEQ ID NO: 692485 - DNA, 48 bp, Homo sapiens
gcccaggccagcattcccgcagacactcatgaggaccatgatacttcc

SEQ ID NO: 692486 - DNA, 100 bp, Homo sapiens
cttaaaattaaggtctcttcagaaaggaacctttgattctaaatatggagagtatgaatgggtccataaggttaatggggttgacctgaggaactccagc

SEQ ID NO: 692487 - DNA, 100 bp, Homo sapiens
gaactatagcaatctggttttcttggatctgaaaaccatgagtgaacgcctcaagaataggtactacgtgtctaagaaattattcatggcagacttacag

SEQ ID NO: 692488 - DNA, 100 bp, Homo sapiens
acggaggcttcgcgggaagacgcggcggcggcggcggaggatgagcctgcagagcgcgcagtacctccggtgtgtgtctggggaagagacttacagaagt

SEQ ID NO: 692489 - DNA, 100 bp, Homo sapiens
gaatgaaatttgcagagtatgggatatgtcaatggatgagagcagagaggagccttcaggggaagtagaggtggccgaggttggggcacacgaggaaatc

SEQ ID NO: 692490 - DNA, 75 bp, Homo sapiens
taatgcagaaaatccatacacagcgcttgataaggctgacaaaccaagaggatttgccagaggtcttgatcctga

SEQ ID NO: 692491 - DNA, 80 bp, Homo sapiens
ggtctggaatacaagttacatgattttggctacagaggagtctcttcccaagagataaacgaagccgacatcttggtgct

SEQ ID NO: 692492 - DNA, 80 bp, Homo sapiens
caaagaagaccacacactgggaaacatcattaaatctcgtgatgagaggagatggattgaaaagcagaacagagcaacaa

SEQ ID NO: 692493 - DNA, 100 bp, Homo sapiens
gacaagaggaaattagcagattgttgtccagtgtacagaagcttactggaaggagtggccaactagttaaaggtttgacacctcaatatcaacaaaatgc

SEQ ID NO: 692494 - DNA, 90 bp, Homo sapiens
caccacttcacttcacctctttctggaaaccagctttctgtatgagcccaatagccaagggtacaagtactaccgacagaagctggagga

SEQ ID NO: 692495 - DNA, 100 bp, Homo sapiens
cgctcaggaagtacttcgagggcttcggcgacatcgaggaggccgtggtcatcaccgaccgccagacgggcaaaaatctccagccctacagagactgagc

SEQ ID NO: 692496 - DNA, 100 bp, Homo sapiens
aagactttccagctcagagagtgaaggctttaccttgtgggggtcagaatattcgtggaactggaatgccatagatgaggggcccaagagggacattgtc

SEQ ID NO: 692497 - DNA, 90 bp, Homo sapiens
ccctgcccagaggtccctcagcaaagatggtacaaaagagtctttggaggatgcggctttgatggtttgtgatggacgcctctgacccca

SEQ ID NO: 692498 - DNA, 75 bp, Homo sapiens
gtggcacgctctcctcctacccgagatctattgggaaactgattataaccactcgggcaccatcgatgcccacga

SEQ ID NO: 692499 - DNA, 75 bp, Homo sapiens
aaaacctatcgttagagtcttcctgcccaacaaacagaggacagtggatatgggccctcacattttccaaacctg

SEQ ID NO: 692500 - DNA, 100 bp, Homo sapiens
agccgcgagcgcccggccgaacccgcgatggaataatgcccagcggcccgccaggtcccgtgaagtttagcaactgcaatggaaaaagaaaagtacaata

SEQ ID NO: 692501 - DNA, 100 bp, Homo sapiens
ctttgggagttccaatatcagtctatcttttattcaacgaatgacagcccatatcaaggcggtgtattctttttgacaattcattttcctacagactacc

SEQ ID NO: 692502 - DNA, 136 bp, Homo sapiens
agcgtcgagaagggcgactactacgaggcgcaccagatgtaccggaccctgttcttcaggctccttcgagagcagtggatccgggccaagtacgagcgacaggagttcatctacccggagaagcaggagccctact

SEQ ID NO: 692503 - DNA, 75 bp, Homo sapiens
ctgctgtcaggctacatcagcaaaggggccctggccaacgtcaacattgggagcctcatctgcaatgtaggggcc

SEQ ID NO: 692504 - DNA, 96 bp, Homo sapiens
tggcggagacgccggctgctcctcccctccccgccggtggcctcagccccgagtccaagaagatcctgacacccgccctcaagaagcgggcccggg

SEQ ID NO: 692505 - DNA, 83 bp, Homo sapiens
tccaaatcttgctgcttttaattcaactcagagacctgcctagagctggaacgttacctccagagcgagccctgctatgtttc

SEQ ID NO: 692506 - DNA, 75 bp, Homo sapiens
ctgatggagctcaagaccagggccctgcagctggaagaggagctgttccagaaggagcatttctaccagaggcag

SEQ ID NO: 692507 - DNA, 99 bp, Homo sapiens
cacggatgccgtctggatgggaagttacggtttacagcgaagtccacccagcgtttccgagatgccggtggccgtgggtccctacggacagtcccagcc

SEQ ID NO: 692508 - DNA, 82 bp, Homo sapiens
cttatgttagtgctcctgtcacccaccaactagcacaacctgttgtgacgactgggtttggattcagaagaggattattata

SEQ ID NO: 692509 - DNA, 100 bp, Homo sapiens
gtgttgaaaagatagacctgaagggattatcacacacaaaaaatgacagaaatgttgaatgttcctttgagagtatggtgtttgcgaaaacttgcggaag

SEQ ID NO: 692510 - DNA, 75 bp, Homo sapiens
gtgggcgacctcttccagaagctggagcttgaagaaatccgcaaatgtgggatgaaaaacttccgtaacatccag

SEQ ID NO: 692511 - DNA, 75 bp, Homo sapiens
gcgctgctgagtttcttcatctacaacccgcgcttctggccgcgggaaggagagccgggcccctcagatgagagc

SEQ ID NO: 692512 - DNA, 98 bp, Homo sapiens
gcacacagtaccacatgcagctggccaaacaactggctggaatattgcaggtgcctttagagacagcaatggatcaacttcatatgcacttcacccaa

SEQ ID NO: 692513 - DNA, 51 bp, Homo sapiens
gtggacatcgtcacagaggagatgcctgagcgccgcccctggctgggggca

SEQ ID NO: 692514 - DNA, 74 bp, Homo sapiens
ctgctgtcaccctcctgggagtcctgctgcaagagcctcagctcaaaggcatcgtcaccaaactgttctgccgc

SEQ ID NO: 692515 - DNA, 100 bp, Homo sapiens
tttggtacctcatgtggacaacattgagacagccaacagttttgctgtaacaaacgccttgcacgatctgattttctggagagatgtgaagaagactggg

SEQ ID NO: 692516 - DNA, 100 bp, Homo sapiens
ccaaggccccttttgcagcccacggctatggtgccttcctgactctcagtatcctcgaccgatactacacaccgaaatgcagtaatagtggccttgtctt

SEQ ID NO: 692517 - DNA, 50 bp, Homo sapiens
aagatttgtaaagaaaactcttagatgaaaataaacccatctggatgcat

SEQ ID NO: 692518 - DNA, 97 bp, Homo sapiens
ccacagactggatggacacagagtgcccagaggccaagcggctaaagccccccgctgccacacagccaggctgaccagtacgtcctcagctgggacc

SEQ ID NO: 692519 - DNA, 82 bp, Homo sapiens
gaggagcgggaagagttgctgggtaagactttgaccccgacgcaggcttcagtgattgccgcggatcagaagcctgagcact

SEQ ID NO: 692520 - DNA, 74 bp, Homo sapiens
ccctcaacacccgtccatgtacttcatcctcaccgtggctgaggttcctgcccagcccaaagcgggaggctctg

SEQ ID NO: 692521 - DNA, 100 bp, Homo sapiens
cgtcgtgcgcctgggggtgcgcgcctgcgacctgcccgcctgggtgccctacgagacgctgaacaaacgctttcgcgccgctcagaagaacattgaccgg

SEQ ID NO: 692522 - DNA, 100 bp, Homo sapiens
cccagaagaagggaaggcgcgagtgaggaaaggaggtactgtagatagttttgtgccagaataatatccataatcaggcccatatgaacagagtggtcac

SEQ ID NO: 692523 - DNA, 100 bp, Homo sapiens
ttcaccgcgtacccgggacccgcccgcccgcgggaggacctagatgtgaaggctggtggaggctgtgtaatgaccattggagaaatgctacgatcttttc

SEQ ID NO: 692524 - DNA, 100 bp, Homo sapiens
ctcctgtgacctgcatgtactgggggattcgcagggaggatgtcgggacaccccggaagctgggaaatggaagtgcacggctgtctataacgtgctgccg

SEQ ID NO: 692525 - DNA, 75 bp, Homo sapiens
ggcgccgagaggccgtgcgggacgcgggcgccaggaccggccgaacgcagaggacatcaaggacgccctgcgcag

SEQ ID NO: 692526 - DNA, 101 bp, Homo sapiens
ttcctttctattcacccatctggcaagttggccctgtcggttggtacagataaaactttaagacagccgctcaggaagcaatcttgcatgcgtctggaaat

SEQ ID NO: 692527 - DNA, 100 bp, Homo sapiens
cactaacggggacttcacctttgtctcctcagcagacgcggaaggcatctccagaatatcagaaactgcaggattccagttcttgttatgagtgtcttgc

SEQ ID NO: 692528 - DNA, 100 bp, Homo sapiens
cgcgtccgccgattcctcctccttggtcgccgcgtccttggctggcgttcttctcaagtcttaggattgcagcaacacgctcggctgcccaaacccaagg

SEQ ID NO: 692529 - DNA, 75 bp, Homo sapiens
taaggattccaagtaactcttatttgggtgtcagtgtggaggcagttgatccagtgttccaagctaaaatgttgg

SEQ ID NO: 692530 - DNA, 74 bp, Homo sapiens
tgcgagctcctcaagaatctcgtgctcaccggtttctcccacatcgacctgagcgacaccacaggcaagctggg

SEQ ID NO: 692531 - DNA, 115 bp, Homo sapiens
tcagattggccagtgtggcaaccagatcggagccaaggtgcaatggatgagcttcatagtctggatccaagaaggcaagagttattggaagctagatttactggagttgcaagtg

SEQ ID NO: 692532 - DNA, 51 bp, Homo sapiens
gtccactgcgggccggcgaaagctggccaagactaaggggctgcagagcgg

SEQ ID NO: 692533 - DNA, 90 bp, Homo sapiens
gacttgggcccagtttatggcttccagtggaggcattttggggcagaatacagagatatggaatcagatttagcatgtagactgctgggg

SEQ ID NO: 692534 - DNA, 83 bp, Homo sapiens
ttcctcatgacattgctgtctgaacatggtttcattggatattcacccgaactgctacagaacaacacgctgcccgattacag

SEQ ID NO: 692535 - DNA, 80 bp, Homo sapiens
gctttaatcctgaaagccatgcagcggagctccaaacgagaatggaagccgctggaggaccgtagctgcacagacatacc

SEQ ID NO: 692536 - DNA, 75 bp, Homo sapiens
tgaaaagccgtccttggcacagtcaattgccaaaatcctctctagagatccccctgaggtgaccgtgtttcccaa

SEQ ID NO: 692537 - DNA, 101 bp, Homo sapiens
tgcatcatggaagaggacaatcgcgctccccaattgtggcgcaagccactgccaaaaaatatggtgtctcgtctttgtgaatctaaaaaggtttgtgctgc

SEQ ID NO: 692538 - DNA, 75 bp, Homo sapiens
gagcggcaacggggctccgggccctaagggaagctgaacatggttatgcctccatgttaccatacaataacaagg

SEQ ID NO: 692539 - DNA, 100 bp, Homo sapiens
gacatggccgccaacatgtacagggtcggagcttcggaaccaaaaagaagcttcccagagccggggccaggagccccaagcgccctctagcagcaaacac

SEQ ID NO: 692540 - DNA, 83 bp, Homo sapiens
cttcgccaaggagatcgtctctctcatcgaggcccaaaccgccaaggttatcaatactctggctgaccatcatcatcgtggga

SEQ ID NO: 692541 - DNA, 90 bp, Homo sapiens
gggggattctcgacctgctaacagaactggaccttttcggttgtccgcacaaaccagtgtgcaggggagtttgtcatcacttttcctcgt

SEQ ID NO: 692542 - DNA, 75 bp, Homo sapiens
ctgggaggtggaccggagctcgtccagctgcgtgcctagagctaaagttgcagacaagatccagctcatcaataa

SEQ ID NO: 692543 - DNA, 75 bp, Homo sapiens
acaggaggcagtagccaaacacccagttcagtggggactgcccaccgtgtctgcggccggtgtcatcggcatgct

SEQ ID NO: 692544 - DNA, 73 bp, Homo sapiens
ctcagaagactagaaggaagttcctggccattcaggttgaaatcacaaagattagacacctttttagataggt

SEQ ID NO: 692545 - DNA, 75 bp, Homo sapiens
cttctccttctgccatgattgagggtcgtcctggaacagagacttaaacgtatgccaagggagcatgagcaagga

SEQ ID NO: 692546 - DNA, 100 bp, Homo sapiens
gttgcattgatgaaattaaagatgcatgctgatggcgataagtcattaccacaggaagttaaatgaagttcgaaagagattgaatgagctaagagaatta

SEQ ID NO: 692547 - DNA, 100 bp, Homo sapiens
gagacaggctgttccttaagcagagaatgagcttactctctcagatgacttcgtctcccaccgactgcctgtttaagggctgtaatccccttgcacaaac

SEQ ID NO: 692548 - DNA, 101 bp, Homo sapiens
ggaaaagtggagtctgatttcttttgtcaattaggtcacttcaacctcttattggaagattatccaaaaggtgggaaaggagaagtttcacaaatcccaac

SEQ ID NO: 692549 - DNA, 50 bp, Homo sapiens
cggagcgtctggtggcgttgttgggacaatgcagatcttcgtgaagactc

SEQ ID NO: 692550 - DNA, 75 bp, Homo sapiens
cccgtggacgatgcaatcaatgggctaagcgaggagcagaggcagaacagcctgcttggacacagctcggtggaa

SEQ ID NO: 692551 - DNA, 50 bp, Homo sapiens
cctctcaactaggctgctcccagaagtgagctccttaataagcatttata

SEQ ID NO: 692552 - DNA, 100 bp, Homo sapiens
aagatttgtggaaggagaactttcaaaagatatatagtcaacatgtggcactgtgcagaatggagggactgccgtaccccaccatgtcagagaccatggc

SEQ ID NO: 692553 - DNA, 100 bp, Homo sapiens
gctaaacatctaactagaagggatacccttccatttcaaagaacagaatgctaaggaagctgtggcaaggtcaaggtggaaggtccaaggactgagaaag

SEQ ID NO: 692554 - DNA, 100 bp, Homo sapiens
actgcgaggacgggaaggacgcgccgcggccgggcagggaggagaccggcacccagacaggtggcgacggcagaggagaaactggtcaaagaactcatgc

SEQ ID NO: 692555 - DNA, 75 bp, Homo sapiens
attctcgcctgtcttcccttcacccagagcaaattgagacgtcccggttatcaatactctggctgaccatcatca

SEQ ID NO: 692556 - DNA, 98 bp, Homo sapiens
gcctcaccaagtcacatgacaagcagtgcgagaagatgtactaaattcattgaataacaactttcttcaaacgctaaatcaagcttggaatgatcatc

SEQ ID NO: 692557 - DNA, 75 bp, Homo sapiens
ccactgctaagttatccactagtgctaaaagattcaagatggaaaaggtgatgtaaccattacaaatgatggtgc

SEQ ID NO: 692558 - DNA, 100 bp, Homo sapiens
atggtgaggagatgaccctcaaacagttcctcgactattttaagattccatactcagccacttccaaagcctctcctatagcctggctgagcgatcttct

SEQ ID NO: 692559 - DNA, 100 bp, Homo sapiens
aacgaggggtgaagcggcccaggtgaggccctggaagaaagcgggacttttcccctgttccttggagtcagtattttgagtccatggaagatgtagaagt

SEQ ID NO: 692560 - DNA, 74 bp, Homo sapiens
gccctggggccggcgatgtgccaccgaggctgaggatgatggtagattgccagcgtcgagggcgaggcccccag

SEQ ID NO: 692561 - DNA, 100 bp, Homo sapiens
ctttacgtcatcttcgattagctaataaccaactgcaattcctacctccaggtagctcagtggcatttctgagcaggggccaccctgacttcaccttggc

SEQ ID NO: 692562 - DNA, 101 bp, Homo sapiens
tgctgctaaaggaaggtgagtcagcctcgaacgccacagaaacatccggcccagacatgactatcaagtttaattggttggggtcagataagaagaggagt

SEQ ID NO: 692563 - DNA, 98 bp, Homo sapiens
tgctcaccatcagtgaatttaagcccacatatcaggaccgagtggccccgccagcctcctacgtgatcacagacctgacccagctgcggaagatcaag

SEQ ID NO: 692564 - DNA, 83 bp, Homo sapiens
aaccccccgcgcgaggcgcgcctcggctctgcagaacattgctgccatcagcctggccatcaactacccaaacaaggccaccc

SEQ ID NO: 692565 - DNA, 100 bp, Homo sapiens
tccaagaaaaaaaccacaaatgtttttctgttttgcctgaatacatgatttaaacaagagatttccacagaaggaaatccagttatcaaaattgactcaa

SEQ ID NO: 692566 - DNA, 100 bp, Homo sapiens
ctgcatccatattctggtgtaactgtggacatcaccattcaggaaggtcttcatcctccaggtccacctttagcaagacctattctcccccgagaacgag

SEQ ID NO: 692567 - DNA, 83 bp, Homo sapiens
ttcggcagtccacccaccgccgccgcctcccagattatgatgcatcattatcacagaagaaattcgtgtctatagcttttaag

SEQ ID NO: 692568 - DNA, 100 bp, Homo sapiens
ctgcggtctccccgccgcggctggtaaaggcgacacaggaggagaaccgggagctgaggagcaggtgtgaggagctccacgggaagaacctggaactggg

SEQ ID NO: 692569 - DNA, 98 bp, Homo sapiens
gggggccgtgccctcggaggcggcgtgggcggcagagagcggggcggcggcagcctccccacctgcccccgcaaggcggcatctgctggtcctgctgc

SEQ ID NO: 692570 - DNA, 50 bp, Homo sapiens
gaagaatagtaggtggtactgtggaatgcaagctttaggacttcacctga

SEQ ID NO: 692571 - DNA, 97 bp, Homo sapiens
ctccggagcctcagcgccgcgcagaacccctgaacagtgcccaagtgttgtctctttgttgtcagagagttacaaccctcatgtgcgctacggagct

SEQ ID NO: 692572 - DNA, 50 bp, Homo sapiens
cacagatgtccaagctgccaagttctgcaccagtattgtggctcaagact

SEQ ID NO: 692573 - DNA, 90 bp, Homo sapiens
tatctgtactgccggcacctcaaccagatgaggaagtacaactttgaggtatccgctgatcattgacccctctggacaggccacagaatt

SEQ ID NO: 692574 - DNA, 75 bp, Homo sapiens
gacagatgaagaaatgtttgattgtgccatacttacagttgctgattttcaagtgtcttctcagaaacaaccggc

SEQ ID NO: 692575 - DNA, 100 bp, Homo sapiens
tcctggggttaagtctctcatcaaaacaccagagcgactttcattagaaggagagcgacagcccaagtcaccaggttgctccttgagggcaggacagttc

SEQ ID NO: 692576 - DNA, 80 bp, Homo sapiens
ccagggaaaggatgacatatttttggacctgaaacagaaattctggaacacctatatgataaagagttctatctgtcttc

SEQ ID NO: 692577 - DNA, 75 bp, Homo sapiens
tcggagcaacgagcgcagcgccgaggctgtgatcaatagccaggaatggactttgagccgctccattcctgaact

SEQ ID NO: 692578 - DNA, 75 bp, Homo sapiens
cttaccgagagtttgaaagtgcgattgtggaagctgctcggaatttcctgttgagatataaaggcccatctgatc

SEQ ID NO: 692579 - DNA, 75 bp, Homo sapiens
tccttgaagtatttggctgaggagttttcaatcccagtttctactttccaggtccactggtgtttggtgtaccca

SEQ ID NO: 692580 - DNA, 73 bp, Homo sapiens
gaggactcctctagttgctcagatataccaaaattggaaggagataggggacaggcaaatggtatgaattaca

SEQ ID NO: 692581 - DNA, 50 bp, Homo sapiens
ggggagaggctctgagaggcgaggccgggagaagcaggacaaggtggtgc

SEQ ID NO: 692582 - DNA, 75 bp, Homo sapiens
ctggagctcactcagaaagcagccaggttacctacctgggcaaagtctccaccactggcatgcagtttttgtcag

SEQ ID NO: 692583 - DNA, 96 bp, Homo sapiens
ccgaccagccgcacgccgaccggcgccgggagatcctgggaagggaaaaggccgaggcatcagcgtgtgaagaccgcaaagacgatcccgagtaca

SEQ ID NO: 692584 - DNA, 129 bp, Homo sapiens
gaccattcttccctgggctggtgaagtacatgaactcagggccggttgtggccatggctgtaacagaagacaagtacgaaatactgcaatctgtcgacgatgctgcgattgtgataaaaaacacaaaag

SEQ ID NO: 692585 - DNA, 75 bp, Homo sapiens
tttggcattgacatttaattttagggtcctttatatagaagggagatgtctttggtgcaacactaacaaggcttg

SEQ ID NO: 692586 - DNA, 75 bp, Homo sapiens
attggatacactggaaaaatgtcttgctgggttccatgccattgcagtgtcaactaggcctcagttacttttcag

SEQ ID NO: 692587 - DNA, 100 bp, Homo sapiens
gatcgttgtgttgtacagccagaaaccggggaccttaacaatccacctaagaaattcagaggatcttagaaatgaagttgaaaaattacgcaatgaagtg

SEQ ID NO: 692588 - DNA, 100 bp, Homo sapiens
ggctggctctggtcttcgatgcacaggagtggccgttatggaacgcagaatgtcaggaatgatgacaaatgccattgggggacctgctgctggagttggg

SEQ ID NO: 692589 - DNA, 99 bp, Homo sapiens
gagatcatcctctccactgcccgcatgaaccgggtcctcagcttccacagcgtgtctgatacttccgggtcatcctcctcctcctcctggccctgactc

SEQ ID NO: 692590 - DNA, 80 bp, Homo sapiens
tgggtcctcgcttgcagttcagcgaccacgaaacgggtatgcaggagattagaagccagtgggcatgagcgtggctgcca

SEQ ID NO: 692591 - DNA, 50 bp, Homo sapiens
tatgggctatttgtgtagcagaaggcctggagctgctgaagactgctatt

SEQ ID NO: 692592 - DNA, 101 bp, Homo sapiens
atattctcgtcagcatcacagtattcagatggtactccaaagattcaggtttactcacgtcatccagcagagaatggaaagtcaaatttcctgaattgcta

SEQ ID NO: 692593 - DNA, 75 bp, Homo sapiens
aaaccacgcaggcaaacgagaattaaatgccgagaaggccagtacgagctgagaaaacagaagtccttagtgaag

SEQ ID NO: 692594 - DNA, 74 bp, Homo sapiens
ggaaaaatcgagcagaaagaatgtctttcagcgttaaaaggatctgaacaaagtctgctcaaatctcctgctgt

SEQ ID NO: 692595 - DNA, 100 bp, Homo sapiens
aaagcagatgttattaaggcagctcacctttgtgctgaagctgccctacgcctggtcaaacctggaaatcaggtggtggtgctcaccaacacccccctgg

SEQ ID NO: 692596 - DNA, 88 bp, Homo sapiens
gaaaaaccgcgaagtcatggggctctgtcgggaagtcctgccattgactctaccagaggagattcttcaagcttagttgctgaacttc

SEQ ID NO: 692597 - DNA, 78 bp, Homo sapiens
aaaaacagccaccttcagtatctcagtcctccagtgtttggatattcaggacatgaaatctgctgtgatcacgccttg

SEQ ID NO: 692598 - DNA, 101 bp, Homo sapiens
caggcaacgtgttggaccttccggagcttctcagaagacagagggttttcttttgaggccaatggaagcactgttgtgaagaacttatgaaaattgagatt

SEQ ID NO: 692599 - DNA, 98 bp, Homo sapiens
acaagtcaggaggaggatgcattcagcctcctttttgagagcctgggcctggtggacaggaacaacgaaccgcttacacacgccatgtataacctggc

SEQ ID NO: 692600 - DNA, 87 bp, Homo sapiens
gggactaaactggcgggctccgtggaagcgtggccggcagcgtcccggacgaggaggtgccttatgcctctggcatgcccatcaaga

SEQ ID NO: 692601 - DNA, 100 bp, Homo sapiens
cccgagggatcgagacctgaacatgtggtggtggttgcacagtcgccttttccagtttggagagacgttcaagaggaacagagatcaggtcttatggcaa

SEQ ID NO: 692602 - DNA, 100 bp, Homo sapiens
atttctctagctattgccttattttttctcatggatgttcttcttcgagtatttgtagaagggcaaaagtcaacaactctagcttaattggagtaggcta

SEQ ID NO: 692603 - DNA, 100 bp, Homo sapiens
atgtttcatcatactgctatactgaaacctgaatcaggctgtcttgataacatcaaggcagctgcaatgactctccgcacggtattattgtcattgcaag

SEQ ID NO: 692604 - DNA, 82 bp, Homo sapiens
atggcatttacagaaagagtcaacagcagtggcaacagatggcgtgatcaacatgagcatccccattgtactgcccgtctct

SEQ ID NO: 692605 - DNA, 100 bp, Homo sapiens
tagggtgaacaacccgttcttgcctcaggccagtcgcctccaggccaagagggatccttcacccgtgtctgaaatcatgaggtccaatggattttgttta

SEQ ID NO: 692606 - DNA, 75 bp, Homo sapiens
gggaggccgagaaccgcagggactggccgaggtaagaattgtgacaaaggccagtcttttttcattgacgcccca

SEQ ID NO: 692607 - DNA, 80 bp, Homo sapiens
ccgaagctgtgcttctccatgagatggctactaaggcaggtgcagcatcaatgattcactacatggttctgatatcagct

SEQ ID NO: 692608 - DNA, 100 bp, Homo sapiens
ccccagattattgcccagagacaatggacccagatgatgtggtaccagttggccaaagaagagcctggtgttggtgcatgtgctttggactagcatttat

SEQ ID NO: 692609 - DNA, 75 bp, Homo sapiens
tgcagcagtctccagagcattccatgagtttggggggaaagagctcagagatgaggaacagacagctgagagcat

SEQ ID NO: 692610 - DNA, 75 bp, Homo sapiens
agaatcaattaccaaaggtgatcttgagctgaactgctcattttcagtgtcccgattgtctatgagaagtacaag

SEQ ID NO: 692611 - DNA, 73 bp, Homo sapiens
ttggactgaacttaaatactgatagtttaacggatgaagagtcccggaaaaattgggaagaatttggaaatcc

SEQ ID NO: 692612 - DNA, 100 bp, Homo sapiens
ccgagagctacacgttcacggtgccccggcgccacctggagagaggccgcgtcctgggcagagatgccatggacaatattaccaggcagaaccaattcta

SEQ ID NO: 692613 - DNA, 77 bp, Homo sapiens
agccgatccagcctgcggagcctgtggggcagggcacggccgagcagatgaggactgtgtggacgaccgggccagac

SEQ ID NO: 692614 - DNA, 75 bp, Homo sapiens
ctgcgctctgctcggtgtcgtggcctcgcagatgaatgaggaaaatggggagcaggaggctgacaatgaggtaga

SEQ ID NO: 692615 - DNA, 100 bp, Homo sapiens
cccatccgtccgcgggtccgtggagctggagcagatcccccagccggctgagacagggaatgaaggatggcagcatgccgtgcattaaaagctgttttgg

SEQ ID NO: 692616 - DNA, 100 bp, Homo sapiens
aggagaaagagcactaccaggtgttagaactgtcaagtaatccacctctggctaccatccttattcctcctcatgctcggattcaagcagctgcttcaac

SEQ ID NO: 692617 - DNA, 76 bp, Homo sapiens
taccgttgaacttctgaaaggagatgcacacagtctgttttggcaggagaagctaaaacttacttatgaggaaaag

SEQ ID NO: 692618 - DNA, 50 bp, Homo sapiens
aaaaatcaccagttactttaatgattggctactcctggcttcccctcctg

SEQ ID NO: 692619 - DNA, 75 bp, Homo sapiens
taacagtctgcactttcacccgtttcagagctggtgatgctgctggagtggtggtcgggcacggaatgcaccatc

SEQ ID NO: 692620 - DNA, 96 bp, Homo sapiens
tttggaaggtcagacctttttctccaagaaggacaagcccctgtggaatgaaaaagactcgagtagatgcaaaaaaaattggtcctcttaaactgg

SEQ ID NO: 692621 - DNA, 90 bp, Homo sapiens
ggagagggtgctggctgccgcgcggccgagtgtgaaaaactcaaattactgtcttccatcatataccgcttataagaactatgattattc

SEQ ID NO: 692622 - DNA, 100 bp, Homo sapiens
tcaccatccaggggagactccacctctcatcaccccaggtcatcgtattgaggaagttcctgaacttcctttggtagttgaagataaagttgaaggctac

SEQ ID NO: 692623 - DNA, 88 bp, Homo sapiens
accgattttctgcagaagatgaagctttgagtaacattgccagagagctgatgttctaatcatgtcagataaagatgatattgagact

SEQ ID NO: 692624 - DNA, 100 bp, Homo sapiens
cctcagtcctgccgggtccacggcggcaggctttgatgaactaggtggacttctcaaaccaacagtggcctctcagaaccagaaccttcctgttgccaaa

SEQ ID NO: 692625 - DNA, 100 bp, Homo sapiens
ttcttgcaagaaagatgaatgcacttcacatgctggatattaaagagcacaatggacagttcccctccacagctcatgctcagcaaagtgtttactgctc

SEQ ID NO: 692626 - DNA, 90 bp, Homo sapiens
gcatcatttacaagagcagaagccagaagcctgtcttagatgttcatgcagaactagacagaattacacgaaaaccagttacagtttctc

SEQ ID NO: 692627 - DNA, 100 bp, Homo sapiens
aagaaagtccacatttccaaaagtccaagggtgcacttacagagtgctacgatgaactggggaacagatatcagcttccagtgtattgcttggcaccgcc

SEQ ID NO: 692628 - DNA, 73 bp, Homo sapiens
ccaaggaggaggccctggagctgatcaacggtgtgctgggcatcaaggtgaagatcatgctgccctgggaccc

SEQ ID NO: 692629 - DNA, 101 bp, Homo sapiens
gaaacagtgacagacctggagactgcagttctctatccttcacacaggtatccatcatcccacgtggcaaaggactaggttatgctcagtatttaccaaaa

SEQ ID NO: 692630 - DNA, 74 bp, Homo sapiens
cagtcttctatgtttccacatcggtcagaaaaagatgcatcattcttaacaaagaagttaaatattggtgggaa

SEQ ID NO: 692631 - DNA, 83 bp, Homo sapiens
ctgctttccactcggctcctgtcgtccgttctctcaggctcccgttcagcagccattgtttgatgtcctgtgactgagaaacc

SEQ ID NO: 692632 - DNA, 73 bp, Homo sapiens
ctatgtgccacaggtggagcaggggattcactccttctccagttgcacagccacacccttcagctggccttaa

SEQ ID NO: 692633 - DNA, 118 bp, Homo sapiens
agaactcgtcatgctctttgtagcgtggtgcttctgttgctcacagaccagaatccgtagaagctagccctgtggtagttgagaaatccaacagttatccccaccagttatataccag

SEQ ID NO: 692634 - DNA, 88 bp, Homo sapiens
gctggacactagggaaccacatcttcttcagggatcgatatggagtcaagtcaaaatgcagatcttcgtgaaaacccttaccggcaag

SEQ ID NO: 692635 - DNA, 82 bp, Homo sapiens
ctcgagggaggttcatgacaactgaggaaaaagccaaagtgggaccaggggttaaagcacgaattgggagctctcagcgaca

SEQ ID NO: 692636 - DNA, 83 bp, Homo sapiens
ctggcggacgcaggagcgatggcagcgaccgatatagctcgccaggtgcgtctgcttctgcgctttgcctgggagaggccctg

SEQ ID NO: 692637 - DNA, 75 bp, Homo sapiens
gctgtagtgggagtgttccaggattcgccttgaaatgggacgtcggtcatcagatactgaagaagaaagcagaag

SEQ ID NO: 692638 - DNA, 51 bp, Homo sapiens
tatgccaggcatgccacctgggtgtgtcaaggatgccacaatgccatcgac

SEQ ID NO: 692639 - DNA, 80 bp, Homo sapiens
ggttggggctgctgtttctcttcgccgacgattctcctgagaatgatattcctatggagatcaccacggcagaaccacag

SEQ ID NO: 692640 - DNA, 99 bp, Homo sapiens
cagaacttgaaggttaaaccactagcccatttcacaggcatggaagaggagatggttcgtgttacgcagtggccgtttaactggagatccagatgtttt

SEQ ID NO: 692641 - DNA, 100 bp, Homo sapiens
gcaaaatcttcgtgaaaagatctgctgcaaggaactgatagcttatggttctccattgtgatgaaagcacatggtacagcccattgcagatgcaaaggct

SEQ ID NO: 692642 - DNA, 83 bp, Homo sapiens
gcttgtgcagcgactggggctgacattcctgaagccgaaggtggcagcatggagccatgccagtgacggtaacccgcaccacc

SEQ ID NO: 692643 - DNA, 100 bp, Homo sapiens
caaacgaggatagaagacaaggtgcggtggtcctccatgtgctctgtctgtcaaagctcgaaaaacagcagcagaggaaagaaaagaccagagctaaggg

SEQ ID NO: 692644 - DNA, 75 bp, Homo sapiens
ccacagccattctcccatgtctactcgcaggcgtcatgttgggaatcggagtcttctgaagaggagtctgatgat

SEQ ID NO: 692645 - DNA, 75 bp, Homo sapiens
ccaacatgggcattttgtttatgagcaaggttgggtaaccggtaatggaaaaggactcatctacctcacagatcc

SEQ ID NO: 692646 - DNA, 73 bp, Homo sapiens
gtcaattttatgatgaagcaagacagaggaattggcagtcttagccaacacagatctatagatttcttcgaac

SEQ ID NO: 692647 - DNA, 73 bp, Homo sapiens
tgcaggtctctccgctcatcaaggccaaacgtaccaagaaagtcgggatcgtcggtaaatacgggacccgcta

SEQ ID NO: 692648 - DNA, 101 bp, Homo sapiens
actggactcatggaggctgagcatttattcagggttacacatcattttggaatgactgtatatcatctggattacgtggctgtatgttaattgaattagca

SEQ ID NO: 692649 - DNA, 100 bp, Homo sapiens
ttcaacctgcgcattgggaggccgaagggtccccgggacccgcctgctgagtggacccgggtactctgaacaggaagtgcctcctggaaccacagagtcg

SEQ ID NO: 692650 - DNA, 75 bp, Homo sapiens
caagaagataggatgtgggaacttcggagagctcagattagtctattcttattctgagaaggaacttatatgcca

SEQ ID NO: 692651 - DNA, 50 bp, Homo sapiens
agcacctgctgagcccagccagatacctgcactttaatcagatagaaact

SEQ ID NO: 692652 - DNA, 100 bp, Homo sapiens
ctcaaggaaacctttccaacacagatgtccaagctgccaagaacaacttgatacagagacaagtacaactcaatcagaaactattcagacagcggcttct

SEQ ID NO: 692653 - DNA, 75 bp, Homo sapiens
cggatatttaagtacaatggtgggcttaattttagatcatagcaatggatcatttaacttgaaagctttgtcagg

SEQ ID NO: 692654 - DNA, 75 bp, Homo sapiens
tgtgcagaaaggaatcaaaagaatatttagaatgcaggatggagagcatgatgccttcttctgtagagtgggcgc

SEQ ID NO: 692655 - DNA, 75 bp, Homo sapiens
ccagaagaggtttagtgccctcctgagtgactgcgtcaggcatctcaatcatgcttcagctttagctgcagctgc

SEQ ID NO: 692656 - DNA, 101 bp, Homo sapiens
ttgaagtctgtgtcaaacatccatatcataagtggaattttggagatattcaaaggtgcagattcactttataggaacagcttcagcttcagtgatgaaaa

SEQ ID NO: 692657 - DNA, 100 bp, Homo sapiens
aggtctggttcctgccgcccgtctgcatggcccactgcatccgcctggcgctcatccgcttccacgtcaaggtggattctgaagagccagtctttgaggc

SEQ ID NO: 692658 - DNA, 100 bp, Homo sapiens
caaaacttattcgggataaagtagcagggttttgtgaccatgatcttgcagtgctcaattgaaatgccaaatattagttatgcttggaaagaacttaaag

SEQ ID NO: 692659 - DNA, 58 bp, Homo sapiens
attagcagctttccccaactgaagaggcacaaagaattcagcttagagaactatcaac

SEQ ID NO: 692660 - DNA, 95 bp, Homo sapiens
gcgctggggcccccagaagtgatcgctcagctggagaacgcggctaaagttctgatgtggacagaggactgcagaaaatcaacctatcctccttc

SEQ ID NO: 692661 - DNA, 100 bp, Homo sapiens
gtgtatgcctcgtttgttgggaacctactgatgaaccttggtaaagcagctgagcagccattttcagatttaccccttctcattgaggaaaccaaactca

SEQ ID NO: 692662 - DNA, 100 bp, Homo sapiens
gtatttgccatcagttattgctggagctgcctttcatttagcactctacacagtcacgggacaaagctggattctgcccccgtggagactcccagaggga

SEQ ID NO: 692663 - DNA, 99 bp, Homo sapiens
cggcactgattttcagttctgggaaaatggtgtgcacaggagccaagaggactaaaatgtagcagttgtgaaccttttccagatggagccacgaacaac

SEQ ID NO: 692664 - DNA, 99 bp, Homo sapiens
cccgagtacccaccagagggcgccactaaactggtaatctcaggggcgatataatcaatgaggtggtcctaaagttgctcaaggctggatggtcccggg

SEQ ID NO: 692665 - DNA, 100 bp, Homo sapiens
gaaacttccccattcggtgcaccaagagcagcctcacatggtgtgggccgacatcaagagctgcgagatccaacaggttgccaacttggcctgttccatc

SEQ ID NO: 692666 - DNA, 82 bp, Homo sapiens
cacagatgtgacacctcggcagttcttcaatgttcagaaaatgtatggagatctagatgtcttattcctgacagatgaatac

SEQ ID NO: 692667 - DNA, 82 bp, Homo sapiens
tttatgctagaacccagcgcaggagtaaattgaaagaatcacttggtcccgcggcagtgctggtggccatggttcccgtagc

SEQ ID NO: 692668 - DNA, 90 bp, Homo sapiens
tggagatcagcaccaaatcccacagaggcatctgagcgggacgaccctgggacagtctccactggggcagatccagctgaccatccggca

SEQ ID NO: 692669 - DNA, 83 bp, Homo sapiens
ggtgaagtcggccagcctgagcaagcggaggacctacgccggcctgggaagctcttcgtgggcggtcttgactggagcacgac

SEQ ID NO: 692670 - DNA, 100 bp, Homo sapiens
ggcgccgcgccgcacgagcaccagcctagagccaggaaagaccacagcaagattctttcattcgtctcctcctagcctgggggaccaggctcgaactgac

SEQ ID NO: 692671 - DNA, 97 bp, Homo sapiens
ggaatccaatcctctgcttccaggacaagtcctgcgcttggggatcctctgtacgcccgttcactggtcggattgtttgtgctgaacgaactgtcct

SEQ ID NO: 692672 - DNA, 100 bp, Homo sapiens
gacttagagccaggcaccatggacagcgtgcggtctgggccttttgggcagcttttccggcctgacaacttcatctttgttccagtctcatcagattttc

SEQ ID NO: 692673 - DNA, 100 bp, Homo sapiens
atagcagattctaatcaaaatatgcagtctcttttaccagcaacaatccatggacacaagggaccaatcactgcagtggcttttgctcctgatggaagat

SEQ ID NO: 692674 - DNA, 111 bp, Homo sapiens
gagacaccgattataagaagagaaactcagcgctggggaagaaggtcttgagagctgatgacaataacatgggcaatggctgctctcagaagctggcgactgctaacctcc

SEQ ID NO: 692675 - DNA, 83 bp, Homo sapiens
acctgccaatttaccagagataattgataacaccctgtaacagctgagctggtcgtctgatgataaggaaattagttgcagag

SEQ ID NO: 692676 - DNA, 100 bp, Homo sapiens
cagcagccccggggcccggagagatgtttctttctcagcaaaatagaggagaagcttacccctcttccagaagataatagtatgaatgtggatcaagatg

SEQ ID NO: 692677 - DNA, 50 bp, Homo sapiens
ccgtccccgaccttgcctgaacaagaaagttcaggagccctggaaaggag

SEQ ID NO: 692678 - DNA, 100 bp, Homo sapiens
caagaacagctaaaatgaaagccatcattcatcttactcttcttgctctcctttctgtaaacacaggcatccgtgtcattctggaccttactcccaacta

SEQ ID NO: 692679 - DNA, 75 bp, Homo sapiens
ggagtatcaaatatgagaaagctaggccatctgaataactttactaagaaaaccagaactgatggctctatttgc

SEQ ID NO: 692680 - DNA, 100 bp, Homo sapiens
agagaaaatgaaaccagcagacagaatttgtcaggagtcagtggatcggtggggaaaatgctgcttaccctgggccctgggctgtagaaagaagacacca

SEQ ID NO: 692681 - DNA, 96 bp, Homo sapiens
gtctaattcagactgtgttgctgctgatgaagacgttatttaccatatccagtatgatgaggtacctttcaacagatgtggatttccaagcaagaa

SEQ ID NO: 692682 - DNA, 101 bp, Homo sapiens
gccaaagcctgcccagacggctcacctgtgcgggatggaacaaaagaaatatggctacacacacctttctgcaggagagctgcttcgtgatgaaaggaaga

SEQ ID NO: 692683 - DNA, 76 bp, Homo sapiens
ctgcaggaactctacaacccaatccaggatgtggctttgtttgagatgaatcagtcggattcaaaagaagtggaca

SEQ ID NO: 692684 - DNA, 98 bp, Homo sapiens
ctgtcctggccaacctgctgctggaggaggataacaagttttgtgcagattgccagtctaaagcggaaatccgaacgccagcagatctgaatggaatg

SEQ ID NO: 692685 - DNA, 75 bp, Homo sapiens
ccggaggaggcattaacgagaccgggtagaccaattggacaaaacagctcctcgtatcacactcttgcattcccc

SEQ ID NO: 692686 - DNA, 75 bp, Homo sapiens
gaatttccatgtcaacatagtccaggtgatgacacatctccacgtgattgaagaaaggaggaaccaaagcctctc

SEQ ID NO: 692687 - DNA, 75 bp, Homo sapiens
ttaccacttcctctagtgctcccttcacccagccattgtcttccaatgagaagttcagttctgcaagcaagtatg

SEQ ID NO: 692688 - DNA, 90 bp, Homo sapiens
ccccggggagacggacgcgtttggcaacagcgagggcaaagagctggtggcctcaggtgaaaagtatggcatttcaaatatagatacaac

SEQ ID NO: 692689 - DNA, 87 bp, Homo sapiens
ggacggagcggccggggcctggggctgcctgccgggcggccgggcgcggcgagcccagaaatgactgctgtccatgcaggcaacata

SEQ ID NO: 692690 - DNA, 100 bp, Homo sapiens
gaaaaaagagaggatttgcttttgtaacttttgatgatcatgatacagttgataaaattgttgctaactgccttctatgaaagcagtcattattcaaggt

SEQ ID NO: 692691 - DNA, 100 bp, Homo sapiens
ccgaatcttccttcaggatatcaagatgcttgctctgtcaaggcacagcctattgtctcctttgctcagtgtgacatcattcagacgcttctacagaggt

SEQ ID NO: 692692 - DNA, 82 bp, Homo sapiens
cagcactgtggaggccgtcctcgcgtactgtaagaactctgtggacggcctctggtactgcttcgatgacagcgatgtgcag

SEQ ID NO: 692693 - DNA, 111 bp, Homo sapiens
ccaggatgttgctgcctgcagaagctcagctcaggtgaatggtagtgtctagaaagggtatgtcccttcaagagagaggtgccaatgtccaaccggcctaataacaatcca

SEQ ID NO: 692694 - DNA, 75 bp, Homo sapiens
agctgactgcacttcttttttgagaaaggaaggaatatatcctgactgattggcattttgtcagtgatgctgatc

SEQ ID NO: 692695 - DNA, 90 bp, Homo sapiens
ctggaataccacgctggcctgcttcgtggccatcctcattgacacatgacggaagtgtgtatttttgggccactccacggcaggtcccta

SEQ ID NO: 692696 - DNA, 82 bp, Homo sapiens
cgaggagttcctcagcaaggtctccatcctaggaagccgagatcccccgcgaggtgatcgagaggctggcccgcagtcagat

SEQ ID NO: 692697 - DNA, 75 bp, Homo sapiens
taccagagacagaagcagatggattcgtccttttaggtggttccttaaaaacagttattgctcaagatgaaaacc

SEQ ID NO: 692698 - DNA, 75 bp, Homo sapiens
ccacgagtgggaggtgctgagccgctcaggtagatttcgggcagacaacttgaacaagctgaagaacctatgcag

SEQ ID NO: 692699 - DNA, 75 bp, Homo sapiens
ggttacctcgtgaggcgcctcaggggaagcaaaggcgaatgctccttgtgttatatttattgatgaattagattc

SEQ ID NO: 692700 - DNA, 50 bp, Homo sapiens
ccacgcttcgagacttagggagcagccaccaaaaccctcaacaggggcat

SEQ ID NO: 692701 - DNA, 107 bp, Homo sapiens
ttaattttagggtcctttatatagaagggagagtagccccctacagaagctaagcagcatggacccggccatgctggagcgcctcctcagcttggaccgtctgcttg

SEQ ID NO: 692702 - DNA, 83 bp, Homo sapiens
ggaagagattcagccagcacactcctcgcgagcaagcgtgagtgcatctccatccacgttggccaggctggtgtccagattgg

SEQ ID NO: 692703 - DNA, 90 bp, Homo sapiens
tttaaacaagagatttccacagaagagagatggctgcccaaagattgtcaatctggggagctctaagacagacctcttctatgaacgcaa

SEQ ID NO: 692704 - DNA, 100 bp, Homo sapiens
gagtctcaatatctgtcttcggtggactccttcggcagtccacccaccgccgccgcctcccaggctactgcagcactggggtgtcagttgttggtccgac

SEQ ID NO: 692705 - DNA, 98 bp, Homo sapiens
cactgtgagttagtggtggacctgtttgtgcgcacagtgctggtctgcctgacatgttatgatgtgattgctcaagcccaatctgggactgggaaaac

SEQ ID NO: 692706 - DNA, 74 bp, Homo sapiens
gcttcccgagacatcaccttgccggcattttgcacagaggccgtgtcttatgcggaatacagggtgggtgtgca

SEQ ID NO: 692707 - DNA, 73 bp, Homo sapiens
ctccttgaagctgatggtgaatgtgtgcggacacactctgactgaaatgcaactgcagaagcaacatgtgacc

SEQ ID NO: 692708 - DNA, 87 bp, Homo sapiens
ggcgcagccagagccaccagcgcagcgctgccatggagcccagcagcaagttaaacacagtgggaatatcacttttgatgagattgt

SEQ ID NO: 692709 - DNA, 83 bp, Homo sapiens
atatccggagatattccaggcccactccagggcagcccacttcgatgtgttgttcttgtcgcacttagggacatcaatcaagg

SEQ ID NO: 692710 - DNA, 75 bp, Homo sapiens
cttggggactggagatggccagttacttaaggaaagagccagacttctcagaggtcagtctgttcaacaagtggg

SEQ ID NO: 692711 - DNA, 90 bp, Homo sapiens
gtttgcctgaatccatcattgcagctgcatgttcaagaagtggccggagagttctgcatgttgattcatctatttaggtccacctgagga

SEQ ID NO: 692712 - DNA, 83 bp, Homo sapiens
agaaagagaaaggatttctaagcaggaactccccagagacacctatggctgccgatgaaggctcagcagagaaacaggcagga

SEQ ID NO: 692713 - DNA, 100 bp, Homo sapiens
gtctacagatgaaggcagaagactatgatgttgtaaaagttattggaagaggtgcttttggtgaagtgcagttggaacttagtgatttggcccgtgaccc

SEQ ID NO: 692714 - DNA, 78 bp, Homo sapiens
gcgagtgaggaaaggaggtactgtaggccgtggaggatatagaggtcgtggaggctttcaagggagaggtggagaccc

SEQ ID NO: 692715 - DNA, 100 bp, Homo sapiens
gaatgggaccacaaacgagggccaagaggatcacaggagtcgatggatggagatgaaaaggaactagagagcagcgaagagggaggctcagccgaggagc

SEQ ID NO: 692716 - DNA, 90 bp, Homo sapiens
agccccagtggaccaggctatcatatcatgttgcctttcattactacgttcagatctgtgcaggcaacacagacagcccctccaccaccc

SEQ ID NO: 692717 - DNA, 75 bp, Homo sapiens
actggtgtctatcaaagccatcggatggatgagcagtcacacagactttgcttttagtttggatgctgaacagcc

SEQ ID NO: 692718 - DNA, 101 bp, Homo sapiens
ccaggccaagagggatccttcacccgtgtctggccctgggcagtgacggggttcgggtgaccatggagagtgcgctcaccgcccgtgaccgggtgggggtg

SEQ ID NO: 692719 - DNA, 75 bp, Homo sapiens
tgcacatccaggctggtcagtgtggcaaccagatcggtgccaagatcatcaccgaccgacctggctttcatgatg

SEQ ID NO: 692720 - DNA, 74 bp, Homo sapiens
tcgaacgcgaggccaacagccccggctgagtcatcactagagagtgggaagggcagcagcagcagagaatccaa

SEQ ID NO: 692721 - DNA, 98 bp, Homo sapiens
tcagctcttgggtttagcaaaagttcatctccttctgcatccttaactgagaatgaggttatgaagacagtatggagtttccagaccatagtagacat

SEQ ID NO: 692722 - DNA, 75 bp, Homo sapiens
ggcctgcccttcaccctctacatgatcacagattctgctggccatattctctactccaaagaggatgcaaccaag

SEQ ID NO: 692723 - DNA, 76 bp, Homo sapiens
ttcgtcaggaacgtggccgacgacaccagaacaaaatccagtctcatagcagaggagaatataatgtttacagcac

SEQ ID NO: 692724 - DNA, 120 bp, Homo sapiens
acgggatcctctgctgcatagtttcggtcatctaaaggaggttttaaacagtataacagggccgggactgtcacttggtgatacagctctgcagaacctggagcagctgctagacgggcc

SEQ ID NO: 692725 - DNA, 75 bp, Homo sapiens
gcggtggcggcccattcagcccgagcgcccggcgggcatgtggagaccccaaggcaaaaccatcctatcttatcg

SEQ ID NO: 692726 - DNA, 101 bp, Homo sapiens
gcttgacattacagccaagatggtgctgtcccagagacaacgagatgaactgaaatgggagagcctgggcttcattcctggcctactaaatccataagcaa

SEQ ID NO: 692727 - DNA, 100 bp, Homo sapiens
gcactggttgctcgtcgtcattacaggagaacgacacattggatacagaagggaggtgatcatgcaccatggcactggcccccagaacgtccagcatcag

SEQ ID NO: 692728 - DNA, 74 bp, Homo sapiens
tcttggcacaaatactattatggataagatgatgagtacaggggctcaggtccaggtggcaggggatatgctac

SEQ ID NO: 692729 - DNA, 80 bp, Homo sapiens
tttttatctcatattagtgcctgtgatggcatctttcatctaacacgaatcaaacattttaagtccagtgcaggatggaa

SEQ ID NO: 692730 - DNA, 75 bp, Homo sapiens
tgcacacccgagccgcccgccgagcactaccaggcagtttggaggagcaatggtacttagaaatcgttgataaag

SEQ ID NO: 692731 - DNA, 98 bp, Homo sapiens
cgctcctggaggaggaggtgggagtgatggaatggggagaagatattaaagcagtttcaaaagatgaagcagtgatgttggtgaatcatcaggcaaca

SEQ ID NO: 692732 - DNA, 100 bp, Homo sapiens
ggcatccagggctcgtacttctgctcgcagggcccttctagcccaatccagagctgtaccatggcagagacaagagaagaggagacagtgtcagcagaag

SEQ ID NO: 692733 - DNA, 100 bp, Homo sapiens
aagctgttcctcacggcctgtgagacaagagcatcttggatgtaggacaatggaagagttaggcggataaaacggtcccatcaagactgagaaaaagcac

SEQ ID NO: 692734 - DNA, 105 bp, Homo sapiens
gtgcgctaaccccggagcccggccccggggaactagggagcgtctccggctgcacagcgctcagatacagatccacgggttttagaaaaacaagaattacagcag

SEQ ID NO: 692735 - DNA, 97 bp, Homo sapiens
cgagacccagcacatcgccgaccagggaaatcctcattgacgattcaatttgttgaaggccaatttgtggactcctacgatccaaccatagaaaaca

SEQ ID NO: 692736 - DNA, 75 bp, Homo sapiens
accggcggtctgataggctacatcgcggcatgagatgaagctgtgacagggaatggcatttactttacaagaacg

SEQ ID NO: 692737 - DNA, 101 bp, Homo sapiens
ctggttttgtggcggctgctgctagagctggagcatttgccggattcaagtcaatctgaaagtcccagccagccaagtgacgctgacattaaggaccagcc

SEQ ID NO: 692738 - DNA, 101 bp, Homo sapiens
cggcaacccatccagatcaccatgccggtgaagttaaaatgaactatttgggcaaaccatatgtagccatggttacaacataccaaatggcagttcttctt

SEQ ID NO: 692739 - DNA, 101 bp, Homo sapiens
aagaggagaacctggacctcagggacacgctggtgctcaaggtcctcctggctctcctggtgaacaaggtccctctggagcctctggtcctgctggtcccc

SEQ ID NO: 692740 - DNA, 82 bp, Homo sapiens
gaatagacctgaagacaaaaatccagaagtacaagcagtctggagcatcagatccatgctgctgctgactcggagccccaca

SEQ ID NO: 692741 - DNA, 90 bp, Homo sapiens
ccgtcgcggagccggagggcgggaggaacatgacatcgcggaggtccctatcactgttcagtccatcgtcattcagtctctaaataaaac

SEQ ID NO: 692742 - DNA, 100 bp, Homo sapiens
aaaatctgtggcatggcaaaaacttcagtgaagatttcatacattggcctcatgacccagagctccttggagacacatcactatgtggattgtggaggaa

SEQ ID NO: 692743 - DNA, 87 bp, Homo sapiens
ttaactgatgagcaatcactttggattgaagatactacaaaatcagtttatcaagtcaaaatgcagatcttcgtgaaaacccttacc

SEQ ID NO: 692744 - DNA, 75 bp, Homo sapiens
agacctgggtcccagtggagaggcctcaccatgtagaactgtggctgcaccatctgtcttcatcttcccgccatc

SEQ ID NO: 692745 - DNA, 101 bp, Homo sapiens
ctctaccttaaggatgtgcaggatcttgatggtggcaaggattccagggtctccctccactgctgtagtaacccgggtccggggcctcggtggtgctcctg

SEQ ID NO: 692746 - DNA, 75 bp, Homo sapiens
gttccatgcgcacagggacaggggccgacggtcgcaaggtcctacggtcaagcatccgggagtttctatgcagcg

SEQ ID NO: 692747 - DNA, 100 bp, Homo sapiens
cctgctgctgagcagcgccgcgggttatacattggctcttcaaagacgttcacctcatcagagaaatccctgactcctttgcagtggtgtagacatgtcc

SEQ ID NO: 692748 - DNA, 90 bp, Homo sapiens
gttcaaggaggccttccagctgtttgaccgaacagctgcccaacatgtttgggaacctgcgctccacgttaatggccctcatgattggct

SEQ ID NO: 692749 - DNA, 50 bp, Homo sapiens
tgaattcacaacctcaaacccgttctccgtactatactggcaattgctgg

SEQ ID NO: 692750 - DNA, 101 bp, Homo sapiens
taatgaagaagttcgtgaccttttgggcaaggatcagacacaaaggttagaggtgaatgaaaactttgccattgatttgatagcagagcagcccgtgagcg

SEQ ID NO: 692751 - DNA, 102 bp, Homo sapiens
cctgctgatgtcagtgttatatcctccaggaatactggccaggggcaagattcttgccaagagaattaatgtgcgtattgagcacattaagcactctaagag

SEQ ID NO: 692752 - DNA, 100 bp, Homo sapiens
ggaggttcgcggctctaacggggctttctacaagccatgaagctcatgactgctctggtgaatgttgccttaaacctcagtattcatcaggataataccc

SEQ ID NO: 692753 - DNA, 51 bp, Homo sapiens
caggttgttcccattagtaaaaagtattcaactccctggacatgtcccgct

SEQ ID NO: 692754 - DNA, 90 bp, Homo sapiens
gggactcttggaactgggcttggtgcaggatttggaacagagcacgagcggctccgcaaataccactgaagaggacacactctgcacccc

SEQ ID NO: 692755 - DNA, 100 bp, Homo sapiens
cataacggggttcgggtgtctcgtgtgtgaacatcacagttctttggggtgactttcaagatggactctactctaacagcaagtgaaatccggcagcgat

SEQ ID NO: 692756 - DNA, 78 bp, Homo sapiens
acctaccagatgactgtggagctcctgttcagacagagtgcaagacgatgacttgcaaaatgtcgcagctggaacgca

SEQ ID NO: 692757 - DNA, 100 bp, Homo sapiens
gcgccaccctggaaaccctgcattttgggaaactcgactttggagaaaccaccgtgctggaccgcttttacaatgcagcccttcagatatttcaacactc

SEQ ID NO: 692758 - DNA, 75 bp, Homo sapiens
gaggagcgtcaacagcagcaccatgggtgatggccgttttgctggaagaggatcgcttggcagctgaacccagct

SEQ ID NO: 692759 - DNA, 82 bp, Homo sapiens
cccgtctctgagactgcagttaatacaaatcatattcccctgaagccctctggagatacctcacagctcgccatgattggtt

SEQ ID NO: 692760 - DNA, 100 bp, Homo sapiens
ctttcttagacaaaatctaccaggaagatatctttccatgtttaacattctcaaaaagtgaggtttcccttgggggctttgaaataacaccaccagtggt

SEQ ID NO: 692761 - DNA, 88 bp, Homo sapiens
aggaacatctctttcaatgacaaaaagtttgtcattaaacccatcgacaagaaggcacctgtgtattttgattacatgagaagctgga

SEQ ID NO: 692762 - DNA, 96 bp, Homo sapiens
ggccgacatcatccaccactggaacgccaaccggctggacctgttcgagatcagccagccgaccgagttctggacatggcaagacatgtgccactc

SEQ ID NO: 692763 - DNA, 100 bp, Homo sapiens
gggaaagggccggaaaacacacgttcctccgaaaccggtttgcaagtccttgtagagtgagacggtttaagcggaagcatcttactgccattgactgcca

SEQ ID NO: 692764 - DNA, 88 bp, Homo sapiens
cttcgcgtctgcttcggagaccgtaagggttttatctgagagaactaatattgaaccttgggtttgtgccaacatcattcgtctcttt

SEQ ID NO: 692765 - DNA, 88 bp, Homo sapiens
taaataagggcacacctagtcagggtcgttggctgtgggttgcaattaccatgtctgactcagtaattcttcgaagtataaagaaatt

SEQ ID NO: 692766 - DNA, 105 bp, Homo sapiens
ggaagaacttcttcagaattagaaaggagctgcttcccaataaggaaacaacaatgcagatcttcgtgaagactctgactggtaagaccatcaccctcgaggttg

SEQ ID NO: 692767 - DNA, 90 bp, Homo sapiens
gtggaatctgttcttcttttgcatcctacgtaaccagaccaagctgtggggaaggaagcagccaccctcgccatggcctccccgcccgcc

SEQ ID NO: 692768 - DNA, 101 bp, Homo sapiens
caagcatggatcggcgctggacgtgctcctctccatggggttccccagagcccgcgcgatctaagcctttcccacgttatggttataaaccctccccaccg

SEQ ID NO: 692769 - DNA, 83 bp, Homo sapiens
tgagaccagtggaagcagcaccatcggggagacaagcaaagttaaacatgaagtttctggagagacagtggtatttcaagggg

SEQ ID NO: 692770 - DNA, 101 bp, Homo sapiens
atctctccatcccttccgaggcccgacttcgctctacattaatcatactcctccaccactgtccaagagtaaggagagagaaatggacaagaaagatttgg

SEQ ID NO: 692771 - DNA, 100 bp, Homo sapiens
gggatcccggcaagtaacatgactaaaaagaagcgggagaatctgggcgtcgctctagagagtcattcaggagagcaggaaagaaaaggccatccctgtg

SEQ ID NO: 692772 - DNA, 75 bp, Homo sapiens
aagagttgtcccagctcggcccgcgggggagccccgggagccgcacgctcagagtcaagatctccactgaagttg

SEQ ID NO: 692773 - DNA, 100 bp, Homo sapiens
tacatccttctgacaggcccggcagactcagaggcacccggcctggtctctgtgatcaagcacaagctgctttgctccccctgtggatgtaaccccttag

SEQ ID NO: 692774 - DNA, 100 bp, Homo sapiens
ggcgttcaagatgtcgaccaagaatttccgagtcagtgacggggactggatttgccctgacaaaaagttatacattggctcttcaaagacgttcacctca

SEQ ID NO: 692775 - DNA, 74 bp, Homo sapiens
gctggaagatggacgtactttgtctgactacaatattcaaaagatcgccacatcacagaatcgtatctatctca

SEQ ID NO: 692776 - DNA, 75 bp, Homo sapiens
gctctctggaccttgtctcgctcgggagcggaaacagcggcagccagagtgaagtgcgccacaagcaaaccagct

SEQ ID NO: 692777 - DNA, 83 bp, Homo sapiens
tgtttatataactcaagttgtttggctaaattcttcaggttactcactataaacaatatccacccaacacaagcaaagtttat

SEQ ID NO: 692778 - DNA, 90 bp, Homo sapiens
agtggtcgcttcttctccttggtggatccataaagaacccagccaacccgcagagggaggggaggggctgagctgtgaggagagcggggc

SEQ ID NO: 692779 - DNA, 76 bp, Homo sapiens
ccggccgcctggctccccatactagtcgccgggctattgagtggccagacttccccaacaaatgccaaattggaga

SEQ ID NO: 692780 - DNA, 100 bp, Homo sapiens
gcagactctgaagatgatcagacaaggcaaagcgaaattggtcattctcgctaacaactgcccagctttgaggccaacatagccgaggtagaggtctcca

SEQ ID NO: 692781 - DNA, 100 bp, Homo sapiens
gaggaggccgtccagcagatggcggatgccctgcagtacctgcagaaggtctctggagacatcttcagcaggcctccccatggccacccatggaccagtc

SEQ ID NO: 692782 - DNA, 100 bp, Homo sapiens
cagagattcaggccagagttgtgggccgccgtcggcagcaagaacagagagagaggtggacagatctgagagatactgagtgctgcttttgacacaaaaa

SEQ ID NO: 692783 - DNA, 100 bp, Homo sapiens
cggatttgcaccccgtggggtggtgcacacagaacaacaaggtgttgatgccgccggacgcactgtgacttctgccgtgttcaccgtgggagacaacgtg

SEQ ID NO: 692784 - DNA, 75 bp, Homo sapiens
cctgtcggaccggatggcaagaatcagctggggcagaagcgcgtggtcaaggacttacaaagtacccaagcatct

SEQ ID NO: 692785 - DNA, 100 bp, Homo sapiens
ctcctcactgagagctcaaagctcatgaagatgaatccggcctcggcgccccctccgctcccgccgcctgggcagcaagtgatccacgtcacgcaggacc

SEQ ID NO: 692786 - DNA, 50 bp, Homo sapiens
gctgtaggccatacatggcagtctctcaggcagctgcagagcttcaacag

SEQ ID NO: 692787 - DNA, 100 bp, Homo sapiens
gagcagctgcggcggctcggggtgctctactggaagttctcccaggagaaagccatgttcagttcgagcgccaagatcgtgaagcccaatggcgagaagc

SEQ ID NO: 692788 - DNA, 100 bp, Homo sapiens
ccgccacgcagccggccaccgccgagacccagcacatcgccgaccaggcctggcatgcgtgggcagtgatgaacttcgaagctgtgctacactacaaaca

SEQ ID NO: 692789 - DNA, 82 bp, Homo sapiens
gtcctcgctgctgtacttcgtctatgtggcgcccggcatagcctgcttagacgcctggtgactctcatttcgcagcaggcca

SEQ ID NO: 692790 - DNA, 100 bp, Homo sapiens
agaacttcctcgcactgtgacatgtctgatcccttgctcccatccctgcagcatgaacaaggcaagatgatgatgaatgaagtcctggcagcttcctgtg

SEQ ID NO: 692791 - DNA, 100 bp, Homo sapiens
tgaaagtgcattcaaggaaatggcagatgacctcagcaacccctttggacaaatgagccttagtcgccaaggttctactgaagcagctgacccatctgca

SEQ ID NO: 692792 - DNA, 129 bp, Homo sapiens
agaaaactacagctgggctctgcctgctgacctggggaggccattggctctatggaaaacactgatcgaaaagtatcctccttgcacacctcccgagttcagaggcagatggtggtctccgttcacgac

SEQ ID NO: 692793 - DNA, 87 bp, Homo sapiens
tgaaaatactggagctcataacccctactccacagctgtgagtacctcagtttcaccagtgatcattaaagaatgggcagcttacaa

SEQ ID NO: 692794 - DNA, 50 bp, Homo sapiens
cttttccaagatgtcatttatcaggtttgaagatgccgcatttggattgg

SEQ ID NO: 692795 - DNA, 75 bp, Homo sapiens
tccctgaaatccgacactactgattctagtcaagtcagaaattggctttggaaaaatggaaacctacatcaaatt

SEQ ID NO: 692796 - DNA, 78 bp, Homo sapiens
tatcaatgacaaactgacggaaaaggagagagatgccggtggtggtgtgcacattgagccccggtatagacagttccc

SEQ ID NO: 692797 - DNA, 75 bp, Homo sapiens
tttagaacgatgtgaacatcgaatcatggaatcccttgcatggctctcaaataactgaagtgaagtgatggactc

SEQ ID NO: 692798 - DNA, 50 bp, Homo sapiens
aggtgcccctggtggtccggcttgaaggaaaatcctgccttgcttcgttg

SEQ ID NO: 692799 - DNA, 80 bp, Homo sapiens
ctcggttaagggaaagcgccgagatgacgggctttctgctgccgcccgcaagcagagcattttgaaagcgaagcagaagc

SEQ ID NO: 692800 - DNA, 101 bp, Homo sapiens
atctggaccaggatggtttcaatgagaaagtggctcatgccaaagaagaaaaccttagtatgcatcagatgctggatcagactttactggagttaaacaac

SEQ ID NO: 692801 - DNA, 103 bp, Homo sapiens
ttgtgattctctcagaattttttaataccacatggcaggaggcaaattgtgcaatcctgccattgactctaccagaggagattcttcaagcttagttgctgaa

SEQ ID NO: 692802 - DNA, 100 bp, Homo sapiens
tgggatacagcaggacaagaacgattcagatggcttaatggtacaaataactccagagaccatgaatggcttgcggctagctttacgagaacagaaagac

SEQ ID NO: 692803 - DNA, 100 bp, Homo sapiens
aaatcatatcttgtctaattgtgagctggttaagaagtttttagatccaaacaactattccgcaaactatactgttcttatcaggagaggatcaatggaa

SEQ ID NO: 692804 - DNA, 121 bp, Homo sapiens
gcagagagtccccagcaggaaggtctcacctgaggtgaaccttcgaccttggacttctcagcctccagaatgactggaactctaactgaagatggtttagatctttgggggattcaacgag

SEQ ID NO: 692805 - DNA, 109 bp, Homo sapiens
cataccggagcgcaatggcgtccaaccccgaacggggggagattctgctcacggaactgcaggttgaatcatgtagctgctggtctcgtttcaccaagtctgaaatcgg

SEQ ID NO: 692806 - DNA, 83 bp, Homo sapiens
ttgaaaagttccggcagagaattctggctccctgtaaggattgtgcagactggtgcttaaaatggaagtcgatattaatggag

SEQ ID NO: 692807 - DNA, 73 bp, Homo sapiens
cctggaggtggatctgaagaacgggtaccaggatcatctatgaccggaaattcctgatggagtgtcggaactc

SEQ ID NO: 692808 - DNA, 100 bp, Homo sapiens
ccctgtgtcttgcaggagtaccagcagttcaggtttgagtacaagctcagcttcaaaggcccaaggctggcattgcctggggctggaatacccttctgga

SEQ ID NO: 692809 - DNA, 98 bp, Homo sapiens
ccaaagaaatctatcacttcaccttggaaaagatccagcctagagtcatttcatttgaggagcaggaagtggcggtgcgagggctgctgcacagcgag

SEQ ID NO: 692810 - DNA, 82 bp, Homo sapiens
aagcctattgagttaacacctctgccgctgctaaaaggtgacaaccaaagccaagcaactgaaggattcagtgacctgctcc

SEQ ID NO: 692811 - DNA, 83 bp, Homo sapiens
gttcttgtttgtggatcgctgtgatcgtcacttgctacacttagtcctgagatgtattttttctttaagtcttgaatgaatac

SEQ ID NO: 692812 - DNA, 101 bp, Homo sapiens
gaggctccgggcgcggggaagtcatgctcgcttcacggaggcaatagctagccggtgtgcaactgaggaacatggctcaagaaactaatcacagccaagtg

SEQ ID NO: 692813 - DNA, 100 bp, Homo sapiens
cggagcagtatttcaatgtggaggttcaaaatgagcctgtttggaacaacctcaggttttggaaccagtgggaccagcatgtttggcagtgcaactacag

SEQ ID NO: 692814 - DNA, 82 bp, Homo sapiens
aaaggagatattacggcggcagatccgcctactgcaggtctctgctttctatccgtcaagatgataaagtcgtgtgcccgag

SEQ ID NO: 692815 - DNA, 100 bp, Homo sapiens
cacccagctgtgccaagtgcaagaagaagattacaggcgtcctagaccagaaggagcacaggctggatggccgtgtcattgaccctaaaaaggccatggc

SEQ ID NO: 692816 - DNA, 90 bp, Homo sapiens
cgggaggggcgaaggcgggcggcagaggcgatcaggtttctctactcggacgaggtgcagattggcccggagacggtgatgaccacgcta

SEQ ID NO: 692817 - DNA, 100 bp, Homo sapiens
gcttaactcatatatttaacccccctccaaaaagtggccgtttgttgcatctgtttttttgttattcttcctctaaatcttgttggtacaatacttggcc

SEQ ID NO: 692818 - DNA, 48 bp, Homo sapiens
cacattgcccagaagcttttccgaggtatggagagtcggcttgactac

SEQ ID NO: 692819 - DNA, 100 bp, Homo sapiens
atgcatggagtcgtgttttggaaaacaggccaagggaagaaggagaaagggccaacccctgaagaagcaatacagaaactgaaggagacagagaagatac

SEQ ID NO: 692820 - DNA, 88 bp, Homo sapiens
gctctgaaccaggacctggacccggacccaaagtgccatgtctttaattacaaaattggacagctgtacatgatcagcaaacacagcc

SEQ ID NO: 692821 - DNA, 97 bp, Homo sapiens
ttctggaaaaacactcactggatgctagccagggcacagccactggccctcgggggatattcactaaagaggaggagatatcaccaaacatgatgga

SEQ ID NO: 692822 - DNA, 99 bp, Homo sapiens
gcgactgcagagccagaagggagtgcagggaatcatcgtcgtgaacacagaagaatggtagctgagtggaggttgtctcgaggtgttgaagaacagaca

SEQ ID NO: 692823 - DNA, 100 bp, Homo sapiens
ataaagacaagctttccatcattggtgaggtgctatctcggagacacatgaaggtggcattttttggcagcactgctcagcacgcaggcatgtgaggaag

SEQ ID NO: 692824 - DNA, 98 bp, Homo sapiens
gaccatcctcttggcgcacaaacagtctagccagccagctgaaacggactccatgtggatcaatgagacaatattagtgccacttgttcaagagattg

SEQ ID NO: 692825 - DNA, 89 bp, Homo sapiens
tttggagttcttacaacatggcagacattgacaagtcacagtcaaagtgcctcagaagaactcataagaatcatgcaagcttcctccct

SEQ ID NO: 692826 - DNA, 82 bp, Homo sapiens
ggacgaggacgaggacgagatggacctggagcccaacggtgagaagccctaccactgcaactgggacggctgcggctggaag

SEQ ID NO: 692827 - DNA, 75 bp, Homo sapiens
caagttcacctaccgcggcgtggacctcgaccagctgctggacatgtcctaatgccatggacaatattaccaggc

SEQ ID NO: 692828 - DNA, 100 bp, Homo sapiens
gatcaagcaggcagcgggctttgccagcaaaaccgaaacaggtggaccgggtcagctacctcctgcaggagatctatggcattgagaacaagaacaacca

SEQ ID NO: 692829 - DNA, 100 bp, Homo sapiens
ggcgaagccacagaaaccgtccctgctacagagcaggagttgccgcagccccaggctgagacagttcctctgtgacgagggtgcaggtatctctggggac

SEQ ID NO: 692830 - DNA, 83 bp, Homo sapiens
ggtgcccctgcgttgtaccatccgcctgtgggacacctaccagggggatatgagactttctactcggaatatcctgagtgttg

SEQ ID NO: 692831 - DNA, 99 bp, Homo sapiens
tctgtggctttcgcggccccgaggcagcgaggcaagggggagatcactcccgctgcgattcagaagagctagggccatgagtaccttgtttttgactgg

SEQ ID NO: 692832 - DNA, 90 bp, Homo sapiens
gtggattttaaccgaggcacggacaacatcaccgtgaggcagggggacacagccatcctcagcggacaaggcaaaatctcagcaagttcg

SEQ ID NO: 692833 - DNA, 75 bp, Homo sapiens
caagcggaggcgcgcggaacagtcgccgaggcgattcccgcccaggcatcgttggcttcacagtatgactgatga

SEQ ID NO: 692834 - DNA, 100 bp, Homo sapiens
ggcgagttctcggtcaccatgtggtcctcaggtgctggagaatctggtaaaagcaccattgtgaagcagatgaggatcctgcatgttaatgggtttaatg

SEQ ID NO: 692835 - DNA, 87 bp, Homo sapiens
gctggatgcacagggacgtggtcctggctctgggggacagttatttctcaaactctgaggctgcggagttcacacattgaaatctgt

SEQ ID NO: 692836 - DNA, 75 bp, Homo sapiens
accctgcacagccgtcaccctcaactttcccttcagtgcctggctctctggctatgaaaatcctgtggtgtctcg

SEQ ID NO: 692837 - DNA, 100 bp, Homo sapiens
gccaggcggtgatgaagaatccccccgaaaggaccccccagggcacctggacgatgacggattaccgcacgggttctgcacagtcacctactcctccaca

SEQ ID NO: 692838 - DNA, 100 bp, Homo sapiens
ccgctctccaccatccgcgaggtggcggtgctgaggcacctggagaccttcgagcaccccaacgtggtcaggtagaaccctggaagaagaggaagaggaa

SEQ ID NO: 692839 - DNA, 90 bp, Homo sapiens
cactctctattcgaactctcatgaggaaagaccacagcaagattctttcattcgtctcctcctagcctgggggaccaggctcgaactgac

SEQ ID NO: 692840 - DNA, 90 bp, Homo sapiens
gtagagattggcttcgggctgagctagcagtgagcaccttttggcccaatgaatatcaggtgcctcaatcaggaaccctgaagctgtccc

SEQ ID NO: 692841 - DNA, 101 bp, Homo sapiens
ctgagccggccgcgggcgcgaccggaggcaggcacaagaccagttgcacaatgccctgaatcttaataggcacgatctgacttatataatgctggggaaga

SEQ ID NO: 692842 - DNA, 75 bp, Homo sapiens
ggtagtgagaacccttccggtgggctaggtactgagcgcgcgagccaaagtcatacactggctatcagaaaatta

SEQ ID NO: 692843 - DNA, 98 bp, Homo sapiens
gtgaggcccaacagcggaatcatcgatgcaggggcctcaattaatgtatctggagcttactccacgggaacagcctctagataatctgagttgttgaa

SEQ ID NO: 692844 - DNA, 100 bp, Homo sapiens
ctggaacgtgcagaggagcgggctgagctctcagaaggcaaatcacgggtggagaggtcggctgaaggacctggcttgcccaccggtgtggaacgggaga

SEQ ID NO: 692845 - DNA, 90 bp, Homo sapiens
ttgactatatggaatgtaaggtcccctgctaaaccagtacagacaatcactccacatgtatattcatcagttacactttcactgttcccg

SEQ ID NO: 692846 - DNA, 82 bp, Homo sapiens
gtcatcatgggccggcctggaacaggagctgagagaagataatatcattttaattgaaaccaaggccatgctggaggaacag

SEQ ID NO: 692847 - DNA, 80 bp, Homo sapiens
actacataataaggatgatgaattgtactctacagatgtgattgatctcactggagatgataaagatgatcttcagagag

SEQ ID NO: 692848 - DNA, 75 bp, Homo sapiens
caacatcatagaagtgatgagtgcctccaagttcaccttcaagggcaacgggcatgaggaggtagttgcatgcgc

SEQ ID NO: 692849 - DNA, 82 bp, Homo sapiens
gaacaaaggccgcgacttggaggtgtgaatgacagaggtggtgccatccagcgcgctcagcgaggtcagcctgcgcctcctc

SEQ ID NO: 692850 - DNA, 90 bp, Homo sapiens
caaggcccgcccgggagggccggggccgcgctcagagctgtaggtaaaacttgcctactgatcagttacacaaccaatgcatttcctgga

SEQ ID NO: 692851 - DNA, 91 bp, Homo sapiens
ccccaccatgtcagacgcagccgtagacaccagctccgaaatcaccaccaagcttcctgggtctgcaggtccagccggctggcaccctcca

SEQ ID NO: 692852 - DNA, 100 bp, Homo sapiens
tgatcatcgcctaccacacacgtgaagtccagctgcggcggagccccatcaagaaagtccggaagtctctggctcttgacattgtggatgaggatgtgaa

SEQ ID NO: 692853 - DNA, 83 bp, Homo sapiens
tgaaggctagtttggatgtggaggggaatagactccatctatccatatgaggtggacccccaaaagtacaagggcatatttaa

SEQ ID NO: 692854 - DNA, 74 bp, Homo sapiens
gacccttctagaagacttggagcttgatttatcaggacaacaggtgaatcagttcagacagctgtattccaaag

SEQ ID NO: 692855 - DNA, 97 bp, Homo sapiens
ggacaacaacaccaggaaactgacctcggggttgcggcgaccttttggagtggctgcctcaaggaataggttctcctagtgtctatcatgcagttat

SEQ ID NO: 692856 - DNA, 73 bp, Homo sapiens
cttcagcttgggcaagtgtgtgcctgtgtgccgaggcgatgctctacgagaagttcagcccggccgggcccat

SEQ ID NO: 692857 - DNA, 100 bp, Homo sapiens
tctgcctcagcctctttgtcactgcctggaccattgtccctgctgtttctcaggtgaccagtatgcactgaagatgaggtttgtggaccatgtgtttgat

SEQ ID NO: 692858 - DNA, 90 bp, Homo sapiens
atacataagctggccttagaaaataaattgcctctaacttcttcacactgaccaagataaaggagatggaaatttaaaatacatactaac

SEQ ID NO: 692859 - DNA, 87 bp, Homo sapiens
gcgctctcctggctcccttctgccccagctccgtctcggcggcggcgggttgaggaacaggttagcaccactgagagagtgtttcag

SEQ ID NO: 692860 - DNA, 75 bp, Homo sapiens
aatcagcctttggacaactattttcgtcatctttggaacaaaggccctcgggaccaaggatcacgtcatgactcc

SEQ ID NO: 692861 - DNA, 100 bp, Homo sapiens
tgtggttcaagaagtgaaaatgaaagtgaagccgcacgtagaattaagacggagttcctagtgcaaatgcaaggttacaggaggttccagtggcatcggg

SEQ ID NO: 692862 - DNA, 90 bp, Homo sapiens
tcagcctcccgaatagctgggactacagattgactatccaccatttgaaaaaaacttttacaatgagcatgaagagataaccaacctcac

SEQ ID NO: 692863 - DNA, 82 bp, Homo sapiens
ataaaatcaagttgctgaaagctgcctttctgcaatactgcaggttatcttctgaagatggtgaagaagcttctgcttatct

SEQ ID NO: 692864 - DNA, 100 bp, Homo sapiens
agaagcaccagaatacgtttagcttcaaaaatgacaagttcgataaaagtgtgcagaccaaggttgcccccaagtttcctggcagtgtgtgatactgagg

SEQ ID NO: 692865 - DNA, 98 bp, Homo sapiens
caacacgcagcagccgctgccgccgccgcgggagccgctgcccgaactcccggcccgaactccaggacgtggcccagtggaacatcgggagcctccgg

SEQ ID NO: 692866 - DNA, 75 bp, Homo sapiens
gattgtgggagtctccgcgtcccgctcgctgggagagaggaacaagatcactcaaggtgaaggataatctactaa

SEQ ID NO: 692867 - DNA, 90 bp, Homo sapiens
cccaaaacagtgcacagacggctgacggctcacactgtgacttcatggtcatgacgattttcttcaatgtgagcaggcggtttggctatg

SEQ ID NO: 692868 - DNA, 74 bp, Homo sapiens
tcctaccagctgcaggcgcagatgaaccgtgccgtctatgaggacagattttgggaaccagtaggacattgaca

SEQ ID NO: 692869 - DNA, 97 bp, Homo sapiens
aggaggcggtggagcgcagagcgggcgagcgcggttaaagctgaagctcaacaaagatatagtgatctctgtgggcatttataatctggtccagaag

SEQ ID NO: 692870 - DNA, 82 bp, Homo sapiens
cctcacttccccggggtgtaataatgttaactgagccatggacctggctcaggcaggcagcacagtggaatctaagatctac

SEQ ID NO: 692871 - DNA, 75 bp, Homo sapiens
gtcccgaggaagtgcaagacccggttgtggcagcactgcctgaaggtatgagaccagattctaatctttatggtt

SEQ ID NO: 692872 - DNA, 82 bp, Homo sapiens
cgttgagctcagagaagagcaactcggagttttgggggtgtgctttgagcccctcaatagtgaagatgatgtgagtgatgag

SEQ ID NO: 692873 - DNA, 108 bp, Homo sapiens
gtggcggcggcggcggagcgggagcgggtaccgggcgcgggcagagcgcggcggcgcgggagtctccccaggacagtgctatcacccgggatattaaccgaacattcc

SEQ ID NO: 692874 - DNA, 100 bp, Homo sapiens
agtgtgctgaccattcaaagttcagcaacacctgttaaagtccttgctcctggtgaattcggtaaccatagaccaaaagttttgattacgaagatgcagg

SEQ ID NO: 692875 - DNA, 112 bp, Homo sapiens
cttgtggagccggagctgggcgcggattcgccgaggcaccgaggcactcagaggagggagtgcatccgccccaacccttttccccctcgtctcctgtgagaattccccgtcg

SEQ ID NO: 692876 - DNA, 50 bp, Homo sapiens
acagaccatttactgcgacattttagacgagtttggcgcacagacttgtg

SEQ ID NO: 692877 - DNA, 75 bp, Homo sapiens
ttctcagccattttccacagatcagatcagtcgcatcgaatacattcattcaaagaacttcatccaccgggatgt

SEQ ID NO: 692878 - DNA, 99 bp, Homo sapiens
tttcccgctggcgcgcagcctcagctaggcacacaagccatgccccctcttttctctttgggataccaccagtgccgctggaactatgaagatgagcag

SEQ ID NO: 692879 - DNA, 83 bp, Homo sapiens
ccgctccgcgccgagggctggaggatgcgttccctggggtccggccacttctgccccaccaacgttgggccaaccaaaaggag

SEQ ID NO: 692880 - DNA, 98 bp, Homo sapiens
agggaccaggaaggtcaggtgctcgccccgcgtcggtgcttcaggagggaatgtggccagaacgagaaagctaaacaaccctgagatggtggagggcc

SEQ ID NO: 692881 - DNA, 100 bp, Homo sapiens
tttacagcttcttttaataggccaaatctatattatgaggtcgttccaggggtagaggaggcatgaaggatgaccgtcgggacagatactctgcgggcaa

SEQ ID NO: 692882 - DNA, 97 bp, Homo sapiens
cacttggtggcgtctgatgctgaactggatgctaaacttgagatcaaacagatgatggaggcagcaacacgacaaatcgaggagaggaaaaaacagc

SEQ ID NO: 692883 - DNA, 100 bp, Homo sapiens
tacacttttcggattgattcagcattaccagtacataccgagcatcaaatattaaggcacccggagaacagacagtaccagccttgaaccttcagaatgc

SEQ ID NO: 692884 - DNA, 100 bp, Homo sapiens
gaggatgcaccttcccctgccttggaaagaggaggaacccgttttcactagacaagacagcaatcgcagtgaaaaggaagccacaccagtggtgcatgaa

SEQ ID NO: 692885 - DNA, 100 bp, Homo sapiens
gccactggccagaggtacttcctcaactgagatctgtatctgtggacctgaatgttgatccctcgcttcagattgacatacctgatgcgctcagtgagag

SEQ ID NO: 692886 - DNA, 75 bp, Homo sapiens
cgcctgcttcccgtctgcgcgagtccacgcagctccccaggtgatgaagtacattacatctttgaatgaagactc

SEQ ID NO: 692887 - DNA, 100 bp, Homo sapiens
aacccaaaaacgatacgccatctgttctgccctggctgcctcagccctaccagcactggtcatgtctaaagcattgggaatggtaccacctcccgaaaat

SEQ ID NO: 692888 - DNA, 75 bp, Homo sapiens
gaacctgagagaatcgggggacctgaggtcacaaggagcctcctcaacaagcccaagagtgagatgaccccagag

SEQ ID NO: 692889 - DNA, 100 bp, Homo sapiens
cggcagcgggtcctacgaggagggctgtcagagcctcatggagtacgtctgcctaccctcctaggctgagctggggtttacccaaataccatcacattgt

SEQ ID NO: 692890 - DNA, 95 bp, Homo sapiens
caaaagtgaggtcttctacccagcctatggaccagctctcattgaacactgtcttttagaaaatggattctcgggtaatgtcaaagtggatgaaa

SEQ ID NO: 692891 - DNA, 100 bp, Homo sapiens
ttattgcgcaggccttgtgcctccaaggaaaatccacctcgcagcttgtaaatctacaggcttacgtgtatgaaatgggctcaagcacgttttctcaccg

SEQ ID NO: 692892 - DNA, 82 bp, Homo sapiens
ctcagtagacttaaaaacaggggcttgaagtagaaaatgccatgatgagaaaaactattaaaaaacaggatgaccaaattga

SEQ ID NO: 692893 - DNA, 100 bp, Homo sapiens
ctggaatgttcaactctatacagaacacagagctccagcaacctggcagaattacgacagcttcttgattgtggtagctcagtggcatttctgagcaggg

SEQ ID NO: 692894 - DNA, 100 bp, Homo sapiens
ttgactgcagctcactgtaacttgtgtaattgaaaagtgatcctctcttcagagatgtcaaaaacaaacaaatccaagtctggatctcgctcttctcgct

SEQ ID NO: 692895 - DNA, 50 bp, Homo sapiens
tgctgcctgcctttgatgccctggaagatgcctctaatggaggagtttct

SEQ ID NO: 692896 - DNA, 75 bp, Homo sapiens
tacactgctgcataatggagaacctctctacattccagtaacccaggtgacaaccaaagccaagcaactgaagga

SEQ ID NO: 692897 - DNA, 82 bp, Homo sapiens
gaggacacacccaggaaaagactcaggacggacaagcacagtcttcggaaggactccatgttttcgttggccctgaaatgcc

SEQ ID NO: 692898 - DNA, 100 bp, Homo sapiens
cacagcagctgagtgcgcatcaaatctgaagaaaatctacacagtacagacagtacaggaaccaacgtccaagaggcccagaagatactcaacaacagcg

SEQ ID NO: 692899 - DNA, 126 bp, Homo sapiens
cgtgccccaccatgtcagacgcagccgtagacaccagctccgaaatcaccaccaagggccaattcctgtccccccagcagcatggcatcgtgtgctgaaccctctgagccctctgccccactgccc

SEQ ID NO: 692900 - DNA, 127 bp, Homo sapiens
aagatggagttcctcctggggaacccgttcagcacaccagtggggcagtgcctcgatctttaatctcatgaagtacgacagctacagccgcttcttaaagtctgacttgtttttaaaacacaagcga

SEQ ID NO: 692901 - DNA, 100 bp, Homo sapiens
cacggacaacatcaccgtgaggcagggggacacagccatcctcaggaatactcccccagttgcaagaggcgcaggaccgtggaagacttcaacaaattct

SEQ ID NO: 692902 - DNA, 82 bp, Homo sapiens
atttagagagtatggacaaagaggtactccaaagattcaggtttactcacgtcatccagcagagaatggaaagtcaaatttc

SEQ ID NO: 692903 - DNA, 82 bp, Homo sapiens
ccagtggcaaacctcagcccaccacttccagaacactgatcatgacaaccaacaatcaggagggagccatggatttgctgcg

SEQ ID NO: 692904 - DNA, 82 bp, Homo sapiens
agcaaggccacgccggccgcgcgcgccagcaagaagatcctgctgcccgagcccaggtgagaagccctaccactgcaactgg

SEQ ID NO: 692905 - DNA, 74 bp, Homo sapiens
taatgactgtgcaaagaagattgttaaagtggacattcttacgtatgttacctggaaactaagtggattaccca

SEQ ID NO: 692906 - DNA, 100 bp, Homo sapiens
gacttctcgatctctggaggcacctgttgcaagtgacaggtgatctgcaactctttcaccatctgtaatgcggagatgcaggaagttggtgttggcctat

SEQ ID NO: 692907 - DNA, 82 bp, Homo sapiens
cgccgaacccgcctggctagccggcgagttgagtggcgactcaccatggatgatgatatcgccgcgctcgtcgtcgacaacg

SEQ ID NO: 692908 - DNA, 100 bp, Homo sapiens
tgagggacccccattcaagttcaagttcacaattggcctgcatcttcctcccgtgaggctggccgagctccacgctgatctgaagatacaggagagggac

SEQ ID NO: 692909 - DNA, 90 bp, Homo sapiens
cgcgtctgagcggttctcgaggcgttctcgcctcggtctctggcgagtgcacggcccctctgaaatcaaagagatcttgcatctggctgg

SEQ ID NO: 692910 - DNA, 104 bp, Homo sapiens
agaagatggtgcagaagaaaccagccgaacttcagggtttccaccgttcgttcaaggtccgcgggagagctgtggggcttggtgagtgtttcgtggcctctcgg

SEQ ID NO: 692911 - DNA, 82 bp, Homo sapiens
ctcactgctgcgcctggacctcgaccgtgaacccaagaaagaggcgattcccactggaaattcgttgtatgaatcttattac

SEQ ID NO: 692912 - DNA, 100 bp, Homo sapiens
aagcattgggggaaccagtgggccccacgtgggtaaaaaggttgatgacaacaagaaactaggagaatgggtaggcctttgtaaaattgacagagagggg

SEQ ID NO: 692913 - DNA, 100 bp, Homo sapiens
cggaatgttttccgggagctgcagatcatgcaagggctggagcaccccttcctggtcaatctgtgcaaagtgcctgcattcgtgaggatgattgctcccg

SEQ ID NO: 692914 - DNA, 100 bp, Homo sapiens
gttatctgtacaaatgggagaagtgagctttctcttaagtgtgccaagctgccatccaactttcttgagcattttttctcatgggaaatgatcaagtttt

SEQ ID NO: 692915 - DNA, 100 bp, Homo sapiens
ccattcaagctgaacgcacccgctggttgtggaccgtctgccaggcaccacagtgcacattcaggttcccgagcacaaacatcaagataacgttcactgc

SEQ ID NO: 692916 - DNA, 50 bp, Homo sapiens
aaaggaaatccggaattatcacagagaagatgatccctatgatcttgaag

SEQ ID NO: 692917 - DNA, 75 bp, Homo sapiens
gtcgatcaggactggaggaagccacgtttcaacagcaatatcaagatgctattcgagcacaccgagcaggacgga

SEQ ID NO: 692918 - DNA, 103 bp, Homo sapiens
ccggcgagcccggtccccgccggcaccatgacgcaaacatgcagatctttgtgaagaccctcactggcaaaaccatcacccttgaggtcgagcccagtgacac

SEQ ID NO: 692919 - DNA, 75 bp, Homo sapiens
gtgaaagagttcagatcactgcaattgactgaatgtggatgtcagttcacgtcaaaactggaaggaatgtttagg

SEQ ID NO: 692920 - DNA, 75 bp, Homo sapiens
tgctgcaacccgcgcccgcttcggagagagaaatgctgggtgtgaagcctcagtttaggtcatctggtggttcag

SEQ ID NO: 692921 - DNA, 83 bp, Homo sapiens
cagaaatacacctgctttaagtgtgtactgctgagcagagaatattccctctgtatacttgcatttttttctatcaattgacg

SEQ ID NO: 692922 - DNA, 100 bp, Homo sapiens
aagatgccaaatggagggtccgcctggccatcattgagtatatgccgctgctggcaggccagctgggccatgtgaaactttctgactttggtctttgcac

SEQ ID NO: 692923 - DNA, 97 bp, Homo sapiens
cctgagtcactgcctgcgcagctccggccgcctggctccccatactagtcgccggtgtccgcaaatatggtaaagattttcaagctattgcagatgt

SEQ ID NO: 692924 - DNA, 75 bp, Homo sapiens
gacgcgacgcgccccgcctcccccgtccggtccctctctccacggtaagggtcccagcagaagtgcatcgtgatc

SEQ ID NO: 692925 - DNA, 101 bp, Homo sapiens
cctggaccccaaaattaccgaattggagaaatgaaggcagaggtcaccaaactacataaaaaattgtttgaacaagaaaagaagttgcaaaacaccatgaa

SEQ ID NO: 692926 - DNA, 83 bp, Homo sapiens
cgcgcgcctgggagacgctgcctcggcccggacgcgcccgcgcccccgcggctggagggtggacggcggctccctggaccagg

SEQ ID NO: 692927 - DNA, 76 bp, Homo sapiens
cagacacttggggcacctaccttttaaccacagagacgggactccagaaagaaggcagagccaggtgtacaggatg

SEQ ID NO: 692928 - DNA, 75 bp, Homo sapiens
caacttttgtaattcggtcagagtcatgatgacagcacagctagaggagaattctgcctaagccaactcgaaaaa

SEQ ID NO: 692929 - DNA, 82 bp, Homo sapiens
cggcgagcagaactacggcgagcgggttgttgatcattatgaaaatcctagaaacgtggggtcccttgacaagacatctaaa

SEQ ID NO: 692930 - DNA, 80 bp, Homo sapiens
tagcaccccgagaaccgtcagtttgagccagatgattagtgatgatgaaccaggttatgaccttgatttattttgcatac

SEQ ID NO: 692931 - DNA, 75 bp, Homo sapiens
gaaaaagcaagagtttgttatatagcagagaatgtactactcatcacctcccacctgtgaaagcccctcttcaga

SEQ ID NO: 692932 - DNA, 100 bp, Homo sapiens
cggggaagtgtccttcatcaacatcaagacactcaatgagtgggattccaggaaaatataacctgttgggaaactgtttctgccttgatgatgttgtaca

SEQ ID NO: 692933 - DNA, 90 bp, Homo sapiens
gttgactgcgtcgcgatgtgtggcgactgtgtggagaaggaatatcccaaccggttgaagactgggatagtttccaagctattttggatc

SEQ ID NO: 692934 - DNA, 100 bp, Homo sapiens
tgcagacatctacaaccttcgatctcctgacgaaagacttgcactatctgccagatgctgcttcctaaccagtgcagttatgcatcacaccagagaatcc

SEQ ID NO: 692935 - DNA, 75 bp, Homo sapiens
cggtcctccacctgtccgctacgctcgccggggctgcggccgcccgagattttgcaagaacgaggctcaaggatg

SEQ ID NO: 692936 - DNA, 90 bp, Homo sapiens
ctaccacttccaaccgccaccggcgacagattgaccggggtgtcacccacctcaacagggcttccctggaggccgccattgcagatgccg

SEQ ID NO: 692937 - DNA, 82 bp, Homo sapiens
taaagcattaaaggatagttcttcaggaacagaacgaacagctgatttagaagaaagttttaatgaacatgaactggagccc

SEQ ID NO: 692938 - DNA, 76 bp, Homo sapiens
gtttgagaaaaggcctaagaattttggcattggttatcaatactctggctgaccatcatcatcgtgggactgactt

SEQ ID NO: 692939 - DNA, 100 bp, Homo sapiens
tgaaattgtcagatgcctagcatttgctccatgataatctgagatcggcttcagctccccaggaatatgattgaaaacagcatgtttgaggaagaaccag

SEQ ID NO: 692940 - DNA, 100 bp, Homo sapiens
ttggcatcctcagccgcttttctgccttcaggatcctccgctcccgaggtgctggagaatctggtaaaagcaccattgtgaagcagatgaggatcctgca

SEQ ID NO: 692941 - DNA, 82 bp, Homo sapiens
ccccccgggtgtcagtggaactaactgtgaggatgaagcagctgcctgtaccctgttgaaacttcatggccacagccccagg

SEQ ID NO: 692942 - DNA, 82 bp, Homo sapiens
gtggaaaacagagcgaagggggagtgtccggttgatcccagtttgtcaggcaggccactcctggtccgacccccagtggcac

SEQ ID NO: 692943 - DNA, 99 bp, Homo sapiens
gtgccgctgcacctcctgggctgcctcctcagggccaagggcaccatggctgagacacaacatttgcctgcaacaaggacagcggccagtggcactact

SEQ ID NO: 692944 - DNA, 51 bp, Homo sapiens
cttccttccacggtagcagtaacctctgaacccagcaagcgtagtcgagga

SEQ ID NO: 692945 - DNA, 90 bp, Homo sapiens
caccccgagcgaggccaaccttcaggaggaggagaattaaacaaccaccatgtcgagcaaaaaggcaaagaccaagaccaccaagaagcg

SEQ ID NO: 692946 - DNA, 100 bp, Homo sapiens
aaaggaccccatcaaatactctcagtaccagcaggcctccccaccagatgccctgcgctggatacctaagccttgggagcggacagggccgccacctcga

SEQ ID NO: 692947 - DNA, 100 bp, Homo sapiens
tgggatgttatctggcgtattcaccacaggaatcatgactcctggagaacggatcaagtgcttattacagctcgccctcccctacctgcggaagagtcaa

SEQ ID NO: 692948 - DNA, 82 bp, Homo sapiens
gtcaagcttctgcgctcccttcctcagcgtttcaaggtcggattgtttgtgctgaacgaactgtcctcttgcttcagaagcc

SEQ ID NO: 692949 - DNA, 100 bp, Homo sapiens
tggttctgtatgagactagagctctggccagctcagcgtccctggaagggaagggacaactgaagttcacctcaggacggtggagcccacatcataactg

SEQ ID NO: 692950 - DNA, 75 bp, Homo sapiens
atggagcccatcgtgctgcagtacgtgcctcatgatcgcttcaacaaggaatgtatcctgtcaggtataatgtca

SEQ ID NO: 692951 - DNA, 99 bp, Homo sapiens
ctacctcctggctgccgtgaataggcagcctaaaggtgaccaagaatatggcccaggtgaccaaagccctggacaaggccctgagcaccatggacctgc

SEQ ID NO: 692952 - DNA, 90 bp, Homo sapiens
gccgggatcaaagtgtaccagtcggcagcatggtatctggagtccatctttcaccatcttctcctgagattgtactggaccgtgaccact

SEQ ID NO: 692953 - DNA, 98 bp, Homo sapiens
aaaaagaaactggagccaccatcaagctgtctaagtccaaagatttttacccagagagcacagtcagacgaactcgaaaaaatagaaaagcatggccg

SEQ ID NO: 692954 - DNA, 75 bp, Homo sapiens
ctggtgctgctgaagtccctagggaaccaccaattcttcccagggggaaatttgcagtggtgagaaaatgtataa

SEQ ID NO: 692955 - DNA, 75 bp, Homo sapiens
aagaggaggaagtgcctgaacaggaaggagagccaagaaaggatcttgttcgagtagaagccacagtcattgaaa

SEQ ID NO: 692956 - DNA, 88 bp, Homo sapiens
gttcagcagtcatgtaactataagcagcttcggaaaggagccaatgagggtgactacgaagtctcagtcaagttcaacgaggaacaca

SEQ ID NO: 692957 - DNA, 100 bp, Homo sapiens
ctcggcccgcacgccaagcacgtggtgggctatggccaccttggtgtgacgtatgcagccaaaggctactttgacgccctggtgaagatgggggagctgg

SEQ ID NO: 692958 - DNA, 74 bp, Homo sapiens
taaattattccatttgcaacttatccccaacaggaatggcagtggaagacacagttgcagccaaactcatctat

SEQ ID NO: 692959 - DNA, 73 bp, Homo sapiens
cccagaaccccaagaaacagggaatcttccacattcatgaaggattaatacccctcgaagacaaggaggactt

SEQ ID NO: 692960 - DNA, 100 bp, Homo sapiens
cccagagaaagtcctcgctcgtcaccagcaagcttgcgggacaaagaaacagccttggtataatagcacgttagcatcaagacgaaaacgacttactgct

SEQ ID NO: 692961 - DNA, 100 bp, Homo sapiens
acctggagaagctggcagaacgcttcctggccaagacatgcagcaccaaggaccagcaattcaaacacgttggtcgtcattgcctccgagcccactttag

SEQ ID NO: 692962 - DNA, 85 bp, Homo sapiens
aaatcgcctgctacaaaaacaaggtcgtcggctggcggagcggcgtgtggagctgatcagaataatgttcagcatcaaccccctg

SEQ ID NO: 692963 - DNA, 75 bp, Homo sapiens
gtttttagtccattgactatgcagcctaatgggtaaaccagacttgaatacaacattgccaattagacaaacagc

SEQ ID NO: 692964 - DNA, 90 bp, Homo sapiens
agctggaaccatgacaggcatgttgtataaatgtacagagaaggagccctcagttctgagaaaagtactattggaggatgaggtgttggc

SEQ ID NO: 692965 - DNA, 87 bp, Homo sapiens
gattttttttgaggatgaactggtgtgtatcctaaatatggaaggaagttcctggcagacatggaaaataatgtactttttcgggat

SEQ ID NO: 692966 - DNA, 100 bp, Homo sapiens
tccaagctctagaaatctctgacacatcttgaccatgagaccacggctggtttttggcagatggcccactgcgtgaccttggttcagctgtccatttcct

SEQ ID NO: 692967 - DNA, 83 bp, Homo sapiens
gacggattcatttagagctgcggaacaggacgccctctgatgttcagcagctggacatggagaaccaacgctcatcacctctg

SEQ ID NO: 692968 - DNA, 104 bp, Homo sapiens
ttaaccaaacaaccagaagaagtatttgatgtcttagagaaacttggagaagggtctccgtgaggccgggtgacgctccagaatgggagacaagccaatttggg

SEQ ID NO: 692969 - DNA, 75 bp, Homo sapiens
tttttgggctgtgttgacatcaaggatctaccagggaaggaagccatgctgaagcaccgggactacgagacggcc

SEQ ID NO: 692970 - DNA, 100 bp, Homo sapiens
cgaacgggagggcgctacggaagaggcggtccgggagaggggactcgggcaagggtgccgaagatagacaagaggcacacagagacagaccaactggcag

SEQ ID NO: 692971 - DNA, 82 bp, Homo sapiens
aacgaatggacagaatcatggaatctcatttaagttctaggcctgattcttcactacctgagacgtctaaaaaggagcacat

SEQ ID NO: 692972 - DNA, 75 bp, Homo sapiens
agaactcaaggtcttcatagaccagaaccttagtcccgggaaagtgctacagctagaatgaagcacatcaaccta

SEQ ID NO: 692973 - DNA, 83 bp, Homo sapiens
cagcaacacagaaattcaggaagctgctttcaaaaggaaaaccaattctgtgtcctcggaggaccacagcccagttgggcccc

SEQ ID NO: 692974 - DNA, 83 bp, Homo sapiens
cgggcccaggaaaaagaggaaagtggactgtccggggccgggctcaggagcagaggacttgatcatcttccctgacgactgtg

SEQ ID NO: 692975 - DNA, 82 bp, Homo sapiens
cacattgagagcaaaatctacaagatgatgcagggaggaggtttggtgcacctcgatttggaggaagtagggcagggccctt

SEQ ID NO: 692976 - DNA, 100 bp, Homo sapiens
ggccaggttatgctgactcctcagaagaacaccagaggacttctgaatgatgctttccagaaagggggaccagagggtgccactacccggcttatgaaag

SEQ ID NO: 692977 - DNA, 74 bp, Homo sapiens
ggatgacatatttttggacctgaaacagaaattctggaacacctatatgcccagcggtctgctcaagaacttcc

SEQ ID NO: 692978 - DNA, 75 bp, Homo sapiens
cgcttatggactgaaagtttattgcattccaacagctcattttatgttggtgaggtttatacatggggcgacaat

SEQ ID NO: 692979 - DNA, 100 bp, Homo sapiens
gggacaggaggctgcggggcctcagcctgaacccccgccaacaaacaaatggcaacttgataattggctgaataaagtgaacccacataaagtgtcaccc

SEQ ID NO: 692980 - DNA, 75 bp, Homo sapiens
catgagcgagcgcctccgtcccagggcggcgactggcggcgcgatggacctgaccgggctcctgctggacgaaga

SEQ ID NO: 692981 - DNA, 89 bp, Homo sapiens
cttcctgcgcatcgtctgcaagaccgcgaggcgagacctcttatgaggtttatataactttccaagacaaggaagttgtgcaaagcctc

SEQ ID NO: 692982 - DNA, 82 bp, Homo sapiens
gccaacctcaacctcgtccaggccctcaggtatctcttaaatattccaggaccaattgacattccatctcgtttatgtaaag

SEQ ID NO: 692983 - DNA, 100 bp, Homo sapiens
ttctccagacagtgaacaaaggcagtctgttgaggcatctggacaccacacacatcatcagtctggaagatgttaccgagtacttcagtgaattccttag

SEQ ID NO: 692984 - DNA, 82 bp, Homo sapiens
actagttgagaggcttcatatggtaaaggatcagatttgtgatgtgagaatatctgacataatggatgtatatgaaatgaaa

SEQ ID NO: 692985 - DNA, 101 bp, Homo sapiens
ggccctccagtgggggccatgcttcccagagcggagacaacagcagtgagcaagatggactctgtgactacatgactaataaaatatggcagaaatgacac

SEQ ID NO: 692986 - DNA, 98 bp, Homo sapiens
gcaacgctgtgggccaggacacgcaggaggtcatcgtggtgccacactgtcttttatcagaaatcaccgatccagagagcttcctgaaggacctgttg

SEQ ID NO: 692987 - DNA, 82 bp, Homo sapiens
gagactgaagagagctggcaaggcctggctagaaaaactccaggcaaggcctgtgttttaaaatcaaagatgggaaaatcgg

SEQ ID NO: 692988 - DNA, 75 bp, Homo sapiens
gctgtacaccctcaacaaacaccagcgctttggaggctgacccgcggctgattgagtccctctcccagatgctgt

SEQ ID NO: 692989 - DNA, 100 bp, Homo sapiens
gatttatagctaagactccaggacacccctgaagccgagaaatgacctctgtgagtgaaagccttcagagggaagctgctaagaagcaggccatgaaaca

SEQ ID NO: 692990 - DNA, 104 bp, Homo sapiens
ctatggtgctgagtttcctggtagagccggccgagctgaggcggtcgcggccatgaaggccatcgaagacggcaatttggaggaaatggaagaggaagtacggc

SEQ ID NO: 692991 - DNA, 75 bp, Homo sapiens
ggcagtaccttcttcaagagaaatggagcccttctccaaggcctttgcccagtttgatgctgagggtgatgggac

SEQ ID NO: 692992 - DNA, 114 bp, Homo sapiens
tgatcacatggagagaactgcaagtgtccttcgacgggaggctccaccaaggacctgatcgagacttgctgcgcagccggacagcagtgggccattgacaatgacgagtgcctg

SEQ ID NO: 692993 - DNA, 100 bp, Homo sapiens
gcagaggagcgagctgagcgcctccagcgagaagttgagggagaaaggcgggcccgggaacagggtgacgagaacaagtcagtgcgcgaccgtttcaacg

SEQ ID NO: 692994 - DNA, 83 bp, Homo sapiens
ctccttttccctctccctttccctaagggctttgttcgcgggggtcacagctctcatggctgcagctagcgtgaccccccctg

SEQ ID NO: 692995 - DNA, 96 bp, Homo sapiens
catgagatgggaaattacaccagcagtcaaggtagcaaggtgatgatgaacagtctacacagatggctgcaagttgggaagatgataaagttacag

SEQ ID NO: 692996 - DNA, 75 bp, Homo sapiens
catcttcaaagaatgatatttccaaagtttgcagaaaagaatatgagattgagatggccatcctgcggttccctt

SEQ ID NO: 692997 - DNA, 76 bp, Homo sapiens
ctcgcgccggctatggccgtgccctggggctgagccctcagcagtcctgcgttaactgcggccgggaggctatgag

SEQ ID NO: 692998 - DNA, 90 bp, Homo sapiens
cgcagccggagtggggccgtgagtttaaaaagcagaaactcctcctagaactggaccagtatgccccagatgtggccgaactcatccgga

SEQ ID NO: 692999 - DNA, 82 bp, Homo sapiens
agaagtctgtcctgaaggaagtcagccacccgttcctcatcaggctgccagaagcggactcctagaagaggggagcagcaag

SEQ ID NO: 693000 - DNA, 76 bp, Homo sapiens
cgacgctgcactgtagcataccttcagcaaatcacatgaacagttccctgctgtctttatatcggaaaggaaatcc

SEQ ID NO: 693001 - DNA, 75 bp, Homo sapiens
gccggaggaggaggggagaggcctggaggacaccaacatggatccagccgcagaagccaggatgaaggtagcctg

SEQ ID NO: 693002 - DNA, 100 bp, Homo sapiens
aaaaaatacatatctggttttggtggagccccctgagctgcccgctgatctgcagcactggatctcctacaacgaggccagcagccagctgctccgcatg

SEQ ID NO: 693003 - DNA, 100 bp, Homo sapiens
cagccaccccgcgggatacgcctcagcgcgcaattctgtggtgttcttggtcacacatttatggagtttctgaagggcagtggagattactgccaggcac

SEQ ID NO: 693004 - DNA, 101 bp, Homo sapiens
ctctgcggctggtccaggccttccagtacacagacgagcatggggaagaccccaccaacaactgaacgctttggtcaggctgctacaatggaaggaattgg

SEQ ID NO: 693005 - DNA, 75 bp, Homo sapiens
ggcgttgccgggagccgggcgcggctctgtgtggactcggagaaacgcggagaccctgagggcgcggtggctcac

SEQ ID NO: 693006 - DNA, 100 bp, Homo sapiens
atgtggatgatgccaaagttttattagaaatctcctgcaaagaagctgagccatgcaattagtaaatctttggggtgtgtacccacgagagaacccccgc

SEQ ID NO: 693007 - DNA, 96 bp, Homo sapiens
caggctgcggcagacggcgacagtggcggcggcgccatggcagggcttgcagcaaattgtggctactaatttgccccctgaagatcaagatggctc

SEQ ID NO: 693008 - DNA, 98 bp, Homo sapiens
tcggaatgcactacaacaggaaaatcatattatagatggagtaaaggagagcacagaatggggattcaacacctcggcaatgcccttttagtgtgcga

SEQ ID NO: 693009 - DNA, 75 bp, Homo sapiens
taatggtgttcgaatatctggaagagagcaattgtatgatggctatgatgaagagtatgactgtcccattttaga

SEQ ID NO: 693010 - DNA, 83 bp, Homo sapiens
cctggagcctcagttggaagcagccgatccagcctgcggagcctgtggggcagggacgcatggaatacctcgtgaaatggaag

SEQ ID NO: 693011 - DNA, 80 bp, Homo sapiens
acctcagatgctcccttctgctcctgatggcagttgaattcctgcatgaactgaatgttccatttttcaaagttggatct

SEQ ID NO: 693012 - DNA, 76 bp, Homo sapiens
ccaaagcgctggaattatgggcgtgagccactgtgcccagtaacaaatgtggcaattattttggatctatcacctg

SEQ ID NO: 693013 - DNA, 82 bp, Homo sapiens
ctttacccgcccgcctgctcggcgaccaggtgagaagccctaccactgcaactgggacggctgcggctggaagtttgcgcgc

SEQ ID NO: 693014 - DNA, 100 bp, Homo sapiens
agaagcccagtcagcattagactctacatcttcatctatgcagcccaggaaaatggctttgtaaagaagtttgaacctaaatctggctggatgacttttc

SEQ ID NO: 693015 - DNA, 75 bp, Homo sapiens
gcctggaagacgattccagagacgggcagatcttagatatgtgtgcagcacctggctcaaagaccacacagttaa

SEQ ID NO: 693016 - DNA, 96 bp, Homo sapiens
cgaaccggcgctcctgcccccggggtgacgcgcagctcccagccggtggtggcggtggcggcccgcgatctgagccgtgcgaaggagtttgcacag

SEQ ID NO: 693017 - DNA, 101 bp, Homo sapiens
aaccggtgtaggagaagaaatccgcagaagcttattaaagttaaggatcacagaagaactgcagcttcctggggagcagtttcacctccacaggcatcgct

SEQ ID NO: 693018 - DNA, 87 bp, Homo sapiens
attatgcaggtggtctgtgaagccacacagtgtccagatacgagggtttctttttggagacaggcccttttggtgggtccatgagtc

SEQ ID NO: 693019 - DNA, 75 bp, Homo sapiens
cttttccttggagagtcataacatatcactgactgctggtgctcaagaccgaatcggctgggcttttggcctagg

SEQ ID NO: 693020 - DNA, 75 bp, Homo sapiens
agatgttgtcctgtgctggggctgacagggatacagcacagacccgcgccctgtttgagaaggtccaacccacac

SEQ ID NO: 693021 - DNA, 75 bp, Homo sapiens
gatgagaagttccatgggggctgggccctcattgactgtgaccctaggaggagatgttaaagtaacccatcttgc

SEQ ID NO: 693022 - DNA, 75 bp, Homo sapiens
tattgtctttatatcctgacactatgaatgctacttggatgcctcttaagaatatatacagccctgctctgggac

SEQ ID NO: 693023 - DNA, 82 bp, Homo sapiens
gcgggagctggacggcgagcgcgagcggcgcgagaaaggagtgaggattctttggacaccagcctgagagctcacggggtcc

SEQ ID NO: 693024 - DNA, 75 bp, Homo sapiens
cagaccctggtctatgagaactacaacaagttcatctcagccacagcttccacagcgcggcacctgtacctccgg

SEQ ID NO: 693025 - DNA, 90 bp, Homo sapiens
cggctggggacgtgcgcccgcgccaccatcttcggctgaagatgtccagctcgccgctgtccaagaaacgtcgcgtgtccgggcctgatc

SEQ ID NO: 693026 - DNA, 74 bp, Homo sapiens
tggagggacgagacctgaccttgcagtacaacatctacaatgttggctcaagcttttaacctggagacttgccg

SEQ ID NO: 693027 - DNA, 51 bp, Homo sapiens
aagctgtggatgaatttgcttttctggaagctgcagaaccttggcctgaaa

SEQ ID NO: 693028 - DNA, 100 bp, Homo sapiens
cccatcttcagcagactttccatctcagatgactaagccaggagcctttgcactggcgatgccatctgctgcctggatgtcttcctgctggctggtcccg

SEQ ID NO: 693029 - DNA, 90 bp, Homo sapiens
ccgcgcctgcgcagaaggccggggccggccagaagcgggcggcgcgggggagatggagtgtttctcaggagctatcagaaactatcctca

SEQ ID NO: 693030 - DNA, 74 bp, Homo sapiens
cgaagagaaggtggtgatcaaaggctctatgatggaccacggcagatgggacgctactgtggagtagacctgcc

SEQ ID NO: 693031 - DNA, 75 bp, Homo sapiens
caatacatcaagcaagagaagcttgtatgatttttgatgaaattgagtcatgaaactgtaaccattgaattgaag

SEQ ID NO: 693032 - DNA, 51 bp, Homo sapiens
ctcaagaccgccttccccagcgtccagggaggtggtacaagcaaactgtgt

SEQ ID NO: 693033 - DNA, 80 bp, Homo sapiens
ctccgggggacccgcggtccccaccgtgcagcggggcatcatcaagatgtccaatcagtgaaagtcgaagagtactacag

SEQ ID NO: 693034 - DNA, 100 bp, Homo sapiens
cgtcatctacctgctcaacccctgtcacctggtcaccatgatgcatataagctgtcattggaaggaatagtggtacaaagagctgaatgccgaccagctg

SEQ ID NO: 693035 - DNA, 80 bp, Homo sapiens
tcatcatctgcctggggggagacgggacgctgctgtacgcttcctcgcttttccagggggatatgagactttctactcgg

SEQ ID NO: 693036 - DNA, 75 bp, Homo sapiens
caggagcccggcaccccccgccgacaaggaggactgatgggaagaagagttactataagaaggtgtgcattgatg

SEQ ID NO: 693037 - DNA, 100 bp, Homo sapiens
tcaatccatccacttctagtcattttacccaaactgtcaactaagtgaagaagaccactggatttaccaggctattttggatcagtaccctggagatctc

SEQ ID NO: 693038 - DNA, 74 bp, Homo sapiens
ggccgctgggagccgttattggctgccgttaaggaccgttacgtttcccggaattctgcttggtcagaatcgtg

SEQ ID NO: 693039 - DNA, 82 bp, Homo sapiens
gcgtgagcgagcagaggcttaaggtcttcagcggggcgctccaggaggcactcacaggttgtgaccgagattcccgacgaga

SEQ ID NO: 693040 - DNA, 74 bp, Homo sapiens
ggggcctctccagggagtgctctgttcacggctccatcgctgttagtcaaactgccttaatatttggtgcaaga

SEQ ID NO: 693041 - DNA, 96 bp, Homo sapiens
agctgagaagtattatgatctggcagccaggctgaggcctaattgcttagatgagtacgaagatgatgaagcagggcagaaagagcggaaacgaga

SEQ ID NO: 693042 - DNA, 96 bp, Homo sapiens
cttgcctctgctgacagcgtggccaggcgactgcagtcacgtctccaacaaccaagcttaaagcttttcaagccaggccaagaagctgtgaagtac

SEQ ID NO: 693043 - DNA, 76 bp, Homo sapiens
tgtgttctgcaaaaaacaaaaaggatagcctccggcattccaggtccgagtggacagatgaattaaacacgtacag

SEQ ID NO: 693044 - DNA, 115 bp, Homo sapiens
tgagggctccgggtcgctggcggcgtggacacctgagtcccggggtaggggtctcccgcgagtaacggcacagccaacaagatgaacggagctttggatcactcagaccaaccag

SEQ ID NO: 693045 - DNA, 95 bp, Homo sapiens
tggcggacaacgagaaactggacaaccaacggctcaagaatttcaagaacaaaggccgcgacttggagggacaggccttcagtatttggcatcac

SEQ ID NO: 693046 - DNA, 99 bp, Homo sapiens
gctgaaataacccttgatcctcctcctaattgcagctattgacctgaaaagtggttctggaaaagtgtaccaaggccctgcaaaaggtgctgctgatac

SEQ ID NO: 693047 - DNA, 110 bp, Homo sapiens
gtcgcgtgtctaggtgagtcgcggtgggtcctcgcttgcagttcagcgaccacgagacaagaggagcagcagcggcaccgcccctcaccctggagggtcctgtacaatct

SEQ ID NO: 693048 - DNA, 100 bp, Homo sapiens
agcaaaggctgctctgaagcgcacgacctccgactactttctccttcaagaatgtgacagtgatgataacatgggtgccaaaaatacttcaataggagaa

SEQ ID NO: 693049 - DNA, 98 bp, Homo sapiens
aagccattgaaaaccatcagaacatgattaagcagtttaaaggtatttcagttactaactgatctgaaagagcagcgtaaagaaagtggaaagaataa

SEQ ID NO: 693050 - DNA, 75 bp, Homo sapiens
cagattcgcagtggtcgcttcttctccttgtttctccttggaccaagatgactgatggaaaactctccacctcta

SEQ ID NO: 693051 - DNA, 98 bp, Homo sapiens
aggacgagccttcaggagccaccacaagatccaccaccagatcagaggctcagagaaccatatttatttagagtcagaatggagcgatttgtagtaac

SEQ ID NO: 693052 - DNA, 100 bp, Homo sapiens
aacatggcggcgcccagtggcgtccacctgctcgtccgcagaggtaaagtaccttttattcatgtgggaaatcaagtagtatcagaacttggtccaatag

SEQ ID NO: 693053 - DNA, 75 bp, Homo sapiens
tctgacccctgacgagcgcagcaaagagggctctatctggaaccaccagagatggagtcttgctctgttgcccag

SEQ ID NO: 693054 - DNA, 100 bp, Homo sapiens
gtttccggctgcagggcggtaaggatttcaacatgcctctgacaatctctagtatccaagtattttagaacatgctcaagaggtgagcacttaacaatag

SEQ ID NO: 693055 - DNA, 100 bp, Homo sapiens
tgatgcaaagacaaaggcacagctggatgaatggaaagcaaagaagaaagcttctaatgggccaatggagatcttcgtggatgatgagacgaagttgacg

SEQ ID NO: 693056 - DNA, 100 bp, Homo sapiens
accagatcgggagtggcaccatggacctgcccttccagggtgccgacccccacatcctggcaaaagagcgagagagcgccctgtcgctggccagcacagg

SEQ ID NO: 693057 - DNA, 75 bp, Homo sapiens
gtagtagcagtgattgttgcttttacgggcgcctgcattactcaagctcgtggtcccaagaagcatctgaagcgg

SEQ ID NO: 693058 - DNA, 98 bp, Homo sapiens
tagtgaatctgcacagaaggcccttaagtatgtccgtggttcagaccctgtattaaagcttttggacgacaatgggaacattgctgaagaactgagca

SEQ ID NO: 693059 - DNA, 83 bp, Homo sapiens
cggaagcctgcgtaactttctcccttgatccgggagtctttccactgggaagtgggaaaactcttgcctttgccatcccaatg

SEQ ID NO: 693060 - DNA, 75 bp, Homo sapiens
gtcctacgcttcagggcaatgagcttcccctcagcctaaggccctctggtcctggaggcaggatcatgtggtgga

SEQ ID NO: 693061 - DNA, 83 bp, Homo sapiens
caacagttccttcacctcagcatttttcatggatttcaaataagtggccatttcataattctgaatcatgtctgataacggag

SEQ ID NO: 693062 - DNA, 82 bp, Homo sapiens
cacagccacggacgccgaggccagagaagctggagggtgtgaagacagagaatgaccacatcaacctgaaggtggccgggca

SEQ ID NO: 693063 - DNA, 82 bp, Homo sapiens
ctcatcatggggctcctgtacaaggaggcagtggagaaggtgacacagcacatccacggcctgtctgggaagaaggatgggc

SEQ ID NO: 693064 - DNA, 50 bp, Homo sapiens
gaagacaacaagcaattttttgcaaagccttctagacaagctcagtggaa

SEQ ID NO: 693065 - DNA, 74 bp, Homo sapiens
cttcagttcaaaacataatgtgattgatcaatgtccgagttaccaccatggatgcagagctggagtttgcaatc

SEQ ID NO: 693066 - DNA, 105 bp, Homo sapiens
agatacaaaagttttgcagtactatttcaatctaggattgcagaacatcatcaagaaggtgatcgggcagaagtttgtgtacaagtttgtctctttcccggagat

SEQ ID NO: 693067 - DNA, 97 bp, Homo sapiens
gaaaatgctgcacatcccttaatagtcatctacataggtcacaaggcacttaaagcattgttgaggtcattggtaggtcttcaggaagagttgcttt

SEQ ID NO: 693068 - DNA, 75 bp, Homo sapiens
gacttcaagactcggatatgcaaaaaagtctgtggccactacactcaggaccctgatgctcccataagacagaaa

SEQ ID NO: 693069 - DNA, 98 bp, Homo sapiens
cgagaaccgcagggactggccgaggtgaggccgcaggcggtgctctgggtccgggagcgctgtccccagcatgaacgcggccggcggcgggagtgaat

SEQ ID NO: 693070 - DNA, 82 bp, Homo sapiens
gaactggaaaaaggaatagctgttatagttacaggacaaggttattgaagaaattgaagaaatgatgcaggaatcaccggac

SEQ ID NO: 693071 - DNA, 97 bp, Homo sapiens
tgggttgtactcatagattgtgtaggcgttggtcttctgatagcaactttaatgtgattctgctcctaagtgtaggagagaacttggtgcctcttcc

SEQ ID NO: 693072 - DNA, 76 bp, Homo sapiens
accgcaacctggccatgggcgtgaacctcaccaggcaccccagctaccatgtcccagatagccaaggatgtgtgca

SEQ ID NO: 693073 - DNA, 75 bp, Homo sapiens
ggagcgggagtgttcgttgtgccagcgactaaaaagagatgagttttgatcatcctgagaaaaatgggccttggc

SEQ ID NO: 693074 - DNA, 101 bp, Homo sapiens
cgtcgtcgtctgccttcgcttcacggcgccgagccgcggtccgatttgggaatacctgctactgcaattcagttcttcaagcactttatttttgtcgtcca

SEQ ID NO: 693075 - DNA, 100 bp, Homo sapiens
aggacccgctgctctgcgatctgccgatccagctgatttgaataggatgcacagacaaaatatagatgcctaccataacccagatgcaagaacatatgaa

SEQ ID NO: 693076 - DNA, 50 bp, Homo sapiens
cgaggctgttgctgttgatctgtggctttctgtctctggtcgtgatgaga

SEQ ID NO: 693077 - DNA, 75 bp, Homo sapiens
tctggctgtgctgcgcgacccccgcgcatggtggaggcctgaattttgatctatgttctacctacatccagctgg

SEQ ID NO: 693078 - DNA, 100 bp, Homo sapiens
cgggatggggtgatcctggcatatctcatcgagattgttggccaaagaggtgctgaaaaaatatttggagtccaaggaggatgtggctgatgcacttcta

SEQ ID NO: 693079 - DNA, 75 bp, Homo sapiens
aaccgtttccgcctcctgctagagcggcgaaccgtgggcagtgaggaggtggagctgtataaaagcagccaccgg

SEQ ID NO: 693080 - DNA, 82 bp, Homo sapiens
ctcatttcgagtgaccattccaacagatttgattgcctccagtggagatatcatcaagggcatcaagttatcagcagatgtc

SEQ ID NO: 693081 - DNA, 50 bp, Homo sapiens
cagcggaggaggagctctcaaaaggatgagaaggcgcgcattgaagcatt

SEQ ID NO: 693082 - DNA, 100 bp, Homo sapiens
tcgtcagactccagcagccaagatggtgaagcagatcgagagcaagggactttgaacatgtcggggatcgccctcagcagactcgcccaggagaggaaag

SEQ ID NO: 693083 - DNA, 100 bp, Homo sapiens
agctcaaaaaggaaaatcctttcttgaggcaagagtgatgtcttggcattgcccattttcaagcaggaagattccagccttccattggatggtgaaacag

SEQ ID NO: 693084 - DNA, 90 bp, Homo sapiens
gcattaggggcttcctgaggaagcgcgggcggacgacagaggatgccgaaccactccaggctgatggagttatgagaacaatgaacacag

SEQ ID NO: 693085 - DNA, 90 bp, Homo sapiens
gttacagcttagcttccaggatgatgatttgcctatctggggcgcctggctcacgaggttggctggaagtaccaggcagtgacagccacc

SEQ ID NO: 693086 - DNA, 99 bp, Homo sapiens
ggggttcgagaagttggagcttttggaacacctgtgatcaacctgggaacacgtcagattggaagagaaacagttttagaaagagcgttttcgctacgt

SEQ ID NO: 693087 - DNA, 100 bp, Homo sapiens
tgctttcaggctgccgctgcattaggggcttcctgaggaagcgcgggcggacgacagaggatgccgaaccactccagtgtgtgatcctgtaaaattaaat

SEQ ID NO: 693088 - DNA, 100 bp, Homo sapiens
cagtcagagccaccagccaatgatcttttcaatgctgcgaaagctgccaaaagtgacatgcagcatggcggacaccgacctgttcatggaatgtgaggag

SEQ ID NO: 693089 - DNA, 90 bp, Homo sapiens
tgcccactcaagatgtcctttccatgctgggtgacatccgcaggagcctggaggaggagggcgctacgacccctcgctgactttctctga

SEQ ID NO: 693090 - DNA, 100 bp, Homo sapiens
tcagaagagtgagagagagctattagagattgtgaagaagaatttcgatctccgccctggggtcattgtcagacttgtgtatgcggatacctgcttcagt

SEQ ID NO: 693091 - DNA, 75 bp, Homo sapiens
atttcctgcgctgttccacctcattcaacttcagatctgttacctaaagcaataaaaaatggccagaggatcagt

SEQ ID NO: 693092 - DNA, 100 bp, Homo sapiens
gccctatcctgaccaccacctgcctgatggggagcgtggctgggttctgggacgggcccgcccaggagcagagaaaccccgttcaccaaggccatggaag

SEQ ID NO: 693093 - DNA, 106 bp, Homo sapiens
aagaaacgcagatacctaccctacaaccagcagcacctgtacttcttcctgactcgtgtgggcgctcgtccacaaacactccgtggctgagaggcagcggatccag

SEQ ID NO: 693094 - DNA, 75 bp, Homo sapiens
atcacatggacgtggcaaggacctggagcatgtggacgagtgctcactagcagaaaaaacctgtgtgaggaaaaa

SEQ ID NO: 693095 - DNA, 100 bp, Homo sapiens
acccgccggggacggtggacaagaagatggtggagaagtgctggaagctcatggacaagtagccatcctaatggatatgggttggttcctgttttctatt

SEQ ID NO: 693096 - DNA, 75 bp, Homo sapiens
ctggctgccttgagaggtcacttctgcctttccagtgacaaaatggtgtgttcactgagacttttttgacggaga

SEQ ID NO: 693097 - DNA, 98 bp, Homo sapiens
tgggatgtggtatgataccagcaactggtctattatatcatttaaaccacatggctatctaaagagctcctcagagaaattttgaaattgccttcaag

SEQ ID NO: 693098 - DNA, 84 bp, Homo sapiens
ccgggacgacgagtacgactacctattcaaagaaagaagcttccggttctgaggtcctggaggtgccatttccctctctgttga

SEQ ID NO: 693099 - DNA, 90 bp, Homo sapiens
caggagccaagagcagagcgccagcatgaacttgggggtcagcatgctgaggatcctcttcctcctggggaaatcctcattgacgattca

SEQ ID NO: 693100 - DNA, 88 bp, Homo sapiens
cagaagtcgcgtgtctaggtgagtcgcggtgggtcctcgcttgcagttcagcgaccacggagcaggccgggctctcgccatgggtcac

SEQ ID NO: 693101 - DNA, 100 bp, Homo sapiens
agtaatgccatctgttttcctaaaagactgaaatgggggcgaccattcttagacgtggacgaatgtcagctcttccgagaccaggtgtgcaagagtggcg

SEQ ID NO: 693102 - DNA, 75 bp, Homo sapiens
atttgactctgtaaagagaatatcaaatagtggaaaacctattttcagctgaactctcatctctcaacactggca

SEQ ID NO: 693103 - DNA, 75 bp, Homo sapiens
tctggaattattctccttttggagaatctggtcgagaagtgaactgaagctgagggtaaaaagctgggattggta

SEQ ID NO: 693104 - DNA, 83 bp, Homo sapiens
tgatgtgaaaaataccacgacaaaaccaccctacactggaagatcaattcttttatcatccatactttagaggcagcaaaatc

SEQ ID NO: 693105 - DNA, 83 bp, Homo sapiens
ctcaacagtttgtggcaagacaagctcagaactgagaagctgtcaccacaggtacatctggtattcagatgaagtatgtcatg

SEQ ID NO: 693106 - DNA, 98 bp, Homo sapiens
cggagtcatcctcggctccctgctgggcgggaccctggtctccgcgtacggggccagacgggcccagccagcaccaagatgagtgccacgtcctggtt

SEQ ID NO: 693107 - DNA, 88 bp, Homo sapiens
aagtttcgggacaactgtttggcaattttggagagcaagggccttgatccaggattttgcctaccattttacagtatttgtcttctat

SEQ ID NO: 693108 - DNA, 75 bp, Homo sapiens
attttctttaaggatggtttagaaatggaaaaatgtatcggcttcaccaccgaccctcggatggcccgctcctcc

SEQ ID NO: 693109 - DNA, 101 bp, Homo sapiens
gatacagcatgtgttaccaagctgtttcctaccaggtcacacactgttgcagcgcagcgccggggcaggaaggacggggaccttctgtgccctgagcaccg

SEQ ID NO: 693110 - DNA, 100 bp, Homo sapiens
tttccaattctcacctccccttctccccttagctcagaaacaggaagattggaatctgcctggaacaaagaactgcacctaagcagaccagaagcaaaat

SEQ ID NO: 693111 - DNA, 125 bp, Homo sapiens
ggacgagctggagaaggccatcaccacgcagaacgtcaacaccaagtgcatcaccatccccaggtcagtatgggaatcctttaaataaatatatcagacattatgaaggattatcttacaatgtg

SEQ ID NO: 693112 - DNA, 100 bp, Homo sapiens
cacgatacctttttcttggcgattatgtggacagaggttattttagtatagagtctcatataatggcagcaaaggctgtagcaaatacaatgagaacatc

SEQ ID NO: 693113 - DNA, 80 bp, Homo sapiens
accgcaaacaaggagagcctactgagcagcctgagtggtgacagaggccaagcaagaattaataacctaccctcagcctc

SEQ ID NO: 693114 - DNA, 80 bp, Homo sapiens
gtggcatggcggacgaggggaagtcgtacagcggtttgcctgcaatgagatttcattctctacatttaaaggacatcctt

SEQ ID NO: 693115 - DNA, 75 bp, Homo sapiens
aaagacgatgacaagatggtctttaagacaggttatgcattagacccttcattagataatcatcaagtgtctgct

SEQ ID NO: 693116 - DNA, 100 bp, Homo sapiens
ttcggtaagaaaaagagatctacagacttcaacacatgtagaaacactactaactttttcagctttgaaaaggttgctgtgctgcttatggatacccagg

SEQ ID NO: 693117 - DNA, 100 bp, Homo sapiens
cttcactgcctctggcatggatgagaattgcggcgagcagtaagaagcagcgtgtggaaaagggagacgattgttcatcaacatgagtatggaccagaag

SEQ ID NO: 693118 - DNA, 75 bp, Homo sapiens
cagaattactagattttctctcaaactacgaggtgaagacattcagtgaagcttgcctgatggtaaggaaaccag

SEQ ID NO: 693119 - DNA, 75 bp, Homo sapiens
tttaccagatgctcttggctgtgcaggcgcagttgtgtagcagttgagtaatgctggttagctgttaaggtggcg

SEQ ID NO: 693120 - DNA, 98 bp, Homo sapiens
ccacagactacgagggagtttgacagctattaaaaccagggctccacagttaggagctctagccggcccggtccttggactgaaagaatgcaccaggg

SEQ ID NO: 693121 - DNA, 122 bp, Homo sapiens
cgaacccgcgatggaataatgcccagcggcccgccaggtcccgggcggcgactggcggcgcgatggacctgaccgggctcctgctggacgaagaaggcaccttctccctcgccggcttccag

SEQ ID NO: 693122 - DNA, 51 bp, Homo sapiens
gcaccataggccgaagcacccggttacagaatgtctgaaggggacagtgtg

SEQ ID NO: 693123 - DNA, 100 bp, Homo sapiens
cagagaggggaagtgatttgcctcagcttgtactaaagatgtgtcatggcaatgctgagaaggaggatcagggatgagaagaccaacgttaggaagtctg

SEQ ID NO: 693124 - DNA, 75 bp, Homo sapiens
caaaacaagccctccaggaactcacgttcagtgtctgtggtcggatatcaatcattcgcttcccggacaccgtca

SEQ ID NO: 693125 - DNA, 90 bp, Homo sapiens
ctgcagctggcgcctctgcagtgggatcaggatcctcatgaccagccaaagagaagaagaattaggaagcataaatcaaagaaaaaattt

SEQ ID NO: 693126 - DNA, 100 bp, Homo sapiens
ctttatatttgctccataatgacatgatatgggccctcacattttccaaacctgtccatctgctaactattttgactgcagagccatgtccattggagcc

SEQ ID NO: 693127 - DNA, 50 bp, Homo sapiens
cgagcagtgccacggccccatcacattctgcctgatcaatgcaggagtcc

SEQ ID NO: 693128 - DNA, 50 bp, Homo sapiens
cgtcctgacagatctccagctattgaaggagccgacagttagaatcagaa

SEQ ID NO: 693129 - DNA, 115 bp, Homo sapiens
gcagaaaggagtgatgaatcagcccatggcttacgctgcacttccatcccacggtcagaccattcctcaagaattttgtatccaaggcccaaaagtttgttacccaagatgatga

SEQ ID NO: 693130 - DNA, 102 bp, Homo sapiens
ttccatctaaccagacaagaaatagtatcattattcaacgcatttggaaggtaaaagctgctgaaacatgtcaagagccgaaggaattcagattgccgaaag

SEQ ID NO: 693131 - DNA, 106 bp, Homo sapiens
ggggcttcataccagctgaagagcgacaagccgctggcagccgcggatctcaccgccgctcagggacatggatttgattgacatactttggaggcaagatatagat

SEQ ID NO: 693132 - DNA, 82 bp, Homo sapiens
catggcgttcctcaaactccgtgaccaggtgatctttagacagtgactgagtatggatcatttgaacgaggcaactcagggg

SEQ ID NO: 693133 - DNA, 90 bp, Homo sapiens
cgcgtgcgggattccggcgccgctctccgagctcgatccgctgctcgcacgggagccagctgggtgatggagtcttactctgtcgcccag

SEQ ID NO: 693134 - DNA, 73 bp, Homo sapiens
ggcgggcggcggcgcgcggacccaggcgcggatggcgaggccagcaggtgaatgaaaactttgccattgattt

SEQ ID NO: 693135 - DNA, 74 bp, Homo sapiens
acgtcatcaaggtccctgataatctccatccagttcctggtgtacaggcgcagcaccgccgcctcggagcttga

SEQ ID NO: 693136 - DNA, 100 bp, Homo sapiens
cgccgcgcgcccgcggccctccgtcccgccccggccggctggcggtcacctggcacaccagcgcccgcaggatgcccagctgcagaaccttggcctgaaa

SEQ ID NO: 693137 - DNA, 75 bp, Homo sapiens
gatcgaatgacctccaccatgcacaagatgttgtccctgcccccagccaaggacctcccgaattccctggtaaca

SEQ ID NO: 693138 - DNA, 83 bp, Homo sapiens
cctcggggacctgctggagacctgccatttccaggccttctggacaaagccacagacccaagcatgtcggaacaggattggtc

SEQ ID NO: 693139 - DNA, 100 bp, Homo sapiens
gaaatgtcactgcagctttaaaaagcagtgggctctggaacaacacggtgttcatcttttctacagagctacgaagtgaagagtgtcctcggaaaggaag

SEQ ID NO: 693140 - DNA, 82 bp, Homo sapiens
caatttttctgcagtggctctgggtccagccccttacttaaagttcaagcaagtttgctgctgttggatttcataaaacttt

SEQ ID NO: 693141 - DNA, 100 bp, Homo sapiens
gagcctgatgatggggacgtgccgcccctttgcgggatgaaacaggcgcctatttaatcgacagagaccccacctactttgggcctgtgctgaactacct

SEQ ID NO: 693142 - DNA, 82 bp, Homo sapiens
tgggacccaccgctgccctcagctccgagtccagggcgaggttgaaaggattgttgacaaaaggaaaaataaaaaagggaag

SEQ ID NO: 693143 - DNA, 75 bp, Homo sapiens
ctgaaaaccctggccaaggacgaggaagaacctaggaaagtccgctttgattatgacttattcctgcatcttgaa

SEQ ID NO: 693144 - DNA, 100 bp, Homo sapiens
cttggatgagaacatgacttttggcatcattcagagccagagtttaggagttgacactctccctcctcctgaccctaatccacccagagctgaatttaac

SEQ ID NO: 693145 - DNA, 90 bp, Homo sapiens
ttccagccagatggtagaagcgatgtctccaaaaaaagttggtgatgacattgccaaggcaacgggtgactggaagggcctgaggattac

SEQ ID NO: 693146 - DNA, 100 bp, Homo sapiens
tgcaaggaatacagtgacgacaaagtgcagctggccatgcagacctacgagatgttgcatttgctggtctggcctttgcgtccttctacctggcagggaa

SEQ ID NO: 693147 - DNA, 74 bp, Homo sapiens
ctttgatccctgtgtgctgaagaggggcaagattcttgccaagagaattaatgtgcgtattgagcacattaagc

SEQ ID NO: 693148 - DNA, 75 bp, Homo sapiens
agtctcacagaatattcctataacaggcaaaatcctgacagatgactttgcagacaaggagggtctggaaatggg

SEQ ID NO: 693149 - DNA, 99 bp, Homo sapiens
tgaaattttcagacaaagatacagaagcccctcaggataaactcatcctgaaagtcgctgttgttctcctgctgagcaagaatggaggccccactggtg

SEQ ID NO: 693150 - DNA, 102 bp, Homo sapiens
tcaagaattttggagaagacatggatgatgagcgccttaaggatctctttggcaagtttgggcccagcgtgtgaggcggccgataccagggtcagatcagac

SEQ ID NO: 693151 - DNA, 100 bp, Homo sapiens
gagtaacaaccatgagaatgtgtctcttgccaaagcgaagggggaagttgctgaagttatatttgtaggtgctaacccgaagaattcagtacaaaaccag

SEQ ID NO: 693152 - DNA, 98 bp, Homo sapiens
cgactccagcatcatgattacctcccagaaagacttccgagtgcaggaactcccactggctcgtattaagaagattatgaaactggatgaagatgtga

SEQ ID NO: 693153 - DNA, 99 bp, Homo sapiens
attttgcagcaatctcagctctcaaagtgctatcatggtgaacttacttcagattgtgcgggaccactgggttcatgttcttgtccctatgggatttgt

SEQ ID NO: 693154 - DNA, 51 bp, Homo sapiens
ttcgagcagagcctgatgggctgtttgacgatcaaagacacggtgacaatg

SEQ ID NO: 693155 - DNA, 100 bp, Homo sapiens
atcattatggtgctgttaggtaggacttgtatccagatgtaaggctcacttatctaaagaatatgaggaggctaatttcagagctatatgtgcgagataa

SEQ ID NO: 693156 - DNA, 100 bp, Homo sapiens
tcaagactacaagagatcagtcattacaatagcaacttctgttgataagttggaaaccgaagctgaaagactggcatcctcctgggggctttattctggg

SEQ ID NO: 693157 - DNA, 80 bp, Homo sapiens
ctccgccaagcgcggccgccgcccccgcctcaggccatgtttttggtatactgtgcactggagaaagaacctgtgccaat

SEQ ID NO: 693158 - DNA, 75 bp, Homo sapiens
tgccgttaaacaaatcctggaggcagttgctagtgagataattcgagataatactggcattttggagtgtgttaa

SEQ ID NO: 693159 - DNA, 100 bp, Homo sapiens
attgccgtcgacggcgagcccttgggccgcgtctcctttgagggtcccgacggcctacacatggggcgctgtgggcgccgtggggctggtgtgggccacc

SEQ ID NO: 693160 - DNA, 100 bp, Homo sapiens
ccggactggagggagacaaagcagcgcccgtctgcttcgggcctctggaatttagcgctcgcccagctagccgcagcaaaccaagatggagtatgagtgg

SEQ ID NO: 693161 - DNA, 86 bp, Homo sapiens
tgggggacggtaggagcctccgtgcggagaccactgttcaaggccacaggttaatttggagtggcccctggagtcagtttcctaca

SEQ ID NO: 693162 - DNA, 51 bp, Homo sapiens
ggaaagcagaggagctgtagagggggaaatttgcagtggtgagaaaatgta

SEQ ID NO: 693163 - DNA, 100 bp, Homo sapiens
atggccaccagcaagcctccgttccatgagcttggtgagccgcaggcagccatgttcaaaggatagctgggagtatggccaccctgctccacgatgcggt

SEQ ID NO: 693164 - DNA, 100 bp, Homo sapiens
gccggcaagcgagtgctcattgcagcccacgggaacagcctgcggggcattgtcaagcacctggaagagctagagccggtgcaggccacgcagaacaaga

SEQ ID NO: 693165 - DNA, 75 bp, Homo sapiens
attgtgaaaaacctaaaggataccttaggcatgtccagatcagcaatgagtcggcaattgacttctacaggaagt

SEQ ID NO: 693166 - DNA, 97 bp, Homo sapiens
catttccaggggaagcgtgggctggaccaggatgtgcgggtgctgaaggtagtcaaggctggagtgcagtggcgagatctcgactcactgcaggctc

SEQ ID NO: 693167 - DNA, 75 bp, Homo sapiens
tcttcaatgagtaaacatattcctaacatccagtcatggataaaaatgagctggttcagaaggccaaactggccg

SEQ ID NO: 693168 - DNA, 101 bp, Homo sapiens
ttgtcagtttcctgaggcctccccagccacgctttctgtacagcctgcagaactctcatgatggagcagtccaagaagtcctccctcatggtggcccgcag

SEQ ID NO: 693169 - DNA, 100 bp, Homo sapiens
cagggatcatcgactctcacccttggcccctagctcaggaacttgctactaccagcaccatgccctaccaatatccagcactgaccccggagcagaagaa

SEQ ID NO: 693170 - DNA, 96 bp, Homo sapiens
gaaaggcatttacccaatgtaaccagctgaaaacgcatgtaagaactcatacagagatacaatcttgcttgaccgtttgggacatcaatcttccac

SEQ ID NO: 693171 - DNA, 100 bp, Homo sapiens
agcgcctactgtgcgcccggcgccgttctacacaggaacacagcgcttttcaagagatgtggtctgaagctattaaaatcctgaaaggggagtatgctgt

SEQ ID NO: 693172 - DNA, 77 bp, Homo sapiens
ttgaaacagatcataatcttgacacatctgatatccagttcttggaggatgattgagaggatccagaatccagatct

SEQ ID NO: 693173 - DNA, 100 bp, Homo sapiens
actacgcccgctccgaggactacgtggagctggtgcagcggaagcgagtacacctggatttcattagcatcatgacctacgattttcatggagcctggcg

SEQ ID NO: 693174 - DNA, 88 bp, Homo sapiens
ggcgtggacgaccgttgctgagctggtgtggaacgtctgtgatcagaattgtattcctattgaagagcagcttcagttggtgttgggc

SEQ ID NO: 693175 - DNA, 97 bp, Homo sapiens
ttgtggaccctgaggatgagcgtgccatagagatgttcatgaacaagaaccctcctgccaggtttcaatgtggacactctccctgcttatgcaaaac

SEQ ID NO: 693176 - DNA, 101 bp, Homo sapiens
tgcttcacgccttggctcgacactgccagctggaaccagaccatcctgaaaacagcctcctgtcatccccccagcccagcgagcccctcgtgctgctggcg

SEQ ID NO: 693177 - DNA, 71 bp, Homo sapiens
ctggaacaaggggatgacacagctgctgagaggctagagaaggtgtttgatgcgatcatgaatttcaagaa

SEQ ID NO: 693178 - DNA, 96 bp, Homo sapiens
tcaacctggagctctacgcctcctacgtttacctgtccatgccgcccccgaagcccaccatgcctagccgtcccattgctcctgctccaccttcta

SEQ ID NO: 693179 - DNA, 83 bp, Homo sapiens
tacctgcggccaattcggtggaacgaggacgcggactgcgaaggcaggtcactgcagccagaggggtccagaagagagaggag

SEQ ID NO: 693180 - DNA, 122 bp, Homo sapiens
ctttcttggcccttgttcccccaaatgtctgactctgactctcggactgagaaacgcaagcaaattgtggctactaatttgccccctgaagatcaagatggctctggggatgactctgacaa

SEQ ID NO: 693181 - DNA, 100 bp, Homo sapiens
agagccggaacgtcatccctgatatccctgaccacttcctgtgtctgtgggagcactgtgagctggggaccagatgacgatgggaagacagtggatggcc

SEQ ID NO: 693182 - DNA, 90 bp, Homo sapiens
gtggacccctcagtatatggatacggagtacaaaaacggcccttggatgatggaggcttcagggatgacttcttagggggcaggggaggt

SEQ ID NO: 693183 - DNA, 100 bp, Homo sapiens
tgcagcgagcgctggacggagaggaaagcgctgactggaaataccggcatgcaggattgatggccttatctgccattggtgaagggtgccaccagcaaat

SEQ ID NO: 693184 - DNA, 50 bp, Homo sapiens
aattctgaactcaggacttggcaagaaacttccattttagaagaatacag

SEQ ID NO: 693185 - DNA, 46 bp, Homo sapiens
cctcactcttcatggtcactggaaatgtaccttctccgaatgcacc

SEQ ID NO: 693186 - DNA, 122 bp, Homo sapiens
ctcaagtcaccgtggagctccgccgccccgaaactttcaccgcgagcggttggagtgcctcaagcttattgcctctcaaaaatttacagacaaacgcattggctatttaggggcaatgctgc

SEQ ID NO: 693187 - DNA, 100 bp, Homo sapiens
ccgggagcaccggggctccgtcatctgtctggagatcatggaagggaagtggttgctgtgtatgttactggtgcttggaactgctattgttgaggctcat

SEQ ID NO: 693188 - DNA, 100 bp, Homo sapiens
cacattatcattctcttcactcgagagatgaggacactgaaattcagagaggggaagtgatttgcctcagcttgtactccaaaagcgtttgaacaatact

SEQ ID NO: 693189 - DNA, 75 bp, Homo sapiens
aagaatttatcaaaggaaagatggatccagacaagattttctaccctagcaaggatggtacgaagattccaatgt

SEQ ID NO: 693190 - DNA, 100 bp, Homo sapiens
caggagccgcagcgcccgcgggcccgggtgcgggcccggcgccgcaccagcagaacgagtatctgactgtcttctctcagatgattgcatttcatgatcc

SEQ ID NO: 693191 - DNA, 74 bp, Homo sapiens
cccgcgcgcacctcagccgcctcctagcggcgcggcgctcgctcctacgacagtgggagtagctcaccgttacc

SEQ ID NO: 693192 - DNA, 90 bp, Homo sapiens
gccctcgcggaggccgagaggcttaaggaggtttgacatctacaggaaggtgcccaaggaccttacgcagccaacgtacaccggggccat

SEQ ID NO: 693193 - DNA, 72 bp, Homo sapiens
agtgaatgggcggatctcatatcttcacttggcaaactcaacaaggtgaaagaacttgtcctggacaacagt

SEQ ID NO: 693194 - DNA, 100 bp, Homo sapiens
cagttaatggttgctaaaaaagcggtggatgctgaaccagtcctgaaagctcaccagtctcactctgcaccaaatccagttgaagaaatatttactgaag

SEQ ID NO: 693195 - DNA, 88 bp, Homo sapiens
tgggattggctgtgtgcaatactcctcacgagagaatggatcttggagaatgtctgaaagtccatgacctggctttaagagcggatta

SEQ ID NO: 693196 - DNA, 100 bp, Homo sapiens
tatgattttctttaaggatggtttagaaatggaaaaatgtaccccatgccacagctggatgtgactgaggccaacaaggagttcatggaacagagtgagg

SEQ ID NO: 693197 - DNA, 83 bp, Homo sapiens
gtaagcgcagaaagcaggcgaacccgcggcgcaataacgacactgccctaaccatcatggaggtggccgaggtggaaagtcct

SEQ ID NO: 693198 - DNA, 101 bp, Homo sapiens
ctctgcccggcgagtcgggctctggaggaaaagaaagcgagtaaccagctcataaatcacatcgaacagtttttggatactaatgaaacaccgtattttat

SEQ ID NO: 693199 - DNA, 100 bp, Homo sapiens
tatgattgtcatcgttacagccggcgaagaagaagcagcctgagcggtgcatccccgttcctgggcgagaccaagcaggagacgctcaccaacatctcag

SEQ ID NO: 693200 - DNA, 98 bp, Homo sapiens
caacaacattggctcaatagcaagaatgtgtgcccttaatgaaaatggaggctccagagtgaaattaatgacactttgtcgatgaagatcttgattgt

SEQ ID NO: 693201 - DNA, 102 bp, Homo sapiens
ggaagactatgagacacacaaatctaaaaggcgcgagagaatggatgatagtagtgacacaattggagaaaccggttattttaccaaagctttggaatggtg

SEQ ID NO: 693202 - DNA, 90 bp, Homo sapiens
acagctgtcgtctctgggactgtgaaacaggtgtgggcccatcgctggatggatctgtcagaacacggctttgggctggccctgctcaac

SEQ ID NO: 693203 - DNA, 75 bp, Homo sapiens
cgcgaaggcagtaccgtttcctcagcggcggagttcacccagggcatgatcttacctacaatgaatggagagtca

SEQ ID NO: 693204 - DNA, 75 bp, Homo sapiens
attcgtggcgccacaagctcattcactgtgtagaataccgtagcagtaggcaggacagttccaattcaacaaaaa

SEQ ID NO: 693205 - DNA, 88 bp, Homo sapiens
gggttgaaggctattccatggaatatttgtcccggcactggctcttcagtcccttcaatgagaaagatcagtctaaagaaaaggagaa

SEQ ID NO: 693206 - DNA, 89 bp, Homo sapiens
tttttcaatgtccattccgctgtgttgattgaggacgttcccttcacggagaaagattttgagtggttatcactaggctaaaactggac

SEQ ID NO: 693207 - DNA, 50 bp, Homo sapiens
gcatcatccgctatgcaattgggtgaaacccagggccccaggaaacctga

SEQ ID NO: 693208 - DNA, 75 bp, Homo sapiens
gccggaactggagccgaggcgcaggtggcgctggactgtgccctgtccacggtgcctcctgcatgtcctgctgcc

SEQ ID NO: 693209 - DNA, 83 bp, Homo sapiens
gcaagctgaagacatcaagaagatcttcgagttcaaagagaccctcggaacgctatgactttgcagccgtcctggagtggttc

SEQ ID NO: 693210 - DNA, 74 bp, Homo sapiens
cgcgccgcccggcagcctcggcagatctaagctggaaccagaaccaaatacaaagacaagagaatccacatctt

SEQ ID NO: 693211 - DNA, 74 bp, Homo sapiens
atccatccagatgaacgtggccgaggaatggtcctcgtccgaagtgagaatgggcagttgttaatgattcctca

SEQ ID NO: 693212 - DNA, 75 bp, Homo sapiens
aggagttcgtctcttacgtctgcggaagtgcagctgcctcagttcttagcgcagaggtgttatgaacataaacag

SEQ ID NO: 693213 - DNA, 97 bp, Homo sapiens
catcagatgttcattcatctggatcttcagatgcacatgtattatagctgcaaatgtccttgtattctgtttatggagagtaccttctctgcagcgg

SEQ ID NO: 693214 - DNA, 101 bp, Homo sapiens
gggttgctgcccgtcagtctcgaaagggcaggaagatcccaacagtttgcgccataaatataactttatcgcggacgtggtggagaagatcgcccctgccg

SEQ ID NO: 693215 - DNA, 75 bp, Homo sapiens
gacggcgacttctgacaacgaatagcagaccccacgttagctgaaatgggaaaaaacttgaaggaggcagtgaag

SEQ ID NO: 693216 - DNA, 82 bp, Homo sapiens
tgcaaatttacatacgagaatggcttgtgaaatcatgcctctgcaaaggaaaatggcaaatgcacgacagcggcctcctgaa

SEQ ID NO: 693217 - DNA, 80 bp, Homo sapiens
ggacattgctagcaatgagctcccaaagccatccagagagaagaagaaggaggttcctgctgtgccagaaacccttaaga

SEQ ID NO: 693218 - DNA, 100 bp, Homo sapiens
cactaattcagttgtgtgtttctgagagcaaatgttacttgttccacgtttcttccatgtcaggtaccaaaaactgtggaagagttatgtgaaacttcgc

SEQ ID NO: 693219 - DNA, 75 bp, Homo sapiens
aaatgcttcaagtagtcctgtgctcaacattgcttatcgatattgattttgccacccgcaagattgcagtacgtc

SEQ ID NO: 693220 - DNA, 83 bp, Homo sapiens
cttgagagctgggttctattttccctcctcaaactgactttgcagccacggagaggagtgacagtgaggattcacatttgggt

SEQ ID NO: 693221 - DNA, 80 bp, Homo sapiens
tttcgtggttcacccgctgccgggcaccgaggaccagctcaatgacagattgagatggccatcctgcggttcccttacga

SEQ ID NO: 693222 - DNA, 100 bp, Homo sapiens
ctcagtcagtcctgcctcatcccagccatgtcatcttatctacgaaatgattcagctcggggtgtggttttctctcggttgtgcctatttggccttggaa

SEQ ID NO: 693223 - DNA, 90 bp, Homo sapiens
gggaaggaaaaccgcgcagagagattttgagaagagggggaaaaaggaagtttgtcctgtcctggatcagtttctttgtcatgtagccaa

SEQ ID NO: 693224 - DNA, 75 bp, Homo sapiens
cttgagtcagtgcgccgctctccagcccgcttgaacggtgtggacactgccagcggctgcagccgacttggaatg

SEQ ID NO: 693225 - DNA, 98 bp, Homo sapiens
catcttgccaatttcaaatcgggcgagaagagggaagttggagagggaaaagttagcccagaaggaaagcattttctgcagatcagcctgaatccacc

SEQ ID NO: 693226 - DNA, 100 bp, Homo sapiens
ccgacttcgatgatcgtgtgtcggatgaggagaaggtgattccttcaacacccagaatgagccagaagacatgatgaaaaaagagaaaaagtctgaagct

SEQ ID NO: 693227 - DNA, 75 bp, Homo sapiens
agagtcagacctcgaattagcaaaggaaacttttgacacatcaccttcactttgggatatggaatttgataagca

SEQ ID NO: 693228 - DNA, 101 bp, Homo sapiens
ccacctttgtcaccagaatgaatgaagtgcttcagatttaaatagttaaatcacccagaggttccatacagtagtggcgccacatcatccaccaacaatcc

SEQ ID NO: 693229 - DNA, 73 bp, Homo sapiens
aggatgagattttgccagagaaaggacgagcagcaagtcagggagcttaagcattccatggcaatagattctg

SEQ ID NO: 693230 - DNA, 50 bp, Homo sapiens
cgcggggaccgctgtgctctcggttccccctcagcccttcctggagatgc

SEQ ID NO: 693231 - DNA, 83 bp, Homo sapiens
gttctaaaggaaggcgtccgttggccttcgtacccgtcttgattgaggagggtgtgaagacagagaatgaccacatcaacctg

SEQ ID NO: 693232 - DNA, 143 bp, Homo sapiens
gggctctggactctgtatctggaactggtggcgtcggcccaggtcggcgggaaccccctgaaccggagcttcctttctgtctgaccagcctgagccttacctgccatttctttcacgcttcattgaaacacagatgtttgcca

SEQ ID NO: 693233 - DNA, 82 bp, Homo sapiens
ttagctgtgctcgcgctactctctctttctggcctggaggctatccagctgcgcgtcccgggacgactggcgctgtgcgcgc

SEQ ID NO: 693234 - DNA, 100 bp, Homo sapiens
ctggcggccggcttggagaggccgagggtttgatgaaggtggaggcagcgcggctctcagccattgagacccagagcagcagttctgaagagatagtgcc

SEQ ID NO: 693235 - DNA, 82 bp, Homo sapiens
cacagaccaagtcctccacagagggcgagccagggtggagaagagccagcccaggagatgcagaaactaccagaggccgttc

SEQ ID NO: 693236 - DNA, 88 bp, Homo sapiens
gactaccaacaagtgttgctggacgtccggcggtcattgcggcggttccctcctgatcagcctgtcctcggggaccctgcttctgctg

SEQ ID NO: 693237 - DNA, 50 bp, Homo sapiens
cccggaggtctccgccggctcccgggacaatcatatcctgattcagccct

SEQ ID NO: 693238 - DNA, 100 bp, Homo sapiens
ccgcatcgagagcgcgctggagttccacaactgcaggacagaacatgacgaacaccgtggtgaggaccacgctgaggaacgacctgtcccaggagggcat

SEQ ID NO: 693239 - DNA, 82 bp, Homo sapiens
ggcggcggctccagcgtcctaagagacaatgcagatcttcgtgaagactctgactggtaagaccatcaccctcgaggttgag

SEQ ID NO: 693240 - DNA, 82 bp, Homo sapiens
aatgatagccagtccctggagctggtgcacaggttccagagcgctggaggcgggctgccggctgtgcgggcgctccggagag

SEQ ID NO: 693241 - DNA, 101 bp, Homo sapiens
atcatcactggcgatctacaattggcatgcttcgagaatcaaggcttcttgctcatttgccaaaggaaatgactcggcgtggcacaagcctaatggaagat

SEQ ID NO: 693242 - DNA, 75 bp, Homo sapiens
accataagtgtccatctgtctgtcacagagggttccgagtctgaggaagacataaccttgtgcctgcctgcccac

SEQ ID NO: 693243 - DNA, 96 bp, Homo sapiens
gccagcagctggactatggcatctatgttatcaaccaggtggcagtagagaagagcatcacagaagttgctcaggagctgacagagctggtggaac

SEQ ID NO: 693244 - DNA, 74 bp, Homo sapiens
ggaacgcttattcaacggcaaaaggtgaaatgacaatggatgctctgttggctcgattgaaacttctgaatcca

SEQ ID NO: 693245 - DNA, 83 bp, Homo sapiens
ccggagcatggtcagccccgtcccctccccgacgggcaccatcaggtaaggggcctggataccaagaagtgactgctcatcta

SEQ ID NO: 693246 - DNA, 98 bp, Homo sapiens
caagtacaagttagaactctttatctttctgtggatccttacatgatctgctcactttagcactctggcaattaaacagaacccccttctggcagaag

SEQ ID NO: 693247 - DNA, 75 bp, Homo sapiens
agaagatcctgtattcttggggagagttgctaggaaaatgcagcatctggaatcaagagacccatggcatctgag

SEQ ID NO: 693248 - DNA, 82 bp, Homo sapiens
ggcgcgggaggtgttcgagaacgaccccgagacgctgtgccacgaccgtggctatctggtgacccaggacgagcttgaccag

SEQ ID NO: 693249 - DNA, 100 bp, Homo sapiens
atccggatcattctagagctttaagtcacttttacaaagagaaagtttggattaatgaagaaagcctatgaacttagtgtgctctgtgactgtgaaatag

SEQ ID NO: 693250 - DNA, 82 bp, Homo sapiens
cagaagtccagagctgaggactgcctgtttgcaggtgaaagaacttgtcctggacaacagtcggtcgaatgaaggcaaactc

SEQ ID NO: 693251 - DNA, 83 bp, Homo sapiens
ccgtgtctctggattcaagtcccaggagtcctgaccagagagcaggaacatggtggtggctttgaaggaactgtccatccgag

SEQ ID NO: 693252 - DNA, 100 bp, Homo sapiens
gtggtcagcgtgaactgattattggtgaccgacagactgggaaaaccagtgagtctggagagctgcatgggctcacaactgaggaggaatttgtagaagg

SEQ ID NO: 693253 - DNA, 83 bp, Homo sapiens
ccttcgggacaagattcgcttctatgagggtttacccaaggtccagcctagcccctaggcaccatgtcggacagtgatctagg

SEQ ID NO: 693254 - DNA, 100 bp, Homo sapiens
cagtacttgggatcccccagttccaaagtgtcttaaaggcgtcgaccagaagattatgatattcataacagcagaaagaaaccaaggattgactatcccc

SEQ ID NO: 693255 - DNA, 74 bp, Homo sapiens
cgcgccagaaggccgagattgccgcctccaggtgctgcgacaagagactttggacaaaaattgacttgagtagg

SEQ ID NO: 693256 - DNA, 75 bp, Homo sapiens
cctatgcaacgctgggcatgaggagcggagcggagaatgccaagctgccactggtgacatgccaacttaccagat

SEQ ID NO: 693257 - DNA, 90 bp, Homo sapiens
acaagggaggagaagacaagctaaaaatgattcgggaatatcggcaaatggctcggacatcatcatgcagctggacgacgtggttagcag

SEQ ID NO: 693258 - DNA, 101 bp, Homo sapiens
accacaataaaagagacctctacttagctcagcaattcttaccttggttatgagagaatttacaatgaaattccggacattaatctggatgtcccacattc

SEQ ID NO: 693259 - DNA, 100 bp, Homo sapiens
ttcatgggcaaagtgtggaaacagcagatgtaccctcagtacgccacctactattacccccagtatctgcaagccaaggctgccaatagctacctgcgag

SEQ ID NO: 693260 - DNA, 101 bp, Homo sapiens
tacatcagcttgtaggagacagagcggtcttgcgagtggctggttccctgcagaagagcacagaagtgatgaaggccatgcaaagtcttgtgaagattcca

SEQ ID NO: 693261 - DNA, 100 bp, Homo sapiens
cttgaatttcaaccccagtaacccctactgtgcaggctcctatggatattccaggtttaaacctgagtcaacaagaatactacccctatgtgtactacaa

SEQ ID NO: 693262 - DNA, 83 bp, Homo sapiens
cgacgggccgagcctgccactatgtgcactcccagcaacacccctgccacgccgcccaacttccccgatgcgctggccatgtt

SEQ ID NO: 693263 - DNA, 100 bp, Homo sapiens
atgcaatgtcacttacaacattaatcagatactgcatttaagcctaggcgaggacttctaccgcgaggccatcgagcactgccgcagttacaacgcgcgc

SEQ ID NO: 693264 - DNA, 74 bp, Homo sapiens
gttcattaagacttcccagcattcctacagatataaataggttgtcggggccaaagtggtaacgaacgcccgca

SEQ ID NO: 693265 - DNA, 75 bp, Homo sapiens
gtgaatacccagaaaatttcatgacagttaatgattggacgtcatccaatgagaaagcagtgatgtctttactgc

SEQ ID NO: 693266 - DNA, 82 bp, Homo sapiens
ttccccggaatcgtgtgctgggctggtcccccttgcccatcatcttcgtttcggacagagcaaacagcaacaaggagctggg

SEQ ID NO: 693267 - DNA, 50 bp, Homo sapiens
gtcaacctgcgcccccagatgtcccaggctggagtgcagcggcacaatct

SEQ ID NO: 693268 - DNA, 82 bp, Homo sapiens
ctgaccctgggagacatcgacgagttcctgagttggaggtagaagaagaaacccaagttcaagagatgactttagatgagtg

SEQ ID NO: 693269 - DNA, 101 bp, Homo sapiens
ctcctagggacagggaaactgagtcatatcaaggtggaaggcagctgaagctgaagagcaagtgggatgagtccatcttcacgaaaggctgcatccaggcg

SEQ ID NO: 693270 - DNA, 101 bp, Homo sapiens
gccgggagtcgctgggtgcgtggggctgcctcgccgcgtctcgccacgcttttcctccgcaaccatgtctgacaaacccgatatggctgagatcgagaaat

SEQ ID NO: 693271 - DNA, 88 bp, Homo sapiens
tctcttacgtctgcggaagtgcagctgcctcagttcttagcgcagattgagaggatccagaatccagatctctggaatagctaccagg

SEQ ID NO: 693272 - DNA, 43 bp, Homo sapiens
catcctggggacctggtacatgagggattgaagtctcaagttg

SEQ ID NO: 693273 - DNA, 100 bp, Homo sapiens
aataacaggcggagggtcggcgtaggtatcacacctgtgtatcataatatgtttgctttaatgagtgaaacagaaaggatctggtatccacccaaccatg

SEQ ID NO: 693274 - DNA, 82 bp, Homo sapiens
ggacgaggggctccgggtcttccagagcgtgaagatcaagatcgtaatcaagatgattaccaactggttcgaaaacttggtc

SEQ ID NO: 693275 - DNA, 100 bp, Homo sapiens
gaaatgatgatggaaatgaagtataataccaagaaagccccacttgaccccaccaacaactgaacgctttggtcaggctgctacaatggaaggaattggg

SEQ ID NO: 693276 - DNA, 100 bp, Homo sapiens
cgcccaccagcacggcatccctgacgagacctgcaacaactaccaggccaaggaccaggatgatgaggagtctgatgaggaagctgtgaagaaaaccaac

SEQ ID NO: 693277 - DNA, 99 bp, Homo sapiens
tcgaattcgcactgatgaaaatgggctttgtcctgcatgtagaaaggagcatctttccttgaagaagtacattattgacattgtggttgaaagtacagc

SEQ ID NO: 693278 - DNA, 75 bp, Homo sapiens
ggcttcttcagcgttttcggcatgtgtgtggacacgctcttcctctgcttccgaattacatgaacgacagccttc

SEQ ID NO: 693279 - DNA, 50 bp, Homo sapiens
ctccgaggagctggggccatcaagggaacaacatcaagcctttttgtatc

SEQ ID NO: 693280 - DNA, 100 bp, Homo sapiens
cacgcagcctggggactctgcctcgtgccgctgagcctggcgcagatcggggttgtagaaggtgatttagctgccatagaagcatacaagtcatcaggag

SEQ ID NO: 693281 - DNA, 100 bp, Homo sapiens
agccagccgggaggacacttactacagctgctcagaagcaccactggaaactcagagctgtgttaaaagtgaccactcgtgctcgccatgtgctccaatc

SEQ ID NO: 693282 - DNA, 96 bp, Homo sapiens
ctgcgcctctcccgcccctgtctcccgctccgcagccccgggcacggcggaggcagcggagccctgggccatcgggctggtgaattaccagatctc

SEQ ID NO: 693283 - DNA, 50 bp, Homo sapiens
catgagatgattgccaaacccccaggaactatcgtgagcataggtgaccc

SEQ ID NO: 693284 - DNA, 84 bp, Homo sapiens
ccgtcttggggcctagcggcgaggcgacccgcacagggaggagagagcgatggcttttttcacccagaaggccagccccagcgg

SEQ ID NO: 693285 - DNA, 83 bp, Homo sapiens
agaatgacgaccattacgtcatgcaggaacatcgcaaggtgcccttcgcctggctaagtcctatcagccatggaaacaccatt

SEQ ID NO: 693286 - DNA, 97 bp, Homo sapiens
tgatacaaacacattagaatcaccatttagtgacttgaacaacctaccaagtgatgtgatggcccactgcgtgaccttggttcagctgtccatttcc

SEQ ID NO: 693287 - DNA, 100 bp, Homo sapiens
cgagaagatggggccctggctttccagggagtgcagcaagcagccggcctgcaggcactcttaaaagacccattttacatgggcttgtaccagaaacgag

SEQ ID NO: 693288 - DNA, 100 bp, Homo sapiens
gttcatgctgtgtgctggacgctggacagggggcaaaagcacctgctcgggcatcttcgtctcccgcattgccgagggcggtgctgctcaccgcgcgggc

SEQ ID NO: 693289 - DNA, 80 bp, Homo sapiens
tctatattcaaaaattctaggaccaaaacctcagtaagcaagctgtgtgggaagtgcagccccactgacgtggacatcct

SEQ ID NO: 693290 - DNA, 50 bp, Homo sapiens
gagggaagggacaagaagatactgccctgctggattgagccagagcaacc

SEQ ID NO: 693291 - DNA, 100 bp, Homo sapiens
cccggacgtggggcccaagcccccgtgaagatggtgtcctggatgatctccagagccgtggtaataagactgattttatgggaaaattaagcagatgctc

SEQ ID NO: 693292 - DNA, 100 bp, Homo sapiens
agagagcgagctgagtggttgtgtggtcgcgtctcggaaaccggtagcgcttgcagcatggtatggcctcacaagtcttggtctacccaccatatgttta

SEQ ID NO: 693293 - DNA, 75 bp, Homo sapiens
aaattttacccagaactgaagcttgcctatgccgttcgaggcaataaatgtcatctcgatgcactcctgaggggc

SEQ ID NO: 693294 - DNA, 50 bp, Homo sapiens
tatggcagctggcttgatattgggacaagatcctaattatctcatggcta

SEQ ID NO: 693295 - DNA, 90 bp, Homo sapiens
tggtgactggtctattcaagttcaagtgaatgagtgaaaaggctctcagtgtctgagttaaatgaaatcctggaagaaattgagactgcc

SEQ ID NO: 693296 - DNA, 83 bp, Homo sapiens
gggcgacccggtgtgtggcgcgcccagagccccgcgtttcagccctagggaagttactccacaggatccgctgaacataggat

SEQ ID NO: 693297 - DNA, 100 bp, Homo sapiens
cccagagccacttctcaccgagatgattcatgaaccactggacggatgtccaggtgaaggggacgtcgctgccccgagcactgcactgctgggacaggag

SEQ ID NO: 693298 - DNA, 90 bp, Homo sapiens
aggaaccagatatcttgaaaagctgccagaaaggatgagcacaagcctgggagatggcagtgatggaaatggcctgcccaggtgcccctg

SEQ ID NO: 693299 - DNA, 80 bp, Homo sapiens
gcgggccaggaagcgcatccaggagtgccatcagacaagatcagttgatcagaacagaaagctagctcggaaaatcctac

SEQ ID NO: 693300 - DNA, 119 bp, Homo sapiens
gaaaagatgggctacatgtgtacgcaccgcctgctgcttctagccatccgggtgacctgcataggttcctgcggggtctccaacaaggctaatgacacagcgtgggtagtggaggaggg

SEQ ID NO: 693301 - DNA, 75 bp, Homo sapiens
cccagagccaagtgcgagcccagcgggagaaaatcaaggagattggggaccacaaattcagtgcccaccggattg

SEQ ID NO: 693302 - DNA, 82 bp, Homo sapiens
cagagctgaggcagagggtggcccatgagccggttgcgccacccgaggacaagctcactgaaaactgaagctaatttggaag

SEQ ID NO: 693303 - DNA, 82 bp, Homo sapiens
cgcccgcgccggaagagccacgccggcacagagcatggagaatgatgaacttccgtcagcggatgggatggattggagtggg

SEQ ID NO: 693304 - DNA, 100 bp, Homo sapiens
ccagccgagggccatcgccttggaccccgctcacggagtgtgaacatggctacgcctcttcattcccgtccatgccgagcccccgactgcagcattcaaa

SEQ ID NO: 693305 - DNA, 75 bp, Homo sapiens
gcggatgtcggcgaagagttcaaccaggttctccagcatttggctcaaggccccaagggcacatgtgacaagaag

SEQ ID NO: 693306 - DNA, 89 bp, Homo sapiens
cacgtctggaataatgggtactctttcctcgtggaatttgaagattctacagataaatcagactattgcccagaagaaaagatgtttgg

SEQ ID NO: 693307 - DNA, 100 bp, Homo sapiens
ggaaaccagacttgttcagctggacagtgctatcagcatggaattgtggcaggatgtctcagtggtacgaacttcagcagcttgactcaaaattcctgga

SEQ ID NO: 693308 - DNA, 75 bp, Homo sapiens
gcaatcaggggacaatgtagtaaagtcatccgtccttggctcaggatttggagagcttgcaccaccaaaaatggc

SEQ ID NO: 693309 - DNA, 100 bp, Homo sapiens
atctcccgttccctccgccctatggaccccaggggccttaccgataccccactcctgatgggcccagccccatcttcccgggaagccagccgcccaccag

SEQ ID NO: 693310 - DNA, 100 bp, Homo sapiens
caaaaaactatcaagttgggatcaggcagagcaggaagctaggaaacctggcagtgccagctgatgagaagtggaaagcggtgtttgacgaatgttggcg

SEQ ID NO: 693311 - DNA, 83 bp, Homo sapiens
caggcatctaatgttcttagtgacattagtctccaccagatctgcagaattctgaatgcccatatggactccctgcagtggat

SEQ ID NO: 693312 - DNA, 50 bp, Homo sapiens
ggcaagctacaataatggggccagaagcaagatttccagatgtagcaaat

SEQ ID NO: 693313 - DNA, 100 bp, Homo sapiens
tgtcaagctgtgcagcatcaaagaggcaggagcagcctcgtcttacagcgtgactgcaaagaaaaagacttttgttttgcaaaagaaaagcagctcggtg

SEQ ID NO: 693314 - DNA, 95 bp, Homo sapiens
atggggaaaatctccccggtgactttcaggatctcaaagatttcatgagacaagctggggaagtaacgtttgcggatgcacaccgacctaaatta

SEQ ID NO: 693315 - DNA, 74 bp, Homo sapiens
gaaagaatgcttcgcctcagtttgaacattgaccctgatgcaaagaagggagagaaggtacccaaagggaaaaa

SEQ ID NO: 693316 - DNA, 75 bp, Homo sapiens
cagcacttaagcaaacgggaattctcgcggtgggtatatggctgccaaggtccagaaattggaggaacagtttcg

SEQ ID NO: 693317 - DNA, 82 bp, Homo sapiens
gaagagattcagccagcacactcctcgcgagcaagcgtttgcctcagcatggagggcggggccgcggcagccacccccacag

SEQ ID NO: 693318 - DNA, 83 bp, Homo sapiens
ctgaaaagaggctttggttttgtgatgagttttgatcatcctgagaaaaatgggccttggcctgcagacccaataaaccttcc

SEQ ID NO: 693319 - DNA, 75 bp, Homo sapiens
tggcggcggtgaccctgcagacatcatccatgacttccagcggtgggaagtggtggttcaagtggaggatgatgg

SEQ ID NO: 693320 - DNA, 100 bp, Homo sapiens
ggacctcacttccccggggtgtaataatgttaactgagaagaagaagaggacagtgctccagtgaaagtggaagaacaaaggaagatgagtcaggatagt

SEQ ID NO: 693321 - DNA, 101 bp, Homo sapiens
gaaggaacttggttccccctccctcagcttccgccccaaaagttcaatcaatgtactgaatataactgctgaagaaattaaaccaaatcaggttggaggag

SEQ ID NO: 693322 - DNA, 100 bp, Homo sapiens
ccggccacctctgagaagggagacgacgctgctgggtccgctgagcggggcgacccgaggttatagctcagcaagtgtcagataaacacttggaagaggg

SEQ ID NO: 693323 - DNA, 100 bp, Homo sapiens
gggtcagtggtggaagtgagaccgaaatagactctgaagtaatatctggactttgaaattgacgatgctgaaggagcagtacattgacaggacgcgcgtg

SEQ ID NO: 693324 - DNA, 97 bp, Homo sapiens
ccctttctcctcggcactgtattctttacctgcttcccaatcccactgatgaggatcagcccatggttttgcacactagggaccaagaagccctcgg

SEQ ID NO: 693325 - DNA, 75 bp, Homo sapiens
cagccctcctgatactcaagaaattcatatcttgcaggagagagagttactgcctgtgaagaaatttgaaagtga

SEQ ID NO: 693326 - DNA, 100 bp, Homo sapiens
tgaggaagtactgagcctgttggaggaactggcccggaaacaggaggacccactgaggcggctcccagctgcgttggcgacatggccgacacccccagag

SEQ ID NO: 693327 - DNA, 85 bp, Homo sapiens
tatccccagattaactctccgagtcggtgctggccaagacaagatgagcagcaaatggatttctcatggaagtttgtgttgattc

SEQ ID NO: 693328 - DNA, 74 bp, Homo sapiens
cttattcttcaactcagcatgttcctgtttatctggcaagactgaggcaaataagactacagaatttcaatgag

SEQ ID NO: 693329 - DNA, 100 bp, Homo sapiens
gggcaccatgagcgacgtggctattgtgaaggagggttggctgcacaaacgagaaatcaccaagccgccctcagacgacagcccggcccacagcagtgcc

SEQ ID NO: 693330 - DNA, 100 bp, Homo sapiens
gcgtatattaatgaagagtgtccggacccggctgaggacacccatgaaccttcccaaagagtggagtcaacatatcaatggagcaagtcacagtcgtcga

SEQ ID NO: 693331 - DNA, 100 bp, Homo sapiens
cagggccctgcagctggaagaggagctgttccaggttgctgctaaaaccttgcctttttataaggactacttcaatgttccttatcctctacctaaaatt

SEQ ID NO: 693332 - DNA, 100 bp, Homo sapiens
ctaagatgctgccgactctgggcggcgaggaaggcgtctcccgggacccagatgatgtggtaccagttggccaaagaagagcctggtgttggtgcatgtg

SEQ ID NO: 693333 - DNA, 74 bp, Homo sapiens
ccagcccgtgcgcctgttcaggggccggacctcggtgaactactgagttcttcattatgtctgatggagattat

SEQ ID NO: 693334 - DNA, 74 bp, Homo sapiens
gaaggtgaagatgggttggatgaaatttattcattcagtgagttctctggtgatgttgatagcctggaactggg

SEQ ID NO: 693335 - DNA, 100 bp, Homo sapiens
cccttcctgggcatgcgtcctccaggcccacagtacactccagacatgcagaagcagtttgccgaagagcagcagcaggatgtagccaatcaaatgtgca

SEQ ID NO: 693336 - DNA, 75 bp, Homo sapiens
gcacttgttgcagaaacagccaagggggggccctcagcctcttggccttgaacgggctgttcatcttgattcaca

SEQ ID NO: 693337 - DNA, 100 bp, Homo sapiens
ctttatatagaagggagagtagcaacaaggagtgaggatcttcataatgctctacaaagaggtggaactcgctcttggcatcaatagtgaatacaccaag

SEQ ID NO: 693338 - DNA, 100 bp, Homo sapiens
aggctgggagtgtctgctgatcacttggagtgctgtcccttggaacaggaggagtaagattgagataaaatctacgtggttgacttgagtaatgagcgag

SEQ ID NO: 693339 - DNA, 100 bp, Homo sapiens
cgcattgacagctggattgttctgagacctgcctctcctcctgcctcctctttcctccctgaccatgctcccaaagagggtctcggtctgtcgcccaggc

SEQ ID NO: 693340 - DNA, 126 bp, Homo sapiens
agcaggagatgggctcagcagcagccaataggacatgatccaggaagagcagtaagggactgagctgctgaagtgaacatccacttgcccagctttactgccattcaatcatggaacaccatcatt

SEQ ID NO: 693341 - DNA, 100 bp, Homo sapiens
ggggtggtgccgcgctcctggccccgcgcgggcggacggcggaggcgcctcccaggttcatcatgcctagtggcgtataagaagaccccgccaccggtcc

SEQ ID NO: 693342 - DNA, 100 bp, Homo sapiens
cagtggcgatgacagctgtaaagcacgaacaggaatacatggaagtccgggagagaatacacagagccagcatgtcagagcgggagcgacaggtgatgaa

SEQ ID NO: 693343 - DNA, 99 bp, Homo sapiens
actggagaccggggttgtcaaaaaactctacactctggatggaaaacaggcattgtatctgatagccactaatggaactccagagctccagaatcctga

SEQ ID NO: 693344 - DNA, 100 bp, Homo sapiens
gaagccttgaggacctactcacagataggaattgaagaggccctgaagcttgagcgggatacaactggctatgcctatctgaatcatgaagtatccagag

SEQ ID NO: 693345 - DNA, 100 bp, Homo sapiens
tttagatgatgattataatggacaagccaaggtaaatacggcatcatctgcatggaggatttgattcatgagatctatactgttggaaaacgcttcaaag

SEQ ID NO: 693346 - DNA, 82 bp, Homo sapiens
gtgaatttgcctcggggacgcctctccagacaatgcagatcttcgtgaagactctgactggtaagaccatcaccctcgaggt

SEQ ID NO: 693347 - DNA, 98 bp, Homo sapiens
gcccggaggaacattccaaaggaaaaatttcaggtacatggactatatcgcacaacaggtgctagttttgagaaggcccaacaggagtttgcaacagg

SEQ ID NO: 693348 - DNA, 83 bp, Homo sapiens
agagattcagccagcacactcctcgcgagcaaggctccataaaaatacagactcaccagttcctgctttgatgtgacatgtga

SEQ ID NO: 693349 - DNA, 100 bp, Homo sapiens
atgtttggccggctatggagcttaccgtgtctccaatgacaaacgagatgtaaaagtgtcactgtgagcctcctcaacaagcccaagagtgagatgaccc

SEQ ID NO: 693350 - DNA, 49 bp, Homo sapiens
ggtgtgaaccagacccccgtggtagacgattggccatttgatgatggag

SEQ ID NO: 693351 - DNA, 82 bp, Homo sapiens
ttcggtggactccttcggcagtccacccaccgccgccgcctcccaggccatgcggaccctcagttggaagcacaccctgggc

SEQ ID NO: 693352 - DNA, 82 bp, Homo sapiens
tttgagctggtggaagtggttggaaatggcacctatggacaagtctataagcagatccagagccagagctctacctcgatcc

SEQ ID NO: 693353 - DNA, 90 bp, Homo sapiens
aacatctctaagcaagttcttgatcagtatctcactctgctggcagatgatccaagagacaagagagacacctccaacttcgacaaagag

SEQ ID NO: 693354 - DNA, 106 bp, Homo sapiens
ccgcagccttgggcctcgcgccggctatggccgtgccctggggctgagccctcagcccgtggaccgggagcccgtggaccgggagccggtggtgtgccaccccgac

SEQ ID NO: 693355 - DNA, 107 bp, Homo sapiens
cagattcagcagcggcagcagctggagaaggtcgtggagcagcaccttgcctgcagacttaattcagtgcacaaatgagatgaatgtgaacatcccacagttggcag

SEQ ID NO: 693356 - DNA, 96 bp, Homo sapiens
agatcctgtgctttactctgaagactcatgctgcagttggagaagaaacttgaacgtgaacttgaggatgatgcacgagttattgcttgccggttc

SEQ ID NO: 693357 - DNA, 82 bp, Homo sapiens
cccacccgccgaggggcccagggaggacgcgacctgcctagagctggaacgttacctccagagcgagccctgctatgtttca

SEQ ID NO: 693358 - DNA, 101 bp, Homo sapiens
gccgccagggtctgcagggcctgggccgccgctgctacctgcagcgccgtgtggcacgacacaaaaatcaggccaggaccaaaccgtcacgagccaggtgg

SEQ ID NO: 693359 - DNA, 87 bp, Homo sapiens
gggcaagtggataccctggggctgagaggaatcttctggagtactcttattttgaaaagtccaacgtggagcacctgacggagaaaa

SEQ ID NO: 693360 - DNA, 120 bp, Homo sapiens
cattttcaattgtatttccgttcatttacaagttattttctcttcttctgaaaaagagatcttgtattgttatgacagcagagggtgatgctccagagctgccagaagaaagggaactga

SEQ ID NO: 693361 - DNA, 101 bp, Homo sapiens
caccccggggccgggcagaattgggctccaggtgtggccgacgacgatgccctcgctgaggagcgcatgcggagaggccagaacgccctgccagcccagcc

SEQ ID NO: 693362 - DNA, 51 bp, Homo sapiens
cacggctctcaacagcatcgactccgatgcctcctgacaaggtgatccggg

SEQ ID NO: 693363 - DNA, 75 bp, Homo sapiens
ggatttgccagggcatgtagctctccaggcttgcaagcgattaccaggctggacgtaaagaaagaagtgatgcac

SEQ ID NO: 693364 - DNA, 125 bp, Homo sapiens
ggcgtggtgagatacgtggggcctgccgacttccaagagggcacgtgggtcggcgtggagctcgacctgccctcaggtcccttcaccgatgttgtcaccaccaacctaaagcttggcaacccgac

SEQ ID NO: 693365 - DNA, 50 bp, Homo sapiens
aaatgtttgacgacactgatggtttggttgcacagagcattgaggatcac

SEQ ID NO: 693366 - DNA, 83 bp, Homo sapiens
tgaagagcgagagaaaagagaggacagcggacgagcagatccggtgagaagccctaccactgcaactgggacggctgcggctg

SEQ ID NO: 693367 - DNA, 73 bp, Homo sapiens
gaaacaacttctactccaggaagtggagaatcacaaaaagcagatgctcaggcctgtttaaagaagaaaaccc

SEQ ID NO: 693368 - DNA, 100 bp, Homo sapiens
atcaggtaggctgcgttgaggatctttgctcttccatccgcctttgatcgtcttcctcttcagccatccaggacgtggtgggtcctctggtgcgaaattc

SEQ ID NO: 693369 - DNA, 89 bp, Homo sapiens
ggatcggggacggagagaacacgagcccatcagatcctcggggagcttccggagcactgtgcctacatcatcatctacgggatgcccac

SEQ ID NO: 693370 - DNA, 96 bp, Homo sapiens
ggcttctctacgcagaacccgggagtaggagactcagaatcgaatctcttctccctccccttcttggcagttcaattaacctccagaagatggctg

SEQ ID NO: 693371 - DNA, 90 bp, Homo sapiens
gcccggcatcggaatgttcgaggctataactacgatgaagggacagagcagaatgggctgatatagatccggtgccgcagaatgatggcc

SEQ ID NO: 693372 - DNA, 100 bp, Homo sapiens
ggtcgcctagtaaacggggctgctggtgggccgcgtcgaagacatggaccagggctacggaggtgagcgagtgctgtgctttcatgggcctcttctttat

SEQ ID NO: 693373 - DNA, 75 bp, Homo sapiens
agaggggatcccttccgtttaaacatctccctctttcagataaagtcagacctaaagccaaaaggaaagaagaac

SEQ ID NO: 693374 - DNA, 74 bp, Homo sapiens
ctggaccagctcatgggcacggctcgggacgaggcagagaagaagcgtgaggctaagcagcgagctaaggaagc

SEQ ID NO: 693375 - DNA, 82 bp, Homo sapiens
ggtttggacgccggcggagacgcgggcgaggcagttgtgaaaaacttcaggacaaaaatgtttcatttaaggacttgtgctg

SEQ ID NO: 693376 - DNA, 82 bp, Homo sapiens
aggatacttgggactacacaaaccccaatctcagtggacaagatcaatgtccgagttaccaccatggatgcagagctggagt

SEQ ID NO: 693377 - DNA, 75 bp, Homo sapiens
aaactctttgtccaggatctgaccacccgagttaaaaaatctcggaagggtgctgacctggaccgggagaagaag

SEQ ID NO: 693378 - DNA, 82 bp, Homo sapiens
atgaagtgtgattcaaggtgggaaatagccgcttcagccttatgccagcctggaccatcttggaggcagtgtaggatcatgg

SEQ ID NO: 693379 - DNA, 100 bp, Homo sapiens
agatccgggagcggcagaagttacggcgacagctcctcgcgcagcagattggttatacaagtgttcagttcagaaactggttgtagttatctcaaatatt

SEQ ID NO: 693380 - DNA, 132 bp, Homo sapiens
gaggattggaggtgtcagtgttaaaggaacctctacaacgaaggtgaagccacggaagataagtacctggagtagaacagaaaaattattatgtctgtgttcccttgggactcattggaaattgtacagtga

SEQ ID NO: 693381 - DNA, 98 bp, Homo sapiens
acgtgtcgggtgtcccttctggatggtactgatgttagtgtggacttgccaaggtaccaatcttgggaaaaagaagcaacacatttgtcatataccag

SEQ ID NO: 693382 - DNA, 83 bp, Homo sapiens
ttgggtccgaaggggacggacgtcctcccacgtaccatttagaagaatgccagaggattcaacatgagcatacctatgcctgg

SEQ ID NO: 693383 - DNA, 100 bp, Homo sapiens
ccggttttgagaggggaagatggggacaaagccgctccacctcccatgtcggcacagtcttactactttgaccgcgatgatgtggctttgaagaactttg

SEQ ID NO: 693384 - DNA, 100 bp, Homo sapiens
tataacctagaccagtcctgtttgcctcatgatatcagggccatcactgtgcatgtccccatgccctcagcaggagtcgtggacatccccattgtggaga

SEQ ID NO: 693385 - DNA, 100 bp, Homo sapiens
cacgtcggctcccacgcttagccagctcccggttttagctaaagaagatactgaggcagctattcaatcaatattatacaaagaaaattctgtaattaag

SEQ ID NO: 693386 - DNA, 82 bp, Homo sapiens
ccgcgttcacagccccagcgcaggtacggaatggccacatcaaaagaatcactgataatgacatccagtccctggtgctaga

SEQ ID NO: 693387 - DNA, 98 bp, Homo sapiens
agcctggaaggtgcgtgtggggctgggtctcggagtgggagacgtggagtgcagattctgaaaaagagttccacgtcctcccttatcgagtctttgtt

SEQ ID NO: 693388 - DNA, 98 bp, Homo sapiens
tgtgaccctgcagctcctcaaacatcacaatggggttgcctctgagcccagcagctgactcggcccgctctgcgaggcatgccctctcgctcattgcc

SEQ ID NO: 693389 - DNA, 80 bp, Homo sapiens
cggagcatgtcgaccccggcccggaggaggctcatgcgggatttcaagcggattttttatcaagcagaaatgcatcgaac

SEQ ID NO: 693390 - DNA, 48 bp, Homo sapiens
aggaccgcgacggcagcagagcaaatatcaacttgcaaggccttctga

SEQ ID NO: 693391 - DNA, 90 bp, Homo sapiens
tgaggagactcagctcttccacatcccccgggttacctccctgaagctgtagggccttgtggtcaccatccaggggagactccacctctc

SEQ ID NO: 693392 - DNA, 103 bp, Homo sapiens
tggggaccgccctggacatcaagattaaaagagcgaataaagtttatcacgccggggtagcagaaggtcaagaaatttgtgtgattgaagccatgaaaatgca

SEQ ID NO: 693393 - DNA, 83 bp, Homo sapiens
gtgacaccgagccggacccagcgcgacctgcggcggctccgggcctggtccgacccccagtggcactaacgtgggatcctcag

SEQ ID NO: 693394 - DNA, 100 bp, Homo sapiens
agcgcccagaggccggcgggagctccaggttcacctcctcctcctccaggagttattcctgatgaagctaaagctttgtctctgttggcaccagctaatg

SEQ ID NO: 693395 - DNA, 74 bp, Homo sapiens
cccgtgcccaggagcttgacgccttagataacagccatcctattgaatttgccaggcagtatagcaggaatgag

SEQ ID NO: 693396 - DNA, 74 bp, Homo sapiens
gagccgtgtggaccaggaggagcgctagcacaggaagcttggaaacatgactgtgacggtgaagaagactgtcc

SEQ ID NO: 693397 - DNA, 82 bp, Homo sapiens
taaggcgagccggagaccgagcccgaacagcagacctcctgccccccgaggtctgcagtctcctgaacccagcagccatcta

SEQ ID NO: 693398 - DNA, 75 bp, Homo sapiens
cagattcgcagtggtcgcttcttctccttggtcagcagatccggaagctcatcaaagatgggctgatcatccgca

SEQ ID NO: 693399 - DNA, 96 bp, Homo sapiens
atcaacatactttagacaatttggaaaaagaattacaagtgctgagatctcttgcagaatatgagttggaagtaaagagggtgcaagacattcttt

SEQ ID NO: 693400 - DNA, 82 bp, Homo sapiens
actcatgatgtaccagtttcaaagaagtttcatcaaagcagcaactcggtgccaatgccttgctcttcgtcggtgtgaacat

SEQ ID NO: 693401 - DNA, 96 bp, Homo sapiens
gagaagatgaaggaagactgtctgccgagttctcacgtgcccatcagtgacagcaagtccattcagaaaaaaatccagttacactcttaaaggaat

SEQ ID NO: 693402 - DNA, 95 bp, Homo sapiens
agagcttctcctcatcaactggggatgattacagttcttcctaaaaaagggcgccaatgcttcggcattagagaaagagattggtccagaacagt

SEQ ID NO: 693403 - DNA, 82 bp, Homo sapiens
caggtgctagcgctgctgggggccgcccatgaaagcgcagccatggcgggtggacgcggatctgtcaacatgggtaaaggag

SEQ ID NO: 693404 - DNA, 100 bp, Homo sapiens
ttccttacttctccgccaacgcggtcatctcgcagaacgccatcaaccagctgataaaagaatcagagtgtctcaacccttgacaagaggaccaagtgcc

SEQ ID NO: 693405 - DNA, 97 bp, Homo sapiens
agtgcagggagttcccgttacaatcactagtgttgcagactgggacagggagaaattacttgaagcttggatgtccaacccggagaactgctgccaa

SEQ ID NO: 693406 - DNA, 83 bp, Homo sapiens
gttaactgctaacttttctgtaaccaacctggagatacagcagcgacatggattagccaattccatttcttcctaccttatta

SEQ ID NO: 693407 - DNA, 75 bp, Homo sapiens
gatcatctacagcatcccccccggcattcaggtgaagcatcagggcctgaacaagaacatcaacctggactctgc

SEQ ID NO: 693408 - DNA, 75 bp, Homo sapiens
attttggggcagaatacagagatatggaatcaggtggtcaagaagaatacgtcttatcttatgaaccagtgaatc

SEQ ID NO: 693409 - DNA, 80 bp, Homo sapiens
cagcagtggacgtcccaactcggcaaaaccgttttgaggtgatggcccgctccctctccccacccccggagctggaagaa

SEQ ID NO: 693410 - DNA, 98 bp, Homo sapiens
gacgaaccttggagagaggagaacgaacatcttctggacctttgtccagtgttggataccaatgatagattcctgaggaagatcacgattggacaggc

SEQ ID NO: 693411 - DNA, 100 bp, Homo sapiens
ctatttcagaactgttctcaggactcattattttaacatttgggagaaacacagccagaaggtcatgagagaatgggaagaggcagaacgtcaagcaaag

SEQ ID NO: 693412 - DNA, 90 bp, Homo sapiens
gaagatcctctgggtgatcatggttcagcgctttagcctcaggaggcagctatccaagcaaagatgtcaaggaagttaagcttacctact

SEQ ID NO: 693413 - DNA, 88 bp, Homo sapiens
gcctttcacttattcatctgtccagcatgactcatccccgggagtgttgacaatcatcctcttccagtggtagcgtgtttgggtctgg

SEQ ID NO: 693414 - DNA, 97 bp, Homo sapiens
gaagcctgtaggaaagcggaagcggcctggcaggggaaggatcgagtttcagcaagttcgtgagcagatggaggcagagatagctcacttgaagcag

SEQ ID NO: 693415 - DNA, 85 bp, Homo sapiens
tcgacttcatgctcggcgccaaagagctttcagcagaggccaaggcagcattgcttgaatttgaagaaagggagcgacagcataa

SEQ ID NO: 693416 - DNA, 100 bp, Homo sapiens
agaggtccgtgcggcagcagctccagagctttgtcaaagaatgaggagctctatgctggtgtgtacatcgattttatgggcactgatgcagccatcttcc

SEQ ID NO: 693417 - DNA, 100 bp, Homo sapiens
ggcaggaggggcggcccggtccgggttgcgcctcctggagccgcccccgggacgtcagtcctggaggaggcgagggtgccttatgcctctggcatgccca

SEQ ID NO: 693418 - DNA, 96 bp, Homo sapiens
taaaagccagggggaaattgacaaggccataaagttcctagaaactgcaaggaactcattatacaatgacaaatggaggcagcattaacagttcta

SEQ ID NO: 693419 - DNA, 100 bp, Homo sapiens
ctgtagtgccggcgccgccgcgtcttcccggtctcctttcccggccgcacagggaatttatgcaaatattctcatgaggttctctcagaagagaacttca

SEQ ID NO: 693420 - DNA, 95 bp, Homo sapiens
aggattgtgacatatcgttggacccagaattgaggaatgtatcctgtcaggtataatgtcagtgaatggcaagaaagttcttcatatggatcgaa

SEQ ID NO: 693421 - DNA, 100 bp, Homo sapiens
tctggaagcagaggaagtagtttaaatgatacctatcactcaagagactcttcatttagattggattctgaatatcaggatctattaggattatgtgaac

SEQ ID NO: 693422 - DNA, 96 bp, Homo sapiens
ggattcattggcttctttgtgaaattgatccatattcctattaataacatcattgtgagttgccgtgtggctcctctcatccagtgtgactattgc

SEQ ID NO: 693423 - DNA, 98 bp, Homo sapiens
gacgggcgaatagccctgctgcccggtgccttgagggggtctcagggcagcagcatacaaggtggctataacagagaggaatgtcttcgaacagtcga

SEQ ID NO: 693424 - DNA, 74 bp, Homo sapiens
tcccaggaaccattggataaggataaagagctcagagttctacagagtcaccactgaacaatatcagaaagctg

SEQ ID NO: 693425 - DNA, 83 bp, Homo sapiens
ttttccggggccctctcagcaagaacgggaacaaaactctgaaactacatcaagcagcatgcttgattcaagcctattggaag

SEQ ID NO: 693426 - DNA, 98 bp, Homo sapiens
cggaggacgagctccgggatgctgtactccttgtctttgcaaacaaacagtttctgtaacctaacagctatgtttgcaatagagacatttggactgat

SEQ ID NO: 693427 - DNA, 83 bp, Homo sapiens
cctcggcctccggcgcagcccggaaatgtccggcaagatcgagaaagcaggttttgagcaaaattttggactgtgaagcaagg

SEQ ID NO: 693428 - DNA, 80 bp, Homo sapiens
tgagggtcaacgtcaagcgggagtatgaccacatgaatggatccaggaactgtggctgcaccatctgtcttcatcttccc

SEQ ID NO: 693429 - DNA, 100 bp, Homo sapiens
gtggtctggagaccatggagaccctcacggagctgggcgacgagctgaccctgggagacatcgacggtgctggagaatctggtaaaagcaccattgtgaa

SEQ ID NO: 693430 - DNA, 100 bp, Homo sapiens
cggtgctgtggtgcagagctagttcctctccagctcagccgcgtagtgaggtgctggcggaggagtccatagtatgtctgcagaaagccctaaatcacct

SEQ ID NO: 693431 - DNA, 100 bp, Homo sapiens
aggtgccgcgcggcctccacctctgcgatgtcaagccctccaacatcctagtcaactcccgtggggagatcaagctctgtgactttggggtcagcgggca

SEQ ID NO: 693432 - DNA, 100 bp, Homo sapiens
gctgcgtccgcactcctgttcctggtcctgacgcccccctcccgcccggaaagctgcccagccaccagcaaccccccagcggctggactctattacctgg

SEQ ID NO: 693433 - DNA, 48 bp, Homo sapiens
ctggcctcgcttctgtcccatgagggccccaaggctgttgcagctcct

SEQ ID NO: 693434 - DNA, 80 bp, Homo sapiens
tcccgccggccgtctccttaacaccgaacacctcaggatggctaaaggtgaccccaagaaaccaaagggcaagatgtccg

SEQ ID NO: 693435 - DNA, 95 bp, Homo sapiens
ggatcgtgaccgagaccgtgaccgagagcgtgaccgagagcgcgaatatcgtcatcgttagaaggtgcttgaggaatccaaagccctcgtgcgct

SEQ ID NO: 693436 - DNA, 75 bp, Homo sapiens
ccttgatgataaaccagtaaatggcctattccactagaagcaagatggctgaactcaatactcatgtgaatgtca

SEQ ID NO: 693437 - DNA, 103 bp, Homo sapiens
ccggggatgaagcgagactgcgggggtgctgcggccgtcctgggggccttcagagccgcaatcaagcagctcagcgatgcctgccgctttcaagaggatcagg

SEQ ID NO: 693438 - DNA, 96 bp, Homo sapiens
gataagaattttgataaaatcagagtgtggctgcaaagtgaaaagcttgaacgcataatcaccagcaacacccgggacaataatacgggggccacc

SEQ ID NO: 693439 - DNA, 80 bp, Homo sapiens
cactaacgagattcaagattatttgcaacagctcacgggagcaagaacgacaatgcagatcttcgtgaagactctgactg

SEQ ID NO: 693440 - DNA, 75 bp, Homo sapiens
tcgctgggctgtcggcctggaccttgcagccgcaatgggtttcatcaccttaaatggttttgaaccaatgaaggt

SEQ ID NO: 693441 - DNA, 82 bp, Homo sapiens
gaaatctcctgacagtgttaatggaagtgaaccaagcattcctcagatttccatggagaatgattatctgggacctcgaaga

SEQ ID NO: 693442 - DNA, 100 bp, Homo sapiens
gccggaacagctacaagcggtcagccgccctcagccagttcgtgattcacaggagcctctgtatcagcaccatgcaggaaggtgtcttgctgcaggtaac

SEQ ID NO: 693443 - DNA, 100 bp, Homo sapiens
gaagagtcctgaccacaatggggaggacaacttcgcccgggacttcatgaaaaagcttgtggtgaaggggggcaaaaaaaagaagcaagttctgaagttc

SEQ ID NO: 693444 - DNA, 123 bp, Homo sapiens
aggagccccacggagcgctgcggagcgaacctcacctttccagggcgcaagggggctgttgtggttccgactataaacagtacgtgtttggcggctgggcctgggcctggtggtgtatctccg

SEQ ID NO: 693445 - DNA, 74 bp, Homo sapiens
gtgcagtatttccagtctgtctcagccattgacctcatcaacaacctgctgcaggtgaagatgcgcaaacgcta

SEQ ID NO: 693446 - DNA, 75 bp, Homo sapiens
aagtgtattgattctgcaaatttaaagcttgcatttgaatctttggctgtgattggaaatgctctaaccctcctg

SEQ ID NO: 693447 - DNA, 87 bp, Homo sapiens
gcctctcaccacttagaacccaacatggatttgatcaacctgctcacggtggacccccaaaagtacaagggcatatttaacggattc

SEQ ID NO: 693448 - DNA, 76 bp, Homo sapiens
ggtggccgccgcgcaggagcctcccggagctggagggtgtgaagacagagaatgaccacatcaacctgaaggtggc

SEQ ID NO: 693449 - DNA, 75 bp, Homo sapiens
tgcccatttactgcgaaaacctgcaacccagaggagagaagtggatgggccctatacctccagccgtgaatgcca

SEQ ID NO: 693450 - DNA, 82 bp, Homo sapiens
gagcgcaaggacagcgcgaggtccgcgcagcccagcgcagccatgataaacatcacgatgctgctcatgaaatcatcgagac

SEQ ID NO: 693451 - DNA, 101 bp, Homo sapiens
gatatctctactcgctccaaaggatgctgatatgctaactggtgatgagcaagtatggaaggaagttcaagaatccctgaaaaaaattgaagaactgaagg

SEQ ID NO: 693452 - DNA, 75 bp, Homo sapiens
ctcagtttggtgctactgcaggaacagaatgccgtggagccgccaccaaaatgcagattttcgtgaaaaccctta

SEQ ID NO: 693453 - DNA, 112 bp, Homo sapiens
cgttaagtcccccaaagatgagatttacctgtgagatgtttcatcccaacagtgtcatggagaaactccagctgggcccagagattctgcagcgggaaaatccaaggcttat

SEQ ID NO: 693454 - DNA, 50 bp, Homo sapiens
tttgccaggtgtttgttaccttggattggtggtgatcctcaggaaatggg

SEQ ID NO: 693455 - DNA, 85 bp, Homo sapiens
acaccaaaaatggaaattttcaagacctggcatcaggctcctttctgtcaagggggtgttgtgtcctacaggatgtcagttgcaa

SEQ ID NO: 693456 - DNA, 100 bp, Homo sapiens
tttgaatcgctgagcgatatcacagaacacaagattaatcaatgtcaactgacagataaactgccagggagaagaatgagaagacaggagacaaactgtt

SEQ ID NO: 693457 - DNA, 74 bp, Homo sapiens
gtttagtagcagccttaatgcttgctaagtgccttcaggctaaagtaaataatgccagcctgattggactgggt

SEQ ID NO: 693458 - DNA, 98 bp, Homo sapiens
cttcagggaagatgggaggcgaggagaagccggaatggcggcgctagatagtaaggcatcagggaagatgggaatgcgagctgtagtctattatatga

SEQ ID NO: 693459 - DNA, 98 bp, Homo sapiens
ttgagattgcccgagaagtgaccccagcaaaagaaaaatattgctgtacctaaattcaaaatgaaaaatccccagggcgatctgcaagtcgatcaagt

SEQ ID NO: 693460 - DNA, 100 bp, Homo sapiens
gaagtggatccttcccccgaaagcccggctttcagaggtgctgatactcaaagaaggtttaagttgtctgatctctctataaattccactgaatgtctac

SEQ ID NO: 693461 - DNA, 75 bp, Homo sapiens
cggcctcccaaagagctgggattacaggttgcctgtggctggagaaaggaatgtgctcatcaccagtgccctccc

SEQ ID NO: 693462 - DNA, 96 bp, Homo sapiens
gtgactcttgggtccgaaggggacggacgtcctcccacgtaccatttagaagcttggagctcggcggcacaaccagcaccatctggtcgcgatggt

SEQ ID NO: 693463 - DNA, 75 bp, Homo sapiens
gcctggcttcccagtgcatggcgctcaagtctgtgcgccgcatccgtgtcattctggaccttactcccaactacc

SEQ ID NO: 693464 - DNA, 87 bp, Homo sapiens
tttggcgtgcaacatggggcttgagaaaggatataccttagatgaatttggaacagccagaagaagtacagttgttcgtggatttat

SEQ ID NO: 693465 - DNA, 104 bp, Homo sapiens
gaagaaagcgagaaaggaacaggcgccttcaaaagcccacttggcgatgggttacagtaagagtgcgactggctcaacaattaccacctgacctgcagggatgt

SEQ ID NO: 693466 - DNA, 75 bp, Homo sapiens
gccgagcgggcggcttcctggcctgggcgctccggtggcggcggagggcgccctgcgtccggcagaggaggcgag

SEQ ID NO: 693467 - DNA, 100 bp, Homo sapiens
acgctactgccatgataataacataattcacagggatgtgaagggaagtagatcgagattcagatggtcacgtcagctttagagactttgaatatgccct

SEQ ID NO: 693468 - DNA, 48 bp, Homo sapiens
cctcccgagtggctgggactacaggctgcagtgcagtggcgtgatctc

SEQ ID NO: 693469 - DNA, 97 bp, Homo sapiens
ggatggtggaggcgagaacactgaggaggtttccaaggtgctattgggagctcatgcactcttggccaacgggtctgtgatgtcacgggtagggaca

SEQ ID NO: 693470 - DNA, 50 bp, Homo sapiens
cccggacctcgcttacctgcatgctgggtgttcctgaaaagccccatagt

SEQ ID NO: 693471 - DNA, 83 bp, Homo sapiens
ccttcgccttcgccctttccacctcgcggcagttcggtgacccggccctgtagctacagcaagaagtcccactttgactttga

SEQ ID NO: 693472 - DNA, 97 bp, Homo sapiens
ggtcggagaggtcagcaacagggacatcgtggagacggtgctcaacctgcaacccttctgtggggctcaattttggaaatcttggaagtacttcaac

SEQ ID NO: 693473 - DNA, 75 bp, Homo sapiens
ccgagagcgcgaatatcgtcatcgttagaaggtggtgatattcgtgaagagtcttcctataaagtaattgtcatg

SEQ ID NO: 693474 - DNA, 100 bp, Homo sapiens
gtgagggaagcgtctccgttgggtccggccgctctgcgggactctgaggaaaagctcgcaccaggttatgaagacagtatggagtttccagaccatagta

SEQ ID NO: 693475 - DNA, 75 bp, Homo sapiens
taaagcagcgtgcgttcagccctggggacctgaaggagaagaaggagaaggtggaggagaaggcaagccggaaag

SEQ ID NO: 693476 - DNA, 74 bp, Homo sapiens
aaaaggcctaagaattttggcattgtaatagctcttcaagtctgcaataaaaaatggcctccaacaaaactaca

SEQ ID NO: 693477 - DNA, 50 bp, Homo sapiens
ctaccccccaagcagcggcagctgacctgcgaccgcatcaagcagtccgc

SEQ ID NO: 693478 - DNA, 50 bp, Homo sapiens
aatttaggatcttgttgaatccagtccagctgctgaatgccatggtggca

SEQ ID NO: 693479 - DNA, 80 bp, Homo sapiens
ccctggagcctcagttggaagcagccgatccagcctgcggagcctgtggggcagaccatgctcgacagctgaccaaggcc

SEQ ID NO: 693480 - DNA, 75 bp, Homo sapiens
catgcccattggctgttatctagccttatctatgacagctgtgggccacagacatcatggttgacacaccagacg

SEQ ID NO: 693481 - DNA, 96 bp, Homo sapiens
cccaacaacgccgagagagtcctccttaccacacaggttccgccatggagtcatagttgcagctgactccagggctacagcgggtgcttacattgc

SEQ ID NO: 693482 - DNA, 98 bp, Homo sapiens
aacattctgccgaagagaacaagacgtgtgaagactcaggctctctatgagaacatgctggtggagctgccctttgcaggcttctttctttccaagtt

SEQ ID NO: 693483 - DNA, 100 bp, Homo sapiens
gccagagccggtgcggcggccgcgacttccccgacgcggggcgctgagaagcaatgtcaaaatccacaggcaacttcctcactttgacccaagctattga

SEQ ID NO: 693484 - DNA, 100 bp, Homo sapiens
aggctgggcccagaatacataagtagccgcatggctggcggaggccagaagattggccgcgtaatccaggttgctgctgggagcagcaacctcaagagag

SEQ ID NO: 693485 - DNA, 75 bp, Homo sapiens
gggagtttgacaggcgattctcccctcattttgtgttacagcacatgaaggccgtgcaggcagatcaggagcggg

SEQ ID NO: 693486 - DNA, 100 bp, Homo sapiens
atcggggacggagagaacacgagcccatcagatggcagaaacggtggacacaagcgaaatggtcaacggcgctacagaacaaaggacgagctctaaagag

SEQ ID NO: 693487 - DNA, 98 bp, Homo sapiens
atgcagtacgccacggggccgctgctcaagttccagatttggttaaaaatctgtaagagcctgattttagaattcaccagctcctcagaagtttggcg

SEQ ID NO: 693488 - DNA, 75 bp, Homo sapiens
tcccaaaagacaggctcttcacctgaaggtgctggagaatctggtaaaagcaccattgtgaagcagatgaggatc

SEQ ID NO: 693489 - DNA, 105 bp, Homo sapiens
cgccgtccccagccctgcctctccctgggctctgaacatacatatgatagttgagaaagacacatattctgatcatgaagaaataaacacaagttaaatatgact

SEQ ID NO: 693490 - DNA, 89 bp, Homo sapiens
gagggtctggaggagccttctcaagaacagagatcgtgaggaccagtcaattctttgcacgtaagtaaatgttgaatgttcagatttgt

SEQ ID NO: 693491 - DNA, 88 bp, Homo sapiens
ggagcccctgcgggtgctggagctatacagcggcgtgggcggcatgcaccacgcgctgagaggccggtctaattgaagccaacggaga

SEQ ID NO: 693492 - DNA, 100 bp, Homo sapiens
ctgtttcacaacaccaggagttcagctatgggcagtttgggccatgcaacatgtctgcagcaagaatcaaactaatctggattcactccctctggttgat

SEQ ID NO: 693493 - DNA, 98 bp, Homo sapiens
tctagagattaacgactccgaagaggttgcaagtatttatactccaaccccaagacaccaaggtgtatgtggaatttgatgatcttgaatgggataaa

SEQ ID NO: 693494 - DNA, 96 bp, Homo sapiens
ttgaacagcagattttgtcaattgaccgagaaatgctagaaaaattgactgtatcctatgatgaagcaggcagtgggacctggtggtgtcaactca

SEQ ID NO: 693495 - DNA, 53 bp, Homo sapiens
tttgagatgagttacatcttggaggtttaatacaacatggaagccaccaaggc

SEQ ID NO: 693496 - DNA, 90 bp, Homo sapiens
ggagatcaacctgaggccgcagatgtcccaggctgttgaagctcaaatccgaagttttggacagactccttctcaactactcatagagcc

SEQ ID NO: 693497 - DNA, 75 bp, Homo sapiens
gcgcaaaggcatgagcaagaggcgactgcaagagctggttcaggtgtgggacacagcaggtcaggaacgtttccg

SEQ ID NO: 693498 - DNA, 109 bp, Homo sapiens
agccggtggagcagctgggctcggcgctgaggtttcgccctggctacaacgaccccatgtcaggatctcaggatgatggggcgcagccctgggtttgccatgcagcaca

SEQ ID NO: 693499 - DNA, 85 bp, Homo sapiens
gtgccgtcgctcatcaagcagcaggtccttaaggttggctttgatatgagtaaagaagctgcaagaaaatgctatgagaaatctg

SEQ ID NO: 693500 - DNA, 100 bp, Homo sapiens
ctctccaccgtactgttcctgcagctgttcctgattctacaggaaaatgtgggccccctccacctattgacaatggggacattacttcattcccgttgtc

SEQ ID NO: 693501 - DNA, 75 bp, Homo sapiens
ccacccgcttccgagggtacaccctgccccaggtgcaggtgatggtcctaccagtgtgtctgttgaggtcacccg

SEQ ID NO: 693502 - DNA, 75 bp, Homo sapiens
cggcgctggaggagcgaggcagctgtactaggactgggaacggagccaagagctgggtagagctgcaaggacacc

SEQ ID NO: 693503 - DNA, 82 bp, Homo sapiens
cggggtttcaccatgttagtcaggatggtctagtctatgcagtcgagttctcccaccgctctggccgtgacctcattaactt

SEQ ID NO: 693504 - DNA, 100 bp, Homo sapiens
ggaaaatctgttgacagcaaggtcccctctctgcagaaaatatttacaccagcagctccagttcataccaataaagaagatcctgctacccaaactaatt

SEQ ID NO: 693505 - DNA, 73 bp, Homo sapiens
ccacagccaagatggtagaggctgccaaggagtccttcaataatgttaaacagtggctgcaggaaatagatcg

SEQ ID NO: 693506 - DNA, 83 bp, Homo sapiens
gttcgagcgctgttctcgctccggagccgctgcacatttcgggggtctgccacatgtagaaagatatcttccaaaacgaaatc

SEQ ID NO: 693507 - DNA, 100 bp, Homo sapiens
aaagagaaacccggagggcgccggggaaggtgctcgggtcttcggggcactgggtcccatcggtccctcctcacctgggctcaccctcgggggtctggcc

SEQ ID NO: 693508 - DNA, 75 bp, Homo sapiens
acggccgggggcgtctttcagagcattacgatatgcacccaatgtccagggagcgtgcaaaatttgtcaaaagtg

SEQ ID NO: 693509 - DNA, 101 bp, Homo sapiens
tggggcccgacaagaacttcacgcgggagcagcaggttacgggcaggacttgagtggcttcggacagggcttctcagaccccagccagcagcctccttcct

SEQ ID NO: 693510 - DNA, 100 bp, Homo sapiens
ctcggccatccaagggtctcccaggtactggaagatgctcacagagatgccaacctgcaccatgtagcttgtaatatagtgaaaaaacctggcaacattt

SEQ ID NO: 693511 - DNA, 100 bp, Homo sapiens
ttcaagatgctctctctggaccgatcccacttctcacaccattttgctggtacagcctaccaagaggccagaaggcagaacttatgctgactacgaatct

SEQ ID NO: 693512 - DNA, 101 bp, Homo sapiens
gctggcgttaactgtgcggaggcagacggagccggtgggagaggagagcatctccgacgcagagaaggtggccatggatctcaaggaccccaaccgccccc

SEQ ID NO: 693513 - DNA, 82 bp, Homo sapiens
agccgggagcgctgactggcccggctgggcaggcctcccgcgacgatgcccctcaacgttagcttcaccaacaggaactatg

SEQ ID NO: 693514 - DNA, 100 bp, Homo sapiens
ggacagcatcagcatcatcgacacccccgggatcctgtctggagagaagcagcggatcagcagagcaatggctgccatccggaagaaactggtgattgtt

SEQ ID NO: 693515 - DNA, 100 bp, Homo sapiens
tctctcgctgcgtcacagtccatggctccaatggcttgttggtaatcccgtttgttggcaccattcctgatcagctggatcctggaactttgattgtgat

SEQ ID NO: 693516 - DNA, 140 bp, Homo sapiens
ctgcgcgccgccagccgccgctccgagaggctgcaccggccgccggtcatcgtcctgcagcgcggagcctgcggccaagacaagttggatggcttgaggactggtactaaaaggaaacgtgactgggaggccattgccag

SEQ ID NO: 693517 - DNA, 90 bp, Homo sapiens
aagatggcggacggggagctgaacgtggacagcctcatcacccggctgctggaggggccgcgatgggcctcttggaacattggtgtgttc

SEQ ID NO: 693518 - DNA, 98 bp, Homo sapiens
acaccagtgacagttaagattcccaaggctcggaagaggaagagtaatgaaatggaggagtgtgtaatgctgtgtcatggagctaaaatcggattttt

SEQ ID NO: 693519 - DNA, 96 bp, Homo sapiens
cgaggaaagatctgcatatgggatgtttccaaacttatgaaggtatcctccatgaaatgtgggatccttccaatttctcaagagtctcttcttctg

SEQ ID NO: 693520 - DNA, 98 bp, Homo sapiens
tccatcgaacattccgagaatgcgagagaaagagcctccgtcaccacatagccataggaaaaggatacagagtagagtttcatgaacctgaaacttgg

SEQ ID NO: 693521 - DNA, 100 bp, Homo sapiens
cggacgtctctgtggattcagtggatgcagcagctgatgccgccaggtccaacagaatttccattcaggaaatgccagctgcaggacgtggtcactcagc

SEQ ID NO: 693522 - DNA, 100 bp, Homo sapiens
ctgacatcacattgatacatgctggaggtctggctcagagtgcccttatgcctgcacagttgttttttaagacggaagatggaggcaaatatccagttat

SEQ ID NO: 693523 - DNA, 100 bp, Homo sapiens
cggcgggagcgcccccgatccggacaaagaaacgagcgctcggatgctgttcgcatcatggcaaaagacttggtgcgcacccggcgctatgtgcgcaagt

SEQ ID NO: 693524 - DNA, 82 bp, Homo sapiens
ggcaacatcctgtcacaggccatgctctggcaaaaaccagtccagagcgtgagtccattcacatcctgagtgttgatgagaa

SEQ ID NO: 693525 - DNA, 82 bp, Homo sapiens
gcggcagcgctggactaggtggcagaaatgagccgtcagactgctacagcattacctaccggtacctcgaagtgtccaccat

SEQ ID NO: 693526 - DNA, 75 bp, Homo sapiens
catggggaaaatctccccggtgactttcagaggcggggtttcaccatgttgcccagactggtcttgaactcctga

SEQ ID NO: 693527 - DNA, 99 bp, Homo sapiens
gcctgcagtggccgaggagattcaggatgaagttgacttgtgcaccatggacaattttgctgagggagatttcactgtggcggattatgccttgttaga

SEQ ID NO: 693528 - DNA, 100 bp, Homo sapiens
ggcggcgcctgaggagcgggatctaacccaggagcagacagagaagctgctgcagtttcagccctccaggggacccctctctcagccaccctctctctgg

SEQ ID NO: 693529 - DNA, 144 bp, Homo sapiens
gccagtgcctggttccacccggggggcatctgagaactgtgtccttccattcctgagtccagcacttcccaggccaggttattcagcttctcaaggctggaaaagcgaaggaagtttcctacaatgcactagcctcacacataa

SEQ ID NO: 693530 - DNA, 82 bp, Homo sapiens
gatgcagctgtacaacagcatcttcagcctgctcagcttcgagaagattggctacacaggaggatttgatgaagatgttaaa

SEQ ID NO: 693531 - DNA, 146 bp, Homo sapiens
gcgggagcagcatccggagcggagctgcagcagcgccgccttttgtgctgcggccgcggagcccccgagcaatgtcaagctacctctttatcattaaatatgaactacctgaagtaatcagagcattcatgggacttgaagaaaat

SEQ ID NO: 693532 - DNA, 100 bp, Homo sapiens
cttctcaacatttctgcagactgcctcaacagagtgataggcagtgaaatcaactgtgcagaccatcactgttggaggagtgagcacatcacagtttaag

SEQ ID NO: 693533 - DNA, 88 bp, Homo sapiens
ggcggtgcgcgacctgggctggctccgggggtggcgggcgcagctgctgtgacagaattcctagaggacctgtgcaacaacctcttga

SEQ ID NO: 693534 - DNA, 90 bp, Homo sapiens
gggaaggttccctcaagtccaaggtcttgggcttgccttcaacttgaatccagctctgaccatgattggcaagtatttctacaagaggcg

SEQ ID NO: 693535 - DNA, 90 bp, Homo sapiens
gaaactgattggaaactctttgggaaagccactcgaaaaggtcaatgagtggtcattgaagataagaaaggaaatgagagttgttgacag

SEQ ID NO: 693536 - DNA, 136 bp, Homo sapiens
gtccgaggactcgagcgccctgccctggtccatcaacagggacgattacgagctgcaggaggtgatcgggcatatgcctgagcgtttcgatgccttcatctgctattgccccagcgacatccagtttgtgcaggag

SEQ ID NO: 693537 - DNA, 100 bp, Homo sapiens
cctggcattgccttttgttgaggtttatgctggattgaatattttttttggaatggcaagcattggattactcacggtcgtggctgtggaccgatacctg

SEQ ID NO: 693538 - DNA, 106 bp, Homo sapiens
ttccggcgcctccactccgtcccccgcgggtctgctctgtgtgccatggacgggcgccatgtcagaaccggctggggatgtccgtcagaacccatgcggcagcaag

SEQ ID NO: 693539 - DNA, 50 bp, Homo sapiens
tctctggagacatcttcagcagttggaaatggaggatgaagatacaattg

SEQ ID NO: 693540 - DNA, 130 bp, Homo sapiens
agcgcgcgtgtggtccttgcgccgctgacttctccactggttcctgggcaccgaaagggacatctctacaccgttcccatccgggaacagggcaacatctacaagcccaacaacaaggccatggcagacg

SEQ ID NO: 693541 - DNA, 100 bp, Homo sapiens
cggccaagaaaattatgcatgcgttagggaagctctgagagaatggctgtggaaggtggtattaaagataatcaaacattatcaagaagaaggacaagga

SEQ ID NO: 693542 - DNA, 83 bp, Homo sapiens
attcgcagtggtcgcttcttctccttgaatccacattcatctcaatggaaggatcctgccttaagtcaacttatttgtttttg

SEQ ID NO: 693543 - DNA, 83 bp, Homo sapiens
acaagttccgatcagaggtgaaaccaacagccagtgatatgctatacatgaaagaaatgaccgcccggatgtgccactgagag

SEQ ID NO: 693544 - DNA, 75 bp, Homo sapiens
ccaagagggtgttcgactgctagagccgagcgaagcgtggtgtttggactctagaccatgtgcctaggtagaagt

SEQ ID NO: 693545 - DNA, 83 bp, Homo sapiens
cccctcccccctgagcccgaggtgctgacgtcgcaaaaaaattggatagatggagagcaatacatcatcatctttggagaatt

SEQ ID NO: 693546 - DNA, 100 bp, Homo sapiens
ctgcgagtagagacccagaaatttgaggcatttcagaagatggacacaaagaagaaggaggaacagttgaagcttctcaaggagaaatatggcatcaaca

SEQ ID NO: 693547 - DNA, 99 bp, Homo sapiens
ggacacccctgaagccgagaaatgaatgatatggaacctagcaaagctgttccactgaatgcatctaagcaagatggacctatgccaaaaccacacagt

SEQ ID NO: 693548 - DNA, 75 bp, Homo sapiens
tgaacaccgggagctactatgagcacgtgaagaagaagcacagcgtgctgatgtctgtgattgccggggaggctg

SEQ ID NO: 693549 - DNA, 74 bp, Homo sapiens
agagctgtctttctcttgatgatcttgccaaaaggatagagattgcagaggccaacagagcacttatggcaagg

SEQ ID NO: 693550 - DNA, 97 bp, Homo sapiens
ggccggcgagcagatgagaccgctactcacccgggaatgcgatgttaattctggggcattgatgttttacaatgcctgatcaagataaaaaggtgaa

SEQ ID NO: 693551 - DNA, 88 bp, Homo sapiens
ccatcctgccgtccttctccactttcgccagcccgtgccgcgagcgcggcctgcaggagagctcaggccccggggcctccagcggcac

SEQ ID NO: 693552 - DNA, 90 bp, Homo sapiens
ctgtgagccagggacaattcctgatgcctccatcctagcagctgccttggatctactttcagaaaaccaacgccaagatccctcccagcg

SEQ ID NO: 693553 - DNA, 50 bp, Homo sapiens
tgggtattgggcgtcactgtaataagttcaaactggaaacaagatggatg

SEQ ID NO: 693554 - DNA, 75 bp, Homo sapiens
gaggagtcctccacctcgtcgcagacactgccctctcggtgccaccagtgtgtgattgtcagcagctccagccac

SEQ ID NO: 693555 - DNA, 100 bp, Homo sapiens
gtaaaaagcagtgggatttggatgtgggatccggttccttggtgtcatccagccttagcaaaccagagggtcttactggacagagctcattcagactatg

SEQ ID NO: 693556 - DNA, 100 bp, Homo sapiens
tctgaagagggtctggaggagccttctcaagaacagaggcttgtctggagcgggaaagactactgtgagcatggccttggaggagtacctggtttgtcat

SEQ ID NO: 693557 - DNA, 95 bp, Homo sapiens
aagatcatccctctcaaaatgtgctttgctgctagaaacctaagcatgccggatctggaaaacaggaatccgctgtgtggcttacaataaccagt

SEQ ID NO: 693558 - DNA, 75 bp, Homo sapiens
ttgaagccctcatgcggatgctcgataatctggtggttattaacttggtgatgcttttggctgaaatgaaaatac

SEQ ID NO: 693559 - DNA, 100 bp, Homo sapiens
ctttgttattggagaaacatgcagattatatcgcatcctatggctcaaagaaagatgattatagctcttcagaaaccaggctgctttcaggaacattgct

SEQ ID NO: 693560 - DNA, 74 bp, Homo sapiens
gaggtgctgggagcgagttggctgcttcctgcctgacacagctcacttcaagaagtgcacaatgtcagaacgtg

SEQ ID NO: 693561 - DNA, 50 bp, Homo sapiens
gggagcttcaggctcgctccgtgcgggtggacactcactgacctgtcaca

SEQ ID NO: 693562 - DNA, 100 bp, Homo sapiens
cggagctcgcctgcacagatcagctccggagaggggaaaaccacgctcctcggaccaagcctcgggagctaaggggccacctacagatgctcctgcagtg

SEQ ID NO: 693563 - DNA, 100 bp, Homo sapiens
ctcggcctcggagcaacgagcgcagcgccgatctctggaaacatggctacagaacatgttaatggaaatggtactgaagagcccatggatactacttctg

SEQ ID NO: 693564 - DNA, 75 bp, Homo sapiens
cacaggctggtaccagttcactacaggcatgggttggaattggagcctatcccccaacccgaaggctaacagcat

SEQ ID NO: 693565 - DNA, 75 bp, Homo sapiens
atcaagaggaactcattcagagtgctacagaaacaataggtttatcggcgggggcttcaggcaatacctcttagt

SEQ ID NO: 693566 - DNA, 50 bp, Homo sapiens
ggctcccactgattgtacattatgtttccacctggatgtttgaggttgtg

SEQ ID NO: 693567 - DNA, 100 bp, Homo sapiens
aaatcaagacgcaacagccctcatcgagggatgctcagaactgtaagagtaaatgggtccagtaattggaatgactccagataagagagctgaaacccca

SEQ ID NO: 693568 - DNA, 75 bp, Homo sapiens
cggcgacctcatccacgccatgccaggctggaatgagctgctcatcgcctccttctcccaccgctccatcgccgt

SEQ ID NO: 693569 - DNA, 75 bp, Homo sapiens
tggaacattcagaatctacggagaggctaccacatactgttgattgtgatgaaatgccagttgaagcacctgtcc

SEQ ID NO: 693570 - DNA, 74 bp, Homo sapiens
cctgcaatctggcctggctggtggccaaagcctttgggacagatacgatgaatggattaaagcagataaaatag

SEQ ID NO: 693571 - DNA, 100 bp, Homo sapiens
tataccgaaataaagatgccttaagccattttgtaattgcaggagtaaagccatcaataaggcctatgaggagtatgttttatctgttgggaatttagat

SEQ ID NO: 693572 - DNA, 143 bp, Homo sapiens
ctactttgtggctgcctttgttgctgctgcacattaggttgcagtatgtggccagttatttgcctcagtaaaagacgatgaagaacgatacagatacagggaatatgcagaaagaggttatgagcgtcacagagcaagtcgag

SEQ ID NO: 693573 - DNA, 75 bp, Homo sapiens
atgagacctccaaacccctttggccctgtatcaggagcacaggaatcccgttctgcttccagaagtggaagtgct

SEQ ID NO: 693574 - DNA, 75 bp, Homo sapiens
tcccggctgccggtcgacgaccgccccgcgtcatgcggctcctcggctggtgccacataaagaagatccctaata

SEQ ID NO: 693575 - DNA, 90 bp, Homo sapiens
atgatggagacaacttttatgtcatagaacggatgcagcaccgaggcttcctcctcctcaccctcctcgccctgctggcgctcacctccg

SEQ ID NO: 693576 - DNA, 87 bp, Homo sapiens
accaatccaatgtgaaatctctcctcttatctcctatgctggagaacaaaaaatcccagaagtgggatgaaatgaacatcttggcga

SEQ ID NO: 693577 - DNA, 100 bp, Homo sapiens
accgggatcgtgaccgagaccgtgaccgagagcgtgaccgagagcgcgaatatcgtcatcgttagaagctttgtcacccgaaagaaccgccaagtgtgtg

SEQ ID NO: 693578 - DNA, 75 bp, Homo sapiens
ggaaacgaccattttcgtcaaactgcgggtgcactttacaggtccccgatgaaccaagagaaccctccaccatat

SEQ ID NO: 693579 - DNA, 85 bp, Homo sapiens
tcgccagcccgtgccgcgagcgcggcctgcaggagcagaaaggacccaggagcgataacagtaaatcaaataagatatttgtcgg

SEQ ID NO: 693580 - DNA, 90 bp, Homo sapiens
cgactttcagatttcgggttctcctgccacttggaacctggcgagaagcttcgaggctggcaccgttgtctggattggcatcctggtata

SEQ ID NO: 693581 - DNA, 90 bp, Homo sapiens
tgctttctaaaacaccagaactcaacctggccttgtgtagaatcactcgccattctcctactgccttccagaatgttattgaaaaggtgg

SEQ ID NO: 693582 - DNA, 83 bp, Homo sapiens
tcgggtctcgggggccgctctgggatcccggccaccagcaattgtccgggatgcccgctgtctgtagccccggcatggtgccc

SEQ ID NO: 693583 - DNA, 50 bp, Homo sapiens
tggaaacccacaggcacacccaagtgcgagacaagaagcttctcaatgac

SEQ ID NO: 693584 - DNA, 75 bp, Homo sapiens
ggactttccttacctgtttttccagctcacccactgccagcagagaattctgcttggtcagaatcgtgatggcat

SEQ ID NO: 693585 - DNA, 99 bp, Homo sapiens
ttgaaacctcgtcattaattggacacagtgccagagtgtatgcactttactacaaagatggacttctctgtacagcaccgaacaagatttgtgatgaaa

SEQ ID NO: 693586 - DNA, 97 bp, Homo sapiens
caacaggcaaaaatgatattggaaaatattcctaacccggaccatgaggtttcccaggcagctgcagacttgaaacagttctgtctgcagaatgctc

SEQ ID NO: 693587 - DNA, 100 bp, Homo sapiens
gtaaagacaaagatgtcaggcctgcggcccggcactcaagtggaccctgagattgagctttttgtaaaggtagcagatcaaccttatgttcaacagacat

SEQ ID NO: 693588 - DNA, 101 bp, Homo sapiens
gttgctgggcctcatttccgcaacttttcggctccgaactgctgggatggcctttacccttgaagaaaggctgcagcttggaatccacggcctaatcccgc

SEQ ID NO: 693589 - DNA, 96 bp, Homo sapiens
gaaacaatggcatttacagaaagagtcaacagcagtggcaacagttcagagtcgtgacacttcaagaggtgggcagattattcatttgtgaatgaa

SEQ ID NO: 693590 - DNA, 75 bp, Homo sapiens
tgaacggaagcgtctttgctcaaggatcccagttttctctggatgacgtgatgggcccaaaagcacaagaactgg

SEQ ID NO: 693591 - DNA, 82 bp, Homo sapiens
gcgaggagcgcctgcctgaggagagcaggatattaccttccaaatgatgatggagaattttatcagttctgttacgttaccc

SEQ ID NO: 693592 - DNA, 74 bp, Homo sapiens
gtgaacatggatgaccctaagaaggaagacagttaatcagagacttactccaacccagaagtttataccaaaag

SEQ ID NO: 693593 - DNA, 75 bp, Homo sapiens
cagaatcaccagcactggctgaagctttttgcctgaattcatcaatggagactttgattctattaggcctgaagt

SEQ ID NO: 693594 - DNA, 100 bp, Homo sapiens
agagcacgagcggatcctgcgagagatcgagagcactgacacggcctgcatcgggcccacgctcaggtagtcggtcttctcttgcccaaccagacactgg

SEQ ID NO: 693595 - DNA, 100 bp, Homo sapiens
ggtggatgaagttgttcattgtttgtcaccacaaaaaggacaggatgaggatgggacagaagaggataacagtcgtgttgaacctgttggacatgctgac

SEQ ID NO: 693596 - DNA, 100 bp, Homo sapiens
gcgaacccgagagcgtggagcgggctgggccagaccagaagggaaagatttcagcattcatcgacttgtcctggggacacacacatcggatgaacaaaac

SEQ ID NO: 693597 - DNA, 59 bp, Homo sapiens
gggagctccattccctaaggcactgtggaagggatgagaccatgcagcctgcgaaacca

SEQ ID NO: 693598 - DNA, 83 bp, Homo sapiens
ggtggactccttcggcagtccacccaccgccgccgcctcccaggcagccagataagctggtggtggtatggacccgtcggaac

SEQ ID NO: 693599 - DNA, 82 bp, Homo sapiens
cggcccgcgcctgggctgccggcacttcgcggcagtctgtagatggacggcagatccgagtagaccaggcaggcaagtcgtc

SEQ ID NO: 693600 - DNA, 124 bp, Homo sapiens
ctcccctttctcgcccagcgcccccaggccgctcccggggctcacgctggcacacccataccgagcagcggtcctgagggccatggagagggtcctgagcagtcgcgccagtgagctggacaag

SEQ ID NO: 693601 - DNA, 101 bp, Homo sapiens
ccgggacgcgacgggacgcgctgggaccggcgtcgggggtcgcggggaccatgcagcggagggcactgtgacctttgaagatgtggctgtgaacttttccc

SEQ ID NO: 693602 - DNA, 101 bp, Homo sapiens
ctgctggacggactggtcccccaggaccctctggaaatgctggaccccctggccctcctggtcctgctggcaaagaaggcggcaaaggtccccgtggtgag

SEQ ID NO: 693603 - DNA, 124 bp, Homo sapiens
gccaccgcctcctcctgctgctgctgcgctacctggtggtcgccctgggctatgagctgcttcagaaagagcaaaactattcagatgacgtcttggccaacatgattagtgaaccaaggatcag

SEQ ID NO: 693604 - DNA, 75 bp, Homo sapiens
agcttcaagcccaaccaagtgcgagatctgcgtgaaaaggtgtccggtggagagctgtttgaccggatagtggag

SEQ ID NO: 693605 - DNA, 100 bp, Homo sapiens
ccagatggcgcacagctccttttttccagatgagtatttcacctgctcctccttgtgcctcagctgtgggtcaagttcctaacgagtcttcagaggaggc

SEQ ID NO: 693606 - DNA, 82 bp, Homo sapiens
tcctgtctatcctcctggccgtcctcctcacggtcctcctggctgtgctcatatacacctgatattgatatgctggaggaat

SEQ ID NO: 693607 - DNA, 100 bp, Homo sapiens
tccgcggagatctctctcatctcgctcggctgcgggaaatcgggctgaagcgactgagtccgcgatggagtaatctatgccagcaattatgacaatgtta

SEQ ID NO: 693608 - DNA, 98 bp, Homo sapiens
catctgcaaagaaggttaaatcaggatggctggataaactctctcctcaagggaagtgcacggctgtctataacgtgctgccgggtctcaggatggag

SEQ ID NO: 693609 - DNA, 98 bp, Homo sapiens
ttacgtggccggaatcattcccttggctgttaatttctcagaggctccgagctctgtccagtggtgggagtattacatcccctcctctttctccagca

SEQ ID NO: 693610 - DNA, 114 bp, Homo sapiens
tttggattcaaagcataaaaaccattacaagatatacaatctgcattcctgcatcgcatccggcagaacgtggccgactcagtggagaagggcctcacggaggagaatgtcaag

SEQ ID NO: 693611 - DNA, 101 bp, Homo sapiens
tggagctctacgcctcctacgtttacctgtccatgacttcacagagaatgcagttgtcttgacttcaggtctgtctgttctgttggcaagtaaatgcagta

SEQ ID NO: 693612 - DNA, 98 bp, Homo sapiens
tatgcagagcgacttgcgcgccttgtcactggagtgcaagaagaaattcccacctgtcaaagagtgatgtccttgcattgcccatttttaagcaagaa

SEQ ID NO: 693613 - DNA, 90 bp, Homo sapiens
ccggctcacggaaaatgtctataagatgccttcaattaagttgcagagttctgatggagagatatttgaagttgatgtggaaattgccaa

SEQ ID NO: 693614 - DNA, 100 bp, Homo sapiens
ctcaaacaccagctactgtgaactctgccacttcaggtttgcagtcgagcgcaaacccaggccgttagtggagaatgtccctcttccagtggaaagccca

SEQ ID NO: 693615 - DNA, 82 bp, Homo sapiens
tcacaatgaggctccctgctcagctcctggggctgctaatgctctgggtctctgcggacaaggcaaaatctcagcaagttcg

SEQ ID NO: 693616 - DNA, 83 bp, Homo sapiens
ctgcgggagcccggcgccggagcccaaggttgtcctttgtggagggtcttctcgaatcccaaagctacagcaactgattaaag

SEQ ID NO: 693617 - DNA, 82 bp, Homo sapiens
gcagaatctgtcacagagggagatgtcaggtgggagaaagaccacctgttcagaacattgcttacagaaatatttaaaaatg

SEQ ID NO: 693618 - DNA, 100 bp, Homo sapiens
ccgggagttacaccgccaccgccagaatttcgctaaggagtttgtgatcagtgatcggaaggagctggaggaagatttcatcaagagcgagctgaagaag

SEQ ID NO: 693619 - DNA, 100 bp, Homo sapiens
cctaaagttcgtcgtcgtcatcgtcgcggtcctgctgccatctgaggacacagacctgccctacccaccaccccagagggaggccaacatctacatggtt

SEQ ID NO: 693620 - DNA, 75 bp, Homo sapiens
taaaaatgctgcgtatagtggaaccttatgtgacctggggctatcatggtgaacttacttcagattgtgcgggac

SEQ ID NO: 693621 - DNA, 82 bp, Homo sapiens
tgccaataaaataaattcttttgaactagatcgagctgatagagaccctagtaacatggatgtaataggaaaagcactgcag

SEQ ID NO: 693622 - DNA, 96 bp, Homo sapiens
tctgtatttgaagaccctgtggatatgccctgtggacatgacttttgtagaggatgttgggagtcggtctaaaattcccaggactccacagctttg

SEQ ID NO: 693623 - DNA, 80 bp, Homo sapiens
gcacgcaccatctgttgccatcccggccggccgaggccattgcagcaggtattaatctctggagaagacacatccacagt

SEQ ID NO: 693624 - DNA, 98 bp, Homo sapiens
tcctggacaccctctcgcccaggctcgctacagctaataatcacaagaagttgtcagaatttggaattagaaatggcagccggcttcaagcagatgac

SEQ ID NO: 693625 - DNA, 75 bp, Homo sapiens
atcaggaccccagatgtctgacagccctgtgtgacaccaagataagtaaccaaacagtgattgctgaccactcgc

SEQ ID NO: 693626 - DNA, 101 bp, Homo sapiens
gtgaggcctccccagccacgtggaactgccaagatcaaggctcgagatcttcgcgggaagaagaaggaggagctgctgaaacagctggacgacctgaaggt

SEQ ID NO: 693627 - DNA, 52 bp, Homo sapiens
gtctttgttccctgcagccctcccacggtgctggagaatctggtaaaagcac

SEQ ID NO: 693628 - DNA, 82 bp, Homo sapiens
gcatattagcgctagccctgcagacagaggtgtgctgacgacctgctacaacagaactgtttgcagacaaggtcccaaagac

SEQ ID NO: 693629 - DNA, 75 bp, Homo sapiens
gatgatccatttcaaggacttgctgctgcacgagctgtgggtgagcgtggaggatgctcagatgcacaccgtcac

SEQ ID NO: 693630 - DNA, 75 bp, Homo sapiens
ttggaagaggcgagtccggtctcaaaatggaggcaaaagtcaacaactctagcttaattggagtaggctatactc

SEQ ID NO: 693631 - DNA, 97 bp, Homo sapiens
gtcatggatctggaagctgagggcacgtgtttgcggttcagccctttgatgaccgcagcaggctgaacatgaactaaatctggcaagaaaaatgagg

SEQ ID NO: 693632 - DNA, 74 bp, Homo sapiens
tagaggggagatagcaagattctggagtctggaaagccttcacttggaagccatttggaaatagcatcagcaga

SEQ ID NO: 693633 - DNA, 51 bp, Homo sapiens
atttctccgcctcagcccaacggggaggtattgttgcagcatctggcagtg

SEQ ID NO: 693634 - DNA, 51 bp, Homo sapiens
cggagaggcggcgagaccgcagatgccttcaattaagttgcagagttctga

SEQ ID NO: 693635 - DNA, 98 bp, Homo sapiens
tatcctcaagagtcagctggcagggagacaccagtctgcagtctgtgagcttggtggttatttgtacataatcggaggtgcagaatcttggaattgtc

SEQ ID NO: 693636 - DNA, 100 bp, Homo sapiens
gagtgaggttgctcatcggtttaaagatttgggagaagaaaatttcaaagccttgtttacttttgaatactcaaggagacatccagacctgtctatacca

SEQ ID NO: 693637 - DNA, 98 bp, Homo sapiens
ccgcgtgggcaccctgcaggtggtcagacatgtcatcaactcagctgatcaggatcctcatgaccagccaaagagaagaagaattaggaagcataaat

SEQ ID NO: 693638 - DNA, 101 bp, Homo sapiens
gggcccgtagctgggctctgcgaggccaagaagacgctggagggaggctgttaggagggactctgagcttcacacctgtctgctgccatgggtgcagagcc

SEQ ID NO: 693639 - DNA, 51 bp, Homo sapiens
atttgaactcattcatgttgagaggattcatagacttcatagctgatgagg

SEQ ID NO: 693640 - DNA, 75 bp, Homo sapiens
ttaaggattccaagtaactcttatttggtcacgagaagagaatgccttctagatgcaaaatcacctccaaaccag

SEQ ID NO: 693641 - DNA, 100 bp, Homo sapiens
aagatcgtccagcggctgattgagcagatccacccgtcgaaggatgagaatgtgtatccagggcagcagtatctgcaaggaggccagtatgcacccagca

SEQ ID NO: 693642 - DNA, 100 bp, Homo sapiens
cactcctcaggtgtccagcctgctcaggaccacatggtgacaatgcatgatgtgcttgatgctcagtggctgtatgataaccacaaggatgagagttacc

SEQ ID NO: 693643 - DNA, 100 bp, Homo sapiens
ggaagtcagcatagtccaggcaggacagcatctttaaatcagagaccaaggacacacagacatgtgcaagccagccagcgcgccatagccttaattgcag

SEQ ID NO: 693644 - DNA, 80 bp, Homo sapiens
gcgggaggaggccggggaccacacaggtgagaagccctaccactgcaactgggacggctgcggctggaagtttgcgcgct

SEQ ID NO: 693645 - DNA, 90 bp, Homo sapiens
gggggcttcctcactcgtggctttccgaaggctgctgagcccagaggctcatcaggacttgtaaacagcagacagaagagctatgaccac

SEQ ID NO: 693646 - DNA, 98 bp, Homo sapiens
acctcctgggctcaagcggtcttcacacctcagcctccccagtagctgatcctacagtgtttgaaagatgtatggtgatcttgaaacctccagacaca

SEQ ID NO: 693647 - DNA, 83 bp, Homo sapiens
gctcaccggatgtaaaagaactctggctagagaccctccaaggcggagctggagtttgttcagatcatcatcatcgtggtggt

SEQ ID NO: 693648 - DNA, 74 bp, Homo sapiens
ccggtgtgcctcggcagccttgcgctgctctaatggtccggacttccgtgtcccttcagatatttcaacactcc

SEQ ID NO: 693649 - DNA, 98 bp, Homo sapiens
gtcgctcatcaagcagcaggtccttaagctgggagtgtccactcgccttccaccagcatggcaacgtcttcacagtaccgccagctgctcagtgacta

SEQ ID NO: 693650 - DNA, 100 bp, Homo sapiens
aggttacttcttcctcaacaccagcaccgcagatgttgtcaaggtggcctaccaggaggccaggggtgtcgccatggagatgcgctctgtgctgcggaag

SEQ ID NO: 693651 - DNA, 100 bp, Homo sapiens
taccatgcattgtctcagaaagaggcgaatgactccgatgtccagtggtcatctccatcagaggcaactgaaagtttcttatcaaaagaaatttggttgc

SEQ ID NO: 693652 - DNA, 74 bp, Homo sapiens
gatgctcaaggcagaatatatttgccctatctccaaaactggagccatgacttggcagatgaacttgctcttgt

SEQ ID NO: 693653 - DNA, 100 bp, Homo sapiens
ctcgtggcgcctcctgtctgtggaattctgcttggtcagaatcgtgatggcattgtgttcagcactgatgactattttcaccatcaagatgggtacaggt

SEQ ID NO: 693654 - DNA, 98 bp, Homo sapiens
tcttccccaggcctgcgtccgagtctccgccgctgcgggcccgctccgacgcggaaggcaacgccctgctgcggcggctggtccgcattggggtgctg

SEQ ID NO: 693655 - DNA, 100 bp, Homo sapiens
cggagcaccccatccctgacgacaaaggctgtgctcttggaaccacgtgaatgttgagggggcgacacacaagcaggtggtggacctgattcgagcaggc

SEQ ID NO: 693656 - DNA, 74 bp, Homo sapiens
aaaactacaaacaagacttcgcaggaagcacaagcctatgcagacgacaacagtttgctgttcatggagacatc

SEQ ID NO: 693657 - DNA, 100 bp, Homo sapiens
gaactcgtggcgagagaaggaaaatgcgcgtcccgggcgcgggtaggtcatcatcagatttgaaatatttaaagtggatacaaaactatttcagcaatgc

SEQ ID NO: 693658 - DNA, 75 bp, Homo sapiens
cggcgccacacggtgaaggtgacgccgagcaccgtgctgcttcagtccagggaccttgacccagcccctctcagc

SEQ ID NO: 693659 - DNA, 83 bp, Homo sapiens
ttcaccaccacagagcccatcaagcccgagcaggacccagatgatgtggtaccagttggccaaagaagagcctggtgttggtg

SEQ ID NO: 693660 - DNA, 51 bp, Homo sapiens
cgcccagccctgccagctgcgccgggacgcctgacatttaccccggtaact

SEQ ID NO: 693661 - DNA, 100 bp, Homo sapiens
caccctggggaggagagctctgggaacagccgctcacaatatggccatcaggtttacccagggttgatgataaccgctggccttattcattggattttaa

SEQ ID NO: 693662 - DNA, 100 bp, Homo sapiens
agacgagggagaaatgttttgtttgactccagtgttaagagaagaaatgaggacatatcagtatcgagtgaccgtctccttatcaagggaggcagaatcg

SEQ ID NO: 693663 - DNA, 96 bp, Homo sapiens
gcggagcccgcagaacctccacagtcaagaggacggatctgtgccagttcagaagcaggcgagcctcttccctgatgaaaaagaagataacttgct

SEQ ID NO: 693664 - DNA, 80 bp, Homo sapiens
ggtcgccctcaaggccatgatcaaaacaccatggtgaatccgggcagcagctcgcagccgcccccggtgacggccggctc

SEQ ID NO: 693665 - DNA, 75 bp, Homo sapiens
ggcttcaatgtcatattttggatgctattaaactacagctggttgaagcaggcctagtagagtgtctactagaga

SEQ ID NO: 693666 - DNA, 82 bp, Homo sapiens
catcagcaagtagttcgcagtgttggttgttcttggtttcgcaggattttataggagcactatgatgccataatgaggtata

SEQ ID NO: 693667 - DNA, 75 bp, Homo sapiens
ggacacagcctgggggatggactgggcccttccacttaccagaggaacaagctgaaagctggatacctaatgtca

SEQ ID NO: 693668 - DNA, 82 bp, Homo sapiens
aatgggaacaggccagcaaaacactcagctgcaagtccaaagccacaagctgctctgttaaaagcgaaaatgaaacaattgc

SEQ ID NO: 693669 - DNA, 74 bp, Homo sapiens
aagtgtgaagcggccaatggcacggaggcctgcgtgactccagaagacctttccagattcgtggttgagctgca

SEQ ID NO: 693670 - DNA, 100 bp, Homo sapiens
agggagcccgcgaccgcgccttctcctccgccggtcccatacgatgctttgttctgtacaagctgcccaacttgaaatttctggatgcccagaaagtaac

SEQ ID NO: 693671 - DNA, 75 bp, Homo sapiens
cggctactacaaccagagcgaggccgctcgggttcatgacgctctcgatattcctgtgcagaaacctggaccacg

SEQ ID NO: 693672 - DNA, 76 bp, Homo sapiens
cttgaatttctctctgtaaaggagcttggtaaaatgcggctgacaattccgtgtcgggcccttacatgttctcatc

SEQ ID NO: 693673 - DNA, 98 bp, Homo sapiens
ctgcattgtgttgctgcagattgccaaaatacctgcactttaatcagatagaaactttggacccagattcgttccagcatctcccgaagctcgagagg

SEQ ID NO: 693674 - DNA, 96 bp, Homo sapiens
cgccgccgaagaagcatcgttaaagtctctcttcaccctgccgtcatgtctaagtcagagtcaaggagaagctgcgccttgatcctgacagcgaga

SEQ ID NO: 693675 - DNA, 50 bp, Homo sapiens
ctcctttctgggcaaacgttccaaggtccaagcatctcattttgaaggcc

SEQ ID NO: 693676 - DNA, 50 bp, Homo sapiens
tttggatgatcttgaccccgagctgaaaatgtgtgtctgacatgcaagct

SEQ ID NO: 693677 - DNA, 98 bp, Homo sapiens
ctcactgtcagcttccaagagcctcttagcgtcaatgcagctgtagtaaccaggtataaagccatcatcgtctacagactgccgtggacctggaaatg

SEQ ID NO: 693678 - DNA, 83 bp, Homo sapiens
cagcactggactcatggaggctgagcatttattcagtgcctccggagccagcgtggtggccatagacaacaagatcgaacagg

SEQ ID NO: 693679 - DNA, 90 bp, Homo sapiens
gagcggccgcgagcagagccgcccagccctgccagctgcgccgggacggtgcccgtggttgacacgagctgtgtccccagctgttcccgt

SEQ ID NO: 693680 - DNA, 100 bp, Homo sapiens
gccatcaggactccatcactcgtcttatggaggtgtctgtaactgaggtggtgatctttgtgaagtctgtgcagcggtgcattgccttggcccagctact

SEQ ID NO: 693681 - DNA, 100 bp, Homo sapiens
gaagccctttctcctcggcactgtattctttacctgcttcccaatcccactgatgaggatcagcccatgtttcccgtcaccaattttccttggaattgga

SEQ ID NO: 693682 - DNA, 100 bp, Homo sapiens
gtgtcaaaaatatggaccagtggtatctctacttgttccaaaggaaaatcctggcagaggacaaggttattggggctgtgccatcggcaaagccaggcaa

SEQ ID NO: 693683 - DNA, 74 bp, Homo sapiens
aaacaaggagaaggtgcaagactgtccgtgtggaccctgactcacaggaaacacaacctatttgtgggagtttc

SEQ ID NO: 693684 - DNA, 82 bp, Homo sapiens
ctacttcctcggtggctgcgccggaggcctgactctgggagcacgcagcaccatgactcctgtgaggatgcagcactccctg

SEQ ID NO: 693685 - DNA, 50 bp, Homo sapiens
agtggaaaggatggcccccaaaggagaagaaatgggtgaccgttggtgac

SEQ ID NO: 693686 - DNA, 75 bp, Homo sapiens
caaaggaagacttgtaacctggagaagaggaacatcatttacagcgagcaatttcagcacagcaagtgtttagag

SEQ ID NO: 693687 - DNA, 75 bp, Homo sapiens
tggctctggaattgctactgctgcctctgtcactcctggtgaccagcattcaagagttcaaggcagcttgcctcg

SEQ ID NO: 693688 - DNA, 100 bp, Homo sapiens
cctctactttctggagtttgtgtaaaacaaaaatattatggtctttgtgcacatttacatcaaggaggtttcagtcaggaagaacttctgaaaatctgga

SEQ ID NO: 693689 - DNA, 95 bp, Homo sapiens
gctctcctagaaatgttgaagaagctgcacaggcatttgacattgtgcagcaaagaaatggttatggagaagcccagtccgctgcttgtagggcg

SEQ ID NO: 693690 - DNA, 83 bp, Homo sapiens
cccctcggcactaggcagcggaggagcccgaccgacccggcgtccgacctccgatcatgaacgggcccctgcacccgcggccc

SEQ ID NO: 693691 - DNA, 100 bp, Homo sapiens
acatgtggagtgagcaggagaaggagaccttccgggagaaatgtgttcagagcaacattgttttgttgacacaagcatttagaagaaagtttgtgattcc

SEQ ID NO: 693692 - DNA, 90 bp, Homo sapiens
gtgacagcaaaaatgacccaccaatggaagcagctggcttcactgctcaggtgggaaagcagtgccactctccgcttcacagatgccccc

SEQ ID NO: 693693 - DNA, 101 bp, Homo sapiens
ttcttaacccctagaccggtttttagtccattgactatgcagcctaatgcaggtggtccattatggctgacatgcaaaatctggtagaaagattggagagg

SEQ ID NO: 693694 - DNA, 83 bp, Homo sapiens
attaaaactgatctgataagacctcagatcagacagagacatatctgaagagatggattaagaatgctttggattaaggattg

SEQ ID NO: 693695 - DNA, 75 bp, Homo sapiens
ctctgacagtcattgatttcaccgaggatgaagtggagcccgagggcaacatccttcgagaccggttcaagagct

SEQ ID NO: 693696 - DNA, 100 bp, Homo sapiens
aaaagggactgctaagaagataccaccagacactgtgcatcttagccaacatagcggatgggacaacagcaaaagatcttattatgaccaatgatgatat

SEQ ID NO: 693697 - DNA, 75 bp, Homo sapiens
aggacctcctggtgcgcatcctgctgctggctgcccttgtctcctttggtgatagcacactcagataagaatcgc

SEQ ID NO: 693698 - DNA, 90 bp, Homo sapiens
cgaatgctttatgaatgataaagatgtttccggaaagatgaacaggtcatcatccaccggctcctgagcatgttccaccctcggcccttt

SEQ ID NO: 693699 - DNA, 75 bp, Homo sapiens
cgctactctccgggaggggcgcttcccgacgccaagtgccggtggtggtgtgcacattgagccccggtatagaca

SEQ ID NO: 693700 - DNA, 73 bp, Homo sapiens
tgaccttgatggtggcactgggtcagttggcagatatccctgttacaatctgtacatatccatttgtatttga

SEQ ID NO: 693701 - DNA, 89 bp, Homo sapiens
gtgaatttatcacagaggaataacgagggagaggagaaagccatcactggtgcaagctatatttaacggagatcctgatgaagttcgag

SEQ ID NO: 693702 - DNA, 97 bp, Homo sapiens
gatggatggagtcacgaccaggaccttctgtgggactccagattatatcgccccagaggtttggggaaaggtgctgctgaagcaatggaagaaaaat

SEQ ID NO: 693703 - DNA, 75 bp, Homo sapiens
cggactctccgttattttaggaggtgtcgtgaaaactacccctaaaagccaaaatgggaaaggaaaagactcata

SEQ ID NO: 693704 - DNA, 50 bp, Homo sapiens
atatctgacagcgagatcgcttgtaggattgctgtcacgtctaatgtggc

SEQ ID NO: 693705 - DNA, 75 bp, Homo sapiens
caagaattcgcttgcaagttaagggatgctgaaaacgccattcaacagatgggtggccagtggcttggtggaaga

SEQ ID NO: 693706 - DNA, 75 bp, Homo sapiens
tgccaccttctccagcattgtgaaaggcctggcgctgctgctgccgcccgtcaccctggcagccctggtggacag

SEQ ID NO: 693707 - DNA, 100 bp, Homo sapiens
acgagaaccaagtgcggacgctgtgcgagaagctggccaactggctggaaactcctctgttgagatgtatcgccaagtgctcctgtctggttgtcgctgt

SEQ ID NO: 693708 - DNA, 100 bp, Homo sapiens
caaaatcccaggctgtcggaagcaagaatgattacggacctgaagccaaagaacaagatgcgctagtggacagattgctgaccaggggcttgagagctgg

SEQ ID NO: 693709 - DNA, 75 bp, Homo sapiens
gcgagcggtggtttggacgccggcggagacgcgggcgagcactattcctgatcagagaactccagttgcttcaac

SEQ ID NO: 693710 - DNA, 96 bp, Homo sapiens
gttccgcaacctggaaaacttcaagcaaggacagagcgggatgccaccagcttgtccaaagggaagttccaggagctcctggtgggcatcgttgtg

SEQ ID NO: 693711 - DNA, 83 bp, Homo sapiens
cgccttgaggatctttctgcccgcctgagtgatcttgaaatgaataggctgtctgtccccagaccccagagcacgtccggcac

SEQ ID NO: 693712 - DNA, 98 bp, Homo sapiens
ggaggagaccggcacccagacaggtggcgaaggcagaggaaaatctccaaattggacatccagagcagcattcttgttctgtctacgtcttgaattag

SEQ ID NO: 693713 - DNA, 51 bp, Homo sapiens
ctcctgagtagctaggactacaggagcgccatggattactacagaaaatat

SEQ ID NO: 693714 - DNA, 54 bp, Homo sapiens
gtgtggacaaggtcgtggcctgcacctcggagatggagtttcgccatgttgccc

SEQ ID NO: 693715 - DNA, 75 bp, Homo sapiens
aaccgccccctaaagaaactggaggcccaagatctacaagtactactccctgctggcctccctgcctctcctgct

SEQ ID NO: 693716 - DNA, 83 bp, Homo sapiens
cttcagagcgtcacggcgtacgccctcatggggaaaatctccccggtgactttcagatccagcacacggaagacatggagaac

SEQ ID NO: 693717 - DNA, 74 bp, Homo sapiens
ctgcaggcagatccccaagctcctcaggcagctgcagacttcaatccccgactcggaaagcaatctggatcaga

SEQ ID NO: 693718 - DNA, 100 bp, Homo sapiens
accgctccttggaaggtcgctgggaggtggcattcaaaggcctcctgatcacttgccacgtggcacgcatccctctgccagccggatacagagaagagat

SEQ ID NO: 693719 - DNA, 82 bp, Homo sapiens
atcgagcctggccttgagggtccacaccgcgagggaagatgcgtgcgcccattatccagctatgggacacagcaggacaaga

SEQ ID NO: 693720 - DNA, 100 bp, Homo sapiens
gcacctcgtcaccaaggccaagtgccggtggtggtgtgcacattgagccccggtatagacagttcccccagctgaccagatcccaggtgttccagagcga

SEQ ID NO: 693721 - DNA, 74 bp, Homo sapiens
cgaatatcgtcatcgttagaagatttgttcccgacaaggagttttctggttcagaccgtagacagagaggccga

SEQ ID NO: 693722 - DNA, 100 bp, Homo sapiens
agtcaaggttgtctgtctgtccatccactcaggacatctgcagatattgatgatgttaagaagttcaaaccgggttacctggaagctactcttaattggt

SEQ ID NO: 693723 - DNA, 51 bp, Homo sapiens
ctctgaccctcgtcggcgcctcaggacagcccagaaacttgcaggacctgt

SEQ ID NO: 693724 - DNA, 50 bp, Homo sapiens
gctgctcgtggacccagaaggcacgttctgtcaggccaagcagaaggcag

SEQ ID NO: 693725 - DNA, 101 bp, Homo sapiens
aggggcaaatcgaagtagagagcgaaaccatcttcaagttagcagcgtttattttacaggtgctggagaatctggtaaaagcaccattgtgaagcagatga

SEQ ID NO: 693726 - DNA, 100 bp, Homo sapiens
ccagctagccagatcccggacccaaaccatgttccctgtgaaggtgaaagtggagaaatcagatgacttccggatcttctgtggggatctgggcaatgag

SEQ ID NO: 693727 - DNA, 106 bp, Homo sapiens
atagattcccagaagtggaattgcttggtcaaacgaatgatatggaacctagcaaagctgttccactgaatgcatctaagcaagatggacctatgccaaaaccaca

SEQ ID NO: 693728 - DNA, 75 bp, Homo sapiens
tgggcgttcatgatcctggccagcctgctcatcgcctactgcagttaatttggagtggcccctggagtcagtttc

SEQ ID NO: 693729 - DNA, 100 bp, Homo sapiens
gctctcccacccaatggagatggctctaatggtacccactgatggtaatgctggcctgctggctgaaccccagattgccatgttctgtggcagactgaac

SEQ ID NO: 693730 - DNA, 95 bp, Homo sapiens
ctgaagatggtttgaaacagcttcacaaggtggtttgaagtgtcctgtttgcagctttgtatatggcaccaaatgggagttcaataggcacttga

SEQ ID NO: 693731 - DNA, 89 bp, Homo sapiens
gaggatcgacgcctatgtcgacgagcagaatcttcagctacttggagcaacagccattgaggataaattacaagatcaagtgcctgaaa

SEQ ID NO: 693732 - DNA, 100 bp, Homo sapiens
acagctaggcttgaggcctcttcatcgggggcaaatgacacagctttgtgaactgatcaacaagagtggggaactccttgcgaagaacttatcccatctg

SEQ ID NO: 693733 - DNA, 75 bp, Homo sapiens
ttcacaaagaagcatattcacgagcatgcgaaggcgaagcggcacaacctggccacccctttgctgtgaagttgc

SEQ ID NO: 693734 - DNA, 98 bp, Homo sapiens
gatcgatgcacatgtatgccaagaacttctacgggggcaatggcatcgtgggagcgcagctgcaagctttcttcctggtggcagatgacatcatggat

SEQ ID NO: 693735 - DNA, 50 bp, Homo sapiens
tgctccaggctgccccataataaacaatgcagatcttcgtgaagactctg

SEQ ID NO: 693736 - DNA, 75 bp, Homo sapiens
tctgccgtcttttgaagcaccctaatattggaaaatgtttataggaggccttagctgggacactacaaagaaaga

SEQ ID NO: 693737 - DNA, 104 bp, Homo sapiens
ccaccgcaggtcgaggacggtcggactcccgcggcgggaggagcctgttcccctgagcctcctgacaaggtgatccgggcgggccccgcaggaattttatcccc

SEQ ID NO: 693738 - DNA, 83 bp, Homo sapiens
catctagcatgccagggggcagtacgcccgtcagcagcgccaatatgatgtcagttacagaatgtctgaaggggacagtgtgg

SEQ ID NO: 693739 - DNA, 90 bp, Homo sapiens
gcctcttcggctgcggaccctgccattccggaggaggtattagtcactgtaccactggctttactacagaaaggtgccattcagtttaat

SEQ ID NO: 693740 - DNA, 80 bp, Homo sapiens
gcagtcggggcggcagctgaggcggaggctgacgaggaggcggatcccccggcgtcagggccacccgttcatcgtgcagt

SEQ ID NO: 693741 - DNA, 74 bp, Homo sapiens
agttctacgaggagtgaccaatgatcaggttgacccttcaacggcaaatggatacatcttgttttttcatatta

SEQ ID NO: 693742 - DNA, 82 bp, Homo sapiens
cgagaaatcttcctgttcaacgacctcctggtggaaacactgatgggaaagtatggggaagactccaagcttatctatgacc

SEQ ID NO: 693743 - DNA, 83 bp, Homo sapiens
gtctcaatctctggaaaaacttcttgccaaccaaaatccatgttcactagcggccttacagaaagtactcaaaaagaagttcg

SEQ ID NO: 693744 - DNA, 82 bp, Homo sapiens
ggagtgcgtttcttctatgaagtgtactaatggtcacttgatgtgcgctggctgttttatccacctactagcagatgcccgg

SEQ ID NO: 693745 - DNA, 100 bp, Homo sapiens
gttggagattctgcggcgaatacgccagtggaatattggtgaacgatactaagttagatggacctatattacagattctattcatgaacaatgctatttc

SEQ ID NO: 693746 - DNA, 100 bp, Homo sapiens
caaaggcccaaggctggcattgcctggggctggaatacccttctggagccatcatggagcccagctggtcctgtccttcctgcaccttcatcaatgcccc

SEQ ID NO: 693747 - DNA, 74 bp, Homo sapiens
atgaactatgagaaactcagtcgtgcattaagggtacgctagctgggattttgattggtctggctcagttaaac

SEQ ID NO: 693748 - DNA, 50 bp, Homo sapiens
gcctacccgggatacggaggagggaaagcataacccctactgtagaacta

SEQ ID NO: 693749 - DNA, 100 bp, Homo sapiens
aaagcactctgtgctagtgatgtgagcaaatgcctcattcaggagcaatttacagcaatgagggatttatacatgaaaaatggacaaggatttgcattag

SEQ ID NO: 693750 - DNA, 75 bp, Homo sapiens
ccttgagaaatatgatgcagctatgtacacgttgcttgagcaactgtaccaagatttggcatttgaagaatggga

SEQ ID NO: 693751 - DNA, 100 bp, Homo sapiens
agcgacgtgggcaagggcgagatcctggcgagcctgcaggatggcgcggccgagtccccgtacggccacccggcggatcctgaacccgccgccctccccg

SEQ ID NO: 693752 - DNA, 100 bp, Homo sapiens
cgttgagagacgcggctttcggcaagaactggattcgtggcgccacaagctcattcactgtgtaggtcagcccaaggccaaccccactgtcactctgttc

SEQ ID NO: 693753 - DNA, 89 bp, Homo sapiens
aagctgtcatcacaaaagagttgattgaaattatctctggtgctgcagctctgtggtttcagacaccctcacaggttttctaccatgca

SEQ ID NO: 693754 - DNA, 75 bp, Homo sapiens
gcgcgaatatcgtcatcgttagaagggcggcgactggcggcgcgatggacctgaccgggctcctgctggacgaag

SEQ ID NO: 693755 - DNA, 114 bp, Homo sapiens
gcgctgggagcaacgggagtgtcctggacccagctgagcgggcggtcattcgcatcgcagggggggccctcagcctcttggccttgaacgggctgttcatcttgattcacaaac

SEQ ID NO: 693756 - DNA, 75 bp, Homo sapiens
ggagcaggagcttcaggttgtccgagcatctgggaaacatccacaagcgctgggccctcgtgtggctggcctgcc

SEQ ID NO: 693757 - DNA, 98 bp, Homo sapiens
tcttgctctcgggtccatgctgcacttgtctaccacaagcatctgaagagagttttcctgatagatctcaacagtattcaaacaagctgtatataaac

SEQ ID NO: 693758 - DNA, 75 bp, Homo sapiens
actagctccaggttaggccgagctttgcgggaaagcagcgaactcccccactggaaaggattctgaaagaaatga

SEQ ID NO: 693759 - DNA, 90 bp, Homo sapiens
gcggagcacatgcggagactccgaggtggaggaggagtccccaggaaagcgcctggacgcaggtccctggtgctgaaccgcctgcgtcca

SEQ ID NO: 693760 - DNA, 100 bp, Homo sapiens
tgatcccatgaccacctccagagctaatcagaatccacactggtgatagaccatacaaatgtgcacacccaggctgtgagaaagccttcacacaactctc

SEQ ID NO: 693761 - DNA, 83 bp, Homo sapiens
catcagactgaccgtgtcttacatcagttcagagagcaaaagctggcaggctgacagaggcggcctcaggacggaccttctgg

SEQ ID NO: 693762 - DNA, 75 bp, Homo sapiens
ctactttttaattactatttgacaacctgccttcagtcttcagttaataaaattgagcccctgagtcctgagttg

SEQ ID NO: 693763 - DNA, 82 bp, Homo sapiens
atctaccttctggaagctactactacgtggtgcttggaaagcaaattgtggctactaatttgccccctgaagatcaagatgg

SEQ ID NO: 693764 - DNA, 90 bp, Homo sapiens
tggacaaggaccctgacctgcctgtcgtcgtggtggccaacaagcagggacaaactctgcctgggcgagtccttttcctgcgttatgtcg

SEQ ID NO: 693765 - DNA, 90 bp, Homo sapiens
gtcctggacccagctgagcgggcggtcattcgcatcgcagaatatgacagatacctagcatctagcaaaataatggcagctgcttacctt

SEQ ID NO: 693766 - DNA, 119 bp, Homo sapiens
atttgagactttctgtcgcatccaccagtgtatcagcattaagctttccatctgatggtcccctggtgtgtgccctggaacaggagcgaaggctccgcctccctccgaagccacctccc

SEQ ID NO: 693767 - DNA, 100 bp, Homo sapiens
ctctgtagcacggaggatgggctttattcctctcccactagctgttttaagacgaggacttgctatgttgccagtttggtcttgaactcttggtctcaag

SEQ ID NO: 693768 - DNA, 87 bp, Homo sapiens
tttgtcctgcacctatcctgaataaagctggagaggaaagcgctctagcgagtgctgatttagaagaagaaattcaccagaaacaag

SEQ ID NO: 693769 - DNA, 75 bp, Homo sapiens
agtttaagaaagcaaagagcaggttcttcatcttcaaaaatgaacagtttgatcatatctgaagatattagtgag

SEQ ID NO: 693770 - DNA, 75 bp, Homo sapiens
cgagagatggatgctcacccgaaggctgattactttggcatatcacacctgaaaaattttatgtggaagcttgtg

SEQ ID NO: 693771 - DNA, 75 bp, Homo sapiens
aattgaagctggaaagcttggacttagcaatatactttgctgcttattcaaactgcaaggaaaagttgaatgatg

SEQ ID NO: 693772 - DNA, 82 bp, Homo sapiens
aggggcttacgcagaaggacctggccacgatcgcaccccctccctccctggcggagcccctgaaggagctgttcaggcagca

SEQ ID NO: 693773 - DNA, 48 bp, Homo sapiens
ctccgcactctggagcataatgtgagctatgaagacatgattggtgag

SEQ ID NO: 693774 - DNA, 101 bp, Homo sapiens
ttctgatcgcaaatacctgaaagattgggcaagagaagaattcagaagaaacaaaagtgccaccgaagaggtaaaagtgctgtttgtacgcaaccttgcca

SEQ ID NO: 693775 - DNA, 100 bp, Homo sapiens
ctgggacacacctccattggatttaaaagacagtcctcgtcagcactgactttcagctatggaatcgatcgccatggatcggatgaagaagatcaaacgg

SEQ ID NO: 693776 - DNA, 126 bp, Homo sapiens
ggcaacggccaacttcggcaagatccagatcgggatttacgtggagatcaagcgcagcgatggaagtagctgatctctgcaggaaactgctgttacctggcctcagctgaatttttgtgggacctc

SEQ ID NO: 693777 - DNA, 50 bp, Homo sapiens
cccgccgccgccgttggctggagaaaccaaggtgtatgttggtaacctgg

SEQ ID NO: 693778 - DNA, 75 bp, Homo sapiens
gtcagcactgactttcagctatggaatcggctctacagattctcccctgcccctggagaaggaggagcaggtccg

SEQ ID NO: 693779 - DNA, 98 bp, Homo sapiens
gagcaactgaggcgccgggaccggctgcagagacaggcgttcgaggagatcatcctgcagtattatagtgggaccagtctcattaggttgaatctaca

SEQ ID NO: 693780 - DNA, 83 bp, Homo sapiens
attggcccaaagccctacagtctgcaaacgttagtaaaactggagctgaaggtgctgtgctggatgaagctaaaaacatcaac

SEQ ID NO: 693781 - DNA, 82 bp, Homo sapiens
cctgagctggattgacatagcccttggcgggtgtccctggccagtgtccttccacctgtccacaagcatggggaacatcttc

SEQ ID NO: 693782 - DNA, 74 bp, Homo sapiens
agtacaacgaagccaccggcgtgtgccccgacggcgacgaccaaaacagagtggagtacgagaaaagggtccga

SEQ ID NO: 693783 - DNA, 152 bp, Homo sapiens
atggcggctgccgcggagtgcgatgtggtaatggcggcgaccgagccggagctgctcgacgaccaagaggcgaagagtgtgatgagaatagcacgtttaataaccatgctctgtacctgggcctgccctgctgcaaagaggactacaatggc

SEQ ID NO: 693784 - DNA, 82 bp, Homo sapiens
ggcttttattccacaaacttatacaacctgatcatccgcagatatctcagcaggtggtgaagcagtattttccaatttgaag

SEQ ID NO: 693785 - DNA, 83 bp, Homo sapiens
tccagacactggaaaactggatgctgcagacactgaacgaggagccagtgatgggttctctacctggcctgtgccttgttgcc

SEQ ID NO: 693786 - DNA, 100 bp, Homo sapiens
attctactttgaccctatgagaacctcatttctcttccaaggaaattcgaaatgagtcccatgactatcctcatagagtggccaagtttccagaaaacag

SEQ ID NO: 693787 - DNA, 112 bp, Homo sapiens
agcggggcccgcgggcccatgaggaggcctggggaccatgggctccaggatcaagtgtgttccagagaacaagccttcagacatttgctatattgacgctgagctgtcaggg

SEQ ID NO: 693788 - DNA, 75 bp, Homo sapiens
aacttcttaacccctagaccggtttttagtccattgactatgcagcctaatgagactctacaggggcaggtaatt

SEQ ID NO: 693789 - DNA, 75 bp, Homo sapiens
tgtttgtaactacctggcattgccttttgttgaggaacttgtaatagctggcatcgttgagaatgaatggaaaag

SEQ ID NO: 693790 - DNA, 74 bp, Homo sapiens
agattgtgaagaagaatttcgatctccgccctggggtcattgtcagtaaacgcgaaattattttctacaaaaat

SEQ ID NO: 693791 - DNA, 83 bp, Homo sapiens
gcggaccgcttctcccgcttcaacgaagaccgagactttcagccctccaggggacccctctctcagccaccctctctctggtg

SEQ ID NO: 693792 - DNA, 84 bp, Homo sapiens
cccggtgcggctgcacgtctcgcggatcatgcttatgccgagattttgctgtcctggaggaccacaccctggctcacagcctgc

SEQ ID NO: 693793 - DNA, 75 bp, Homo sapiens
gccttcaaccccgagccgctggtgctacagccgggggccattgagactgccatggaagacttgaaaggtcacgta

SEQ ID NO: 693794 - DNA, 50 bp, Homo sapiens
caagcccacacttccagaaatttcagaagctaaaccagccccagaaatat

SEQ ID NO: 693795 - DNA, 100 bp, Homo sapiens
tgtggtccaatgatgtgaccttggccaatgtcatggaagccgctggcctgccaggttggtagctggcagtgttgtgatggcttttgaagaagtatgcccg

SEQ ID NO: 693796 - DNA, 75 bp, Homo sapiens
ttcaaatataatgccatcttcaaggttcctcatgccatgcacctgctgtcacccagcatgcaccctattttaagg

SEQ ID NO: 693797 - DNA, 98 bp, Homo sapiens
cacccgagaggaccacatgaagctgaaggtccagggcatggagccgctccggagacagatgtccctgtggacaccaacctcattgaatttgataccaa

SEQ ID NO: 693798 - DNA, 75 bp, Homo sapiens
gggaaattaagtttcttgcggagaaatgcactcggtgatggaaagagagccactattctgaagaacacttggcca

SEQ ID NO: 693799 - DNA, 90 bp, Homo sapiens
tgtggcagcagttcgtgaagtctgtgaggaggtgtctctgccaacagactcatgggtggtgccatgcagcttaccttccgcaagatggcg

SEQ ID NO: 693800 - DNA, 100 bp, Homo sapiens
tatacccagaatgggaggccttggcccagggaaggagagttgtcatggatgcactggtagaagatgatatctgtattctgaatcatgaaaaagcccataa

SEQ ID NO: 693801 - DNA, 80 bp, Homo sapiens
ctactgtccaattctgtttactctgaattaccatcagctgaagggaaaatgaagaattcctccacgtactgggaaggcaa

SEQ ID NO: 693802 - DNA, 100 bp, Homo sapiens
ttgtggcgaggcagatcctgccccgtggccgcggccgtctcgtagttaccggtattgtaagaacaagccgtacccaaagtctcgcttctgccgaggtgtc

SEQ ID NO: 693803 - DNA, 100 bp, Homo sapiens
gtcatattatacagtgcgacagctagaattggaaaaccttacaaagacaaaggctcaggtcccaatggtgctgactgctggtcccaagtggttgctggat

SEQ ID NO: 693804 - DNA, 100 bp, Homo sapiens
caatttgtgtcccttgggctggtgattctgctggaaatcctgatcagctgcttagcttttcagccgcaactttgttctgctcagatggaagataaaaagc

SEQ ID NO: 693805 - DNA, 74 bp, Homo sapiens
gactatgttcagaaaacctactcagaagacacctaccgcatggcggacaccgacctgttcatggaatgtgagga

SEQ ID NO: 693806 - DNA, 50 bp, Homo sapiens
gaaaaaacgagaagaccccaaaaccagggcaattgaaggaacagactaaa

SEQ ID NO: 693807 - DNA, 145 bp, Homo sapiens
ctgaggaggccgccaagatgccgcagtccaagtcccggaagatcgcgatcctgggctaccggtctgtgggtactccaaagattcaggtttactcacgtcatccagcagagaatggaaagtcaaatttcctgaattgctatgtgtc

SEQ ID NO: 693808 - DNA, 90 bp, Homo sapiens
ggacctggtccagcttcccttcctcaaataaggaaattgacacctggcgtggagtctggttggaagcaaatgtttttttaatggacttgc

SEQ ID NO: 693809 - DNA, 96 bp, Homo sapiens
ggtcatctgcagagtagatcacgaatccctcaatgccacccctcaggtagccatgcaggtgctagaaatacactgcttgtctggagcgggaaagac

SEQ ID NO: 693810 - DNA, 100 bp, Homo sapiens
gttgtacataccaatacctatgcgaaatctgtggtgaacatggcagatttagtggacccccaaaagtacaagggcatatttaacggattctcagttacac

SEQ ID NO: 693811 - DNA, 75 bp, Homo sapiens
ccagttccgtgctccattatgtcgtgtgcttccccggtattgttgcagcatctggcagtgagactgaggatgagg

SEQ ID NO: 693812 - DNA, 100 bp, Homo sapiens
tggaattgtgggagttgtgtctgccactcggctgccggaggccgaagcaatggcaccagcatgatatcattgatcattcctcccaaagaccagatttcac

SEQ ID NO: 693813 - DNA, 83 bp, Homo sapiens
gcgtgggctcccttccccctctgtgggtcccgcgaggagactctcgggctttgaggttaattatagaaaatgccaagtaggaa

SEQ ID NO: 693814 - DNA, 51 bp, Homo sapiens
catatcttcacttggcaaactcaacaagataatcgcttatcagccgtatgg

SEQ ID NO: 693815 - DNA, 100 bp, Homo sapiens
ctttcacggacaacctcagaggacaacgaagtgttcgaaataaggatctggcatgtcaacacaaacataggaagttgaggcagtcaaagggaaataactg

SEQ ID NO: 693816 - DNA, 74 bp, Homo sapiens
ggcggatctggaggagcagttgtctgatgaagagaagctgggcctacacttcgtcgcacggtaagaagaacgcc

SEQ ID NO: 693817 - DNA, 116 bp, Homo sapiens
accagcgtaagggctatggcaggtttctcatcgatttcagccataggaaaaggatacagagtagagtttcatgaacctgaaacttggtggaaatttgatcctgaagaattagaaaa

SEQ ID NO: 693818 - DNA, 97 bp, Homo sapiens
gggaatatccctccacgttgccctcaaagccctgcattccagagggatgccattattacttgcaatcctgaggaattcatagttgaggcgctgcagc

SEQ ID NO: 693819 - DNA, 98 bp, Homo sapiens
cttggggccacctcctgacagcagccctgagacgcccatccaaaaccctgttgtgaaacatgtggacctgggctcctcgaaggaggtgacaggcatca

SEQ ID NO: 693820 - DNA, 82 bp, Homo sapiens
cgcctccaggccaagagggatccttcacccgtgtctgggagcatcgagtacagctgtccggcctccaacgagtgtgagatca

SEQ ID NO: 693821 - DNA, 83 bp, Homo sapiens
aacattcaagtgaagcaaaagcctttcatgattatgtttattgggcacttcctagcaccaggcactgcaataagaaatggagg

SEQ ID NO: 693822 - DNA, 99 bp, Homo sapiens
cacctggggattcctgaggccgtgtttgtgctgtgattgggttattatacccctgcattgacagacatctaggagaaccacataaatttaaaagagagt

SEQ ID NO: 693823 - DNA, 100 bp, Homo sapiens
tcccccctcacccaggcccctgtcaagaaggtgccggtggtgcgagtcttcggagcgaccccggcaggtttgtctacagattttgagcgttcgaagttga

SEQ ID NO: 693824 - DNA, 100 bp, Homo sapiens
aaggcactggctgtggtctacggcccgcacgagttgctggatttgtgcgactcggtgaaggatgatgcccggagggtgatctcgacctttaacattccac

SEQ ID NO: 693825 - DNA, 50 bp, Homo sapiens
tgtgaaaaatgataactcatctcgttttgcccagtccacaggctcatgtc

SEQ ID NO: 693826 - DNA, 100 bp, Homo sapiens
caagcggaggcgcgcggaacagtcgccgaggcgattcccgcccaggttgtccgggtgccaaaaagcatgagtttctgaccagcgttctggacgcgctgtc

SEQ ID NO: 693827 - DNA, 80 bp, Homo sapiens
ttctcgcagtccccgcgcgtggtcatccaggagctggtgactgccctcatgtgtgatttgcggcggccagcggcaggtgg

SEQ ID NO: 693828 - DNA, 75 bp, Homo sapiens
gaaaatattccaaggaatttttcaccaaaaaagccgagccgctgccgctcatggatttgtgccgtcgctcggtgc

SEQ ID NO: 693829 - DNA, 100 bp, Homo sapiens
gatcaagcaaggtacctgcaggacccatttgtgtccattgatctcttggagcagctggggatcatgccttcaaatgtttatctggtgtgactgtattatg

SEQ ID NO: 693830 - DNA, 75 bp, Homo sapiens
ccccctgctatgacccttgcgaatttggagtcaaaatatggacctgagaaaatatctccagaaaatgatattttt

SEQ ID NO: 693831 - DNA, 100 bp, Homo sapiens
ccttatgtgaaagtttttgaacattttcttgaaaatctggataaatcccgaaaaggagaacttcttaagaagagtgggtggcagcacgcaaagggtgtcc

SEQ ID NO: 693832 - DNA, 100 bp, Homo sapiens
gtacgagctgcaggaggttatcggtcccgtcaggaagcccaagtatgtggaaagccccagagtgcctggagatgcagttataatgccattcagagaagta

SEQ ID NO: 693833 - DNA, 100 bp, Homo sapiens
accaattgttttacagtctgttccacatgatcattgtaataagattgaagaagagatgttggctttgcagaatgagcgcacagaacgaatacgaagcctg

SEQ ID NO: 693834 - DNA, 100 bp, Homo sapiens
gtatacccagaaaaatgatggaaaggaaaaggaacatgaattacatctggatcagtcccttgaaatcagagaggagccatcaaaactcgatcaggatgtt

SEQ ID NO: 693835 - DNA, 90 bp, Homo sapiens
tcttatttagttctggggagcgcctcgtcgacatgagtgatgtggaggaaaacaacttcgagggcagagcctcttctgaagagctgaaag

SEQ ID NO: 693836 - DNA, 82 bp, Homo sapiens
catcaaatctgcttcttttggaccttggtcatctaaagttgctgctgacacgccgaccgcctgctgcttcagctacacctcc

SEQ ID NO: 693837 - DNA, 100 bp, Homo sapiens
caacagcggcgcgggcaagaagcgctttgaagtgaaaaagtggcttttcatggcctgccactgaaaatcaagaaagaaccccacagtccatgttcagaaa

SEQ ID NO: 693838 - DNA, 87 bp, Homo sapiens
gtggagaatggagtccggaggctggtggagactccctgcatccaggacagtctgatggtagtgaaaacctttatggatatggatcag

SEQ ID NO: 693839 - DNA, 88 bp, Homo sapiens
agctccaagatgatttgatgaaggtcctgaacgagctctactcggtgagctccagaagctgggaatcaaatgcttttaccataacgct

SEQ ID NO: 693840 - DNA, 75 bp, Homo sapiens
tgcctgatgccaagttcactaagggtgaatttcagagctccacctggaggggaacttcctacaccgcctccccag

SEQ ID NO: 693841 - DNA, 80 bp, Homo sapiens
caaataaccgttttgaaatttgtaaacaggaacatcgataagtagtgtaaaaacttgcacaatgaaatccgaagccaagg

SEQ ID NO: 693842 - DNA, 85 bp, Homo sapiens
gcctcctgagtagctgggactacagctatcatggtgaacttacttcagattgtgcgggaccactgggttcatgttcttgtcccta

SEQ ID NO: 693843 - DNA, 135 bp, Homo sapiens
ctcaaccctatgctgtctaccctcaggcaacccaaacgtatggactacctccttttggtgtcatggagaaactccagctgggcccagagattctgcagcgggaaaatccaaggcttatttatgccaggctgagtg

SEQ ID NO: 693844 - DNA, 104 bp, Homo sapiens
ccgggaggaaggaacgaggcaaggagctaaagcagcgtgcgttcagccctgggccactcatctctgcccagctgctgccctccccaggaggcctccatggcttc

SEQ ID NO: 693845 - DNA, 131 bp, Homo sapiens
gggccgagatgtctcgctccgtggccttagctgtgctcgcgctactctctctttctggcctggaggctatccagcgcaccatgactcctgtgaggatgcagcactccctggcaggtcagacctatgccgtg

SEQ ID NO: 693846 - DNA, 83 bp, Homo sapiens
gtcatcctgctggatgaggccctcaagtacctgtcccggaaccacatgcacggctgtctgtccccagaccccagagcacgtcc

SEQ ID NO: 693847 - DNA, 90 bp, Homo sapiens
agaattgagtgatttcctgcaggctatggaacacactgaagttcttcagcttctcagccccccagggagagtcccgtattctcagagtaa

SEQ ID NO: 693848 - DNA, 74 bp, Homo sapiens
gctaagatgcccggacatcctggaagctgggaaatgcaatggcagatgagtctggggaccagcgaagaccacca

SEQ ID NO: 693849 - DNA, 75 bp, Homo sapiens
caaagccattcgggttggagtaattgttcctcagatgttagcaatgatggttgatttggaagaagatgaggactg

SEQ ID NO: 693850 - DNA, 75 bp, Homo sapiens
aacatgctggagccaagtgctaacgagctcttgtccctggcaaagcgaaagcgcagtgactctgaggagaaggag

SEQ ID NO: 693851 - DNA, 89 bp, Homo sapiens
acctgacgggcctgcgagggttgaagattgtgaagcaatagcctaagcaaatcacagatgaaggtctcattactatatgcagagggtgc

SEQ ID NO: 693852 - DNA, 82 bp, Homo sapiens
tttgttaaggattccaagtaactcttatttgatcttcagtttagatcttggaggcatatcaactgtggttctaaatggctat

SEQ ID NO: 693853 - DNA, 75 bp, Homo sapiens
aagcatcgtcctaggaatggatttctcctctaatgacagccgtgctggtatagaggactctaagaagtggggcat

SEQ ID NO: 693854 - DNA, 83 bp, Homo sapiens
cgcgcgggtgtcgctgggctgtcggcctggaccttgcagccgcaatgacaatgcagatcttcgtgaagactctgactggtaag

SEQ ID NO: 693855 - DNA, 51 bp, Homo sapiens
agttcccgttacaatcactagtgttgcaggagaactgcgacacatcaccaa

SEQ ID NO: 693856 - DNA, 75 bp, Homo sapiens
cgcggactgaaggagactgaaggtgttttaaggatttccaactgcagcgggctaacaagatggagctgcgaaagc

SEQ ID NO: 693857 - DNA, 73 bp, Homo sapiens
aaggattccaagtaactcttatttgattttggaagatggcaaagttcatgacacccgtgatccaggacaaccc

SEQ ID NO: 693858 - DNA, 100 bp, Homo sapiens
ccaccctcagcagatgataatatcaagacacctgccgagcgtctgcgggggcttttaaagaagcagttttttcaccgagccctaaaagtaatgaaaatga

SEQ ID NO: 693859 - DNA, 74 bp, Homo sapiens
ccgagaagagcagagcggagggagccccagacacgttactccacaggatccgctgaacataggatgttgccaca

SEQ ID NO: 693860 - DNA, 100 bp, Homo sapiens
ggcaaccatgcagctattaaccagtgtcagatagtcaatggctacttcgtgcacttctttgcacctcaaggccttccagtggtgcctaagaacgtggcct

SEQ ID NO: 693861 - DNA, 90 bp, Homo sapiens
ctggtgaaggcagacagcgagtggcgacgatggaaggaagccatgctgaagcaccgggactacgagacggccacactatcggacatcaaa

SEQ ID NO: 693862 - DNA, 83 bp, Homo sapiens
actgaaggactctgaagctgagataacgaaggaggcccaacttcattcaataaggagcctgacggatttatcccagacggtag

SEQ ID NO: 693863 - DNA, 82 bp, Homo sapiens
agctaaagcagcgtgcgttcagccctgggaatgattacggacctgaagccaaagaacaagatgcgctagtggacagattgct

SEQ ID NO: 693864 - DNA, 87 bp, Homo sapiens
catgtcagagagagagcttggttaacttgggagaaagtttcatctgtggatggagtattgaaaaagaaggggagcgttcaattccaa

SEQ ID NO: 693865 - DNA, 100 bp, Homo sapiens
ccccgcgctgcggcctggcggcttccaggcgcactaccgcggttgatgccggcccaggatggatcagacctgtgaactacccagaagaaattgtctgctg

SEQ ID NO: 693866 - DNA, 100 bp, Homo sapiens
cgcagctccacactccaggtacttcttccaaggacctaggtctctcgcccatcggaaaggccttggcccctccaccagaggaaggtgctgccacgtgtct

SEQ ID NO: 693867 - DNA, 83 bp, Homo sapiens
gtgccttgagagcttcaggggaaatggcttcagcgcagtatattactgcagctaatgggaatgacagcaagaaatttaaacga

SEQ ID NO: 693868 - DNA, 100 bp, Homo sapiens
cgtcagttgagctgcctgtggaggtataccatacttttcacgatgaggtggatgagtatcggcgacactggtggcgctgcaatgggccgtgccagcacag

SEQ ID NO: 693869 - DNA, 74 bp, Homo sapiens
gctcatgacgctgcggctgtggtccagctgaggacgactgggtttggattcagaagaggattattatacaccac

SEQ ID NO: 693870 - DNA, 55 bp, Homo sapiens
gaacgggaaggagacgctgcagcgcgcagacccccccaagacacacgtgacccac

SEQ ID NO: 693871 - DNA, 82 bp, Homo sapiens
ggctgtggaagctcccgcggcgccgcgatggacctcgaggaggcgtttttgaaatcatgaatcctgtttatagtcctggatc

SEQ ID NO: 693872 - DNA, 100 bp, Homo sapiens
caaaagtttggaaatccggacgctaacagtggaaaggctgttggagccacttgttacacagctgtttggggctcagctaagtgaccacacaggagagcag

SEQ ID NO: 693873 - DNA, 100 bp, Homo sapiens
gagcagcagcggtaccgttacgcggagctctcggaggaggacctgaagcagctgcattcctctgaatattgatttgctgaatagcccagacttattggaa

SEQ ID NO: 693874 - DNA, 100 bp, Homo sapiens
aggaggaagccgactgctgcctggtctgcaaagaagtcctttcaagtctctaggactggactcttcctaagcaagtccgtctcggagtcggagagcgcgc

SEQ ID NO: 693875 - DNA, 146 bp, Homo sapiens
ccaagagcgacgccgccgtgtgcccaacggtcggtgtccccggctgaggcagcgcggccgcagcagccctaataacaagcctttgtattcatttgaagataatgcagactatgtttatgatgttatgtggtcacctacccacccag

SEQ ID NO: 693876 - DNA, 82 bp, Homo sapiens
gcagagcccatttcagaacctgagaaagtagagactgcacatgctaggagaatactacagcagtctaacagaaatgcatgca

SEQ ID NO: 693877 - DNA, 87 bp, Homo sapiens
tcgaaaactggatccagaactccattaccagtgtgcttttcttggagaaagaagaaaagaagaaagaaggaagaagaagaagaaaga

SEQ ID NO: 693878 - DNA, 73 bp, Homo sapiens
tgtgtgtattgatcaatggaagaacaaaatctggcctgaaataaaaggtgaaaggaagcatgtttacaccaat

SEQ ID NO: 693879 - DNA, 99 bp, Homo sapiens
caagcggctccccaaccgggagcggctcacggcggaggacgacgcgctcaaccagatcgcgcgggagaatatgacattgaatttgaggacaaggaaatg

SEQ ID NO: 693880 - DNA, 101 bp, Homo sapiens
gttcagtgtatcgacggataacagagttcacatattcaaacctgtatctgtgcaggcaatgtgtgattacagtggcgagatcttgaacaactgctgcgtca

SEQ ID NO: 693881 - DNA, 101 bp, Homo sapiens
tcgagaccagcctgggcaacatgcgatgactacctgtccctggagggttcccgctggccaccagccatcaggcaggccacacgctggaagtacacgcccat

SEQ ID NO: 693882 - DNA, 101 bp, Homo sapiens
cccgctacggagcgtcactccgccagagctgccccaggcccggcagccatggcggtggaaggaggaatgaaatgtgtgaagttcttgctctacgtcctcct

SEQ ID NO: 693883 - DNA, 95 bp, Homo sapiens
cagacgcggcacagagagggcctgggagcttgctgcagcttcagcaaacggggattcagcgtccgatcctttggaacagggactcacgtgaagct

SEQ ID NO: 693884 - DNA, 75 bp, Homo sapiens
tgaatgaacacccattgactgaagtgaggagattacctggggcaattgatgttatcggtcagactataactatca

SEQ ID NO: 693885 - DNA, 75 bp, Homo sapiens
agcaccatggggaagcgggacaatcgggtggactctgtctactagtgacgatgtcgaagacagggaaaatgaaaa

SEQ ID NO: 693886 - DNA, 100 bp, Homo sapiens
ggctccagatggagaattatttgctgttggatcgtttcatactttacgcttgtgtgataaaactggggaagtctttgaccataacatcaaccaatttcag

SEQ ID NO: 693887 - DNA, 100 bp, Homo sapiens
ctgcaggtggagacccgcaccagctcccgcctccatctgaagagggctccaggcatccggtcctggtccctgctggttgaggagaaggcagagccccccc

SEQ ID NO: 693888 - DNA, 104 bp, Homo sapiens
cgagagcgtgaacaacgcatgcggaatcagttggagctagcagccagggagacgagttgtactgctgtcacaggaaatggacgctggattacaagcatggcagc

SEQ ID NO: 693889 - DNA, 90 bp, Homo sapiens
cttcagtggtggggacaagatgcttcggagcattgaacagcatatgccatatatgagctggctgtggcttcatttcccaagaagcaggag

SEQ ID NO: 693890 - DNA, 82 bp, Homo sapiens
ggaggaaggaacgaggcaaggagctaaagcagcgtgcgttcagccctggggaatccattgaagaggccatctccacattcag

SEQ ID NO: 693891 - DNA, 75 bp, Homo sapiens
cagtccacccaaggtctcctcggatcgcctggagaggcactcggacctgacagccgctgtactgtgttaaggaaa

SEQ ID NO: 693892 - DNA, 98 bp, Homo sapiens
ccagagggccacgcagaggctggcgggcattccggaactgctcaacaaacttcgccaggcttctgggaacttggcagacgcagcttagagagactcac

SEQ ID NO: 693893 - DNA, 88 bp, Homo sapiens
gctcccccagcaccgaagactgcgatgaatgttatggaacagttcaatcctgggctgcgaaatttaataaacctggggaaaaattatg

SEQ ID NO: 693894 - DNA, 83 bp, Homo sapiens
aacctctacagagatgtgatgctggaaaacttccagaacctggcctcactaggtgtgactgaagaaatatcaaatgtttccta

SEQ ID NO: 693895 - DNA, 127 bp, Homo sapiens
ctacaacatccacacagagacgcccctgctggacctcatgagcgacgcgctcatcctggctaaatcgatatctattgaaatcgaggctcctacccagatatctttagtggatgaagcatcaggagag

SEQ ID NO: 693896 - DNA, 96 bp, Homo sapiens
ggggaagcagcacgggatcccagcctcaggcctgcacggacggtgttggttgggataacgaaggaggcccaacttcattcaataaggagcctgacg

SEQ ID NO: 693897 - DNA, 100 bp, Homo sapiens
ttatgatgctatggctggagattttgtgaatatggtggaaaaaggaatcattgacccaacaaagacccctgggcatactccttccttaagatgggatgag

SEQ ID NO: 693898 - DNA, 90 bp, Homo sapiens
aaaaagattcccaggatgtgagcaacacgggaccgttccatcagagttcctttctactgtcagctagcaagaagaaacgaattagtaaac

SEQ ID NO: 693899 - DNA, 101 bp, Homo sapiens
cttcctgctgctcttcctgctcgtgctcactgtcaccgagccgctgcggccagatccctaaagaagtggctgacatctttaacgcccccagtgatgatgaa

SEQ ID NO: 693900 - DNA, 82 bp, Homo sapiens
tgtgtctcttctaagctgaataaagctgttttggaactgtcaggtacctcaaagcggctgtggcagaaattctcaggagcag

SEQ ID NO: 693901 - DNA, 83 bp, Homo sapiens
gttaaagatgctcattttacttacaggttaactgaagtccaaaagatgtctaggagaagactttgcagttgtgcagcaagaaa

SEQ ID NO: 693902 - DNA, 74 bp, Homo sapiens
ttggaaggaggagattctgaagataaggagagcccacaggcggttttgtgagctgcttccccaggagcagcgga

SEQ ID NO: 693903 - DNA, 83 bp, Homo sapiens
tgggagtctccgcgtcccgctcgctgggagagaggcaatgaatcgctccctggctaatgtgattcttggaggctatggcacca

SEQ ID NO: 693904 - DNA, 75 bp, Homo sapiens
caggtggtgcggaaagtggctggattggacaagcaggcaaagctgagggtatcagctctgtgataacagcgtggg

SEQ ID NO: 693905 - DNA, 103 bp, Homo sapiens
gccatcgagcgcccctccgagctggggttggacgctgccagtttgcacagcagcaggggtcgggccccggctcagtggtcccaggcagctcgggtgtcggaac

SEQ ID NO: 693906 - DNA, 83 bp, Homo sapiens
acgaagagacagctggatgaagatgctgaaatttctggaaaagacaatggaaatcaggggcaggaagagaacagtgtggggtg

SEQ ID NO: 693907 - DNA, 100 bp, Homo sapiens
tcttacaaagtggaggtttgtggcagccctgcatggagcaagtctgtcagcaccatctttctaacattctgtggctcctgatggatctgagaagatggac

SEQ ID NO: 693908 - DNA, 100 bp, Homo sapiens
ctttgacttcctcctcctcgtctgctgcgccatgctcatggcccgtcacagctggagctgactctccaggcatccaagcaaaatggcacctggccccgag

SEQ ID NO: 693909 - DNA, 97 bp, Homo sapiens
tcaacattgtggctgtcaagaatgatcatgattttcttgaaaaggaccttgtagaacctctttgcaggatgaatgctatcaagtaagacaagtgttt

SEQ ID NO: 693910 - DNA, 100 bp, Homo sapiens
gttcagatcacttcagtgcctcagagtgcagttcccaaggaggcttcaagacaaagggccccttacacaccagacagtgattctaccagaaaggaatgaa

SEQ ID NO: 693911 - DNA, 80 bp, Homo sapiens
gtttgcaccgagagaccatttgcagcgggtgtggacactgccagcggctgcagccgacttggaatgacctgggagacaaa

SEQ ID NO: 693912 - DNA, 83 bp, Homo sapiens
ctcgcccagctcgcccagcgtccgccgcgcctcggccaagcaagagtgagccatggagctacgtgtggggaacaagtaccgcc

SEQ ID NO: 693913 - DNA, 50 bp, Homo sapiens
gacagcgaggagctgagggaccctgagctggtgagcaggctgctgcacct

SEQ ID NO: 693914 - DNA, 100 bp, Homo sapiens
cgccaggacctccttcttcaggagagcgccccagggcaagccccgctccggccaacaaagacctcacctctgaggaccagatcgtactgctgaagtcaag

SEQ ID NO: 693915 - DNA, 75 bp, Homo sapiens
caatcccactgatgaggatcagcccatgatgcctgggaaccactcacctccttctgtgccatgaggccacctcag

SEQ ID NO: 693916 - DNA, 101 bp, Homo sapiens
ccgggagggagttgtcggcgccgcggccgctgcggacggacgctcgcctgccggctgagcaattaatggatgcctcgaagttgacgtacatatatattcag

SEQ ID NO: 693917 - DNA, 98 bp, Homo sapiens
aagcatctgcattcaaaaggcttccttgtgtttgctggctgcttgatgaagtgggtcccacattgagaactggcattcgatcctgcgcaatgggctgg

SEQ ID NO: 693918 - DNA, 80 bp, Homo sapiens
ggactgctgcccccatgacatcctggctgggacggttttccagcttgcagctcatctggtgtactggggcaaggccatca

SEQ ID NO: 693919 - DNA, 76 bp, Homo sapiens
ccccgtcagcatcccagccgtgctcacgttctagcgactgcgaagatagctcgctgagctggaaccccacagatca

SEQ ID NO: 693920 - DNA, 51 bp, Homo sapiens
cagacctgttatcctaaactagcagaagaaggaggaggagtcggcgggcgg

SEQ ID NO: 693921 - DNA, 100 bp, Homo sapiens
gaaaaacgaccgtggccacagtaccacaaagtctctgattgctcgctgtaagcagctcatctgtgaccccagctacgtaaaagatcgggtagaaaaagtg

SEQ ID NO: 693922 - DNA, 90 bp, Homo sapiens
attcttcagacattacgagaaatgttagagaagaaagacagctttgtggaagaggtccatggctaatgaaacacagaaggttggtgccat

SEQ ID NO: 693923 - DNA, 49 bp, Homo sapiens
caaggaccgcggagtcggacgcaggtgtcacgtcttgaaattttaaatg

SEQ ID NO: 693924 - DNA, 100 bp, Homo sapiens
gaaagatggatttttgcatgagacgcttctggacagcttccttcaggcaaaagaagaactgaagctactaaaacttcctgggttcatgtacagtgaagtt

SEQ ID NO: 693925 - DNA, 82 bp, Homo sapiens
gcagctcctggcctattacttcacggagctgaaggatgaccaggtcaaaaaggtgtggacactgccagcggctgcagccgac

SEQ ID NO: 693926 - DNA, 50 bp, Homo sapiens
cgaagtatcagctccttttaaaagctggatctccagaactgttctctgga

SEQ ID NO: 693927 - DNA, 50 bp, Homo sapiens
acatccattattgggaaatgtcaagatcagcttgaacgggtctttttacg

SEQ ID NO: 693928 - DNA, 100 bp, Homo sapiens
ccgggagaaattgctgaagaactcgcaagctcctacgaaagaaagctcatcgaggatggctacttttctcatcggccgaaagagaaagtgcgaacagaca

SEQ ID NO: 693929 - DNA, 80 bp, Homo sapiens
agcaatctcagctctcaaagtggtgctggagaatctggtaaaagcaccattgtgaagcagatgaggatcctgcatgttaa

SEQ ID NO: 693930 - DNA, 149 bp, Homo sapiens
aaaatacaaagtaacaaaggatcatcatataaactcctggtagaacaagcaaaactaaagcaggccacttcaaagatatgttccatttaaggctctgaagatggggagagaattctggatgatccaggtgggcccttaataatggtccc

SEQ ID NO: 693931 - DNA, 90 bp, Homo sapiens
cagagagcgttgctgcagccgcccagtgggtgaaggagtgcgtgagagacaaagccgcttacaaacacgcagatggcaagaagattgatg

SEQ ID NO: 693932 - DNA, 88 bp, Homo sapiens
tgaccgagagcgcgaatatcgtcatcgttagaagatatggatcagaaactttcgaagttggtagaagagctcacaacttcaggagaac

SEQ ID NO: 693933 - DNA, 100 bp, Homo sapiens
ttcgcggtggcgatgctcttcttggaaaaccagatccagaaactggaggagtcccgctcgaagctagggaagaggaagaacgtctgagaaataaaattcg

SEQ ID NO: 693934 - DNA, 76 bp, Homo sapiens
tccttcagctcttcagtgagctgaccaggccagagtgcctggtgaagaatgtgatgggatcactagcatgtctgcg

SEQ ID NO: 693935 - DNA, 101 bp, Homo sapiens
ggaagatgaccccaggtggccaggagcaggagaggagagccagagaagtgacagggaagctacaggttacaacagatttgtgaactcagccaagcacagtg

SEQ ID NO: 693936 - DNA, 83 bp, Homo sapiens
catgacgtttggaccccgcggccaccactggcaaggcccagcttgtgaaaatgatagcagactccttgaaagcagggtccttg

SEQ ID NO: 693937 - DNA, 88 bp, Homo sapiens
ggtacgggcactcttcatagttcctagacaaaggtgtgtggtctggacgggcgatgaccgagttttcttcttcaacccaacgatgcac

SEQ ID NO: 693938 - DNA, 90 bp, Homo sapiens
aaaggtttaaagacaaaaaacatctggataaattctcttcttatcatgtgaaaactgccttctttcacatggagtcttgctctgtcgccc

SEQ ID NO: 693939 - DNA, 100 bp, Homo sapiens
cgacaggcggcgcgggcggcgaaagcgtggatacccatcaacgaagttttgatattggaattcagattggctatcagcgacgcaataaggatgtgttggc

SEQ ID NO: 693940 - DNA, 100 bp, Homo sapiens
agacgaggaatcagctttgaagtgggagcccagttggaagcccgggaccgtttaaaaaactggtctcagccttagatccaaggacagtccaaggaagtcc

SEQ ID NO: 693941 - DNA, 51 bp, Homo sapiens
atttaacacaagtgttcccgaagagccttctcttggagtcaagaagcctac

SEQ ID NO: 693942 - DNA, 82 bp, Homo sapiens
gttccccaacatgcctcaccctcatctatatcctttggcagctcacagtgtgtcccggcatggatatccggaacaacctcac

SEQ ID NO: 693943 - DNA, 74 bp, Homo sapiens
cggaatgtcatccagcgagtgattaggtgctagaacagacttaagaaacattgagaagaagctggccttcgaca

SEQ ID NO: 693944 - DNA, 75 bp, Homo sapiens
ggatcacggatgtaggaagtgcaacaacctttaaggcccaatctagtggaaactagttgtcccaacatacggatg

SEQ ID NO: 693945 - DNA, 75 bp, Homo sapiens
taaaagtcctgaaacagttttgcagtcggatcagcgagaatgtgtgtccagacaggaatacaggaagtatggagg

SEQ ID NO: 693946 - DNA, 97 bp, Homo sapiens
aggctgtgcgggccccgctccgcttcgaatgggtgcaggccactgtcgtggggctcttggctgctgtggctgcgctgctgttgggcgtggtgtctcg

SEQ ID NO: 693947 - DNA, 100 bp, Homo sapiens
ctttcaggaggccctggctatctatccaccatgtgggaggaggaaaatcatcttatcagacgaaggcaaaatgtatgatggattaattgcctctgaagga

SEQ ID NO: 693948 - DNA, 84 bp, Homo sapiens
agtaaacggggctgctggtgggccgcgtcgaagacatggaccagggctacggagaaaatgtggtgacctggaagaagaactcaa

SEQ ID NO: 693949 - DNA, 83 bp, Homo sapiens
cggatcactaccgctactgagagccagcaaaaaatggccccatttatgatgtagtttggaattctagttctactgagttttgt

SEQ ID NO: 693950 - DNA, 100 bp, Homo sapiens
acagagtgggacctaatggtgagagagctccctctttgcccactagcagggcattagctggtgctgaagacagtggctgcttggcgagcctggatctcca

SEQ ID NO: 693951 - DNA, 100 bp, Homo sapiens
ggcgatgttttaaatatgactgcttcctacatccatacatggcacctgaagtcatcactcgtgccaaaggagagggccatgggcgtgcggccgacatctg

SEQ ID NO: 693952 - DNA, 82 bp, Homo sapiens
tggacgagtaatcgcctgctttgattcattgaaaatcctgtttgaccaaactcagagatcaattaaggcacagcttcagaac

SEQ ID NO: 693953 - DNA, 100 bp, Homo sapiens
gccatcgacccccagagcaacgttgtcggggccaaagtggtaacgaacgcccgcagcccgggggctcgatgctatggattcgtcaccatgtcgacatctg

SEQ ID NO: 693954 - DNA, 110 bp, Homo sapiens
tggacaggaattggaagaactcacagctagtctatttgaggtttgtggaaggaatgcttaacatttgttacaatgccgttgatcgtcatattgaaaatggtaaaggggat

SEQ ID NO: 693955 - DNA, 96 bp, Homo sapiens
gccagaactctggatcctgaactggaagaaaatgtctatccaacaaaacttacctggggtccctacttatggttttacatgcttcgggctgctaca

SEQ ID NO: 693956 - DNA, 82 bp, Homo sapiens
tgaaagaccaaaaatcccagatccagaagctgtcaagccagatgactggtaaccaaggagcagtgaacagcagctactacag

SEQ ID NO: 693957 - DNA, 88 bp, Homo sapiens
aaactcgaagaacagctgtggaaagaagttgcaaaacactggtccaaaagaaactcttccttcaaaacctgtgaagaaagagaaggaa

SEQ ID NO: 693958 - DNA, 100 bp, Homo sapiens
ggaagcagaaaaagagctaaagagaaaacaagatgacgctgaccaggacatgatgatggcagggatgatcctgtttgaccaaactcagagatcaattaag

SEQ ID NO: 693959 - DNA, 96 bp, Homo sapiens
tgagatcagtatcaaatatttactgaaatcctggagtaataaacccggcagtgggcaggtgtttgtgacttcagagaaccaacttgtgtattaccc

SEQ ID NO: 693960 - DNA, 75 bp, Homo sapiens
tcagacatgtcatcaactcagctgatgagcgggatcgtgtgcagaagaaaaccttcaccaagtgggtcaacaagc

SEQ ID NO: 693961 - DNA, 75 bp, Homo sapiens
cccacaatgccacaggaggaggcagcagagaacgtttgtctgcctgatgagagccacttgggttaagaaactacc

SEQ ID NO: 693962 - DNA, 75 bp, Homo sapiens
ttcacagaggaacactgccggggcccaaccacaagacgactcaataggaggaagtgagatggaagattttcgagg

SEQ ID NO: 693963 - DNA, 75 bp, Homo sapiens
ggatttctccgcctcagcccaacggggagagacacctatggctgccgatgaaggctcagcagagaaacaggcagg

SEQ ID NO: 693964 - DNA, 98 bp, Homo sapiens
agagagcattctcggggctggaaggcctggagcacctctccagaaacatgacaaggaggactttcctgcctcttggagatcagaggaggaaatggcag

SEQ ID NO: 693965 - DNA, 111 bp, Homo sapiens
gggagtgatggtcagctaggactcatgactactgaggattctgtggcagtgcccaggcaactcatgcagcaattccagaaccccgacttcccacccgaagtagaggaacag

SEQ ID NO: 693966 - DNA, 100 bp, Homo sapiens
cggaggagaccggaccgaagacggaccgtgccgggaagaggtgactgaaaactcctgaggcatttcctggactagaatgggtagtgaagacccatgtcag

SEQ ID NO: 693967 - DNA, 75 bp, Homo sapiens
aagatggccctgcggcgcgcctttactcactggaaacacttaatagctcttcaagtctgcaataaaaaatggcct

SEQ ID NO: 693968 - DNA, 123 bp, Homo sapiens
caggatccctgcttgctggagaatgacccagatgtcccaggtgcaggagctcttccatgaggcagcccagcagattgcaaatgcacaagattcgagacctatgtatacagagggccaactttt

SEQ ID NO: 693969 - DNA, 98 bp, Homo sapiens
ccatgccgctcctaagcctgcacagccgcggcggcagcagcagtgagaggtcttattagtaggtaagaaacagctgctcctccacctccaccccagcc

SEQ ID NO: 693970 - DNA, 100 bp, Homo sapiens
atgatgctggaaaatgaccgtagcatggcttctttggaggggaggtatggtgtcaagaaaacatagtcaccattattacgaaaagtaaaatatggaagag

SEQ ID NO: 693971 - DNA, 75 bp, Homo sapiens
tcttaactaataagattggaactgtattaggccatggtggcgtgttacccaggcaacgggctcgggtacgtaagg

SEQ ID NO: 693972 - DNA, 123 bp, Homo sapiens
ccgcgaaccaacggttagcggtggcaggggctgactgagagcgtctgcttggtcacttcatgggcaagaagagtctggagccttccagcccatccccattggggacagctccccacacctccc

SEQ ID NO: 693973 - DNA, 75 bp, Homo sapiens
atagagtttccttataagaatcttccaattgaggatatcaccaactccacattgtatgatccatttgctgagcac

SEQ ID NO: 693974 - DNA, 98 bp, Homo sapiens
taagttgtcatttctcttgagtaaatacctaaaagtgggcttgctggttcacttcttcaactgagatggacatgatataatctccattgagtcaaaga

SEQ ID NO: 693975 - DNA, 50 bp, Homo sapiens
cgccaggaccggccgaacgcagagagagcatcagtgatgtcacgtttgga

SEQ ID NO: 693976 - DNA, 100 bp, Homo sapiens
aacaaaagttagaattcttgaaaaaaagcatgttattgaattatcaacatcactggaaagcgtctctagcagctgatatccccagacttggatatagttc

SEQ ID NO: 693977 - DNA, 95 bp, Homo sapiens
ctctggaggacgccaaagaaggctacagccacataaagaagatccctaatagtcatttctcaacaattatatagtcaactgatgtaacaatggta

SEQ ID NO: 693978 - DNA, 76 bp, Homo sapiens
ctctggatgatgcagaagaggagtcctttaggaaggtcattcccaaaagcaagttcgtcttggtgaagttcgacac

SEQ ID NO: 693979 - DNA, 74 bp, Homo sapiens
agagatcgaatgacctccaccatgcacaagatgttgtccctgcccccagccaatttaatggatcgagaagtggc

SEQ ID NO: 693980 - DNA, 100 bp, Homo sapiens
ctactatctgggcatcgggcccacactcaacatcctgggtgccctcaatcctgtttgagagtggcatcaattggggccgtgtggtggctcttctgggctt

SEQ ID NO: 693981 - DNA, 100 bp, Homo sapiens
ggcttttgtgctcattttggttctcagtttctacgagctggtgtcaggtttttcgttggaatatacgttgcacatttatggcgattctgagtgtgagggc

SEQ ID NO: 693982 - DNA, 74 bp, Homo sapiens
ccgaaaagaagattactctgcaacagctaaagatggctgtatgggcgaaaaagatgaccgaaattcaaactcct

SEQ ID NO: 693983 - DNA, 100 bp, Homo sapiens
tcatccagtactaaatatgatcccgatattttaaaagctgagatctccactacaagattaaggcagaaaaatatggctcaggagactaaccagaccccgg

SEQ ID NO: 693984 - DNA, 119 bp, Homo sapiens
gttttcttatttagccggagtgagaagcaagaaggccctggacacagcaatatctctgggctttcacaggaaaaactggaggagtgcctaaagcagttaaaggaagaaagagtgataag

SEQ ID NO: 693985 - DNA, 83 bp, Homo sapiens
atcctgggtagcctctaggaagcgctagacacatgaaggtgggagtcaatcattttgacaagtctcctgaaaggaacagctag

SEQ ID NO: 693986 - DNA, 97 bp, Homo sapiens
tgaatcgggcacctctgcagctgcagaagtgaaccggcaaatgctgcaggaactggtgaacgcaggatgcgaccagtagagacggggttttgccatg

SEQ ID NO: 693987 - DNA, 100 bp, Homo sapiens
aacctgtgctgcaggatcctgggcaggagcgaagggccgttgctccagggagaactgcaaatatcttcatccacccccacatttaaaaacgcagttggag

SEQ ID NO: 693988 - DNA, 96 bp, Homo sapiens
atggattaaattttttgctgatggagagctggaatctatgggattttcagctcgatacaatttcacacctgatggcggactgtgggggactgcccc

SEQ ID NO: 693989 - DNA, 82 bp, Homo sapiens
ctggagtctctcaaatctcaggaatttgttgaaacggggctttgctatgatactcggctggtcaaaatgtctttggaagttt

SEQ ID NO: 693990 - DNA, 75 bp, Homo sapiens
atttagcgcatcatgtgatccggttctacttgtccaattctgaaaaggaacgttatgaaaaagaattcagccaag

SEQ ID NO: 693991 - DNA, 90 bp, Homo sapiens
ggcatgtgccagtattatgatgctcaatgtcaagtcatctttggctcaagagaagaaatcatagcctataagccacctggatttagtctg

SEQ ID NO: 693992 - DNA, 100 bp, Homo sapiens
catccatgaccctaatggtctttttgttcaagataaagtgattttttgcctttgttgattaactggacaaattcagagagaagaagaaggaggttcctgc

SEQ ID NO: 693993 - DNA, 75 bp, Homo sapiens
ggaaccagcagcaaagaagtgctatctggaaagagaggagtatagtcatggccaacagcaaaaaactcaagaggg

SEQ ID NO: 693994 - DNA, 82 bp, Homo sapiens
gtcagagcccggggacggcgaggccctcatgtaccacacggtggaacacctgcagcaggagactgctgctctgaaaaagcaa

SEQ ID NO: 693995 - DNA, 73 bp, Homo sapiens
gccgccgtctggaaaaagagccaaggtcagtttaggggctggtgcaaaggatgagttgcacattgttgaagca

SEQ ID NO: 693996 - DNA, 87 bp, Homo sapiens
tgcacagccgcggcggcagcagcagtgagagcctgtcaggattggagctgctttccgagcacctggaccccaaactcctgtgccgcc

SEQ ID NO: 693997 - DNA, 96 bp, Homo sapiens
aatgcacttaagtctttatcaattattagcactaggagaaatggtagccttaaaaaaagtacgtctggataatgaaaaggaaggctttccaattac

SEQ ID NO: 693998 - DNA, 100 bp, Homo sapiens
ggacgaggaggaggccatggtggtggccgtaattccgcggcccgagccgatgctcagagagcctacctggacgtagacattactctgtcctcagaagctt

SEQ ID NO: 693999 - DNA, 100 bp, Homo sapiens
cggcacttccggccggcggcggctgctccgggtgagcagggactccaacctgtctgtgcacacagaaaacccggacctcactccctgcttccagaactcc

SEQ ID NO: 694000 - DNA, 100 bp, Homo sapiens
tgacaattcaacttactctctcttcccacagagccagaaaatgcatgacacaggagaagatgtaccctcatctgttcagtgagagatgtgcaaatcaaca

SEQ ID NO: 694001 - DNA, 90 bp, Homo sapiens
tggaagacgcgctcctgcgccggctccatctccattctgggttctgatgatgccactacttgtcacattgtggtcctgaggcacacaggt

SEQ ID NO: 694002 - DNA, 96 bp, Homo sapiens
gcctctccggacaagaggactgaagcagatggcaactctgatcccaactctgatgaacacgtcactgctgggaagcatcggcatgctgaactcggc

SEQ ID NO: 694003 - DNA, 90 bp, Homo sapiens
ggatttaaagcttcagaggcagaaaggcagaagtggaagcaacttctatttagtgatcatgaaacttacagcctatttagatcttaacct

SEQ ID NO: 694004 - DNA, 78 bp, Homo sapiens
tcaagtgctgcagcgcgggctgtgccaccttctgctctctgcccaatggttataagaggctactccaggacctggagg

SEQ ID NO: 694005 - DNA, 98 bp, Homo sapiens
cgggctttcagttgttagaccttgtccacgaggagggagaacctgaagccgcctctgcaggctcctgcaaactgtttgcagacaaggtcccaaagaca

SEQ ID NO: 694006 - DNA, 75 bp, Homo sapiens
gcttcagaaaaaatgaaagaagcagtcagattggacagtcattttgtttactcattcagccctgttgcaggtccc

SEQ ID NO: 694007 - DNA, 97 bp, Homo sapiens
cagttaatgctgaagcttcattaaggagggatgctgaaaacgccattcaacagatgggtggccagtggcttggtggaagacaaatcagaactaactg

SEQ ID NO: 694008 - DNA, 75 bp, Homo sapiens
ggcgcccgtctcccacagcaaaggaggaatgggctctttccatgccatgataaactcttccgtgcatgtcataat

SEQ ID NO: 694009 - DNA, 99 bp, Homo sapiens
ccatgccgctcctaagcctgcacagccgcggcggcagcagcagtgagagagttgcatgctgagaatttgaaaaatgaagatgatgtagacactggacta

SEQ ID NO: 694010 - DNA, 88 bp, Homo sapiens
ttgagagtgtcacatggattgttttaaagcaacctataaacatcagctctcaacaggttaccttatcttacagcaaaaatctcaagcc

SEQ ID NO: 694011 - DNA, 80 bp, Homo sapiens
gaaatgaacctgcccacggtgtccgcgctcagggtatagccaggctggagaaaagaagctgccaccatggttgcactttc

SEQ ID NO: 694012 - DNA, 90 bp, Homo sapiens
catctctagcaagtggtcaggacgctgattgttctgcgcaggttggagggagctgcagtccatggctgaccaggagcaggtgtcaccagc

SEQ ID NO: 694013 - DNA, 101 bp, Homo sapiens
cacatcaccttgatttttaatcccacgggaactgggaacagccaggtgccccaaagcaaatacgcggagctgctggccatcattgaagagctggggaagga

SEQ ID NO: 694014 - DNA, 100 bp, Homo sapiens
gtgtgctccatagtttatcaaaagttactgtaaaatggggaaaggagaaatttgaaggtgtagaattgaatacagatgaacctccaatggtattcaaggc

SEQ ID NO: 694015 - DNA, 50 bp, Homo sapiens
gtcagcgtgggcagttctatcagtgttattctgaagaagccaataatctc

SEQ ID NO: 694016 - DNA, 100 bp, Homo sapiens
cctccaggccagtccctgatccctgacctaatgttatcgcggaatgatggactcctggcggcgggcagtcagcactggggtccaggctggcattcccatg

SEQ ID NO: 694017 - DNA, 75 bp, Homo sapiens
agaaatgcatagttttatccaggaactcgatcaaaatgccactgaaaaagtccagacaatgttcacagccattga

SEQ ID NO: 694018 - DNA, 74 bp, Homo sapiens
aggaaggagcttttctccacaaccacttcccaggtgatttccatggtgatggtggctgtgggtgtctacgctcg

SEQ ID NO: 694019 - DNA, 90 bp, Homo sapiens
ggcctgcgtccgagtctccgccgctgcgggcccgctccgacgcggaagggcctccagacggtcatccaaagggatttctttcctgatgtg

SEQ ID NO: 694020 - DNA, 100 bp, Homo sapiens
agcggcgcgtgagcggcactgatttgtccctggggcggcagcgcggacccgcccggagatgaggtgtccggctttgctggcccagcaagcctgataagca

SEQ ID NO: 694021 - DNA, 87 bp, Homo sapiens
cttggtttcgggatctcggtgctgcagacggcgagacctcctgcacaggtcagcccaaggccaaccccactgtcactctgttcccgc

SEQ ID NO: 694022 - DNA, 100 bp, Homo sapiens
taaacggaaggtagtgccaccttctcctatgactggctgacaaacgggctcatcataatgcactggaacgaaaacgtagggaccacatcaaagacagctt

SEQ ID NO: 694023 - DNA, 90 bp, Homo sapiens
ggagagagtagggacagcgactgggagacgcgctccacagaaacccggactgagaggcagcgagaggattactccaaaggtttcggcggc

SEQ ID NO: 694024 - DNA, 75 bp, Homo sapiens
cgctgcctcagttatgggggcaccagccagctccgctcttccgccctctctggatgagggaacagaagtggagga

SEQ ID NO: 694025 - DNA, 51 bp, Homo sapiens
cagaagacagagggttttcttttgaggtaacagtgatgatgtcaaatgctt

SEQ ID NO: 694026 - DNA, 87 bp, Homo sapiens
cgctgaacaagttgaagatattattcatgaatcctacaaaactgatatttgtcaggatacgaatcaggttctcttcaagtgctgcca

SEQ ID NO: 694027 - DNA, 98 bp, Homo sapiens
gtagctgaatccagtaccaaaaacgtcaacaacagttttacggcacaacagggttctatcaaggaggaaatggactgggcaacgcagccggtttcggg

SEQ ID NO: 694028 - DNA, 75 bp, Homo sapiens
cgtcttgccaaatgcattacgatttcacatggctgctgaagaaattcatgttacatgtaaagctgtcctcatttg

SEQ ID NO: 694029 - DNA, 87 bp, Homo sapiens
cgagatcgccccgatagtttgagagtaaatgggttaccagaggaagagctaagctaaaccaggtggacaggtgaaatgtcagtatat

SEQ ID NO: 694030 - DNA, 82 bp, Homo sapiens
gtcacgggtggtgaggaaccaacggattttttatcaagcagaaatgcatcgaacaacgagaatcaagatcactgagctaaat

SEQ ID NO: 694031 - DNA, 100 bp, Homo sapiens
agcagttgaagaagtgaagaaattattggtacctgcattatttgctggtataaaggatggagaaagcctgcagctctttgaacaaagttctcgctctgcg

SEQ ID NO: 694032 - DNA, 80 bp, Homo sapiens
gcagagaagggaacgcccggcccagccccatgagttttgatcatcctgagaaaaatgggccttggcctgcagacccaata

SEQ ID NO: 694033 - DNA, 75 bp, Homo sapiens
aggtgccacagcagagacgcgaaggagaggccctagaaccgctttgaaatttctgaaaaccagaagaggcaggct

SEQ ID NO: 694034 - DNA, 75 bp, Homo sapiens
cggggacccaggagtttcctgtgtccagcgctgccggagccgcctgaggttttgggatttgagattgacgcggtg

SEQ ID NO: 694035 - DNA, 101 bp, Homo sapiens
taaatcaagatttaacattccaacacataaaaattatttatccaacagctcctcccaggtgggaaagcagtgccactctccgcttcacagatgccccctgc

SEQ ID NO: 694036 - DNA, 74 bp, Homo sapiens
taaacatgcaatgaacccaaaagggcaacagagatgcttatttttggaaagaagttaacagcgggagaggcatg

SEQ ID NO: 694037 - DNA, 100 bp, Homo sapiens
atggccaagtatggagaacatgaagccagtcctgacaatgggcagaacgaattcagtgatatcattaagtccagatctgactgcttttcaggaagccttg

SEQ ID NO: 694038 - DNA, 75 bp, Homo sapiens
gccaggctgggctgtggcttcaaggagagtccaagtacctttgctcagtttgtggaaagtcttttcataggggct

SEQ ID NO: 694039 - DNA, 83 bp, Homo sapiens
gagcagctgcaaacccccgaaaaaggtggtatggtcaggaaaaagactacaatgtactagtcatggatcttctgggacctagc

SEQ ID NO: 694040 - DNA, 75 bp, Homo sapiens
cactccccagggcagaaatagcgaccatggcgagattgacaagtatctctatgccatgcggctctccgatgaaac

SEQ ID NO: 694041 - DNA, 100 bp, Homo sapiens
cggcgctgccccgtgggctcgctggggagccacggcggagacccccgccctcaactgaggcctcaggagtgcaagtagctgatgaagtatgtcgcatttt

SEQ ID NO: 694042 - DNA, 74 bp, Homo sapiens
ggaacctgggcatccctctgggccaggacgccgaggaggccaaagaggtgctgaaaaaatatttggagtccaag

SEQ ID NO: 694043 - DNA, 75 bp, Homo sapiens
acttcaggtttcactcctggtggaggaggctcttcagtctccatggactcagaattcatgattgaagaaatgcag

SEQ ID NO: 694044 - DNA, 100 bp, Homo sapiens
gtgtacttgggaacgaggggtgaagcggcccaggtgagggtaaagggagaagatgaggaagagaacaatttggaagtacgtgaaaccaaaattaagggta

SEQ ID NO: 694045 - DNA, 90 bp, Homo sapiens
gtccagaaaagagtagcagcagtgaggaagagctgccgagacgaatgtctacacaaggaagtacaggatttggcttttctagatgtcgta

SEQ ID NO: 694046 - DNA, 96 bp, Homo sapiens
atctttctgcccgcctgagtgatcttgaaatgaatagaatgtccctcttccagtggaaagcccaaccatgcagacatcttgctcataaacttacag

SEQ ID NO: 694047 - DNA, 100 bp, Homo sapiens
atgtggcgactacgtcgggccgctgtggcctgatcttgagccagatgattgtgcatccatttacatctttaatgtagatccacctccatctactttaacc

SEQ ID NO: 694048 - DNA, 100 bp, Homo sapiens
cctcacctttattctctcagcacactgcagaaatcaatggtgcctgctctgcctgtggggggctggtggtgcccctcctcccccgagacaaggaggcccc

SEQ ID NO: 694049 - DNA, 100 bp, Homo sapiens
tacaaaagacaaggaagatgagctgtcctttcaggaaggagccattatttatgtcatcaagaagaatgacgatggttcacgcaaagaatctgctccacaa

SEQ ID NO: 694050 - DNA, 100 bp, Homo sapiens
ggggatgcaaggtccaaatctcagcaacccctgtgcttctccccaggtccagccaatgcattcagaagccaaaatggtccccgcggaagccgcggtgtcg

SEQ ID NO: 694051 - DNA, 75 bp, Homo sapiens
agttcacataagaagttcttcgatgtatctaaacttggcaccaagtatggagtgaaagctggacattgaagaagc

SEQ ID NO: 694052 - DNA, 75 bp, Homo sapiens
catcccatgaggatctgcccgcttcccaggaaaggtccgagttgccattacccagggaggagcaatacagctggc

SEQ ID NO: 694053 - DNA, 100 bp, Homo sapiens
cttggccaggctggccccgagcggaactggagaaagctgagggaatggcggcgctagatagtaaggcatcagggaagatgggaatgcgagctgtagtcta

SEQ ID NO: 694054 - DNA, 75 bp, Homo sapiens
cctcaacgatgacgtggtcaaggatcaccattaacaaggacaccaaggtacccaatgcctgtttattcaccatca

SEQ ID NO: 694055 - DNA, 74 bp, Homo sapiens
ttagaagatggctatttcagaatagtgatgttgcacctgtaaccatctttttatgggtggagcagagagtcaat

SEQ ID NO: 694056 - DNA, 98 bp, Homo sapiens
tcattgatgcccatgcaggaggactaggtgctggagaatctggtaaaagcaccattgtgaagcagatgaggatcctgcatgttaatgggtttaatgga

SEQ ID NO: 694057 - DNA, 82 bp, Homo sapiens
cacatggtggaatgtatccgggaggtcaacgaggtcatccagccgcttacaaacacgcagatggcaagaagattgatggcag

SEQ ID NO: 694058 - DNA, 46 bp, Homo sapiens
tacttccaagtcatcaccagaaaggattcagtggtcccaatttaaa

SEQ ID NO: 694059 - DNA, 100 bp, Homo sapiens
tcgttgctgccgggattttggaggccggggccgcgctgagggcgcccagctggaacattaatcctgatgttctttttgaagtacacaactataatataac

SEQ ID NO: 694060 - DNA, 83 bp, Homo sapiens
cccaccgctgccctcagctccgagtccagggcgagccctcccaggcccaatacttcaaagcatcctacctctgctcaatatat

SEQ ID NO: 694061 - DNA, 100 bp, Homo sapiens
ggactgcacaactagcaagacttcagattacctctctagtgacccttcagctgttaaccctggttggccatgacgatcagcttgatggaccaaaatacaa

SEQ ID NO: 694062 - DNA, 60 bp, Homo sapiens
gaaggagctggcccaggctgaggacgagggcaaacctggtggacctgcagaagaagctgg

SEQ ID NO: 694063 - DNA, 98 bp, Homo sapiens
cgagtgtccctttccttcctggcgctttcctgggttgcttctggcggccatggtgttgctgctgtactccttctccgctgcaagtgtccactgcttgg

SEQ ID NO: 694064 - DNA, 100 bp, Homo sapiens
cgatgtttcagacagtccccgacacgtcgtcttacatcaaggtggtcgttctcgttaccggaccacttcttcagccaacaatcccaatctgatgtatcag

SEQ ID NO: 694065 - DNA, 50 bp, Homo sapiens
tcccgggctggactcaggcttctcaggtggcttcattgcgccagacagcc

SEQ ID NO: 694066 - DNA, 75 bp, Homo sapiens
ctacagatactttgaagtagaagaagctgatgcaaaaagtggatgactgtgagcggtgccgggaatttttcaaca

SEQ ID NO: 694067 - DNA, 75 bp, Homo sapiens
aaatctccaagaaacatcattcacccatactgactagtttcacatctctttgctcctgacccctgaggattacca

SEQ ID NO: 694068 - DNA, 50 bp, Homo sapiens
gtcttttctgaaccaagagctgtagctacagagacttctgaagtggagag

SEQ ID NO: 694069 - DNA, 108 bp, Homo sapiens
gttgtaccttgtgacagaatatgccaaaaatggagaaatttttgcactttcagaccatgctgaagtctaaattgaatgtcttaacactgaaaaaggaacctctcccag

SEQ ID NO: 694070 - DNA, 100 bp, Homo sapiens
ttcccttccttcatatgaggaagatcagggatcaaaactcattcgaaaagctaaagaggcaccattcgtacccgttggagcctgtgtgaaatgcagcaaa

SEQ ID NO: 694071 - DNA, 102 bp, Homo sapiens
aacaggaagaacagagtaaactagggatatttgaaaacctcaacaaacatgcatttcctctttctaacggacaggatattgctgcatatcgagctaaaggaa

SEQ ID NO: 694072 - DNA, 128 bp, Homo sapiens
ggactttgttgtcccggtcccagaccaccctcctccaccgtcgcctcccactgcaaaaaggcctggcagggcactgtgacctttgaagatgtggctgtgaacttttcccaggaggagtggtgtcttct

SEQ ID NO: 694073 - DNA, 100 bp, Homo sapiens
gttgtcttctgggctgtgtggacctaattgactgcttgtcccagaagcaatttaaggagcagaacctggatgacagtgtgttttcgaagcggcatgcaaa

SEQ ID NO: 694074 - DNA, 90 bp, Homo sapiens
aagccagactacagctggttcttgaagctgctgggtgactgtcgttcctacagttacgtgtgtggaatctccagtaaagatgaacctgac

SEQ ID NO: 694075 - DNA, 75 bp, Homo sapiens
aaaaggcctgacatatctgagggagaagcacaagatcatgcacagagagacgagttgtactgctgtcacaggaaa

SEQ ID NO: 694076 - DNA, 74 bp, Homo sapiens
atttttggatcctgagaattgatctatgttggatcagtcgcgtggggcaggcagtggcgctgcgggccaaggcc

SEQ ID NO: 694077 - DNA, 75 bp, Homo sapiens
ctttccagagggcagtgtagaggactgcccacagtggtgaaactggtagacagaaacaccttattaaaagagaga

SEQ ID NO: 694078 - DNA, 95 bp, Homo sapiens
gccattgagaaattgttgaggcaggtgtatgtgctcaagaggccttatgtggatgagttcctgagacgcatgggggaactctttgaatgtgttct

SEQ ID NO: 694079 - DNA, 75 bp, Homo sapiens
gctgcggacgctcggtcccgcgctgcgcatccccgcggacgccacagcgctgccaagactaaggggctgcagagc

SEQ ID NO: 694080 - DNA, 82 bp, Homo sapiens
cctggtgaagctctgtcaaccagcccaatgacgaaagtggagctaacgtggatgcgtccaaaatgtggcgcgatgaccggga

SEQ ID NO: 694081 - DNA, 97 bp, Homo sapiens
gcgcgctgctgctggcactgctgctctgctgggacccgaggctgagccaagcagcctggagcattggtaagcgtcacactgccaaagtgagagctgc

SEQ ID NO: 694082 - DNA, 75 bp, Homo sapiens
aaagataaaaaagggagtgattgtagttcctggttattggggctgtgccatcggcaaagccaggcaagctgcaaa

SEQ ID NO: 694083 - DNA, 86 bp, Homo sapiens
ctgcacagccgcggcggcagcagcagtgagagcctaagttcgaggcccaggcgcctccatcagcgccgcctgcgccccgggccgag

SEQ ID NO: 694084 - DNA, 134 bp, Homo sapiens
ggagacctggagttgtttgacttagtggaggaggtgcagctcaacttctaccagttcctcggggtgcagcagatcaatgaactgagccatgttcaaatccctgttatgttgatgccagatgacttcaaagccta

SEQ ID NO: 694085 - DNA, 100 bp, Homo sapiens
ggcgccggaaggctgggggccccggagccgggccggcgtggcccgagttccggtgagcggacggcggcgcgcgcagcacacggaccctgactactcggct

SEQ ID NO: 694086 - DNA, 51 bp, Homo sapiens
cataaaggaatggtttgaagagagcttgcataaagatgcctatcaagtgat

SEQ ID NO: 694087 - DNA, 74 bp, Homo sapiens
tgatgacgcaggccttaaggagaaagtttcaggtgatgatgaacagtctacacagatggctgcaagttgggaag

SEQ ID NO: 694088 - DNA, 75 bp, Homo sapiens
ctttggtggctctttaggatcccggcaaatatttccacaagacggcaccctatgtcgtcactggcagcgtagatc

SEQ ID NO: 694089 - DNA, 83 bp, Homo sapiens
gccatgagggccctgtgggtgctgggcctctgctgcgtcctgctgaccttcgcaattctgtggtgttcttggtcacacattta

SEQ ID NO: 694090 - DNA, 73 bp, Homo sapiens
ccgaagtcgagtgacaccttggctatggacatgcgtgtcagctcacggatgattgatatccagaccaggatgg

SEQ ID NO: 694091 - DNA, 80 bp, Homo sapiens
cccatgcaaaccaatgagggagaagtatcggaagaaagcagttccaagatgcctaccttaatgcctctgaaacaaccact

SEQ ID NO: 694092 - DNA, 100 bp, Homo sapiens
agacttttgaagaaatctggaagttttccacctaccatgctctcgtgttctagaacagatcagacattttgtaatgatgcctgaaataaacactaaccac

SEQ ID NO: 694093 - DNA, 100 bp, Homo sapiens
aaagcccccaaaagcagctattcaggtacaaattctgagctgtctaacccctctgaaacggaatctgagcgtaaagacgagctgagtgattggtcattgg

SEQ ID NO: 694094 - DNA, 72 bp, Homo sapiens
agtccctcgtccagccacccccaggccctggccaacgtcaacattgggagcctcatctgcaatgtaggggcc

SEQ ID NO: 694095 - DNA, 98 bp, Homo sapiens
agcatgtcctcactggctcagctgacaacagctgtcgtctctgggactgtgaaacagcaatggccaatgtacatggtggactatgccggcctgaacgt

SEQ ID NO: 694096 - DNA, 97 bp, Homo sapiens
gtgtggatgaagttgctttccaggaagaagtggttgcagtgctgaaaaaatctttagaaggagcagatcttctagtacgcctgctgtgaacattcag

SEQ ID NO: 694097 - DNA, 74 bp, Homo sapiens
gcagtttctgctaaaatggtctttctacaggcacgtgtggttctcaaatataggcattctgatgggaacttgtg

SEQ ID NO: 694098 - DNA, 100 bp, Homo sapiens
cccacatctgctgcctgtcaggctgttgcaggtgtctgcaaatccatattggtaagaatgattgatgttggctgatattggagtgctcattcacatgaag

SEQ ID NO: 694099 - DNA, 51 bp, Homo sapiens
ggaagtcattaggaacaatggtgcaagatgttaattattcatactgcatga

SEQ ID NO: 694100 - DNA, 87 bp, Homo sapiens
actggaggatgcctatgtattccctggggatggcgcatcacacaccaaagtgaatggtagtgtctagaaagggtatgtcccttcaag

SEQ ID NO: 694101 - DNA, 106 bp, Homo sapiens
atgaagaaaactttattgatctcaacgttttaaaggcccagacatatcacttgaataactgaagtgaagtgatggactccgatttggagagtagtaagacgtgaaa

SEQ ID NO: 694102 - DNA, 90 bp, Homo sapiens
gtaaaatgggtgatgtcaaagagaactatcttgaaacatttatttccagtccaaaaaggaagaggcccagcagaagggactcgctgagcc

SEQ ID NO: 694103 - DNA, 100 bp, Homo sapiens
cagaagccgagttcaacatcctcctggccaccgactcctacaaggagacatttgctcagaagagaatcaaatagtttcctcttatgcttctaaagtctgt

SEQ ID NO: 694104 - DNA, 90 bp, Homo sapiens
cggagcgcatgcagctgctgctgaccctggccttcaaccccgagccgctggtgctacaggcaaagatgcaatctacacaatcccagtaaa

SEQ ID NO: 694105 - DNA, 50 bp, Homo sapiens
ggcgttggaggccaccgtttccagggtcgacatgttaaaacgggtcagtt

SEQ ID NO: 694106 - DNA, 75 bp, Homo sapiens
agaaatcactaaatactactctgaggggcttagaaattaacaggcttcgggctcagaatcaggttctgaaaaaag

SEQ ID NO: 694107 - DNA, 75 bp, Homo sapiens
gcgggagaagcggcgctccaccggcgtggtcaacatccctgccgcagagaatgacagcccatatcaaggcggtgt

SEQ ID NO: 694108 - DNA, 74 bp, Homo sapiens
cctccagctcagccttctctcacctactatgtctgtccaacaggtctacctgtaccctttcccatgatatccac

SEQ ID NO: 694109 - DNA, 100 bp, Homo sapiens
gcagcctccgccgccgccaccgccgcctccgccgctgcctcaggagcggaacaacgtcggcgagcgggattttgaagaagtcctgcatcgaaattctagc

SEQ ID NO: 694110 - DNA, 82 bp, Homo sapiens
tcggaggtctcatctttgaactactgccggagcttctgccaggaatcaagtactggaaatgtttgatcatgcttatggtaac

SEQ ID NO: 694111 - DNA, 83 bp, Homo sapiens
gcggggaccgctgtgctctcgagatggacagagacgtatgtgcgttggtctcctaagggcacctacctggctacctttcatca

SEQ ID NO: 694112 - DNA, 75 bp, Homo sapiens
tggcagcaaaggctgtagcaaatacaatgagaacatcacttggaccaaatgcagagagagatcatcattgcctga

SEQ ID NO: 694113 - DNA, 100 bp, Homo sapiens
gcgagtacacctgcaccatccaggcagttgaagatgactttgtggaaatgcggaagaacgaccctcagagcatcactgctgatgatcttcaccagctgct

SEQ ID NO: 694114 - DNA, 100 bp, Homo sapiens
tctctgcagaatgccacctcccctgtcatggagttttgggagattgatttccagagacttatgttacttgaggaagacaccaagaaggcaaagaaaagga

SEQ ID NO: 694115 - DNA, 50 bp, Homo sapiens
catgatggacaggatgtttgccctcgagatggcccactgcgtgaccttgg

SEQ ID NO: 694116 - DNA, 75 bp, Homo sapiens
gcttcaccttcccctgacctgagtagtcgccatggcacaggtctctgtgccttgcggagaatcctgaaaaaacag

SEQ ID NO: 694117 - DNA, 83 bp, Homo sapiens
ctgggagcctaggatccccgacaggatgtaatccctgttcattactacttaatacctccaccaacaaagactaagaatggcag

SEQ ID NO: 694118 - DNA, 83 bp, Homo sapiens
cttctaggagatttgtttggcgtgccaagcttctctgtgaaagagcacagacgtgaacgatcaagagagagggaccatagtag

SEQ ID NO: 694119 - DNA, 100 bp, Homo sapiens
ttcaacagaaggcaaatacgaagacgaggcaaagcacccagctttcttcactcttccggaacttataatcaaaactgtattaagctcggcaagagatgag

SEQ ID NO: 694120 - DNA, 90 bp, Homo sapiens
cccttgacacgattgcatgtcacttacgaaggtaccatagaagaaaatggccaaggcatgctacagaaggacagaataacgggctcccag

SEQ ID NO: 694121 - DNA, 98 bp, Homo sapiens
tcctttaaacagcttctccgggtctcagcatgttttcctgaggagaatgcatcttcaccatttacccaagccagagcacattggatccgagcagttac

SEQ ID NO: 694122 - DNA, 100 bp, Homo sapiens
cagacttttataaccctttgatccctaccaacattaagaggagacatcacagctttcccagatcgggaggaaaaatatggaatgtgttttaccgctgact

SEQ ID NO: 694123 - DNA, 100 bp, Homo sapiens
ccactgtggggttaaatctcatcccgcggctctcctcctgtcggtcctgcagttcttttgtccccgggtagagatgaagtaaccaagactgaggacagag

SEQ ID NO: 694124 - DNA, 75 bp, Homo sapiens
gagtaggaaaccggtaccaggcagacatcaccgacttgttaaaagaaggcctcgaaggagctccagcaagcccag

SEQ ID NO: 694125 - DNA, 76 bp, Homo sapiens
tttggttacctatgtacctgttaccactttcaaaagtcttaaaattttggtagcagaaagcaaatgtgcaaagagc

SEQ ID NO: 694126 - DNA, 82 bp, Homo sapiens
ggatgtcatgggaagccagtgaggtagtcagatatatttttgccatcatggatcagtttggagatatattagaaggtgaagt

SEQ ID NO: 694127 - DNA, 75 bp, Homo sapiens
agaatttaattccttttcgaccttcaatccagttccaaggactccacgggagtggcattctgcatttctgtggct

SEQ ID NO: 694128 - DNA, 83 bp, Homo sapiens
gtgcagaaggtgcacagccacagcgccgagatggaggattttttatcaagcagaaatgcatcgaacaacgagaatcaagatca

SEQ ID NO: 694129 - DNA, 83 bp, Homo sapiens
gtcgccttttgtggagaaatttgcccgctaacaggccatctgtgtgagaaagaagcttccggttctgaggtcctggaggtgcc

SEQ ID NO: 694130 - DNA, 75 bp, Homo sapiens
attgcccttgcttcaggacagagtcactcttgcaggactgatcctttgaaatactccagccatgactaaaagaga

SEQ ID NO: 694131 - DNA, 74 bp, Homo sapiens
aaaactccagtgattttcaatcaaacattgcatagtgaagctttgccctttttcctacttttgattgacctttc

SEQ ID NO: 694132 - DNA, 75 bp, Homo sapiens
tgaggaaagtgaaaaccaaactgatctctctgggttggcttcagcattttcttcctctcgcaaatctggaatgtt

SEQ ID NO: 694133 - DNA, 75 bp, Homo sapiens
ctgggggcagcctggggacttagtttcctgcttgccttcccccaggcccagctgagagccagcctggaggttacc

SEQ ID NO: 694134 - DNA, 97 bp, Homo sapiens
gatgcagaatttgatgctgtggttggatatttagaggacattatcatgggtgccatgtttcagaacagagtaagacccctggtaaagaagaactgaa

SEQ ID NO: 694135 - DNA, 98 bp, Homo sapiens
gagcctttgcttttctttggagtcatgttctatgtgccaaatgtgtcatggcttcagcaagaggccacaaggaatatgagagcctggagcaagaaaac

SEQ ID NO: 694136 - DNA, 100 bp, Homo sapiens
gccatcaagcccttctaccagaagagggaggtgaccaaggaggagtacaaggacatcctgcgcaaggccgtgcagaagggcgaccattgacgaggtggag

SEQ ID NO: 694137 - DNA, 100 bp, Homo sapiens
gacaaatgggcgcatgacgatggagagcagggaaatggactgctatctccgtcgcctcaaacaggagctgcaaatccagtttgctgatgacatgcaggag

SEQ ID NO: 694138 - DNA, 88 bp, Homo sapiens
ttccaacaaaagaatgctgccgcagcttcagcgcctgctcctggtcatcactaaccagatttacttggagtacatgtgaaagaaaacg

SEQ ID NO: 694139 - DNA, 75 bp, Homo sapiens
atgacgcctacggaccccccagcaacttcctcgagatcgatagcctgtgcctctggaggaggtccaattggtggt

SEQ ID NO: 694140 - DNA, 101 bp, Homo sapiens
tgcgggaccggcttttggctaatggctttaatgagtgtattcttctcttctccgatttaccagtcaaataaagtgcccgtggtgcagccatcccatgcggt

SEQ ID NO: 694141 - DNA, 75 bp, Homo sapiens
gaccccaggctgctgatcgccttccagaacaggtctcctgacaaacacagcccctgaggggccccgggagtggcc

SEQ ID NO: 694142 - DNA, 90 bp, Homo sapiens
gtcagagccaccagccaatgatcttttcaatgctgcgaaagctgccaaaagtgacatgcaggtatctcattcagttgctaaacttatatt

SEQ ID NO: 694143 - DNA, 90 bp, Homo sapiens
aggtaacagaggagggtaccaaccaaaggcccttgagcaatcaggatgttgggtggcaggttttaagaagcaaatggcagatactggaaa

SEQ ID NO: 694144 - DNA, 73 bp, Homo sapiens
gcaaaccagccttcagcagtcggctacgaaacagcagcggaagtagccggttgctagaacctgtctgtcacca

SEQ ID NO: 694145 - DNA, 89 bp, Homo sapiens
gggaagtgctgctcccggaggtgcttggagggtgaatgagagcccccctccatgcgcctgaaggcccgacccagcagccctggcttttc

SEQ ID NO: 694146 - DNA, 100 bp, Homo sapiens
cggcgacagcaggcaaggcgggcggcgcggccgtggtcatcaccgaacccgagcacaccaaggagcgcgtcacctttctgcgagtacgagccaaccggca

SEQ ID NO: 694147 - DNA, 76 bp, Homo sapiens
gaagattatgacagattacgccccctatcctatccgcaaacacctggaattgtctcgccatttaaacgagtattcc

SEQ ID NO: 694148 - DNA, 50 bp, Homo sapiens
gaggtttgccgccggtgaagatgggcacctccttttgtggctcgggagac

SEQ ID NO: 694149 - DNA, 100 bp, Homo sapiens
accctggaggggtccccaccttcttccgggcaaatgatggctcagacattcattctgctgtgctctccacaattagaaaactagaggatggatattttgg

SEQ ID NO: 694150 - DNA, 98 bp, Homo sapiens
gaagcgggaagatggctgcagacaagcctgcaggtttacccagggttgatgataaccgctggccttattcattggattttaaatacattgaacataac

SEQ ID NO: 694151 - DNA, 100 bp, Homo sapiens
gccaaggccaagctctccaagttcagcatccccaagcagggggagcccacaccagttatcctattgaaagaggggactgatagctcccaaggcatccccc

SEQ ID NO: 694152 - DNA, 100 bp, Homo sapiens
gccgctctccgagctcgatccgctgctcgcacgggagccagctgggtgggccgcgatgggcctcttggaacattggtgtgttcatctgcattcgatgtgc

SEQ ID NO: 694153 - DNA, 88 bp, Homo sapiens
gggaaatggccgctgtgtggttgcaacggagataaattcccggaaccgcgattcggcgtgtcagacaacatctggggaagatgtacga

SEQ ID NO: 694154 - DNA, 101 bp, Homo sapiens
acttcccagggggcaggcacttactgcattagtgaccagaaggatcccaaggatcgaatggttcaggttgtgaaatggtacctctcagcctttcatgcggg

SEQ ID NO: 694155 - DNA, 100 bp, Homo sapiens
tctgatgatgatgaaagttacacaggtaattcatttgcacacctgttagcaagaaacagaagttgaaggactggaacaagtgaactaggaaagagggaac

SEQ ID NO: 694156 - DNA, 82 bp, Homo sapiens
ggagtatctggtgaaatggagaggctggtcgcccaatgatcagggccaaagcggtcagtgagaaggaagtggactctggaaa

SEQ ID NO: 694157 - DNA, 75 bp, Homo sapiens
tcgtctgcaagaccgcgaggcgagacctcttgtctcctctgagcctccggcctccataagacccaaaacagatga

SEQ ID NO: 694158 - DNA, 90 bp, Homo sapiens
gatattatgaatacaaccatgatctcttccaaagaatgccacagaatcaggggaggcatgcttcaggagccattccgtagtgccatcccg

SEQ ID NO: 694159 - DNA, 75 bp, Homo sapiens
cgcgctgagggtctcggggcgggcgccgcgggacctctccgggccatgggtttacccaaggtccagcctagcccc

SEQ ID NO: 694160 - DNA, 100 bp, Homo sapiens
gaccgccctggacatcaagattaaaagagcgaataaagtttatcacgccgggcagaagatggctgtgccacccacgtatgccgatcttggcaaatctgcc

SEQ ID NO: 694161 - DNA, 100 bp, Homo sapiens
gggtgtacaaatacccctttgaattaattatggctgttatgaagacagtatggagtttccagaccatagtagacatttgctacagtgtctgagcgagcag

SEQ ID NO: 694162 - DNA, 82 bp, Homo sapiens
tgacagccttcatttctctgaacatactgccttatgggacagatcaatccccagtctgtcccagatcgtctgaggatccggg

SEQ ID NO: 694163 - DNA, 89 bp, Homo sapiens
tatgaatatgggtcgaccattccaaaaaaatcgccaacagctcatcaaggaagtggatgccaaaactactcatggaattctacagaaac

SEQ ID NO: 694164 - DNA, 100 bp, Homo sapiens
caaactcggcctcatcagcccggcctacctcttcctctggcccgaagccttcctttatcgctttcaggatgggtcatcagttaaggaagttgaaacctac

SEQ ID NO: 694165 - DNA, 75 bp, Homo sapiens
gactgcaagcacccctttcttgaaccgaacagagtcaagtggaatcaaagctcccctcccacccggtcactccgt

SEQ ID NO: 694166 - DNA, 74 bp, Homo sapiens
cgcgggcagcagacggcagacggtgcccggcgcccacgggacaatgcagatcttcgtgaagactctgactggta

SEQ ID NO: 694167 - DNA, 100 bp, Homo sapiens
cggtgtgaagacagggagacgctgctgcagctccgggacacctggggccgccgaggcaaagagaaggtccttctccagcccactgaggactgtgttttca

SEQ ID NO: 694168 - DNA, 83 bp, Homo sapiens
cagcaccgcagccttgggcctcgcgccggctatggccgtgccctggggctgagccctcagtgacccaggaggctctcacgtgg

SEQ ID NO: 694169 - DNA, 75 bp, Homo sapiens
ctcaggccagcagcagccggatgcagtgcccccagcgccaggggctccggcatattgtagaaggcatgaaacaaa

SEQ ID NO: 694170 - DNA, 102 bp, Homo sapiens
gtttggagaagctcctggactggtttaaaacggtcactgaaggagatcccagctctcctgttggcttcgtgcttggggtagatcttcttcacatattccccc

SEQ ID NO: 694171 - DNA, 50 bp, Homo sapiens
atgcaacctcaggcttcagccactgtgcctttggctgcaacaagtatgtt

SEQ ID NO: 694172 - DNA, 100 bp, Homo sapiens
cggaggaagcggctgttctacaaggacagaataacgggctcccagattcacaagccccaccaagaggatcaccccaggaacgcttggaggctgaggagtt

SEQ ID NO: 694173 - DNA, 73 bp, Homo sapiens
actttcattgtctcggacgtgcggggcctgggcctcccggtccgcaagcagggacccgagctgatccagaaag

SEQ ID NO: 694174 - DNA, 74 bp, Homo sapiens
ccgacgtcatcatgctgaccaccaatcagatccgtaaggagggtgtgaagacagagaatgaccacatcaacctg

SEQ ID NO: 694175 - DNA, 98 bp, Homo sapiens
aagtacgggcagttgcagtgttggagctaaagtcactgaactgatgcaggagcagtcatacctgaagtctgaattgggcctgggacttggagaaatgg

SEQ ID NO: 694176 - DNA, 100 bp, Homo sapiens
aggccttccagctgtttgaccgaacagcaaccataggctttgatggcttctcacaggacagaaaacctggatcatcccaaacctgctctgtgaaccctct

SEQ ID NO: 694177 - DNA, 90 bp, Homo sapiens
caaaacatgttcgagttctgggatgtacttggtaatcaaataatgcctggatttcttaatatgaagataaagtttgtgtgcgcccagtgt

SEQ ID NO: 694178 - DNA, 82 bp, Homo sapiens
gagcccatggcaggaccggcacggcgaaaccttcaccttcagtgctcgccagaaacccagagctaattatttagaagaccga

SEQ ID NO: 694179 - DNA, 83 bp, Homo sapiens
cttcggatggtgaactcattagaaatattaataaggcagcggaaagaagaaatatgaatacggctccatcaagacccagcccc

SEQ ID NO: 694180 - DNA, 75 bp, Homo sapiens
caagaccggcgtggtgaagcgtgccaaatctttggagtgttgatggagaagttacagtagctgaacagaagccgg

SEQ ID NO: 694181 - DNA, 75 bp, Homo sapiens
caggccacagtggcttggccaatggcacagagttgtctgctggttctcagcttgaagaagattctgcagtcctta

SEQ ID NO: 694182 - DNA, 75 bp, Homo sapiens
ggccgcggctggagcgctcggccggcgtgggagcgccaaggccgcaggtaacatcatgtctcgggtaacagagga

SEQ ID NO: 694183 - DNA, 90 bp, Homo sapiens
gcctgggctgtctggaaatctgaggacggcccccaagttacatgaactacctgctagactcacaccccagcaaaaatattgatgtcccca

SEQ ID NO: 694184 - DNA, 51 bp, Homo sapiens
cctgtatctgctgctgctgctcatagcacgtgtggttctcaaatataggca

SEQ ID NO: 694185 - DNA, 98 bp, Homo sapiens
tgcccagacggctcacctgtgcgggatggaacaaaagaaatcccaagttgaccgtcaagtccaacgctcgctgcagacatctagtggacccggcgctc

SEQ ID NO: 694186 - DNA, 100 bp, Homo sapiens
ctcagagaaagcagagggtgagatggatgagtccagcattctaagacgaagagggctccaggtgctggagaatctggtaaaagcaccattgtgaagcaga

SEQ ID NO: 694187 - DNA, 83 bp, Homo sapiens
aaaaaaatgataaagaagaagtcaccgtttctacctggaaattatctcattcaaagctagtgcaactttatggagtctgtata

SEQ ID NO: 694188 - DNA, 87 bp, Homo sapiens
aacgcagagacaaaagaaacgggccccgactgattccaggagggcttcgtgtatggacctcaagcgttggaggtagcagacttttca

SEQ ID NO: 694189 - DNA, 110 bp, Homo sapiens
aagctcccggccgggctgactcaagcggaggcgcgcggaacagtcgccgaggcgattcccgcccagcggaaatgagaaagcagagggagttctatcacaaattgggcatg

SEQ ID NO: 694190 - DNA, 83 bp, Homo sapiens
gggtgactcagagagggaagagattcagccagcacactcctcgcgagcaagtggccaacagtgttgcaaacaggaacccgagg

SEQ ID NO: 694191 - DNA, 83 bp, Homo sapiens
tctgttcaggccagaccctctgggagcttctcagccattttccacagatcaggtgtcgtgaaaactacccctaaaagccaaaa

SEQ ID NO: 694192 - DNA, 83 bp, Homo sapiens
cgctgagcacgttcttccaagaaaccaacattcccaacagccaccaccaccaccagatggccagctgcgggccgtccagcggc

SEQ ID NO: 694193 - DNA, 80 bp, Homo sapiens
cgcagcccccgggcacgacctctcggacacggtgcaggcaggtgccggggacacgggcggcaagccgtccacgcggggcg

SEQ ID NO: 694194 - DNA, 75 bp, Homo sapiens
ggtgatcaggctgcaggaagaagaagggacacctttcacagctatcagggaagtgaactgaattcaaagctgcaa

SEQ ID NO: 694195 - DNA, 100 bp, Homo sapiens
agtaacctcatcaccaagctgcaggccaagcacgatttactcaagcagaccctgggcgaaggttgctccttgagggcaggacagttcttatggctttatc

SEQ ID NO: 694196 - DNA, 96 bp, Homo sapiens
tctgtttctctgctgcaccgacctcgacgtcttgcctgtgtcccacttgttcgcggcctatagtgcagggctcgcggcctggcaagaatgtacagc

SEQ ID NO: 694197 - DNA, 101 bp, Homo sapiens
ccctgctggagcaagaggcagagctgtgggcggtggagtctagacttccccaaggcgtgtacccagcatatcagtgctttcatgccttaaaaattaagaaa

SEQ ID NO: 694198 - DNA, 98 bp, Homo sapiens
gtgctgtgaccttgaagaggagccacagtcccttcaggagaagggtgtggagagagtatgctctgtgtcgtcccagacatttctgcattccgagaagg

SEQ ID NO: 694199 - DNA, 75 bp, Homo sapiens
aaaatctaccaggaagatatctttccatgtttaacattctcaaaaagtgagcacttttcaggattagaagaggct

SEQ ID NO: 694200 - DNA, 100 bp, Homo sapiens
gcagtctgtccatctcagcctcccaaagtgctgggattacaggtgtgagccaccacactggccaagtgggatggagtaggacctcttccagactgtgctg

SEQ ID NO: 694201 - DNA, 101 bp, Homo sapiens
tgctggccgcgctgctgctggccgcacgcggggctgctgcccaaggcctgaagtgttagaagattcacctctggttccccaaaaaggcagttttcagatgg

SEQ ID NO: 694202 - DNA, 89 bp, Homo sapiens
cagatgcctcgcagagcaccaggcccaccgtgaaagatgccagaagtgggtggagaactgtaggagagcagacttagaagataaaacac

SEQ ID NO: 694203 - DNA, 101 bp, Homo sapiens
attcccttcttttttcctacccaaggacatgactatgtacttgcagaaaaacagggtgtgaacggcatgtctgtggatgagaagcctgactcccccatgta

SEQ ID NO: 694204 - DNA, 100 bp, Homo sapiens
gggagaaggtgttgttgccggagctgagaccgggcggccacagtccgcagggatgaacctcgagttgctggggctcctcctactccagagaggaaacctc

SEQ ID NO: 694205 - DNA, 100 bp, Homo sapiens
ccgggaagagctgatgagaatgctggcggaggacgagctccgggatgctgtactccttgtctttgcaaacaaacagaggcatttcatccttcatgaagcc

SEQ ID NO: 694206 - DNA, 83 bp, Homo sapiens
ggaagcaggactgcgccgcgtcttcctcaaggatgatcggctgaatgtaacagaggaactaacgtccaacgacaagacgagga

SEQ ID NO: 694207 - DNA, 83 bp, Homo sapiens
gaaaaacattgtttgaggattcctttcaacagactatcggtggtccatgtcaagtgatagttcacaagtgggagactcatcta

SEQ ID NO: 694208 - DNA, 76 bp, Homo sapiens
gtatatcaagcattcaaattgctcacagctgatcctaagaatgtttctccatcccagagagatgaagtaattcaat

SEQ ID NO: 694209 - DNA, 97 bp, Homo sapiens
ctactgcagccacgcgggcgagcggctgtgtggatgtcggcgaagccgcgggcgagtggacgtgactctggacccagacacggcctaccccagcctg

SEQ ID NO: 694210 - DNA, 100 bp, Homo sapiens
agagtggccgcttccaggacgtgggaccccaggccccagtggtccagcagctccagatctcggttgaccaacatggtgacaacctgaagaacaccaagag

SEQ ID NO: 694211 - DNA, 100 bp, Homo sapiens
tggactctgctcagagagatttgtatagagatgtgatgttggagaactatagcaacttggtatcactaggagtatgctgctgctgttccgctttgcgtcc

SEQ ID NO: 694212 - DNA, 90 bp, Homo sapiens
gaactgctgacgcttgatgagaaggacccacggcgtctgttcgaaggggtccctgtgaaggtgaccaacgtcaaggatggcaccacccac

SEQ ID NO: 694213 - DNA, 100 bp, Homo sapiens
ctgagtggtgacagtagcccagcccgccggccaggtcaacgaagtgacggtggaacagctggtgcagcagtacccccacatcaccttcagcaccgtcctg

SEQ ID NO: 694214 - DNA, 75 bp, Homo sapiens
aagcgactattttggtctgagatttatggattcagcacaagtagcagacacctcctacctgttcatcactggccc

SEQ ID NO: 694215 - DNA, 90 bp, Homo sapiens
cggctactgcgacgccaaatacgtctgggcagccacggccgggggcgtctttcagagcattacggtatggatcctggcgggagccagtca

SEQ ID NO: 694216 - DNA, 49 bp, Homo sapiens
ggaggagccttctcaagaacagagcatgctcgaagacgaccttcagctc

SEQ ID NO: 694217 - DNA, 90 bp, Homo sapiens
cctgggtgacaatgccttggtttcaacactatcggaatgctatgatcctggcaggaaaagcctactacgatggagtggccaagatcggtg

SEQ ID NO: 694218 - DNA, 101 bp, Homo sapiens
tatgtgttcaagttcattgttcggtcgaggacattattttcacatcttgataaactgcttgatgctggtctctatactggagaagtgactgaaattgtagg

SEQ ID NO: 694219 - DNA, 100 bp, Homo sapiens
ggagctgaaacagaacctgtccaggagctggcatgacgtgcagattgagaacgggctctgcatctgtgcagccatgcccagcaaagtcgtcattctccgc

SEQ ID NO: 694220 - DNA, 100 bp, Homo sapiens
tggtggggagatgaacccaacctagtgggtgtaatacatcatgaactgcagggaggagagggcagtgagagataggaatctcctccaggttcatgaccat

SEQ ID NO: 694221 - DNA, 90 bp, Homo sapiens
cgctgttcctcgctctgctcctggggagcccggcggcagcgctggagcgagggaagtgatgccgacatggtggataagaacaagtgctgc

SEQ ID NO: 694222 - DNA, 100 bp, Homo sapiens
ggtaacgacggcctcagcaggcggggaagatgaaaggcgtggagatacaaaactccccacagggtggcctttgttgaaaaattgacaaaactcgtcttga

SEQ ID NO: 694223 - DNA, 100 bp, Homo sapiens
gggcatccttcacccatctgaagggaggaaatagtggcaggtgacagtctgcatgtgcagttttcagggttttcagagaaagatgctgatgaggtgaaag

SEQ ID NO: 694224 - DNA, 98 bp, Homo sapiens
gccatgtgcaggaccctaacgacaggcgcctccggcccatttacgtttccacgggctcccttgctcagcagtatgcgcaccctaacgctaccctgcac

SEQ ID NO: 694225 - DNA, 74 bp, Homo sapiens
gaggagaatcaagagctccgaggtgctgtccctggacaccaacatcacaaaccaggtgaataagctgaaccgag

SEQ ID NO: 694226 - DNA, 96 bp, Homo sapiens
tgccctgaaatttatgtccaggattcaaaaagtttaggactgctaagttgaacaagagatttttcaatcaagactttggaactacgaagatggaag

SEQ ID NO: 694227 - DNA, 83 bp, Homo sapiens
ctcgccgcccgtccccggcacacgcgcagccccggcctctcggcctctgccggagaaacagaccatggtgaatccgggcagca

SEQ ID NO: 694228 - DNA, 74 bp, Homo sapiens
ctacagaaacctgatcttccttgcgccgcgcggtgaggttctctagtccacgctcgcagccatgccgtccaagg

SEQ ID NO: 694229 - DNA, 99 bp, Homo sapiens
actgcgagaacaagtttaacgacaagcacatcaccactctgcaggggacatcacccagaagggctatgaaaagaaaaggtccaaactcctatctcctta

SEQ ID NO: 694230 - DNA, 100 bp, Homo sapiens
cttcctggtttacctggcactcctggacaggatggattgccagggcttcctggcccgaaaggagagcctggccatggagttggggagagaatgtctaaat

SEQ ID NO: 694231 - DNA, 84 bp, Homo sapiens
cgtggctgcgtcaccgccgcccccccagacaagatggacaccgcggaggaaggtcaaaatgcagatcttcgtgaaaacccttac

SEQ ID NO: 694232 - DNA, 100 bp, Homo sapiens
agtatacagaaaatcggtgaagagaggttttgaattcacgcttatggtagtgggttgttggaagaggagcctttggagttgtttgcaaagctaagtggag

SEQ ID NO: 694233 - DNA, 75 bp, Homo sapiens
gacaagtccccagggaatgccacagcatcctccagcacctcaggaactgtggctgcaccatctgtcttcatcttc

SEQ ID NO: 694234 - DNA, 74 bp, Homo sapiens
cctgaggctgcaccaagtggcgaaggagccggctccaaggtgtagtcgccgccgccagccgccatgggcaaaca

SEQ ID NO: 694235 - DNA, 98 bp, Homo sapiens
ccgccgccgccgccgccgccgcccgctttcggctcgggcctcagagactaagaaagcactgtgcatcaccttgaccctggggaccttcctcgtgggag

SEQ ID NO: 694236 - DNA, 101 bp, Homo sapiens
cacctggagctgaggaaccggaccccggcagctgaatcccgttctgcttccagaagtggaagtgctcacggatcggggaaatctgcaaggcatacccctgc

SEQ ID NO: 694237 - DNA, 50 bp, Homo sapiens
gggcagcaagggggaggcccccaagaacatccagtcatggataaaaatga

SEQ ID NO: 694238 - DNA, 75 bp, Homo sapiens
cctaagccatcccctggcggaaccgcccccagctgcggttggatttctcacgatgtccagtgttatctccatgtc

SEQ ID NO: 694239 - DNA, 74 bp, Homo sapiens
accacacagcaaataatgattaatgatatttgctcagagttcactgacttgaagtatactcagttaaaatcggg

SEQ ID NO: 694240 - DNA, 83 bp, Homo sapiens
atttgctcttacgtatttgtgtgacttgactcttcaaacacaaagactgttggcaacacttacggtaatttttcgttagcaac

SEQ ID NO: 694241 - DNA, 50 bp, Homo sapiens
caccaggctgcaagaacagtgctgggtgtgtcccggcatggatatccgga

SEQ ID NO: 694242 - DNA, 48 bp, Homo sapiens
agagagagcagagacagctcgtctgtcttactactttgaccgcgatga

SEQ ID NO: 694243 - DNA, 100 bp, Homo sapiens
atcccatgggcaaacctcctttgcctagaggctatcacacggagaagaatttggattggtttcctcggatgcgagccatgtccctcgttagcaatgaagg

SEQ ID NO: 694244 - DNA, 88 bp, Homo sapiens
atgaacccaacctagtgggtgtaatacatcatgaactgcaggggtgaatcatttgatgtaaaagacttgactccataatctgcatctg

SEQ ID NO: 694245 - DNA, 100 bp, Homo sapiens
caacaaggacaacaatgagatcgtggacaagatcatgggcaaaggacagatccaggaatactcccccagttgcaagaggcgcaggaccgtggaagacttc

SEQ ID NO: 694246 - DNA, 82 bp, Homo sapiens
atcttggttccgcgttccctgcacaacaatgcagatcttcgtgaagactctgactggtaagaccatcaccctcgaggttgag

SEQ ID NO: 694247 - DNA, 50 bp, Homo sapiens
tttgaggcggtcctcctagcggcctggtggatctccttacgtagcagcca

SEQ ID NO: 694248 - DNA, 82 bp, Homo sapiens
atggacagagactaccacgtggagtgttaccactgcgagactatggtcagtgcaatcagaaaattcctagaaggcatcccag

SEQ ID NO: 694249 - DNA, 82 bp, Homo sapiens
cggacttcgacacctacgacgatcgggcctacagcagcttcggcggcggcagaggcctcagtgtcctcgtaggggaaatggg

SEQ ID NO: 694250 - DNA, 96 bp, Homo sapiens
ctcgatcaagtcatccgccaaagaagcctgtccagtttggaactgttcctctcctgtgcacagaaacaatatgattctataacagactcttccaga

SEQ ID NO: 694251 - DNA, 60 bp, Homo sapiens
tgaacatgatgaacatgatgaaaatggtgcaactggtggacattgaagtggacctaattc

SEQ ID NO: 694252 - DNA, 101 bp, Homo sapiens
gccagggctctatcaaggggctggtgtactccagcaacttccagctgcttcctgtctgtgacacctgggaagacacagtttgggcctacttccgggtgatg

SEQ ID NO: 694253 - DNA, 100 bp, Homo sapiens
gtggcagccgatcttctgtgttctgcgtggggacggccgcctagagtggttcagccacaaggagtttgtagatgcggacaacctgatcctcaaccctgac

SEQ ID NO: 694254 - DNA, 51 bp, Homo sapiens
aaacgattgaacaccagattgcagttcagtgtaagaagaagcttgggaagc

SEQ ID NO: 694255 - DNA, 90 bp, Homo sapiens
tccccagtcgctgctgcagacgacactgttcctgctgagtctgctcttcctggtccaagcgttccaatccacatgctgcctatcccaacc

SEQ ID NO: 694256 - DNA, 101 bp, Homo sapiens
cagctgatcctggaccccatcttcaagaggccttaaggacatggaactggactcgtcttccattgaaaagcggtttgcctttggcttcctgcagcagctgc

SEQ ID NO: 694257 - DNA, 82 bp, Homo sapiens
cttcggcagtccacccaccgccgccgcctcccaggacatggatttgattgacatactttggaggcaagatatagatcttgga

SEQ ID NO: 694258 - DNA, 98 bp, Homo sapiens
cagactccaagtgggaccggcggacacgcagcctcgcgatgccctccaaatccttggttatggaatatttggctcatcccagtacactcggcttggct

SEQ ID NO: 694259 - DNA, 100 bp, Homo sapiens
ttgtggcgctcttgctcctctctccttggcctctcctgggatcggcccaaggccagttctccgcagttggaactgataatgggagagaagcaattgaaag

SEQ ID NO: 694260 - DNA, 106 bp, Homo sapiens
agagaaaagggctatgaacgattaaaagaagaactcgcaaaagctcagaggcctgcctagggtagttaaaagacgagtgaatgctctcaaaaacctgcaagttaaa

SEQ ID NO: 694261 - DNA, 83 bp, Homo sapiens
acagacctaccggtctgtcagtgagatggcttctaacaaggacgcgtgaccaaaaccaaagacggccatgaagtgagatcgtg

SEQ ID NO: 694262 - DNA, 101 bp, Homo sapiens
tacagagtataacaatcagtgccgagcaattgtgatgagatattctgctgagtggaaggtcgctttgctgttcgtgatatgagacagacagttgcggtggg

SEQ ID NO: 694263 - DNA, 75 bp, Homo sapiens
taagattcttcaaggtggggttggcatcccccacatacgaaactcccatcaagactgaagcagacgttttggcag

SEQ ID NO: 694264 - DNA, 98 bp, Homo sapiens
gttggtaaatcatgcttattgctacagtttacagacaagaggtttcagccagtgcatgaccttactattggttgctattggcagaacagacattgaag

SEQ ID NO: 694265 - DNA, 83 bp, Homo sapiens
ctgctgcgacgaagagttccctcagcctccggccttgtgtgtccgactcggcagcagtgaaagacgagaggaccttcgaggag

SEQ ID NO: 694266 - DNA, 100 bp, Homo sapiens
gtttagagcaacagatcgtggatctgaaagtgacaagcattttagaaaggtcttatcgaatgttacttagcctccaacagtattcgagaagcaatggtaa

SEQ ID NO: 694267 - DNA, 100 bp, Homo sapiens
ctccatcatcacccaggcgcggagggaagacgccctggtgctcaccaagcaagaaaaagcttgtggtgaaggggggcaaaaaaaagaagcaagttctgaa

SEQ ID NO: 694268 - DNA, 50 bp, Homo sapiens
gcgctggtctgctcccagccggccatgacgctgatggagtacctcatcaa

SEQ ID NO: 694269 - DNA, 50 bp, Homo sapiens
agtttctgcatttagtgagataaggtgattgaagcctccgatgttgtcct

SEQ ID NO: 694270 - DNA, 100 bp, Homo sapiens
caactcagagctgttgctcatgctggagtctccagaatccctccatgccaaggaccgtataatagacgctggccccaaaggaaactactctcgatttatg

SEQ ID NO: 694271 - DNA, 100 bp, Homo sapiens
tgacatctacacagagcacgcccatcaggtggtggtggccaagtatgcgcccagcggattctacattgcctccggagatagcctgggctggaagctcttc

SEQ ID NO: 694272 - DNA, 82 bp, Homo sapiens
ttgagtccccttgcccgctccttcagtttggtgccctggttgtcagatgttggaaagcagtaggacggaacatactcttcgt

SEQ ID NO: 694273 - DNA, 83 bp, Homo sapiens
ctcgtcatgctctttgtagcgtggtgcttctgttgctcacaggcctccctccgtatccagagcacctcaccagcccacttagc

SEQ ID NO: 694274 - DNA, 83 bp, Homo sapiens
cgacaagccgctggcagccgcggatctcaccgccgctcagggagcttactccacgggaacagcctctagataatctgagttgt

SEQ ID NO: 694275 - DNA, 100 bp, Homo sapiens
tggaaaaggttgatctcatagacaagtttgtacatccaaaaatgacattttcctcagacattatgacaaagggccatgcaggaataaacttggccactca

SEQ ID NO: 694276 - DNA, 76 bp, Homo sapiens
tcctgctgctgccctagctggctacacagattttgaggatgacatgattataacatctgatgtctctcgatatatt

SEQ ID NO: 694277 - DNA, 75 bp, Homo sapiens
tgtaccttttgctcctgatgatcaaaacacgagatttttctcctatttcagcagttggccacaacttcattgctg

SEQ ID NO: 694278 - DNA, 100 bp, Homo sapiens
gcctgaagggagagtttcagttcttcattgacggcacagaccccacaggctcctcggacactgggtccatcacctcctgccccatcatccactccaacac

SEQ ID NO: 694279 - DNA, 83 bp, Homo sapiens
cggcgagcgcgagcggcgcgagaaagtgaaagttacacaagaactgaaaaacattcaagttgagcagatgacaaaacttcaag

SEQ ID NO: 694280 - DNA, 100 bp, Homo sapiens
ccagaacactcctttggttccaagcggggtaaagtcctgggcacaagccagcgtcacccatggagcacatggagatgtgtcactactccatccagaaggg

SEQ ID NO: 694281 - DNA, 50 bp, Homo sapiens
cctggccgcgcctctgcgaccagctgttcaacggttttgtgtatagcatt

SEQ ID NO: 694282 - DNA, 51 bp, Homo sapiens
aggaacgcatccacgaggaattcaagcaaatggttattgaaaatgcacgag

SEQ ID NO: 694283 - DNA, 100 bp, Homo sapiens
cgccatcgatgcatcccagacccccgatgtcgtgttcgcaagcatcctagcagccttctccaaagccacatgtcagcaatctgaagatggtcttacggag

SEQ ID NO: 694284 - DNA, 124 bp, Homo sapiens
cttcgcccggctttgcagcggggacttcggcggcggcgcctcaggcacctcggcccgggtcaaaatgcagatcttcgtgaaaacccttaccggcaagaccatcacccttgaggtggagcccagt

SEQ ID NO: 694285 - DNA, 105 bp, Homo sapiens
cagattcgcagtggtcgcttcttctccttgctgcaagctttcttcctggtggcagatgacatcatggattcatcccttacccgccggggacagatctgctggtat

SEQ ID NO: 694286 - DNA, 100 bp, Homo sapiens
ggacaataccacgctgctgattgagctggaatattgtaatggtggataattactgtaccttcctcatggaaaaagttttatttaaagtgttatttctcat

SEQ ID NO: 694287 - DNA, 50 bp, Homo sapiens
gtgcttcctgcttcatagataagagtcaccaggagactaaagtccatcaa

SEQ ID NO: 694288 - DNA, 118 bp, Homo sapiens
catgtgactctgctcagaagtgccattctattggagagacagatggttcatctcctgttagtattttggtctggaccacacaaccttggacgattccagccaatgaagctgtttgcta

SEQ ID NO: 694289 - DNA, 51 bp, Homo sapiens
gccgctgctccctggccggtcatttcagagccatgggaccacaccaccacc

SEQ ID NO: 694290 - DNA, 100 bp, Homo sapiens
ttttcacttactgcaggattttcagcttcagcaagcagggtttcatatgtccccagtgtatgaaatctcttggatctgctgatgaacttttcaaacatta

SEQ ID NO: 694291 - DNA, 100 bp, Homo sapiens
agaatatggtgcagaggccctccacgggtcccttcggctgcctgaacaacgcccggtacggcatcgcgtggggcgtgcttggagcttcggagttctgctt

SEQ ID NO: 694292 - DNA, 100 bp, Homo sapiens
gggttgctggagcgacggttggaatggaaaactagctggaagacacccaagtactcttaaagcaatccccgtggacaagactgatacactggaacacgaa

SEQ ID NO: 694293 - DNA, 100 bp, Homo sapiens
ggccttcattcagcatttcactcagctgcaggatgtcttagggcgccagcgagctgctattgaggggcagacgcttctaaccgaaaatcttcagttggcg

SEQ ID NO: 694294 - DNA, 100 bp, Homo sapiens
tcacaacccttttgcaaaaggatttcgggataattatgacacgtcatcgaacactatttattggagtacatgtgcccttgggaggaagaaaaagccatcg

SEQ ID NO: 694295 - DNA, 100 bp, Homo sapiens
attcacacacaatccccatcagttgcacgtcttcgaaacctgctataaccccaaagagctcacaatgtctctctgcaccaagctccatgactcaggattt

SEQ ID NO: 694296 - DNA, 100 bp, Homo sapiens
gccaagatctacatttcaaccctgccttacacccagagcgtccagatctgccacatagaaggctccaaagtccggaggtgcagaaagccaggaccaagag

SEQ ID NO: 694297 - DNA, 133 bp, Homo sapiens
gcctgtgtcgccgccgcctcgggaccggctgtatgattaggccacaatcttcaatgagtaaacatattcctgtgtggacactgccagcggctgcagccgacttggaatgacctgggagacaaatacaacagca

SEQ ID NO: 694298 - DNA, 99 bp, Homo sapiens
cagacatggcggcggcttttcggaaggcggctaagtcccggcagcgggaacacagagagcgaagccaggtctctaattaacagaagatggcaaagccca

SEQ ID NO: 694299 - DNA, 100 bp, Homo sapiens
actgaaagtcacgattaggactgacaataaggtgtccaccccccagggttcctgacccctgcccctggacagcgaccccttctcagactccagttgggcc

SEQ ID NO: 694300 - DNA, 74 bp, Homo sapiens
ccgccggttcgcgtctctctgctgcggcgcggggaccgctgtgctctcgatgaggaaaatgaagctcgggctgg

SEQ ID NO: 694301 - DNA, 100 bp, Homo sapiens
cgtgtttgctgcgcccgcactgcgattagccgatgaattacatatgccatctctccctgaaatgatgtttggagacaacgttttaagaatccagcatggg

SEQ ID NO: 694302 - DNA, 100 bp, Homo sapiens
ctcatcagagggaagatctttttcctcaattggtgagaagcgccactgctttgatgtcaactataattcaagttacatgtatgagaaagagagtgagctc

SEQ ID NO: 694303 - DNA, 75 bp, Homo sapiens
gttcgcgtctctctgctgcggcgcggggaccgctgtgctctcggtgctgactgggttacttttttaaacactagg

SEQ ID NO: 694304 - DNA, 127 bp, Homo sapiens
cctatgagcctttctacacttcgggctatgatgacaaacaggagagacagagccttggagagggtcctccggggtcacagccctcgccgcacgcacagcctccacctcacaatcctagcagcatgat

SEQ ID NO: 694305 - DNA, 100 bp, Homo sapiens
gcatggatatctctactcgctccaaagaacccttaggagaaatcttgagagtggacagcaattgtgaagatcgccagagagttctgtgtttcatcaccgc

SEQ ID NO: 694306 - DNA, 121 bp, Homo sapiens
cattgacgccatgtcgggttattcgagtgaccgagaccgcggccgggaccgaggatgaggacggggacttggttgccttttccagtgacgaggaattgacaatggccatgtcctacgtgaa

SEQ ID NO: 694307 - DNA, 50 bp, Homo sapiens
ttcatctaccacgctttcgtgaggttgtggctcactggattgctgaaagc

SEQ ID NO: 694308 - DNA, 74 bp, Homo sapiens
gccacaggcagtacggcatggtgctcggttgtctgcattcaaaagagcattctattaaagctaccttaatttgg

SEQ ID NO: 694309 - DNA, 100 bp, Homo sapiens
tgttgaactcagctgcctgtagattacaccaggaagcaaggcggcagctgccaacctgtgtcctggagatgtcatcctggctattgacggctttgggaca

SEQ ID NO: 694310 - DNA, 75 bp, Homo sapiens
ctccctggccagggcagcccttcaggagctccttagtaaaggaccccaactggtacaaagccaaaaacaaggtgg

SEQ ID NO: 694311 - DNA, 81 bp, Homo sapiens
tttttgttcaagataaagtgattttttgcctttgttgattaactggacaaattcaggtccagccctgctgggagttttctg

SEQ ID NO: 694312 - DNA, 74 bp, Homo sapiens
gctggaaaagtgagaggtcagactcctaagtctctggatggtcgtcagatccgtgtggatcatgcaggcaagtc

SEQ ID NO: 694313 - DNA, 90 bp, Homo sapiens
atatgactgggttgaagacttctccagatcagtgctaacatcttccgtacacttcctccaagtgataatccagattttgatccagaagag

SEQ ID NO: 694314 - DNA, 100 bp, Homo sapiens
ccgggaaccagccgcagccgcagccgcagcagcaggtggcaaagaaacacagcatgatgtttggaaatataattcttcgatcaacaagtggattcagatt

SEQ ID NO: 694315 - DNA, 100 bp, Homo sapiens
cttcccagcattcctacagatataaatagtgagaaagatcagtctaaagaaaaggagaagaaagtgaaaaaaacaattccttcctgggctaccctttctg

SEQ ID NO: 694316 - DNA, 98 bp, Homo sapiens
cttcattgctgcgcgcctctgtggtcaggacctcaacaaaaccagccgacagcagatgtgtccggctttgctggcccagcaagcctgataagcatgaa

SEQ ID NO: 694317 - DNA, 100 bp, Homo sapiens
ccacgatgtgaagcggggcagagccgggggagcccagcccagccagcctccaggggttatggttttgtgaaattcacagatgaactggaacagaagcgag

SEQ ID NO: 694318 - DNA, 100 bp, Homo sapiens
ggccctgggctccccagtgccacccgaagggcctgaggaggccatctgcaggtgtgactgcacagaaaagttacaaaacaaatttgactttttgcgctca

SEQ ID NO: 694319 - DNA, 83 bp, Homo sapiens
gaaaaggcaacatcctgtcacaggccatgctctggcaaaaacgagtgcctgtgaagaaaacggggtattgccctgaggcttat

SEQ ID NO: 694320 - DNA, 82 bp, Homo sapiens
cagcagtggagttcagcccactactctgaaccaggagtgtacctcacagccttctaggatctccagagtggacaggaatctc

SEQ ID NO: 694321 - DNA, 76 bp, Homo sapiens
aaaaagcagtctaaacctgtgaccacccctgaagaaattgcacagacttaattcagtgcacaaatgagatgaatgt

SEQ ID NO: 694322 - DNA, 78 bp, Homo sapiens
tcaaggtggcctaccaggaggccaggggtgtcgccatggactgtgtgcagctgaatcagtataccctgaaggatgaaa

SEQ ID NO: 694323 - DNA, 76 bp, Homo sapiens
attcttcagagggcaatgaaggcacagaaatggaagtaccagcagaaggagtggagtcaacatatcaatggagcaa

SEQ ID NO: 694324 - DNA, 83 bp, Homo sapiens
cacgcgggcgcggatcgaccggagcagagagctggcgagcaaggaactgtggctgcaccatctgtcttcatcttcccgccatc

SEQ ID NO: 694325 - DNA, 100 bp, Homo sapiens
acagagagatggagagagacctagttagtctcagaccagtatccttcaggggttctcttactctgatttgcggaaatttggcatcgtcttgtctgctgtg

SEQ ID NO: 694326 - DNA, 100 bp, Homo sapiens
ccagagcccaggtgcccagaggactttcttccagcttctgctgtccttctttgtggagagcaaggtagctcatcccacttcagggactatttcctctgcc

SEQ ID NO: 694327 - DNA, 100 bp, Homo sapiens
cagctccgggaccacttgcctccaccctcatctgccaggtcgcaatggaagaagagatcgccgcgctggtcattgacaatggctccggcatgtgcaaagc

SEQ ID NO: 694328 - DNA, 100 bp, Homo sapiens
tcatctgtccccaccacaatcaatacgattggaaccagcacaagtacaatcaagtaagggagaattgactacgcttatacatcagcttcaagaaaaggac

SEQ ID NO: 694329 - DNA, 75 bp, Homo sapiens
cctggatccgtacctaaaaatacatctcagacggcagctattactacaaagggtctcactgtgttgcccaggctg

SEQ ID NO: 694330 - DNA, 97 bp, Homo sapiens
agaaattccagaagcagaagtatttgtcaaccccagacaggtgggactcttccctggacactgtgttgagttaattaaccaaaaagttccccagtca

SEQ ID NO: 694331 - DNA, 98 bp, Homo sapiens
tggattatcactgcacatccgtagttatgctaaatgatgtggatcctgcccagacatatctgaagagatggattaagaatgctttggattaaggattg

SEQ ID NO: 694332 - DNA, 75 bp, Homo sapiens
gaggaaccgcccaacatggcctcggaggatggtgatcgctcacaccaaatccttggacccctcccggcctgtgac

SEQ ID NO: 694333 - DNA, 95 bp, Homo sapiens
cctggccctggacctctgcccgtccgacaccaacaagatcctcactggcgtggtgaccaagatgaagatgcagaggaccattgtcatccgccgag

SEQ ID NO: 694334 - DNA, 100 bp, Homo sapiens
tggtcaagaaaattcagcctttagcaaaagccacttccagatcaggctgttcttgccttagctgcatcttggacctcaagacaagtaggagaacggacgt

SEQ ID NO: 694335 - DNA, 50 bp, Homo sapiens
cgatgtgcgagactttggaaagggccctcctcaggacctgtctgttcatc

SEQ ID NO: 694336 - DNA, 82 bp, Homo sapiens
ctgcttatggcggcgctggagagggggcgctgagctgttgggagacaagaggagcagcagcggcaccgcccctcaccctgga

SEQ ID NO: 694337 - DNA, 75 bp, Homo sapiens
cgccatgcaaggctggcgcgtctccatggagttgcctgacctggtaccccagctggggacactctaccagttaat

SEQ ID NO: 694338 - DNA, 82 bp, Homo sapiens
ggaaccctggtcaccgtctcctcagatttcttcgccaagcgcaagagatcagcgcctgagaagtcgtcgggcgatgtccccg

SEQ ID NO: 694339 - DNA, 51 bp, Homo sapiens
ataaaatctttaacatttgacgcactgaactgtcccaagcaataaacagtg

SEQ ID NO: 694340 - DNA, 74 bp, Homo sapiens
tatcttcccatccaatacttggtgactggtctattcaagttcaagtgaatggattaatgaaaatcaagttccat

SEQ ID NO: 694341 - DNA, 97 bp, Homo sapiens
ggccaccggagcttgacctcctgcatcgaccgccagcacatctacctctcggctcgaattgatggaaacctggtcgtccggccctatacacccatct

SEQ ID NO: 694342 - DNA, 101 bp, Homo sapiens
caaaggacaaaatcttcaccaaatactcaaggtcactacagaattagcccaagcagattcctcccagaatggagatgtatgcatttcgattcttcatccgc

SEQ ID NO: 694343 - DNA, 49 bp, Homo sapiens
caaccgcctacgagacactcaagagtgatcagcagctggactgtgcctt

SEQ ID NO: 694344 - DNA, 75 bp, Homo sapiens
ctctcgctcctctggccaccgcccctgggaagcccttttggaaagccagtggaatcctgaagggcttcgacccac

SEQ ID NO: 694345 - DNA, 75 bp, Homo sapiens
cgaggaggagacgtaccggctctggaaaatccgcaagaccatcatgcagctgagcgtgctccgcctctcaccttc

SEQ ID NO: 694346 - DNA, 83 bp, Homo sapiens
atgaaattatcaactggcttgataagaatcaggtggcagatatgctgttggagctctgtgtcaccgagttggaggatgtggcc

SEQ ID NO: 694347 - DNA, 74 bp, Homo sapiens
tgccctccgagtcaccgatggcgcattggtggtggtggactgcgtgtcagggagtggtacgggtatcactttcc

SEQ ID NO: 694348 - DNA, 74 bp, Homo sapiens
tgaagagaaaaataggctgccagcaaacagtcttccgcaggaaggagatgtgccacatgaaatgaagatcacct

SEQ ID NO: 694349 - DNA, 50 bp, Homo sapiens
aatggggagcagaaggactcggacacagggtgtccgtgccgctgctgaag

SEQ ID NO: 694350 - DNA, 100 bp, Homo sapiens
catatagctgccctcagctgcactgtggcaaggcttttgcttccaaatacaagctgtatagtgctctggtgctactgattgctcaagagaaggaaagaaa

SEQ ID NO: 694351 - DNA, 74 bp, Homo sapiens
cgcaggcctctttgtcagctggagttgcgcgagcaaacgaggcccctgagagctccacctagttcacaggataa

SEQ ID NO: 694352 - DNA, 75 bp, Homo sapiens
ccaaataaacagaatttgattgctgaggtttcaaccaagtgaatggtagtgtctagaaagggtatgtcccttcaa

SEQ ID NO: 694353 - DNA, 50 bp, Homo sapiens
agacaaggactcacagtggctgcaaggccataaaattttgagtagaaaaa

SEQ ID NO: 694354 - DNA, 90 bp, Homo sapiens
atgctgatggtgatggagattttgatgtggatgatgccaaagttttattaggagagcacacagctgctacaaatgccgtcagtgcagttt

SEQ ID NO: 694355 - DNA, 83 bp, Homo sapiens
actagctccaggttaggccgagctttgcgggaaagcagcgggcgtgatggtgggcatgggtcagaaggattcctatgtgggcg

SEQ ID NO: 694356 - DNA, 89 bp, Homo sapiens
ccttacccggatgatggcatggggtggagccgccaccaaaatgcagattttcgtgaaaacccttacggggaagaccatcaccctcgagg

SEQ ID NO: 694357 - DNA, 101 bp, Homo sapiens
gcacaaaagagtctccgcggtggaggtctgcgttgctcttgcttttcctcgctggggtgtacggagcggcctattgccaattcatggacatgctcttccct

SEQ ID NO: 694358 - DNA, 75 bp, Homo sapiens
tggagctgcacagcctcctggatgccgagctgcaacagccaactcagtttataaatccagaaacacctggctatg

SEQ ID NO: 694359 - DNA, 80 bp, Homo sapiens
aggaaaactcaggaccatgatggctcagtttcccacagctatgaatggtgatctgtgaaaatggttcgctattcacttga

SEQ ID NO: 694360 - DNA, 88 bp, Homo sapiens
ggcagcggcctgcacaccaagggcgcccttcccctggatacggtcactttctacaagctgagatctgtatctgtggacctgaatgttg

SEQ ID NO: 694361 - DNA, 99 bp, Homo sapiens
gaggacagcatggatgggctggagacaacagaaacagaaacgattgtggaaacaggtgagcctgaatttaaatacattgggaatatgcatgggaatgag

SEQ ID NO: 694362 - DNA, 97 bp, Homo sapiens
cccgaggggaccccctacatcaaccaccccatcggtgggcgacatgaccaacagaaagccacagcgcctcatcactcagttccactttaccagctgg

SEQ ID NO: 694363 - DNA, 88 bp, Homo sapiens
ccctgagactctgctgggggagatggaggcgaagacaagagagctcattgagacacgctgtgaacaagacaggccttccccaaccaca

SEQ ID NO: 694364 - DNA, 100 bp, Homo sapiens
caaacgacttctcccttctttgaactggaccccgcgagcaccagagtcggcgtaactatcgcctgacagggtgccttggaacactatgttaattgcctgg

SEQ ID NO: 694365 - DNA, 100 bp, Homo sapiens
caggtagcaagtacatggggaggagaaggaagccaacatccttttggagccatgaatattgtccgaactccatctgttgctcagattggaatttcagtgg

SEQ ID NO: 694366 - DNA, 105 bp, Homo sapiens
gcgcaggatgggatccggctcctccagctaccggcccaaggccatctacctggacatcgatggacgcattcagaaggacctgaaggagaagaaggagaaggtgga

SEQ ID NO: 694367 - DNA, 83 bp, Homo sapiens
agaaactagagcaaataaccgttttgaaattttcctaaggacggtctgaagagccaagagctatttgatgaaattagaatgac

SEQ ID NO: 694368 - DNA, 50 bp, Homo sapiens
gtgagcgtcgtctatatctttgccggcacagtcttcactaccgtagaaga

SEQ ID NO: 694369 - DNA, 112 bp, Homo sapiens
actctctgaggaagcccaactcctatgagctcctctctggcaggtgtctgagggttctgtggtccagttttcatcagcaaacttctccttgacagcagaaacagaagaaagg

SEQ ID NO: 694370 - DNA, 75 bp, Homo sapiens
cctggagttggagacaattcctggttcagaatttaaacatctttctagggaagcccgtcagcctgagctacagat

SEQ ID NO: 694371 - DNA, 74 bp, Homo sapiens
ccgaaactttcaccgcgagcggctgtctgacaacatctacccggtggaggacctcgccgccacgtcggtgacca

SEQ ID NO: 694372 - DNA, 49 bp, Homo sapiens
ggcggatttggtggaatatcacaagcaatgctggggtgaaaacaacacg

SEQ ID NO: 694373 - DNA, 75 bp, Homo sapiens
gagcaggcagagagcagaagatattcacagacatgcggaatttgaggatttgaagcattcattaccatctggact

SEQ ID NO: 694374 - DNA, 100 bp, Homo sapiens
agactctgaagatgatcagacaaggcaaagcgaaattggtcattctcgctaacaactgcccagctttgaggagggatttgttcgtgttgaccgagattat

SEQ ID NO: 694375 - DNA, 74 bp, Homo sapiens
gtgcagggccaggaggaacatgaggctgtgagaagacatttatcacagtgagtgccctgttttcccataaccga

SEQ ID NO: 694376 - DNA, 83 bp, Homo sapiens
gggcgagaagccctacgagtgcaacatctgcaaggtccgcttcaccagacccctttgctgatgcaagtaagggtgatgacctg

SEQ ID NO: 694377 - DNA, 100 bp, Homo sapiens
cgaataactcaagaaacatttggagattatcctcaaccacaactagaatttgcacaatataaggtttgggtttgtacaagataaatattctgcctctgct

SEQ ID NO: 694378 - DNA, 98 bp, Homo sapiens
ggatctttgagccttttggaagagatgggaaactattgtgggaacaagagctatacaataactttgtatataatagtcctagaggatattttcatacc

SEQ ID NO: 694379 - DNA, 100 bp, Homo sapiens
gaggacggggccgtgggttctctagaggagcgagctggacgccactgtggggctctgagagtcctgaattcttactgggttggtgaagattccacataca

SEQ ID NO: 694380 - DNA, 83 bp, Homo sapiens
cccagcactttgggatgctgagacatatgaacaggtatttaaaatgcaatgtgatattcgttgtactggaaggatgttcaggg

SEQ ID NO: 694381 - DNA, 75 bp, Homo sapiens
cgagaccgtgaccgagagcgtgaccgagagcgcgaatatcgtcatcgttagaagcctctcctcctcccagttctc

SEQ ID NO: 694382 - DNA, 101 bp, Homo sapiens
atatttacactgatggtagaaataaataaaaaaggaaaagctctactgcatcagttagaggatgttggttcctgcaaacaagaactgaccctatcacctct

SEQ ID NO: 694383 - DNA, 100 bp, Homo sapiens
ggagagattgttcctgtggagcaaagagctgcatcatgaattcaggagcatcgtctcttgcagctgaatggggtaaatatggaatgcgattcaatgtgat

SEQ ID NO: 694384 - DNA, 100 bp, Homo sapiens
ggccgggcggcgcttctgtcctcctactcggacccgcagagtgcagacatcctcagcaccatcggctatgacaacattatccaacatctgaacaatggcc

SEQ ID NO: 694385 - DNA, 100 bp, Homo sapiens
gtttagtcaaaaagccatgtagaatgcctgccttttgaagaccacttttaaggtgtctagtaagacagcagcgtctgaccaaacacaccaagttcgtgcg

SEQ ID NO: 694386 - DNA, 98 bp, Homo sapiens
tggctgctgcctactacagcggaggtacaggtttgcagattccgccagcagcacagcaagctctacagatgagtggctctttggcatttggtgctgtg

SEQ ID NO: 694387 - DNA, 101 bp, Homo sapiens
cagacggcgacagtggcggcggcgccatggcagggcttgcagacgcaaacatgcagatctttgtgaagaccctcactggcaaaaccatcacccttgaggtc

SEQ ID NO: 694388 - DNA, 90 bp, Homo sapiens
tagtgattgcccatacattgttcagttttatggtgcactcttcagagaggtatggcccatctcctgtacgcttggagcgacctttggcta

SEQ ID NO: 694389 - DNA, 100 bp, Homo sapiens
gcacctgattcccaaggcaagacagggcttccgagtggacctgccaatcaagtcggcccgctaccgtggccagtacaacacctatcccatcaagctcttc

SEQ ID NO: 694390 - DNA, 75 bp, Homo sapiens
actctcttcgctctttgcatcttaactgcagggctgacgcgccactatgtagcgggtttcgggcgggccacgcgt

SEQ ID NO: 694391 - DNA, 75 bp, Homo sapiens
tcttccagagccaaggaggaagggttgtccgggatgggcttctttctcaaggttattctgattttataaatagga

SEQ ID NO: 694392 - DNA, 74 bp, Homo sapiens
agaccattccgtatggagagccggctgcttttctaacccaaactgtatgtcttgatgacactacagtaaagttt

SEQ ID NO: 694393 - DNA, 100 bp, Homo sapiens
aaatggctaaacaggcaacagttgtcctcaattgcgtaggaccagtttgctgtaatggcacaagagtatttgtgcagaaagaaattcttgataaatttac

SEQ ID NO: 694394 - DNA, 101 bp, Homo sapiens
gaggaaatgaagggtattgccgctgttactgatatacctttagaatgctgcttctaaattacttgggcaaaattgggtccaaaacgcctttgatggcagct

SEQ ID NO: 694395 - DNA, 90 bp, Homo sapiens
cagaatgctccaggcagtgtaatctcattccatcttcattcatgactccagacaggtcttatcacaatggccatacttagaacatgagca

SEQ ID NO: 694396 - DNA, 103 bp, Homo sapiens
tttgactactggggccagggaaccctggtcaccgtctcctcaggtattttcaaatcaaagaagtttgaacacttaaaaacaagtcaaattgtactgaaagatt

SEQ ID NO: 694397 - DNA, 118 bp, Homo sapiens
tcggatcctagacctaacagaatgttcagctgtacaattcgattattcacaagaaagggtaaactgtttttgatgttcatgagagcgcagtttgactatgatcccaaaaaggacaatc

SEQ ID NO: 694398 - DNA, 75 bp, Homo sapiens
ctactatggatataaaagatctggttaaacaatttcatcagattaaagacaagcttaccattgttcagaagcaaa

SEQ ID NO: 694399 - DNA, 75 bp, Homo sapiens
gatctagttaaagttattcaacagaatcgatgatgcaaccaacttggtccagctgtatcacgtgctccatccaga

SEQ ID NO: 694400 - DNA, 119 bp, Homo sapiens
cggccccctcccagcctgccgctccggagagccgcccgccgaggatgcgacgcaccgcagggagtgcatccgccccaacccttttccccctcgtctcctgtgagaattccccgtcggat

SEQ ID NO: 694401 - DNA, 107 bp, Homo sapiens
tgtgcagccgcgaggaggcgcgggaggtgttcgagaacgaccccgagacggtccctggtgctgaaccgcctgcgtccagttgccagcgggggtgggaaagcccaacc

SEQ ID NO: 694402 - DNA, 75 bp, Homo sapiens
aagaaaacacaggagccggagcagaagcaaagaggggaatgtgaccctgaaggagctgaatgctcgccccatgga

SEQ ID NO: 694403 - DNA, 98 bp, Homo sapiens
cgcgctgccgagaagctttacctcgctgaccctatgaaggttgtatctcccacttcacccttctagaccatcccagaagatctataagatttcatctg

SEQ ID NO: 694404 - DNA, 74 bp, Homo sapiens
gcagcacgtggacgctgactcggaagtgcaggtgtcgtgaaaactacccctaaaagccaaaatgggaaaggaaa

SEQ ID NO: 694405 - DNA, 80 bp, Homo sapiens
acaagtggaaatccacaaggattcttttcaatacatcctaaaacagatgctcccataatactctcagatagtgaagaaga

SEQ ID NO: 694406 - DNA, 100 bp, Homo sapiens
tagatctagaaggagtcaagaggaagatggaccaagggaattacacatctgtgatttagtccatattatcgaaccaaggaaaaacttcccctgagctcag

SEQ ID NO: 694407 - DNA, 75 bp, Homo sapiens
tgtgtgtgagcacccctccatgccagactgtttgtctgtgggatataaacgcaggaccaaaagaaggcaaaattg

SEQ ID NO: 694408 - DNA, 83 bp, Homo sapiens
ggaagtacgtgaagaaggagacgtcgcctctgcttcggagccataaagaatgctgatgggagaaccattttcctaattttcaa

SEQ ID NO: 694409 - DNA, 109 bp, Homo sapiens
caggaatctggaccttcagcagaaaagtatagcgtggcaacccagctgttcattggaggtgtcactggatggtaccctcacctgagtcccaagtacaaggagtcttttg

SEQ ID NO: 694410 - DNA, 51 bp, Homo sapiens
aaaatgttccgggcccagagcaaagactgctgcctcatatccgggggaatg

SEQ ID NO: 694411 - DNA, 124 bp, Homo sapiens
ctctcctccctcacgggcggcggcggggccgagcgcggccctgcaggcgatgtcgccgaaaccgggctgcaggcggaatgccgaactggggaggaggcaagaaatgtggggtgtgtcagaagac

SEQ ID NO: 694412 - DNA, 100 bp, Homo sapiens
cctggccgaggtcccagccagcatcccggtcaacacgcggtacctgaacctgcaagagaacggcatccaggaggaggcccaggccgtggaccaggagcta

SEQ ID NO: 694413 - DNA, 98 bp, Homo sapiens
ggctggggagacccatctggactaccaaggagaagctatagactacttctactccaccaggaagaaacatgcccctgattcagtgcctctgcttagct

SEQ ID NO: 694414 - DNA, 83 bp, Homo sapiens
ctagagataggagcagagaacgatccaagaggaggtactccacatcagcattctcaagactggagaagttaggcctcagacat

SEQ ID NO: 694415 - DNA, 100 bp, Homo sapiens
caacaacttcaaagtaaaatcagtttaatttcagaaaagcatcaccaaataatccagcagtacatggtgaccctggagaaccttctcttcactgctgaat

SEQ ID NO: 694416 - DNA, 74 bp, Homo sapiens
agaatcccggccagacgtgcgaacagctccagctggtggctgctaatttacagaagattgtagatgatcccaaa

SEQ ID NO: 694417 - DNA, 82 bp, Homo sapiens
cttttatagaagtacgtccaggaatagaagtgacctgctttttcgcaacagaaaaatatggctcaggagactaaccagaccc

SEQ ID NO: 694418 - DNA, 93 bp, Homo sapiens
ctgatggctaagtttgcatgaaaactgcactttattgcaagaattacatgaacgacagccttcgcaccgacgtcttcgtgcggttccagccag

SEQ ID NO: 694419 - DNA, 74 bp, Homo sapiens
tgttccgtgctgttcctgagtgtcaactatctgggggggacattcccagggtgttgaaagcagcaggggcctag

SEQ ID NO: 694420 - DNA, 82 bp, Homo sapiens
cctcggtgcagggctccaccccgtcgcctcgacagcggggatctgacgagcttttctctacttgtgtcactaacggaccgtt

SEQ ID NO: 694421 - DNA, 75 bp, Homo sapiens
gagagacattgattttgttgaagatgactcggacattttacatggtcgaactggaagagcagggaataagggaaa

SEQ ID NO: 694422 - DNA, 90 bp, Homo sapiens
caccgtttccagaagctgcgttgccaacgtcacatcccaaaatagcaccttctagccaccatggcaacctcatctgaagaagttttgctg

SEQ ID NO: 694423 - DNA, 80 bp, Homo sapiens
ctgccacgtccgagacctggagcagccaccgccgcaatcatgctattgacctgaaaagtggttctggaaaagtgtaccaa

SEQ ID NO: 694424 - DNA, 75 bp, Homo sapiens
cagcagaagaaggcagacaggggctatcattaagaaggcttccgatctagagtacaaaatccagagaagaaccct

SEQ ID NO: 694425 - DNA, 111 bp, Homo sapiens
gcaccatgccgctcctaagcctgcacagccgcggcggcagcagcagtgagaggtgtgaacccacatccctgcccccagggccacctgcaggacgccgacacctacccctca

SEQ ID NO: 694426 - DNA, 82 bp, Homo sapiens
actcacacatgcccaccgtgcccaggtctgaaggggcgtctcgattacctgagctctctgaaggtgaagggccttgtgctgg

SEQ ID NO: 694427 - DNA, 75 bp, Homo sapiens
gtcccttccagctgtcacattctggagcgtatgagatgagttgtcgagatgtccacagaaggaggatttggtggt

SEQ ID NO: 694428 - DNA, 82 bp, Homo sapiens
tccacgtccgatgatgaacctccctcctctgtcagtcatggagcaaaaggctttgacacatcttcctcatcttcgaactcag

SEQ ID NO: 694429 - DNA, 83 bp, Homo sapiens
gttccccgcgctgcggcctggcggcttccaggcgcactaccgcggtcaaaatgcagatcttcgtgaaaacccttaccggcaag

SEQ ID NO: 694430 - DNA, 116 bp, Homo sapiens
gaaatccattgcccgtgttctcacagttattaaccagactcagaaagaaaacctcaggaaattctacaagggcaacaaaccatggatttctcttccccgaggaaagggtatccgcc

SEQ ID NO: 694431 - DNA, 98 bp, Homo sapiens
caatccctgccttttgagtccaggtgttccagaaagctgagtctgatctggattacattcaatacaggctggaatatgaaatcaagactaatcatcct

SEQ ID NO: 694432 - DNA, 75 bp, Homo sapiens
cacccagcagttgcggaagactttcggcctggatgtcagcgaggagatcattcattggaaatctacatttctgaa

SEQ ID NO: 694433 - DNA, 51 bp, Homo sapiens
ccccgaaaacgcaagaagcgtgcctgaagacggaagaagggagtgtcagag

SEQ ID NO: 694434 - DNA, 75 bp, Homo sapiens
tgactgaattaaaaggtgtcaagaagctcagaatgattcctgacattcagacaactgacttgtaactgacttata

SEQ ID NO: 694435 - DNA, 75 bp, Homo sapiens
gacagcagcagcagcagccagtattcgggaaaggcagacaggatgtacagttacccagcacgtgtacctcctcct

SEQ ID NO: 694436 - DNA, 75 bp, Homo sapiens
ttacgtggagccactccctgactacaaggacccccggcggacaggtgatcgagaaggagcggccacagctggcgg

SEQ ID NO: 694437 - DNA, 80 bp, Homo sapiens
ttgtagaaggttgtgaaaaaactactaggatcacgcggcatgtattgaggtttatgaaggcgagcgtgccatgacaaagg

SEQ ID NO: 694438 - DNA, 83 bp, Homo sapiens
gcgggagctggacggcgagcgcgagcggcgcgagaaaaaatctcccaagcctaagaagaagaagcacaggaaggagaaggagg

SEQ ID NO: 694439 - DNA, 75 bp, Homo sapiens
agaaacctcaggacttgagtaacagcaacatggccacgtttaagggatggatggatattatgtatgcagctgttg

SEQ ID NO: 694440 - DNA, 100 bp, Homo sapiens
tctccagcgccggcctcctcagtgcgaagaagctgcagccgcacctggccaagggcattggccgctggaccaacccccagtaccggcagttcatcaccat

SEQ ID NO: 694441 - DNA, 100 bp, Homo sapiens
tcttgttatttcttctttgagaaaaacctgaaagatgtctcagaacgaatgcaggaatttgggaactgagctgtgcaagtgctgaagaaggagatttgtt

SEQ ID NO: 694442 - DNA, 73 bp, Homo sapiens
agacctacgtggcagctgtgaaaaaagccatttccgaagatgcagacagacatgctgaactatctggaagtcc

SEQ ID NO: 694443 - DNA, 75 bp, Homo sapiens
agacgcgtgccgcggcgcctggttgcctgcagcggcccggacccgagagaactctaagctctctgcactgactgc

SEQ ID NO: 694444 - DNA, 98 bp, Homo sapiens
cgcacaccatcctgcgcgtcgtgtcttggcaagagtgagccatggagctacgtgtggggaacaagtaccgcctgggacggaagatcgggagcgggtcc

SEQ ID NO: 694445 - DNA, 75 bp, Homo sapiens
atgggagaagatccagaaactttcactcaagaagatattgacatggtgagaacaagaccaagattggaaagccag

SEQ ID NO: 694446 - DNA, 100 bp, Homo sapiens
taccttatatgaaggggaaaaatttcaacttctatttaaatttagtagtcgatatccttttgactctcctcaggtacagtatatcagaagtatgagccga

SEQ ID NO: 694447 - DNA, 75 bp, Homo sapiens
cctgtttttggggccaagatcaagtggcagaggtcacgagaagagaatgccttctagatgcaaaatcacctccaa

SEQ ID NO: 694448 - DNA, 133 bp, Homo sapiens
caggcatcagatgccagctctgaaaaactcttcaacactgttattgtaaacaaaggaacaccatgaagaagacttctttctctacattgcctacagtgacgaaagtgtctacggtctgtgaagctgctgcccc

SEQ ID NO: 694449 - DNA, 100 bp, Homo sapiens
tcacctccgctcccccgatcctattcccagtcgtggtgtggatgaatggaacatagctcgcctcaatacagtcttggatgtggttgaagaagagtgtggc

SEQ ID NO: 694450 - DNA, 80 bp, Homo sapiens
ttgctttgatctgggagcgcgatgagcctggaacggaagtgaggatcacctacaggaagctcttcgtgggcggtcttgac

SEQ ID NO: 694451 - DNA, 98 bp, Homo sapiens
tttctcattctcatatttcaccaataaagatctggacgttggtggttggctatgtgttgactgtttcattcaagtggaatgcaagcactgaacgctac

SEQ ID NO: 694452 - DNA, 100 bp, Homo sapiens
gcagaaggagctggcagagcagaagtctgtggagaccgcaaaaaggtatggcctcacaagtcttggtctacccaccatatgtttatcaaactcagtcaag

SEQ ID NO: 694453 - DNA, 74 bp, Homo sapiens
cgcgagcgcgagaaggagcgcgagcttgaacgcagcgtgggatcaagcatgaattgcaagcaaactgctacgag

SEQ ID NO: 694454 - DNA, 90 bp, Homo sapiens
gcgggaaatcgggctgaagcgactgagtccgcgatggaggcctggctacagcaatatggctacctgcctcccggggacctacgtacccac

SEQ ID NO: 694455 - DNA, 97 bp, Homo sapiens
cattgtcagtctgtggccatgccaatagagccaggggatatcggtgctgtcctggagccgagagctgccttgcgcttggcgcgccctgcacacctcc

SEQ ID NO: 694456 - DNA, 97 bp, Homo sapiens
agccccagacggctgtcactgctggccagactcagattgcattcatggcttctctggcaacccacttcagcaatcagaacagtgggattatcttcag

SEQ ID NO: 694457 - DNA, 89 bp, Homo sapiens
gacagaagatggatatattctgtgccttaaccgaattcctcatgggaggaagaaccattctgacaaagtgacagaaatgttggtaaatg

SEQ ID NO: 694458 - DNA, 100 bp, Homo sapiens
gtgctcgggtccaagctgtcagagccacaatggagagtcacctagacactccctacaatgtcccagatgtggtcatcaccatcgccaacaatgatgtcga

SEQ ID NO: 694459 - DNA, 50 bp, Homo sapiens
gaccttgttatagaagccttaaaggtcagaagagatcaattctacagaaa

SEQ ID NO: 694460 - DNA, 71 bp, Homo sapiens
ggataacactaagtttagatctcatgagatggcgttcaggaagtggcttatattcactcaaaccagaatgt

SEQ ID NO: 694461 - DNA, 100 bp, Homo sapiens
tcggtttcagttggagttggaatttgtgcaatgtttagccaacccaaattaccttaattgtaagagcttctgttcgtgtgcagggaaagcagctcacaga

SEQ ID NO: 694462 - DNA, 75 bp, Homo sapiens
cggctcacctggcggtgcccgaggagtagtcgctggagtccgcgcctccctgggagaggagaggcagcagcatgg

SEQ ID NO: 694463 - DNA, 75 bp, Homo sapiens
gagcagctctgtcagcatgaacaccttctccgacagcagcacacccgtctcctctgagcctccggcctccataag

SEQ ID NO: 694464 - DNA, 83 bp, Homo sapiens
ctcacgcatacaacaggaatctggatgcaaaatacagatagctcctggctttatcctgtggataaacgcagagtgaacgagtt

SEQ ID NO: 694465 - DNA, 83 bp, Homo sapiens
gccgccttggcctcggggtctccctacaccaacggtactactcagtcctctatccactggagaggaaaatatctgatgccaag

SEQ ID NO: 694466 - DNA, 100 bp, Homo sapiens
actgtgtgtaccttggatgctgctgtttaaaccattggtccttcgccgtcagtatttgaggagaaagcatttggacctggaggaacttgctttgtaccag

SEQ ID NO: 694467 - DNA, 96 bp, Homo sapiens
aaagagaaggaggccggaactacaccagcaaaagtgggacttctcctcttgcatgcctgaatgcaatgcttcacacaaactccagaggtgaagagg

SEQ ID NO: 694468 - DNA, 100 bp, Homo sapiens
cgcaggggaagcgtgactgtgctcaggcgggaagtccaggagtacatcccagcccagctctaccgtacaacggcaggctcgacctggctcaacctggtca

SEQ ID NO: 694469 - DNA, 75 bp, Homo sapiens
ttgccacagtccacatgtcccggacaggggaaatgctgtctgtagctgagcacttcctggagcagcagatgcacc

SEQ ID NO: 694470 - DNA, 75 bp, Homo sapiens
cttgaaagagataaaagcggaagtttgccacacgcaactccgaagtcaagcccgcactctgattacctttgctgg

SEQ ID NO: 694471 - DNA, 75 bp, Homo sapiens
ggacctgctggctcagcccctccctgcagacggcgccggcgcccaggtggaggcaatgcccagagctgtggcagc

SEQ ID NO: 694472 - DNA, 50 bp, Homo sapiens
caggccgcggccggggcaggagcgcagaaagccttgagccgggccatgct

SEQ ID NO: 694473 - DNA, 100 bp, Homo sapiens
tcttctgcctcagcctcctgaattatgagcttacagaaagcctggcctacattttactctttttggatttcttcctcatcaagagactgctgcagtgcct

SEQ ID NO: 694474 - DNA, 82 bp, Homo sapiens
atcgaggcatgcttgacacacatcataaactctgcacattcattctcaaaaacccacctggataccatgtcaagactgaaga

SEQ ID NO: 694475 - DNA, 82 bp, Homo sapiens
tttccatgtcaacatagtccaggaggagaaagtgcaggccatgccacttcctctcaggagcctagtggatgctcagatcaga

SEQ ID NO: 694476 - DNA, 82 bp, Homo sapiens
tcagatgggatctttccggatcaatccagatggcagccagtcagtggtggaggtctgggacctcagtgacattgacaaggat

SEQ ID NO: 694477 - DNA, 121 bp, Homo sapiens
cccaggcttctgcgcagaatgcttctcagcagcaacatccccaaacagcggcgtttcacggtggcacatacatggaactttatagtggtagcagagactgcaacattctggcttgggttcc

SEQ ID NO: 694478 - DNA, 98 bp, Homo sapiens
cgcgccttcggcattggccgccgcgatgtcagctcagtgctgtgcgggccaggttaatgttgaagaaggaaaatgcggaagtcgtcatttgacaagtt

SEQ ID NO: 694479 - DNA, 100 bp, Homo sapiens
atggcgtggagatatggcgcaactgcggcgcctacaaggctttggcccaccaagtgtgtaccatgctgctattgtcatcttccttgaattctttgcgtgg

SEQ ID NO: 694480 - DNA, 100 bp, Homo sapiens
tgccgctgtacactctttgtaaggaggatttagagagtatggacaaagagatcttaatatttgccagtgatgcctgcaaaaatgtgacattacatgttcc

SEQ ID NO: 694481 - DNA, 75 bp, Homo sapiens
gatctggctataatacccctgctgacatttggagcacggcatgcatgcttggatttacactgggcaacgtggttg

SEQ ID NO: 694482 - DNA, 95 bp, Homo sapiens
acttcttcacggaccagtttcagttcgccgatgggaaacccggagaccaaatccttggacacattcagctaacgtattttagcaggtggagtgag

SEQ ID NO: 694483 - DNA, 75 bp, Homo sapiens
catcaccatgggccgggatcacattctgattctggggccacaactttggtgaagaaggatatattcggatggcaa

SEQ ID NO: 694484 - DNA, 98 bp, Homo sapiens
gtggcatctcctctcacggatgcctcgtgagaaaagctagaatgtggagtcctgtcatcagatgatgtgactacatggaatgaggactatagctgctc

SEQ ID NO: 694485 - DNA, 75 bp, Homo sapiens
cagcctacaagagcaccatcggcaggaatttacatagtacatgacgaagttaaggataaagcttttgaactagaa

SEQ ID NO: 694486 - DNA, 104 bp, Homo sapiens
aggacgccagcatcatacaccggctgttcgaggccttgactgtaggtttggtgcacctcgatttggaggaagtagggcagggcccttatctggaaagaagtttg

SEQ ID NO: 694487 - DNA, 100 bp, Homo sapiens
cccatcactccaaggagagaaggaaggagctcattgccaagttagatcaggcagaaaaggagaaggtggatgctgctgagctggttcgggaattcgaggc

SEQ ID NO: 694488 - DNA, 74 bp, Homo sapiens
ggaaagtgaggaattttgaagtacaccgtggtgacattgtatcattggtgaacattttagtggacaaaccaaat

SEQ ID NO: 694489 - DNA, 100 bp, Homo sapiens
cccaccttcagcaggatcctgatgccaaagtagcttgtgccaagtagcttccagcttacagcagccctcaaatttggacctgccaccagctccagagctt

SEQ ID NO: 694490 - DNA, 75 bp, Homo sapiens
ttctgtggggacacatagatttgtccaaaagtttaattggttggggtcagataagaagaggagtgacaatcaagc

SEQ ID NO: 694491 - DNA, 100 bp, Homo sapiens
gatcattctgcctgggaaagaaatgaaagtctttccaatgcaggtcatcatcagatttgaaatatttaaagtggatacaaaactatttcagcaatgcaga

SEQ ID NO: 694492 - DNA, 90 bp, Homo sapiens
agtctgcaccttctcttactgctggcctgaaatatggctacacacacctttctgcaggagagctgcttcgtgatgaaaggaagaacccag

SEQ ID NO: 694493 - DNA, 100 bp, Homo sapiens
agctgctggagcgcgtggaggagccggtgctgcagaaccagatccgggagcacgtcatcgccatcgaaggctgagcagcgtgttatgtcccgggtacact

SEQ ID NO: 694494 - DNA, 75 bp, Homo sapiens
aaaatcaacaacagtttcctgcgcgaccacagctatgcgaccgaagtggccacagatgtctttaattccaaaaac

SEQ ID NO: 694495 - DNA, 100 bp, Homo sapiens
agtagaacttatctactggatttccgtagtattgatgctgttctgtaggaagttatacaatcaattttcgggtaatgagttgtgattcctttcccatccg

SEQ ID NO: 694496 - DNA, 83 bp, Homo sapiens
gaacctcagcaccgagaacatctactctttcaactacaccagccagcccgaccagcggacaaggcaaaatctcagcaagttcg

SEQ ID NO: 694497 - DNA, 98 bp, Homo sapiens
ctacacttgcctatccagaaagcaacagcagagagaaactggagagtgagaagctaaatgtggctgaggtcacccagtcagagattgctcagaagcaa

SEQ ID NO: 694498 - DNA, 75 bp, Homo sapiens
ggtgtcaccgggatcatgattgcccgatttggagtcaaaaacgtatgagaccaaaaaaatattttcagaaaatga

SEQ ID NO: 694499 - DNA, 83 bp, Homo sapiens
cctggatgcacagccccggcgctggaagcgcctcttggacgcgtgtgaccgatgcccagattgcacgaccacttctggagctg

SEQ ID NO: 694500 - DNA, 83 bp, Homo sapiens
cgggcgtaagcggactgcagccgcgagctcctggaggcggcgggatggaggcggcggccggccccctcagaccgtgccatggg

SEQ ID NO: 694501 - DNA, 100 bp, Homo sapiens
cggaagcgctacgccctcaccgggaggaagtggaacaaccaccatctgacctttaggtgcccctcccagggtacatcgaggcctacccccgatcacggta

SEQ ID NO: 694502 - DNA, 100 bp, Homo sapiens
cctggagggggcagtcccgggagaacctgcggcggccggagcgttaataacgacatgatagtcactgacaacaacggtgcagtcaagtttccacaactgt

SEQ ID NO: 694503 - DNA, 82 bp, Homo sapiens
ctcatctggaattttgccgatttcatgactaaccagtaatgtaatctgattgaaggggaagatcatgtagaagtaaatgggg

SEQ ID NO: 694504 - DNA, 86 bp, Homo sapiens
aaggaacagtgccaagttagatgccgattacccacttcgagtcctttattgtggaggctaaatttattgtgaagaaatcagaagat

SEQ ID NO: 694505 - DNA, 71 bp, Homo sapiens
acatctttccaccgaatgccacctggtttataacaaaaggtgtctgatgatttgtgagcctcaagtgacta

SEQ ID NO: 694506 - DNA, 98 bp, Homo sapiens
cgcgcggcgctggactggagcagaaccccaggactgcgcccccgggagcgggcgcccagaggagccatgtggctagaaatcctcctcacttcagtgct

SEQ ID NO: 694507 - DNA, 101 bp, Homo sapiens
gtttagtatcttcttcagcaactcagtacggggctcatgagcagacgcatgcgatgtatggtgtttgtggcttgatcgtcccccaggaagacatgccattt

SEQ ID NO: 694508 - DNA, 75 bp, Homo sapiens
gcgagagcgtgccaggcgtgtactgcctatgtgtgctatgccatggacaatattaccaggcagaaccaattctac

SEQ ID NO: 694509 - DNA, 100 bp, Homo sapiens
ccacttccgaaaccacaagtttgccgatgttcggactaaggatcaccgctttgaaagtgtcagtcaccttatcagctaccacatggacaatcacttgccc

SEQ ID NO: 694510 - DNA, 50 bp, Homo sapiens
taactttaacgaacagcttgaaaatgacatatctgaagagatggattaag

SEQ ID NO: 694511 - DNA, 75 bp, Homo sapiens
actgcacattgccgcccgggagaaccgctacgactgtgtcgtctagcaattgactatgggattaaattcttggag

SEQ ID NO: 694512 - DNA, 82 bp, Homo sapiens
atacaccagtactaccaaggacagcttttttcctgcaagagttttactacccttggatgctgctgttgacatggaaaagatt

SEQ ID NO: 694513 - DNA, 75 bp, Homo sapiens
gtttgagaaacctggatctgcgatctgtttgtggaggaatgccccccacgccgcaggccgcgcagctcgctggac

SEQ ID NO: 694514 - DNA, 98 bp, Homo sapiens
attgctactgcacggtgaacctggaccaggaggaggttttcaggaccaaaattgtggaaaagtcactctggaagcagacagtatgagcatgaccagtg

SEQ ID NO: 694515 - DNA, 100 bp, Homo sapiens
tttgatgccctgactcctgtgattgaatccagcctccatcaagtggaaagcatgcacggagcagggcaagaagagaggcggaggcgatccttccaggatt

SEQ ID NO: 694516 - DNA, 98 bp, Homo sapiens
acaggctcttgcacacaaagaagagacatgatgtatttgcatccttccctgcttcagccaggtagagtggaacccccagctattagaggtcccacccc

SEQ ID NO: 694517 - DNA, 82 bp, Homo sapiens
caacagacctctgtttggggagacgtccgccaagcagggaggagagagcgatggcttttttcacccagaaggccagccccag

SEQ ID NO: 694518 - DNA, 100 bp, Homo sapiens
tttgccaccgtttacaaggccagagataagaacaccaaccaaattgtcgccattaagaaagcacaaatatgccagctacctttggacatttggcaggggg

SEQ ID NO: 694519 - DNA, 90 bp, Homo sapiens
ctcaccccgcggccgcaccttcccgccttctcagattttgcaagaacgaggctcaaggatgtgagggacacagtattgacagctgaagaa

SEQ ID NO: 694520 - DNA, 83 bp, Homo sapiens
gcgccgtgcccaccgaccggcctcgagcgccccggcgggaggttgccgaggagcccaagtagaagaaatatggagtttagagc

SEQ ID NO: 694521 - DNA, 100 bp, Homo sapiens
caacgtgggagacaaagaagagcctgaaagagccaaatcttaccttctggaccatgacaacactaagcagttgagatttgaagatgtagtaaaccagtca

SEQ ID NO: 694522 - DNA, 73 bp, Homo sapiens
ttgactgccgaggccccatgaatcaatgtctggtagccaccggcactcacgctcgagcagcacctaaaatagc

SEQ ID NO: 694523 - DNA, 83 bp, Homo sapiens
cgagctggctttaatcctgaaagccatgcagcgggagtcagaaataccatcagaggaggggtactgtgactttaatagtaggc

SEQ ID NO: 694524 - DNA, 90 bp, Homo sapiens
catacactgtgttacatgagagagccaatcttggacctaccacttgaaaccattagtgagctggcccctggatcctcctggaatccccga

SEQ ID NO: 694525 - DNA, 74 bp, Homo sapiens
ttttccacagggaattgagttggttcgagaacttgtcttggacaattgcaaatcaaatgatggaaaaattgagg

SEQ ID NO: 694526 - DNA, 83 bp, Homo sapiens
cgggtctggagtgcgtgggggaccggctgttggcggcggggatctgacgagcttttctctacttgtgtcactaacggaccgtt

SEQ ID NO: 694527 - DNA, 90 bp, Homo sapiens
ggaaagtgaggaattttgaagtacaccgtggtgacattgtatcattggtgacttttcttggtagagatggaaatccaaataaacggaatg

SEQ ID NO: 694528 - DNA, 90 bp, Homo sapiens
ttcgcagtggtcgcttcttctccttgcatgaacgtgcagggtgattatgagccaactgatgccaccgggttcatcaacatcaattccctc

SEQ ID NO: 694529 - DNA, 87 bp, Homo sapiens
gccgcctcgggaccggctgtatgattaggccacaatcttcaatgagtaaacatattcctatctgactgcagccatgagcagcaatga

SEQ ID NO: 694530 - DNA, 95 bp, Homo sapiens
gaacgggaccgggttcagaagaaaacgttcaccaagtgggtcaacaagcacttaatgaagaagcaatatccaaggcagtgtcatctgcaacaatg

SEQ ID NO: 694531 - DNA, 98 bp, Homo sapiens
aaggccgggacccggttccccggcccacagtgggggtgtgcaaacccgagagaactgggacttgatgacacgtaccttcgctgcattgagctgcacag

SEQ ID NO: 694532 - DNA, 50 bp, Homo sapiens
gccagaatcctgaccttgctgcacagagaaaggagttcatgaaggcagaa

SEQ ID NO: 694533 - DNA, 75 bp, Homo sapiens
cccctcctctgcctcgctccaacacagatggggacccagagcctgctcttgggaacagccagagtaagattggaa

SEQ ID NO: 694534 - DNA, 100 bp, Homo sapiens
cctatattttttcttccagaatctcagcagctgggagagcaagaatatgatcctggaccaagcctttaaatatataacagaattgaaaaggcaaaatgat

SEQ ID NO: 694535 - DNA, 88 bp, Homo sapiens
ctactctgatgtcaatcttgagggctagagagttttccaaagagagggagaaggccaaggcccggggagatttccagaagctgcggga

SEQ ID NO: 694536 - DNA, 75 bp, Homo sapiens
gccctgcatatgattggctctttagctgaaatacttctgaagccacccgaaacaatgaaatgtaatacattcata

SEQ ID NO: 694537 - DNA, 101 bp, Homo sapiens
gctggctgcccctcaggacccctgctacgtggagaaaacctcggataagtttctcttcagcaacgggtagcagaattggaaaaaattaatgcagaattttt

SEQ ID NO: 694538 - DNA, 83 bp, Homo sapiens
cctggacgtagccaagcgcatgatccgcatggccaaggaactgtggctgcaccatctgtcttcatcttcccgccatctgatga

SEQ ID NO: 694539 - DNA, 97 bp, Homo sapiens
tatggtcgtgatcgtgactattcagatcatccaagtggaggttcctacagagattcatatgagagttatgttcaggcttcagagagcccctgacgcc

SEQ ID NO: 694540 - DNA, 74 bp, Homo sapiens
cgccaccggcagcagcagcaccaccggacgattattcttggagaaaccctgtctgtttactgtaaccttttgca

SEQ ID NO: 694541 - DNA, 89 bp, Homo sapiens
cagaaaaccaaacaccacatgttgtctcttagaagtgggagctgaacggggatgtggagacgctggtagcggggccaggaaggctccgg

SEQ ID NO: 694542 - DNA, 100 bp, Homo sapiens
ctcagagtaaagctgctggacaacaccatggaaatatttgacattgagcaacagccaactcagtttataaatccagaaacacctggctatgttggatttg

SEQ ID NO: 694543 - DNA, 83 bp, Homo sapiens
ccgcccgccggcagcgccgctccccagggagggagtccgcagcctgagtgtgaacgagctctatgtcgatgacccagacaagg

SEQ ID NO: 694544 - DNA, 90 bp, Homo sapiens
ctggtgacttccggaaagctctgttgactttggcagatgtgacagcctctgatgcagattcaggactctatggctttattgaatattctc

SEQ ID NO: 694545 - DNA, 100 bp, Homo sapiens
atgaggaccctgggaatgtttcttattctgagattggagggctatcagaacagatccgggaattaagagagattccagagtgtttgagggatagttatcc

SEQ ID NO: 694546 - DNA, 75 bp, Homo sapiens
cagcccaaaggcccatgaggggatgcagttatgggctctgtcgccgtgggtagttggcaaaaaaggagaaagcca

SEQ ID NO: 694547 - DNA, 101 bp, Homo sapiens
aacttccaaaagaaaactggctaaagatgctgtgtcgacatgtagctaacaccatttgtaaagcagatgctgatctagtgaaaagccatttgatgtatgcg

SEQ ID NO: 694548 - DNA, 75 bp, Homo sapiens
ataggagtctggtcaggcgtcaggctagtccgacgaagagtggagacagggtcttactctgttacccaggctgga

SEQ ID NO: 694549 - DNA, 97 bp, Homo sapiens
gagtttgcagcaaaacctcctgcacgaaaggctctggaaagatgtggtgatggggcattcttgctaacaaccttgggtgatggttgcagttttccaa

SEQ ID NO: 694550 - DNA, 80 bp, Homo sapiens
gacgaggggctccgggtcttccagagcgtgaagatcaagatcgttacagaatgtctgaaggggacagtgtgggagaatcc

SEQ ID NO: 694551 - DNA, 82 bp, Homo sapiens
tggccagaagaaccaactccacattcaaccaggttgtgttgaagagcccaacgatgatcaaatatggcatcaacaatatccg

SEQ ID NO: 694552 - DNA, 82 bp, Homo sapiens
ccgtggaataggtgtatcaagtaatggtgcaaagcctgaagcttgaagtagaaaatgccatgatgagaaaaactattaaaaa

SEQ ID NO: 694553 - DNA, 100 bp, Homo sapiens
gatgttttcacctcctgtgagcagtgggaaaaatggaccaacttctttggcaagtggacattttactggctcaaggactttgaacatgtcggggatcgcc

SEQ ID NO: 694554 - DNA, 100 bp, Homo sapiens
aatgccatgctcatggcaaaagggaagctgaaaccaactcagaatgcttctgagaagggcttcgtgggacacatatgcaacatgcctatgatttttacaa

SEQ ID NO: 694555 - DNA, 100 bp, Homo sapiens
ccttctctgaacgctcacttccgaggagacgccgacgatgaaggccgactctgcgggggacaggggcaaatccaagggtggcggcaagatgaatgaggag

SEQ ID NO: 694556 - DNA, 112 bp, Homo sapiens
agccgctcgtcagactccagcagccaagatggtgaagcagatcgagagcaaggtcaaaatgcagatcttcgtgaaaacccttaccggcaagaccatcacccttgaggtggag

SEQ ID NO: 694557 - DNA, 101 bp, Homo sapiens
acccaaggatctggaaagcatcatcagacccaagtgccaagttatttactttcccatcaggtttcctgatgtgagcagggtaccagaacatctcgtgaaga

SEQ ID NO: 694558 - DNA, 100 bp, Homo sapiens
cgagggagcccgcgtcggctgagagcccacaggcccccacaggaatactcccccagttgcaagaggcgcaggaccgtggaagacttcaacaaattctgca

SEQ ID NO: 694559 - DNA, 100 bp, Homo sapiens
gttctggggagcgcctcgtcgacatgagtgatgtggaggaaaacaacttcgagggcagaggtcctcactgagcagcgagtcgtcccccgtgtcctctccg

SEQ ID NO: 694560 - DNA, 75 bp, Homo sapiens
tagggtcctttatatagaagggagagctgttcggctcttgaatcccagcgatgaaaccaggaactcactttcccg

SEQ ID NO: 694561 - DNA, 75 bp, Homo sapiens
tatactttggttacctatgtacctgttaccactttcaaaagttggcatggatcctattagctgtgtaatactgga

SEQ ID NO: 694562 - DNA, 107 bp, Homo sapiens
agggactcctctccgtctccctggaccgctgtgtaggcacctgagttaacggacgctaagcggggtaggggaagacattgctacaagtggttggtgtggtctctgtg

SEQ ID NO: 694563 - DNA, 98 bp, Homo sapiens
agttgtaaggccagatgtgggtgactcaccgactcgcagcgatgtcgaggcccctccagccagcgtcaggtgcagaatggcccctctcctgatgagat

SEQ ID NO: 694564 - DNA, 97 bp, Homo sapiens
gacccagctcagagaagcctgtataaagatgtcatgatggagaattatggaaacctggtctcactggactgccatccagggccatgcagcaaacaag

SEQ ID NO: 694565 - DNA, 98 bp, Homo sapiens
aagggccttactccttcacagatcgattgtcactgctgttccaagggcacacgcagagggatttggaattcctggagagttgcctttgtgagaagctg

SEQ ID NO: 694566 - DNA, 101 bp, Homo sapiens
ctccgggcgcggggaagtcatgctcgcttcacggaggcaatagctagccgggaaatcctcattgacgattcaatttgttgaaggccaatttgtggactcct

SEQ ID NO: 694567 - DNA, 82 bp, Homo sapiens
agcatggcacgctgcatggagccaaaatcgggtctgagggatcatagacggtatttctatgtaaacgaacagtcgggcgagt

SEQ ID NO: 694568 - DNA, 100 bp, Homo sapiens
cagcactgtagaacagctttatgaaacagcttgcttcctacaggatgttttagaagaatgtatgtctcttcccaagctatcttcttattctggatgggtg

SEQ ID NO: 694569 - DNA, 95 bp, Homo sapiens
tttgtcaccataggagacatggacgaagccttcaaatccatcaagctcatcaaaaggtattatcgggggacccacggggtcattgtggtttacga

SEQ ID NO: 694570 - DNA, 75 bp, Homo sapiens
ctgtccccaccacaatcaatacgattggaaccagcacaagtacaaggttggatgactgcctgcaacaatatgtcc

SEQ ID NO: 694571 - DNA, 100 bp, Homo sapiens
gagaatctgggcgtcgctctagaggattttctattgcagcagaccatgctacgagtgaaggatcctaagaagtcactggatttttatactagagttcttg

SEQ ID NO: 694572 - DNA, 50 bp, Homo sapiens
gtgggcgttgcctttagacccagccaaatttgtatcctactgtggggctt

SEQ ID NO: 694573 - DNA, 100 bp, Homo sapiens
agtgatatcttcagcgaaagtgaaaccaggccttgataaatttgctgaagttccttatgtcaaatgagactgtacttttggccaaacacaacatttttac

SEQ ID NO: 694574 - DNA, 87 bp, Homo sapiens
gccctggccttggccctggccccccagagtgcctggaagagctgggatgtctggttgagtcctatggcatgaatgtttgccaaccaa

SEQ ID NO: 694575 - DNA, 100 bp, Homo sapiens
gcaactaccactgctaccacgagaaggacccggacggtcgttatgccatggtggtctgtggagacattgccgtctatcccagtggtaatgctcgtcccac

SEQ ID NO: 694576 - DNA, 110 bp, Homo sapiens
cccgggactcgggtttgggcgaccaggaggtgccggtggccgcgctcggacccgtgtactaatggtcacttgatgtgcgctggctgttttatccacctactagcagatgc

SEQ ID NO: 694577 - DNA, 100 bp, Homo sapiens
cttcgtgtcctggcctcagctgggaggaatattgctgcccggctggtgcgctggtacccttcctctgacaccacccagcaaggatggaagtaccgtcagt

SEQ ID NO: 694578 - DNA, 100 bp, Homo sapiens
cctcctgcaaaagtggaagcgaagccgaaaaaggcagcagcgaagatcatcatggcaaaaccagctggtgggcccaagcctccaagtgggaagaaagact

SEQ ID NO: 694579 - DNA, 100 bp, Homo sapiens
caacatcctgaccaagcccgatccaagaaccttctggactaatgatgatccaggtggtataagttgaaatccaaaccaggaaagaaggacaaggagcgag

SEQ ID NO: 694580 - DNA, 74 bp, Homo sapiens
agatacttgccgcaaagcaaatgccattccagatggtccccgagggagccctctggcacaaatggaagaagaaa

SEQ ID NO: 694581 - DNA, 88 bp, Homo sapiens
aggacaaaagccaagaggaggacagttcgctacacagcaatgcatcgaggttccagcagcactgatgtgaaggaaaaccgcaatctgg

SEQ ID NO: 694582 - DNA, 51 bp, Homo sapiens
gactgtttgatgctgaacttcaccgttaagaatggtgagagtatcatggtt

SEQ ID NO: 694583 - DNA, 74 bp, Homo sapiens
ggaatgaagcaggatcaatgatgggataaaaatcaagggacagccacagtgtggaagaccctgtgccccttctg

SEQ ID NO: 694584 - DNA, 74 bp, Homo sapiens
cgtgatccagaagtccagagctgaggactgcctgtttgcagatcctgcagctcctgaaaggcaagctggtggtg

SEQ ID NO: 694585 - DNA, 90 bp, Homo sapiens
tgtgcgttgcggccagtcgccactgctgtttcggctgagtccagctcctccatgaactccaacaccccgctggtgaggataacaacacgc

SEQ ID NO: 694586 - DNA, 98 bp, Homo sapiens
caaggaccagaagaaactgcaccggaaatgtgcctaccagtttgcagacctgacagacgctgctgcccgcaacgcggagctgctccgccaggccaagc

SEQ ID NO: 694587 - DNA, 82 bp, Homo sapiens
ctggtgtaccaggcgaagctggccgagcaggctgagcgatacgacggatgcagcagtctcggccctggctgctctatgcagt

SEQ ID NO: 694588 - DNA, 50 bp, Homo sapiens
cgccgcccgtccacacccgccgccagcaggctatggaactcagtcaactc

SEQ ID NO: 694589 - DNA, 82 bp, Homo sapiens
ttcgttgtgccagcgactaaaaagaggaacgtcaaggtcgtgggaaataaaaggcagttctacacagactgcagcaacggtt

SEQ ID NO: 694590 - DNA, 100 bp, Homo sapiens
ctgtgaatttgtattccctttcacctcctggaagcattctcctggtgtgcagcctgcagatgtgaaggaagttgttgagaagggtgtacagactcttgtg

SEQ ID NO: 694591 - DNA, 82 bp, Homo sapiens
tggataagactcctgtcatccgctcagtgatactgaaactgcttttgaagtacagtttcctgctctacgaaacgcactcttt

SEQ ID NO: 694592 - DNA, 100 bp, Homo sapiens
ccccggtgcctgcgcggcgggccattgagatggcccagcacggccagagggtttcaaagacaacctccacgctgtgttctgcttggctgagaactcggtg

SEQ ID NO: 694593 - DNA, 100 bp, Homo sapiens
agtgttttcttatttagccggagtgagaagcaagaaggccctggacacagcaatatctctgggctttcacagctgaaacttgaatcttcgtctttaaaag

SEQ ID NO: 694594 - DNA, 95 bp, Homo sapiens
tcattgaagtgcttggagtgcagaactgaaagaggagtacttgattcttcagaaaacctccaaagtagatgtggactcaagtggaaagaaatgca

SEQ ID NO: 694595 - DNA, 100 bp, Homo sapiens
catggccaactccttcgtgggcacgcgctcctacatggctgctaagtcctatcagccatggaaacaccattgctctcttcttccggtcactgttgccaaa

SEQ ID NO: 694596 - DNA, 82 bp, Homo sapiens
aatctgttctacaggaagatgctgagaaactgcggaaagaattgcatgaaggaaagctatttttgatacaccagatgaggat

SEQ ID NO: 694597 - DNA, 101 bp, Homo sapiens
cgaagccctgcatggtggtgtggcttgtggatccctcacagagctaaattgtgagcgcccccatggcagggacctggactcccccttcttcggcattcggc

SEQ ID NO: 694598 - DNA, 75 bp, Homo sapiens
agaaaatgtccacccccatcgaagtgttgtgtaaaggctacccttggctgaccagtttgagtatgtaatgtatgg

SEQ ID NO: 694599 - DNA, 50 bp, Homo sapiens
cacagtggacgaggtgttggcggaagcttcagacagcaaagtcctgacat

SEQ ID NO: 694600 - DNA, 98 bp, Homo sapiens
aaggtgttcggtccttccgaggaagctaaggccgcgttggggtgagaccctcacttcatccgctctgtggcactctgtaagctgctccagcatggcat

SEQ ID NO: 694601 - DNA, 100 bp, Homo sapiens
taagcaggcttttttagatgagctgaaatgcatcttctgcagacaccgggttaagagggtctctggagcctgcatccagtgttcctacggtcgctgcccg

SEQ ID NO: 694602 - DNA, 75 bp, Homo sapiens
tggtgcctgccctgccacccaagagaatgctgggagacttaattcagtgcacaaatgagatgaatgtgaacatcc

SEQ ID NO: 694603 - DNA, 75 bp, Homo sapiens
ggaaaagtcatttgccatcggggtgcagttcttgttgatgcgcttgctggtcgggaagacgtctctgattacgag

SEQ ID NO: 694604 - DNA, 129 bp, Homo sapiens
cctgggcctctcggtggagcagggacccgaaccggtgcccatccagtccggtgccatctgaagcccccttcccaggtacttcaactcccgcccccacctgtgtcccgctggctcctaagctgcccccct

SEQ ID NO: 694605 - DNA, 75 bp, Homo sapiens
agaacctgcctgcccaggctgcggacacatgtccagccgaacgaccctgtcaccaacatttgccaagcagccgac

SEQ ID NO: 694606 - DNA, 100 bp, Homo sapiens
gccttccaggttgttatctgcaggtgtggcaggttgcagaggacagtgcgggactacttgttgatatttgaggagggaagtgtcttacctgagagcctgg

SEQ ID NO: 694607 - DNA, 100 bp, Homo sapiens
tcagcttctccgagtgtgtgcagcgctgcacccgcaccctgcaggccgagggacgtgccaagaagcgcaagatgtgattcagcactgccagcgagtcaaa

SEQ ID NO: 694608 - DNA, 80 bp, Homo sapiens
tggacacctccatgttatggacacggtctttcttattcaggcaggggaaatggaaggtgatgcagtcgaagccattgtgg

SEQ ID NO: 694609 - DNA, 75 bp, Homo sapiens
gaggggattggtgaagaactggccatccataatcgagggaaagagggggccatgaagcccccaggaggagaatcg

SEQ ID NO: 694610 - DNA, 50 bp, Homo sapiens
gtggtaaggagaggaagccggccaaggttgaaaaagatcatctagcaaag

SEQ ID NO: 694611 - DNA, 100 bp, Homo sapiens
cgttctgcgacttataaaggaccagacaaatcaaattagtggttttgaatgcagtaatagtggccttgtcttcaaaatcatgggatgtagagactgcaac

SEQ ID NO: 694612 - DNA, 96 bp, Homo sapiens
gcagactcactccggctgtggctattacgtgttctaagaacggaagcatctgggctggatggaatttagcatcaagcagagtcccctttctgttca

SEQ ID NO: 694613 - DNA, 99 bp, Homo sapiens
gcactttaccctttttaatattggccaatcatcaagacaagccagcagctcgctcagtacaagaggaaatggaagttccagtattaccgaaaatctctc

SEQ ID NO: 694614 - DNA, 75 bp, Homo sapiens
cgcctcctctcctaggtgccggccgggagggcggccgcagcaggaaactttaccctcccagaggtagctgagtgc

SEQ ID NO: 694615 - DNA, 100 bp, Homo sapiens
taacagggccttgcctagtgggccttccttcccaggtgctggctgccagctgctgcgccccccatgtagaaggtgcacctcctgggagcaggcacgtctt

SEQ ID NO: 694616 - DNA, 100 bp, Homo sapiens
gtttcctcctagaccgacttctgcagtacgagaacgtggatgaagactcttcgggtcctgctggttggggcagacaacttcacgctgcttggcaagccac

SEQ ID NO: 694617 - DNA, 100 bp, Homo sapiens
ccggatcctggagaacatctcgctgtcggtgaagaaggtgctggaaacatgcatgaagagctgcggcaagcggttccacgacgaagtgggcaagttccgc

SEQ ID NO: 694618 - DNA, 82 bp, Homo sapiens
cttgtgtgctccatagtttatcaaaaggtgacaatggaatggactctgatatggaagaggaagcagatgatggttctaagat

SEQ ID NO: 694619 - DNA, 80 bp, Homo sapiens
aaagtcgatctggagcttttcccctccccggattggaaagagtcaacctaaagcccagaaccctgctcgattgagccgca

SEQ ID NO: 694620 - DNA, 75 bp, Homo sapiens
tgtggatcgctgtgatcgtcacttggcccctggaagattggatggtgcctgcctatacggagggcggatcttccc

SEQ ID NO: 694621 - DNA, 83 bp, Homo sapiens
ccgcaggcggcgccgagggcttccacctccacggggagccttcacgtaaatgggtccagtcatgcctcccagtaagaagccag

SEQ ID NO: 694622 - DNA, 101 bp, Homo sapiens
ggccccgcgacagcctccgagcgcccccggatcatggccaccgagggacttgagtgagaacgccatccaggccatccccaggaaagcttttcggggagcta

SEQ ID NO: 694623 - DNA, 50 bp, Homo sapiens
tattcggttctctacttccaacagaaggctatgaccagggccagagcact

SEQ ID NO: 694624 - DNA, 100 bp, Homo sapiens
ggagtcctgttccaccttcagagcgtcacggcgtacgccctcatggggaaaatctccccggtgactttcagatttcagaagaaagtggtagcttcctttc

SEQ ID NO: 694625 - DNA, 82 bp, Homo sapiens
gggcagtcggcggagcttcgccaaggctggcgcagtcgggggatatgagactttctactcggaatatcctgagtgttgcgtg

SEQ ID NO: 694626 - DNA, 75 bp, Homo sapiens
ctacgagagcgaccggcggcgggagaggcgccggggccgcacaggatctgtgccagttcagaagcaggcgagcct

SEQ ID NO: 694627 - DNA, 50 bp, Homo sapiens
ccgagagcgtggagcgggctgggccaggcccgacaacaagctcaaatacg

SEQ ID NO: 694628 - DNA, 100 bp, Homo sapiens
ctatggaagtctgaaaagcccagaacttttcctctgttataagagagggagagataaaccaccgcttacagatattggcgtgcagttaaaaaatttatta

SEQ ID NO: 694629 - DNA, 75 bp, Homo sapiens
caagatccagtctccgcaagagaaggaagctctttatgccttaacgagagaaaaggaacagttccgtaagctctt

SEQ ID NO: 694630 - DNA, 100 bp, Homo sapiens
cggcgttcttccgctggctcagccgcaagtacccgtccatcatagtcaactgcgtggaagagaaggtggcttcccacacttctgactcggacgttccttc

SEQ ID NO: 694631 - DNA, 101 bp, Homo sapiens
atggatactacagacaacagagaaaacttgttgaagagattggctggtcctatacagggaaatcctcattgacgattcaatttgttgaaggccaatttgtg

SEQ ID NO: 694632 - DNA, 113 bp, Homo sapiens
tgcagaaggaggtcctgccgtccatgcggaagatcgtcgccacctggatgctggagacaatgcagatcttcgtgaagactctgactggtaagaccatcaccctcgaggttgag

SEQ ID NO: 694633 - DNA, 82 bp, Homo sapiens
cgcggattcgccgaggcaccgaggcactcagaggagctcctgcccctcctaaagctgaagccaaagcgaaggctttaaaggc

SEQ ID NO: 694634 - DNA, 82 bp, Homo sapiens
tggaaagacccaggagaagccgcccaaagaactgattggacgaggccttggcccagtactttgggaatgggacagagttggc

SEQ ID NO: 694635 - DNA, 100 bp, Homo sapiens
cggcccggcgttgaattccgggaagtgggagcttcaggctcgctccgtgcgggagccaagggagaacccaagacagagaatagtggcccaataatgaagc

SEQ ID NO: 694636 - DNA, 75 bp, Homo sapiens
cgacgctgctgggtccgctgagcggggcgacccgaggtttcatatggacccatctgggacctttgtacagtgtga

SEQ ID NO: 694637 - DNA, 50 bp, Homo sapiens
gccagcgttacagtaatgttccagatggcccactgcgtgaccttggttca

SEQ ID NO: 694638 - DNA, 100 bp, Homo sapiens
atgctggagaagtccccttatgaccagggtggcaatgaccatgagatcttcacagaccccagaaccatgggctactccgtgacagcgcctgaggacacgc

SEQ ID NO: 694639 - DNA, 83 bp, Homo sapiens
gcaagctgggcggcaccctggccaggaagcggagggcgcgcgagggagcatcagatccatgctgctgctgactcggagcccca

SEQ ID NO: 694640 - DNA, 100 bp, Homo sapiens
atggacatgaagaggaggatccacctggagctgaggaaccggaccccggcagctggctccacgtgttccccacgtttgtggcgtacgagctcacggtgct

SEQ ID NO: 694641 - DNA, 50 bp, Homo sapiens
ccgaggcggtgttttattacaaggaactagcttctaaaaaatccctgcct

SEQ ID NO: 694642 - DNA, 101 bp, Homo sapiens
cccttcgacctgcgctccgcgctctggcgctacggtctggccgtcggctgcggcgccatcgattctggatgaaattgaagaacataacatcaaaatctatc

SEQ ID NO: 694643 - DNA, 100 bp, Homo sapiens
taatggcactcagcagcaagcacagagtatgaccaccactattaatgtattggaacaacacaaactaacaaaagaacagtgggaagaaagaatacagaac

SEQ ID NO: 694644 - DNA, 50 bp, Homo sapiens
gtggaggggaccgcccaggaagccgactcccagctgcaggaggagctgcg

SEQ ID NO: 694645 - DNA, 98 bp, Homo sapiens
agcagatgtgatctgcgctaggtggcatctcctctcacggatgcctcgcttaatcttctccatacagagctggctaaacagttggcagacacaatggt

SEQ ID NO: 694646 - DNA, 100 bp, Homo sapiens
cttattgaaacattaaatgacagttcacataagaagttcttcgatgtatctaaacttggcaccaagtatggaattcgatgtcttctttccgtcctgggag

SEQ ID NO: 694647 - DNA, 75 bp, Homo sapiens
cacaggcctgctgaactgggtgctttatatagggaacttagtgatttggcccgtgaccctccagcacaatgttct

SEQ ID NO: 694648 - DNA, 100 bp, Homo sapiens
gggacctgcatgtgtgtgcgcgcgaaggagcggaagaatggcagtgctcaaactcaccgaccaggcttgtacagcatatgtggattttatgatttctgtg

SEQ ID NO: 694649 - DNA, 100 bp, Homo sapiens
cgcggccagacctgcgtggtgcactacaccggttggtacaggtcttgggcctacactggagttttatgcgcttgtatctcaggaactacagagagctgac

SEQ ID NO: 694650 - DNA, 90 bp, Homo sapiens
gttgcccgccaccatgagctacacagtgtgtgatgacgctgctctacgccttctccaaggacatcttctccgtcatcaacttcttcagct

SEQ ID NO: 694651 - DNA, 100 bp, Homo sapiens
gtggagaaggcttgggctcgcgccgctgaaggatgaagcagcaaaggaatttcaggagaaacacaagaaggaagtagggaagctgaagagcatggacctc

SEQ ID NO: 694652 - DNA, 75 bp, Homo sapiens
ccagaccatgcagggggtcatcaccatggatgggacgctgcaggccctggctgctctttggcgtaaattgcaatc

SEQ ID NO: 694653 - DNA, 75 bp, Homo sapiens
tggacacagcaatatctctgggctttcacaggaattatttggatcggttggcagaagaggtcaatgataaattgc

SEQ ID NO: 694654 - DNA, 75 bp, Homo sapiens
ctcctcagaaggcggacaccgaccctgagaacttacctgagatttcgtcacagtgactcaagaccctcttaggaa

SEQ ID NO: 694655 - DNA, 74 bp, Homo sapiens
gccagttgcttgatcaggtggaacagattcagaaggagcaggattaccaaaggcaggaagaaccggacccggcg

SEQ ID NO: 694656 - DNA, 101 bp, Homo sapiens
ctcaggcagggcgcgggggcagagcctcgcctgggttctggaggctgcggggccatcgctccagttcagacttggttccttcaacctagagaaagttgaaa

SEQ ID NO: 694657 - DNA, 100 bp, Homo sapiens
tcacttattcatctgtccagcatgactcatccccgggagtgttgaggaggttcccctgaaggatgctaaggaatacgctgaatccataggtgccatcgtg

SEQ ID NO: 694658 - DNA, 116 bp, Homo sapiens
cagaatctaacgtgtcgttaatagaaagaagaacaggcaagaagtggtccagccggcgaaggcgcctgtgtctggcagagctggtgtgagacgagacaatcctgccccgccgccgg

SEQ ID NO: 694659 - DNA, 101 bp, Homo sapiens
gttacacctggatacaccatcaaaattcctgtccaaggacaaactcttcaagccttcctttgatgtgaaggttgcacgttttcaaaaaatacctaatggtg

SEQ ID NO: 694660 - DNA, 98 bp, Homo sapiens
ccccacttatgtttgtaaatgtgagtggaagccatgaggccaaaggcagttgtattggaaatccagttatcaaaattgactcaagaagagagaaccta

SEQ ID NO: 694661 - DNA, 82 bp, Homo sapiens
ggttaaaccatgttaaggaggattttacagaggacctcctgccccccgaggtctgcagtctcctgaacccagcagccatcta

SEQ ID NO: 694662 - DNA, 87 bp, Homo sapiens
tcatcagagggaagatctttttcctcaattgtttggcaatgaggagcagcagctggcgtgggccaagcgggagagcgagaaggcgga

SEQ ID NO: 694663 - DNA, 75 bp, Homo sapiens
tgaggagaaggaggagcgggccgtggaggcttcgccgcctaggccccttcacagatgtagtcactacaaatctta

SEQ ID NO: 694664 - DNA, 100 bp, Homo sapiens
tagtgttttcttatttagccggagtgagaagcaagaaggccctggacacagcaatatctctgggctttcacaggacatttttattccttccccaagtctg

SEQ ID NO: 694665 - DNA, 73 bp, Homo sapiens
aagtactgagcctgttggaggaactggcccggaaacaggaggacctgcttccagctgccatggtgatgccacc

SEQ ID NO: 694666 - DNA, 142 bp, Homo sapiens
cctccagcgtctcgtcctccagcagcacgttggagagggaggagaaggaggacaagctctccagggacaggacaactgctggagtcacatcagaagccgcgcagactatcaccacggctcctgatgcctcagggcctgaagc

SEQ ID NO: 694667 - DNA, 82 bp, Homo sapiens
cggagagaaggcggcgcgggaggtgaagttgctgctgttgggcggttccggcggcaagacgtaaggaatggcgaccccagca

SEQ ID NO: 694668 - DNA, 89 bp, Homo sapiens
aaagaaatgaaccagtattcttaaattgatttcaagtttgaacaaggtgacaaagaagctgaagatgggtggtggagagaggtataaca

SEQ ID NO: 694669 - DNA, 90 bp, Homo sapiens
caccaagtacaccagctcgaagctacagctatgagcgtgtggatggttctgtgagaggagaagagagacacttggccattaagaactttg

SEQ ID NO: 694670 - DNA, 100 bp, Homo sapiens
gcggcgcgcgcctctcccggaccctgcagggctgctctttggcgtaaattgcaatcgattagggatcgtttctcagaatcaagttagaagtgagagttca

SEQ ID NO: 694671 - DNA, 98 bp, Homo sapiens
agctgccctacgcctggtcaaacctggaaatcaggttgttccaggctatggccatgcagtactaaggaagactgatccgcgatatacctgtcagcgag

SEQ ID NO: 694672 - DNA, 83 bp, Homo sapiens
gcccttaccactgacatttcactcatctttgcgttcggcagaaggttctggagagaaaaaatcatgagttggtatggcaagga

SEQ ID NO: 694673 - DNA, 100 bp, Homo sapiens
tgaatttccatgtcaacatagtccagaactcccccactggaaaggattctgaaagaaatgaagtcagccctcagaaatgaagttgactgcctgctggctt

SEQ ID NO: 694674 - DNA, 100 bp, Homo sapiens
ggcggcggcggctgctgctgctgctgcccgcgtccgaggctcgcgggcggcgggcccggaatctcattttcagcttctgccagagccagtagcagttggg

SEQ ID NO: 694675 - DNA, 82 bp, Homo sapiens
caggatgaactgaaacggattgccagagaattggcagaaggccccatcacaccctgtctaccacacctgccgtactgagcaa

SEQ ID NO: 694676 - DNA, 50 bp, Homo sapiens
ccaatgtagtgatgaagaatgtggaatgcagtagccctctgggcctggga

SEQ ID NO: 694677 - DNA, 75 bp, Homo sapiens
tggggagagttgctaggaaaatggctttcaaggatatgctgtattcagctcaggaccaggcaccttctgtggaag

SEQ ID NO: 694678 - DNA, 75 bp, Homo sapiens
cgaggacttcacggagctctggagaaacatgaagttcgggactatcttctgggtaacaagatgctcaactatagt

SEQ ID NO: 694679 - DNA, 75 bp, Homo sapiens
tggaggacgacggcgagttctacatgatcggctccgaggattttcaaaatggctgcagctcctcaagcaccgggg

SEQ ID NO: 694680 - DNA, 90 bp, Homo sapiens
gatccccgctgacttcttcgtagacattgtctcccaagacaacttcctcaccagcaccttacaggaaactacagtcgtcgggaaggaaca

SEQ ID NO: 694681 - DNA, 85 bp, Homo sapiens
gtcagtaaagcaaaacagagtcggagtgaaaagaaggcacggaaggtgaatatgaccatctcccagaacaggccttctatatggt

SEQ ID NO: 694682 - DNA, 75 bp, Homo sapiens
ggatgccctgcaccgggtccggcaggtgctggagaatctggtaaaagcaccattgtgaagcagatgaggatcctg

SEQ ID NO: 694683 - DNA, 118 bp, Homo sapiens
gttgatacagcagagacgtcatacttggaaatggctgcaggttcagagttatcgaggacaccaaagagaaaagaaccatcatccatcaggctatcaaatctctgtttccaggattaga

SEQ ID NO: 694684 - DNA, 49 bp, Homo sapiens
ttgcgctgccggtggcctgggctacaacagatgaggatgaggaagggaa

SEQ ID NO: 694685 - DNA, 51 bp, Homo sapiens
tctgggcttttaccagaaggcatagccctggaggctgcccgaatttgtgcc

SEQ ID NO: 694686 - DNA, 117 bp, Homo sapiens
aaattatgctgcagcatattgtactggcctgctgctggcccgcaggattaaagtatggacagccaacccccaacaatttgtagaagatgaagatgatgatacattctcctatactgt

SEQ ID NO: 694687 - DNA, 75 bp, Homo sapiens
ataactcacttcctgaggaaaaagcgccatctctaggggtcccagggctggtggttgctttgggtctacagctac

SEQ ID NO: 694688 - DNA, 100 bp, Homo sapiens
cgcagatcctgagacccggacagtggcagtgaaacagtgtggtgtaaaggaattcattagccatggatgtattcatgaaaggactttcaaaggccaagga

SEQ ID NO: 694689 - DNA, 83 bp, Homo sapiens
ccagaccctggagcctcagttggaagcagccgatccagcctgcggagcctgtggggcagctagacttcgggctccttgaggat

SEQ ID NO: 694690 - DNA, 100 bp, Homo sapiens
gttctccctatcctgaagttgatcattttgttctttctttggtgaataaagatggcattaaaggaggtggtttgtgatgaaaatggttccaagggctatg

SEQ ID NO: 694691 - DNA, 103 bp, Homo sapiens
gaatggcagcaaggtgggcccggacggcacaccctacgttaccgtgctcaaggagccttcacgtaaatgggtccagtcatgcctcccagtaagaagccagaaa

SEQ ID NO: 694692 - DNA, 73 bp, Homo sapiens
agaatcgaaaggttgcatctacttggacgcctgcattgatgttgttcagatgattaccacatgctgagggcac

SEQ ID NO: 694693 - DNA, 101 bp, Homo sapiens
cgagggctggacaccccttcatgcagcagcttcctgtggctatctcaacatagcagaatctgtacccccgatttggtggtattcctggcttgtgctaatca

SEQ ID NO: 694694 - DNA, 82 bp, Homo sapiens
tgccatcttagtctagggactgaggagtcgccgccgccccgagtcccgaatgtgaaaacctttgcatcttctgatagtctag

SEQ ID NO: 694695 - DNA, 100 bp, Homo sapiens
agtcggagcggcactcggcgagtccgggactgcgctggaacaatggataacttcttcaccgaggtgtcttctctttagggatggtgaggttggaaaaagg

SEQ ID NO: 694696 - DNA, 51 bp, Homo sapiens
gagacatgggagacccggggtcggagacttaattcagtgcacaaatgagat

SEQ ID NO: 694697 - DNA, 75 bp, Homo sapiens
gactccttcggcagtccacccaccgccgccgcctcccaggctacaaagtttggatcccaagcgagtcagaaggta

SEQ ID NO: 694698 - DNA, 100 bp, Homo sapiens
tgtggaggtagttgctgagtggcactgggtaaaagtagacgttacatccaagaggaaataatccaggcaaggaagcacaagctgatcaagatgtgtagtt

SEQ ID NO: 694699 - DNA, 100 bp, Homo sapiens
tggatctggtctcctgccagcctgaatgagaaaacaccgaagggacattctgtcttcatggacatttttgaacttgtgggtttgtgtttagtgaatcaga

SEQ ID NO: 694700 - DNA, 90 bp, Homo sapiens
gtgaacctatcgaaggacatgaagactaccacatgatgaccattgtgatgaatgactgtattatccgaggggatctggcaaatgtaagag

SEQ ID NO: 694701 - DNA, 98 bp, Homo sapiens
cggcaaccacgggcagctctcagggaatctccgtcgtgaggccagaggctccagtccccgcgggttttggccaaattgggcgagggcacaaaataacc

SEQ ID NO: 694702 - DNA, 50 bp, Homo sapiens
gccaaattacactgctccgacatgtgtgcaggaacggagaataaactgag

SEQ ID NO: 694703 - DNA, 50 bp, Homo sapiens
cgcccaccgcgccgcatccatgttcgatggagcccacagtgaccatctcc

SEQ ID NO: 694704 - DNA, 83 bp, Homo sapiens
tttgttcgtaaaggacttcgtaatgatgtcaagagtcatgtctgcactgggggccacagtgctgatctcagcagctccatttt

SEQ ID NO: 694705 - DNA, 100 bp, Homo sapiens
atccgcaaggccgcccgggaactgctgacgcttgatgagaaggacccacggcgtctgttcgaagctggaggagcaccggaattcacagaagcagatgaag

SEQ ID NO: 694706 - DNA, 75 bp, Homo sapiens
gagaagctttgaaggctgtgaaggctggtaatcctggtggacctggacctggtggtcgaggaagaggtagaggtc

SEQ ID NO: 694707 - DNA, 100 bp, Homo sapiens
ctctctctttctggcctggaggctatccagcgttgaagctgatctgggctatccaggtggaaaggcgaaagtcatccataaggaatctgatatgatcatg

SEQ ID NO: 694708 - DNA, 99 bp, Homo sapiens
tgctcgataaatcagacagaacagttaatcctcaatttaagcctgatctaacccctagaaacaggaagcccttagtgtatacaaggaagcaattcagaa

SEQ ID NO: 694709 - DNA, 75 bp, Homo sapiens
accagcaagaggatggggccctggatgagggggaagggcctcaaagccagaaggccaaacgtaccaagaaagtcg

SEQ ID NO: 694710 - DNA, 76 bp, Homo sapiens
ccggaggaggttcgaagctgagtatgtgacaggtatgcagtggaactgatgaagaccctgatgataaaaacgcacc

SEQ ID NO: 694711 - DNA, 88 bp, Homo sapiens
gagtatgcgctgtatagaccactgcagttgcagagttttcaaggcaaagatgtggcagcaattgcaggtggcttggtggatgctgaag

SEQ ID NO: 694712 - DNA, 75 bp, Homo sapiens
gcaaggactggttccacggcagggaattcacaattgaaactgaagggaaaacatttcagttaacaaaagacatga

SEQ ID NO: 694713 - DNA, 88 bp, Homo sapiens
gcaatccaagccgactgatgactggagaggatggctactatttcaccaatctggcctgggccgaggccactggtgcatatgttcccgg

SEQ ID NO: 694714 - DNA, 100 bp, Homo sapiens
cacggccacgggcatcctgacagtggtctgctgaatgccatggtggcaaaactggggaaccgggaggacccactcccccaggactcctttgaaggcgtgg

SEQ ID NO: 694715 - DNA, 100 bp, Homo sapiens
ataaatcagcagttatgaggcagagcctaagagaactatggcaacatcaggtgactgtcccagaagtgaatcgcaggttgtgggctgcacactgcagaaa

SEQ ID NO: 694716 - DNA, 100 bp, Homo sapiens
cgagagaggcaccgggatcgtgaccgagaccgtgaccgagagcgtgaccgagagcgcgaatatcgtcatcgttagaagagacaaggtctcactatgttgc

SEQ ID NO: 694717 - DNA, 100 bp, Homo sapiens
gacagaaggcaatcacatgccaaaagaataaccaatggtcggctaagaagccaggctgcgtgtaccagcatctcagacatgtcgaaaaagatgttttgat

SEQ ID NO: 694718 - DNA, 90 bp, Homo sapiens
agtgagaagcaagaaggccctggacacagcaatatctctgggctttcacagataattggttaagtgcaggcagccacacctttgacttcc

SEQ ID NO: 694719 - DNA, 101 bp, Homo sapiens
cctgagttgaagggaattattttcatgcagacagcttgtcaagctgtgcagcatcaaagaggcaggaggaaaatctgaacttggctctgaactctgcctca

SEQ ID NO: 694720 - DNA, 88 bp, Homo sapiens
ccgcgctgtgcggcgcgctgctctgcgcccccagcctcctcgtcgccctgggtgtgggaaccgctgagcagaacaccctcccccagcg

SEQ ID NO: 694721 - DNA, 75 bp, Homo sapiens
tgcatcaaatacttcatatttggcttcaatgtcatattttgggtggagtctttcattttggatcaggatgatttg

SEQ ID NO: 694722 - DNA, 49 bp, Homo sapiens
ggcggcaccgggaggccgggccgagcgagacacgctgtgaacaagacag

SEQ ID NO: 694723 - DNA, 97 bp, Homo sapiens
acttcggaggtggctccttgtgccacggactccgaggagtccttcagctactgaacactcaaagctgaggagaggctaaaggcagcagttcactata

SEQ ID NO: 694724 - DNA, 98 bp, Homo sapiens
tgctactcttcgttttcctttgaaaggccttttgccatatgataagaaaaccatgagctgttttccaagagcttcatctccatggaagtgcctgtcat

SEQ ID NO: 694725 - DNA, 100 bp, Homo sapiens
caccacgcggcctacgtgaacaacctgaacgtcaccgaggagaagtaccaggaggcgttggccaagggtgaggaaaatagcagctgaatactatgacaac

SEQ ID NO: 694726 - DNA, 75 bp, Homo sapiens
gatgctggaaaatctcaggaatctggtctcattgggtcctcttcctgatggatgggaacaagccatgactcagga

SEQ ID NO: 694727 - DNA, 100 bp, Homo sapiens
tgaagatgctcgatgagagttttcagtggaggaaagaaatttctgtcaatggttcatgcagcatcccaagaactttggcctgatcgcatcattcctggag

SEQ ID NO: 694728 - DNA, 90 bp, Homo sapiens
ataaagatgatgatatccttctcaaccttgtgggatgtgaaaactctgttactgaagatttgcttgtaaatgcatcacgaagaggcagcc

SEQ ID NO: 694729 - DNA, 82 bp, Homo sapiens
ttgcgggccccgggacctgggctgggaacccgcggtggagcgggacacgaacgtgcctcctgcccgaaggccacctgaacct

SEQ ID NO: 694730 - DNA, 75 bp, Homo sapiens
cagcagcccccgaaggccctatcaggacatggagtatgaaagacgcaggctctccccggaggctcagccccctct

SEQ ID NO: 694731 - DNA, 100 bp, Homo sapiens
aacactcaagcaaagaagagttgagcacaatcagaggatctgaagaggcaaaatgcagtattacaagctgcacaagatgatttgggacaccttcgaaccc

SEQ ID NO: 694732 - DNA, 90 bp, Homo sapiens
cgcggaaatctggaaccgggatggcgacgtctacactgagtcggaggcgaagggggggccctcagcctcttggccttgaacgggctgttc

SEQ ID NO: 694733 - DNA, 80 bp, Homo sapiens
atttgaagatacatgagacagcagccaaacccccaggatatttctttaatgggaaaaatgtacctcaaaacatcacctat

SEQ ID NO: 694734 - DNA, 95 bp, Homo sapiens
ctggacgtggtcatgaggcacttgccatccatgaggtacatgtcccagagcaagcacacggaggcccgggagctcatgtactcgggagccctgct

SEQ ID NO: 694735 - DNA, 82 bp, Homo sapiens
ggctcacggaaaatgtctataaggccaacatgcaaaagtcttctgtaccaagacctcggacaccgtgtgtgactcctgtgag

SEQ ID NO: 694736 - DNA, 96 bp, Homo sapiens
gcaaaagagaggttctctcccctcactaccaatctgatcagatggtgccatgacaatggtgtgaactacaagattggagagaagtgggaccgtcag

SEQ ID NO: 694737 - DNA, 100 bp, Homo sapiens
gaagtgggcaatgccatcctcttctgcctcctcatagagcaagctctggtgccaggattgctgagtattcccagttgtatgaccagattgtattcagaga

SEQ ID NO: 694738 - DNA, 82 bp, Homo sapiens
gccgatccggacagcggcacagaggagggagggtctccgtctctccaccgggggcttcatccttccagggaggagaagaggg

SEQ ID NO: 694739 - DNA, 100 bp, Homo sapiens
acctcgtgctcctgcagaacctgctgacctgtggaggaatgccagagaaagctggaccacaagctgagcctggactcctacctgctgaagccagtgcaga

SEQ ID NO: 694740 - DNA, 90 bp, Homo sapiens
aatttctgtgagcaggtgaacactgaccccaatggctctctagagcgctctggtgtatggctggtggcccccctcattgctaaactgccc

SEQ ID NO: 694741 - DNA, 82 bp, Homo sapiens
gcggaagatcgtcgccacctggatgctggagatgggggctccggaggtggcgcccaggctctgagctaccctaggtctgcag

SEQ ID NO: 694742 - DNA, 90 bp, Homo sapiens
tttagaacagaaaacagtctgtggagagaatctgcctcctttaacttatgaccagaaaacgttgtgtgacgtgatcctcatggtccagga

SEQ ID NO: 694743 - DNA, 50 bp, Homo sapiens
gcccatgccgcttgctccggagaagccacaggacgaagtcttcaggctgg

SEQ ID NO: 694744 - DNA, 88 bp, Homo sapiens
cgggagctggctgaagatggctactctggagttgaggatatcggggctggcaaaggcaagtattatgctgttaactacccgctccgag

SEQ ID NO: 694745 - DNA, 100 bp, Homo sapiens
ctcaccccagttgcaatccaggcaggaagattgctggctcagaggctctatgcaggttccactgtcaaggtgttgatcctattatctgggaacaggccaa

SEQ ID NO: 694746 - DNA, 83 bp, Homo sapiens
ctccaatgggcctttccagcccgtggtccttctccatattcgaggtgttcaaggccaagttcaagaattgggacgatgtgttg

SEQ ID NO: 694747 - DNA, 50 bp, Homo sapiens
gtcggtgcagctggcaagacctaaaggtggtggagaagctgatccgaggc

SEQ ID NO: 694748 - DNA, 100 bp, Homo sapiens
gcatgatggtggagcacctgctgcgttgcggctactacaacacggctgtcaagctggcgcgccagagcggcatcgagcaaattgtggctactaatttgcc

SEQ ID NO: 694749 - DNA, 100 bp, Homo sapiens
gagttcagtggtaggatcatggcttactgcagtctggaactcctgggctcaaaccatcctcccacctcagcctttgtggccatcctgctctacctgacgc

SEQ ID NO: 694750 - DNA, 96 bp, Homo sapiens
ccggggaacgcgcgctgcgcggactgcggcgccccgggttcagcagactgtacaggatctttttggcagagccccaagtaaagctgtcaatcctga

SEQ ID NO: 694751 - DNA, 82 bp, Homo sapiens
cctccttcttcctcaactatctcgctgacacgcaggttgaaatcacaaagattagacacctttttagataggtgttcttcag

SEQ ID NO: 694752 - DNA, 100 bp, Homo sapiens
tggatcgagtgaacgctgctgatgggagataccatgtcctgtttctcggaacagcagatatatggagtgatcactcatttcagactgatccagatttgcc

SEQ ID NO: 694753 - DNA, 100 bp, Homo sapiens
cggaaatccaaaggcagacagtacgggctcccttcgccaaactcttcattttctctgcaacagcaggttgaatatttggggggaagcaagagtaggctcc

SEQ ID NO: 694754 - DNA, 75 bp, Homo sapiens
ctgcgctgttccacctcattcaacttcagcaggaggccactgtctgcagctcccgtgaagatgtccactccagac

SEQ ID NO: 694755 - DNA, 76 bp, Homo sapiens
agctctagctggatgggcgcagagtctctcatcacttttgtgaacaagcacctgaacaagctgaatttggaggtga

SEQ ID NO: 694756 - DNA, 133 bp, Homo sapiens
gccgcggtggcggcgctgccgcctgaagtgcgggcgcagctggcggagctggagctggagctctcggaggaaagatggatactatgatgctgaatgtgcggaatctgtttgagcagcttgtgcgccgggtgga

SEQ ID NO: 694757 - DNA, 50 bp, Homo sapiens
agcgatgcccagtgccgagatcggtttctagagccatctgggctttccgg

SEQ ID NO: 694758 - DNA, 100 bp, Homo sapiens
agctgctgctcacctatgctgacaacatcctcaggatacaatgtctctttgctatatgaccttgaaaatcttccggcatccaaggattccattgtgcatc

SEQ ID NO: 694759 - DNA, 112 bp, Homo sapiens
ggcttcctgaccccattcagctttgagaactttcagtcccaagttactcaggtgatagaggggtgtccgcaatgttgccagtgtctgtctgcagattggctacccaactgtt

SEQ ID NO: 694760 - DNA, 80 bp, Homo sapiens
cgccgcggtaccatgaggcgccggtcaaaatgcagatcttcgtgaaaacccttaccggcaagaccatcacccttgaggtg

SEQ ID NO: 694761 - DNA, 83 bp, Homo sapiens
cggacatggtcatgagctttgtgaacctgggatcccatgacagattctgttgtcacgtctccttacagagtttgagcggtgct

SEQ ID NO: 694762 - DNA, 101 bp, Homo sapiens
gaagtgaatccccctaaacaggagcacctgctggcgctaaaagggtcaaagaattgactgtagatccaactgctgctggtgatgttcgtccaataatgcac

SEQ ID NO: 694763 - DNA, 100 bp, Homo sapiens
agacagtattttatcactgccggattgaggaagccctcaatctagaagagtagaggtccaaaggtgccatatgttcacactgtgagcctgcaagatctcc

SEQ ID NO: 694764 - DNA, 75 bp, Homo sapiens
cgcagtggaggccacatcaactcggcgccttgggaaccgctcgagcctaccaggaaccataaatccatggctaac

SEQ ID NO: 694765 - DNA, 100 bp, Homo sapiens
cacggccatttccttgatgcgcaagttcattgcctaccagttcacagacacggcacagaagatctctgatgatctgatgcagaagatcagtactcagaac

SEQ ID NO: 694766 - DNA, 75 bp, Homo sapiens
agctggaaattattgtcctgaatgagatgttttagaagaatgtatgtctcttcccaagctatcttcttattctgg

SEQ ID NO: 694767 - DNA, 90 bp, Homo sapiens
tacgatcagcagatatgggaaaagtcaatcgaacagactcagattaagcattcctactgccacccagcactgcctgctgtactcagctct

SEQ ID NO: 694768 - DNA, 100 bp, Homo sapiens
gcagcagcattgggactcctccagaagagacacctgtgcatagcagatcatcttcacctattcctctgactcctagcaaggaagggagtgctgtgtttgc

SEQ ID NO: 694769 - DNA, 100 bp, Homo sapiens
gccgagcgccgcgcgtcccgagcatggcaggctccctgcctccctgcgtggtggactgtggcaccgggtactccaaagattcaggtttactcacgtcatc

SEQ ID NO: 694770 - DNA, 75 bp, Homo sapiens
gcggattcgccgaggcaccgaggcactcagaggaggtgatcaatgttgatgggacgaagaggcggaccctcctgg

SEQ ID NO: 694771 - DNA, 95 bp, Homo sapiens
gtgcgggttcgcgtctgggaggccaagaccgctgtgtggaggtagccgcagcgccagcaccagaaatgcactcggtgatggaaagagagccacta

SEQ ID NO: 694772 - DNA, 96 bp, Homo sapiens
aaagagttccttgctcatctaaaagaggcaatcaccgttcagggtgaacttctcacctgagggctgtaaagactcgtttgaaaatggagagccaag

SEQ ID NO: 694773 - DNA, 75 bp, Homo sapiens
cgaagagctcggaccaagcgctcaggatatggcctaccagatgacattgtgatagaaaagaggggcaaaggcgac

SEQ ID NO: 694774 - DNA, 101 bp, Homo sapiens
aaaaagtaaaccacgatcgttatgctgagcccagctgtggtccctcaccagtattatggagttactccctggggagtctaccctgccagtcttttccagca

SEQ ID NO: 694775 - DNA, 95 bp, Homo sapiens
gcaagagacagagcagttttatttcacactctccagtgaagaagccaagtcttctaaaggcccaccaattcgagggagactcttttgactcagcc

SEQ ID NO: 694776 - DNA, 100 bp, Homo sapiens
cactatatcagataagcttgacattacagccaagatggtgctgtcccagagacaacgagatgaactaatctacctgttactcgtattttggacaatctta

SEQ ID NO: 694777 - DNA, 100 bp, Homo sapiens
ctgcaaggtgtgcagtgcacagctgatctccgaatcgcagcgtgtggcccactacgaggcccgatgagagaaagggaaagttaaggatgctggagcagaa

SEQ ID NO: 694778 - DNA, 100 bp, Homo sapiens
cggggttctccgggagagggggagtgcgcggcggccgcagctgccacaaaccagcacgtcagctaactgttcagatgatgcaaaatcctcagattcttgc

SEQ ID NO: 694779 - DNA, 100 bp, Homo sapiens
ctggggttctgagactccctgtcccggaccgcaggcctccggtgtggctgtctctgatggtgtcatcaaggtgttcaacgacatgaaggtgcgtaagtct

SEQ ID NO: 694780 - DNA, 80 bp, Homo sapiens
gttcttggtcctgcagcttataatgttccattgccaaagaaatcgaaagaacgagtgaaggattttaaaaccgttatcat

SEQ ID NO: 694781 - DNA, 100 bp, Homo sapiens
gttggctttgcaaaatgacccacctcctggaatgaccttaaatgagaagagtgttcaaaattcaattacacagtgaaactgaaattggctgtatcatctg

SEQ ID NO: 694782 - DNA, 82 bp, Homo sapiens
atcatgtctgcgagccaggattcccgacctcctgccccccgaggtctgcagtctcctgaacccagcagccatctacgccaac

SEQ ID NO: 694783 - DNA, 50 bp, Homo sapiens
agccagcacactcctcgcgagcaaggcaaatgttctgaaaaagactctgc

SEQ ID NO: 694784 - DNA, 100 bp, Homo sapiens
gggtgcagatcccggaatgcctgaaccaactgttttgagcagcaatgcagcaagtcttggaaaaccttacggagctgccctcgtctactggagcagaaga

SEQ ID NO: 694785 - DNA, 95 bp, Homo sapiens
caacaccgttcccccagccgggctggagcggttggttccccgaggcgtacgtgaaggctctggaggaggggcccgtgaatcccatgacccccgtg

SEQ ID NO: 694786 - DNA, 74 bp, Homo sapiens
cgatccatagctaagacgccaggtcccccggaaacctagaaatgggtacaggcatccttcacctgctattgttg

SEQ ID NO: 694787 - DNA, 75 bp, Homo sapiens
tgaactttcacggacaacctcagaggacaacgaagtgttcgggtcagcagttcccagcgctcctcacggatccct

SEQ ID NO: 694788 - DNA, 104 bp, Homo sapiens
agaagagcggcggctggaccacttctctgtcgacggctatgacagttctggtcagcccaaggccaaccccactgtcactctgttcccgccctcctctgaggagc

SEQ ID NO: 694789 - DNA, 100 bp, Homo sapiens
aaccgttacctggctatgaaggaagatggaagattactggcttctagggtggtgaaggcagatattgtaaactacaaccaggaacctatgtcaaggactg

SEQ ID NO: 694790 - DNA, 100 bp, Homo sapiens
ctcctcctcaagcccccaaggcccttcggcgggcccctgctgaaagaccggcatgccctattctgtgggcttccgcgaatccatcccatggaagtggctg

SEQ ID NO: 694791 - DNA, 100 bp, Homo sapiens
ttcacctttgattccagtgtgaactgtcaatcataaggcgtcgacattccagatggctatcctgcttcagtacaacacggaagatgcctacactgtgcag

SEQ ID NO: 694792 - DNA, 97 bp, Homo sapiens
cgcagcgtctggtcactcgctctcctctggggactgcagagaagcaggacctcgggccatgggatctggaaatagtatattcctatttacatggtat

SEQ ID NO: 694793 - DNA, 98 bp, Homo sapiens
ataaattcaaggatgatccagttggaccttttggacaggaaagtgtaacatcagttacagagatccaaactactggatacaggtgcatcgcttggaac

SEQ ID NO: 694794 - DNA, 83 bp, Homo sapiens
tcggtggactccttcggcagtccacccaccgccgccgcctcccaggtctcggcgcggaagatggccggcggcgtggacggccc

SEQ ID NO: 694795 - DNA, 88 bp, Homo sapiens
cgccggagcggggtccgatggttctcgaaggcccgcggcgccccgtgctgcagcatggaaataaccagcctgcaagaactggcacact

SEQ ID NO: 694796 - DNA, 75 bp, Homo sapiens
ctgaacgggaaggagatctccgcgagaactgtcagaatgaggagatcctgaacagtctcaagtatgtccgtcctg

SEQ ID NO: 694797 - DNA, 101 bp, Homo sapiens
cgggatcgtgaccgagaccgtgaccgagagcgtgaccgagagcgcgaatatcgtcatcgttagaagatgctggcccgcgagagacattgatgcattttgct

SEQ ID NO: 694798 - DNA, 97 bp, Homo sapiens
gtttggctacgaatcccagcggctcagacacaacatctgctgaggtgttcattgaagttgactggtctgagtgtctccaatggaaaggaccaacttg

SEQ ID NO: 694799 - DNA, 100 bp, Homo sapiens
tcgaagtcggggaggagtttcatgaagagcccaaaacctattacgaactcaaaagtcaaccgctgaagagcagtactttgaagatgtcatcccattgtct

SEQ ID NO: 694800 - DNA, 83 bp, Homo sapiens
ttgcgcggcggccccagaccctgctccgggtcgcgtcctggggggatatgagactttctactcggaatatcctgagtgttgcg

SEQ ID NO: 694801 - DNA, 100 bp, Homo sapiens
ctcggagcttatactcctcccagtgacgggtctggagtgcgtgggggaccggctgttggcggtgggcgtctttgactgggcaggggcttcggacggcggc

SEQ ID NO: 694802 - DNA, 82 bp, Homo sapiens
cctgatgccaacagtgtaccagcagggcgttggctatgtgcccatcacagcatcccagccatcactcttccacctgctcctt

SEQ ID NO: 694803 - DNA, 96 bp, Homo sapiens
aggcggcggagcgcgagagcttcgagcggactcaggaacaatgacactgccattgaaatagacaactgcagcagctacaagataccctctccagtg

SEQ ID NO: 694804 - DNA, 105 bp, Homo sapiens
aagacgtccaatctgagcgtgctgcggacggcgctgcggtacatccaggtttggtgcacctcgatttggaggaagtagggcagggcccttatctggaaagaagtt

SEQ ID NO: 694805 - DNA, 71 bp, Homo sapiens
gggagctccagagcctgctggtggaggaggggaggaacatcatcgtgttctacggctcccagacggggact

SEQ ID NO: 694806 - DNA, 100 bp, Homo sapiens
tgttttgaatttggtctggagcttgatgaaattcaatctgcacatcgtgctgccacacgaggcttcattcgttatggctggcgctggggttggagaactg

SEQ ID NO: 694807 - DNA, 100 bp, Homo sapiens
tgttctctggcatggaaggggtcctcagagttactggggagatctattgggaaactgattataaccactcgggcaccatcgatgcccacgagatgaggac

SEQ ID NO: 694808 - DNA, 100 bp, Homo sapiens
gggggctcagatatggaggcaaatgggagccaaggcacctcgggcagcgccaacgactcccagcacgaccccggcgtgcatcgcttcaaggccgggacag

SEQ ID NO: 694809 - DNA, 100 bp, Homo sapiens
ccttcttcctcaactatctcgctgacacgcagagctcaggccccggggcctccagcggcaccagcggagaccacggtgagctcgtcgtccggattgccag

SEQ ID NO: 694810 - DNA, 100 bp, Homo sapiens
ctgcaagaggagctattctgatcttgagctgaactagagaaacatggttataagatggagacttcatagcatccagaagaagtgttgaagtaacctaaac

SEQ ID NO: 694811 - DNA, 82 bp, Homo sapiens
cgcctcagctctgtggaggagcagcagtagtcggagggtgcaggtcaaaatgcagatcttcgtgaaaacccttaccggcaag

SEQ ID NO: 694812 - DNA, 115 bp, Homo sapiens
caggaaactattgctgtagatgagtggattgtatttcagtctccagcaagaattgcccatcttgttaaggacatagctcgccttttgcaagaaaaggagttacaggaagagaaaa

SEQ ID NO: 694813 - DNA, 99 bp, Homo sapiens
caccaggcaaattactccatcattgatgatgctacaatgagacgttttctttggaccaaagatctctttcgtgattccttgcaacaatcaatgagaatc

SEQ ID NO: 694814 - DNA, 98 bp, Homo sapiens
cgatgactcggaaagcgctcagaagaacgcttcgcccgttggtgctatatttaaaggtacagttgaggaactcagtaaccagatattatctgcacgga

SEQ ID NO: 694815 - DNA, 100 bp, Homo sapiens
tctgttggggatagagttcctgctgacttacgcttgtttgagatcatggggaatttcagaggtcatgccctccctggaaccttcttttttattattggtc

SEQ ID NO: 694816 - DNA, 75 bp, Homo sapiens
tgacagcaaaaatgacccaccaatggaagcagctggcttcactgctcagctcccatggtgaatagatcaaccaag

SEQ ID NO: 694817 - DNA, 75 bp, Homo sapiens
gattcagtcgagtttgctttgctccgtgggaactgcaccagagctggaggtatgtgcactgcgcgtgaccagccg

SEQ ID NO: 694818 - DNA, 90 bp, Homo sapiens
cccatatccgggttcagggtgaggcccagaaagtggagcgactcatcgaagccttcagggaacgagagcagccacccagatttgcacagc

SEQ ID NO: 694819 - DNA, 100 bp, Homo sapiens
ccccagctctccctgcagatcggcgatgtggtgcgaatacaggagacgtgtggagttccaaaagctgagacaagatcttgaaatggtactgtccactaag

SEQ ID NO: 694820 - DNA, 49 bp, Homo sapiens
gggcagctgccaggaacgagggtagcagaaccccagctcaaagggattg

SEQ ID NO: 694821 - DNA, 100 bp, Homo sapiens
atttcgatctccgccctggggtcattgtcagctgagtcagtgctgattctctcaaatagagcttgaaggataaatcttcatttttgtttcaacaaaactt

SEQ ID NO: 694822 - DNA, 75 bp, Homo sapiens
agataaagtgtcgcatactctttgataagataatacattgacatgattcaaaagtccaaaggtatccaataaaaa

SEQ ID NO: 694823 - DNA, 76 bp, Homo sapiens
cacgaactgagctgatccttgccccaggagaggagaggcagcagcatggcgagtgtcctgtcccgacgccttggaa

SEQ ID NO: 694824 - DNA, 75 bp, Homo sapiens
ctcagccaccgagaaggctacggcaccatgtacatgaagacacggcttttccagatttggagcaagaggtggtgg

SEQ ID NO: 694825 - DNA, 88 bp, Homo sapiens
tggacagatctgagagatactgaggtctcctctgagcctccggcctccataagacccaaaacagatgacacctcttcccagtcccccg

SEQ ID NO: 694826 - DNA, 90 bp, Homo sapiens
ggatggcggagtcggggctcctgacgggttatgagagaatttacaatgaaattccggacattaatctggatgtcccacattcatactctg

SEQ ID NO: 694827 - DNA, 82 bp, Homo sapiens
cggacggggagctgaacgtggacagcctcatcacccggctgctggaggatatctcccggggccaattcagcatctctacctg

SEQ ID NO: 694828 - DNA, 73 bp, Homo sapiens
gccaggagcagcagcctttctgtgcagagcattgtagaccaaggagccatggataggagaagtatgggtgaaa

SEQ ID NO: 694829 - DNA, 100 bp, Homo sapiens
atgagcagcatggtagttacagacgctctgctgttgcccgtattcaggagttcttcagacggagaaaagaaaggaaagaaatggaagaattggatacttt

SEQ ID NO: 694830 - DNA, 95 bp, Homo sapiens
cagggcccaagcctagcatctaagcctgttccctgttcagcacctccttttgtggctcgggagacgctaagggcctggcaagagaagaatcaccc

SEQ ID NO: 694831 - DNA, 100 bp, Homo sapiens
ccaatatctgatgacagttgtatagcagggcaagtgtccagagaatggctgggatgaaagtacacttgaactctttttacatgaacttgcaatcatggac

SEQ ID NO: 694832 - DNA, 96 bp, Homo sapiens
aaaagaaaactacttatgcagaaccagtcttcaacaaatcatcctggagctagtttgtcccgctggctggaagcctggcagtgacacgattaagcc

SEQ ID NO: 694833 - DNA, 50 bp, Homo sapiens
ctcaaacgagagtcagcctttaacgatccctatggttcaggaggccagaa

SEQ ID NO: 694834 - DNA, 100 bp, Homo sapiens
tcacaatccaagttccacaatatattgactactgccacaattccggtctgctgagaacagacccagtccctgaggaaggagaagatgttgctgccacgat

SEQ ID NO: 694835 - DNA, 75 bp, Homo sapiens
ggaatcaagcaccttcattctgctggaattattcatcggggtttgtgtttagtgaatcagagggatctgcattag

SEQ ID NO: 694836 - DNA, 50 bp, Homo sapiens
tgcgcgtggaacggctgcttttggaagggtttccaggcctgaggtgcccg

SEQ ID NO: 694837 - DNA, 96 bp, Homo sapiens
tttggacgccgggagattgagattgcagagcaagaacggcccgggatgttggacttcacgggcaaggccaagtgggatgcctggaatgagctgaaa

SEQ ID NO: 694838 - DNA, 90 bp, Homo sapiens
cccctatctagaggatataccagaccctggagtgaactggattccatgtagagacccctggagggtgtttgtgaaccgaagtttagcaat

SEQ ID NO: 694839 - DNA, 75 bp, Homo sapiens
ttctgtgccattgctaggttaattgggaccaaaacatgtagacagaatacaaattcagtgccaggtggaccaaag

SEQ ID NO: 694840 - DNA, 90 bp, Homo sapiens
ctgtttttggcagggtgatgcagataggcttcaacggaccacaccaaaatgccatctcaaatggaacacgccatggaaaccatgatgttt

SEQ ID NO: 694841 - DNA, 100 bp, Homo sapiens
ctggaggagcagctgctcaagtactcgccggacccggtggtcgtccgcggctccggtcacgtcaccgtggcagctgcaatgactctccgcacggtattat

SEQ ID NO: 694842 - DNA, 83 bp, Homo sapiens
cggctcccctctcaggacaacccagatgtgcaacaaagtgcgatggttttttattggcacctcagtctcaacattttcttttc

SEQ ID NO: 694843 - DNA, 100 bp, Homo sapiens
gagatgatcacagctcctgaacgtcagcagctagagaccctgaaacgtaatgtcaacaactctacttctgcaggccccatcccttcccagaaagaagagg

SEQ ID NO: 694844 - DNA, 75 bp, Homo sapiens
aatcaaaaggaactgcccagacttcaccacgatgcaatatatgcatgaactgtggctgcaccatctgtcttcatc

SEQ ID NO: 694845 - DNA, 88 bp, Homo sapiens
ccgcgccaactcggaccgctacgccgtctactggaaccgcagcaaccccaggtggcctgtgagtacggcatggtgcacgtggtctccc

SEQ ID NO: 694846 - DNA, 98 bp, Homo sapiens
aaaaaaccttcaggcggcccatggaaatgcatcttctgcagacaccgggttaagagggtctctggagcctgcatccagtgttcctacggtcgctgccc

SEQ ID NO: 694847 - DNA, 75 bp, Homo sapiens
acagagatacccagacaacaggatcgtctcgtccaagagatcccactggcattgttggtggtaggcctgggcggg

SEQ ID NO: 694848 - DNA, 93 bp, Homo sapiens
cagaggagctgaagactccagtatgcaactgactacaaggagacaatgcagatcttcgtgaagactctgactggtaagaccatcaccctcgag

SEQ ID NO: 694849 - DNA, 100 bp, Homo sapiens
aaaatgtggaagggacccaggctgattcagtttaattggttggggtcagataagaagaggagtgacaatcaagccaacagtagatgatgactgaagaata

SEQ ID NO: 694850 - DNA, 90 bp, Homo sapiens
tggagaacgggaaggagacgctgcagcgcgcgggaactcgtacgtccggctgcggcacctctgcaccaacacgtggattcagagcaccaa

SEQ ID NO: 694851 - DNA, 98 bp, Homo sapiens
ctgagctagatgctttactaggccatgctttacaagcgttggctccaacttttgaaatgaatcctatgaagaaaaagatcctggctgctaaaggtgga

SEQ ID NO: 694852 - DNA, 100 bp, Homo sapiens
aagttcctgtctctggcaagtaatccaggtcaaaatgcagatcttcgtgaaaacccttaccggcaagaccatcacccttgaggtggagcccagtgacacc

SEQ ID NO: 694853 - DNA, 112 bp, Homo sapiens
cagcctcttcagcacagtgacaccatgtcagcaaaacttcttttggggttttgcacactagggaccaagaagccctcggggacactgctgagaaaagactgccgaagggaag

SEQ ID NO: 694854 - DNA, 73 bp, Homo sapiens
ggaagcggaggtctgaagggggacaggccaagtggaggtgactggtgatgaatacaatgtggaaagcattgat

SEQ ID NO: 694855 - DNA, 100 bp, Homo sapiens
acttcagatgctgaagcgagtccctgagctcccggtcagtttaggggctggtgcaaaggatgagttgcacattgttgaagcagaggcaatgaattacgaa

SEQ ID NO: 694856 - DNA, 83 bp, Homo sapiens
gggatctttgtcctttgggatttctgaacttcagaaagccagtgttgatggctggaatactctgaagatagtaactccgagcc

SEQ ID NO: 694857 - DNA, 117 bp, Homo sapiens
ggtctccacccgctcgcgctccaagctccctgcggggaagaacgtgctactgctggagttgctggagaatgtaaccctaatccataaaccagtgtcgttgcaaccccgtgggctgat

SEQ ID NO: 694858 - DNA, 100 bp, Homo sapiens
caagaagaataagcacaagagaaagaaggttaagctggctgtcctgaaatattataaggtggataactcctcgctcactggtgaatcagaaccccagact

SEQ ID NO: 694859 - DNA, 100 bp, Homo sapiens
cccggaaccactctttgtgccgcagcttcgcagaggggcccatacggcgttgttctggattcccgtcgtaacttaaagggaaactttcacaatgtccgga

SEQ ID NO: 694860 - DNA, 96 bp, Homo sapiens
ctctccacctggtgctgaggcgagggttgaggattgggcagttggtacaggttaccatgccagcaatgattccttttgagtttctgacagaagata

SEQ ID NO: 694861 - DNA, 83 bp, Homo sapiens
ggcaatgatagatacatcagtgtgggaagccaagcagatacaagacttggtggggaaacttaaagatgcttcgaaaagcctgg

SEQ ID NO: 694862 - DNA, 51 bp, Homo sapiens
ggacatcctggaagctgggaaatgcaacacagtcactcctggcggcaaacc

SEQ ID NO: 694863 - DNA, 82 bp, Homo sapiens
gctgcagagaccccgctatggctgtgtggatgaggtcaccattgtcaacattttgaccaaccgcagcaatgcacagagacag

SEQ ID NO: 694864 - DNA, 100 bp, Homo sapiens
cacaaaacagcagatttcccaagagcagcggaaaatgatccagtcacaggccctgggaggagcggggacactgaggacctctctccaaattggcctctca

SEQ ID NO: 694865 - DNA, 100 bp, Homo sapiens
ttcaacttcaatttttctgcagtggctctgggtccagccccttacttaaagatattgatgatgttaagaagttcaaaccgggttacctggaagctactct

SEQ ID NO: 694866 - DNA, 100 bp, Homo sapiens
ttaccagcagctgaaaccaattggctctggggcccaagggattgtttggtggaagatggtatcttgaagttgaggaatgctggcaatgaacaagacttag

SEQ ID NO: 694867 - DNA, 82 bp, Homo sapiens
tgctctgtgtaccagtctggaggagtcaacatgagagaaaaggaacagttccgtaagctctttattggtggcttaagctttg

SEQ ID NO: 694868 - DNA, 83 bp, Homo sapiens
gggagcgctgactggcccggctgggcagggttctctacttttagagtcgaaaataaatcctaacactgcataccagaaacaac

SEQ ID NO: 694869 - DNA, 76 bp, Homo sapiens
gagtttccgatttaaagctgagctgcgaggaaaatggcggcgggaggtggaatatgtgatcaagtgtgacatgtca

SEQ ID NO: 694870 - DNA, 100 bp, Homo sapiens
ctcagatccccgctctcctactcttggtattgcacggacacctatgaagaccagcagtggaggagataggaacaggtggcacatgtcagtggaagatatg

SEQ ID NO: 694871 - DNA, 100 bp, Homo sapiens
tcagggttaaaaagaacagtactacagaccaagtatatcagtatggcatgcagctgtaccagaattatatgcatccatatcaaggtagaagtggctgcag

SEQ ID NO: 694872 - DNA, 101 bp, Homo sapiens
agtcccataccagttctgcaatgtggtatgcagagttggctttcaaagaatgtactcgacaccttgcggaattctcaagaaatttgaggaagaagatttgg

SEQ ID NO: 694873 - DNA, 100 bp, Homo sapiens
aaggagtgggtcatgggtggccactgtttcttggatcgctgcaaccatctccgccagaacgacaaagaggaggtgccttggaacactatgttaattgcct

SEQ ID NO: 694874 - DNA, 100 bp, Homo sapiens
cggcgacggaggaacgcaggtctgctgccaggttttaaaatcaaagatgggaaaatcggagaaaattgcccttccccatggccagcttgttcatggtata

SEQ ID NO: 694875 - DNA, 100 bp, Homo sapiens
acctcggaccagctctgtaaaagccccgcctctgccttcggataggtcttcctatcactgggctctaatttcactttgcaactggtgactgtgatgcttg

SEQ ID NO: 694876 - DNA, 100 bp, Homo sapiens
tgtttccaaagagaaaaacctactcttgatacacaatctaaaaagaattaggaaggtccttcagctggagaccatggccaaaatggaggtgaaaacctca

SEQ ID NO: 694877 - DNA, 100 bp, Homo sapiens
cccgaccacttgcggcctgagtatgagcaaacgccctggaggagcagctgaaggagcaggagctgagagcctgcgagatggtcctggaagagacccggcg

SEQ ID NO: 694878 - DNA, 96 bp, Homo sapiens
gagatgacgtggagtttatcagtgacctgattgcctgcctgcttcagggctgctatcaacgaagagatatcacgtaagaatgattgatgttggctg

SEQ ID NO: 694879 - DNA, 88 bp, Homo sapiens
aatcttggagtcctgcatttggatggcatcttccctggagttcctggaaggaatcaaggaagctatgcgaaattatttaaaagagcga

SEQ ID NO: 694880 - DNA, 74 bp, Homo sapiens
cggagctaacggactccgcgcggatgttcatcatcagaagcagcaccttggagaaaaacatttcagaagcaatg

SEQ ID NO: 694881 - DNA, 75 bp, Homo sapiens
gttggacgctgccagtttgcacagcagcagggcgaagctgtgctcaggcccgggctggacgcagagccagagctg

SEQ ID NO: 694882 - DNA, 100 bp, Homo sapiens
aagcacatgtttcagtgccactcacataagaagtgcccgaatgtggaggctgtggacccacgaggtcgaacattattgcatcttgctgtttccttgggac

SEQ ID NO: 694883 - DNA, 97 bp, Homo sapiens
caagagtcagctggctgcagctgccaggatttttttcccaggaagccatcccgtcagaggggttcaagtgatgaaagttggcaaactgcagctacat

SEQ ID NO: 694884 - DNA, 75 bp, Homo sapiens
ctgcggctggtccaggccttccagtacacagacgagcatggggaagtgggaggtctgaagagcccttggagggga

SEQ ID NO: 694885 - DNA, 98 bp, Homo sapiens
gcatgccccgctacgagctggctttaatcctgaaagccatgcagcgggatcatccatgaagatggcttctccggagaagacgtgaaacagtacaagcc

SEQ ID NO: 694886 - DNA, 77 bp, Homo sapiens
caaaggaagattctcatgcacagattgaaaccctctgagatatcaaccccctagagtggagactgctgcacggactc

SEQ ID NO: 694887 - DNA, 87 bp, Homo sapiens
atatcaaacggcaagatgtccagtaatgtcccggcggatatggtcacaatttgaagaactctgtgctgaacttctgcaaaagataga

SEQ ID NO: 694888 - DNA, 50 bp, Homo sapiens
tgaatgacatccgagcgaaagagaaagagatctcaggaaacaggctcgac

SEQ ID NO: 694889 - DNA, 141 bp, Homo sapiens
cgatgcctgaggagaactgtcagtgtcccttccgagggtcagtttcccgagtacccaccagagggcgccactaaactggttgtacaatggtagatggagtgatgattcttcctgtgcttatcatgattgctctcccctccc

SEQ ID NO: 694890 - DNA, 100 bp, Homo sapiens
gtggccagcgccgcgcccggggccgtgcgctctcgggccactcggccgcaggtctgtaaacagatttggctaggattatttgatgatagatcttcagcaa

SEQ ID NO: 694891 - DNA, 100 bp, Homo sapiens
tggcggatgccctgcagtacctgcagaaggtctctggagacatcttcagcaggtatcacagatgtcgtaagaatctgaatcctccaaaagacagatgatg

SEQ ID NO: 694892 - DNA, 82 bp, Homo sapiens
ccgcccgcaactccgccgcccaccatggcttccgaggagctgtacgagcaaattgtggctactaatttgccccctgaagatc

SEQ ID NO: 694893 - DNA, 82 bp, Homo sapiens
aggacgggcacctactcatggatggcggctacatcaacaatctgccaggagaggcgggagatttttgagcagcacctgaaga

SEQ ID NO: 694894 - DNA, 75 bp, Homo sapiens
cctgtcgtacgtgggacaggccacgctgtccgtccgcagtaccgacgcctgcagatgaagatctccttcaacgac

SEQ ID NO: 694895 - DNA, 120 bp, Homo sapiens
ggtctcagcccaggacctccaggggaacaatgaggcctacgcagagctcatcgtccttgctgccaaggggccaagggatgagctggggccctccttcccaatggcatctccccctggtct

SEQ ID NO: 694896 - DNA, 75 bp, Homo sapiens
ttgaagagttctgcgttttgccagtcacctctcaactgtgtgccaaaggagttcaaagaaggacgcagagccagc

SEQ ID NO: 694897 - DNA, 100 bp, Homo sapiens
gtcagtggaggtggagttcgggatgccgtgcgcatgctcaataccctgcagaccaatgccggctacctggagcaggtgaagcgccagcggggtgaccctc

SEQ ID NO: 694898 - DNA, 100 bp, Homo sapiens
gccggaccctgaggcagcgagccagttttaccaggaggtgctctggggatctccagcagcatcagatgacggcagacgcacgctgagggttcagggcaat

SEQ ID NO: 694899 - DNA, 74 bp, Homo sapiens
ggaagagaggccgtgcccctcaggagtctactcttcatcttgtgttgagacttcgtggtggtgctaagaaaagg

SEQ ID NO: 694900 - DNA, 75 bp, Homo sapiens
ccaggccgtgcgcatgtttgctgactacctcgcccacgagagtcggagagtgcctggaagagctgggatgtctgg

SEQ ID NO: 694901 - DNA, 90 bp, Homo sapiens
gataggctgcgctaccggaatgtcatccagcgagtgattagatgatacataccttttctcgatgtgtgttatgctgtgctgaagaagtgg

SEQ ID NO: 694902 - DNA, 102 bp, Homo sapiens
ttttaactctttcaaagccgattttgaaacggctgcagtgatacatgcgaagattgggaaaatgaggtacgttagtgttcgcgattttaaaggcaaagtgct

SEQ ID NO: 694903 - DNA, 97 bp, Homo sapiens
gttctctggagccccagattcaacccgtgtacgtgcctgtgcctaaaagctctcagcatggcggctcctctacgtcacttgcgtccaccaaagtctg

SEQ ID NO: 694904 - DNA, 100 bp, Homo sapiens
aaagacactgtttcacttgtctcaggtgatgtacctgctcccccttcaccttctgccataattggaagcttcctgaggccctcaccagaagcagatgccg

SEQ ID NO: 694905 - DNA, 82 bp, Homo sapiens
tggatttaagcactgctgcactttatgagatcctgataacttaagtgactctctcttttccggtgatgaagaaaatgctggg

SEQ ID NO: 694906 - DNA, 100 bp, Homo sapiens
cgtcatcatcagcctcaaacctgcactttatcccagtgtttccaactgtacaccaaagaggagcggactcagattgatggacaacttttcttaattaagc

SEQ ID NO: 694907 - DNA, 98 bp, Homo sapiens
ccaccttgtggccctgggctttaccatctttgtggctgtgcttgccaggcctggctccaactgctgagaaggaagaatttgaacatcaacagaaagag

SEQ ID NO: 694908 - DNA, 108 bp, Homo sapiens
ccggaagcgccaggacaatggggacccgggacgacgagtacgactacctattcaaaggtctcggcgcggaagatggccggcggcgtggacggccccatcgggatcccg

SEQ ID NO: 694909 - DNA, 103 bp, Homo sapiens
ccgacggtcacccgaatcgcagggagtcgccgctggagaggggctcggcgcccggcggggactgcagcataccctgtaaaaagtgtgtggtggttggtaatgg

SEQ ID NO: 694910 - DNA, 74 bp, Homo sapiens
gatgccctgcagtacctgcagaaggtctctggagacatcttcagcagcaattaccagctctggctgggtcgcca

SEQ ID NO: 694911 - DNA, 100 bp, Homo sapiens
tgcggggagctaagtccccagattggaggaggctggctctggtcttcgatgcacaggagtggccgttatggaacgcaggcctatgagagctacaagaaga

SEQ ID NO: 694912 - DNA, 74 bp, Homo sapiens
atgtgtatccatggagacaagagtcaaccagaaagagattgggtacttaatgagcatgtcctttgcaacctgat

SEQ ID NO: 694913 - DNA, 105 bp, Homo sapiens
ctcgactcggtcctgtttcgacagcgaacatgtcgcggcctgtcaggtggccagcatcgaaatgttcagccttttagtgatgaagatgcatcaattgaaacaatg

SEQ ID NO: 694914 - DNA, 100 bp, Homo sapiens
ctgaaaaagctgtggaaggctctggataaggaccagtacctgcccaggaaactgaaaccagcctggacaccaagtctgtgtcagaaggccacctcaagag

SEQ ID NO: 694915 - DNA, 50 bp, Homo sapiens
cactggattgggaaagaccatggcaggtacaaaaggaagttacctctgtg

SEQ ID NO: 694916 - DNA, 96 bp, Homo sapiens
cgttggccgcagatgcctctcggtccctccctgtacttactgtaatctcaggggcgatataatcaatgaggtggtcctaaagttgctcaaggctgg

SEQ ID NO: 694917 - DNA, 90 bp, Homo sapiens
cgggaacgattgggctgagcagaggacgacatgttgcttttcgtggaggtactgaacgacacctgggtctccttcccttcctggtctgag

SEQ ID NO: 694918 - DNA, 98 bp, Homo sapiens
tgcttcgggcctctggaatttagcgctcgcccagctagccgcagtaatctatgccagcaattatgacaatgttagcagaccatgcagctcgtcagctg

SEQ ID NO: 694919 - DNA, 75 bp, Homo sapiens
gtaactataagcagcttcggaaaggagccaatgaggactgcctgaagttacatttagagactgaaatcactgcac

SEQ ID NO: 694920 - DNA, 50 bp, Homo sapiens
ccgttatgtgggaagcgaatccagaagaagttgcctatgaagaaagggcc

SEQ ID NO: 694921 - DNA, 50 bp, Homo sapiens
aaaaacctcagcgacctgatcgacctggtcagttcaccgggacctggagg

SEQ ID NO: 694922 - DNA, 74 bp, Homo sapiens
ctgaagatggtttgaaacagcttcacaaggccaaatttgagtttcatcatggtgactatgaaaaacagtttctg

SEQ ID NO: 694923 - DNA, 75 bp, Homo sapiens
caaggccaaccatggaaatggataaatggtactgaatggacaagacagagctatcaatgtcacatataccacggt

SEQ ID NO: 694924 - DNA, 74 bp, Homo sapiens
tctaatatctcgaaatgcggctgcttttcaaggtgctgaatgtggagtaaatgcagatgttgagaaacatcttg

SEQ ID NO: 694925 - DNA, 100 bp, Homo sapiens
ctccaaaccacgtcatctgattggagtaactattcccagtcagaggcgctatgtgtattattatagctacctgttaaagaatcatctggattatagacca

SEQ ID NO: 694926 - DNA, 98 bp, Homo sapiens
atttttcttaaatggcccacatcaggacagctgttccttggccatcccaaagctattctgggggcaacagaggttaaagatggttttgaaaatgttgc

SEQ ID NO: 694927 - DNA, 74 bp, Homo sapiens
ctgatcccaatggattgcatccacattccagagagcatcatcaagctgaacatatgcagaagaaaaggagaaaa

SEQ ID NO: 694928 - DNA, 100 bp, Homo sapiens
gtatgagcctgtcatggaggccatcaagacttaattcagtgcacaaatgagatgaatgtgaacatcccacagttggcagacagtttatttgaaagaacta

SEQ ID NO: 694929 - DNA, 75 bp, Homo sapiens
gcatttgttacttttatccttcccagtgtgtcccggcatggatatccggaacaacctcactaggttgcatgagct

SEQ ID NO: 694930 - DNA, 100 bp, Homo sapiens
gctggccccgagcggaactggagaaagctgaggaatagcctaacatggcagaccagagacagcgctcactgtctacctctggggagtcattgtaccacgt

SEQ ID NO: 694931 - DNA, 90 bp, Homo sapiens
gaaatttacagaaacaaactacatctcagggtggaaccgtcccaaaatgtcccttgctcagaagaaggatcgggtagctcaaaagaaggc

SEQ ID NO: 694932 - DNA, 90 bp, Homo sapiens
gcgccgagccacccgcccgcccaaggtctctcgcgggcgggagaacggaaaactcccaacttcctggctcccagccaacctctgataaac

SEQ ID NO: 694933 - DNA, 100 bp, Homo sapiens
ctggccaaaactacaaacaagacttcgcagagatcctgaaggagctagacgagtgctacgagcgcttcagtcgcgagacagacggggcgcagaagcggcg

SEQ ID NO: 694934 - DNA, 82 bp, Homo sapiens
ggaaatcgggctgaagcgactgagtccgcgatggaggtctgatgctacaggacttggtttcagctaagctgatttcagatta

SEQ ID NO: 694935 - DNA, 82 bp, Homo sapiens
gacccggggggagcgcggggcgacgctggctgcagggacccggtgacagcgtgagaggcagaatccagagaccacatttgaa

SEQ ID NO: 694936 - DNA, 75 bp, Homo sapiens
gcgcgaatatcgtcatcgttagaagactggattactctggtattgctcttctgattatgggaagttttgttcctt

SEQ ID NO: 694937 - DNA, 98 bp, Homo sapiens
tgaacgtggacagcctcatcacccggctgctggagggtgaggacaccagtgatgaattctgaagcaaaagttctggtgcctgggattcctggtcatca

SEQ ID NO: 694938 - DNA, 82 bp, Homo sapiens
gcaagctctccctgccgtggctgctcaacaaggagctgggctgcatcaactcgcaagagtgagccatggagctacgtgtggg

SEQ ID NO: 694939 - DNA, 51 bp, Homo sapiens
ggactctggagctggtgggagagatcgagaattatatccagatcgagagac

SEQ ID NO: 694940 - DNA, 107 bp, Homo sapiens
cgagaagcataatgacattgtggacagtgacagcgatgctgaggatcgaggaacgttgtctggacccgtgcatctcttccgactctcgggcaagtgcttcagcctgg

SEQ ID NO: 694941 - DNA, 100 bp, Homo sapiens
atttcataaaatatgcatgctagcaaaagcacagaaagaccacttaagcaaacttaatataccagacactgcaactggtggtggccagctgagatctgcc

SEQ ID NO: 694942 - DNA, 82 bp, Homo sapiens
tcctcacctcgctactcgcttgcctacccgccggcccgcgggtctacttcctcaaagtaccatggggcgcaagttggaccct

SEQ ID NO: 694943 - DNA, 50 bp, Homo sapiens
gcgggaggagcctgttcccctgagagaatggatcttggagaatgtctgaa

SEQ ID NO: 694944 - DNA, 83 bp, Homo sapiens
cagcgaactgggtggcgaacggggcgagcctggaggattgtcactccaacctcttttcgctgcagcccctgtcaaagggaaca

SEQ ID NO: 694945 - DNA, 95 bp, Homo sapiens
catcttcaggtcctactccaggggcgctcagcccccaaatacatcaagatgtttgtactggatgaagctgacgaaatgttaagccgtggattcaa

SEQ ID NO: 694946 - DNA, 100 bp, Homo sapiens
aagaactcgcaaaagctcagaggtcttattgttacaggtatcgctgtgctgctcggagccagaacacacctgatagctctgcttcgaatctgggattccg

SEQ ID NO: 694947 - DNA, 98 bp, Homo sapiens
aggggcctttgtccgtgttcggtgaccgcagcactggggaaacgatccgctcccaaaacgataacctctttgtgcccaaccagaacggatactactgt

SEQ ID NO: 694948 - DNA, 105 bp, Homo sapiens
gccaggtgacgaggacctagactgtgacaacgaccacgtctccaaaatgagtcgcatcttcaacccccatctatatgtcttgtcgttcaagacttgcaacactaa

SEQ ID NO: 694949 - DNA, 100 bp, Homo sapiens
ctatctccatcttccctactatgatggtgtgtatgatggcctggcgacccattcaggcacttatggccatttcagccaagtgtcaatccatatctacaag

SEQ ID NO: 694950 - DNA, 82 bp, Homo sapiens
gtacagacacaagcgggccaacaaatagagatccaagcctcctaaaggccaaggagctgagcaccatctagaaagaatccga

SEQ ID NO: 694951 - DNA, 100 bp, Homo sapiens
ataacccttttaacgagtattccaaatttgatggcaaggagcctcacagtctactcagagaaaaataaaagaaggcaaaatgagtcctccccatttccat

SEQ ID NO: 694952 - DNA, 101 bp, Homo sapiens
tcatgacaagagtggccctgcaggctgagaaactggaccaccatcctgaatggtttaacgtgtacaacaaggatgtgtttcacatggtagttgaagtacca

SEQ ID NO: 694953 - DNA, 82 bp, Homo sapiens
gtgaaggtccggggcttgccctggtcttgctcggccgatgaagtgcagaggtttttttctgacttaagcccttagatgtggc

SEQ ID NO: 694954 - DNA, 75 bp, Homo sapiens
ccaccagcacctgttgatccaccagtgcacttttccagccattaactccaggctctcgagaatttgaagatgttg

SEQ ID NO: 694955 - DNA, 75 bp, Homo sapiens
ctcttcgtctttgcagcgtagcccgagtcggtcagcgccggagacccaacatgagtgaagtttcctgcaagaaac

SEQ ID NO: 694956 - DNA, 100 bp, Homo sapiens
cgcacgctggagggcgagctgcatgatctgcggggccaggtggccaagtgtgaaatggcctttccccgggtcaagccagcacctgatgaaacttccttca

SEQ ID NO: 694957 - DNA, 105 bp, Homo sapiens
aagagggtctggaggagccttctcaagaacagagacatacaatctttgccagcaacacttcctccttgcagattacaagcatagctaatgccaccaccagacaag

SEQ ID NO: 694958 - DNA, 98 bp, Homo sapiens
ggtacttcaaataggctggatatgtgtggctgtcctcctgtcatctctctggataagatggagcaagagagaaactatgttccaacttcctgtcaaca

SEQ ID NO: 694959 - DNA, 82 bp, Homo sapiens
cccgcagcatgaacccccgccggcgggcagcctcctgtacagcccgccgcccctgcaggctaccggctctctgaccagttcc

SEQ ID NO: 694960 - DNA, 90 bp, Homo sapiens
cttccaaagaagttgaaaagtgtcacacctgtaggaactgagaaatttattgtccagcaccaccacaaattgacaatggaataattcaag

SEQ ID NO: 694961 - DNA, 82 bp, Homo sapiens
cgcgggcaacgggatctaaagggagatagagacgcgggcctctgaggtgcacttacatttcaatcgaccaagttccaaggac

SEQ ID NO: 694962 - DNA, 98 bp, Homo sapiens
ggactggcagcggcgcgtggccacgtggttcaaccagccggcccgtaagatccgcagagacaagctgttccctgcatttggatttggggcccaggttc

SEQ ID NO: 694963 - DNA, 120 bp, Homo sapiens
gatggccccgaccgcgtgctggagctcttcgacccacccaaggactctatgctggtatcaagttcttcctcattgatttcatctttaaacgctgcccgaggctgcgcgccaagtacgaca

SEQ ID NO: 694964 - DNA, 100 bp, Homo sapiens
gctctgcccgtccccggggagcccgaacgccccgcagccctcacccctcccgccagtctccagccatggatctctataaaaatggactccaaagagctaa

SEQ ID NO: 694965 - DNA, 90 bp, Homo sapiens
gtcaaagagaactatcttgaaacatttatttccagtccaaaacacgatgaggcgagtggtacgacagagcaagtttcggcatgtatttgg

SEQ ID NO: 694966 - DNA, 82 bp, Homo sapiens
acgtcttccccaaccagcctggaggcaagaggctcctgcagacccctggcttcctcagagcccacacgatgaagacccccag

SEQ ID NO: 694967 - DNA, 50 bp, Homo sapiens
cccggatctcaacaatcccttcaagacatccacgacagcgatggcagttc

SEQ ID NO: 694968 - DNA, 82 bp, Homo sapiens
agcaaagtgaggctgctggagggtgacaagctcctcgcacagggggatatgagactttctactcggaatatcctgagtgttg

SEQ ID NO: 694969 - DNA, 87 bp, Homo sapiens
cgggggacacgcaggatgagccccgcgaccactggcacattcttgctgacagacacagataatgtacaagtggatagagcccaaaat

SEQ ID NO: 694970 - DNA, 99 bp, Homo sapiens
ctgagcctctgggcccacgggacggtgctgaggaacctcacgggtgataacccccgtgaggacaggccatggctacgtatacgagtacccatccagata

SEQ ID NO: 694971 - DNA, 100 bp, Homo sapiens
tggttcaccttcctcttgtataagttcctcaagacaccattcgcttttcacccaagatgatttgatgtcttataaaactctgatgaaccatgatggctac

SEQ ID NO: 694972 - DNA, 96 bp, Homo sapiens
gcacaaggcagcccgcacgatatcatcagaataggtctgcgcaggcatggcactaagtgtcccatggcacatttggccctcatggaggcctcaaaa

SEQ ID NO: 694973 - DNA, 100 bp, Homo sapiens
aaacacagcaaggaaatgtgagccccaggctgcagaaggaaattcgaaatgagtcccatgactatcctcatagagtggccaagtttccagaaaacagaaa

SEQ ID NO: 694974 - DNA, 75 bp, Homo sapiens
atccagaggctcggtggatcaatgatcttagcaaagcaatgtctcaagatggtgcttctcagttccaagaagtca

SEQ ID NO: 694975 - DNA, 75 bp, Homo sapiens
acttcaaggaagctcttgatagccttatgtttgatcatcggccaaggtcctggcgagaactgcctctgcggctag

SEQ ID NO: 694976 - DNA, 82 bp, Homo sapiens
gctgggcagctacaaaatcaatggccggacgaaagtcacgagaagagaatgccttctagatgcaaaatcacctccaaaccag

SEQ ID NO: 694977 - DNA, 97 bp, Homo sapiens
acatttttgaacgtttcccagaaagactcagcccgcctgcacccaggtgaaatatacagccttgttgctcacacaaagcctgtttggtggtttcttc

SEQ ID NO: 694978 - DNA, 100 bp, Homo sapiens
cggagctctcggaggaggacctgaagcagctgggctggtgaattaccatatctccgtcaagtgcagtaaccagttcaagttggaagtgtgtcttttgaaa

SEQ ID NO: 694979 - DNA, 80 bp, Homo sapiens
ctcgcctcctcgcagcagcgccatgcaaacggggattcagcgtccgatcctttggaacagggactcacgtgaagcttcca

SEQ ID NO: 694980 - DNA, 100 bp, Homo sapiens
gagggcgccgggagccgcggcccggaatcggggcgcttcgccccgggccccccagcatgaagaccccggcggacacagcttgccttgcgccatggactgg

SEQ ID NO: 694981 - DNA, 75 bp, Homo sapiens
acgccgacatcgtgtgccgctgccagatgatgactttgaccagtttgataagcctggcgcggaacggtcgtggag

SEQ ID NO: 694982 - DNA, 95 bp, Homo sapiens
ttcatgatattcctctgaaggtgaactctaaagaggacccagatgatgtggtaccagttggccaaagaagagcctggtgttggtgcatgtgcttt

SEQ ID NO: 694983 - DNA, 122 bp, Homo sapiens
cctcggcgattatggacccggccgaggcggtgctgcaagagaaggcactcaagtttatgtcacccacaaaagctgtatataatgccagacattggaatcatccagattcagaagaactgcct

SEQ ID NO: 694984 - DNA, 83 bp, Homo sapiens
gcagccgcccgcttcaaccccaggggaccagaggaactcagccctgattgcggtggtggtctgtcacgtggtgggccaggcta

SEQ ID NO: 694985 - DNA, 102 bp, Homo sapiens
gatcgagcagtgtgactaccccccactccccggggagcactactccgagaaggaagggaaaaggccgaggcatcagcgtgtgaagaccgcaaagacgatccc

SEQ ID NO: 694986 - DNA, 96 bp, Homo sapiens
cataaattttccacccgggattatatcatggaaccctccatcttcaacactctgaagagatgtggatgagtgccaagaatatggtcccgagatttg

SEQ ID NO: 694987 - DNA, 73 bp, Homo sapiens
agcttctagtgtactcttactttgaaaaggatattaatgcacacgcctgtgttactggtaaacccatcagcca

SEQ ID NO: 694988 - DNA, 98 bp, Homo sapiens
ccgagtcagaacccgagtgctgcttggcggcgaggaaaaccagtagattcccagacatcgcgaagtgaatctgaaattgtgccaaaagttgctaaaat

SEQ ID NO: 694989 - DNA, 99 bp, Homo sapiens
gtcaggtacctcaaagcgtaaggctctcgaaatatcggccagctagctcccgatctgctttaataccccagcactcagcaggctgtgacagcacaccca

SEQ ID NO: 694990 - DNA, 100 bp, Homo sapiens
gacagcgcctcaccgccaccagctcctggaccaccatggccaagaaccgcagggacagaaacagttgggtgggatgaagctctcttgactatgagtaaag

SEQ ID NO: 694991 - DNA, 75 bp, Homo sapiens
cgggccgccgcgccccgacgcccccgcggatgaagcgccctcagttcagcaagccgccaggaggccaccacaaga

SEQ ID NO: 694992 - DNA, 75 bp, Homo sapiens
tcggctcagctggaggaggccagctctacaggcgttgatgcggatgaaattaaaaggctaggaaagagatttaag

SEQ ID NO: 694993 - DNA, 100 bp, Homo sapiens
ctgataataacacagttattaatggactgcttggaaatatagccttgtcagacccaagcagtagactttcaacttctcctcctcctccagcaattgcagt

SEQ ID NO: 694994 - DNA, 100 bp, Homo sapiens
tcctccccgcggccggggccggccggactcccagcggctcccggagcgcagggtctcactgtgtcacccagcggtggagtgacacggagtgtcagcggtg

SEQ ID NO: 694995 - DNA, 100 bp, Homo sapiens
cagcagaatatgatgaactcggcttcaggaaagaccacagcaagattctttcattcgtctcctcctagcctgggggaccaggctcgaactgaccctggac

SEQ ID NO: 694996 - DNA, 75 bp, Homo sapiens
cagcgagcaggcgcgcagccacctggagaaggcgcaggagcattggtttgaaaaggccctacgagacaagaaggg

SEQ ID NO: 694997 - DNA, 98 bp, Homo sapiens
tttttgaacattttcttgaaaatctggataaatcccgaaaaggagaacttcttaagaagagtggttatgatgtgattgctcaagcccaatctgggact

SEQ ID NO: 694998 - DNA, 83 bp, Homo sapiens
ctcggcgctgccgtctctggaggagtactggcaacaggaactgtggctgcaccatctgtcttcatcttcccgccatctgatga

SEQ ID NO: 694999 - DNA, 50 bp, Homo sapiens
ctgatgtcaatcttgagggctagtacaattgtcccactgagcatgcagac

SEQ ID NO: 695000 - DNA, 100 bp, Homo sapiens
ggggaaccgcagcgcagtgacagtgcagaaccccggcgcggcccttgatgtcatttgtcagagtgaaccgctgtggtccccgagttggtgtaagaaagac

SEQ ID NO: 695001 - DNA, 100 bp, Homo sapiens
cagaagtgacccacaaattgctatctgtctagattgtttacgaaataatgggcaatcaggggacaatgtagtaaaggaagaagctgtttgttttgattct

SEQ ID NO: 695002 - DNA, 90 bp, Homo sapiens
ggaacgctcactgtcagcgcctggaaacttgctcacacaatgcagatcttcgtgaagactctgactggtaagaccatcaccctcgaggtt

SEQ ID NO: 695003 - DNA, 90 bp, Homo sapiens
ctcaagcaatcctctcacctcaggctcctgagtagctgggactacaactggttggtggagaatttgaactggagatgaactctattatcc

SEQ ID NO: 695004 - DNA, 80 bp, Homo sapiens
atccgtccttactctggtgaccctgggcaggtcacgcatgaagggagcaccgtggagaagacagtggcccctacagaatg

SEQ ID NO: 695005 - DNA, 75 bp, Homo sapiens
caaaatggaagtgaatccccctaaacaggagcacctgctggcgctaaaaggaattgaatgatctggcacgggacc

SEQ ID NO: 695006 - DNA, 100 bp, Homo sapiens
gcctcgtccaagcaccgggaagacctccaggctgaccccttgagcagcagtcagcacagcgctgataaagcagtttgtgtccgacgtggcctggggggag

SEQ ID NO: 695007 - DNA, 82 bp, Homo sapiens
ttcgagcgccgcggacgcgtcatcgagtgtgacgtggtgaaagtgtactaatggtcacttgatgtgcgctggctgttttatc

SEQ ID NO: 695008 - DNA, 90 bp, Homo sapiens
ggcattcagctccgacggcccttgttccagaaggctgcagagaaggctggtatgtctgcagaacaagcccagggacttctggaaaagatc

SEQ ID NO: 695009 - DNA, 97 bp, Homo sapiens
ggagcgggcagaggatgcagtggaggccatcaggggccttgataacacagagtttcaagacagagattactgcagtttatgtgacaagcagccaatc

SEQ ID NO: 695010 - DNA, 50 bp, Homo sapiens
gcagaggccttatggatatgaccagactgtttatgaccagtggttcatca

SEQ ID NO: 695011 - DNA, 100 bp, Homo sapiens
gagacgctgactgtcgggcggtggtgatctctggtgcaggaaaaatgttcactgcagactggacgccgggcatggcagtgccacgggacattgcagccgc

SEQ ID NO: 695012 - DNA, 100 bp, Homo sapiens
ctcagaagtccatgttcaggaaatggctgaagttcgtaaagatgatgttgtaacagtgactggtagatttagacgttactttacctggggaaggtggaaa

SEQ ID NO: 695013 - DNA, 102 bp, Homo sapiens
attctcttgaccatgtgacatctgatgctgtggaacttgcaaatcgaaggatgaagatttgataaagtggaaggcactgtttgaggaagtccctgagttact

SEQ ID NO: 695014 - DNA, 87 bp, Homo sapiens
atgtgtgtgaattggatttgatcttccatatggataaggtcctactgctctgttggctcatgaaataggttttggaagtaaagttac

SEQ ID NO: 695015 - DNA, 126 bp, Homo sapiens
gcgaggaggcccgggagcgccgagcgtcgccgccgccgccgccatgaacaactcgggcgccgacgagatcgggtgcagaggccaagaccgttttgcccaagaaggagaaaatgaagctgaggcgtg

SEQ ID NO: 695016 - DNA, 83 bp, Homo sapiens
cccgactcttcctggtgaagcatctgatgcacgttccatccggcgctcagctgggcttgagagtcatcttagtgggatttggg

SEQ ID NO: 695017 - DNA, 88 bp, Homo sapiens
gccatctcgctgcccgacgatgtccgcaggcggactatatttctaaaatggacccagcctctaccctgggactaagcactgagtccat

SEQ ID NO: 695018 - DNA, 98 bp, Homo sapiens
tcgcagtctccacggcgcaggcccacggtagcgcagccgctctgagatgggggactcaaggagatttcaccaccacccatcctcggcctgtggtcaaa

SEQ ID NO: 695019 - DNA, 90 bp, Homo sapiens
ctttgaatgaacatcttcattcttctatagttcgctcaggaaagaccacagcaagattctttcattcgtctcctcctagcctgggggacc

SEQ ID NO: 695020 - DNA, 90 bp, Homo sapiens
cagcaacggcggcctccaggcctcaggccccctcaccatcctagaggtcaagatcagctctggctaggagattaagggtgcctcccacca

SEQ ID NO: 695021 - DNA, 96 bp, Homo sapiens
cgcacacgctcggcgctgcgatccgcgcatataacggtgtcatggagaaactccagctgggcccagagattctgcagcgggaaaatccaaggctta

SEQ ID NO: 695022 - DNA, 100 bp, Homo sapiens
acgtggggtcactggtgtatgtcatggaaggacatgtattcctctgagaaaccttggacagcagattttggtttaatatctgattgggacaacattcaga

SEQ ID NO: 695023 - DNA, 102 bp, Homo sapiens
agcagctactgggctggactgcggaagtgagaaagatcagtctaaagaaaaggagaagaaagtgaaaaaaacaattccttcctgggctaccctttctgccag

SEQ ID NO: 695024 - DNA, 83 bp, Homo sapiens
catggatgctgtcaacaagaagagcagttcccaggatctgcataaaggttgagttgttacaacaaaagttgagagaaaagttg

SEQ ID NO: 695025 - DNA, 83 bp, Homo sapiens
ccagcctgcggagcctgtggggcagaccccttatccctctggacagaatgcaggtccaaccacgctggtataccctcaaaccc

SEQ ID NO: 695026 - DNA, 75 bp, Homo sapiens
cacacgggctctcatcgtggtgcagcagggcatgacaccctccgccaagcagggacctcccggcctgccgggact

SEQ ID NO: 695027 - DNA, 51 bp, Homo sapiens
cctcgcgcgtgaggatctatctcagatggaggtttgctcttgttgcccagg

SEQ ID NO: 695028 - DNA, 82 bp, Homo sapiens
atggcggatgccctgcagtacctgcagaaggtctctggagacatcttcagcagatagcagaccccacgttagctgaaatggg

SEQ ID NO: 695029 - DNA, 75 bp, Homo sapiens
ggaagaccaaagaggatgagaaggacgacaagcccatccgaggcctggcgtttccttgaccatgcaggcattttc

SEQ ID NO: 695030 - DNA, 100 bp, Homo sapiens
atcctttgataatgaaggcattgctatttttgcacttcagttcacatactatttatggactctttttgatcagaacaatgctgcaaaaaaagaagagtca

SEQ ID NO: 695031 - DNA, 75 bp, Homo sapiens
tgaaatttgcagaggtctactttgcacagtcccagcaaaaggctacgaggaacaccggcaagagtatcgccaata

SEQ ID NO: 695032 - DNA, 100 bp, Homo sapiens
ggaggggaaatggctgccgaaaacaagccggaagcaagagtgagccatggagctacgtgtggggaacaagtaccgcctgggacggaagatcgggagcggg

SEQ ID NO: 695033 - DNA, 76 bp, Homo sapiens
agccgctgtacagattcatcaccacggtagaacacctgaaggagaagctcattagccaggcccaggaagtgagccg

SEQ ID NO: 695034 - DNA, 100 bp, Homo sapiens
cagagatcggcggagaccctcgaagtgcgcaaacttgacactcaccctgaccggctgcctctaagaatcaaacttcactcttgggagaaccaccaaaaga

SEQ ID NO: 695035 - DNA, 100 bp, Homo sapiens
acccggcctgggagaagcagcagcggaaagtgaccactgactgggaccttcagaagggcactggctgcactgagggccacacagggacctcagctgcagc

SEQ ID NO: 695036 - DNA, 75 bp, Homo sapiens
ctcaggggaatattctattggacaagtactcactatacaagtactggttgaacctgaccacttcaaggttgcagt

SEQ ID NO: 695037 - DNA, 75 bp, Homo sapiens
agacttgcttgagtgtttcagtgaaaaggagtatagcatcgtgatccagcagctctcaaatggcaaatgggtccc

SEQ ID NO: 695038 - DNA, 88 bp, Homo sapiens
caggactaagagaagtcacaaaacagcagatttcccaagagcagcggaaaatgatccagtcacagtgctgcctccatctagtacaaaa

SEQ ID NO: 695039 - DNA, 75 bp, Homo sapiens
cggagctgtgcgagagcctcctcacttgggacttcagaaatgggcttgggaaccagctgagttcaggatcccaca

SEQ ID NO: 695040 - DNA, 50 bp, Homo sapiens
gaattacactgtgatacgactgactgtgaatctggattgggaaagtcgac

SEQ ID NO: 695041 - DNA, 51 bp, Homo sapiens
aggcctccccagccacatggaactactatggaaatgatgttagacaaaaag

SEQ ID NO: 695042 - DNA, 100 bp, Homo sapiens
ttctgccgtgattgtcagtttcctgaggcctccccagccacgctttctgtacagcctgcagaactctttgtgtccctggtgatgttggaacattaatgat

SEQ ID NO: 695043 - DNA, 73 bp, Homo sapiens
gtgggtatggtcctgcccacatgaacagatatcctgctggatgacattgtccttacccattctctcttcctcc

SEQ ID NO: 695044 - DNA, 90 bp, Homo sapiens
aaggattccaagtaactcttatttgggaatcctgcggggaaggcagcatgaaagtcctggaaaagaggctgaaggacatggggttccagt

SEQ ID NO: 695045 - DNA, 90 bp, Homo sapiens
tgcttttacacggttttccaacatccagctacgactggtacaagggtctccatctgttgtccaaggctggagtgtagtagtgctatcaca

SEQ ID NO: 695046 - DNA, 83 bp, Homo sapiens
gcgctctggctgtgctgcgcggcccccgcgcatgggacctcaggatggaaaccagcagcctgcaccgcccgagaaggtcggct

SEQ ID NO: 695047 - DNA, 120 bp, Homo sapiens
cactatatcagataagcttgacattacagccaagatggtgctgtcccagagacaacgagatgaactgtttgatggtgatgagctcaccacagatgaaaggatacggtccctggctcagcg

SEQ ID NO: 695048 - DNA, 82 bp, Homo sapiens
cacgactggaggcacaaggaggacgccggcgtcttctgctcaggtcaaaatgcagatcttcgtgaaaacccttaccggcaag

SEQ ID NO: 695049 - DNA, 98 bp, Homo sapiens
tggattgctgcaaggctgagggacgagaacgaggtaaaatgtccagtgatcgagctttgaggaagcagcaacagttgaacaaccttgtctatgtggta

SEQ ID NO: 695050 - DNA, 75 bp, Homo sapiens
tcttgccaaaaacctttggacagtccaatgtcaacattgcccagcaagtggttggagcaaaacgtcccactcact

SEQ ID NO: 695051 - DNA, 100 bp, Homo sapiens
gaagccactggagaaaaacggccaagaggcagacctaggaaatggatcacaaaatttgtccaggatagacatagagctagaagaaacagacttcgtaaag

SEQ ID NO: 695052 - DNA, 75 bp, Homo sapiens
tatgtttttcaagggacggatacaacgactagaggcatcaagcatgatggaaccatgtgtgatacctgccgccag

SEQ ID NO: 695053 - DNA, 100 bp, Homo sapiens
gcggactgcagccgcgagctcctggaggcggcgggatggaggcggcggccggtctcggtccagctcgacttccagctcaggctccagcaccagcactggc

SEQ ID NO: 695054 - DNA, 100 bp, Homo sapiens
cccccgcctgcctccgccggctacagcgggaagagcggttggcatggattacagaagctgcatcctgagacccggcggttccgaggatgccagcgccatg

SEQ ID NO: 695055 - DNA, 98 bp, Homo sapiens
tgaacatgtatttaaccaagttccaacaaaagaatgctgccgcagtcaccttcaggccattcagaggaggaaagagaggggaatatgaagtcagccaa

SEQ ID NO: 695056 - DNA, 75 bp, Homo sapiens
tggaacatacaacacacacacttttagtaggagagtcagagggcaaggagttggtgcacacctacaagggctgca

SEQ ID NO: 695057 - DNA, 100 bp, Homo sapiens
ggagggcacattccttttcacctcagagtcggtcggggaaggccacccagcaaagaatggccgagtggattctgaggaccggaggagccgccactgcccg

SEQ ID NO: 695058 - DNA, 100 bp, Homo sapiens
gctgtaccagtacacggcccacgttgccaggtacttacaatttcatcagaaattcctaaaagaattcgaagtgccttaaaaaatgcagaagaatcaaagc

SEQ ID NO: 695059 - DNA, 115 bp, Homo sapiens
gggcgccccgcagccccccaacatcctgctcctgctcatggacgactaagactttgaccccgacgcaggcttcagtgattgccgcggatcagaagcctgagcactttggctcgag

SEQ ID NO: 695060 - DNA, 74 bp, Homo sapiens
gggcacatatgtccaggaggagtctccggaagaatgttggctcaattaagaaacatcagggagataaattcaac

SEQ ID NO: 695061 - DNA, 82 bp, Homo sapiens
gcccagagactgctgagcccgtccgtccgccgccaccacccactccggacacagctgtcacgaccggaggggggactcgcag

SEQ ID NO: 695062 - DNA, 98 bp, Homo sapiens
caagtgcagcgcctgtaatgtttggcgagtctggacggcccccaagttacatgaactacctgctagactcacaccccagcaaaaatattgatgtcccc

SEQ ID NO: 695063 - DNA, 100 bp, Homo sapiens
gcaagaaaagcctctgggagcagaagggaggctccaagacctcatcaacaattaagtcaccaggagactaaagtccatcaaaaacatccagaaaattacc

SEQ ID NO: 695064 - DNA, 75 bp, Homo sapiens
tgcattcctaccggtgtgacaggtggcagaactggtgaagccattgtagatgctgcgctgagtgctctgcgccag

SEQ ID NO: 695065 - DNA, 75 bp, Homo sapiens
gaaaatgcagttagaacctgtcacctctcagttctttaaggaaaaacagtagtgctctgcatagtttactgaaac

SEQ ID NO: 695066 - DNA, 90 bp, Homo sapiens
gatcagaggtagtcggacctttcccgctggcgcgcagcctcagctaggtgactaataaaggtaccagaagaatatggctgcacaaatacc

SEQ ID NO: 695067 - DNA, 82 bp, Homo sapiens
cttggactgagtcctgcaggacacagatgttgtaaattttgatgacatagcttcctcagaaaacttgcttcatctcactgca

SEQ ID NO: 695068 - DNA, 100 bp, Homo sapiens
aggattctgtttcactgaggccatctatccgatttcaaggaagccaagggaattcagtttgcctgttctgtatgcaagttccgtagctttgatgacgaag

SEQ ID NO: 695069 - DNA, 75 bp, Homo sapiens
agaggaccccggtacatctgaaagccgggaaatgcacatccgggcaacgtttgatcctgacacagggctgttgat

SEQ ID NO: 695070 - DNA, 75 bp, Homo sapiens
gcagctttggataatgacgacagcaacccgaagacagggaaatttaggtggcctgtggattaaaccacactttgg

SEQ ID NO: 695071 - DNA, 90 bp, Homo sapiens
gcggcggcagcggagagcgagagaggggagcagatcctgaacttcacagatgagctcacaccacccagattgataaactggcctatctca

SEQ ID NO: 695072 - DNA, 98 bp, Homo sapiens
agagatgatggacccagagctagactacaccctcatgagggtctgcaagcagatgataaagtctcttgcatggcaccaagaatgttaccaattcaagc

SEQ ID NO: 695073 - DNA, 100 bp, Homo sapiens
gcttccttatgaactgactgaaggggacatcatctgtgtgttctcacacatgttcagctcttgacacaaatccaccttcttgccacctgcaaccccaatc

SEQ ID NO: 695074 - DNA, 91 bp, Homo sapiens
ggccgctggattctgaggaccagcagatggccagtcacgagaacccaggtggggaagaaaacatgacagaaacagatgccttctataaaag

SEQ ID NO: 695075 - DNA, 90 bp, Homo sapiens
ggagatgctagagaatgatcttctgcaaagccatgaactcatgcaggatatggctttagttgcccctgaagctccttcagaacaagccag

SEQ ID NO: 695076 - DNA, 100 bp, Homo sapiens
cgcggctcccagccacaccaagttcagcgccgcgcggtgaggttctctagtccacgctcgcagccatgccgtccaagggcccgctgcaatcggtgcaagt

SEQ ID NO: 695077 - DNA, 146 bp, Homo sapiens
ctcttcaccaaggagactgcaggctacctcaggggccgtccccaggacactgtccggatcttccctccctggtgacaaggcaactgtatgagccactagttatgcagctgattcactggttcactaacaacaagaaatttgaaagt

SEQ ID NO: 695078 - DNA, 97 bp, Homo sapiens
tttacctgcttcccaatcccactgatgaggatcagcccatgggaagacactgatcaaggtggcagaagctgaaaagcaactgggagccgcggagagg

SEQ ID NO: 695079 - DNA, 74 bp, Homo sapiens
gcggcgcagaggaggagcttgctgcagagtgaaatcatcgagttccccatcctaaagctaaatggccggaccat

SEQ ID NO: 695080 - DNA, 75 bp, Homo sapiens
atcagcagagaccaccgaagactgcatcgccaagatcatggtcaagaacttcactgaggtccaccctgactacgg

SEQ ID NO: 695081 - DNA, 101 bp, Homo sapiens
cttccaaccaggggctgagcttctgcgctgtggagaagccaggcagcctgcttctgcaaagtggtacgatcgaagggactatgtcttcattgaattttgtg

SEQ ID NO: 695082 - DNA, 49 bp, Homo sapiens
caatcgtgaaaactatattcacagcaaaccagtccagctacgggggccc

SEQ ID NO: 695083 - DNA, 99 bp, Homo sapiens
caccaacgcggtgcgcgaccgggagctggacctccgggggaaatcctcattgacgattcaatttgttgaaggccaatttgtggactcctacgatccaac

SEQ ID NO: 695084 - DNA, 82 bp, Homo sapiens
aactactttggattcacccacagcggggcggcggcggcggcggctgcggcccaatatagcgtccgtctccaagagagtatga

SEQ ID NO: 695085 - DNA, 51 bp, Homo sapiens
tgatcctgaagtacagaaagacattatgaaaactgcctccgaaagttctat

SEQ ID NO: 695086 - DNA, 88 bp, Homo sapiens
accacattgccaagttatgcagccttaaacgacttgttctctatcgaacaaaagtagagtaaataacagatgcgggtgaaagatccaa

SEQ ID NO: 695087 - DNA, 82 bp, Homo sapiens
cgtggtgtgcaccggctggctgaggaaatcgcctcccgagaagaagttgaggcgctatctccctgtgctgtcaggaatctac

SEQ ID NO: 695088 - DNA, 100 bp, Homo sapiens
aaatccatagatggaaaagatgctgctcctgctaaggccaagccggctgaagctcctgctgctgcagccccaaaagcagaacctacagcagcggcagttc

SEQ ID NO: 695089 - DNA, 74 bp, Homo sapiens
agtcttcaaagaaagggaaggggaaaaagaagcagtatctatgcccatctgggtaattccagaattgattggcc

SEQ ID NO: 695090 - DNA, 75 bp, Homo sapiens
ggacagcgacgacgcggaggcagagaagggaacgcccggcccagccccggaaaggaaaacctcttcagcgcaagg

SEQ ID NO: 695091 - DNA, 146 bp, Homo sapiens
tttctacctttattatgatgtacagaacacactgtcagagaatactggacactgtaataagagccaactttgatgagccgtggatacagaaatctctgcaggcaagttgctccagagcatattgcaggacaagcctgtaacgaata

SEQ ID NO: 695092 - DNA, 75 bp, Homo sapiens
actccctgtgccttgcttggagctgacgccgacggatgcctttgaagatgagaaacccccaaagaagagccttct

SEQ ID NO: 695093 - DNA, 100 bp, Homo sapiens
agcaaagacgcgcgtctacagggacacagctgagccaaactggaacgaggaatgggaaaaggacagcacaggatgccctccaaggatgagctggtccaga

SEQ ID NO: 695094 - DNA, 99 bp, Homo sapiens
aagagttaaatgccctcaagtcgacaggggatgggaccctagtgatcatgaagttccagaaccagaatcagaaatgaagatgagactaccaagacgagc

SEQ ID NO: 695095 - DNA, 100 bp, Homo sapiens
ctgaaattgatagcagtttgaatggggacctcaccaagcagcttcctatcatggtggtgggggagcacaaggacaaagtgattcagtgcagatggcacac

SEQ ID NO: 695096 - DNA, 100 bp, Homo sapiens
ggcctggaagtgagaacgtgccaggccctttgagaggttactgtcaacagtgagatggtttggcaatgaggagcagcagctggcgtgggccaagcgggag

SEQ ID NO: 695097 - DNA, 100 bp, Homo sapiens
ctctgcacagcaagcccaggctcattatcaggccttcatggtgaaacacctcttggagtatacccaggcaacagagtctaacctgcagtacagcttgttg

SEQ ID NO: 695098 - DNA, 75 bp, Homo sapiens
tggactcatctgtcattcaaaggaaaaaagtagctgtcattggtggtggcttgaatgccgggtctaagttgtaga

SEQ ID NO: 695099 - DNA, 108 bp, Homo sapiens
caggatgggatccggctcctccagctaccggcccaaggccatctacctggacatcgatggacgcattcagaaggtttacccaaggtccagcctagcccctaggcacca

SEQ ID NO: 695100 - DNA, 99 bp, Homo sapiens
ttttgtgctgctcacagtcaccgctgtcattgtggctgccactggtgacatgccaacttaccagatccgagctcctactgctgctttgccacagggagt

SEQ ID NO: 695101 - DNA, 82 bp, Homo sapiens
caatcttggaacagcacccccttctttaaggagcagtatagcatcaagttctagaggaattgggagccattgcaaatctgag

SEQ ID NO: 695102 - DNA, 134 bp, Homo sapiens
cttgcacagtccttctgagattgttaagcagattacttccatcagtattgagccaggagttgaggtggaagtgatagagggcaccctgcagtgcccggaatctggacgtatgttccccatcagccgcgggatcc

SEQ ID NO: 695103 - DNA, 82 bp, Homo sapiens
cctggggctggaaattgcgctggaccgtcgccttgctcctcgccgcggcggggactgcagtaagactttgaccccgacgcag

SEQ ID NO: 695104 - DNA, 100 bp, Homo sapiens
cctgagcttgacacaattgtccctttggaatcaaccaaagcctacaacatggtggacatcatacactctgctcagcttgtcaatcggaaacagaaattag

SEQ ID NO: 695105 - DNA, 100 bp, Homo sapiens
caggtcccggatgttgcggacagtatgaggcaagcgcagggggacggggaccagcagctgtcgccgccgctctcagacagatgtgctggtgctgagctgt

SEQ ID NO: 695106 - DNA, 100 bp, Homo sapiens
atatgaatgaccctgaagcagtagtatccccaggcatagcgcgctggctaggactccagtaccgtgaagggaggcagtgagagcagacatctgtgcctca

SEQ ID NO: 695107 - DNA, 75 bp, Homo sapiens
ttccactctcctttccaaacctttgcagctgccctttgttaaagatgcttcaggactgccccaaggcccgcaggg

SEQ ID NO: 695108 - DNA, 51 bp, Homo sapiens
agaagataaagttgacagcagaggcagagataaaagcttcgatgatgaaga

SEQ ID NO: 695109 - DNA, 97 bp, Homo sapiens
agaaattgatcagcaacaactaactcagcagcaacttaatggaaactagggaggtggggaagacagggctccagctaccacaggacgggctctgggt

SEQ ID NO: 695110 - DNA, 83 bp, Homo sapiens
ccgggccatggccgccgccgatgccgaggtcagagtggtgctgggaacaactgggccaaggggcactacacagaaggcgcgga

SEQ ID NO: 695111 - DNA, 83 bp, Homo sapiens
gagaactggagaagttaaatcagtccacggatgatatcaacagacgggagactgaacttgagcaacacagtcactcctggcgg

SEQ ID NO: 695112 - DNA, 100 bp, Homo sapiens
gtaaagatggaaaaccagttattgaatatcaagaggaggagttgttggctaccacatactgttgattgtgatgaaatgccagttgaagcacctgtcctgc

SEQ ID NO: 695113 - DNA, 96 bp, Homo sapiens
cgcggggaccgctgtgctctcggtgcacagcgacttcaccgcggcagccaccaggggcgccatggccgtcattgacggcaacgtgatggccatcaa

SEQ ID NO: 695114 - DNA, 100 bp, Homo sapiens
ccgcgccttcggaagcccgttcggcctggaggagccgcagtgggtcccggacaaggaggaacctagaaagattgtacaatgaatggtgattctcgtgctg

SEQ ID NO: 695115 - DNA, 100 bp, Homo sapiens
gctcgcctgcatctactcggccctcattctgcacgacgatgaggtgacagtcacggtatttggcaccaatgtgatggtgacagtggccaagtccttcgag

SEQ ID NO: 695116 - DNA, 74 bp, Homo sapiens
agttttggatgatggagacagcaacccaaagagaagggaatttagcctgaaaaaggactgcgcggactgacttc

SEQ ID NO: 695117 - DNA, 75 bp, Homo sapiens
gttcatgggcgagggaacagatgagaaacccggcaatgaaagctggagtgcaatggcacaatctcggctcaccgc

SEQ ID NO: 695118 - DNA, 98 bp, Homo sapiens
acgtctcgtccacgacctccctaggtcttgatgcagaactttattatgtgagaaatgaccttattagtcactacgctctatcctttagtctgttagta

SEQ ID NO: 695119 - DNA, 80 bp, Homo sapiens
ttccgccgcacgtggattcagcgcgatgcccaaatccaagcgcgacaagaaaggaataaatccagatctactactgaact

SEQ ID NO: 695120 - DNA, 75 bp, Homo sapiens
ctgcagctggcacaggaggcaattgcagctgtaggagaaggtggcagatgccgaatataccaactctcctttggt

SEQ ID NO: 695121 - DNA, 87 bp, Homo sapiens
tgtcgaatgctcaagtgcaatgtcaagagctttctgggaggtgttccctgtcttggctgcaaagcactgtatcatgcaggccaatgc

SEQ ID NO: 695122 - DNA, 74 bp, Homo sapiens
cagacactgcaaatgaagctctcgaggctgctaagagactaaaataatcatgggccagactgggaagaaatctg

SEQ ID NO: 695123 - DNA, 92 bp, Homo sapiens
gagtggttgtgtggtcgcgtctcggaaaccggtagcgcttgcagcatgagtttgccttctgccaggtggatgcctccatcgctctggccctg

SEQ ID NO: 695124 - DNA, 100 bp, Homo sapiens
ttctgagacccaggttggggacagtgccggaggggcctcctctgctgcagacatctgcattcttgttatttaacacgggaaggaggtgacttcgcctgtg

SEQ ID NO: 695125 - DNA, 99 bp, Homo sapiens
ctacaacccgcagtgggcccatcttccgcacgacctcagcaaggcaacctgaaaggaagcggagagatgtcatgcaagtggccaacaccaccatgtcca

SEQ ID NO: 695126 - DNA, 97 bp, Homo sapiens
gtttgggctgtatgttagcaagcatgatctttcgaagggaaccattcttccatggacaggacaactatgaccagatcacgatggtgggtgacctgaa

SEQ ID NO: 695127 - DNA, 83 bp, Homo sapiens
tggaataaaaacagagtccgatgaaaggaatgggtctgggaccttaacagggagccatgagccacctgagctgaagattccct

SEQ ID NO: 695128 - DNA, 100 bp, Homo sapiens
cttggccaggctggccccgagcggaactggagaaagctgaggtgcggagcttgttaacagacgtgcatgcctggcctgtggactgtgcagtaagtgttga

SEQ ID NO: 695129 - DNA, 98 bp, Homo sapiens
gtgtctcatggagaaccactctgcgcttctctgaagtagctttggaaagtagagaagaaaatccagtttgcttcttggagaacactggacagctgaat

SEQ ID NO: 695130 - DNA, 75 bp, Homo sapiens
cgaggctgaagccattgctccacaggttggcaatgcaggagagcctgtcctgcctccagtccacctgtggccttg

SEQ ID NO: 695131 - DNA, 100 bp, Homo sapiens
cttccaccctcagctccaccctcagcatcagagcggagacttcagggagaccagagcccagcttgccaggcactgagctagaagccctgccatggcaccc

SEQ ID NO: 695132 - DNA, 98 bp, Homo sapiens
aaaagtccactgcacatgacagctgtccatggaaggttcacacggtcacagaccctcattcagaatgttgatgcggatgaaattaaaaggctaggaaa

SEQ ID NO: 695133 - DNA, 50 bp, Homo sapiens
agcggagggagccccagacacgaaacgcttcgttaagggactcaggcagt

SEQ ID NO: 695134 - DNA, 97 bp, Homo sapiens
tgagcgtatcatgttaaagatgagcgggtggcagcgacagagccaaaatcagagctggaacctgaggagagaggttagagcagccagcgggtacaga

SEQ ID NO: 695135 - DNA, 100 bp, Homo sapiens
ctctcctctctcatccgcacgcacaatatcgggcagaaagataatcacgcaagtccgcatgcaacaccatcgactcttcatttcccgacatcacccatta

SEQ ID NO: 695136 - DNA, 49 bp, Homo sapiens
tcagaagcagcttcatttaaaagtaccacaaagcctgctccacacctgg

SEQ ID NO: 695137 - DNA, 51 bp, Homo sapiens
ccaggtttgaggcatcttcagagcttgcaagaaaatatgatttcctcataa

SEQ ID NO: 695138 - DNA, 75 bp, Homo sapiens
gggtcaagtcgtgttctgatcactactgacttgttgcatttaaatcaaacggtattgagatggattgggttatga

SEQ ID NO: 695139 - DNA, 83 bp, Homo sapiens
agacgcgccagctggagctgaaggccaagaactatgccgatcagaccggagtcagagtggtggctacagtgaccggagctcgg

SEQ ID NO: 695140 - DNA, 100 bp, Homo sapiens
gaggcaggaggtggagcaaaacacaccaagcctggtgccaatcattgacaatattatggaaactagcagagttgttcacatcatggattttcaacgaggg

SEQ ID NO: 695141 - DNA, 74 bp, Homo sapiens
gctgctggtgccaagcgtggacagaggaacctcgaggtgcccacgagtgtattcggggagaagcttcgagaaca

SEQ ID NO: 695142 - DNA, 50 bp, Homo sapiens
tcccaccgcacgttcagaagtcggtttgtcccatgaggagcacccccata

SEQ ID NO: 695143 - DNA, 82 bp, Homo sapiens
ggctgctgaggctgcgaggaggaggaggaggaggaggtatcagaagcatgtgcacacgtatcgcattctgcctgatggagaa

SEQ ID NO: 695144 - DNA, 83 bp, Homo sapiens
caaaatgcaaaaaaggaggccaaagactttgtttttagaacttcagccataaaaatgggcagaattttccttgatcatatcgg

SEQ ID NO: 695145 - DNA, 97 bp, Homo sapiens
gagactcagagtgctcctcattaagtgctgtctcccccagcgaatcggtggccatgatctctagtcttccgtgtgtgctaagatcgtgcagctcctg

SEQ ID NO: 695146 - DNA, 90 bp, Homo sapiens
cctgtaaaaattgacaagtgggatggatcagctgtgaaaaactctttggatgattctgccaaaaaggtcatcaagccaacgttcgcaccc

SEQ ID NO: 695147 - DNA, 50 bp, Homo sapiens
agacggttgaaactagagatggacagggtccgcaagcaggtggtgaacat

SEQ ID NO: 695148 - DNA, 83 bp, Homo sapiens
cccgcgggtgctgaaaactgtcaagggttctctataaaggtgtcttaaaaaggttgattttgttatatgagcctttgtttgga

SEQ ID NO: 695149 - DNA, 83 bp, Homo sapiens
aacgacaggcgcctccggcccatttacggaaatttgcgagaatccccgatttatcattgatggagccaacagaactgacatct

SEQ ID NO: 695150 - DNA, 75 bp, Homo sapiens
acagcctggagaagagcgaccagctcactaagaacatggttcctgatgaaaagttatgatcaggtgcactcagga

SEQ ID NO: 695151 - DNA, 75 bp, Homo sapiens
ccgacgaacatttctgggtgacactcaacaggattcccgccaaatttgtatcctactgtggggcttcaaacacca

SEQ ID NO: 695152 - DNA, 100 bp, Homo sapiens
ggcccggtatgaacgggagcagtatgtggaccgagcccggtactcagccttttaaaaactggaggcgccgggaactgtgtacgcagctgcggcagtggca

SEQ ID NO: 695153 - DNA, 100 bp, Homo sapiens
atatgaaagtgattttgatagaagactttcgagagtgtatacaaatgacaggttggcttttaggacactagtaagaaaatatagttgtgatctgtgttac

SEQ ID NO: 695154 - DNA, 82 bp, Homo sapiens
ctctaagcccggagcccggcgctttccccgcaagatggacggtttcgccggcagtctcgatgtgttcagagcaacattgttt

SEQ ID NO: 695155 - DNA, 87 bp, Homo sapiens
acattttctttaacatttcctgaagaactgtctcctggaattacattgaatatacaggatcaagtagatatagctgttcaagaactc

SEQ ID NO: 695156 - DNA, 75 bp, Homo sapiens
ggaaccggaccccggcagctaaatgagccgtcagactgctacagcattacctaccggtacctcgaagtgtccacc

SEQ ID NO: 695157 - DNA, 87 bp, Homo sapiens
gagtcatttccttcgtacccacagtgcttcatgagagtatttggtatgctgttaggagacaccattattttggataatctggatgcg

SEQ ID NO: 695158 - DNA, 100 bp, Homo sapiens
tagaaattccccccgaagaagactcccccacatctgggattttttatcaagcagaaatgcatcgaacaacgagaatcaagatcactgagctaaatcccca

SEQ ID NO: 695159 - DNA, 100 bp, Homo sapiens
ttcaagatccgcatggagcctgacgagacgctggttgtcttcttgcctgccctgtgtcgtaaaatgggggtcccttactgcattatcaagggaaaggcaa

SEQ ID NO: 695160 - DNA, 95 bp, Homo sapiens
tcttatgttgttgcagacatggaagaaatgctgcctaggtcctagaaacactctgcctgcagttgaacacaaagacctggaggagactcccacct

SEQ ID NO: 695161 - DNA, 90 bp, Homo sapiens
tgacctgcatgtactgggggattcgcagggaggatgtcgggacaccccggaagctgggaaatggggatcatggaagctgataaagatgac

SEQ ID NO: 695162 - DNA, 90 bp, Homo sapiens
gcccgccgctccgccgcccgcaggctccggcttccgtcccggacagagcccgtggtcgcgcagaaagtctttatctcttgcaaggttcag

SEQ ID NO: 695163 - DNA, 75 bp, Homo sapiens
aaaacagtccagatccccgtgtatgactttgtctcccattcccggctgtctcctggttcggacatctatgtgacg

SEQ ID NO: 695164 - DNA, 100 bp, Homo sapiens
cccggcctgtgatcccaccagtatcaactcctggacaacccaatgcagtgttgcaccaccagcaccaccttccagtagtcagctctgccgttacttccct

SEQ ID NO: 695165 - DNA, 83 bp, Homo sapiens
ctcagtttccccttgagcccctcgctcaccaggcccaggcaggagggacgtgctgctggcggaaggagagttttacatggaag

SEQ ID NO: 695166 - DNA, 100 bp, Homo sapiens
tgcccggcgacactgcacccatcccggctgcttttgctgcgccctctcagcttcccaagaaagaccatggaatccctaaatggtggcaaaccattcctgc

SEQ ID NO: 695167 - DNA, 75 bp, Homo sapiens
ctcagcagcttggacacagcccactgcagaggggtgcccagaggatgcgacatcctcatcgtctacagcccggat

SEQ ID NO: 695168 - DNA, 76 bp, Homo sapiens
actttgggcgtcccattgccatgggtagggctctacttcactgggcctgtgatcgaggacataaggaactagtcac

SEQ ID NO: 695169 - DNA, 100 bp, Homo sapiens
cgggatttgggtcgcagttcttgtttgtggatcgctgtgatcgtcacttgaacactctgctccagccaaggtggtgagggcagctgttcctaaacagcgc

SEQ ID NO: 695170 - DNA, 97 bp, Homo sapiens
accaacccgaaaacattgctaggagctgtggagtccaagtgtgactgccaagaggaatccagcaaagccaaaaagcccaagcatgtagccctgcccg

SEQ ID NO: 695171 - DNA, 96 bp, Homo sapiens
acacagccaccccattctgcaacaggcagctaagtgatattcaaccctatgaaaagataaaggccaggggcttgcctgataatatatcttccgtgt

SEQ ID NO: 695172 - DNA, 96 bp, Homo sapiens
tgtacagagatgtgatgctggagaactacagccacctcgtctcagtggagccagcccctgggcaacaaagtggaaatggagattgtgagcatgttg

SEQ ID NO: 695173 - DNA, 88 bp, Homo sapiens
ttggtcaaatggatagccctacacagatatttgagcatgtgttcctgtttcagtcattcagtcagtaccgctgtaagactgccaagaa

SEQ ID NO: 695174 - DNA, 51 bp, Homo sapiens
cagagtcggcacctgaaggacatggagaatgtatttgctgcagttggaagg

SEQ ID NO: 695175 - DNA, 75 bp, Homo sapiens
tgcccttagccgaagagttgaaaaacactggcgtttaatagaaaatggtcagcttgaaattgtgacaggtggctg

SEQ ID NO: 695176 - DNA, 98 bp, Homo sapiens
tgctgtatccgcatcgcccttcctgcccctcgaggctcaggaactgtgtcagagatggctttggattccccgttctgtgtgctgctgtctggctcctg

SEQ ID NO: 695177 - DNA, 100 bp, Homo sapiens
cccgcccctgtctcccgctccgcagccccgggcacggcggaggcagcggagccctgggccatcggtgtcagcttcctctggtgcaaccagcaagtcttcc

SEQ ID NO: 695178 - DNA, 100 bp, Homo sapiens
atattactggcatcttcaatctgaacaagttgaaatcatcgcagaaggataaagttcgtcagtttatgatcttcacacaatctagtgaaaaaacagcagt

SEQ ID NO: 695179 - DNA, 75 bp, Homo sapiens
acagctaccgcagcatgagcgaaagctacacgctggagaaccgcatgcacgagtctctcatgctcttcgactcca

SEQ ID NO: 695180 - DNA, 97 bp, Homo sapiens
catggaaaacaaccgaacaggacctgaaagagtattttagtacctttggagaagttcttatggtgcaggatatcaatgcttacaattgtgaagagcc

SEQ ID NO: 695181 - DNA, 75 bp, Homo sapiens
tcaaactggatatgaatggcagtgactctggaccaaggatggattggatgctttggtatatgatttggattttcc

SEQ ID NO: 695182 - DNA, 100 bp, Homo sapiens
agagggaagacacgcggaaacaggtcagcagatccggaagctcatcaaagatgggctgatcatccgcaagcctgtgacggtccattcccgggctcgatgc

SEQ ID NO: 695183 - DNA, 50 bp, Homo sapiens
cacacctttctgctttatctggacccagatgatgtggtaccagttggcca

SEQ ID NO: 695184 - DNA, 50 bp, Homo sapiens
gactcacggccgggacactcagggcaggttcaaaatcaaaggaagcccag

SEQ ID NO: 695185 - DNA, 82 bp, Homo sapiens
ctgcttatggcggcgctggagagggggcgctgagctgttggggcttgggcactgtttaaaggaaagttccgagaaggcatcg

SEQ ID NO: 695186 - DNA, 88 bp, Homo sapiens
gaggggcctttgtccgtgttcggtgaccgcagcactggggaaacgatccgctcccaaaacgcttccaaactacaaaaactttaaaggc

SEQ ID NO: 695187 - DNA, 82 bp, Homo sapiens
cggcgtgggagggagcctctgacggcgtctgattggctctaccagtgcacctggacagggaggaatcctggctcagcgggag

SEQ ID NO: 695188 - DNA, 82 bp, Homo sapiens
ggagcgcaaggtcgccctcaaggccatgatcaaaacgggttgtgtccactgtggtccccgactctgcccacaagctgttcat

SEQ ID NO: 695189 - DNA, 75 bp, Homo sapiens
gagaccaaggtggtggatgtcaagagtggaatgttggctgtccgtgaaaaccgctacattgtcctggccaaggac

SEQ ID NO: 695190 - DNA, 102 bp, Homo sapiens
acgcctgagagccgagcccgcgctgaccggggcccgggccggatgggcgctgcgggccggggcgcggaccgcggagcggccggtctcactctgtcatccagg

SEQ ID NO: 695191 - DNA, 50 bp, Homo sapiens
gaaagatagtgttcagttgctgttttctgactcagaatgtgccaaaaagg

SEQ ID NO: 695192 - DNA, 82 bp, Homo sapiens
cgggccgcgaggacgaggcggcgccgccgggctgtggaggacaagatcgcagaggaaggtgggcggcgggagtgcccagccg

SEQ ID NO: 695193 - DNA, 82 bp, Homo sapiens
gcaagcggagctcccccaagagccggaaaggtgttggataaatacaaccctccagaccacttcctccctgagtcctacacct

SEQ ID NO: 695194 - DNA, 75 bp, Homo sapiens
ctgaagactaacattttgtgaagttgtaaaacaggtctagtgacggagcccgcgcgcggcgccaccatgcggcag

SEQ ID NO: 695195 - DNA, 83 bp, Homo sapiens
gtctttagaagatgaattcctgaaccagaggtacccaggtgcctggaatacttattaagaaacgatgcaaatccagggatccg

SEQ ID NO: 695196 - DNA, 83 bp, Homo sapiens
tgaatcctgcggcagaagccgagttcaacatcctcctggccaccgactcctacaagctatccagtcagttcgctgctattccc

SEQ ID NO: 695197 - DNA, 83 bp, Homo sapiens
ctggcctcagcaacctgacaattctgtcgtgtcccgaacaagttgaaatcatcgcagaaggataaagttcgtcagtttatgat

SEQ ID NO: 695198 - DNA, 82 bp, Homo sapiens
caagccccacgctggccggacagggccgcctgtcgccgggtttggtgcacctcgatttggaggaagtagggcagggccctta

SEQ ID NO: 695199 - DNA, 76 bp, Homo sapiens
cggacatctgctttatatttctctcagaccattcccatcagtgagcattacagggtcctcattctccatttgaaac

SEQ ID NO: 695200 - DNA, 50 bp, Homo sapiens
ccccaaaggaaggcttcggtgactcagatgtatcggcaagcagtgtaaac

SEQ ID NO: 695201 - DNA, 74 bp, Homo sapiens
gccgatcgccgcggggcagttcgggccggctgtcctggcgcggttcgtgagccacacatctccccacaccaagc

SEQ ID NO: 695202 - DNA, 83 bp, Homo sapiens
tctggatgcgggagtcatcctgggcagaaggactgaggaatactcccccagttgcaagaggcgcaggaccgtggaagacttca

SEQ ID NO: 695203 - DNA, 100 bp, Homo sapiens
ctcagacaagttctggaggagatgaaagctttgtatgaacaaaaccagtctgatgtgataaaagaatcagagtgtctcaacccttgacaagaggaccaag

SEQ ID NO: 695204 - DNA, 100 bp, Homo sapiens
aggactttccttacctgtttttccagctcacccactgccagcagagttaagtgggcagaccaacatccacctcagcaaaaacttcttcctgacgaatcgc

SEQ ID NO: 695205 - DNA, 100 bp, Homo sapiens
aactatgtacttggaggatcgaacagcctatgttgtccttggccagtttctggtgctaaagaaagatgaagacctcttccgggaatggctgaaagacact

SEQ ID NO: 695206 - DNA, 50 bp, Homo sapiens
acggtctctataagaagatgatcgatggggagatcgacctgaaactcctc

SEQ ID NO: 695207 - DNA, 83 bp, Homo sapiens
gaagtcttgaagaatagagccataaagaaagcaaagcgcagaaatgttggatttgaagaattacatgaatgacagtcttcgaa

SEQ ID NO: 695208 - DNA, 75 bp, Homo sapiens
tagggacaaacctatcacatttactcagagtacaggggctcaggtccaggtggcaggggatatgctacccaactc

SEQ ID NO: 695209 - DNA, 100 bp, Homo sapiens
ttcacagtcctgtttgagtctcagttcagtgttggcagcaatgagcttgtgttccaggtgaagtgtgccgcatactaagtccctggagagccgcatcaag

SEQ ID NO: 695210 - DNA, 98 bp, Homo sapiens
ccggggaggccagagcgtggagcgctgcgcggcgcggcggccgggccctcgagacggggacggtgtcatggagaaactccagctgggcccagagattc

SEQ ID NO: 695211 - DNA, 100 bp, Homo sapiens
tctgggtgtatatcaaacggcaagatgtccagtaatgtcccggcggatatggacaccagcagtgaaaacactgtggttcctccagaaacatatgtgaaag

SEQ ID NO: 695212 - DNA, 74 bp, Homo sapiens
agacggcctgggtgctggcgaagcggaggccggaggttaacacagaaatctgcctcctgggccatgccgcttct

SEQ ID NO: 695213 - DNA, 96 bp, Homo sapiens
aagaagttgcgaaggatccccaacggggaggccaacgtgaagaagcgtctacggtgacgtgcagcgcgtgaagatcctgttcaataagaaggagaa

SEQ ID NO: 695214 - DNA, 82 bp, Homo sapiens
agaacagcgccgtcaccagcagatctgaaatagctcaactcagtcaagaaaaaaggtatacatatgataaattgggaaagtt

SEQ ID NO: 695215 - DNA, 100 bp, Homo sapiens
acagactccaactgtacaagaggagagtgaagaggaagaggttgatgacaacaagaaactaggagaatgggtaggcctttgtaaaattgacagagagggg

SEQ ID NO: 695216 - DNA, 75 bp, Homo sapiens
cgctccattgccaaggtgaaggagcggctggagcccaggcaaaatcctgacagatgactttgcagacaaggaggg

SEQ ID NO: 695217 - DNA, 75 bp, Homo sapiens
aaccggacagtcatcaccatgggccgggatcacattctgattctgtccagaccaaaacgaagaagacgttagcca

SEQ ID NO: 695218 - DNA, 84 bp, Homo sapiens
agaagctgaattgcaggatatgatcaatgaagtggatgctgatggtaatggcacaattgacttccctgaatttctgacaatgat

SEQ ID NO: 695219 - DNA, 101 bp, Homo sapiens
atccgcgagttcctgcgcggctgcggggcttccctgcggctggagctgatgtagcccagcagttccagtatgctgtgcgggtgattggcagcaacttcgcc

SEQ ID NO: 695220 - DNA, 51 bp, Homo sapiens
gtgccctggtcaagcggctcaaaggggttaacacagaaatctgcctcctgg

SEQ ID NO: 695221 - DNA, 100 bp, Homo sapiens
gttgcttcacttagctctacaatcaacccatgtgagcagttgaagacatctcttcatcgaggactaacccctacagttatgcaatgagtactgaagaagc

SEQ ID NO: 695222 - DNA, 99 bp, Homo sapiens
ctagatgtgtctttactgaataaacaaggagggatgtttctaacccgagcaatgtctgatgatgaggagtctgatgaggaagctgtgaagaaaaccaac

SEQ ID NO: 695223 - DNA, 98 bp, Homo sapiens
gaagcgcggaagaaggcctccgtggaggccagattgaaggtcctgaggcacgtgaatggccaggatcagattgtgcccggcctgtacgcctgtgggga

SEQ ID NO: 695224 - DNA, 83 bp, Homo sapiens
cacagatgctaaaactgcagaatctggcaatggctgccatccggaagaaactggtgattgttggtgatggagcctgtggaaag

SEQ ID NO: 695225 - DNA, 118 bp, Homo sapiens
tgcacgagctgtggggggaatggggccagcgccctccggagagccgccgccggagccaggttttggtatcaaggttatgctggttcctaaaaagaactgggcagagttcctcttcctc

SEQ ID NO: 695226 - DNA, 100 bp, Homo sapiens
ctgcttttctggagcgcttaccagaatgagaacgtccacaggtctgtgaagccgcagattctgtcagtgtttggtgatattgcccttgctattggaggag

SEQ ID NO: 695227 - DNA, 51 bp, Homo sapiens
ctgcaaggtgctggtggagaaatgggcatctggcggatccccgtggacgag

SEQ ID NO: 695228 - DNA, 100 bp, Homo sapiens
gcaggtgacagtctgcatgtgcagttttcagtattggtaaaggttttcaaggtgtcatgaaaagatggggatttaaaggccagcctgctacgcatggtca

SEQ ID NO: 695229 - DNA, 90 bp, Homo sapiens
atggagaacccccagcttggagcgcaaggtcagactatgatgactggagaccgtctctggccagtttgcttcaacccattccattcccca

SEQ ID NO: 695230 - DNA, 75 bp, Homo sapiens
gaggctgcagcggtctgcgcgccgggagcgggggcgcgctggccgcgggcgagaaccactgtctctgatcaacgt

SEQ ID NO: 695231 - DNA, 83 bp, Homo sapiens
gccagtgcctcggccccaacgacaccaagcccatcaaggacatggatttgattgacatactttggaggcaagatatagatctt

SEQ ID NO: 695232 - DNA, 74 bp, Homo sapiens
ccgagaccgcggccgggaccgagggttcggagcgaccttggccgttggcctgaccatctttgtgctgtctgtcg

SEQ ID NO: 695233 - DNA, 51 bp, Homo sapiens
ctgtgtgtggattcagaaagtcaatttgtcccatgaggagcacccccatag

SEQ ID NO: 695234 - DNA, 75 bp, Homo sapiens
ccaggaccctttccttctctacagaaatgccagatgatgtaaagcaggagttaataaagttggttaaggcagcag

SEQ ID NO: 695235 - DNA, 100 bp, Homo sapiens
caacactggagtcatcaatgccccccagaagggtggtgacttcacacgccataatggcactggtggcaagtccatctatggggagaaatttgaagatgag

SEQ ID NO: 695236 - DNA, 90 bp, Homo sapiens
gactctcgtgaacatagctttaatagggtagtatatcaaatgtgctgttttctactcaagatccagttgaagatgcagtctttggcgaag

SEQ ID NO: 695237 - DNA, 82 bp, Homo sapiens
ctgccgtccccgctgctgtgcattggtccagaacacatattacataatggagccgggagacagactagggctggcttgatcc

SEQ ID NO: 695238 - DNA, 75 bp, Homo sapiens
agaaggccgtcctgcatcccacagcccccctctatgaccctgaggccaagcagataaacccactgccctacagcc

SEQ ID NO: 695239 - DNA, 80 bp, Homo sapiens
gagctcacttggccaatcatgatgaactaatttccaaggagtcagaaataccatcagaggaggggtactgtgactttaat

SEQ ID NO: 695240 - DNA, 78 bp, Homo sapiens
gagaggccgccgctgccttcaggtttccgaggaagagtttaaagaacgctgtactcagtgtgctgctgtctcatgggg

SEQ ID NO: 695241 - DNA, 100 bp, Homo sapiens
ggatcccttccaggaggttgtattggaaagcagtagtgtggacgaattgcgagagaaggataagcacattgaagaagtgcggaagaacaaagaatccaaa

SEQ ID NO: 695242 - DNA, 83 bp, Homo sapiens
ctttgcagactttggttggtggaggctgtggcaatggaacaggcttgagaaacagaacccagcttagactagaaagtctagaa

SEQ ID NO: 695243 - DNA, 101 bp, Homo sapiens
gaaagtcccaggatgactactgtgtcaagatcaccattgtggaccaaagaaaaacttgaaccaatcacacttcaaagtggtcagtctttagtacttccctg

SEQ ID NO: 695244 - DNA, 90 bp, Homo sapiens
ccaaaggcagggcaaggaaactggccacaagttgtggcagcactgcctgaaggtatgagaccagattctaatctttatggttttccatgg

SEQ ID NO: 695245 - DNA, 83 bp, Homo sapiens
caaacttgcagctgttcagaccgcgctccgccgaggtccaggagcacaacgggcacgtgttcgccagctaccaggttagcatc

SEQ ID NO: 695246 - DNA, 100 bp, Homo sapiens
acagttcatcaacatcaactacgtccctctgaagatgtgtggagttggctgttacgacatccctgtgtgatcccagaggaggggcagtagctgggcagaa

SEQ ID NO: 695247 - DNA, 83 bp, Homo sapiens
cggcgcgggcccggcggcggcggcagcggggtccgggtccggagcgccacaaatagcctaacatggcagaccagagacagcgc

SEQ ID NO: 695248 - DNA, 83 bp, Homo sapiens
aagaatgctgacaacgattggttccgactggagtccaacaaggaaggaactcggccggaaggtggtggtcgtacgctgtgaag

SEQ ID NO: 695249 - DNA, 90 bp, Homo sapiens
accattactgatgatgtggaggttaacagctatctttctgaaagaccacagcaagattctttcattcgtctcctcctagcctgggggacc

SEQ ID NO: 695250 - DNA, 100 bp, Homo sapiens
ctgacgggcgcccggccggctgcggtccgtgcggaggctgagccggccgcgggcgcgaccggaggcagctcgatcaagtcatccgccaaagaagcctgtc

SEQ ID NO: 695251 - DNA, 51 bp, Homo sapiens
ggggccagagggctcccgggctgggcagggctttgtgaaggatgtccatga

SEQ ID NO: 695252 - DNA, 49 bp, Homo sapiens
gaaaaaacacgctcagagataacctctgcagaaccttggcctgaaaatg

SEQ ID NO: 695253 - DNA, 90 bp, Homo sapiens
gttcatatccagttcctcaaccagatgacccttacattgcagacctccttcaagtggctgataacagatggatagctcccagttgatcca

SEQ ID NO: 695254 - DNA, 90 bp, Homo sapiens
gaggggagtggaaaggctctcagtgaaaaagatgatggacttccaaaaccagaactaatatcctggattgaacacgggggagagcccttc

SEQ ID NO: 695255 - DNA, 75 bp, Homo sapiens
cgcagtcgttcgcccaggctttggcccggcttccggaggtttttcgttggaatatacgttgcacatttatggcga

SEQ ID NO: 695256 - DNA, 96 bp, Homo sapiens
aatgcaagttcggttcccactgatggctcagatgatggtggtgctaccccagtacaggatgaacgggattcagggtcagacggtgaggatgatgta

SEQ ID NO: 695257 - DNA, 75 bp, Homo sapiens
gtatgatggcctggcgacccattcaggcacttatggccatttcagccaccgaggcctgcctggagccccagatca

SEQ ID NO: 695258 - DNA, 101 bp, Homo sapiens
cgcaagttgagtggaggaggcggcggtggggccccggaccagatctgggcacgaaagcttctctctgtcccttggcttctgtgtggtcccagaagatatgc

SEQ ID NO: 695259 - DNA, 101 bp, Homo sapiens
cccgccggttcgcgtctctctgctgcggcgcggggaccgctgtgctctcgccttgcaccagggaacgtctaaatcttcctctctccccgcctatggcagga

SEQ ID NO: 695260 - DNA, 101 bp, Homo sapiens
tgcagccccgcggcccccgcgccccgcgggacccggacggcgacgacgggggaatgtggcgctggatccggcagcagctgatgagtcaagctccagtcctg

SEQ ID NO: 695261 - DNA, 76 bp, Homo sapiens
ctggcggggtccgcagtttcagcagagccgctgcagccatggccccaatcaaggaaagtattccatgctacatgtg

SEQ ID NO: 695262 - DNA, 100 bp, Homo sapiens
ggggccacctctgactgcttggggaggcgcccggtgatgctgctgtgcctgaggcatttcatccttcatgaagccattcaggattttgaattgcatatga

SEQ ID NO: 695263 - DNA, 74 bp, Homo sapiens
gaggcgccgcagcgtcggagcaatgcaaggctaagccgggactgatcctttgaaatactccagccatgactaaa

SEQ ID NO: 695264 - DNA, 100 bp, Homo sapiens
ttttgcagcttgaggagcgaggatggcagtcaacaaaggcctcaccttgctggatggagacctccctaagggctgaactgatggaaggaatgctgttagc

SEQ ID NO: 695265 - DNA, 82 bp, Homo sapiens
caggcgaagctggccgagcaggctgagcgatacgacgacccaacatgagtgaagtttcctgcaagaaacgggacgactattt

SEQ ID NO: 695266 - DNA, 100 bp, Homo sapiens
tggggctacatcatcactcagattccgggaggctacatcgcgtctcggctggcagccaacaggaagacaactgttagttttgtggcttactgctgctcca

SEQ ID NO: 695267 - DNA, 96 bp, Homo sapiens
gaaaagcagcggcagccccgactctcagcactgtggaccccgaaggatgactgggctgccctgaagctacatgggaagtgtgatgacgtcatgcgg

SEQ ID NO: 695268 - DNA, 100 bp, Homo sapiens
cagacctgccaatttaccagagataattgataacaccctgtaacagctgagccggagcctcaacagaaagctcctttagttcctcctcctccaccgccac

SEQ ID NO: 695269 - DNA, 51 bp, Homo sapiens
ctgcggagcagtgcgtcagagtttcaggtggagccgccaccaaaatgcaga

SEQ ID NO: 695270 - DNA, 74 bp, Homo sapiens
tacagctttgtgttcaagcggaaaaccaattggtttaaaagaagagccaggtatttattacagtatcaggagcc

SEQ ID NO: 695271 - DNA, 97 bp, Homo sapiens
caagctgcccatcgaggagacgctggaggacagcccgcaggcaaggtgaccccatggcaaggcgcaagccagaagggtccagcttcaacatgaccca

SEQ ID NO: 695272 - DNA, 100 bp, Homo sapiens
cagtggcgcctaaagtctgagagagggaagtcgcctctgtgctcattgctgacagaactggaatctcctgcttggtggccctttagctccaagctttgga

SEQ ID NO: 695273 - DNA, 82 bp, Homo sapiens
tgagctccggcagagcgtgtctgaggccgtgcggggctccgtggtgctgacaggtgatttggcttctgcacagttaggagga

SEQ ID NO: 695274 - DNA, 87 bp, Homo sapiens
ggtgtccagccggatccagcatctctccaccatcgactacgtggaggacggaaaaacaccaccaggccataccacagcctgcccagt

SEQ ID NO: 695275 - DNA, 100 bp, Homo sapiens
ctcacctgtgacgatgagccagagacctacgtggcagctgtgaaaaaagccatttccgaaggaagcagtcaattatagatttcttcaaaccagcttcaaa

SEQ ID NO: 695276 - DNA, 98 bp, Homo sapiens
aacaacctctcctcttcgtctccgccatcagctcggcagtcgcgaagcagcaaccatggccgctgtgctcgctgtggagaaaacgtagttggggaagg

SEQ ID NO: 695277 - DNA, 98 bp, Homo sapiens
gaacattgctcagacacctgctgagctctacaatgccattctggtggacacgcctcttggatttccatcaccaaggagtaagaagaccttcgggcaga

SEQ ID NO: 695278 - DNA, 74 bp, Homo sapiens
taattttagggtcctttatatagaagggagagtgaagacattcagtgaagcttgcctgatggtaaggaaaccag

SEQ ID NO: 695279 - DNA, 132 bp, Homo sapiens
ttattttcagaccttggaagattcagatagctacaaaaggcaggctgcacctgaggtgctacgcatgatggtcggagtaaatatctcagatgagcagctgggcagcatcgcagacaggaccattcaggaggc

SEQ ID NO: 695280 - DNA, 90 bp, Homo sapiens
cttccatgtggtggtgtatgtgcgcttcccagggatcttgagagtgaagatctcgaaggatttcataggctgaccggttccctgatgtgt

SEQ ID NO: 695281 - DNA, 82 bp, Homo sapiens
taaaagagaggccaaagagccagagcaacagctctccacacaaggagatgcaagtcaggtgattgggcctcttactgaagga

SEQ ID NO: 695282 - DNA, 74 bp, Homo sapiens
tgtaaagaacttgcagttgaaggagtataacacaggaacatcatttacagcgagcaatttcagcacagcaagtg

SEQ ID NO: 695283 - DNA, 100 bp, Homo sapiens
ttggaaatcaggaaggcttgtgtctcatatatgagggaaaatcaacaaacttttgagtctgagaggagttcattacttcggaagtggtacaatttaatga

SEQ ID NO: 695284 - DNA, 112 bp, Homo sapiens
atctttattttgactcacgttcttggagttgctggtgttctatactggaagaggcatgccagaggtagagcaggaactttatattgctgttggaatatctggagccatccaa

SEQ ID NO: 695285 - DNA, 83 bp, Homo sapiens
tgaaggtggacacagaagccgcaggattgtctcccgggctggcagcagggccccagcggcaccatgtctgccctcggagtcac

SEQ ID NO: 695286 - DNA, 100 bp, Homo sapiens
caagaagcagctccacgaaaggcagccgcggatcgccgcgctcagcgacaaacaagtttcccaacagtgatgtcacaagattgaccacattgatcacagt

SEQ ID NO: 695287 - DNA, 82 bp, Homo sapiens
gttttgcagatcttcaacaagaggacccaggagaaattcgccctcaaaaagatgcctctaatggaggagtttctgagcagca

SEQ ID NO: 695288 - DNA, 98 bp, Homo sapiens
caaaattacagcacacggggaaggacaccctgaaggctggcaaaaatgcagtcgagaggaggtcgaacagatgtggatgaaagccaaactggagaacc

SEQ ID NO: 695289 - DNA, 97 bp, Homo sapiens
agcgtctgtcgcgctgggacccacactggcttttaaggaggacacccggacacctggaagctgggaaatggctggagtgcaatggcgggatctcggc

SEQ ID NO: 695290 - DNA, 100 bp, Homo sapiens
tgcagcccgaccagtccaagagccggcggcatgacgaatgaagtggttttaaagtttgatcggaaccgtgtgcgtatccggaacgtggcctacgacacgc

SEQ ID NO: 695291 - DNA, 98 bp, Homo sapiens
tctccgatcccagttagcaggaatactttagcctggaaggtaatgaaagtactaaattcttccaatgagcatgtcattagcattggagcaagtttcag

SEQ ID NO: 695292 - DNA, 100 bp, Homo sapiens
tgcatggttgctgctggatgtgttgtgttcctggcttccctctggatgctgacagaaacaagggtgttggagcgggccggagagaagtagagtgggctgc

SEQ ID NO: 695293 - DNA, 75 bp, Homo sapiens
ctccggagccagcgtggtggccatagacaacaagatcgaacaggccatggatggtcatccagaggataagccaac

SEQ ID NO: 695294 - DNA, 100 bp, Homo sapiens
acctggaagccatcctggacgtcgtgcacctgcaccacatcctgcagcgggagggaggttgacgccgctgtcaccccagaggagcgccacctgtccaaga

SEQ ID NO: 695295 - DNA, 75 bp, Homo sapiens
tggccaaagcctgcccagacggctcacctgtgcgggatggaacaaaaggtattctgagcacacccaactacagac

SEQ ID NO: 695296 - DNA, 50 bp, Homo sapiens
ggaaggttccctcaagtccaaggtgaagtattacagacacttagcacctg

SEQ ID NO: 695297 - DNA, 75 bp, Homo sapiens
ggataatggtatcatcaaggccttcagaaacatccctgcagagagagatcatcattgcctgaatttagctttgtg

SEQ ID NO: 695298 - DNA, 75 bp, Homo sapiens
cagggggcgagcatggccgctccgcgagtactactataattccttgacccagcagtacctttactgggatgggga

SEQ ID NO: 695299 - DNA, 98 bp, Homo sapiens
acgccgcggatctcagcctcttctcgcagatggtgaatgaaaactttgccattgatttgatagcagagcagcccgtgagcgaggtggagactcgggtg

SEQ ID NO: 695300 - DNA, 100 bp, Homo sapiens
tggaacacagcttcactttgctgataatcgcttatcagccgtatggaaaatctgtggactggtgggcctatggcgtcctgttgtatgaaatgcttgccgg

SEQ ID NO: 695301 - DNA, 90 bp, Homo sapiens
cctggatatggcaaccagggtgggggctacggaggtggttatgacaactatggaggaggttgtccgggtgccaaaaagcatgagtttctg

SEQ ID NO: 695302 - DNA, 98 bp, Homo sapiens
agcgtctctgcctggccgcccatcgtctgggatgtggggagcgcctctgcccggccgccctgtctaggaggcagcaaatataaagtctatggaccctg

SEQ ID NO: 695303 - DNA, 90 bp, Homo sapiens
ccttagttggccaagtactagtgaaaccatacatagacgaggtgacgctgaccctgactgtccccgagtacagcaacaagagggtttccc

SEQ ID NO: 695304 - DNA, 100 bp, Homo sapiens
cgctggaggccgagcggcaggccctgcggcagtgccagcgtgagaaccaggagctcaatgcccacaaccagggaactctaatgatccaggacaaagaagt

SEQ ID NO: 695305 - DNA, 50 bp, Homo sapiens
gatggactcggagcgccccgccggtgctggagaatctggtaaaagcacca

SEQ ID NO: 695306 - DNA, 80 bp, Homo sapiens
gttgccggctcccctctcaggacaacccagatgtgcaacaaagtgcgatgtctgtagatggacggcagatccgagtagac

SEQ ID NO: 695307 - DNA, 126 bp, Homo sapiens
cgcgtccactgccccggccggccgaccgacaccgaccccgcctactgcggcgcggggacccttgtgtgaaatatgagttggcgaggaagatcgacctatcggcctagaccaagacgctacgtagag

SEQ ID NO: 695308 - DNA, 101 bp, Homo sapiens
aaactatcagaatgggaagaacaatgtgccaaggctgaaattatcctacaaagtgctgccaatggaggtcctgatgtacatcttccgatgggtggtgtcta

SEQ ID NO: 695309 - DNA, 120 bp, Homo sapiens
cattccaacacataaaaattatttatccaacagctcctcccagttaagtgggcagaccaacatccacctcagcaaaaacttcttcctgacgaatcgcgccagggagcgctcagacacctt

SEQ ID NO: 695310 - DNA, 104 bp, Homo sapiens
cactgctgagtcacacacaacgcttgttatgttttcatcacttctctccagaaggtgctggagaatctggtaaaagcaccattgtgaagcagatgaggatcctg

SEQ ID NO: 695311 - DNA, 101 bp, Homo sapiens
ctgggatcccggccaccagcaattgtccgaattcaaagaagctttttcactatttgacaaagatggtgatggaactataacaacaaaggaattgggaactg

SEQ ID NO: 695312 - DNA, 101 bp, Homo sapiens
gtcgccgtcatggccgcggaggtggcacgcccgagcggcctcgcctgagctccgggggtcgtcgccccgcagggttcctacctgatcccgctcccagcagc

SEQ ID NO: 695313 - DNA, 80 bp, Homo sapiens
cgactactagaaggggaggggagtggaaaggctctcagtgaaaaagctccctgtgctgtcaggaatctacaggacttggc

SEQ ID NO: 695314 - DNA, 101 bp, Homo sapiens
cagaagtagaactgctgagtcacaggtcaagaagcaggacacagccagctcccagagcccagtgcacccttgaaccacaccctgcttccccctggaggtaa

SEQ ID NO: 695315 - DNA, 100 bp, Homo sapiens
tgaggagccagacgacaagcacacactatggcgctgaaacggattaataaggtcttcccaacacctttggtgactatgatgaaacgccttctatgatggc

SEQ ID NO: 695316 - DNA, 75 bp, Homo sapiens
agtacctgaccccggtcctcaagagctctcgatgttctgaagtatgaggaagttgacatggattcattagccaag

SEQ ID NO: 695317 - DNA, 51 bp, Homo sapiens
taactcatcagtggctgcaaaggaggacacatttggacctgaccttcacca

SEQ ID NO: 695318 - DNA, 88 bp, Homo sapiens
ctgaagctctgctgccccgcaggcaccttcgggccctcctgccttcactctcgcctgactgctggtgtgcccgacacgcccacccgcc

SEQ ID NO: 695319 - DNA, 100 bp, Homo sapiens
aaaaaaggccggcggcgggtggacgcggcgcgcgaggacccgagccaggcggggacaggacggcggggcgagccagctggaacagtgaaccatggagctg

SEQ ID NO: 695320 - DNA, 90 bp, Homo sapiens
tagagctttctggatccagttcagaggattcagagaaggctgagggtaaaaagctgggattggtaggctgggtccagaacactgaccggg

SEQ ID NO: 695321 - DNA, 100 bp, Homo sapiens
gcagcaggcagatgatgcagaggagcgagctgagcgcctccagcgagaagttgagggagaaaggcgggcccgggaacagtcagattctgaggaagatgaa

SEQ ID NO: 695322 - DNA, 96 bp, Homo sapiens
actatgcagagttggtagttaaaggtgtcatggagaaactccagctgggcccagagattctgcagcgggaaaatccaaggcttatttatgccaggc

SEQ ID NO: 695323 - DNA, 113 bp, Homo sapiens
gcaaccattgacgccatgtcgggttattcgagtgaccgagaccgcggccgggaccgaggcacttgcacctcctgcgccgccgccccccatccaaggatatgccttcaagcctc

SEQ ID NO: 695324 - DNA, 76 bp, Homo sapiens
ctggtgaaagtcccatattctgaggcatttcatccttcatgaagccattcaggattttgaattgcatatgagtgct

SEQ ID NO: 695325 - DNA, 100 bp, Homo sapiens
tggaaggcctgtatttctctacctggaccgcacgctcctcgcgcaaggagggtagagctcaaggtgctttcatttgcaagatggtgccatttgtccagtc

SEQ ID NO: 695326 - DNA, 98 bp, Homo sapiens
ctgtgacctgcaggtattgggagatccacagctaagactccaggaccctctggaagcctagaaatgtggtggtgaccgcggtggcttcaaaaattttg

SEQ ID NO: 695327 - DNA, 75 bp, Homo sapiens
ccacgaatctgcccacccctcctgtaacccagcctgtttcacttcttgttcattcggctcctaaagaagtagcag

SEQ ID NO: 695328 - DNA, 82 bp, Homo sapiens
ggacgtgcacgcagcccggcgggaggataaagaccaccacgcgccatcatgaccgggtcctataacaacttcttcaggatgt

SEQ ID NO: 695329 - DNA, 82 bp, Homo sapiens
aagccatgtaaaaatctgatgaacacactgaataatttgcatcagcaattggcaaaatggttctctataaaggtgtcttaaa

SEQ ID NO: 695330 - DNA, 48 bp, Homo sapiens
acagaagtccatctattacatcactgccactgtagtctgcagatcaaa

SEQ ID NO: 695331 - DNA, 74 bp, Homo sapiens
tccaatcacctcgcaggagccctaggaccttgaagcatgacactgctgcagtcgatcgttccgtcaagcgtctt

SEQ ID NO: 695332 - DNA, 75 bp, Homo sapiens
aaatccgggggcaaggccaaaaagaaggtacatcaggaacgtctctatcaagaatacaatttcagcaaggctgag

SEQ ID NO: 695333 - DNA, 50 bp, Homo sapiens
ctctagcagacaagatcagatccacagggttggaaataccaagtaaggaa

SEQ ID NO: 695334 - DNA, 80 bp, Homo sapiens
acctccaaggtagctgagactacagcgagttcctggggaaaaccccagggcaaaacgctcagaaatggattcctgcacga

SEQ ID NO: 695335 - DNA, 100 bp, Homo sapiens
cacaaatgcttcaagacttgcaagctgctggatttgatgaggatatcaatgagtgtattcttgaaaactatcccgagtgctccaaccccaggttatttta

SEQ ID NO: 695336 - DNA, 50 bp, Homo sapiens
cagcggcgcaaggagatactgggccctcgggaccaaggatcacgtcatga

SEQ ID NO: 695337 - DNA, 100 bp, Homo sapiens
agaggaggggaggaggaggaggattcagggaataggagctggggagcccttctgcgccacagaccaaagagaaccctgtacagtaagaaatatggtgtgg

SEQ ID NO: 695338 - DNA, 113 bp, Homo sapiens
agtgaagagtctggagtttatctggagtgaggtggccggttcttggtgggatctgagcagagacctgtccttttcctggtctcctcattcagcctccatatgatcctgttgtg

SEQ ID NO: 695339 - DNA, 96 bp, Homo sapiens
gcggaccgcggcggaggacgcgcccggcgcccctgagccggccgagcggcgacggaccgcgagggctcttccgtgggcggcggcttcgcgggcttg

SEQ ID NO: 695340 - DNA, 100 bp, Homo sapiens
gaattttgaagtacaccgtggtgacattgtatcattggtattacctctctagtgacccttcagctgttaaccctggttggccatgacgatcagcttgatg

SEQ ID NO: 695341 - DNA, 77 bp, Homo sapiens
gcctcccaagtagctgagactacagaaagaatcttcaagagggagacatagggaaaaggaagacataaaaatcacta

SEQ ID NO: 695342 - DNA, 87 bp, Homo sapiens
tttgctgcatctaccttcccgttcttgggtgtctctggggagtccctgggccagaccttcctccagactccagcccacctcttcgga

SEQ ID NO: 695343 - DNA, 100 bp, Homo sapiens
ggctccgtccccaggatcttcccggttcagggacctggcgatttctgagtgttccggttctgcttccttcggtgctgcggctgtgtgttttctgagcgag

SEQ ID NO: 695344 - DNA, 90 bp, Homo sapiens
ctggttttgtggcggctgctgctagagctggagcatttgccggtactatactggcaattgctggagaagattttgcaattgttgcttctg

SEQ ID NO: 695345 - DNA, 98 bp, Homo sapiens
aaaaataacataattgaaggcagtaaaagtgaaattaaataggaagatcatcagtcaaggaagacccactggagagtttatcaggtagaagatgtgtg

SEQ ID NO: 695346 - DNA, 100 bp, Homo sapiens
ctcggaagagcgctcccaggagaaacaactactctcggaaccgcacgtttgacacgtacattgggcagggctacgtgattcctgggatggatgaaggtct

SEQ ID NO: 695347 - DNA, 100 bp, Homo sapiens
cggggcaggtggctgcatagtcttggcggagccgggcccctcagatgagagctgcacccaggccagcaccagtcgctcagccaccagcagcggcaccccc

SEQ ID NO: 695348 - DNA, 75 bp, Homo sapiens
tcatcttgggagtgatttgcgccatcatcctcatcatcatcataggaatctatggatttcctgaaatatgttgtt

SEQ ID NO: 695349 - DNA, 82 bp, Homo sapiens
agtccccgtacgcctacagtaacggattttgacacttcatgacatgtcattatttagagcaataatgaatattgacctgttt

SEQ ID NO: 695350 - DNA, 75 bp, Homo sapiens
tgaaacggattgccagagaattggcagaaggttgatccaaaagactacatgttcagtggactgaaggatgaaaca

SEQ ID NO: 695351 - DNA, 89 bp, Homo sapiens
actgctctggcagtcatcgtgcctgaaggagtacatgccctttatgaagatattcttgaggtaaccaaaatatccactgaggatgatgg

SEQ ID NO: 695352 - DNA, 100 bp, Homo sapiens
gctgccctgagacggtgtcccgccgaaagcaaatgcctattattattgctggaaatgatcaacaaaagaagaagtatttggggagaatgactgaggagcc

SEQ ID NO: 695353 - DNA, 105 bp, Homo sapiens
ggccgccgcagcaccatggcgaccaccgtcagcactcagcgcgggccggcctccggtgtggctgtctctgatggtgtcatcaaggtgttcaacgacatgaaggtg

SEQ ID NO: 695354 - DNA, 50 bp, Homo sapiens
tgtggctgtgcttgccaggcctggctccaccatgaaccagagaatcagtc

SEQ ID NO: 695355 - DNA, 96 bp, Homo sapiens
aagagagctagaacagttcaccgagactcaggttgtcctttgtggagggtcttctcgaatcccaaagctacagcaactgattaaagatcttttccc

SEQ ID NO: 695356 - DNA, 97 bp, Homo sapiens
cggaagaggagaaggggggcaaaggtctctgctgctgatgaagctgtgaccaaacgcacccaacccttggcagccatctgtccctgcagccatagcc

SEQ ID NO: 695357 - DNA, 100 bp, Homo sapiens
gctgaagctgaggacacacccaggaaaagactcaggacggacaagcacagtcttcggaagatcctccccggcgtgaaggtcatcatcgcacacaccgaga

SEQ ID NO: 695358 - DNA, 96 bp, Homo sapiens
gaagcaggatgaactgaaacggattgccagagaattggcagaaggtgctggagaatctggtaaaagcaccattgtgaagcagatgaggatcctgca

SEQ ID NO: 695359 - DNA, 100 bp, Homo sapiens
aaataagaaaattgagaagcggcgtcaggaattgatggagaaagaaaccgcaaaaccaaaaccagatcctttcaaagtagagatggtttcagcatgttgg

SEQ ID NO: 695360 - DNA, 98 bp, Homo sapiens
cttcagctcatcttaggctgtgctgtgaactgtgaacagaagcaaggtagatttcgggcagacaacttgaacaagctgaagaacctatgcagcaagac

SEQ ID NO: 695361 - DNA, 120 bp, Homo sapiens
ctcctgcgaggcctcccgggctccgggaaaactacactggccagcacatacccccggcctcatgagtacctgtccccagcggatctgcccaagagctgggactggcgcaatgtggatggt

SEQ ID NO: 695362 - DNA, 90 bp, Homo sapiens
gcatgaagagcatatcaatgcaggacgtacagttcagtattctaccttgtaaatactgttatttgtatatactgtaaatgatgacatcgg

SEQ ID NO: 695363 - DNA, 83 bp, Homo sapiens
atcatgtctgcgagccaggattcccgaatccacattcatctcaatggaaggatcctgccttaagtcaacttatttgtttttgc

SEQ ID NO: 695364 - DNA, 75 bp, Homo sapiens
tggcctgtccctcacatccgatgcaccctttttgtcagattatcaggatgagggattacatcccagtagaccaag

SEQ ID NO: 695365 - DNA, 106 bp, Homo sapiens
cggccgctgagattctgtcgtgtcgtcgctgctggcacttcaggctctggtcttatatccagatggccaggctcagatgattcaccccaagcctgcagacttccgg

SEQ ID NO: 695366 - DNA, 75 bp, Homo sapiens
ccaatatttctgcctctgacataatttgggagaacctaactgtgtcagggccacctacagatgctcctgcagtgg

SEQ ID NO: 695367 - DNA, 80 bp, Homo sapiens
gtctcagtccacccaaggtctcctcggatcgcctggagaggcactcggacctggatgaccagtgtcccagtgaaggaacg

SEQ ID NO: 695368 - DNA, 90 bp, Homo sapiens
ctgaaggcccaaatcatgctctgcggagaaagtttcagagggagttcacacaaggagtaaagcctgactggaccattgcacggattgaac

SEQ ID NO: 695369 - DNA, 82 bp, Homo sapiens
gtagagcggagcctggcgggcgtgggaacccaggccccgccgaggcggccaggccggtctaattgaagccaacggagaactc

SEQ ID NO: 695370 - DNA, 100 bp, Homo sapiens
agagggacgcagctgatgaatggaacatctatgtcttcccccaatgcatgtggaggcattgccctgatcctttcaggtcatgcaagacaagataatctgc

SEQ ID NO: 695371 - DNA, 120 bp, Homo sapiens
ctcaccatacaggaacagggcagacgttagcgtgagtgatcactctcaatcccgggaccaagaatcgccttcagccctgtctggtgcatccttggcagaaagtgaggaggaaaacacccc

SEQ ID NO: 695372 - DNA, 50 bp, Homo sapiens
cctgaaactggttcttgggtgtttaaggtcgctcaagccctcagttagac

SEQ ID NO: 695373 - DNA, 99 bp, Homo sapiens
catcaccacccaccctgagagcaaccagggcatcctgacaaccaggaagcccattattcctatgtttacacaaaatattcgagaaggatttagatcact

SEQ ID NO: 695374 - DNA, 83 bp, Homo sapiens
tctcaaccccgtgtatgtgccctgcgtgaagggagaagaagaagttgagcaagtccctgcagaaaccctctaccaaggcttgc

SEQ ID NO: 695375 - DNA, 98 bp, Homo sapiens
acttgtctacgcagtctctgaacagagttcctgacctgtgttccaagaaactatgatcctgctttacatccttttgaggtcccacgagaatatataag

SEQ ID NO: 695376 - DNA, 75 bp, Homo sapiens
gaggatgagagcgacgaagccaactgtccagatggcagaaacggtggacacaagcgaaatggtcaacggcgctac

SEQ ID NO: 695377 - DNA, 95 bp, Homo sapiens
tgcatatttgggtccaactgtgaagccagatgataagagtgcctggaagagctgggatgtctggttgagtcctatggcatgaatgtttgccaacc

SEQ ID NO: 695378 - DNA, 100 bp, Homo sapiens
gtttgcagaaggatgaaaaggctttattgccaaactgacttcagggccacaggtgctgccaagatgctccagggcacctgctccgtgctcctgctctggg

SEQ ID NO: 695379 - DNA, 75 bp, Homo sapiens
ctggagtcgaaggccgtgaggtatttttctaaggcgtcttcactcgaggacagctgggcctgatagacatcatct

SEQ ID NO: 695380 - DNA, 50 bp, Homo sapiens
tcaagaaccagagatcgcaggagtcctcccaaaccgaaggaccctgtatc

SEQ ID NO: 695381 - DNA, 82 bp, Homo sapiens
cattttaagagcaagaagaactacttcaagttcaggggtctctctttttggcatgtcggccctgttactccctgggaacttt

SEQ ID NO: 695382 - DNA, 75 bp, Homo sapiens
ggctgccgcaggacctgcagcatcccagagacaccattcgcttttcacccaagatgatttgatgtcttataaaac

SEQ ID NO: 695383 - DNA, 75 bp, Homo sapiens
cccctgtggaggtgaagacattgtggcacgtttcttgcagcaggataagtatgagtgtcatttcttcaacgggac

SEQ ID NO: 695384 - DNA, 100 bp, Homo sapiens
ggtctggaccttggaatggacactcgggctgaggagccagtggaggaggcagtgggtctcctatggacagaagtgcgggcaaggagctttgttcctcccc

SEQ ID NO: 695385 - DNA, 75 bp, Homo sapiens
cccgtgtctgctcgccctccgacgctgctcagctcaccatggatgatgatatcgccgcgctcgtcgtcgacaacg

SEQ ID NO: 695386 - DNA, 50 bp, Homo sapiens
ttccgcacccataagatgaacgtcaggagcccaataacttgaaggcccgc

SEQ ID NO: 695387 - DNA, 124 bp, Homo sapiens
tgggaagaggggcttattaactcgtctgctgcaggtcatgaagaaggagccagcagagtcgtctttcaggttccgccaggtgcggctgaaacaccggaagctccgggaacaagtgaactccatg

SEQ ID NO: 695388 - DNA, 75 bp, Homo sapiens
ggaatatcgatacaacaccaacaggcagcggaggaggagaaagagatggacctcccggactcggcctcgagggtc

SEQ ID NO: 695389 - DNA, 100 bp, Homo sapiens
cgagaagctgccgccgaacgacaggacgttggggcggcctggctccctcaggattttttatcaagcagaaatgcatcgaacaacgagaatcaagatcact

SEQ ID NO: 695390 - DNA, 100 bp, Homo sapiens
accagagcttcttccagagccttctcaaagccacagctccagaagtgctgggtccagagaagtatgacaagtcctgtgacatgtggtccctgggtgtcat

SEQ ID NO: 695391 - DNA, 101 bp, Homo sapiens
gcaagatctcagtcagagtaggaaataattttcacaaccttcaagaaattcggaatgtgacagtgatgataacatgggtgccaaaaatacttcaataggag

SEQ ID NO: 695392 - DNA, 75 bp, Homo sapiens
tttgaatccttccttgatgatgaagaggctttaatccagtgtgaccagttgaggaaggagctggagaggcaggcg

SEQ ID NO: 695393 - DNA, 101 bp, Homo sapiens
aggccggtggccgtgaggaggttgggggccctcgcggaggccgagaggcttaaggagagagcatcagtgatgtcacgtttggagcaggggtcagttacatc

SEQ ID NO: 695394 - DNA, 75 bp, Homo sapiens
catctgatgcacgttccatccggcgctcagctgggcttgagttatttgctggtataaaggatggagaaagcctgc

SEQ ID NO: 695395 - DNA, 75 bp, Homo sapiens
gcaaccgctgctggcagttttgccaggtgtttgttaccttgccctgggcgctgcctatggcacagccaagagcgg

SEQ ID NO: 695396 - DNA, 98 bp, Homo sapiens
ctgccgctgccgccctgagtcactgcctgcgcagctccggccgcctggctccccatactagtcgccgctctttcgacgtgtagcagcagctttgccgg

SEQ ID NO: 695397 - DNA, 100 bp, Homo sapiens
ccgatcccccagtctggggatcccgccgacgctactcgctgcagcatatgccagaagactggagaggaaggtgtcttgctgcaggtaactaatgaagaag

SEQ ID NO: 695398 - DNA, 75 bp, Homo sapiens
ttacttgtgaatgaagattcattatgaggaaacctcgacctgtctcccagttggttgcacagcaggttactcagc

SEQ ID NO: 695399 - DNA, 101 bp, Homo sapiens
cacaacacagggaagcttggggaggttctctacttaaaagacaatgactactgatgaaggtgccaagaacaatgaagaaagccccacagccactgttgctg

SEQ ID NO: 695400 - DNA, 50 bp, Homo sapiens
cgtcccaccaggcctcatgtgatcctctttggggtttgaagaagtctcag

SEQ ID NO: 695401 - DNA, 96 bp, Homo sapiens
gctccgcggggacccagacgaggctcgggactttgcagccggccttagtgctcgcgcaggaccgcctgtactttgtgatggagtacgtgaatgggg

SEQ ID NO: 695402 - DNA, 100 bp, Homo sapiens
ctagcagcaagtcatctggtgaccttgttgatctgtttgatggcaccagccagtcaacagcccctgaagaagatggccgaccggatcaggaagtatcaga

SEQ ID NO: 695403 - DNA, 82 bp, Homo sapiens
ggaggacttcgtgaaggattcgggcgcctgcttcagtgagctcccagctcctccagcagccgacaggaggcccgtcaagatg

SEQ ID NO: 695404 - DNA, 113 bp, Homo sapiens
ctgaagacaaaaatccagaagtacaagcagtctgacatgaagacatcttatccatcctcactgctgtcaacgatgatgtgagtcgaagagtggacaaacagggaacaaagaaa

SEQ ID NO: 695405 - DNA, 74 bp, Homo sapiens
tggacagagcctgagaagttcctccctgaaagaggatttcatagtaattctatttctgttatccctgatggagc

SEQ ID NO: 695406 - DNA, 83 bp, Homo sapiens
tctacaacacatggtggaatgtatccgggaggtcaacgaggtcatccaggagcggtggtgccccccccgggcacggggccatg

SEQ ID NO: 695407 - DNA, 74 bp, Homo sapiens
gcagtatctcgctcacagagagctgggctacaggttaatgttcgtgaagaaattgaagagttttttccaagaat

SEQ ID NO: 695408 - DNA, 100 bp, Homo sapiens
cgatgagtggtctcggcaggctcttcgggaagggtcacagagatgcggcggaccctgacgcctgccagctccccagtgtcctcgcccagcaagcacggag

SEQ ID NO: 695409 - DNA, 83 bp, Homo sapiens
cgacgtcttgcctgtgtcccacttgttcgcggcctataggagtggagtcaacatatcaatggagcaagtcacagtcgtcgatg

SEQ ID NO: 695410 - DNA, 74 bp, Homo sapiens
ggagctgggcgacgagctgaccctgggagacatcgacggagcctccatcgacctgcagaagacatcccacgatt

SEQ ID NO: 695411 - DNA, 100 bp, Homo sapiens
acccagtggatcatgttggaaatgcaactgcatcccaggaacttggttatggttgtctcaagatcctgtctacctttcatgaccaactacagttttcatt

SEQ ID NO: 695412 - DNA, 75 bp, Homo sapiens
gcccacccctcctgtaacccagcctgtttcacttcttggcgtcgaccagaagattatgatattcataacagcaga

SEQ ID NO: 695413 - DNA, 82 bp, Homo sapiens
tggaggagctgtgcagccgcgaggaggcgcgggaggtgttcgagaacgaccccgagacggccagcggagcctgcaccaccgt

SEQ ID NO: 695414 - DNA, 105 bp, Homo sapiens
agagtataacaatcagtgccgagcaattgtgatgagatattctgctgagtggaaggttatcaatactctggctgaccatcatcatcgtgggactgactttggtgg

SEQ ID NO: 695415 - DNA, 50 bp, Homo sapiens
agagacgcgaaggagaggccctagaaccgaaaggcaccaatgcccagacc

SEQ ID NO: 695416 - DNA, 75 bp, Homo sapiens
gcttcctggcctgggcgctccggtggcggcggagccgcggcgagtcctttgcacatgttggcaacacacgcatcc

SEQ ID NO: 695417 - DNA, 139 bp, Homo sapiens
gacgcagagccgagtgcagaagatctgggtgcccgtggaccacaggccctcgttgcccagatgtactccaaagattcaggtttactcacgtcatccagcagagaatggaaagtcaaatttcctgaattgctatgtgtct

SEQ ID NO: 695418 - DNA, 80 bp, Homo sapiens
atggagacaccctctgggggtcctctctgagtcaaatccagtggtggggcggataaaaatgtcgttgtgtttgacaaaag

SEQ ID NO: 695419 - DNA, 75 bp, Homo sapiens
atgccaaacgagattggggccatgccaaggactatgtggagttagtgtgactctggatccagatacagctcatca

SEQ ID NO: 695420 - DNA, 100 bp, Homo sapiens
cggtggcatgttggatcggatccttctggagtccgtgtgccagcaacagagctgggtccgggtgtacgaactcggttgcctttgaggatgtggctgtgaa

SEQ ID NO: 695421 - DNA, 90 bp, Homo sapiens
gaattcccggcccctcagggccacggctttagcggtgtcttttgcggcaatggtggcttgctatccgggaaatggaacaggttatgttcg

SEQ ID NO: 695422 - DNA, 100 bp, Homo sapiens
acatctaggagcatctacccatggacagacatgtcttcccatggagttgctctaggtcgtaaccagcctttgaaaaaggagaaaccaaaatggaaaagcg

SEQ ID NO: 695423 - DNA, 100 bp, Homo sapiens
agcggatgtattggatttagcagaaacaatggttgcatctgcagatggtttagtttatgaaccacttttctgaagctcagcagcagctatgcaacaccag

SEQ ID NO: 695424 - DNA, 101 bp, Homo sapiens
ctgctttccactcggctcctgtcgtccgttctctcaggctcccgttcagacctgcctagagctggaacgttacctccagagcgagccctgctatgtttcag

SEQ ID NO: 695425 - DNA, 88 bp, Homo sapiens
agtcaccaccctgatcagtcagcagccatccactcaaggtgcgcctcctgtgcgggaaagagaccatggtgaccagcaccacagagcc

SEQ ID NO: 695426 - DNA, 96 bp, Homo sapiens
atcggtggcggagtcttccaggccatcaagggtttccgcaatgcccctgtttttgcagagcagtctctgatgaagaatgccataaaaacatcggag

SEQ ID NO: 695427 - DNA, 75 bp, Homo sapiens
gactccttcggcagtccacccaccgccgccgcctcccagggacttgcaacaaagcattgccagagaacctagtgc

SEQ ID NO: 695428 - DNA, 101 bp, Homo sapiens
gcattgactcccagactcaattgatcctcttacctcaacctcctgcgtatctgggaccacaggagcaatttacagcaatgagggatttatacatgaaaaat

SEQ ID NO: 695429 - DNA, 82 bp, Homo sapiens
accccccccggaattctgagcaccaaaagttacttcatgtgaaaacaaagatggttggaagagcatgcttgttcaaatcctg

SEQ ID NO: 695430 - DNA, 75 bp, Homo sapiens
tgctctgcctcctctatgccatgtctcataataaagcacctgtggaatcctctcaagaggaacagtcattgtgtg

SEQ ID NO: 695431 - DNA, 100 bp, Homo sapiens
caccaacaggtccgccaaatccggaagaagatgatggaaatcatgacccgagaggttagaagggcccccctctctgaaggcccccactccctgggatgct

SEQ ID NO: 695432 - DNA, 76 bp, Homo sapiens
ttacagatggcttcagcctgcctgcattgaagttctttctacaacttcaacaggctgcactggaggtgtttgcaga

SEQ ID NO: 695433 - DNA, 75 bp, Homo sapiens
acctatctatggagaaaatcattcaagtggccaagacctctgctgcacagtaattttgcacgatggcagtcaaat

SEQ ID NO: 695434 - DNA, 100 bp, Homo sapiens
gagatttccagccttccaagctctactgtgacttcagagacactgccaagcagccttagccctagtgtagagacagagggataaattggaagaaatcttg

SEQ ID NO: 695435 - DNA, 100 bp, Homo sapiens
ctgcctcgccgcgtctcgccacggtacatgtcccagagcaagcacacggaggcccgggagctcatgtactcgggagccctgctcttcttcagccatggcc

SEQ ID NO: 695436 - DNA, 83 bp, Homo sapiens
ccaccattcagcgcgcaagataccctccaggtccaggggcaagttcatcctactctcgagtctaatgatgatgctcttcagta

SEQ ID NO: 695437 - DNA, 83 bp, Homo sapiens
cagaaggtctctggagacatcttcagcagcatggactcggaagggggaagcctcctcctggacgaggactcggaagtcttcaa

SEQ ID NO: 695438 - DNA, 100 bp, Homo sapiens
ggcagcctgaacggagtgtgcgacggattgggagtctgcgctcctcagaccaccggcaggtgaacagcctgatgcagaccgaggagtgcccacctatgct

SEQ ID NO: 695439 - DNA, 100 bp, Homo sapiens
atagacatgtgggagaaaaagtgaggatggatctttataagagaggaattccccctgctaggtgcctcactcctgatgcggaagctcgtccagatattgt

SEQ ID NO: 695440 - DNA, 100 bp, Homo sapiens
ttggaagtaaatatgatgtttttcagggctttgaagactgcttggtatttgatgagttaatggataaattcagtaacgaccttagtaagtaaggtcaatt

SEQ ID NO: 695441 - DNA, 90 bp, Homo sapiens
gtctccgtggtgacctcatcaccccctggcacctggggctgccttgcttgcctaaagccaagccaggaatgagccagatgtttatgaaac

SEQ ID NO: 695442 - DNA, 75 bp, Homo sapiens
tttcatcacatcctgtcaaggctttctacaagttctgattaaagtcagaaatagacacaatgatgtggttcctac

SEQ ID NO: 695443 - DNA, 100 bp, Homo sapiens
cgggacaaggaaggttacaatagcatacattatgctgccgcctatgggcacaggcagtgtctggaattgggcacacgtgtttcacgttgacaggtttgct

SEQ ID NO: 695444 - DNA, 93 bp, Homo sapiens
agctccagatggcgtcttccgtgggcaacgtggccgacagcacagtaataatttttcaccatgcatcggaaaaaggtggataaccgaatccgg

SEQ ID NO: 695445 - DNA, 100 bp, Homo sapiens
agagcttttctagtcagcctcaccaagtagaacaaacagagcttcagcaagaacagcttcaaacaggatgaagccccacccgcccttcaggatgccagcc

SEQ ID NO: 695446 - DNA, 100 bp, Homo sapiens
acaacatgcgatgtttggaaatgatacaattacctgcacgacacatggaaattggactaaattaccagaatgcagggggcccctcagcagaaggcagaac

SEQ ID NO: 695447 - DNA, 115 bp, Homo sapiens
catctccagtgaccctgagcgcaccctggaccccaactcagccttcctgcataccctggaccagcagaaacctagagtggaggcaagtgaggcctatctggttggcctttttgaa

SEQ ID NO: 695448 - DNA, 83 bp, Homo sapiens
ctgtgtcaaacatccatatcataagtggaattttggagatattcaaaggttagcatggcctcattgaaagaactagatcaaag

SEQ ID NO: 695449 - DNA, 100 bp, Homo sapiens
cggagctcccccaagagccggaaagttctccaaggagaggcacatcatggacaggacccccgagaaactgaagaaggagctggaggaggagctgctcctg

SEQ ID NO: 695450 - DNA, 75 bp, Homo sapiens
cctcgcctcccggccgagctgacgatgagcagcaccagcagtaagagggctccgaccacggcaacccagaggctg

SEQ ID NO: 695451 - DNA, 76 bp, Homo sapiens
gaattggatatcaagccagagaagtgcccgaggagagttaacagacagaatgttgctgcgggatgtaaaagctctt

SEQ ID NO: 695452 - DNA, 89 bp, Homo sapiens
gaaggtggaggatgcctgccagggtgctggagaatctggtaaaagcaccattgtgaagcagatgaggatcctgcatgttaatgggttta

SEQ ID NO: 695453 - DNA, 75 bp, Homo sapiens
acgaacatttctgggtgacactcaacaggattcccggaagtgcacggctgtctataacgtgctgccgggtctcag

SEQ ID NO: 695454 - DNA, 80 bp, Homo sapiens
gtgcggaggacactcctgcgaccaggtactccaaagattcaggtttactcacgtcatccagcagagaatggaaagtcaaa

SEQ ID NO: 695455 - DNA, 100 bp, Homo sapiens
cggcacctcgggggccacactgcaggcctccgcgctcagtgggaaaggaaaacctcttcagcgcaaggtgaaaccacctaagaagcaagaggaaaaggag

SEQ ID NO: 695456 - DNA, 76 bp, Homo sapiens
tatttttggtatcacaaatgaatccaaccagccacagatactattaggaggggttctgagcaaggttcaaccagtc

SEQ ID NO: 695457 - DNA, 100 bp, Homo sapiens
acaaagatgctctgcggtttttgggctgtgttgacatcaaggatctaccaggcagctgagtatgtcccagagaaggtgaagaaagcggaaaagaaattag

SEQ ID NO: 695458 - DNA, 75 bp, Homo sapiens
actgtagatgcaaatgggtatctgaaaaatggatcaggtgctggagaatctggtaaaagcaccattgtgaagcag

SEQ ID NO: 695459 - DNA, 82 bp, Homo sapiens
gggaccacggtcaccgtctcctcagcccgtggaccgggagcccgtggaccgggagccggtggtgtgccaccccgacctggag

SEQ ID NO: 695460 - DNA, 90 bp, Homo sapiens
gccaccagccaatgatcttttcaatgctgcgaaagctgccaaaagtgacatgcaggtaacctggatgaggacatcattgcagaagagaac

SEQ ID NO: 695461 - DNA, 100 bp, Homo sapiens
actgggagtcagcaaagacagccgcccagaacctgtacgagaagacatacctgcccgctgtagatgagaaactcaggagttctgtgctgagccgaagttc

SEQ ID NO: 695462 - DNA, 49 bp, Homo sapiens
cggcgacctcatccacgccatgccagggcataagcaaggggttcacttt

SEQ ID NO: 695463 - DNA, 59 bp, Homo sapiens
gagaaaggggtgctccaccactccctcccatcccgaggatttaagtgccctgtatgctc

SEQ ID NO: 695464 - DNA, 100 bp, Homo sapiens
gcgggatcccagcctcaggcgtgcgcggacggtgtgcgggtggtggtgaagacgctggagcagctggcgcaacaaggcaagatcaaagagaagatgtacg

SEQ ID NO: 695465 - DNA, 90 bp, Homo sapiens
gccttactactttgggtttggtttgcccttggcttttctcacagcaatgcagtcctcatatattatcagctgatcgtcgtgtgttgccac

SEQ ID NO: 695466 - DNA, 82 bp, Homo sapiens
atgactttaccatctgctacttcaagtgtgagcaggttaattggaaggcctgccgatggtcttcatcaggggtgattcctaa

SEQ ID NO: 695467 - DNA, 100 bp, Homo sapiens
ctccgatgtgcagcccaagctctgggcccgctacggcctgaccgccgctgcctacagagtcacactcaatcctccgggcaccttccttgaaggagtggct

SEQ ID NO: 695468 - DNA, 75 bp, Homo sapiens
cctggtgccactcccaaaaaactatcaagttgggatcaggcagaggggccctggtgaaaacagatgaacaagaag

SEQ ID NO: 695469 - DNA, 98 bp, Homo sapiens
tcccgctcgctgggagagaggtacctctccttttccctctccctttccctaagctaggatgcatttctctcactgaaccccatccagcagaggacaga

SEQ ID NO: 695470 - DNA, 75 bp, Homo sapiens
gagaagagctatggacacagagaatttttccaagttacagctacctaggttttggctacgggcctccacctccac

SEQ ID NO: 695471 - DNA, 51 bp, Homo sapiens
aatatctgacagcgagatcgcttgtagatcggtgggggcaggaacatggac

SEQ ID NO: 695472 - DNA, 90 bp, Homo sapiens
gatgtttcaatattggaagcgctttgatttacagcagctgcagactgtgagctgcttgtccccatcctgcggccgtcctggggacacaga

SEQ ID NO: 695473 - DNA, 100 bp, Homo sapiens
cttgaagtatttggctgaggagttttcaatcccagaggaagttaagtcttcagagcctactgaggatgtggagcccaaagaggctgaagatgatgataca

SEQ ID NO: 695474 - DNA, 83 bp, Homo sapiens
ccgagtggcttgagttggagcctgggactaggagccatcactggtgcaagctatatttaacggagatcctgatgaagttcgag

SEQ ID NO: 695475 - DNA, 125 bp, Homo sapiens
caggtggcccccaccacccggaggagcagctcctgcccctgtccgggggatgactgattctcctccgccagtgtggacgaatgtggaacctcgctctgtggctgtgttcccttggcactccttag

SEQ ID NO: 695476 - DNA, 49 bp, Homo sapiens
tggaatgggaaattccagagataatttcactctggcccccagaagcttc

SEQ ID NO: 695477 - DNA, 98 bp, Homo sapiens
cacggattcttcgcctgagccaccagcaaaggtgtgatgaatgcagactctgctaccattttggctgtttggatcctcctttgaaaaagtctcctaaa

SEQ ID NO: 695478 - DNA, 76 bp, Homo sapiens
gatgcttgctttattagtgtttatactatggaaggtatggcgtgagtcccgagaacattatcctctatggtcagag

SEQ ID NO: 695479 - DNA, 82 bp, Homo sapiens
caactaccaggccaaggaccaggattactcttgtctctgctgctcctgggaaagtgatttgtgaaatgaaagtagaagaaga

SEQ ID NO: 695480 - DNA, 83 bp, Homo sapiens
cctgctgggcccacgccagcaccagcgctatggcggggggatatgagactttctactcggaatatcctgagtgttgcgtggat

SEQ ID NO: 695481 - DNA, 88 bp, Homo sapiens
tgcgtccatgtgaagcatcctcataagtgggtaattccagaattgattggccataccattgtcactgtattactgctcatgtcattgc

SEQ ID NO: 695482 - DNA, 82 bp, Homo sapiens
ggccggctgcggtccgtgcggaggctgagccggccgcgggcgcgaccggaggcagacaatgcagatcttcgtgaagactctg

SEQ ID NO: 695483 - DNA, 83 bp, Homo sapiens
tgtgcagaaggaggtcctgccgtccatgcggaagatcgtcgccacctggatgctggaggagcatcagatccatgctgctgctg

SEQ ID NO: 695484 - DNA, 80 bp, Homo sapiens
atttatgtgggtgccaaagtcttcctcatctacgaggtgcccgtggttgacacgagctgtgtccccagctgttcccgtct

SEQ ID NO: 695485 - DNA, 83 bp, Homo sapiens
ccagcagctgtcgccgccgctctcaggatcacctgctgttaccagctaccacccataacaagaccacaagaccaaaaatgtca

SEQ ID NO: 695486 - DNA, 82 bp, Homo sapiens
ggttctccaggaaccgaaaaggcgaggagtatagtacggcaaaaaactgtcgcttcttggacacttaatgattgttggcaag

SEQ ID NO: 695487 - DNA, 101 bp, Homo sapiens
ggagccgccaagcggctacgttcttctcggcccgccgagatggcgctcgaccccgcagaatggagtctactgaaaaatgtgaagtggtaattcaacatttt

SEQ ID NO: 695488 - DNA, 90 bp, Homo sapiens
ggcagcctccctgtccggcaccaggtaccattgttggatactggtgacatcatcattgacggaggaaattctgaatatagggacaccaca

SEQ ID NO: 695489 - DNA, 100 bp, Homo sapiens
cacagagctcaaggcatatgacctgctctccaaggcctcggtgcagtttgtggaccctgaaaagcaaaggcctcatctccatggcacaggtgatgaaaca

SEQ ID NO: 695490 - DNA, 80 bp, Homo sapiens
ggagcagttgtctgatgaagagaagcggatgtcaatttggatatatcaaagcctttgaaagcaaacctgagtttcaccaa

SEQ ID NO: 695491 - DNA, 83 bp, Homo sapiens
ccaacggggaggccaacgtgaagaaaataccctctaccatctgctttggtcagggtgccgctcgaggatttaaaagcaacaag

SEQ ID NO: 695492 - DNA, 95 bp, Homo sapiens
aggtcgcaaagttcctcacagtttaggtctcaaggcaagcctattgagttaacacctctgccgctgctaaaaggaagacaactgttagttttgtg

SEQ ID NO: 695493 - DNA, 83 bp, Homo sapiens
ctgcgttaatgtttgcaaatgcagaggaagaatttttctatgagctggttgtcttcttgcctgccctgtgtcgtaaaatgggg

SEQ ID NO: 695494 - DNA, 95 bp, Homo sapiens
tgctgaatctgagccacagtgtgatcccagctttaaaggagatgcaggagaaaatacggcattgctaggacacttcacggccatggtatggaaga

SEQ ID NO: 695495 - DNA, 83 bp, Homo sapiens
tggagtttatctggagtgaggtggccggttcttggtgggatctgagcaggcattgaagttgatatcgatgtggagcacggagg

SEQ ID NO: 695496 - DNA, 99 bp, Homo sapiens
atggatctcttcaggcacactacagaactaaatatgcatgttgaggtggtggagggtgtggctggagaagaggatcatcatgatgaacaggaagaacac

SEQ ID NO: 695497 - DNA, 83 bp, Homo sapiens
ccagccgctcgcaggcgccgcacggagttgcgtcccggggacttggggccgcagggaggaatactcccccagttgcaagaggc

SEQ ID NO: 695498 - DNA, 74 bp, Homo sapiens
gaactgttgtaagaggtcagacgaacgtggggcaggatggacggcaagtctccaattgagaaacatggcactgt

SEQ ID NO: 695499 - DNA, 75 bp, Homo sapiens
caggagtacatgaccaaggtcctggaatgtctgcagcaggagaactacgatgacccgcacaaaacccctgcctcc

SEQ ID NO: 695500 - DNA, 82 bp, Homo sapiens
gcgcatgtttgctgactacctcgcccacgagagtcggagccgcggcgagtcctttgcacatgttggcaacacacgcatccgc

SEQ ID NO: 695501 - DNA, 75 bp, Homo sapiens
gctgatcctgtggtccggatccagagaaagttctttgcagatgtagttccagcagtcaggaagtggagagaggcc

SEQ ID NO: 695502 - DNA, 75 bp, Homo sapiens
ggcagctgttagccgagcaaattcgtcactcatgctgctgcagatggcgggtgttggactgggttccctggctgt

SEQ ID NO: 695503 - DNA, 100 bp, Homo sapiens
ctggactcagcggtagcaacctcgccccttgcaacaaaggcagactgagcgccagagaggacgtttccaactcaaagatgtgatcttcgtggtggaaagc

SEQ ID NO: 695504 - DNA, 132 bp, Homo sapiens
cccccctgcaggatgactccatcaaccaggccccactggaaatcgtctcgaaactgctctcagaggctttgatgacagtagggaaagaaccatttcctaccatttacgtagattcacaaaaagaaaatgaga

SEQ ID NO: 695505 - DNA, 75 bp, Homo sapiens
ctggcgagacgggggtgatgcccacccgggcgagaaagggcgtgatggtgggcatgggtcagaaggattcctatg

SEQ ID NO: 695506 - DNA, 82 bp, Homo sapiens
gtgttgtcgtggccggagcggcccgcgcctgggctgccggcacttcgcggcaggacggggaggtttactgcatcgacgcgcg

SEQ ID NO: 695507 - DNA, 75 bp, Homo sapiens
tccccgtcagcatcccagccgtgctcacggaggcatacacggaatacctgaggagcatccactatatctcccagg

SEQ ID NO: 695508 - DNA, 100 bp, Homo sapiens
agttcaggaggggagtctgatattgaagaggaagaactgaccagagctgatcccgagcagcgtcatgtacccctatggagtctcgctctgtcacccaggc

SEQ ID NO: 695509 - DNA, 100 bp, Homo sapiens
gcccgagctccgggaacggcggcgggtacggcggccccgcgcagcccccggccgcagcgcaggcagcccagcagctggcagccaggaggcaggagcagcg

SEQ ID NO: 695510 - DNA, 97 bp, Homo sapiens
ctcaacttcttgtcctcaagtgatcctcccaccttagcctcctaagtagctgggaccacaggtgaaagaaattcctggaataaaaatatttcaaata

SEQ ID NO: 695511 - DNA, 90 bp, Homo sapiens
ctggagaggcagagcctgtcggaagaggtggaccggctgcggacccaggcccagggccccggccagtgcccagccccgctgggagacccg

SEQ ID NO: 695512 - DNA, 75 bp, Homo sapiens
gcggctagaatcttgcctgctccacagtttgaaatcatgcccaagttcaaacaacgaagacgaaagctaaaagcc

SEQ ID NO: 695513 - DNA, 100 bp, Homo sapiens
gagtagaagaggaacatgaagatgaaagccgtgctggctcagagaaggcatcccgggcccaaatcctagacaaagccacagaatatatccagtatatgcg

SEQ ID NO: 695514 - DNA, 50 bp, Homo sapiens
agtgaccgagaccgcggccgggaccgaggaatcatattctaagaactcag

SEQ ID NO: 695515 - DNA, 82 bp, Homo sapiens
ctgaccttctggccaagctcgaggccaaaaccggcgtgaacaggagcttcatcgctcttggagcttactccacgggaacagc

SEQ ID NO: 695516 - DNA, 100 bp, Homo sapiens
cggctcttcaccaacctcaaggacacctcctccaaggtcatccagtccgtcgctaagtgagaagccctaccactgcaactgggacggctgcggctggaag

SEQ ID NO: 695517 - DNA, 82 bp, Homo sapiens
cctgagaccctccagcgctgcctggaggagaatcaagagctccgaggtgaaatgacaatggatgctctgttggctcgattga

SEQ ID NO: 695518 - DNA, 71 bp, Homo sapiens
ggagcggaaaaccttctgaagttaaaaagatcaagtggcatgagcagccttttggggaaaattggtgccaa

SEQ ID NO: 695519 - DNA, 75 bp, Homo sapiens
cacgcctgctgatgtctgtaagaggaacgagccagaatctattcatcagacagtgatgagggatcagaagaagat

SEQ ID NO: 695520 - DNA, 75 bp, Homo sapiens
ccctgttgtggctctataagcagggaagaaacccttttttcttggagccagcaataattatcacaattactgatg

SEQ ID NO: 695521 - DNA, 98 bp, Homo sapiens
aaggaacagccttccagcccggccccagtgaacgatgttagtaggcaggaagaggcggagggagagctcagtgaaggagaacactggtatggaaactc

SEQ ID NO: 695522 - DNA, 75 bp, Homo sapiens
atggcgccagtaagaagaaaaaagcgtccgcttccagctttgcgcaggccgccagatcccacccttggaccccca

SEQ ID NO: 695523 - DNA, 103 bp, Homo sapiens
ggtgatttctgcacttccaactgaggattccctgtcaattccaattctaatggtggaaatgaactctgtccaaagatcaggattggccaagatgacttaccag

SEQ ID NO: 695524 - DNA, 101 bp, Homo sapiens
ttctacagtattatgaagaaaaccatggctcaatctgaaattgaagtgtctgtctctgcaaggaatatcagaaggctactaagtttccagcgatatcttag

SEQ ID NO: 695525 - DNA, 101 bp, Homo sapiens
gttttcacttatctcgaaagcctatcagcatagttaagggagtgcatccgccccaacccttttccccctcgtctcctgtgagaattccccgtcggatacga

SEQ ID NO: 695526 - DNA, 101 bp, Homo sapiens
accttctcaggttgcctttgaaataagaggaactcttttaccaggtttctgagtcccttcaacatgatcctgggaggaatcgtggtggtgctggtgttcac

SEQ ID NO: 695527 - DNA, 75 bp, Homo sapiens
gacatgggggcctcaaacgtggagatcaactcctctctgttaatggagtggtcaaaatgcagatcttcgtgaaaa

SEQ ID NO: 695528 - DNA, 100 bp, Homo sapiens
atctttagatgacgtgatggattatcttgttaacaacacgcccctcaactggctggttccaatgattttggttggcaataaatgtgacctggaagatgag

SEQ ID NO: 695529 - DNA, 97 bp, Homo sapiens
gtcaatgtagccagcaggatggagtccacgggggtcatgggcaacattcagcgtcagcttttctttcgcaaaaagctgcttcactcatcccagatgc

SEQ ID NO: 695530 - DNA, 100 bp, Homo sapiens
ccggtcagggtcaagtcgtgttctgatcactactgacttgttgcctctttcaagtgggctttatcactattatatcatggaattggccttctattggtcc

SEQ ID NO: 695531 - DNA, 82 bp, Homo sapiens
ttctggtggggagatgaacccaacctagtgggtgtaatacatcatgaactgcaggggtgatcagcccatgacctaaacctcc

SEQ ID NO: 695532 - DNA, 100 bp, Homo sapiens
gtgtaaaggaagctcaagtatatcaagcattcaaattgctcacagctgatcctaagagaaccatggagtctggcagtaccgccgccagtgaggaggcacg

SEQ ID NO: 695533 - DNA, 50 bp, Homo sapiens
ctccggagccgctgcacatttcggttatgaagacagtatggagtttccag

SEQ ID NO: 695534 - DNA, 100 bp, Homo sapiens
gtgaaaagaaatctgttgcttcttgcatggctatccgtggtcctgaaccagttatgtgtgttgcatgagaaaacgccagtaagtgacagagtcaccaaat

SEQ ID NO: 695535 - DNA, 75 bp, Homo sapiens
cgcctgttcaactttgtcctctctcagtgacttttttgaacgaaccattctgtgcaacagccttgtgtggagttg

SEQ ID NO: 695536 - DNA, 88 bp, Homo sapiens
aaagtctgggctaccggcgcggcgtagtggatgcagcatcctagtggaggacgcccctgtgattttctccctgggccactgccctaac

SEQ ID NO: 695537 - DNA, 100 bp, Homo sapiens
gtccagctggacatacagatcagggaggctgtcgtggcagtccatcaaggggacccacctcaccatcacccagggtggacacggtggccgcggagcatct

SEQ ID NO: 695538 - DNA, 75 bp, Homo sapiens
aacagaggaacattttgaaactccaaaagaaactcttccttcaaaacctgtgaagaaagagaaggaacagaggac

SEQ ID NO: 695539 - DNA, 76 bp, Homo sapiens
aagaccaaaaaacacaataccaggcatacatttggcagaataaatgaaccagtaaatggggagcaggagaaccgag

SEQ ID NO: 695540 - DNA, 78 bp, Homo sapiens
gagttgtttagaacccgtcaggtggtgaagaagtactgtctctggaatctgttctgcgccacccggcagataatcgca

SEQ ID NO: 695541 - DNA, 74 bp, Homo sapiens
ccaagttccaggattaattctgatgacttgtttaaagttcacaagcttaagccaaatctgaagtggcgacaggc

SEQ ID NO: 695542 - DNA, 99 bp, Homo sapiens
cccgtctgccccgcccacatctagaacgctttttaattaaatgaagccaagtgggatttgcataaagtgaatgtttaccatgaagataaactgttcctg

SEQ ID NO: 695543 - DNA, 100 bp, Homo sapiens
tagctcttcttttaatggtggaagacgagatgagaattccttgtgtggatatcagatccggatggaatctcgagcttgtgaatctaccaggttactctat

SEQ ID NO: 695544 - DNA, 50 bp, Homo sapiens
cgacgaaattagccagctccgcctgtcagcaaatcacatgaacagttccc

SEQ ID NO: 695545 - DNA, 98 bp, Homo sapiens
tgctggagacctgccatttccaggccttctggattattcagtaagaacagtctcaggaaaacaggaccttcaacagagataagagaattaaaatatgc

SEQ ID NO: 695546 - DNA, 75 bp, Homo sapiens
acgtatttgtgtgacttgactcttcaaacacaaagggacccagacatggagctgcgggaagaagcctggtctccg

SEQ ID NO: 695547 - DNA, 100 bp, Homo sapiens
ttgctcttattcagtgtaatcctaatctcatgggtatccactgttgggggagaagtgaattttgaagattgcaccggtcgacaaaggacagcctattttt

SEQ ID NO: 695548 - DNA, 100 bp, Homo sapiens
agctgttccttggccatcccaaagctattctgggggcaacagagcctacaatcagggctttggcattaaaggttttaagagaaatcctaaggcatcaacc

SEQ ID NO: 695549 - DNA, 100 bp, Homo sapiens
gaggcctcgcgaccgccgagcctgcagcctgccccgcggccaacatgagcttcttgttgaaaatgtttataggaggccttagctgggacactacaaagaa

SEQ ID NO: 695550 - DNA, 82 bp, Homo sapiens
acggcttcccccaaggaatatacagggcagctgcaatgactctccgcacggtattattgtcattgcaagcactattggcagc

SEQ ID NO: 695551 - DNA, 80 bp, Homo sapiens
ggagacaacttgtgcgggagcccggagtcctcggaataacacttggtcaaaatgcagatcttcgtgaaaacccttaccgg

SEQ ID NO: 695552 - DNA, 76 bp, Homo sapiens
cgccgccccctccctccggtgggcccgggaggtagagaaaatgggagcagcctcccagagtgggtgacagacaacg

SEQ ID NO: 695553 - DNA, 100 bp, Homo sapiens
cagtcaccgcttctttggacccaatgctgaaataagagtctgaaggaaggcctgacggtgcaagaacggttgaagctctttgaatccagggacttgaaga

SEQ ID NO: 695554 - DNA, 83 bp, Homo sapiens
tgcgggcaccgcagtcgccgtgaagatggcgtctaccagccggaaaatatgttgtgttcttcttttaccctcttgacttcacc

SEQ ID NO: 695555 - DNA, 74 bp, Homo sapiens
actacggtgtgctgttagaaggttctggtcttgcactaaggtattgaagcccctgggtgataatttgatggagg

SEQ ID NO: 695556 - DNA, 75 bp, Homo sapiens
gcatctatgaggacgtcatccgggggtgcttgctgcagaggattgaccaagatctgctttgacagtaaaccccgg

SEQ ID NO: 695557 - DNA, 75 bp, Homo sapiens
gacggccatgtccgaaacctacgctgttcgggggtcttgtctggattttggttgcctcctccaatgttcctctac

SEQ ID NO: 695558 - DNA, 100 bp, Homo sapiens
ccggttgggtaccagttggaaaaagggatatgcaatttggtccttgctggtgcagacgaagcggcgggctctggagaagattgaccttaagttcattgac

SEQ ID NO: 695559 - DNA, 101 bp, Homo sapiens
gcctgggatattgtggttgataactgtgccatctgcaggaaccacattatggatctttgacgagattgaggagctgcgggccgagatgctggagatgcggg

SEQ ID NO: 695560 - DNA, 98 bp, Homo sapiens
gagcttctctccagagtagaaagagccaaagccttggctggacagtcagtacgaatctgtaaaggccccagggctgtgttttcccgcatcttgctact

SEQ ID NO: 695561 - DNA, 76 bp, Homo sapiens
ggcgagagatggtcaggtctggagctcgaccgggccaggtggaaccgtcccaaaatgtcccttgctcagaagaagg

SEQ ID NO: 695562 - DNA, 90 bp, Homo sapiens
caggatgcctctcagctgccacctgcctttgacctttttgaagcctttgcaaaagtacggttcctggagcagcagaacaagatgctggag

SEQ ID NO: 695563 - DNA, 74 bp, Homo sapiens
cggcaccggatcaccaagacggaggaaatgtgactggaaacagtaactccacgttcatctccagcgggcaggtg

SEQ ID NO: 695564 - DNA, 75 bp, Homo sapiens
ctgggacagccatggtttcagacgaggcggggtttcaccatgttgcccagactggtcttgaactcctgagcttaa

SEQ ID NO: 695565 - DNA, 110 bp, Homo sapiens
tggagtcggctgagggaaaagcgaggcaaggcaggcgggtatgagtcgtcatccgaggactccagcacagcagagaacatctcagacaacgacagcacagagaacgaggc

SEQ ID NO: 695566 - DNA, 82 bp, Homo sapiens
tttgttaaggattccaagtaactcttatttggtgagccagccatgagagggtatcttgtggccatattcctgagtgctgtct

SEQ ID NO: 695567 - DNA, 75 bp, Homo sapiens
ctggaggtcagtgtggcctcgcgtttgtcttcggtgacgggaagaccatggccaacctggagcgcaccttcatcg

SEQ ID NO: 695568 - DNA, 100 bp, Homo sapiens
caggataagatcctcttcaccaaggctgaggacaatgagacggtttaagcggaagcatcttactgccattgactgccagcatttggctcggagtcacttg

SEQ ID NO: 695569 - DNA, 100 bp, Homo sapiens
tgttaaggattccaacaacaattccgatggcaaagccgttgccaaggtggctgggagcccgagccccacacctgccgggcagcaggtgctggacgtcgac

SEQ ID NO: 695570 - DNA, 114 bp, Homo sapiens
cccagctggattcggtgcgggtctggctgggcaagcactacaagaaggaatagccaggccagaagaaggaaggcctgtggtgagtgggacaggaaatgacatcaccaccccacc

SEQ ID NO: 695571 - DNA, 100 bp, Homo sapiens
agctgcaccccaccttgatccagcggacttacggcagttggaattgatcacaccttttcagttgtacttcaatcctgaattaatctttaaacactttcaa

SEQ ID NO: 695572 - DNA, 100 bp, Homo sapiens
gaagtactgagcctgttggaggaactggcccggaaacaggaggacgttgtggcagcactgcctgaaggtatgagaccagattctaatctttatggttttc

SEQ ID NO: 695573 - DNA, 83 bp, Homo sapiens
cagcagaagctccagagcccagacttgcagatggagaaggatgaaactgtgagtgactgctccccacacatagccaacatcgg

SEQ ID NO: 695574 - DNA, 74 bp, Homo sapiens
tgcctccaggccgtcaagtacctcatgttcgccttcaacctgctcttctgggacctgaaggagaagaaggagaa

SEQ ID NO: 695575 - DNA, 75 bp, Homo sapiens
ccgtcctcggcggcagtgtcaggaggagaaggcagagcccccccaggctatgaatgccctgatgcggttgaacca

SEQ ID NO: 695576 - DNA, 83 bp, Homo sapiens
cgacctcgacgtcttgcctgtgtcccacttgttcgcggcctatagggctttgttcgcgggggtcacagctctcatggctgcag

SEQ ID NO: 695577 - DNA, 100 bp, Homo sapiens
aacgaattcagtgatatcattaagtccagatctgttacctagaaaagtacgagaaagttcatcattttggggaggatgatgatgaggtaccaccaggcaa

SEQ ID NO: 695578 - DNA, 100 bp, Homo sapiens
cagacccttccccgtgctcagacagtgcaccgctgtcccatctaaagaaacctgtcaggaatacgagcttctggattgtccagaacatcgtgggcacagc

SEQ ID NO: 695579 - DNA, 83 bp, Homo sapiens
cccccttccccacgcaaccccagatccatttacactttacagcccagcagtgagaaactttcacaatctgtaatagatggtgt

SEQ ID NO: 695580 - DNA, 100 bp, Homo sapiens
ggcagacagcggcgccttcctgctgctcttcctgctcgtgctcactgtcaccgagccgctgcggccaggatccacctctgatgttcagtgaagactacca

SEQ ID NO: 695581 - DNA, 98 bp, Homo sapiens
ccggcgtagcggccagcgcctgagcccgcccttgatcttcgctgtggcatggcggacgaggggaagtcgtacagcgatatgatggacgtggtcacctg

SEQ ID NO: 695582 - DNA, 90 bp, Homo sapiens
cggcaccttcggcaaagtgaagagctccacgaaacccttctgggtgtgaggtacagagctcagcacgctgctggtccttaaaaaaagaac

SEQ ID NO: 695583 - DNA, 94 bp, Homo sapiens
aggaagctgagtcagctacgggcaagcgggcagctgaagatgatgaggatgaagcggatcccaaacggcagaagacagaaaatggggcatcggc

SEQ ID NO: 695584 - DNA, 83 bp, Homo sapiens
ctgcagcgctctcgtcttctgcggctctcggtgccctctccttttcgtttccggaaacatggcaacatgagtgagaatgagga

SEQ ID NO: 695585 - DNA, 90 bp, Homo sapiens
acagtgggggtgtgcaaacccgagagaactggctacaaaagaccccacagctgtagagagagcaaacttgttaaacatggctaaactgag

SEQ ID NO: 695586 - DNA, 76 bp, Homo sapiens
ccagccagaagcccttgagcatcacgagacgagttgtactgctgtcacaggaaatggacgctggattacaagcatg

SEQ ID NO: 695587 - DNA, 109 bp, Homo sapiens
aagatgctgcttactggtgggaaatcaagtcgtaaaaacaggtcaagtgggaccacttaatagtgagtcttccaaccagagcttgtgcagcgtcggatccttgagtgat

SEQ ID NO: 695588 - DNA, 83 bp, Homo sapiens
tgaatggtgccgaccgcggccatcgcagttggaggctattttttggggggggtttggtgcacctcgatttggaggaagtaggg

SEQ ID NO: 695589 - DNA, 86 bp, Homo sapiens
ccaggtgtaagcgcagaaagcaggcgaacccgcggcgcaataacggaatgtatcctgtcaggtataatgtcagtgaatggcaagaa

SEQ ID NO: 695590 - DNA, 75 bp, Homo sapiens
tttagccgggcgaaagtatcatatcagctgtttctggcaaagcctgccgtgtcttacatttgtctctctatccgg

SEQ ID NO: 695591 - DNA, 100 bp, Homo sapiens
cagaccccgcgcccaggagaggagccgcgccgcccgccgctggcagcccgtcaccatgatgaacaagagaactgggcaacccatgatccacatctacctg

SEQ ID NO: 695592 - DNA, 51 bp, Homo sapiens
cgacccggatctcaacaatcccttcaagatatcctgcaaggaaactttaag

SEQ ID NO: 695593 - DNA, 98 bp, Homo sapiens
ggccaacgggccaggtaggatttccgggagaggctgctgtggaggctgaggaggcggcggcggagatctggtaccttggccatgtagaagttgatgaa

SEQ ID NO: 695594 - DNA, 82 bp, Homo sapiens
ttcaagcatctgaaaagctttttaaactgaagacaccagcatggtgctaaaatgatgtattttctggacaagtcaaggcagg

SEQ ID NO: 695595 - DNA, 73 bp, Homo sapiens
tctcacattggccggcaacttgttccagtgtgttaacagggcacaaccattatgtgatgtgtgctcagttcca

SEQ ID NO: 695596 - DNA, 100 bp, Homo sapiens
gatatgtagcgaggaggaacgcgctaaggcaaagcacctgactcgtttgtgaacagccaggagtggacgctgagccgctccgtaccggagcttaaagtgg

SEQ ID NO: 695597 - DNA, 75 bp, Homo sapiens
catcctgctgggcttcgtccagatcgggaaggaaatcatgaccaccccaggaaaagagaactttcgcctgaaaag

SEQ ID NO: 695598 - DNA, 50 bp, Homo sapiens
aagacatttcttcggcattctgcaacagtggcctgttctatagcatcttt

SEQ ID NO: 695599 - DNA, 100 bp, Homo sapiens
gttccccgcgctgcggcctggcggcttccaggcgcactaccgcggtgtcatggagaaactccagctgggcccagagattctgcagcgggaaaatccaagg

SEQ ID NO: 695600 - DNA, 80 bp, Homo sapiens
cgcaactggtcttggtagcggaggcacccgaatgctgcccgggtgagactgtgccctgtccacggtgcctcctgcatgtc

SEQ ID NO: 695601 - DNA, 83 bp, Homo sapiens
gggagctggacggcgagcgcgagcggcgcgagaaagtgctggttgccgaggagaacgtggacttccgcatccacgtggagaac

SEQ ID NO: 695602 - DNA, 100 bp, Homo sapiens
gcacctgctggagccagatgctgagtacctccactggctgctgagagaagtggatgggccctatacctccagccgtgaatgccagactttaagattgccc

SEQ ID NO: 695603 - DNA, 100 bp, Homo sapiens
cagcgctcgtgccaccaagggcaggatcctcaccgtggaggaccattattatgaaggacagagcgggatgccaccagcttgtccaaagggaagttccagg

SEQ ID NO: 695604 - DNA, 96 bp, Homo sapiens
gaagcatatacttttgaaggtgcaagatactatataaagaatctttgcctttaagtgtgcccgtgcagaagaattatttaacatgttgcaagagat

SEQ ID NO: 695605 - DNA, 78 bp, Homo sapiens
atgatgatggaaatgaagtataataccaagaaagccccacttgggtgtccgcaatgttgccagtgtctgtctgcagat

SEQ ID NO: 695606 - DNA, 75 bp, Homo sapiens
aaaaggaagagagcactgcagccagtgaaaccactgagagacacctatggctgccgatgaaggctcagcagagaa

SEQ ID NO: 695607 - DNA, 75 bp, Homo sapiens
gcgagctccccgacgaggagcgcggcgagatctacgtgccagagtgtgaacatggctacgcctcttcattcccgt

SEQ ID NO: 695608 - DNA, 74 bp, Homo sapiens
caagctttagagcctggctactcacagttgaagcctgattgcaggacctgctgaagcacacacctgtggaccac

SEQ ID NO: 695609 - DNA, 100 bp, Homo sapiens
gaaattggatcaagaatgggtcccatattcaacatctgctagtctgtatattcgtcctacattcattggaactgagcctatatatgcaaacagatttgca

SEQ ID NO: 695610 - DNA, 99 bp, Homo sapiens
gaacaaaatcagtttacaagactatgaaggattccactatgacaaggagaaactccgagaagcttgcatagagaaggagacgtgccagaagatggaaga

SEQ ID NO: 695611 - DNA, 75 bp, Homo sapiens
tgggaacccgcggtggagcgggacacgaacgtggtgtgaacccacatccctgcccccagggccacctgcaggacg

SEQ ID NO: 695612 - DNA, 90 bp, Homo sapiens
ggtactgagtgaaggtgcagtgctggcggatgctgaaaacgccattcaacagatgggtggccagtggcttggtggaagacaaatcagaac

SEQ ID NO: 695613 - DNA, 96 bp, Homo sapiens
gcttcgccacctgcgtgcaaagtcacggagctgctggacgtctccatggagctgggctgtttcctggctggagcgctcgtctcctctcagggcccc

SEQ ID NO: 695614 - DNA, 101 bp, Homo sapiens
aacgtgttggaccttccggagcttctcagaagacagagggttttcttttgaggattattgtgcaacaaagtggtccattttgcgggaacgctttgaccgag

SEQ ID NO: 695615 - DNA, 98 bp, Homo sapiens
aattcatcctttggaaactgaacaggcaggattagaatcggacccgtgacattaaaggatgttattgtggaattcaccaaggaagaatggaagttact

SEQ ID NO: 695616 - DNA, 82 bp, Homo sapiens
ctccattggatttaaaagacagtcctcgtcagcactgactttcagctatggaatcggtgctatacttggtagatcagaaact

SEQ ID NO: 695617 - DNA, 138 bp, Homo sapiens
tgaacgcggtgcggacgtggatgcagggcgccggggtgctggacgccaacacggcggcgcagagattctgtttctggcgtctgcatacgcaagtccccaactcgctgaggagagctgttcagctatggctgctgtcac

SEQ ID NO: 695618 - DNA, 98 bp, Homo sapiens
agccatgagcggcggcgtgtacgggggagcgagtaaccagctcataaatcacatcgaacagtttttggatactaatgaaacaccgtattttatgaaga

SEQ ID NO: 695619 - DNA, 51 bp, Homo sapiens
gagcctgcaaatggccaatgaaggaggtagacaagggcgtggtccccctgg

SEQ ID NO: 695620 - DNA, 80 bp, Homo sapiens
cagcggcggagccgcctcggacgacaatgcagatcttcgtgaagactctgactggtaagaccatcaccctcgaggttgag

SEQ ID NO: 695621 - DNA, 101 bp, Homo sapiens
tgtttgttcgtctgctgagactcggctccaaggtcacagctcgtaacactggccgccagatcccacccttggacccccatgaaaatggaaacaatggaaca

SEQ ID NO: 695622 - DNA, 87 bp, Homo sapiens
gagagtgaacttggaatcttggacctcatccagacgttgagaaagaagggccttaatggctgtgacagcccagaccccgatgcggac

SEQ ID NO: 695623 - DNA, 96 bp, Homo sapiens
aagagccgttagtcatgccggtgtggtggcggcggcggagactgcgggcccgtagctgggctctgcgaggctctccagcagaactatctcctacta

SEQ ID NO: 695624 - DNA, 100 bp, Homo sapiens
gatcccaggctgggccccgcggcgggtctatgcctctcagcgaatgagagctggcaaaggcaaaatgagaaaccgtcgccgtatccagcgcaggggcccg

SEQ ID NO: 695625 - DNA, 100 bp, Homo sapiens
gaaccccaaggccaacagagagaagatgactcagcgacaagactctgggacgatgaagaagccgcacaccactgaagagattggtgtgcccatatccagg

SEQ ID NO: 695626 - DNA, 100 bp, Homo sapiens
ctgatcatgagctccagcagaccataagggataacctttaccgccatgctgtgccttggagactcatgcatctgtatgccgtgtgcgtggactgcctgga

SEQ ID NO: 695627 - DNA, 75 bp, Homo sapiens
ggagaacttggaaaggttcagtttcgtgacgagaccctcctgttcttaactgtgggcgatgagaaaggtggtgga

SEQ ID NO: 695628 - DNA, 100 bp, Homo sapiens
agaggtcagatgatgacagctgtgtccttaacaaccaggccccagacaagttggatggcttgaggactggtactaaaaggaaacgtgactgggaggccat

SEQ ID NO: 695629 - DNA, 50 bp, Homo sapiens
gaccctgctgtcactgactttccagcttctagtggtacccgtgggctgaa

SEQ ID NO: 695630 - DNA, 83 bp, Homo sapiens
ggctgttagaagaattcatgctcatccgggtaaacaagacattaagtgtttaaggcaaaaagcatggagaggttggggaagag

SEQ ID NO: 695631 - DNA, 83 bp, Homo sapiens
cacagagagggcctgggagcttgctgcagcttcagctattactataacaagcgcattctgcacaagaccaaggggaaacggtt

SEQ ID NO: 695632 - DNA, 75 bp, Homo sapiens
cttcagcagttttaccagtgagcaaaggtaatcctcctcttcccaatccttttggtgatcctaatttatcacaac

SEQ ID NO: 695633 - DNA, 76 bp, Homo sapiens
ctgagtttttggagatgttcgttggtgtgggccctgctagagctgctcttggaattgcaaatcttatagttatgtc

SEQ ID NO: 695634 - DNA, 100 bp, Homo sapiens
gtgagttatcggcgatatggtgatgaggttttccaacctattggtggtatgtctgacagtggatcacaacttggttcaatgggtagcctcaccatgaaat

SEQ ID NO: 695635 - DNA, 82 bp, Homo sapiens
acagcaacttttccgaggaggaggacagcgagcgcagcagtgacggcgaggaggccgaggcaggccagaaagcagacccagg

SEQ ID NO: 695636 - DNA, 100 bp, Homo sapiens
aaaccgaccctgattacgaggatgtatctgtggcccttccaaataagcggcataaagcaattgagaattcagaggcattcgacttacagcagtgtgcggc

SEQ ID NO: 695637 - DNA, 75 bp, Homo sapiens
agacaggcacctggataaccttttgctaacaaaaacaggtgatgtaaaattctcaaacaatgagatagataaaaa

SEQ ID NO: 695638 - DNA, 90 bp, Homo sapiens
agcgcactccgtggccccgatggagcggtacaaaggtacgacagtgccagcccacagggccatcctggtggcccgttgtgaagtgatggc

SEQ ID NO: 695639 - DNA, 100 bp, Homo sapiens
agccgcctcagaacccgaccaacatccagaacttccagctgcccccaggtcaccgacgatgagggcgcacctgctgtcctggagcttccgatctctgttc

SEQ ID NO: 695640 - DNA, 100 bp, Homo sapiens
ccggggcttgccctggtcttgctcggccgatgaagtgcagaggtttttttctggtgtctgacttccagcaactgctggcctgtgccagggtgcaagctga

SEQ ID NO: 695641 - DNA, 82 bp, Homo sapiens
aatcaaagctcgacttctcaatcccaagtggccaaagagctccaaacgagaatggaagccgctggaggaccgtagctgcaca

SEQ ID NO: 695642 - DNA, 117 bp, Homo sapiens
ccagcgactacgcggccgcggagacctacctgcggcgtcggcagctgctgctccgaggcagctcctttgggacccagatcatcgggggccgggaggtgatcccccactcgcgcccgt

SEQ ID NO: 695643 - DNA, 97 bp, Homo sapiens
aggtgaaacagattggaaattaattgctatcaatgcgaatgatcctgaagcctcaaagtttcatggtccagcccagaatcaaatgcaggttccatct

SEQ ID NO: 695644 - DNA, 82 bp, Homo sapiens
cattcccaacagccaccaccaccaccagatggtgacttaagagattaaaattaatttggttgctgttggttctgaacaaata

SEQ ID NO: 695645 - DNA, 103 bp, Homo sapiens
tccagcaactccagcctgtccggctcgtcggtgtcctccgattcacaatgacatcctttcaagaagtcccattgcagacttccaactttgcccatgtcatctt

SEQ ID NO: 695646 - DNA, 100 bp, Homo sapiens
gcagagcggaccgccaccgccgggaggctgctgtacgacatctattattcatggactatccagtctaacagcttgccagttgagaacgatatacatatgt

SEQ ID NO: 695647 - DNA, 82 bp, Homo sapiens
ggaaacgcttgtagggtttcaccaggtttttagaacttcagccataaaaatgggcagaattttccttgatcatatcggtggt

SEQ ID NO: 695648 - DNA, 85 bp, Homo sapiens
gaagagcagcttagcgaaagaaaccctctctgagttcttgggcacgttcatcttgattttacaacagagattgacagtttcgccg

SEQ ID NO: 695649 - DNA, 90 bp, Homo sapiens
ctgatcgagcgcatcgaggatttggcgctgcagaaccagatccgggagcacgtcatctccatcgaggctctgctgtagctgccactgaga

SEQ ID NO: 695650 - DNA, 96 bp, Homo sapiens
cggcggtgacaacgacggcggtggtgacgggcaccgggctcgcgggtggtggagattgtgaagaagctggagtctcgccagcggggctgggaggag

SEQ ID NO: 695651 - DNA, 75 bp, Homo sapiens
gaacacctgtgatcaacctgggaacacgtcagattggaagagaaacagaatgccagtgcccagtatctgggagaa

SEQ ID NO: 695652 - DNA, 100 bp, Homo sapiens
gagacccagtctgagtgtctgtccccagagcctcagtttgtgcaggacaccgacatggaacagggactcactgggggagcccctcaatagtgaagatgat

SEQ ID NO: 695653 - DNA, 75 bp, Homo sapiens
cacgcacttatcattcagtgggtagtcagatgcctccgcagccacccgggagccagtcagaatccagttcccatc

SEQ ID NO: 695654 - DNA, 98 bp, Homo sapiens
ggcgagcagaactacggcgagcgggatgaatttcacccattcatcgaggcacttcttccacatgtccgtgcaattgcctatacttggttcaacctgca

SEQ ID NO: 695655 - DNA, 75 bp, Homo sapiens
gtctggaaaagcggtacattgcttcttatttagcactcacagggtttgaaagtattcttgaagggctgtttggac

SEQ ID NO: 695656 - DNA, 76 bp, Homo sapiens
tggttctggaatcctcagttcaagatagccttctggcaggcattcctcagagagtcaagttcactgtcactaccgg

SEQ ID NO: 695657 - DNA, 100 bp, Homo sapiens
gagaatggaaaggaatagacaggctacgcctggacaaatactatatggtgccgtgagcgatgtggagatgcaggaacactatgatgagttttttgaggtg

SEQ ID NO: 695658 - DNA, 98 bp, Homo sapiens
ggcggcgagagatggtcaggtctggagctcgaccgggccaggttcagcctccgttttgtactccagatgaatttacatactgggcaacagactgtgga

SEQ ID NO: 695659 - DNA, 101 bp, Homo sapiens
ctctcccacaacattgaaggtgcagaagcccagatggagaacttaatgttctggatgatattttaactgaagtaccagaacaagatgatgaactgtataat

SEQ ID NO: 695660 - DNA, 100 bp, Homo sapiens
cgaagttctcacggatctggccaacaagacgcacccgtccatcttcgggatcttcgacgggcacgggggagagagcaaagactcaggtggactgaaggcc

SEQ ID NO: 695661 - DNA, 98 bp, Homo sapiens
gacggaaagcagatccgtggttccctgcagactggcaggagcagattccaaaggcacaggaagaagcttgcagggcagcttgtgcagctggaagagaa

SEQ ID NO: 695662 - DNA, 75 bp, Homo sapiens
aaggaactcgatttatatttggcatactttgtgcatgcagcagaattgtattcccattggagagcagcttcagtc

SEQ ID NO: 695663 - DNA, 75 bp, Homo sapiens
aggacatctgggggccacaaatgctccttctcctggagacgcaactcaagatagtgtctgccttctggagagctg

SEQ ID NO: 695664 - DNA, 82 bp, Homo sapiens
ttctgctgctgaagtaatgcaatggtctcaatctctggaaaaacttcttgccaaccaaaagtgaagacatttccacctggac

SEQ ID NO: 695665 - DNA, 140 bp, Homo sapiens
ccgacctgcacgaatacgcctcgataaacagggccgtgccgcagatgcccaccggaatggagaaggaagaggagtcggccaaagaactgccaactctgaaagataatgatttcattaatgagggccaaaagatttatatt

SEQ ID NO: 695666 - DNA, 87 bp, Homo sapiens
acaagctgacgctggacaagctggacgttaaagggaagcgggtcgttatgagctgctcaagaagccagaaaaaggagatgaaaaaga

SEQ ID NO: 695667 - DNA, 98 bp, Homo sapiens
ggtggagtaggaggcaggtctccgcggtttgccatgcagaacttgaattggggacttgttttcaagcagtaaatagcagaattcagttacaaattctt

SEQ ID NO: 695668 - DNA, 51 bp, Homo sapiens
tgccccagcccatcctctctaaccaaggatggcacatttcctagaggcaga

SEQ ID NO: 695669 - DNA, 100 bp, Homo sapiens
gctcaccgacagtgccctgagggccttcgagagctaccgcgccagacagatgccttcaattaagttgcagagttctgatggagagatatttgaagttgat

SEQ ID NO: 695670 - DNA, 109 bp, Homo sapiens
ccacgtcgccacctacggcccgagacacaccaggccggcaggctgagaaaagcgagaccgcgtgcgaggaccgcttcggaaccaaaaagaagcttcccagagccggggc

SEQ ID NO: 695671 - DNA, 98 bp, Homo sapiens
cggtcaccatctacctattcttcaaatggtagatttcgggcagacaacttgaacaagctgaagaacctatgcagcaagacaatcggagagaaaatgaa

SEQ ID NO: 695672 - DNA, 90 bp, Homo sapiens
gacgagttcgtcatccgtgctgaggacatcccttccctcaagagcatcctggccagaacaagccaaggagccaagacgagagggacacac

SEQ ID NO: 695673 - DNA, 72 bp, Homo sapiens
gcaatttgccatttatttgtaataagcaggcgggtgaaaatgaaagccggctgtagcatcgtggaaaagcca

SEQ ID NO: 695674 - DNA, 100 bp, Homo sapiens
cgcacctcggggacattattgcgcgtggaacggctgcttttggaaggggtcgctgtgatgaaattcaagaaccccccagtgaacagcctgagcctggagt

SEQ ID NO: 695675 - DNA, 100 bp, Homo sapiens
tggagctgggtcagtccgccgctcaccccgcggccgcaccttcccgccttctcaggtcaaagctcagattcacagttgcataagccgtcacctggaatgt

SEQ ID NO: 695676 - DNA, 100 bp, Homo sapiens
gctgagctgcgaggaaaatggcggcgggagagctggactggccattatggaggaggagctgcagcattcccattgtgtgaattgtgtcagtagacggtgc

SEQ ID NO: 695677 - DNA, 101 bp, Homo sapiens
gctgttgctgccgccatacgcgctctccctgtttaggtgggcgtggacttcactggctccaatggagacccctcctcacctgactccctacactacctgag

SEQ ID NO: 695678 - DNA, 50 bp, Homo sapiens
cctgtgtgcatggctttccaaaaggaatctgagtgggacatacttttgaa

SEQ ID NO: 695679 - DNA, 50 bp, Homo sapiens
tggggagcccttctgcgccacagggatggttgtgcgagctgttacgctgg

SEQ ID NO: 695680 - DNA, 50 bp, Homo sapiens
agcagacagaacctacaccatccgtgagcttattccactaagctcaacaa

SEQ ID NO: 695681 - DNA, 78 bp, Homo sapiens
gaaggcctggggccccaggtggagctgggtctgcaagtggatgatgagattgtggagttcggctctgtgaacacccag

SEQ ID NO: 695682 - DNA, 72 bp, Homo sapiens
tgtgtccagaacgtgccatggagacgcttaacgggaagttgaaagaatggagcctcatactgtatggcacag

SEQ ID NO: 695683 - DNA, 90 bp, Homo sapiens
agcactgatgtggacttgattgtggaagtgctaagatcctgattcggactccaccaaacactcaactccatcgaatagctccaaccccag

SEQ ID NO: 695684 - DNA, 75 bp, Homo sapiens
caagatgaggaggacggaagtgtggtgaaggtggacacagaagccgcaggtgaaatgtgaggccaggtcagcctt

SEQ ID NO: 695685 - DNA, 75 bp, Homo sapiens
cataccgttgaccgctcctccaactaaccaccagtcggatgatgattctgggtcagcttcaggctctggatctgg

SEQ ID NO: 695686 - DNA, 98 bp, Homo sapiens
gccagggctctatcaaggggctggtgtactccagcaacttccagacttatgtttaaagaggcatttgaatgcatgagaaagctgagaatcaatctcaa

SEQ ID NO: 695687 - DNA, 75 bp, Homo sapiens
gatccagctttgttgaaaagcgaagccgttagtcccttaatacaaagggaacctggcttctgtatttaccatgta

SEQ ID NO: 695688 - DNA, 97 bp, Homo sapiens
ctcgtagggactccaaaccccagtactcctctgcccaacactgtacctcagttcattgccagagagccatgtgatgatgaaggaatccaggagacag

SEQ ID NO: 695689 - DNA, 75 bp, Homo sapiens
ttgacatttaattttagggtcctttatatagaagggagagaaatgctgtctatgatttcttcattggccgtgaat

SEQ ID NO: 695690 - DNA, 100 bp, Homo sapiens
gaagctcgatctgaagaggcagaaggagcaggctctgcgggaggtggagcacctgaagagatgccagcaggtttggtgcacctcgatttggaggaagtag

SEQ ID NO: 695691 - DNA, 99 bp, Homo sapiens
tgcttcaaagcatggggctaactccagaatcccccattgaaaaggtggtgctcaaacctaatgatgtttcagtatttacgacgctcaccattaatggac

SEQ ID NO: 695692 - DNA, 76 bp, Homo sapiens
aaggtgaacgggcggcccctggagatgattgagccgcgcacgctacagtacaagcaggttcaggagaagtggcacc

SEQ ID NO: 695693 - DNA, 100 bp, Homo sapiens
ggccctcagagacctagatccaactctgggagagagcttactgatgagggtttggagaacattgattaaggaagcattttcctgattgatgaaaaaaata

SEQ ID NO: 695694 - DNA, 73 bp, Homo sapiens
gcggagcacatgatagaaaaggtcgagaggcacattcagcgccaggttatcaatactctggctgaccatcatc

SEQ ID NO: 695695 - DNA, 80 bp, Homo sapiens
ccgccgaaaaagagaagacgctttacccgactctttgggccgttatctcacgctgatcagctgaccgaagaacagattgc

SEQ ID NO: 695696 - DNA, 90 bp, Homo sapiens
ccctccatcctctacgggggcagggctggagtgcagcagcacgatctcggctcactgcaacctccaactcccaagttcaagcgattctcc

SEQ ID NO: 695697 - DNA, 97 bp, Homo sapiens
aattgaggaattcatggtaacttctgaaaatttaagcagtataccttaaatggcaagaaggaaataaatcatctgacatcactcagattgaagagga

SEQ ID NO: 695698 - DNA, 100 bp, Homo sapiens
aaagatggagccctgcatatgattggctctttagctgaaatacttctgaaggttctgcggcatgaggaatttgaagaaggctgcaaagctgcctgtaatg

SEQ ID NO: 695699 - DNA, 100 bp, Homo sapiens
ggcgcgctcctgccttgaccaggacttgggactttgcgaaaggatcgcggggcccggagagcagcctcccgcgacgatgcccctcaacgttagcttcacc

SEQ ID NO: 695700 - DNA, 96 bp, Homo sapiens
gcaggatgaagttcgccgagcacctctccgcgcacatcactcccgagtggaggaagcaatacatccagtatgagaaaaacgttgacctcttggcga

SEQ ID NO: 695701 - DNA, 98 bp, Homo sapiens
aggaggtggtgatcatggagacagatttggctgaaatgcctgagaaaggaggaattcctcctgatcagcagagactgatctttgctggcaagcagctg

SEQ ID NO: 695702 - DNA, 75 bp, Homo sapiens
gtcgcgaggttcgagtgttgcagagcctgcggggcaagatctgaaaatttaaacctagctctgaattctgcctca

SEQ ID NO: 695703 - DNA, 51 bp, Homo sapiens
ccatcccggaggtctccgccggctcccgggctactgcagcactggggtgtc

SEQ ID NO: 695704 - DNA, 100 bp, Homo sapiens
gagagaaaagtgagtttattctgaagagcatccaggatattggtgctggaaaaggcaaatactatgctgtcaattttccaatgagagatggtatagatga

SEQ ID NO: 695705 - DNA, 100 bp, Homo sapiens
ggaaacccaataccaccttggaaagtgccgcttcgagagctgtgcccaggagtgaacaaccagccctacctctgtgagagtggtcactgctgcggggaga

SEQ ID NO: 695706 - DNA, 100 bp, Homo sapiens
gccctggtcttgctcggccgatgaagtgcagaggtttttttctgaaaattacttggggcacacagcaaaaaatgctgtgatcacagtcccagcttatttc

SEQ ID NO: 695707 - DNA, 82 bp, Homo sapiens
aaattgatgcacaaaataagctggaaaaatctgaggccttgtttgtatgaagtccagcacatctgtggttgagcttgttatg

SEQ ID NO: 695708 - DNA, 98 bp, Homo sapiens
gctgctagcagaagccaagtactacctagtccaaggcctggtggaagagtgccaggcggccctacaaggtatgttagagcccaccaaggaaccactga

SEQ ID NO: 695709 - DNA, 75 bp, Homo sapiens
tcctcctggccaccgactcctacaagcaatggctgccatccggaagaaactggtgattgttggtgatggagcctg

SEQ ID NO: 695710 - DNA, 100 bp, Homo sapiens
ggggggcacgcagctgaagctcatcatgaccttccagaattacgggcaagcgctgttcaaacccatgaacgggctgacgcacgaggcacacaggaaggag

SEQ ID NO: 695711 - DNA, 98 bp, Homo sapiens
ggaacatcgcctctttccatcgaacattccgagaatgcgagagaaagagcctccgtcaccacataaccccaccaacaactgaacgctttggtcaggct

SEQ ID NO: 695712 - DNA, 75 bp, Homo sapiens
atctcgagagacctgcgtacattcggggtgccagaaggaaagcataggtacttgaagaaacagaagctcaacatt

SEQ ID NO: 695713 - DNA, 96 bp, Homo sapiens
ggatcttcttcactgcctctggcatggatgagacacaaatgccagaccctaagaccttcaagcagcactttgagagcaagcatcctaagactccac

SEQ ID NO: 695714 - DNA, 75 bp, Homo sapiens
gagctggaggagctgcgctcggagaacgactatctcaagaagatggcagtgaacgtatactcaacgtcagtgacc

SEQ ID NO: 695715 - DNA, 75 bp, Homo sapiens
tggcgcccgcggccgacgacgcgggagagccgcccccagttgcggatttgataatgggctgcattaaaagtaaag

SEQ ID NO: 695716 - DNA, 100 bp, Homo sapiens
ctctcttatgaaagaagagggtgataaaggaaaggagaaggccattcttactgacctgatagtggaagaaaagtagaatgcaatgagagccactatggaa

SEQ ID NO: 695717 - DNA, 100 bp, Homo sapiens
gaaaatttgccgaaattatttgcgcatttcaagaagaacaacctaactccagatatctacctaattgattggaaacatgccctgaactgtcacagaatga

SEQ ID NO: 695718 - DNA, 85 bp, Homo sapiens
agattctttctctggaactgaaccagaggttcacaaaacaagtgtagtagaatttacaacgggaatgattttaccaacgaaagct

SEQ ID NO: 695719 - DNA, 73 bp, Homo sapiens
aagcggagcggcgcgcgcgggacaagcaggtgcattcatccctggagcgcccgtccagcctgtggttttacga

SEQ ID NO: 695720 - DNA, 75 bp, Homo sapiens
ggacctgatggcctgagccgaggtgtgatgttagctgttgatgctgtaattgctgaacttaaaaagcagtctaaa

SEQ ID NO: 695721 - DNA, 75 bp, Homo sapiens
ccggaggccggaggaacgggcccgtcaagctgcgcctgacagcatcaattcctgaagattgccaagcccctctcc

SEQ ID NO: 695722 - DNA, 95 bp, Homo sapiens
tgacgcaggtgcaggtgtctcttctcgccctggcggggaaggactcctcctattttgaggacttctccaacatctccatcttctcctcgtccgtg

SEQ ID NO: 695723 - DNA, 98 bp, Homo sapiens
tgctcccatcattgatgtggtgcgatcgaccgagacatgggtgcccggcaccgcgcccgagcccactccattcagatcatgaaggtggaggagatcgc

SEQ ID NO: 695724 - DNA, 98 bp, Homo sapiens
ataaaaatttggtcaaagactgggatgcttagatcaactttagctcagcaagatcacaaaatttgtccaggatagacatagagctagaagaaacagac

SEQ ID NO: 695725 - DNA, 98 bp, Homo sapiens
ctttcaagtgcatgcagctcactgatttcatcctcaagtttccgcacaggggcgacgtcgtaaaccaggacgacctgtaccaggccttggccagtggt

SEQ ID NO: 695726 - DNA, 100 bp, Homo sapiens
ggaatccgtaacatcagtttcatggtgaaacgcataagagttgaacgttttgtgcttcccatgcatgcagtcaaaaactcagcacacaggccaggcgcgg

SEQ ID NO: 695727 - DNA, 76 bp, Homo sapiens
atggacgaagccttcaaatccatcaagctcatcaaaagttggaaaatggatataccttatttgattatgatgttgg

SEQ ID NO: 695728 - DNA, 82 bp, Homo sapiens
ctgctgctcgggctgctcttggaggtttgcctgcaatgagatttcattctctacatttaaaggacatcctttctgagctgct

SEQ ID NO: 695729 - DNA, 75 bp, Homo sapiens
gagccctcgcgacgcgcccggcccggagcccccagcgcagcggccgcgaggacaagaattttgggcagatttgaa

SEQ ID NO: 695730 - DNA, 82 bp, Homo sapiens
ggaggaagtgagtatgagcgtagagtggaacggggttggtgttcgaggaagagacattgttgttcttggtgtggagaagaag

SEQ ID NO: 695731 - DNA, 87 bp, Homo sapiens
acagaagagtactgggtgtgattttgcagcagtagacccaggcctgccttctgtgaagcaagagccacctgacccagaggaggacaa

SEQ ID NO: 695732 - DNA, 82 bp, Homo sapiens
cgatttaaagctgagctgcgaggaaaatggcggcgggagagttttccgtctgatgaaggttggccatttgcaaagtatcttg

SEQ ID NO: 695733 - DNA, 100 bp, Homo sapiens
gggtgctgctggttagtgtgctctgagggagggtccgagccagccgctgttttgccggaggagcccctcaggccctacccgtacagtgaggacgcccgcc

SEQ ID NO: 695734 - DNA, 98 bp, Homo sapiens
ccgagggtcaacgagaaagagatcgtggcttttcatggcctgccactgaaaatcaagaaagaaccccacagtccatgttcagaaatcagctctgcctg

SEQ ID NO: 695735 - DNA, 101 bp, Homo sapiens
taaactcaatgctgctgtgtgggaagaagatttgtaaagaaaactcttaggttactataacaacagtaccaaggtggctgtgaaaaccctgaagccaggaa

SEQ ID NO: 695736 - DNA, 100 bp, Homo sapiens
tggacaagcaagattgtcgcaaattttgcactactggcatcgatggagccatgacaatttgggatttcaaggccctctttggattccagtacgatgcatc

SEQ ID NO: 695737 - DNA, 90 bp, Homo sapiens
ctgcttctccccactcagacttggagccccgtaggagcaggaaatccacggtgttttgaatgctgtatcaaatgcctggggggcattccc

SEQ ID NO: 695738 - DNA, 83 bp, Homo sapiens
ccgcaagttcacctaccgcggcgtggacctcgaccagctgctggacatgtcctagtgacgcattgctggatgccggcgagtcc

SEQ ID NO: 695739 - DNA, 100 bp, Homo sapiens
ccggaagcgcggagggagccgcgggatggaccgcaggtgaggcttcgagctctgaggaagagcctccatccccagatgataaagagaaccaggccccaaa

SEQ ID NO: 695740 - DNA, 101 bp, Homo sapiens
atttcttgcctggatttataccggttcagcaagtatgttctcagaagctatacactcattatctgatacttgtaatcaggattctcaaagttggattggtg

SEQ ID NO: 695741 - DNA, 96 bp, Homo sapiens
caccaagaagctactggacctcgttcagcagtcatgtaactataagcagcttcggaaaggagccaatgagggtccacaatgtgtccttcgcctttg

SEQ ID NO: 695742 - DNA, 75 bp, Homo sapiens
tgcctttgaccttctgccatgattgtgaggcctccccagccacgtgaaactccactgaagatcctggtgtcgcca

SEQ ID NO: 695743 - DNA, 100 bp, Homo sapiens
tgtatgatggcctggcgacccattcaggcacttatggccatttcagccatggcagatgcctggagagccctcaagaatcccagcattggggaaagcagca

SEQ ID NO: 695744 - DNA, 141 bp, Homo sapiens
tggaagttcgcaaacagcacaggccatcaaatgcagaattcacaagatccaatcccttgtccttaaaaggactgaatttgctcttaaagaaatcatgtcctctggaggtgctgaagatgatatcccacagggagagaggaa

SEQ ID NO: 695745 - DNA, 50 bp, Homo sapiens
aagaagctgaggatgaagaagatggagtctcaggagcaggggctgcggca

SEQ ID NO: 695746 - DNA, 98 bp, Homo sapiens
aaaatcttggggtatcgcacatttttataaagagagggctgaacccccctcatcgtgtcaagtcaatctccatgacaactttcactgagcctgaagta

SEQ ID NO: 695747 - DNA, 97 bp, Homo sapiens
ctgttgctcctactacgcttatattgggaatatcctctcttggtgagtttgtaagtgatgcccttctcgttcctgacaagtgcaaattcttacacca

SEQ ID NO: 695748 - DNA, 101 bp, Homo sapiens
ggtctccgcggcagccctcgctgtcatcctcattgctactgccctctgcgctcctgcatctgcctccccatgtgctcgcatttggcttttcgttggtttca

SEQ ID NO: 695749 - DNA, 75 bp, Homo sapiens
cggagaaatgggcttcacctccccagagagactcaggaaacgggaggcgtgggcagcttcgacatcgccggcctg

SEQ ID NO: 695750 - DNA, 75 bp, Homo sapiens
gcaatgagctcccaaagccatccagtgtatcccctactccgtgttgctgaaagacctggagatgcggaatctccg

SEQ ID NO: 695751 - DNA, 101 bp, Homo sapiens
gttcatagttgactccacagatccgggattgtcactgctgttccaagggcacacgcagagggatttggaattcctggagagttgcctttgtgagaagctgg

SEQ ID NO: 695752 - DNA, 98 bp, Homo sapiens
ccctgattgacctgagcgaagggttttcagagacgagctttaatgacatcaaaggcattggccgctggaccaacccccagtaccggcagttcatcacc

SEQ ID NO: 695753 - DNA, 100 bp, Homo sapiens
cgcttctggtactttgtatctcagttaaagaagatgaagaagtcttcaggggagattgtctactgtgggcaggtgtctgtactggtgatgtgtcacactc

SEQ ID NO: 695754 - DNA, 98 bp, Homo sapiens
tgcacaagcaccaaaagcaccacaagtaccacaagcatggcaagctctcctgccacagctcctcaccccctgaaaatgttcgcctgctccaagtttgt

SEQ ID NO: 695755 - DNA, 101 bp, Homo sapiens
ttgaaggcgtatacaggaacaatattgatgatgtagtaagaattactttcctagtaagcaagatatcctgctggctaggaaagccaccaagggaattgtgg

SEQ ID NO: 695756 - DNA, 100 bp, Homo sapiens
agcatggctacttcatattttggaaagcagtttttaagacaagcacagaaaactgaatctgtagataacgagggagaatgaattgtcatgaaaaattggg

SEQ ID NO: 695757 - DNA, 100 bp, Homo sapiens
agctgcttgtccccaaatcttgcctcaggacttgctgccaggggaacgcagactcagagcgtcctctttggagaagctctgacgcccgctctgcggcttc

SEQ ID NO: 695758 - DNA, 103 bp, Homo sapiens
gctggaggagctccccagctggtggctggagcgaccccttgttctttggtggcgctggtatgaaaatgagtgcgaatgtcaactcctgctaaaagaaatgctt

SEQ ID NO: 695759 - DNA, 95 bp, Homo sapiens
ctcgcgtccggagtccccgtggccagggagttgaccacatttggccatttcccagaagggccccaccccaagggtgagtggccaatggggagctg

SEQ ID NO: 695760 - DNA, 96 bp, Homo sapiens
tcaagttgccggtggaattggcccaggatgacagctggagaatggagtcagccaacaaatggaattttcttgagcatgtttctaatcgttttgcca

SEQ ID NO: 695761 - DNA, 82 bp, Homo sapiens
atcgtgaaggacgccagcatcatacaccggctgttcgaggccttgactgtagatgtgctggtggacggacagccatgtgacc

SEQ ID NO: 695762 - DNA, 82 bp, Homo sapiens
ggaacgaggcaaggagctaaagcagcgtgcgttcagccctggggcgtccgagctgggccacagcctgaacgagaacgtcctc

SEQ ID NO: 695763 - DNA, 82 bp, Homo sapiens
gaaaaatttgagaaggaggctgctgagactgcaaaattcaaaatggggctcaaggtattcgtttcatctacaccagagaagg

SEQ ID NO: 695764 - DNA, 90 bp, Homo sapiens
ctcgtacattaattatgtcatcaccatgacaacactctatattcagcaagaaacaaacgtacttggatttaaaggtcctaggaaaatgtc

SEQ ID NO: 695765 - DNA, 112 bp, Homo sapiens
acatgcatacaaaggacacacagggattttgaaaatgctgcacatcccttaatagtcatctacatagtgacagtggtgctgtttgcagctctgaggcggcagcgaaaaaaag

SEQ ID NO: 695766 - DNA, 83 bp, Homo sapiens
gtaccacatttccaatttgctggaaaaaatgacatccagcgacaaggactttagactcagcccgcctgcacccaggtgaaata

SEQ ID NO: 695767 - DNA, 82 bp, Homo sapiens
tcttcccgcgtccgccgattcctcctccttggtcgccgcgtccttggctggcgtcatcatggcagaacaggatgtggaaaac

SEQ ID NO: 695768 - DNA, 100 bp, Homo sapiens
ggcttgtggtgcggcctcaccatacaggaacagggcagacgttagcgtgagtgatcactctcaatcccgggtgcagtagacattgttgcaatcatgatcg

SEQ ID NO: 695769 - DNA, 75 bp, Homo sapiens
ggagactgtggatgaataatgctgggttgtgagtcccggcccagcccctccacccccctgcccccccgatgcgac

SEQ ID NO: 695770 - DNA, 99 bp, Homo sapiens
tatgctgcagcatattgtactggcctgctgctggcccgcaggggcactccacagaaggatgttattatcaagtcagatgcaccggacactttgttattg

SEQ ID NO: 695771 - DNA, 75 bp, Homo sapiens
gagggagcgggccaaggaggaggcagagtggcagacgaggagtattgtgaggattgagatgactggagtgtgtgt

SEQ ID NO: 695772 - DNA, 75 bp, Homo sapiens
attcctcagctggtgactccgtgtatacttacttcagtgctgttgctggacagataacaacgaacttgatgcaag

SEQ ID NO: 695773 - DNA, 82 bp, Homo sapiens
aacaaatcaaactgcaaatctgggatacggcaattttcgttctgctctcaatgatgtgacagctgccagaaagctaaaaccc

SEQ ID NO: 695774 - DNA, 75 bp, Homo sapiens
acagacaggctctgggaagacatataccatgctggggaccccaacatggacgtctcgctgcctaatgaagttcta

SEQ ID NO: 695775 - DNA, 82 bp, Homo sapiens
cagcaggcgctcaccatgttccctggagcccagcctgactcctggagattgtgaatagctccatccagcctgagaaacaagc

SEQ ID NO: 695776 - DNA, 75 bp, Homo sapiens
gtgcgcgcccgccagctgctccggagatacggctaattgaacaagccccaattcaaatgggagaagaggcagtga

SEQ ID NO: 695777 - DNA, 100 bp, Homo sapiens
acccatagtcaacgattacatggttcaaaagatgtcgtgataaaggcacaggttttagctggtggtagaggaaaaggaacatttgaaagtggcctcaaag

SEQ ID NO: 695778 - DNA, 74 bp, Homo sapiens
ttcatttcaacagccagggagaaagcctggatgctcaagatagttttgaggcagctgtgccatcaaatagccac

SEQ ID NO: 695779 - DNA, 75 bp, Homo sapiens
cagaggagaaactcgctcgccttcagaagacaggttccagcaacagatagaaatgctttaagttcactctgggga

SEQ ID NO: 695780 - DNA, 118 bp, Homo sapiens
aggaaaattataatgtggttgcaccaggctgtctttcacaatccaggctgaaaatgatgagaatggacaagcagaaaacttttccatggacccacaattggagaggcaagtggagacc

SEQ ID NO: 695781 - DNA, 50 bp, Homo sapiens
agcatatattatggaacacactcagattccaaatgaaaatgtttgagagc

SEQ ID NO: 695782 - DNA, 97 bp, Homo sapiens
cccacctgtgtcctggttgagggtctccagggttctttggggcccgagggctggttgatatgtgaagagccaacctgtcgcaatcgaactcgtcacc

SEQ ID NO: 695783 - DNA, 87 bp, Homo sapiens
gaggagctggcggagagcggcctgcgggcgatcgggccgagggagtgcatccgccccaacccttttccccctcgtctcctgtgagaa

SEQ ID NO: 695784 - DNA, 75 bp, Homo sapiens
ccggcccgaggacaccgactaccagcaggtgtaccttccggtttcccagcacggccatcaagatccagttcacgt

SEQ ID NO: 695785 - DNA, 101 bp, Homo sapiens
acagagcctcgcctttgccgatccgccgcccgtccacacccgccgccaggagggagccatggatttgctgcgggagctgaaggccatgcctatcacgctgc

SEQ ID NO: 695786 - DNA, 90 bp, Homo sapiens
cgctagagcaggcggttcctgggctgctccggtcacgagaagagaatgccttctagatgcaaaatcacctccaaaccagaccacttttct

SEQ ID NO: 695787 - DNA, 100 bp, Homo sapiens
cccatttggagatcttgacaaagcctcttctgtttccaatggggctattttggcattctgctggatatatgttcgtaaataccaaagtcggcgggaaagt

SEQ ID NO: 695788 - DNA, 103 bp, Homo sapiens
cgggccgcgaggacgaggcggcgccgccgggctgtggagagcaaacgccctggaggagcagctgaaggagcaggagctgagagcctgcgagatggtcctggaa

SEQ ID NO: 695789 - DNA, 75 bp, Homo sapiens
ggctgtttgcatcgccgatagaggtgcggtccgcgggacggttacccatgcagttgttactgtaccagcctattt

SEQ ID NO: 695790 - DNA, 49 bp, Homo sapiens
ttctaaatgcctgtaagattggagaccccatgccacagctggatgtgac

SEQ ID NO: 695791 - DNA, 83 bp, Homo sapiens
cgctctgggatcccggccaccagcaattgtccgcacttgcacctcctgcgccgccgccccccatccaaggatatgccttcaag

SEQ ID NO: 695792 - DNA, 100 bp, Homo sapiens
cacggcgccgagccgcggtccgacacaaattggcccaccagaggtggcactgactacagatgagaagtccatttctgttgtcctgacagctccagagaag

SEQ ID NO: 695793 - DNA, 97 bp, Homo sapiens
cggcgcggagctggacgccgcgatcgtggggcccgcgaggcgggcagccggggcgtccagggctgtaatccccttgcacaaaccggccggagtaaat

SEQ ID NO: 695794 - DNA, 78 bp, Homo sapiens
gggagttcccgttacaatcactagtgttgcagttgcattaaaatcctcccctactgaaagaaacggaggccaggataa

SEQ ID NO: 695795 - DNA, 75 bp, Homo sapiens
gagaactggagagaactgctggaaggagactggatgatagaattgaaagaagcattggattttcatgtagatcac

SEQ ID NO: 695796 - DNA, 82 bp, Homo sapiens
ggccagctgacggagatggtgcagaagatggaggaggccaagaagcttgagagaagaaaaatttcagaaaaattgtctcaat

SEQ ID NO: 695797 - DNA, 86 bp, Homo sapiens
ggcaccaagaccggccacatcccagcactgcccacctctggaactctggccacttcgtcggagagcagcttctattattctccctc

SEQ ID NO: 695798 - DNA, 82 bp, Homo sapiens
tttactgtcaagacatttcttcggcattctgcaacagccttatgccagcctggaccatcttggaggcagtgtaggatcatgg

SEQ ID NO: 695799 - DNA, 76 bp, Homo sapiens
gtactccgtcatgatcaacaaggccacgccctacaactacccagctcgacagaacaattggccccctctaccttct

SEQ ID NO: 695800 - DNA, 98 bp, Homo sapiens
ctggactctagggaccctgctgaatagctggggctacaggcgtgtgtcactgcgcccagcttttcctaaaaggattgtacaccttagaagtgcttaag

SEQ ID NO: 695801 - DNA, 75 bp, Homo sapiens
agtcagacacggggcaggctgagttcctcttgctcacagagctctgtaaaggacaatgtgttgaacatcattaac

SEQ ID NO: 695802 - DNA, 74 bp, Homo sapiens
ccacaaaccaggccaagatccacgctgacgcagagcggaaggaggcctgttacatgaacagaatatggcaaaaa

SEQ ID NO: 695803 - DNA, 93 bp, Homo sapiens
ggaagagaagatcatcgagcatttcaaacgggcaccggcagaagctggaggaccagaccaagccgttccctgaccgctttggggacctggaac

SEQ ID NO: 695804 - DNA, 100 bp, Homo sapiens
catgtgctgcttgacaaagagaatcaatgtgtctcgagaaaaggcttaagcaggtaaagcagtcactgtgaagaaaataacattttaagaaacttttctg

SEQ ID NO: 695805 - DNA, 96 bp, Homo sapiens
gaaaatgcaaactgaaacctgggaaacagtgcagggatgaggagaatttctgtgccactgtgcccaaggatggacgttcctattccccaactctct

SEQ ID NO: 695806 - DNA, 100 bp, Homo sapiens
gcccagggtgggagacctggaagttttagcctagctgttctcaaggcggattaattagcccaagaaacattatattcatattcctcgaggtctgaacaag

SEQ ID NO: 695807 - DNA, 110 bp, Homo sapiens
agtgatcatttaggatcaggaagtcatttcagtaaccattacgtgtgaaaatgaacttgtgcaaacccaaccccatgctgataatccatctaatactgtcacttcagtac

SEQ ID NO: 695808 - DNA, 75 bp, Homo sapiens
agcgccgcggggcccaggccgggagccgaccggcacagcagtcctcctgcatatgcccaagaggattgggagtgg

SEQ ID NO: 695809 - DNA, 80 bp, Homo sapiens
aaaggagatgcctggcagccccgctctctgcagatctttatgtcgctgaagctttatccactctggaatcctggaggagc

SEQ ID NO: 695810 - DNA, 51 bp, Homo sapiens
gtctggctgtggcggaggagcataagaagattggagctggagggagcatca

SEQ ID NO: 695811 - DNA, 82 bp, Homo sapiens
gtgatgcctgcagagctgtggcttaccagttcccagtgggccgtattcatcgacacctaaaatctaggacgaccagtcatgg

SEQ ID NO: 695812 - DNA, 82 bp, Homo sapiens
cctcaaaatgaagatggcacatggcccaggcagaccttgcagtcaaagccaaggcagaggcttcctcaggagaccatcccac

SEQ ID NO: 695813 - DNA, 83 bp, Homo sapiens
gtgttcactgtggcattaggtggatactggagtggactagttgaattgtaaccaattctgaagggacatgggtgcaactggat

SEQ ID NO: 695814 - DNA, 51 bp, Homo sapiens
tgcaatactatactcatcagagaacagtttgtagtctatcatctggaaaat

SEQ ID NO: 695815 - DNA, 74 bp, Homo sapiens
tggaacctctgacaagaccaagtactaccttcaagggtgaaacttcctacatccgagtttatcctgagagaagc

SEQ ID NO: 695816 - DNA, 75 bp, Homo sapiens
gggagatgggcgaggcctttgccgctgacatcccccgcatcctggtggccggatgatgtctaccgtagaaaagcc

SEQ ID NO: 695817 - DNA, 50 bp, Homo sapiens
tgagagaaaggctggaagacgaggtggatgggcaggtggtagcactgctg

SEQ ID NO: 695818 - DNA, 99 bp, Homo sapiens
gcatttatacttgcaaatgagcataatgttgctctgttcaaacattttgcagacttgctaccgggattcctacaggttgatgccgccttacctttggac

SEQ ID NO: 695819 - DNA, 152 bp, Homo sapiens
cagctcatgatcttgcaggtccttcacctttactggggttattacatcttgaagatgctcaacagatgtatattcatgaagacatggagattaagtagcttgcccaagatcacccagccagtaaagtggcagagctgaagtaatggattcag

SEQ ID NO: 695820 - DNA, 75 bp, Homo sapiens
gccgggacgtcgtgggatccggaacaggtgattcgttggaaaaattcattgtctctagagattgtcagcttggtc

SEQ ID NO: 695821 - DNA, 126 bp, Homo sapiens
cctgccaaaaggaaatgcatctttatgtcagaaacacaaagcagcccaaccaaagggttgttgaagattggaaattcatagcccaggttcttgatcggatgtttctgtggacttttcttttcgttt

SEQ ID NO: 695822 - DNA, 51 bp, Homo sapiens
gcccggcagccgtccagcagaaggctggagtgtagtggcgcaatcttggat

SEQ ID NO: 695823 - DNA, 100 bp, Homo sapiens
gtggcctgctaccttaccaaccacggccgcaggatccccaaggacgtggttgaggaattcagcgatttatacaacgagagacatgcgctggaacaaggga

SEQ ID NO: 695824 - DNA, 101 bp, Homo sapiens
tcatgggtagcctttgataaacaggggtatagaacaggctatgcttacaggcatcctctcattcgagagaagcctaggcacaagagtgatgtggaaatccc

SEQ ID NO: 695825 - DNA, 82 bp, Homo sapiens
gaagaataggaactgcaaacttctggagggtctaaagcttatggccctggtaacttacgacctatttctccgtggcgttggc

SEQ ID NO: 695826 - DNA, 139 bp, Homo sapiens
tttggaccttttttcatttccatttctaccttgtatgcctcaatttgctggatttaagcactgctgcactttatgagtgatcggagggtatggttggcatggaattgaatttcatctgtctgtgggaattgtaagcaag

SEQ ID NO: 695827 - DNA, 75 bp, Homo sapiens
ctcagccacccaagaagctgggaccacagggaaaggaaaacctcttcagcgcaaggtgaaaccacctaagaagca

SEQ ID NO: 695828 - DNA, 100 bp, Homo sapiens
ctttgactaccaccagaagctgcagggcaagccacagagccatgagctggtttcgctggcacaccaggctacctgtcccctgaggtccttcgcaaagagg

SEQ ID NO: 695829 - DNA, 101 bp, Homo sapiens
gagctggacggcgagcgcgagcggcgcgagaaatattaaaggtggaagaaggtccatatctttttctgtgggtgcttcaagtgttgttggaagtggaggca

SEQ ID NO: 695830 - DNA, 82 bp, Homo sapiens
gagctagttcctctccagctcagccgcgtaggttgtggcagcactgcctgaaggtatgagaccagattctaatctttatggt

SEQ ID NO: 695831 - DNA, 90 bp, Homo sapiens
agcatgaaggacatgcgcaaagttctgagaacattacagcagatcaagaaatccagctcaaaccacaggcggagcagcagcagccggagc

SEQ ID NO: 695832 - DNA, 100 bp, Homo sapiens
ccccgcgtccctgcgaccgccgcggcgaagatggttcgtgctggccgtgggcagcgccgtctttgatgccatgttcaacgggggaatggccacaacatcc

SEQ ID NO: 695833 - DNA, 100 bp, Homo sapiens
tttgaagtacaccgtggtgacattgtatcattggttatcaccttttgccatgatagcatttctttcattggacagttccttacaagggctccactcagtg

SEQ ID NO: 695834 - DNA, 50 bp, Homo sapiens
agtaaaccctttccccaaggacagggcaagtgtccagagaatggctggga

SEQ ID NO: 695835 - DNA, 100 bp, Homo sapiens
attcaagaatctcttagtaagatgaaatacgatgaaatcacagctacatatttgttattggggagaaaatcttcagaggctgctgacttgagtaaaccaa

SEQ ID NO: 695836 - DNA, 100 bp, Homo sapiens
cagttgaattacaaggaaagaagatcaagctacagatatgacaagttggatggcttgaggactggtactaaaaggaaacgtgactgggaggccattgcca

SEQ ID NO: 695837 - DNA, 98 bp, Homo sapiens
tgaagagtgttactgtgaacattcatgcacaaatttttatgtggagatcgtcagtatttaaacagatcacatcatgcgtgagtacaagctagtggtcc

SEQ ID NO: 695838 - DNA, 82 bp, Homo sapiens
cggctatggccgtgccctggggctgagccctcaggtggaagttaaacgagctgagcctcgggacagcaagagccaagcgccg

SEQ ID NO: 695839 - DNA, 100 bp, Homo sapiens
acaaggtgaatattgtgcctgtcattgcaaaagctgacactctcaccctgaaggaacgggagcggctgaagaaaaggttcctctgtgacgagggtgcagg

SEQ ID NO: 695840 - DNA, 90 bp, Homo sapiens
caggcctgacagctctgcggctcgggccctgaggtaaactaacattatggatttttccaagctacccaaaatactcgatgaagataaaga

SEQ ID NO: 695841 - DNA, 98 bp, Homo sapiens
gaggtcaagctgctgctgctcggtaacttactacttccagtcaatatgccgaccttagatgctccagaagagaggcggagaaaatttaagtaccgagg

SEQ ID NO: 695842 - DNA, 83 bp, Homo sapiens
gattgacagtcacaattttgtaataagaaaccgaccagagggcaaagtgttggagacagttggtgtgtttgaggtgccaaaac

SEQ ID NO: 695843 - DNA, 50 bp, Homo sapiens
ggcagtcagcagccggcagcagcagcgggattttttatcaagcagaaatg

SEQ ID NO: 695844 - DNA, 129 bp, Homo sapiens
caagtaagcctgctacacttacaacaactagtgcaaccagtaagttgatccatccagatgaggatatatccctggctgaagggtatgtgattggcagctgtattaaacacattccaatcgcaggacgag

SEQ ID NO: 695845 - DNA, 90 bp, Homo sapiens
ggcagagccacgcgtttgatggcttcgaggtgaactggaccgagcagcagcagatggcctctgaagaacacctgaagcagcactacattg

SEQ ID NO: 695846 - DNA, 83 bp, Homo sapiens
gcagggccccgagccggcccgggtcgagacttgggaagatccccatgaaaaagataagagcacgaactgctttggagataatg

SEQ ID NO: 695847 - DNA, 100 bp, Homo sapiens
caaacggcaagatgtccagtaatgtcccggcggatatgaactctgaaagattttgagatgatacgagggatgaaaatgaaactgaatcctcaaaattccg

SEQ ID NO: 695848 - DNA, 87 bp, Homo sapiens
gagcattatgggcagacagcggcatacagaatgcctatgaccggcgtcgagaatttcaactgaatttcctgttgagatataaaggcc

SEQ ID NO: 695849 - DNA, 83 bp, Homo sapiens
gcgggagaggctcaagcgggacctgttccagtttaacaaggtttacccaaggtccagcctagcccctaggcaccatgtcggac

SEQ ID NO: 695850 - DNA, 83 bp, Homo sapiens
tgatgttgctctgggaatcctgattgagaactgggcacctccgggctgtgaaaagttagggaagtgtctgacacctccagaat

SEQ ID NO: 695851 - DNA, 100 bp, Homo sapiens
agaaaattttccttgacctttaggtgcttttatattcatctcaaaaacaaaattctgaactcaggacttggcaaatgatggagcagtggtatcacctgac

SEQ ID NO: 695852 - DNA, 110 bp, Homo sapiens
agtttcaaaaaggatcaattgaccacaaactgcagcaagtgatcagagataatctctacttgagaaccattccatgtggggtggcagttgaaaaatttggtgaatgcact

SEQ ID NO: 695853 - DNA, 82 bp, Homo sapiens
gaagagattgtcatcagagatgatcaagaccccagatcagaaaagccacgaggctttgctcgaggtttggagccggagcgga

SEQ ID NO: 695854 - DNA, 83 bp, Homo sapiens
ctttccggatcaatccagatggcagccagtcagtggtggaggtatgagatgcaagatgctggaattacttcagactcaatgat

SEQ ID NO: 695855 - DNA, 99 bp, Homo sapiens
cctctttcatctcttctggggcaggggccagggccaggagtccatagaggccactgtattctattgaagaacatgtctaacagtaacactactcaagag

SEQ ID NO: 695856 - DNA, 74 bp, Homo sapiens
gcggccgaggcctggaggatgtcatcagtgagttctgcctcagtcagctcccaagtgaggacgcagtcaccttt

SEQ ID NO: 695857 - DNA, 82 bp, Homo sapiens
tctggcctggaggctatccagctgaacagagtatctgtcaggcaagagctgctgtgatggtttatgatgatgccaataagaa

SEQ ID NO: 695858 - DNA, 100 bp, Homo sapiens
tcaactacccagtcctgaccccaaatttgaaaggcttcgaggcagcgaccccaccaacaactgaacgctttggtcaggctgctacaatggaaggaattgg

SEQ ID NO: 695859 - DNA, 75 bp, Homo sapiens
gccttatgactcaagatgggagtttccaagagatggactagtgcttgccctgtgaagccagaggagatggactgg

SEQ ID NO: 695860 - DNA, 100 bp, Homo sapiens
gctctggataaggaccagtacctgcccaggaaactgaattacctccccagccaggaggatatgcctcataaccagttcatcaagatgatgatcatctttt

SEQ ID NO: 695861 - DNA, 100 bp, Homo sapiens
cctagcagagaagcacctgctactttccaacaccttcctgcagttcttcggccggagggggaagacggtggggcctccccacctgccccgcagaagatgc

SEQ ID NO: 695862 - DNA, 100 bp, Homo sapiens
tgctaatgggaaactacatgaatgctggctcccggaatgctcaaaccttcggatttaaccttagctctctctgtaaagagccctggaggtatcacctgcc

SEQ ID NO: 695863 - DNA, 82 bp, Homo sapiens
agacgtgcctttgaccttctgccatgattgtgaggcctccccagccacgtgaaactaaccactcacgaattcttgtttggtg

SEQ ID NO: 695864 - DNA, 78 bp, Homo sapiens
ccaactggtaggaccagcaccccataccccgaagccagatgcacagtctctgacatcagctctcctgggaccctccaa

SEQ ID NO: 695865 - DNA, 74 bp, Homo sapiens
ctggaagaactcgtcatgctctttgtagcgtggtgcttctgttgctcacagagtgcttgtgcacagagctcgaa

SEQ ID NO: 695866 - DNA, 82 bp, Homo sapiens
ttgattggaagtggccagaggattgaagccaaagatggactcaccctgtcacccaggttggactgcactggcctcaacctcc

SEQ ID NO: 695867 - DNA, 100 bp, Homo sapiens
ggacgcgaggccccggcccagccatggccccctggcgcaaagctgacaaggagcggcacggcgtggagaagttgatgacgcctgagatgttttcagaaat

SEQ ID NO: 695868 - DNA, 96 bp, Homo sapiens
acacagaaggctgttcttcagtggaccaagcatgatgattcttcagataacttctgtgaagctgatggtggaaccgtcccaaaatgtcccttgctc

SEQ ID NO: 695869 - DNA, 101 bp, Homo sapiens
agaagagaagaagaagcaggatgaactgaaacggattgccagagaattggcagaagaggaaggaacagagccacagagaaaaatgacttgctcacaacaga

SEQ ID NO: 695870 - DNA, 74 bp, Homo sapiens
tccattgagaagagagaagaacattctcgaatacctagaatggggaagaggatcacctagcccgggtagaagag

SEQ ID NO: 695871 - DNA, 96 bp, Homo sapiens
gacccggcctcctagggggtcgtcgtggtccagacagtttagcagaacagcctccgcggctccggggagaaggtgctggagaatctggtaaaagca

SEQ ID NO: 695872 - DNA, 74 bp, Homo sapiens
cggagccggagccgccgggacatggttgcctagacctggagcagtgttctcttaaggtactggagcctgaagga

SEQ ID NO: 695873 - DNA, 74 bp, Homo sapiens
tctgtcaccatatctgaaaaacttcaaaaggacattaaggatctgggagggtgccggtggtggtgtgcacattg

SEQ ID NO: 695874 - DNA, 75 bp, Homo sapiens
tgccactgtaagtggggagagaagctgctcaggctcttcagcttcttcactgtttccctctggacatacgattaa

SEQ ID NO: 695875 - DNA, 100 bp, Homo sapiens
aacattcatttcatgaaagccttccagaaaatagtggtgcttttttataaagatgaggcaacgtgttatgatgatgggaagacataccacgtaggagaac

SEQ ID NO: 695876 - DNA, 99 bp, Homo sapiens
ggatgaacatgtgcttggtgtcgtttttccttgagctgaacgtcttgcaacagtggccgcacgcataggtgtggatgaggtcaccattgtcaacatttt

SEQ ID NO: 695877 - DNA, 90 bp, Homo sapiens
ctttaaactggagagaattcagttttattcagagagactagcttgcaaaattttcctcatattgaggtggttcggaaaaaagaggagaga

SEQ ID NO: 695878 - DNA, 100 bp, Homo sapiens
agaacagaataaagattatcaagactgtagcaaaaccacttcattgtgcgcaggaccctcagcttgtccgaaaaccagtccttgctgaggatgcccccct

SEQ ID NO: 695879 - DNA, 82 bp, Homo sapiens
aaaggacaagaatgcgaatacccacccacacaagatggtgcaatcgactgttaaagtggtgtcctgccccagattgccacca

SEQ ID NO: 695880 - DNA, 100 bp, Homo sapiens
ctcacctccagcatcctggccggctgcattcagattaagcctgatcaagatgacaacctcccaaaagcaccgagacttcgtggcagagcccatgggggag

SEQ ID NO: 695881 - DNA, 115 bp, Homo sapiens
cagaggcggaagtaaaagcgaactacagtggatgggtgcagttcagggggagtaggttgcatctttgttgaaatgatccaaggagttgctgcttttccaggaatgaaagacattc

SEQ ID NO: 695882 - DNA, 87 bp, Homo sapiens
gtggaacatgatgccagaaaatcaccatagcatggcctccttggtcttgcctccagcaaatccatcctccaatcctgatgccagagt

SEQ ID NO: 695883 - DNA, 50 bp, Homo sapiens
gggagtttgagatgaagcgaatgagtcctgaggctgtgcgtgcagttggg

SEQ ID NO: 695884 - DNA, 119 bp, Homo sapiens
tgagatctacgagctgtatgacgatgtggaacccagagatgactccagccccagccccaagggcagaggccggatcacctcaacagtcacgtcagacaagtgcactcaacagaacggcc

SEQ ID NO: 695885 - DNA, 83 bp, Homo sapiens
gggcaggctttgaggtgcttgtcggtctggactgatgaaaatccatatgccgtgctatcaagactaatcaggaccttctccca

SEQ ID NO: 695886 - DNA, 83 bp, Homo sapiens
agcgtgtcaggcggagagacccgccgccagggaaatcctcattgacgattcaatttgttgaaggccaatttgtggactcctac

SEQ ID NO: 695887 - DNA, 75 bp, Homo sapiens
tcccccactctttccgccctaatggaggtctccagtttcgctctcaaaaatctatggccctgtgttcactctgta

SEQ ID NO: 695888 - DNA, 75 bp, Homo sapiens
gtagggacaacaggcaggagaattatgggagcgcatttccccagggccctcgggaccaaggatcacgtcatgact

SEQ ID NO: 695889 - DNA, 98 bp, Homo sapiens
aaccttcgatctcctgacgagataaaaactggatatgcatctaaaacaagatgtaagtcactgaagatttttagaagaccaaggaaactgttcatgca

SEQ ID NO: 695890 - DNA, 100 bp, Homo sapiens
gaagaggagcggcggcttcagggacagctggaacaaggggatgacacagctgctgagaggctagagaaggtgttacggaaatcggcctacaagattgtca

SEQ ID NO: 695891 - DNA, 82 bp, Homo sapiens
ttcgcctttcccgagccctggaggtggggagaaaaggtgatactgtgcttgtccaccgagttcacagttatttagagcgtca

SEQ ID NO: 695892 - DNA, 83 bp, Homo sapiens
cgactccaagctgaacttccggaaggcggtgatccagctcaccaccaagacgcaggggacggcaaaacagaacagaaaggcgg

SEQ ID NO: 695893 - DNA, 100 bp, Homo sapiens
tgctgcaaaaggactgcgggaactgattctggatgatgagatcctagctgaactggccgtgcccatagaattggcccaggacttgctgctgactctgcca

SEQ ID NO: 695894 - DNA, 82 bp, Homo sapiens
ctgcacactcagtccctctgtgctccaggactccctcaataatgtgggtgtttctctatgagaagggctaccagacctcgag

SEQ ID NO: 695895 - DNA, 50 bp, Homo sapiens
gagaaaaggcctaagaattttggcattgcaggactctggactgtcttcac

SEQ ID NO: 695896 - DNA, 100 bp, Homo sapiens
cctcggcgaggtgcccaccatcgagtccctgatagataacagctttgacctgaataatggtagtgacgctgaacaggaagaaatggaaactcaatcttca

SEQ ID NO: 695897 - DNA, 74 bp, Homo sapiens
ccttgggactaatgacatgcttgtcagttggaaatggaggatgaagatacaattgatgtgttccaacagcagac

SEQ ID NO: 695898 - DNA, 100 bp, Homo sapiens
atggttctaaccttcagtactaaagaagatgcagtttcctttgcagaaaaaaatggatggacagtgattcagaaccgtcaagacggtagtgttgactttg

SEQ ID NO: 695899 - DNA, 83 bp, Homo sapiens
gaacagattttagctgtggccagtctctggcatctctatcccctatgaggcaccacgtaagacctcctgcccttagctctctt

SEQ ID NO: 695900 - DNA, 82 bp, Homo sapiens
gtgttcgactgctagagccgagcgaagcgagcggcggcatggaggctctcaccactcagctggggccggggcgcgagggcag

SEQ ID NO: 695901 - DNA, 101 bp, Homo sapiens
accttgtcccgctgcagccgagatgccgggggagcggggccttccacaccccctccgtgggtgtgtgtttcatgatcaacatgggagactcccacgtggac

SEQ ID NO: 695902 - DNA, 75 bp, Homo sapiens
accctgaggaaggaccagcgggacgcctgcatcaaggaggccattctcttggatatgctgcaggctgctagtcat

SEQ ID NO: 695903 - DNA, 90 bp, Homo sapiens
gaagttgtcaaagttcttgttaaggaaggagccaatattaatgcacagtctcaggacctacctgacttggaagatgatgatgaaacaggc

SEQ ID NO: 695904 - DNA, 100 bp, Homo sapiens
atcctccgacagcgatgtggtctggacaacacaaaggagatgacaagtatgggcggaagatcattgtgtttagtgcctgtcgaatgccccccagccacca

SEQ ID NO: 695905 - DNA, 90 bp, Homo sapiens
atggattttcaaatttcacagaaggagcctccatgctggagaaagtatgtggtgaagaaggtgaagtccatgcagatgttccacatgccc

SEQ ID NO: 695906 - DNA, 100 bp, Homo sapiens
gcctcccgagtatctgggattacagttccagaggctgggaagtccaaggtcaaggcaccagcagattcagtgtctgatgaaggctctctctttgcttcca

SEQ ID NO: 695907 - DNA, 101 bp, Homo sapiens
aaagggcagtcggcggagcttcgccaaggctggcgcagtcggcacttcgtcttagtaacatggccatggggaagacaaccacaggccagatagtcaatctg

SEQ ID NO: 695908 - DNA, 75 bp, Homo sapiens
ggcggcggcaacgagggaatagtggacgaactgcacgtgtacaacacggccgaggcctgcctggagccccagatc

SEQ ID NO: 695909 - DNA, 51 bp, Homo sapiens
aacctcgctccggaaaggggacacctgatattgatgagtgccaactggggg

SEQ ID NO: 695910 - DNA, 100 bp, Homo sapiens
tggaggctcaacggcagaagcttcaccacaaaagcgaaatgggcacaccacagagaatggatcttggagaatgtctgaaagtccatgacctggctttaag

SEQ ID NO: 695911 - DNA, 100 bp, Homo sapiens
aatgccactgtctttgcctatggtcagacgggctcagggaagacatacaccatgggggaggccagtgtggatgtccagggtgctgcagaaggacgcggag

SEQ ID NO: 695912 - DNA, 51 bp, Homo sapiens
tctgtgactattaagaccatgttggaagaggatggagatgaagatgaggaa

SEQ ID NO: 695913 - DNA, 80 bp, Homo sapiens
agaaggatccaagtcaaatgaaaatgacttctcataggaagtcatttggtgttggaggacgtggtgggtcctctggtgcg

SEQ ID NO: 695914 - DNA, 50 bp, Homo sapiens
ccgcaccatgatcgttatgaatgatcagacaccccgaagttggagatcaa

SEQ ID NO: 695915 - DNA, 78 bp, Homo sapiens
aaaacatgtactacagccagtcttctatgtttccacatcggtcagaaaaagatacccagacagtcatccacacagtgc

SEQ ID NO: 695916 - DNA, 95 bp, Homo sapiens
aggactgtggctggaaatatcctgaccgcactctgctgaaacgggaagagaggcagagcacttgtcctccccttggggagaatcctcaccagaag

SEQ ID NO: 695917 - DNA, 82 bp, Homo sapiens
ggcttcgagtgacccgggtgccgaggagcgggaagagttgctggggtactcgtcctcacaagtgcccagactgcgacatggc

SEQ ID NO: 695918 - DNA, 100 bp, Homo sapiens
gagttcgctgcaagtcggcggaaagtttggctgcgcgggttcccccgaagttcaggcactgccgccctgcactgtagcagatgcctaaataaagtgtgga

SEQ ID NO: 695919 - DNA, 100 bp, Homo sapiens
ccccactctcactgtgtctttctgtgttacaggtgcagcttcaagcttaggaccacccaccatgcctatccaggtgaacatgtcaaaccttttaagccag

SEQ ID NO: 695920 - DNA, 50 bp, Homo sapiens
cgagtacctgagattagcccagagcagcccgacggccatggaggctgaag

SEQ ID NO: 695921 - DNA, 75 bp, Homo sapiens
cagagtccgcggccggggcgcgggagagtggttaagaaagtagctcaatacatggctgatgtattggaagatagc

SEQ ID NO: 695922 - DNA, 100 bp, Homo sapiens
gtacgtggccctcgatgtgctctgcgtgttgctggatacctgatcagagaagcagtttgatgtactaaaggcttctcgattgggagacaggaaacctggg

SEQ ID NO: 695923 - DNA, 96 bp, Homo sapiens
gagagaaatgcttacacacagaaatgaaactcgtttccagatcgaccctaagacgacagggaaaggagagcagcaaagaaggaaatgggattgggg

SEQ ID NO: 695924 - DNA, 89 bp, Homo sapiens
gagagaaggaagtgctgatgtggagaccccagagtcagaaggagtgagaaccctgacccctaatcccactgcatccagccaataggagc

SEQ ID NO: 695925 - DNA, 121 bp, Homo sapiens
accgagaccgtgaccgagagcgtgaccgagagcgcgaatatcgtcatcgttagaagatggcagtcttgggcacgtccatctgtaaacctgctgagagctctggtgacaagaaaggcagtgg

SEQ ID NO: 695926 - DNA, 103 bp, Homo sapiens
aagctggaggcgctgatccgagaccctcgctcccccatcaacgtggagagcttgctgcccactgtacaatttctaccactacttctacatggtgaccaacaca

SEQ ID NO: 695927 - DNA, 75 bp, Homo sapiens
atgggatgccggcagtcagagtcaaaacagagcttttggaatctgaacaagggggtgaatctgtaaaatatttcc

SEQ ID NO: 695928 - DNA, 87 bp, Homo sapiens
gagagacgtgaaacatgtgaacactcaagtgaagcaaaagccttccatgattacgtcgacaaagatgctgaattagtggcccaatgg

SEQ ID NO: 695929 - DNA, 75 bp, Homo sapiens
acctctgcatcaaagaaggagccaccgccaagttcgaagggcggaatgaagagcttcgaaacttgtctttgtctg

SEQ ID NO: 695930 - DNA, 83 bp, Homo sapiens
tgtgctccaagatgaggaggacggaagtgtggtgaaggtggacacagaagccgcagtttgcttgcctaaactggacttgaagc

SEQ ID NO: 695931 - DNA, 98 bp, Homo sapiens
tgaggtctgtcggagctgcccttcagtgtggagattacctggggcaattgatgttatcggtcagactataactatcagccgagtagaaggcaggcgac

SEQ ID NO: 695932 - DNA, 100 bp, Homo sapiens
gccagccaagtgaagacatgcttacttccccttcaccttccttcatgatgagcatgcaagcggcaagatgtcctacagatgaattatctttaaccaattg

SEQ ID NO: 695933 - DNA, 50 bp, Homo sapiens
ggagggttggctgcacaaacgaggtactccaaagattcaggtttactcac

SEQ ID NO: 695934 - DNA, 110 bp, Homo sapiens
agctcgcacatttgacttggaagcaatgtttgaacaaactcgaagaacagctgtggaaagaagttgcaaaacactggcaattggggcactgaagatgatgagacccagag

SEQ ID NO: 695935 - DNA, 100 bp, Homo sapiens
gaagagagaaggaggaaaagaagcagttcctgatgttacaaatgaacaaggatctcccaggacagagcgggatgccaccagcttgtccaaagggaagttc

SEQ ID NO: 695936 - DNA, 98 bp, Homo sapiens
catggataccccagggataaaaatcatccggcctctgacggtgtatggactggaagatgcaccaggtcacagtcaaagtgcctcagaagaactcataa

SEQ ID NO: 695937 - DNA, 101 bp, Homo sapiens
agtgggacgtctgagactttctccttcaagtacttggcagatcactctcttagcaggatctcatctggccaccgcgttctggaagaggcgagagggagagc

SEQ ID NO: 695938 - DNA, 90 bp, Homo sapiens
ctcgagaatacagagagaaaattgagacggagctaagagatatctgcaatgatgtactgggcagctgcaatgactctccgcacggtatta

SEQ ID NO: 695939 - DNA, 50 bp, Homo sapiens
gcagatccatcaggatgattttggtgaaaacacatcaccttcactttggg

SEQ ID NO: 695940 - DNA, 76 bp, Homo sapiens
ttggcatcactgcagctagtaatttgccttctggattgaatctaggtaaaaatggcttatctaacagtagcatttt

SEQ ID NO: 695941 - DNA, 75 bp, Homo sapiens
ggcggcgggctggagacatggaccgcggcgagcaaggtagcacaggcggagtgcagcggaggcccctgccgctgc

SEQ ID NO: 695942 - DNA, 90 bp, Homo sapiens
attgcctgcctcgcgctagcaggaagaaaagactgtatcttcaccattgacccatcaaccgcccgagacctcgatgatgccctctcctgc

SEQ ID NO: 695943 - DNA, 75 bp, Homo sapiens
accatggacgcgccgcgcgcctcggcggccaagcccccgaccggacttgggaggctgcattctgataattctcag

SEQ ID NO: 695944 - DNA, 100 bp, Homo sapiens
gcctcgtcgacatgagtgatgtggaggaaaacaacttcgagggcagactatgaaacccacgtagtcgaacaccgtgatgcttctcctgcagggcgtgtga

SEQ ID NO: 695945 - DNA, 75 bp, Homo sapiens
cccaagctttacttttgtggggcacgacgagaaagtccgcagccccaaacagtctggccgtgggcctgggcttcg

SEQ ID NO: 695946 - DNA, 96 bp, Homo sapiens
acaccaaccttatatttggacttcaaattggacccaggagccaaacattcccaacctatccctaaaggtatatgagctccctgaaagcacaaagca

SEQ ID NO: 695947 - DNA, 83 bp, Homo sapiens
cggtgctcgagtgcctgcaggatgtgagggaggaatatattaaaggaatctgtgaacctgaactagaagaaagagaatgttac

SEQ ID NO: 695948 - DNA, 90 bp, Homo sapiens
cttcagcctccaggctctccagtttttcgtcgagagattcactatggaatcggctctgtgtgctccgggatggagcaggtgtgcagaggg

SEQ ID NO: 695949 - DNA, 98 bp, Homo sapiens
cgcggagtcccaatgaaacgggcagccatggccctccacagcccgcagtgccaaagagatggatgagactgttgctgagttcatcaagaggaccatct

SEQ ID NO: 695950 - DNA, 82 bp, Homo sapiens
ccctggccttctgtatcttcatggtgcggctcatcttcgagagccacataaagaagatccctaatagtcatttctcaacaat

SEQ ID NO: 695951 - DNA, 80 bp, Homo sapiens
acaggcactggtggcatccagtggtggccagtagaggaggaggtgaacaaggaggaggtcaaaatgcagatcttcgtgaa

SEQ ID NO: 695952 - DNA, 73 bp, Homo sapiens
cagaaggactgaagagtctgacagactgggctggcttagatgaagatgaagatgcacatgtctgggaggataa

SEQ ID NO: 695953 - DNA, 100 bp, Homo sapiens
ggaaattaattgctatcaatgcgaatgatcctgaagcctcaaagtttcatgatgttcggttactgcttaataatgacaatcttctcagggaaggagcagc

SEQ ID NO: 695954 - DNA, 82 bp, Homo sapiens
ccatgggcgacccagcccccgcccgcagcctggacgacatcgacctgtccgccctgcgggggcctttacaacaactaaacgg

SEQ ID NO: 695955 - DNA, 90 bp, Homo sapiens
agctggcctgttccatcgtggaccagaaggctgaccggttccctgatgtgttacctgcttctgctactgatccaaactgcagaacttctc

SEQ ID NO: 695956 - DNA, 75 bp, Homo sapiens
gttaaatctcaggctccggcgtctggggagaaggtgaggcggattcaagatggaaaaggtgatgtaaccattaca

SEQ ID NO: 695957 - DNA, 100 bp, Homo sapiens
ggcagatactgtgagggctacaagcttctaaataagcacaaaggacatggatttgattgacatactttggaggcaagatatagatcttggagtaagtcga

SEQ ID NO: 695958 - DNA, 82 bp, Homo sapiens
cagagatggcgagcgcccggattggggatgagtatgcggaggacagctctgatgaggagaaacttcagtgctctcaagaagg

SEQ ID NO: 695959 - DNA, 100 bp, Homo sapiens
acaactgcaagggggaagtagagagataacaaaagctgctcagagtctcaatgaacttggtggtgatgatgtccagcaactctgtgaagcaggagaagag

SEQ ID NO: 695960 - DNA, 75 bp, Homo sapiens
ttggtttctatgatgcaaatgagaccgtcctggagatggaggagcaactggtaaactgtcttgagccccaccctc

SEQ ID NO: 695961 - DNA, 100 bp, Homo sapiens
tttggcatcactgcagctagtaatttgccttctggattatttggagcaagaggtggtggtggccttcccccgaagaaatttggtaatcctggggagcgtt

SEQ ID NO: 695962 - DNA, 90 bp, Homo sapiens
atatgcaaaatgatatcaagttagcatttacagatatggctgaggagaatatccattattatgaacaggacattgtgacaaatgtttccc

SEQ ID NO: 695963 - DNA, 83 bp, Homo sapiens
tcatcccctggatgggggaccacaagatcctcatcgacagaacaccttccaccatgaccacctcagcaagttcccacttaaat

SEQ ID NO: 695964 - DNA, 100 bp, Homo sapiens
catgggatacctgttcatgtgttttggaggcaccgtctctccctgggaccagatatctgtgtgaggctggattttctttgcctactccaaccaaagcgac

SEQ ID NO: 695965 - DNA, 100 bp, Homo sapiens
cagattcagcgtcatgatgattacctggtaatgcttaaggaagccttatcagttgtgagtgaggaccagtcgttgtttgagtgtgcctacggaacgccac

SEQ ID NO: 695966 - DNA, 100 bp, Homo sapiens
gtccgggcagcatgaggcgcgcggcgctctggctctggctgtgcgcgctggcgctgagcctgcagccggccctgccgttctgggaggtgatcagtgatga

SEQ ID NO: 695967 - DNA, 80 bp, Homo sapiens
agacagtgaatgtggaaaggagattgacagtcacaattttgtaataagtcgtgagatggagaataaagaaactctcaaag

SEQ ID NO: 695968 - DNA, 124 bp, Homo sapiens
ccctttcccgcttcccatcatcgggaacctcttccagttggaattgaagaatattcccaagtccttcacccgggtctgggaagatccgaggtatctcctggagaagccatctatgatgtcattg

SEQ ID NO: 695969 - DNA, 82 bp, Homo sapiens
tccctcttctgtgtcagggaatgctcctggctggtgcggacacaacccaatagatcactgtgtccactactatgatcttcgt

SEQ ID NO: 695970 - DNA, 102 bp, Homo sapiens
gagacagattctgacctcagatttctgacattcgattccccagaggggaaagcagtgccttatgcccgctcagaggcccacctcacagagctgctggaggag

SEQ ID NO: 695971 - DNA, 82 bp, Homo sapiens
gccagactctgggtcgcccttgcctgcagaggagccaaaacaacttcccgacaagtggcagcacgatcttttcgacagtggc

SEQ ID NO: 695972 - DNA, 74 bp, Homo sapiens
gcggcggcccatggggcccttggcgctgcccgcctggctgcagcccagttgaacaagagatttttcaatcaaga

SEQ ID NO: 695973 - DNA, 101 bp, Homo sapiens
gagccccagaaacgaaatacagaggagtcatcctcacctgttaggctgtgatgcagatccatccgccctagcaaaatatgttctggctttggtaaagaaag

SEQ ID NO: 695974 - DNA, 76 bp, Homo sapiens
ctaaagtctttccaaaaggtcaaggttcacaaggtaccttgtggtctataatcctttagaacaagaccgaatctcg

SEQ ID NO: 695975 - DNA, 101 bp, Homo sapiens
caagctgggcttggccaagtccatccaccacgctcgcgtgctgatccgccagcgccatatcagggtcctcaaggcccacgtggtgacaaaggtgaaacagg

SEQ ID NO: 695976 - DNA, 98 bp, Homo sapiens
tggcagagtaagggtgacttgtacaagtatcaagtactcacacccgggagagacagatggcaccagactcctgctcatttgtgacgtagccctcggaa

SEQ ID NO: 695977 - DNA, 101 bp, Homo sapiens
ctctgatgacgatttggatgaatatacccttagaaaaaatgtggcagtatgggtcagagaatttctgaatgaagaaaacaaaggtcttgatgttctagtgg

SEQ ID NO: 695978 - DNA, 98 bp, Homo sapiens
aggatctgcatcgtcatcgagccggcccagcttctgaagggagatgtcatgagaccatttgtttgtgactatgaagggtgtggcaaggccttcatcag

SEQ ID NO: 695979 - DNA, 90 bp, Homo sapiens
aaaaggcacaggttccttgaacaggcacttgcagttacattcaccacatttgtaacggagccattgaagcatattggaaaaggaactggg

SEQ ID NO: 695980 - DNA, 100 bp, Homo sapiens
ccgtgtcattctttgtaatgaaaggaccattgcaatttagagatgtggccatagaattctctctggaggagtggcattgcctggacactgcacagcggaa

SEQ ID NO: 695981 - DNA, 100 bp, Homo sapiens
gaagggatacccttccatttcaaagaacagaatgctaaggaagctgtggcaagtgatctgtgaaaatggttcgctattcacttgacccggagaaccccac

SEQ ID NO: 695982 - DNA, 83 bp, Homo sapiens
agaaatccaaaaagccgagtagagaagttatcagtaagactttgaccccgacgcaggcttcagtgattgccgcggatcagaag

SEQ ID NO: 695983 - DNA, 82 bp, Homo sapiens
caggtctcatcgggaggaaatggaggtgagagtttcacagctgctggcagtaactggcagctgacaccctagctgtacgcca

SEQ ID NO: 695984 - DNA, 89 bp, Homo sapiens
cggctctcataaagatctggctggcaatggcctgattccaccaagagaaggcccaggaggaagaagagaaaaagatgctgtggttacta

SEQ ID NO: 695985 - DNA, 80 bp, Homo sapiens
caccgcgccagtccacttccggtctccggggtcgacgacatagcggggtatcatgaactgatcactaaatatgggaagtt

SEQ ID NO: 695986 - DNA, 90 bp, Homo sapiens
caatcctcgggactttatcgattgcttcctgatcaaaatggagcaggtctcattcaggaacgtcgcctgataacactgcaccaccacctc

SEQ ID NO: 695987 - DNA, 74 bp, Homo sapiens
agtacagtcagctactcattttaaaaaggaaaatggctttgtaaagaagtttgaacctaaatctggctggatga

SEQ ID NO: 695988 - DNA, 100 bp, Homo sapiens
attccctgcgtcttgagcctccataagaagtggcacctgaaggagatctcggagctgcagagccagcagaagcaggagatcgaagctctgtaccgccgcc

SEQ ID NO: 695989 - DNA, 75 bp, Homo sapiens
gcacgtggaattcgcgaagctgccaaagccttagacaaagcaaaggcacaacaccacttgctccaccacctaaac

SEQ ID NO: 695990 - DNA, 100 bp, Homo sapiens
gggagggccgcagctccggcgccgccgcgtcccgccaggtctccaggtggtcctgaattccatcatcaaggccatggtccccctgctgcacatcgccctg

SEQ ID NO: 695991 - DNA, 82 bp, Homo sapiens
ttgcctttgggactctgaaggctgaaggctcagccggagatgggccctgacgtgctggtgcagacgatgggggccccggcct

SEQ ID NO: 695992 - DNA, 83 bp, Homo sapiens
cagcaggtcctgttggagatgatattatcatttaacatggaagaagatgagttcattggagaaaaaacattccaacgttattg

SEQ ID NO: 695993 - DNA, 101 bp, Homo sapiens
cgggggcatcgagaccatcgccaatgagttcagcgaccggtgcacccccggagggcattaagaacagcctcggaaaaactcagaaaccgctcatctttttc

SEQ ID NO: 695994 - DNA, 82 bp, Homo sapiens
gttacactccccgattcagccaacatgtcagtggcaatcgaccccccacccaacctgccttactttgtacgacgctctcgga

SEQ ID NO: 695995 - DNA, 96 bp, Homo sapiens
gacggggacagcgacgacgcggaggcagagaagggaacgcccggcccagccccattcagaatggacagtttagaagaacctcagaaaaaagtcttt

SEQ ID NO: 695996 - DNA, 75 bp, Homo sapiens
tcatggaggctgagcatttattcaggtttctaagcatgaattgaggaacagaagaagcagagcagatgatcggag

SEQ ID NO: 695997 - DNA, 83 bp, Homo sapiens
gagccctcgcgacgcgcccggcccggagcccccagcgcagcggccgcggtatgataagtattatcagcaacataatagttctg

SEQ ID NO: 695998 - DNA, 75 bp, Homo sapiens
tatgacactgaaatctgtaacgaacaactctgctcatggtgattacatgcaaaataacgagagcagcttaataga

SEQ ID NO: 695999 - DNA, 83 bp, Homo sapiens
tgtgcgcacagtgctggtctgcctgacatggtgtttctgtggcctgggactggttagcaccaacaagtcctgctcgatgccac

SEQ ID NO: 696000 - DNA, 140 bp, Homo sapiens
tgcatttcaactctagaggaaaaaattgaaagagaaaaggaattagcagaagacattatgtcagatgcagccgctctctgctccctgccccaatgaacatctgcactaggcccaagccttggagtaatttacctgaagag

SEQ ID NO: 696001 - DNA, 100 bp, Homo sapiens
gattcgcagtggtcgcttcttctccttgcttccacagcgcggcacctgtacctccggggtggcgctggggttggctccatgaccaagatctatgggggac

SEQ ID NO: 696002 - DNA, 75 bp, Homo sapiens
tggacgccggaagccgggaaatgctgctcagatggaagataaaaagccctttatcctgtcttccatgaggcttcc

SEQ ID NO: 696003 - DNA, 82 bp, Homo sapiens
ggctgggaagagctggaagataatgagaaggaacagataacccagcacattgcagaacagtgcaaccctgaaactcgtcctg

SEQ ID NO: 696004 - DNA, 100 bp, Homo sapiens
accagcatcttggctgaccttgagtgcagctccccctataagcctcggcctccacaggtccttggatgtggctgtgttgcccaagctattctcagtcgag

SEQ ID NO: 696005 - DNA, 100 bp, Homo sapiens
gtggtggaagcacggagcccacgactcccgatagtgagagacctgctcaagctctcttaagagattatgcggccctccaggcactgaagcgtaagaagag

SEQ ID NO: 696006 - DNA, 133 bp, Homo sapiens
aggaaacagcttttgagcaagcagaaatatgcagatggtgcttttgcagatttcaaacaagagaggaatcaaagaatcttcaggatggcagcaagtgtttacgagcccatatttggattggactatcgaacga

SEQ ID NO: 696007 - DNA, 98 bp, Homo sapiens
cgacgcggaggcggcagcggcgggcctgaggcgaaggagcggccgggagcccgccgcgctggtagcgtttctccttggaccaagatgactgatggaaa

SEQ ID NO: 696008 - DNA, 101 bp, Homo sapiens
cgccccggagccgccggccgctagcgtcagcgccagccagggaaatcctcattgacgattcaatttgttgaaggccaatttgtggactcctacgatccaac

SEQ ID NO: 696009 - DNA, 100 bp, Homo sapiens
ccccttgtcatgcagggtgtgagcagggctgagatgggcaccgcggatctggggccgtcctcaggtgagagttacgtgtgtgcatccaatgaaccatttc

SEQ ID NO: 696010 - DNA, 50 bp, Homo sapiens
tgacccccgagcctggggccgagaatgttgtaccatctttgggtaggcag

SEQ ID NO: 696011 - DNA, 51 bp, Homo sapiens
ggaatctgtcttggaggacatcagaaggtcagaagttgagtagcaggggcc

SEQ ID NO: 696012 - DNA, 100 bp, Homo sapiens
ttatgatgaagcattttaccagaagctgcttgacctttccactgaggatgacgggacagtggccttcgcgctaacgaagtgaaggactaccagctggtcc

SEQ ID NO: 696013 - DNA, 75 bp, Homo sapiens
cagcagcggaagaccccagtccagggttcatcaccagcagccagtcggcagcttatgctatcagcaagtttgtca

SEQ ID NO: 696014 - DNA, 100 bp, Homo sapiens
ccaagttccacaatatattgactactgccacaattccggcaccatcatgactccaagcggaggagatccgatgaatttaggcctcaaaattaccaccagc

SEQ ID NO: 696015 - DNA, 88 bp, Homo sapiens
accgccactggatctgcgctgtgcgagagaagaagaaggaggttcctgctgtgccagaaacccttaagaaaaagcgaaggaatttcgc

SEQ ID NO: 696016 - DNA, 100 bp, Homo sapiens
cggatctggacacccagcggtctgacatcgcgacgctgctcaaaacctcgctccggaaaggggacacctgaggcagaggaggtggacacggtggacgtct

SEQ ID NO: 696017 - DNA, 100 bp, Homo sapiens
tggagcaggaaacgaggcagcagctcttttcctggcaaccaacggtgcccatgtcaaccacagaaacaagtggggcttccgttacaagatgaggtctgtg

SEQ ID NO: 696018 - DNA, 98 bp, Homo sapiens
gccccaggacctcaaggtattcccggatgcaatggaaccaagtattgcctaagtgtaatcttgaacatgggcggtgctgtgagtgctggtgaagacaa

SEQ ID NO: 696019 - DNA, 100 bp, Homo sapiens
gcttagaaagagatcacatctttcgacttgaaaaatgtctcaatgagatcttggagtcagcagatgcacccttagaagtcactgaaggattcattcagtc

SEQ ID NO: 696020 - DNA, 100 bp, Homo sapiens
ttaaacactgtgtgatagttcctacacatctcattatagtttccatattttctgctcttaagaatcttcaagataagattcgacgcttggaacttgagag

SEQ ID NO: 696021 - DNA, 83 bp, Homo sapiens
aaatattcaaaggacttcaagaaagcctacgaggacaagcagaaactcaagcggaccgagatcatcagccgctcctggttccc

SEQ ID NO: 696022 - DNA, 100 bp, Homo sapiens
ctggaataaaaacagagtccgatgaaaggaatgggtctgggaccttaacagggagccatggtgaacagggatattgtgtcaggcctgaaatacgttcagc

SEQ ID NO: 696023 - DNA, 101 bp, Homo sapiens
aatgggcagtcaccagcattgcctcgaccacactcacctctctctgctcatgcagggatgatcagaattccagtttttcaaaggtaaagaatgttcatact

SEQ ID NO: 696024 - DNA, 75 bp, Homo sapiens
gctccgtgtctgcagctagtgtgtcaactcagcgtttctcctctcgtccctggtagaagaagtatgtcttcctgg

SEQ ID NO: 696025 - DNA, 100 bp, Homo sapiens
ttctatgattgctctagtagacaaccttgcatcaaaggaacctagaaagattgtacaatgaatggtgattctcgtgctgcggtggtgacctcaccacccc

SEQ ID NO: 696026 - DNA, 51 bp, Homo sapiens
ggatcctggtatccgctaacaggaagatgttaccgagtacttcagtgaatt

SEQ ID NO: 696027 - DNA, 82 bp, Homo sapiens
cgaggccctcatgtaccacacggcatttttgcgagcccttgtggactataccagtgacagtgctgaaaagcgcaggctacag

SEQ ID NO: 696028 - DNA, 74 bp, Homo sapiens
gctggattggacaagcaggcaaagctgaggttttgatgatgatggttcagaatttcatgaacatatatttctgg

SEQ ID NO: 696029 - DNA, 100 bp, Homo sapiens
ctgccgcacaatcccgggttgtccgggtcctgtcaatgtcacactttaagtttgccatgtacccaccgtcgatgatcgcaactggaagtgtgggagcagc

SEQ ID NO: 696030 - DNA, 76 bp, Homo sapiens
agttcaactagcctgcaaagagagagatgctgctaaaaagaacattgatgatggcacctcagatcgcccctacagc

SEQ ID NO: 696031 - DNA, 80 bp, Homo sapiens
atcttaggctgtgctgtgaactgtgaacagaagcaagcccatttttctcatcaaaacggctcccattcctccagttaccg

SEQ ID NO: 696032 - DNA, 80 bp, Homo sapiens
atgaactgggaatctccactccggaggaactgggccttgacaaagtgtaaaccgcatggcctagaagaagtccaaagtgc

SEQ ID NO: 696033 - DNA, 75 bp, Homo sapiens
gaatgagccagagggacacgctggtgcatctgtttgccggaggatactctggatgaatattttgaatatgatgca

SEQ ID NO: 696034 - DNA, 88 bp, Homo sapiens
ggagaggatctcaatgaatggattgctgtgaacatccagaatgacagggtccagaaactggcgagccacgagggacatgtgtaggtat

SEQ ID NO: 696035 - DNA, 98 bp, Homo sapiens
cagcgctacctggctgacggcaggctgtaccatcgccactgcttccggtgacagagctgaatgaacctctctccaatgaagatcgaaatctcctctct

SEQ ID NO: 696036 - DNA, 50 bp, Homo sapiens
ctcccactgcaaaaaggcctgggtcaccatggagtaacaagtatgaccct

SEQ ID NO: 696037 - DNA, 101 bp, Homo sapiens
tgcagacgttgttgcttgggcgcttctccgctgcgtgtaggtgaagggggcttcctgaccgaggtatggcatgaattgccttattcagtttgaagattttg

SEQ ID NO: 696038 - DNA, 75 bp, Homo sapiens
gtgctgagcccgcggaaccgcagccatgattgtttgctacatgaggagaacttctcggtgaggtgccctaagcac

SEQ ID NO: 696039 - DNA, 100 bp, Homo sapiens
ttacttgctgaaaatcaacttcacgggacacattcagctaacgtattttagcaggtggagtgaggttgaagattcctgtgacagcgatgccatagagaga

SEQ ID NO: 696040 - DNA, 100 bp, Homo sapiens
acaaggatgatgatattagtgatactttctctgaaccagacctgtcgcgaaatcgcctttcagaaattcctatagaagcatgtcactttgtttctctgga

SEQ ID NO: 696041 - DNA, 100 bp, Homo sapiens
cccagattgatattgtgaacatcagcgacagctttgagatgacctatagatcacaaagacattagcaggctgctggtttcatggacctgtaccacaatga

SEQ ID NO: 696042 - DNA, 75 bp, Homo sapiens
ccgcagtcgtgcaggatctgaaggagttgatcatggccttgccaggttggtgacagtatattgtgagcatggtca

SEQ ID NO: 696043 - DNA, 51 bp, Homo sapiens
ttcctggagggggactggaagaccatctcgcgctagtcctgctgatgggca

SEQ ID NO: 696044 - DNA, 98 bp, Homo sapiens
attgcgccgtacattcgagagtttgagattcctgggaacaccaccatggagggcctggcctttggcggtggacagtctgtggctgggtgggaacgtca

SEQ ID NO: 696045 - DNA, 107 bp, Homo sapiens
attattcaattgaaaagcctttgaaattctttcaaactggagccttattggaggtccggggttacccagagccccaggtgacatggcacagaaacgggcaacccatc

SEQ ID NO: 696046 - DNA, 89 bp, Homo sapiens
agtcagggggactgcaaaggccaatgttggtgctggcaaaaagtggacagtttcataaagcataacatgagtagaagaatctactgcca

SEQ ID NO: 696047 - DNA, 74 bp, Homo sapiens
aaccaggaaaacctttcaatgaactgtgggattatgaagcatggcttctcgctgtttctgggatgctgacactg

SEQ ID NO: 696048 - DNA, 75 bp, Homo sapiens
cgagtccagcccaggaaaatggagagattcctggtcgggtggcttccagtggtcttcagtctgtcgtgcaccgat

SEQ ID NO: 696049 - DNA, 100 bp, Homo sapiens
tccgcagcagctccccagggcccacgggccagccccgccgccctcgcaacctggcagccgccgccgtggaaggagaaataaagtgtagtccttctgaaag

SEQ ID NO: 696050 - DNA, 100 bp, Homo sapiens
ccgatctgcccgttgtgtttgtgaaacagagaaagataggcggccatggtccaaccttgaaggtggcacaagaatggctcaactctccaaatagagagaa

SEQ ID NO: 696051 - DNA, 90 bp, Homo sapiens
cagcgcagcgctgccatggagcccagcagcaagggctgccaggcgcccagctgtgcccagatggatgggacagagacccggcagcggagg

SEQ ID NO: 696052 - DNA, 100 bp, Homo sapiens
tggccgagctctgtggcgttggcgctgtgctcccgggcacctgtggaggaggccccagggccgcgtttcccaccgtctggtgcctgtttggggacggagc

SEQ ID NO: 696053 - DNA, 82 bp, Homo sapiens
aaaaatagtgatagctttgataaactggtgtcgttcagtatttctacattgaagactggcaattcgttaatgattatcgaca

SEQ ID NO: 696054 - DNA, 90 bp, Homo sapiens
cctgcttctccttttcatgagtgttcctgtggtctctgcacctcctttctgaagcaagatttccagatgtagcaaatgggtttattgagg

SEQ ID NO: 696055 - DNA, 90 bp, Homo sapiens
gagaggaggggtgccggccgggattcgcggcccggagctcgggaccggaagtgggaatgatggctccatttcacagatgaggaaaccgag

SEQ ID NO: 696056 - DNA, 90 bp, Homo sapiens
aacaatgagtacaactaccgctgctggaccacaaaccgctgccagaaaagaagacaactgttagttttgtggcttactgctgctccaccc

SEQ ID NO: 696057 - DNA, 100 bp, Homo sapiens
ggtttccagtgcagcgcggagtgggcgatgccagcgtgccaggaagcatgagtgggaaaagcatgggacctgcgccgcccaggtggatgcgctcaactcc

SEQ ID NO: 696058 - DNA, 100 bp, Homo sapiens
ctcaagttccgggcccacgacgcctgctccggccgaggcgtggtgaccaagatgaagatgcagaggaccattgtcatccgccgagactatctgcactaca

SEQ ID NO: 696059 - DNA, 75 bp, Homo sapiens
cggcgagcagtctcaggcctttagtgatgatggatctatcttgggatcccatggctttctttactgggctctggg

SEQ ID NO: 696060 - DNA, 100 bp, Homo sapiens
cttggggatcctctgtacgcccgttcactgatgcgtctgttactagagtggagagtctaccttcgtctcacatgtgccacaaaggatggcatggcccggg

SEQ ID NO: 696061 - DNA, 83 bp, Homo sapiens
gcttagacaggcttctgtgctttatgattgtaaaagagttacaggattcttggactatgtctgttacagaatgaactatgtcc

SEQ ID NO: 696062 - DNA, 90 bp, Homo sapiens
caattcggaaccgaagattaaaaaactggagccagtccttttgccagagcatttccgacatgtggaccatggtaaaacaaatgacagacg

SEQ ID NO: 696063 - DNA, 75 bp, Homo sapiens
ggtccgcgctgcttccacccaacttcctgttagacccaacatgagtgaagtttcctgcaagaaacgggacgacta

SEQ ID NO: 696064 - DNA, 82 bp, Homo sapiens
cttgagccacgtgcatgaaccaaacccacttcgttcaagacaggtgtttaagcgaaacagagcaaatgcagcgttacaatca

SEQ ID NO: 696065 - DNA, 82 bp, Homo sapiens
cgcggggaccgctgtgctctcgcacttgcacctcctgcgccgccgccccccatccaaggatatgccttcaagcctccaccta

SEQ ID NO: 696066 - DNA, 82 bp, Homo sapiens
ggggaggaggactctggagctgacagcgcgcacttcacccgcagttggtgtctcgtgcctctgctggaccctgactctgggc

SEQ ID NO: 696067 - DNA, 100 bp, Homo sapiens
ctgaacggagtgtgcgacggattgggagtggtggctgctcgagcccccagaaaggtgcttggttcttccacctctgccactaattcgacatcagtttcat

SEQ ID NO: 696068 - DNA, 90 bp, Homo sapiens
ctgatttctccaaaatttggaaactatttccatgcgatgatggacctactggttgaactttgccttcagaaccacctgaatccatcccac

SEQ ID NO: 696069 - DNA, 88 bp, Homo sapiens
gcattgtcccagatatagccgttggtacaaagggggggccctcagcctcttggccttgaacgggctgttcatcttgattcacaaacac

SEQ ID NO: 696070 - DNA, 75 bp, Homo sapiens
gtcgaccccggcccggaggaggctcatgcgggatttcaagcggagtacgagagggcctccaaagtggaccagttt

SEQ ID NO: 696071 - DNA, 74 bp, Homo sapiens
gaccatggacatctcgctgaccaagctggacaaccactgtgagttacccagcatgccacaatctgattgctgac

SEQ ID NO: 696072 - DNA, 100 bp, Homo sapiens
caacccgctgcggaggcagacgagagcccagcgccctcgagcgagcggaggagatggctggcacctgggaacgctatggccctttggagtgaatcaacct

SEQ ID NO: 696073 - DNA, 98 bp, Homo sapiens
gggattactgttctggttatcttcatcatcatcatcatcggtggtttgtgatgaaaatggttccaagggctatggatttgtacactttgagacgcagg

SEQ ID NO: 696074 - DNA, 110 bp, Homo sapiens
accaggtgtcgctgcttaatatcatgatggatcttaagaagtgctgcaaccatccatacctttttcccgtggctgctatgatgcaaccttaaaatcagtgacaagaaaca

SEQ ID NO: 696075 - DNA, 75 bp, Homo sapiens
gcaagcaatgtggcaaaacgaaaaagctcaatgcctcagaaattcattgatcatcttcatggtgggccgaggata

SEQ ID NO: 696076 - DNA, 75 bp, Homo sapiens
gctgaggcagagctccagtgaacagtgcagggcaagttaaagtcttcagagccctgtatacgtttgaacccagaa

SEQ ID NO: 696077 - DNA, 90 bp, Homo sapiens
actgtggtgaagaaagtgagcgaggagtcagaaactcagccactggttgccttggtaggcaataaaaatagttcttcagacacttctggc

SEQ ID NO: 696078 - DNA, 89 bp, Homo sapiens
ggcggatggcccccggtgcaagaggcgcaaacaagccaatcccaggaggaaaaacgacctaactaccataatgaatgctgcatattaag

SEQ ID NO: 696079 - DNA, 129 bp, Homo sapiens
attgaatgcaacttggaccaagaactcaaactttttgtatctcgacactctgcaagattctctcctgaagtcccaggactgaatcaagttttaagtcagcaagcaaaccaggagatcagcccactggac

SEQ ID NO: 696080 - DNA, 100 bp, Homo sapiens
gtttgcgctacgctgagtacttgcagccctcggccaaacggccagacgccgacgtcgaccagcagagactggttttggcttggtttgaagaaggtgaaga

SEQ ID NO: 696081 - DNA, 100 bp, Homo sapiens
tcgaaggctaccgggcccagcacagccagcaccgcacgccctgcaagggaggtgggaccagggagattggatctgctctcaccaggatgtgcatgaggca

SEQ ID NO: 696082 - DNA, 74 bp, Homo sapiens
ggcacgggaattatgaatacaactgaagaaggagagacgaccatcttgcaactagaaaaagatttgcgcaccca

SEQ ID NO: 696083 - DNA, 101 bp, Homo sapiens
ttccggatcccttggaaacacgctggcaagcaagattataatcaggaagtggatgcctccatttttaagggacaagaatccttcaagaaacaggaaaaaac

SEQ ID NO: 696084 - DNA, 80 bp, Homo sapiens
caacgacgttccatctgtggaaggacctaccaaccaggtgctgactgggttacttttttaaacactaggaatggtaattt

SEQ ID NO: 696085 - DNA, 100 bp, Homo sapiens
tgagaaattttgagtcctcgagtgaatgggcggatctcatatcttcacttggcaaactcaacaagcaatggctgccatccggaagaaactggtgattgtt

SEQ ID NO: 696086 - DNA, 90 bp, Homo sapiens
ggtagaggacgatactctgaccgttttagtagtcgcagacctcgaaatgatagacgaatctccaatgaaaactatgttcctcacgggctg

SEQ ID NO: 696087 - DNA, 96 bp, Homo sapiens
ctcccatcccattctcctcactaaccaaaggttgttatcgtcaggagctgtgcaaactgatgtgtgaacggctaaaactcagcacgtggaaagtgc

SEQ ID NO: 696088 - DNA, 75 bp, Homo sapiens
ccaccaggattacatcatctgctgtgagaaagatcagtctaaagaaaaggagaagaaagtgaaaaaaacaattcc

SEQ ID NO: 696089 - DNA, 89 bp, Homo sapiens
tcttctgcctcttgatctccgccaccgtcttcaggccagcaattctgtggtgttcttggtcacacatttatggagtttctgaagggcag

SEQ ID NO: 696090 - DNA, 80 bp, Homo sapiens
atgatgatgtcacaggttctgtgaaaagtgaaaggatgatttcacaaaagttcatcttcattgcagatacctgcctttct

SEQ ID NO: 696091 - DNA, 97 bp, Homo sapiens
tggaagctgagggcacgtgtttgcggttcagccctttgatgaccgcagcagaagactgggacatgttggatgttgatgaagatgaaaagctaactgg

SEQ ID NO: 696092 - DNA, 100 bp, Homo sapiens
catcaaccggacctacctccatcatcacatgaccaaagcattcctcttctatggtcagactctgcgaaaggccgagagaagctggtcctgctcacgagag

SEQ ID NO: 696093 - DNA, 51 bp, Homo sapiens
agtgtagccccagtatttactgtggccaaatttgagtttcatcatggtgac

SEQ ID NO: 696094 - DNA, 82 bp, Homo sapiens
gaggaaggaacgaggcaaggagctaaagcagcgtgcgttcagccctggggaaataatgaagatgtttcattttcaagaccag

SEQ ID NO: 696095 - DNA, 90 bp, Homo sapiens
gatgttgtcctgtgctggggctgacaggctcagctggttaccctgacttcactaatcccacgatgagggcctggtgggctaacatgttca

SEQ ID NO: 696096 - DNA, 82 bp, Homo sapiens
gggagcttccgggagggcggctcgcagatccgagggaagggcttcgactggccgctgctggtgaaggacttcaacctgcttc

SEQ ID NO: 696097 - DNA, 95 bp, Homo sapiens
gctctgggagcctagaatgcatcagtgcccttgtggcgaatggggctcacgtcgaaggggtgtttgatgcttccctcaaaatggctggcttctat

SEQ ID NO: 696098 - DNA, 98 bp, Homo sapiens
attattagtgctgctcctccagggaccgatccgtatactgcagcaggattggctgcagcagctacattagcagccgtgctggtatagaggactctaag

SEQ ID NO: 696099 - DNA, 75 bp, Homo sapiens
gcatgtacacagatattcaggaaccaatgctgagtgctgcacaagagcaggactcagaattcatgattgaagaaa

SEQ ID NO: 696100 - DNA, 82 bp, Homo sapiens
cgctgagcacgagtcacccgttctacgacgtggccagacatggcattctgcaggtggcaggcatagaatgtcaagctaacca

SEQ ID NO: 696101 - DNA, 75 bp, Homo sapiens
gaactgagaatgttaagctttcagcagatgacgtggcgaacaaataatctttgtggagttcacctctgtgtttga

SEQ ID NO: 696102 - DNA, 111 bp, Homo sapiens
tcctgcctcactgccagaagctctttgtgtatgaccttcacgcagtcaagaacgacttccagagagacaagagagacacctccaacttcgacaaagagttcaccagacagc

SEQ ID NO: 696103 - DNA, 75 bp, Homo sapiens
ggtcaacgtggtatactcgcagacaacccaaccggtatacaatgcgcaaatgggagttggcgaaggcaagtccat

SEQ ID NO: 696104 - DNA, 50 bp, Homo sapiens
ctttgccttctcagcccaaagtcagccccgaccattttgttcaggaccct

SEQ ID NO: 696105 - DNA, 100 bp, Homo sapiens
ctacgaggaggtgcgcgagaagtacaaagtctctggctgatgaacttgctcttgtggatgttttggaagataagcttaaaggagaaatgatggatctgca

SEQ ID NO: 696106 - DNA, 75 bp, Homo sapiens
ctcggtgatgggctgcgatgtactcaaaggaggcctactccgtggcccggcagttcaacctgaccccgcccatct

SEQ ID NO: 696107 - DNA, 75 bp, Homo sapiens
tgctctgcgtcctcatcgggcttatgttcgaggaccaagaatcgccttcagccctgtctggtgcatccttggcag

SEQ ID NO: 696108 - DNA, 80 bp, Homo sapiens
ctggagggcactaccagatgggctgccatgtccacgcagagacttcggaatgaagactaccacgactacagctccacgga

SEQ ID NO: 696109 - DNA, 100 bp, Homo sapiens
cacgcataatggatgaaaggaaccgacaggacaggcgacactaacaggtgaagatctcgggagaccatgactaagaaaagaattgctgtgattgggggag

SEQ ID NO: 696110 - DNA, 100 bp, Homo sapiens
tcctccttctcaaattgcagcaggagctttttgcttagcactgaaaattctggataatggtgaatggaaaatgtcactgaaattcacaaatgcaaaacgg

SEQ ID NO: 696111 - DNA, 51 bp, Homo sapiens
gagcgccagcgacttcagtacctgaaagcagaagccactggagaaaaacgg

SEQ ID NO: 696112 - DNA, 74 bp, Homo sapiens
ctcccctaggagtgctgagcccgcggaaccgcagccatgtaagactttgaccccgacgcaggcttcagtgattg

SEQ ID NO: 696113 - DNA, 74 bp, Homo sapiens
aacgcctggtgcagagccccaattcctacttcatggatgtgaaatgcccagaatccttcattacatcatccacg

SEQ ID NO: 696114 - DNA, 100 bp, Homo sapiens
ggccgagcaggaggcgccatcatgactgtggatattcataaggagaaagtggcacgaagagagattggtattttgacaacaaataagaatacatcaagaa

SEQ ID NO: 696115 - DNA, 82 bp, Homo sapiens
gttcgcagtgacctggggaacctgctcaaagccctgggtcgcttggaagaagccaagtcctcctccgcctcctcctctctgc

SEQ ID NO: 696116 - DNA, 100 bp, Homo sapiens
atcaccccaaaggtcgcgataatattattgacctcttcctttatcagccacaatggggacccagagcctgctcttgggaacagccagagtaagattggaa

SEQ ID NO: 696117 - DNA, 100 bp, Homo sapiens
ccggagtcccatttgggagcaagagccatctactcgtccgttaccgggtgattgatatgcccgagcacaaccctggcaatttgggaggaacaatgagact

SEQ ID NO: 696118 - DNA, 88 bp, Homo sapiens
gaagcctcccagtctgaattctgtggattttcgtctaaaaataacaagaatgggaggagaaggacaattgcagcatgactttcccagg

SEQ ID NO: 696119 - DNA, 74 bp, Homo sapiens
ctgagacatctttggtttctaatatcttccatgtcaacacggatgatcacaggagtggaacagatgtgcattca

SEQ ID NO: 696120 - DNA, 83 bp, Homo sapiens
aggagcttctgggagccaccgtctgaagacaatgcagatcttcgtgaagactctgactggtaagaccatcaccctcgaggttg

SEQ ID NO: 696121 - DNA, 100 bp, Homo sapiens
ccgaagcgggctgtgtgccccttctccacccagaggatgtttcgtctgaactcactttctgctttggcagaactggctgtgggttctcgatggtaccatg

SEQ ID NO: 696122 - DNA, 90 bp, Homo sapiens
ccagaacaactcttcttcatagttacgttatactgcccctgcattgttggtattgaaatgtaagaagaagcttgggaagctgccacctca

SEQ ID NO: 696123 - DNA, 50 bp, Homo sapiens
gattcgcagtggtcgcttcttctccttgcttgtgaaaaaacagttgaaga

SEQ ID NO: 696124 - DNA, 82 bp, Homo sapiens
gtgatgctggagacctgtgggcttctggtcgcactgggtattgtcaatatggactcgccatatggttctgtaacaccttctt

SEQ ID NO: 696125 - DNA, 89 bp, Homo sapiens
caagttcatgctgtgtgctggacgctggacagggggcaaaagcacctgctcggacctgaaggagaagaaggagaaggtggaggagaagg

SEQ ID NO: 696126 - DNA, 100 bp, Homo sapiens
gatccagaaactttcactcaagaagatattgaccaacaaaggagagagcgggaagctagaaggcagcaggaacgtgaacagcgaaggagagaacaagaag

SEQ ID NO: 696127 - DNA, 100 bp, Homo sapiens
actgcagcagacagctccctgggcaccaggcagctaacagggctgttctcacatttcaatgcactcacctggagggcttaccacaacaaagatggccgga

SEQ ID NO: 696128 - DNA, 75 bp, Homo sapiens
cgtccgtccgccgccaccacccactccggacacaggtcctgtggcggtacactggaacccgaccatcgaatcttg

SEQ ID NO: 696129 - DNA, 100 bp, Homo sapiens
cttatctgctcagcaagctgctgttattaaccttactggagtaggaagttttatgcagtcacaggcagctggcaaagcagagagcagaggttcttcagtc

SEQ ID NO: 696130 - DNA, 75 bp, Homo sapiens
agaaactcaactggtgtcgagaagtccggaagcttgtggcgctgaaaacgaacgaaatggctgcaagcaactgac

SEQ ID NO: 696131 - DNA, 72 bp, Homo sapiens
gggtctgatctggaccattattttgcatttccagaaatgcactcggtgatggaaagagagccactattctga

SEQ ID NO: 696132 - DNA, 51 bp, Homo sapiens
cttgcagtccttgtttggagaggagttggtaaaatattaaagaagatcaac

SEQ ID NO: 696133 - DNA, 50 bp, Homo sapiens
cacaatcagtttatacctctgcaggtgtttgacctggtgatgcttttcat

SEQ ID NO: 696134 - DNA, 93 bp, Homo sapiens
ggagatgggcagacggattcatttagagctgcggaacaggacgccctctgatgttctgcggggagtgtctccagccctgcctgcaggtgccat

SEQ ID NO: 696135 - DNA, 82 bp, Homo sapiens
ggccgtggggagctgcgaagatttctctctaggataaagtttgttgaagctccctacgaggctgaccaactgactgaagagc

SEQ ID NO: 696136 - DNA, 87 bp, Homo sapiens
aagatattgtttacaaattggtaccaggcctccaagaagcctgcgtatcagaatctgagacagcgtgttgacaactttgttgcaaat

SEQ ID NO: 696137 - DNA, 90 bp, Homo sapiens
ttatcttaaatacttgctttactggaaagacccagaatatgccaagtatctaaaagctgggcgggactgcaaacgccgccttgcgccgag

SEQ ID NO: 696138 - DNA, 74 bp, Homo sapiens
acccagtgaacaaatccgggggcaaggccaaaaagaaggtggaagttaaacgagctgagcctcgggacagcaag

SEQ ID NO: 696139 - DNA, 75 bp, Homo sapiens
cttggacttctcagcctccagaatgcaatggctgccatccggaagaaactggtgattgttggtgatggagcctgt

SEQ ID NO: 696140 - DNA, 115 bp, Homo sapiens
ggaacaccaaatgaggacacatggcctggagttcattctttaccacattttaagccaggtgctgggtcttcagctctaaagaggccatttgaagatggattaggggatgataaag

SEQ ID NO: 696141 - DNA, 100 bp, Homo sapiens
tctcttcgctggtggcaaactggtgtgatccctcacatccacaaatctctgattggaaagaagggacagcagaaaactgcttagagggatgctttaacca

SEQ ID NO: 696142 - DNA, 80 bp, Homo sapiens
cagcgatatgcagtttggtttggaggatcaatgctggcttccacgggaaatgaggcaagttatcctttggaaatgtgctc

SEQ ID NO: 696143 - DNA, 101 bp, Homo sapiens
agggaacaggcatcatggactgtgcgcccaagggcaggagcgatttggcaacatgacccgagtatactacaaggaagctgttggtgcttttgtagtctttg

SEQ ID NO: 696144 - DNA, 50 bp, Homo sapiens
caggcgcccgccaccacacccaggccgccagatcccacccttggaccccc

SEQ ID NO: 696145 - DNA, 100 bp, Homo sapiens
gttccattcccagatagcagcccagggtgctgtgattacaccaaccatggaccatcccatgtcaatgcagccagccaacatgatgggcccactgacacag

SEQ ID NO: 696146 - DNA, 96 bp, Homo sapiens
ggagctctcacatgtggaagctgcaaggtcttcttcaaaagagccgctgaaggtgtttcagtcacctccagtaacacgggcgtgccagatatctcg

SEQ ID NO: 696147 - DNA, 75 bp, Homo sapiens
ctgaaggctgcgagggactaagagcagagtgcaatatcagctacttagaagaatggcttaaagataagaacttgc

SEQ ID NO: 696148 - DNA, 101 bp, Homo sapiens
ggagtgacacaaggtgatagacttcgggccttgaaaagcagaagacaatccaaaacaaacgctattcctctcacaagaggaatctcttgttggcatttgaa

SEQ ID NO: 696149 - DNA, 90 bp, Homo sapiens
ccggtgccagcacctttcggcttctgagacggcggcagcagcggcattcagaatttggagttgtctgcttaatattttctgcaacactag

SEQ ID NO: 696150 - DNA, 100 bp, Homo sapiens
gccaaaaatggagaaatttttggtttcctgtacgctcagaacagcaccaagcgcagcattaaagagcggctcatgaagctcttgccctgctcagctgcca

SEQ ID NO: 696151 - DNA, 100 bp, Homo sapiens
cggccggggcgctagcgttcgccttcagccaccatggggaatgggatgaacaaggggtcggcaccaggaattattatagaaagatcggctacagattaca

SEQ ID NO: 696152 - DNA, 83 bp, Homo sapiens
ctatcttagtccaatgtcaagcatatcatttggttactcaggtgatcgaggaaacatctcaacatcttctaaaccagcctcta

SEQ ID NO: 696153 - DNA, 100 bp, Homo sapiens
ggatttttgcgattgtcctatgagaagcaggacacacttttgaagcttctcattctgtcaatggctgctgtattatgatatagctgacctggcatttgag

SEQ ID NO: 696154 - DNA, 80 bp, Homo sapiens
agttcgtctcttacgtctgcggaagtgcagctgcctcagttcttagcgcaggttcgtgctggccgtgggcagcgccgtct

SEQ ID NO: 696155 - DNA, 75 bp, Homo sapiens
gcccaggctcgcctcgactccaaatggttgaaaacagatatacaggaatcagagatcattgatttcttcctgggg

SEQ ID NO: 696156 - DNA, 100 bp, Homo sapiens
agtgtgtccagcatgggagagtacatgagacgatgaagcaaaggttgctccgactgtgtgttccaggagtggtggctctgaggtgtgaccctgcccacgt

SEQ ID NO: 696157 - DNA, 90 bp, Homo sapiens
cgccatcctcgctgctctaccaggtgccgtgagtggaaatgtgatcgtgaacaccatcgcaggggtcccagctgccaccttccagtccat

SEQ ID NO: 696158 - DNA, 100 bp, Homo sapiens
cttaatcctactcagaagaacttgtacagagatgtgatgttggagaactatagcaatctggttttcttgggtcttcccaacacctttggtgactatgatg

SEQ ID NO: 696159 - DNA, 90 bp, Homo sapiens
ggaaaggatgttggcggtccctgtgacctgtggagacacggccagatctgccctccatttgaagaaaacaggtctgaaacaaggtcttac

SEQ ID NO: 696160 - DNA, 101 bp, Homo sapiens
tcgctgcccagcgccctggccctctcgctgttgctggtctctggctccctcctcccagggccaggcgccgctcagaacgaactgccctcatgctaggttgc

SEQ ID NO: 696161 - DNA, 98 bp, Homo sapiens
tttgttaaggattccaagtaactcttatttgggtttggacagaggagccaaaggccaaatttccactttcagcagttttatttcagctgttagcccga

SEQ ID NO: 696162 - DNA, 148 bp, Homo sapiens
ggacgaggtcctcaagctgctgcaccgcggcgccgacatcaattacgccaatgtggacggactcactgccctgcaccagatggactagaggcttttaccagatttcttaaaactgaattcagtgaagaaaatattgaattttggatag

SEQ ID NO: 696163 - DNA, 100 bp, Homo sapiens
acgtgtgctttttcaagggagctgataaagaacttcttcccaaaatgggtcatcatcctgaaccacccggggcagattagcgccggctactccccggtca

SEQ ID NO: 696164 - DNA, 95 bp, Homo sapiens
ggaaaatatggaaacaggaacaggactgactccagtgatgacgcaggccttaaggagaaagtttcaggaagctgaatatggtgggcatgatcaga

SEQ ID NO: 696165 - DNA, 100 bp, Homo sapiens
gcgccgaggaggctttcctgctggtggcaaccgcctacgagacactcaagatctgcttggctttgaggaagagtggcagtactgcctcactgcataaggg

SEQ ID NO: 696166 - DNA, 51 bp, Homo sapiens
cctcttattggaagattatccaaaagatgtacagatcagctctcaaaatgt

SEQ ID NO: 696167 - DNA, 100 bp, Homo sapiens
gggtaccgggcgcgggcagagcgcggcggcgcggaccacagagtattcagccatggcctcgctggctggtgggctggacgacatgaaggccaatctggcc

SEQ ID NO: 696168 - DNA, 51 bp, Homo sapiens
cagagttcctcaaagttgcagagccaggcgttgtggggcagatgatcgagg

SEQ ID NO: 696169 - DNA, 100 bp, Homo sapiens
ggtgggcgagacagccccacccaatgcctacactgtcactgacctagtggtttggaaagcagagtggagaacaaagagttgattccaatgcaacaaattt

SEQ ID NO: 696170 - DNA, 118 bp, Homo sapiens
gctgcgctgtagcctggaggctccgggcgcggggaagtcatgctcgcttcacggaggcaatagctagccggcataatgattataaagtggtttctcctgctttgcgagctgtgggaaa

SEQ ID NO: 696171 - DNA, 83 bp, Homo sapiens
gtcatccagccttagcaaaccagagttcagagaagccgaactgggattaccatgcagaaatacaagcttttggacatcggtta

SEQ ID NO: 696172 - DNA, 100 bp, Homo sapiens
gcaggtttaaaattttacataagaagttacctttttcaggaggaggtgcgccagtctgtaactcctgccgagccagtccagtactatttcacgctggctc

SEQ ID NO: 696173 - DNA, 82 bp, Homo sapiens
gatttaaccgctctctgcctcccaggggcagaaccccttcgagctggccttctccctagaccagcccgaccacggagactct

SEQ ID NO: 696174 - DNA, 89 bp, Homo sapiens
ggcgtagataccgagctgctagccgagagattttactaccaagccctgtcagtagctcctcagattgatgatgaaactgaggcacaaac

SEQ ID NO: 696175 - DNA, 88 bp, Homo sapiens
tcggtgggcctctgagatatgccgtttacgggtgaataagtctgatgacacagcagaacatcttctggagttgggctggtttaccatg

SEQ ID NO: 696176 - DNA, 90 bp, Homo sapiens
ccgactgggagcagaggaagccttgaggacctactcacagataggaattgaagctttgtgtccctggtgatgttggaacattaatgatgg

SEQ ID NO: 696177 - DNA, 100 bp, Homo sapiens
gtttccgaacagttgaggccaaacaggagaaagtttcaactacactgaatgtggctcaggaattagcttaccgaaaggagatggtgagagctgacctaat

SEQ ID NO: 696178 - DNA, 100 bp, Homo sapiens
agtctccgcggtggaggtctgcgttgctcttgcttttcctcgctggggtgtacggttttgattcccaccatggccatcacccagtttcggttatttaaat

SEQ ID NO: 696179 - DNA, 100 bp, Homo sapiens
ctcaattgaagcaagagatttctgaatggtgtccttcttcacatcattatggaatcacccatttttcaccattagctgtatcactctaataggcttgttc

SEQ ID NO: 696180 - DNA, 100 bp, Homo sapiens
gaccaaacctgtgataacctgtctcaaaaccctcctcatcatctactccttcgtcttctggtattctgacaagtccctgtacacccagctgtgcttttac

SEQ ID NO: 696181 - DNA, 80 bp, Homo sapiens
gccatattgtgtcttccccggccggtccctcgcctcccggccgagctgacggttgtggcagcactgcctgaaggtatgag

SEQ ID NO: 696182 - DNA, 107 bp, Homo sapiens
aacgatattatagtgatcctcgatttctcaatctctggcttaaattagtgtgggcccatcgctggatggatctgtcagaacacggctttgggctggccctgctcaac

SEQ ID NO: 696183 - DNA, 75 bp, Homo sapiens
ggggggttccgctgctgcctctgccacgttactacagccaaccgggaaggtgtggctcattgactttaatccatt

SEQ ID NO: 696184 - DNA, 99 bp, Homo sapiens
caagcttgcctcaagtgaaccccgaatgcatctaggtaccaatggagccaactgtggtggcaggaccccaacttcagagggtgcagcctctgaaagaga

SEQ ID NO: 696185 - DNA, 90 bp, Homo sapiens
tggtcccggctgctgcagggcgggggcgtccccaggagccggacagggctccaaacgaatcctgcggtcccatgagattgtgctgccccc

SEQ ID NO: 696186 - DNA, 75 bp, Homo sapiens
tcggacaccttcgagggttgggttcatgaactggaatgtaagaggcaccagaggattcctgctctgtcccctggt

SEQ ID NO: 696187 - DNA, 82 bp, Homo sapiens
agggcgttggctatgtgcccatcacaggatgaatttttagatgtgatctactggttccgacagatcattgctgtggtcctgg

SEQ ID NO: 696188 - DNA, 50 bp, Homo sapiens
acaaaatgtcaacaaattgatggggttccccactgaaggacttggtccag

SEQ ID NO: 696189 - DNA, 82 bp, Homo sapiens
aaaagaaaacacttcttcatggtatgaggttgactcatttacaccatttcgcaaagccatctcaatcagtgaccacactgcc

SEQ ID NO: 696190 - DNA, 75 bp, Homo sapiens
atccgctgctgctgaggagaggagcgtcaacagcagcaccatggaaattgcaggtgctgcagtgtctgaaatttc

SEQ ID NO: 696191 - DNA, 100 bp, Homo sapiens
ctgagtcagtgtgacagtccatatgtaaccaaatattatggatcctatctgaagagcagtaaacagtcctcagcgaagccgcctttttgcctacccaacc

SEQ ID NO: 696192 - DNA, 96 bp, Homo sapiens
gcaccgaggcgagcaggagcagggaacagaatcatgtcaaccctgccatggacttcacgcagactccacctgggatgttggctctggacaacatgc

SEQ ID NO: 696193 - DNA, 98 bp, Homo sapiens
gaaggaaccaattccggacacataacaagcagcagtgaggacaccaaagatgacagcgcttctgctgcaagtagcatggaggtgacagaccgcattgc

SEQ ID NO: 696194 - DNA, 100 bp, Homo sapiens
cctgtgcgtccgagaggcaacaaggtttgctgctgcctattgtagatctgggaagggtttttaatgaccacaacaagcaagcatgcagcttactgcttga

SEQ ID NO: 696195 - DNA, 98 bp, Homo sapiens
gtactggccgagatggctaagaagtccatgccaggaggtcgtctgcagtcagatgtggatgagtgccaagaatatggtcccgagatttgtggagccca

SEQ ID NO: 696196 - DNA, 90 bp, Homo sapiens
gtggtgcagtgaccaatcagaaataatatccaatcagtacaacaatgagccttcaaacatatttgagaaccatatttatttagagtcaga

SEQ ID NO: 696197 - DNA, 100 bp, Homo sapiens
ctgacattaaggaccagccagaaaatgctgaatcgcgcagaatttgaagatcaagatgatgaagccagagttcagtatgagggttttcgacctgggatgt

SEQ ID NO: 696198 - DNA, 75 bp, Homo sapiens
ggccagcctcagcaccgacagccgacgcgcagatagcagagccatccttggggccatctggctgctgtgcacagg

SEQ ID NO: 696199 - DNA, 83 bp, Homo sapiens
cgggagtgttcgttgtgccagcgactaaaaagagataaacttctgcactggaggggcctctcctcccctcgttctgcacatgg

SEQ ID NO: 696200 - DNA, 75 bp, Homo sapiens
ctttccaaaaataaaagtatcatctgttactataacacctaccaggtatggagagtcggcttgactacactgtgt

SEQ ID NO: 696201 - DNA, 75 bp, Homo sapiens
atccttgatgcggtggaggaaaaggctgcgctggcctcggcacaccagtgccacccgctgccccggacgctgagc

SEQ ID NO: 696202 - DNA, 135 bp, Homo sapiens
ccgccccgaccctgcccctcccgcccgcaactccgccgcccaccatggcttccgaggagctgtacgagaacctgtgagaagtttctacaatggtgggctcagctctcaggagaggtgcccatgcatatgtctacc

SEQ ID NO: 696203 - DNA, 100 bp, Homo sapiens
cgcagccctgaagttgcctcttctggtgtcaaagcttttggacattcctgggatcatcagaaaagcccttactgaggaaaaacgtgtctcaacaaaaaca

SEQ ID NO: 696204 - DNA, 58 bp, Homo sapiens
cctgggtctgggcttcccgggcgagcggtgggtaatggggagagtgccaacaatttcc

SEQ ID NO: 696205 - DNA, 100 bp, Homo sapiens
cttcaacagggcttcaccactggaacaagcacaaggtgctggagaatctggtaaaagcaccattgtgaagcagatgaggatcctgcatgttaatgggttt

SEQ ID NO: 696206 - DNA, 97 bp, Homo sapiens
ccaggctgtctttcacaatccagatcacaaaatttgtccaggatagacatagagctagaagaaacagacttcgtaaagatcaacttaagaaacttcc

SEQ ID NO: 696207 - DNA, 75 bp, Homo sapiens
gaagaatcttaggcgggtgcacccagtttccaccatgattaagggtctccctccactgctgtagtaacccgggtc

SEQ ID NO: 696208 - DNA, 100 bp, Homo sapiens
tgtgctggcccagccgagcccagcaccaccatcttcacccagctcgccaccatggccgccttcccggggtccactggacggggcctgagctacaacttca

SEQ ID NO: 696209 - DNA, 75 bp, Homo sapiens
ctgactccaactctgaggatgaggaggaaggtgaagcgctgaagtcgttcctccgggagtgcaaggtggccaact

SEQ ID NO: 696210 - DNA, 88 bp, Homo sapiens
gatttgcagctggatcttggagaaacaggacaacaggtggtgctcccactctttcccggcttttagaagctggtcctacacagttcac

SEQ ID NO: 696211 - DNA, 80 bp, Homo sapiens
aacgcgagtgggagcaccaggatctcgggctcggaacgagactgcacgaaagtgaagtcactgcttttgctgtcttggat

SEQ ID NO: 696212 - DNA, 100 bp, Homo sapiens
cacccatgccatgtccggcaccgccatccccatttctatggtcctcctcacctatggccgctggcagcttctggagctatttgacagcgaagaccctcgg

SEQ ID NO: 696213 - DNA, 74 bp, Homo sapiens
ccgggtgggatggaggcccgtaagcagggcaagagcggtgagcggggcgcctatgcctccttcgggagagacgc

SEQ ID NO: 696214 - DNA, 75 bp, Homo sapiens
gatgaaagagaagtttctggtcactccccaggattatgcgcgcgggtattcccctacatctcagccatggtgaac

SEQ ID NO: 696215 - DNA, 101 bp, Homo sapiens
aagcaaagaagagttgagcacaatcaggaattacatgaacgacagccttcgcaccgacgtcttcgtgcggttccagccagagagcatcgcctgtgcctgca

SEQ ID NO: 696216 - DNA, 90 bp, Homo sapiens
ggagagaaccagcacttctgggacgcacagagaccgtgaagattccaagttcaggagaactcgaccgctctttcgacgtgtagcagcagc

SEQ ID NO: 696217 - DNA, 74 bp, Homo sapiens
ggcagagaaaaccagctgagacagggcgccacttactaggttgtgaccgagattcccgacgagagagactgagg

SEQ ID NO: 696218 - DNA, 80 bp, Homo sapiens
aaagttattgctaagtgtgggaattttagctaagcattatccaattggtttgctatttgatcttcttgcatcaagttcag

SEQ ID NO: 696219 - DNA, 75 bp, Homo sapiens
gctgagggggcgcgaggggaacggaggccagagctgcgctgtggaataatggcaacagaaagactggctaactac

SEQ ID NO: 696220 - DNA, 50 bp, Homo sapiens
taagcactgctgcactttatgagtagccggatcgagctgggagatgtgac

SEQ ID NO: 696221 - DNA, 83 bp, Homo sapiens
tgctgccctagaggggattgcagaatctccaacaactttacaggtttctctggaaacccccctggtaagtgtggaggaggcgg

SEQ ID NO: 696222 - DNA, 95 bp, Homo sapiens
ccgccggctactgccgcttcagttctcccggtgtggccacgagtcgggtgctgactgggttacttttttaaacactaggaatggtaatttctact

SEQ ID NO: 696223 - DNA, 82 bp, Homo sapiens
ccgagtccgaggtctacgacgacggcaccaacaccttcttctggtgcgcgcggagccatggttatcatgtcggagttcagcg

SEQ ID NO: 696224 - DNA, 50 bp, Homo sapiens
agtgaaagaaacttcctcagtaaagctgaaagatgtcatgtatatctgcc

SEQ ID NO: 696225 - DNA, 83 bp, Homo sapiens
cttttgagataaggaataggactgcggggaggagtgtgtgagaatcaaagcatttaaatcaaacggtattgagatggattggg

SEQ ID NO: 696226 - DNA, 82 bp, Homo sapiens
ggagaaggaaatgctgcttagattaaatgcgttgttgacagctcagcagctcctcctcctatagtggggacatcagcaggca

SEQ ID NO: 696227 - DNA, 49 bp, Homo sapiens
ggggcggcagccagctcgcaggggtaaaccagacttgaatacaacattg

SEQ ID NO: 696228 - DNA, 82 bp, Homo sapiens
acccaccatggagacccgctacaacctgaagagtccgggatagctagcggccaggagaaatacagtggaaaatgcaaaacaa

SEQ ID NO: 696229 - DNA, 100 bp, Homo sapiens
caacttctgctccaggaaattcagcctcaaaaccgtcctgctgcttgctgaccaaatgatctggtggctggacccagagctgacctatggctgcgccaag

SEQ ID NO: 696230 - DNA, 119 bp, Homo sapiens
cgccaagctcctggccctggccctgatcatcctgctgggcttcgtccagatcgggaagggtttggtgcacctcgatttggaggaagtagggcagggcccttatctggaaagaagtttgg

SEQ ID NO: 696231 - DNA, 74 bp, Homo sapiens
tggagggccccgacgatagcgaggtcacctttgcattgcactcaggttggatggcaagcatgtggtgtttggca

SEQ ID NO: 696232 - DNA, 82 bp, Homo sapiens
agacgtctgcgtgagaatagagaccaccgaggacaaccctccatatgataagggagccttcagaatcgaaatcaactttcca

SEQ ID NO: 696233 - DNA, 75 bp, Homo sapiens
gccaaggttccgcgccgggcgtggacggtgtggggcggtcccggccccgcagcttgccttgcgccatggactggc

SEQ ID NO: 696234 - DNA, 100 bp, Homo sapiens
ctgcataatgttttgaagctgaacatccagccctctgaggcagactatgccgtagacatccggagtcctgctatttcaggtatgttagagcccaccaagg

SEQ ID NO: 696235 - DNA, 100 bp, Homo sapiens
tctcgctccggagccgctgcacatttcggtgattgaattactcagatatgaagatcatcatctaggttttgtgtaaaaggccctggatattttaagtggc

SEQ ID NO: 696236 - DNA, 76 bp, Homo sapiens
atagcacagaaaatctctgtcagaactgggagactcatgcatctgtatgccgtgtgcgtggactgcctggaagggg

SEQ ID NO: 696237 - DNA, 50 bp, Homo sapiens
ttttcctccacctaccttcccgagccaagatgctgaattatcagggacac

SEQ ID NO: 696238 - DNA, 100 bp, Homo sapiens
cacggacacggctgtgtttgatgtccggctgagtgggaagaccaagacagtgcctggataccttcgaatagggcgcaatgtgtcatttaggcctgtgacg

SEQ ID NO: 696239 - DNA, 100 bp, Homo sapiens
caatgtgggatcgatgtttcaatattggaagcgatttgatctacggcgactccagacttcagctacgggacggacgagtacgacggagaggggaatgagg

SEQ ID NO: 696240 - DNA, 88 bp, Homo sapiens
acaaacaccagaaggacatgaacgagaagtgtgccatcggagttacccacttccagctggtggcacaagatctctgtaaagtagcagg

SEQ ID NO: 696241 - DNA, 75 bp, Homo sapiens
tgtggccttagctacaggagagattcttgctcacttgtggcatctgggctactcaccagaagatatcattggcaa

SEQ ID NO: 696242 - DNA, 100 bp, Homo sapiens
ctcaaggcctgagtagccggtaacaaacgagggttcccgggattggaccgacgcagccatggtgcttcctgggtgagttggggtttagtcaaaggtgctg

SEQ ID NO: 696243 - DNA, 50 bp, Homo sapiens
catccataatcgagggaaagaggggtggaataacactcccatggatgaag

SEQ ID NO: 696244 - DNA, 90 bp, Homo sapiens
cctggatctttgctagaaagagaggaggatcccttttcccccagaaattactcaatgctgaaacctctcaaagtggtattagagacgctg

SEQ ID NO: 696245 - DNA, 75 bp, Homo sapiens
gtgcgcgcctgcgacctgcccgcctgggagaatggggtactaagagaaaagcacgaagctgtggatcatagttcc

SEQ ID NO: 696246 - DNA, 100 bp, Homo sapiens
ctctgggactcgtggggctgcagcaccgacagagtttcactcctgttacccaggctggaggacaatgatgtgatctcgggtcaccacaacctccgcctcc

SEQ ID NO: 696247 - DNA, 90 bp, Homo sapiens
aggtacatgctggtcacctacgacgaacccccgtactgcatcaagattgacgagatgcctgaggctgccgtgaaatcaacagccaacaaa

SEQ ID NO: 696248 - DNA, 101 bp, Homo sapiens
ttttctccaagagccattgaatatgttaagatcaactggtgagactgcagtcagtgcttttgagattgacaagatgtacacccccttgttcttcgccagag

SEQ ID NO: 696249 - DNA, 82 bp, Homo sapiens
tcatctttcaacaggagcaggagcttggttctacagccattgggatccagacatcagagggtgtgtgcctagctgtggagaa

SEQ ID NO: 696250 - DNA, 82 bp, Homo sapiens
acggagaagtccgcctgtaagagacaatgcagatcttcgtgaagactctgactggtaagaccatcaccctcgaggttgagcc

SEQ ID NO: 696251 - DNA, 80 bp, Homo sapiens
cagagtccttgctgggggttcggggagcgcttggaccccggcttctgggacgcgtcagagagtcccacgaactggctggg

SEQ ID NO: 696252 - DNA, 75 bp, Homo sapiens
gaatatacaagaggggagttactggtacttgatttgcaagcctatgctattggcatgatacttacatttgttgtt

SEQ ID NO: 696253 - DNA, 100 bp, Homo sapiens
gaaaattcacccttgtagagtcattcctgcctttgagcggactcccttttaaggcagccaacatgcctgactctgagctattcgagctcatctctgagaa

SEQ ID NO: 696254 - DNA, 100 bp, Homo sapiens
tttggagccagcctgctaggggctgaattctgactcagccatttactaactgtgtgaccttaggtgtgttccagagaacaagccttcagacatttgctat

SEQ ID NO: 696255 - DNA, 75 bp, Homo sapiens
gtggagcaccgatgatgtgcagatcaatgacatttccctgcagatggtttgtgtagagtggaggatgagagagcc

SEQ ID NO: 696256 - DNA, 73 bp, Homo sapiens
gcggaggaacgccgagcagtacaaggaccaggccaacctgaccgtcaagctgccagatggatacgaattcaag

SEQ ID NO: 696257 - DNA, 100 bp, Homo sapiens
gccgtcccctacacggatgaggcccggcggtcgcgcctcaaccggctgtacggaatccaaggctctgactacacccggataacagaagacagtttctcaa

SEQ ID NO: 696258 - DNA, 76 bp, Homo sapiens
gttttgtttgactccagtgttaagagaagaaatgaggacatatcagtatcggagccggtgaaacctgaagaaggca

SEQ ID NO: 696259 - DNA, 83 bp, Homo sapiens
ggaggtgatgctggaaaactgtgggctcctggtatctctggacaacaaaggaggctttgaaaatgttttagaagaaattgctg

SEQ ID NO: 696260 - DNA, 75 bp, Homo sapiens
cgcagaaggggtgaaagagactcggtgacagatacaggtattatccaaagagatgagtcacccatggaaaaaggg

SEQ ID NO: 696261 - DNA, 90 bp, Homo sapiens
ccaggaagaatttttacagtatctcaaagacttcacttgacttcttgatcctgcataaaaccaagatggagtctcgctctgttgcccagg

SEQ ID NO: 696262 - DNA, 50 bp, Homo sapiens
tcagcctcctgagcagttgggattacaggggagaaagggacatgctgctg

SEQ ID NO: 696263 - DNA, 96 bp, Homo sapiens
cccgggaggaaggaacgaggcaaggagctaaagcagcgtgcgttcagccctggggttctgcggggagtgtctccagccctgcctgcaggtgccatc

SEQ ID NO: 696264 - DNA, 90 bp, Homo sapiens
gcaacaaaaagaaagctgcgttaatgtttgcaaatgcagaggaagaatttttctatgaggatgaatctggttatagatggacaagagacg

SEQ ID NO: 696265 - DNA, 83 bp, Homo sapiens
gcactgctttccactcggctcctgtcgtccgttctctcaggctcccgttcagcctcccggcatggtgctcaaggccttcttcc

SEQ ID NO: 696266 - DNA, 110 bp, Homo sapiens
ggaagaccgcgcgcagggcctgcagcgggagctggacggcgagcgcgagcggcgcgagaaaatgaagatctccttcaacgacaaaagcctgcagaccacatttgagtacc

SEQ ID NO: 696267 - DNA, 80 bp, Homo sapiens
gaaatttggagtgtgcgtgcgcgccgagcggagtgcgccggtctcggggaaatgcccggttccttcgtgcccacggtcac

SEQ ID NO: 696268 - DNA, 100 bp, Homo sapiens
gtgtgtggattcagaaagtcaagcggggagacaaccccttccccaagaatgctgatgggactatatgctacgactccacccactacaaggagacttggaa

SEQ ID NO: 696269 - DNA, 82 bp, Homo sapiens
agggcgctgttttcgacaggtgtgcaggtttcggcacatggagattgatgaagcgttgttgacgaccatggacatcatccac

SEQ ID NO: 696270 - DNA, 84 bp, Homo sapiens
cggtggctgagcagaggacccggcgggcggcctcgcgggtcaggttctcctgaaaagaaagctgaacattcatctataaatcaa

SEQ ID NO: 696271 - DNA, 74 bp, Homo sapiens
agaatgtaagacaggaaaataattaaatattcttaccgaggtggaagatgcaatgctgatgtttgataaaacta

SEQ ID NO: 696272 - DNA, 100 bp, Homo sapiens
actggttctccaggaaccgaaaaggcgaggagtatagtacggcaaaaaactgtcgatactgtggatggtagggaagaaaagtctgcttctgattcttctg

SEQ ID NO: 696273 - DNA, 100 bp, Homo sapiens
ttccccggcccacagtgggggtgtgcaaacccgagagaactggaatgaattttctatctgtgaaattgtgaagacgaaaaaagaaaattgtgctagtttt

SEQ ID NO: 696274 - DNA, 82 bp, Homo sapiens
gggcgggaaggaagatccggcgcggggcacaggatccggagctggagcccccagccatccagtccaatggatcagatgggca

SEQ ID NO: 696275 - DNA, 100 bp, Homo sapiens
aagaccgattttctgcagaagatgaagctttgagtaacattgccagagagacattgctacaagtggttggtgtggtctctgtggctgtggccgtgattcc

SEQ ID NO: 696276 - DNA, 100 bp, Homo sapiens
tgaggtgcagcagatgaaggcacaggcccgggaggagaagcaccagaagcagatggagcgagtccatgttgtacttagatgggcagcggcatttcaactc

SEQ ID NO: 696277 - DNA, 101 bp, Homo sapiens
ggatttgaagtccttgtggagaaagaatggctaagttttggacatcgatttcaactaggggaacacacctgaaactagaggaacagcttatgtggtctatg

SEQ ID NO: 696278 - DNA, 80 bp, Homo sapiens
ccgcggacgacgtgaccagaagtcccgccgcttaaaggacaatgcagatcttcgtgaagactctgactggtaagaccatc

SEQ ID NO: 696279 - DNA, 73 bp, Homo sapiens
agaagcccaccgccgtgaacggctgcgtgaccggcatccgtgtcattctggaccttactcccaactaccgggg

SEQ ID NO: 696280 - DNA, 75 bp, Homo sapiens
tcctcgaagacagtggcagaggcgtgcagaatcaactgatgagtctgaagttgacaaaactcactgtctgaataa

SEQ ID NO: 696281 - DNA, 74 bp, Homo sapiens
aaaaagctgtgaaataccagagtcaggcccggaagttgtaaagatggtgaatttaggcgctatcagggtccaag

SEQ ID NO: 696282 - DNA, 75 bp, Homo sapiens
tcaagagctttctctccaaaatccccagtgtcgtcacaggtacctactgtcaacaacgggaagtggaggccatta

SEQ ID NO: 696283 - DNA, 75 bp, Homo sapiens
cgcagcccgggcccaggccccggcagcgcctgggacaaggaaagaaaccttgactggttccccaggatgagagcc

SEQ ID NO: 696284 - DNA, 75 bp, Homo sapiens
cagaccagcagttatttgcagctatcatgtgagtcacagtcctagtgagtgtcaggagccttcctcgtccaggcc

SEQ ID NO: 696285 - DNA, 87 bp, Homo sapiens
caggcacacaagtgtgaggagttgctaaatgctcaggtgaccaagaatatggcccaggtgaccaaagccctggacaaggccctgagc

SEQ ID NO: 696286 - DNA, 90 bp, Homo sapiens
gcgataatattattgacctcttcctttatcagccacaatgcgtctgaagaaacatcgctggtataagaaaatcctcaagtcccgagatcc

SEQ ID NO: 696287 - DNA, 86 bp, Homo sapiens
tactggggccagggaaccctggtcaccgtctcctcaggtaactaggatttctacctcaaccgcgagacctatgcaaggacggtgtg

SEQ ID NO: 696288 - DNA, 118 bp, Homo sapiens
caggcagaaggcctctctcctgatacagcaggcgctcaccatgttccctggaggttggatggcaagcatgtggtgtttggcaaagtgaaagaaggcatgaatattgtggaggccatgg

SEQ ID NO: 696289 - DNA, 100 bp, Homo sapiens
cttccagccctcgcccccaaccccccacctccctgaatttatgtgatcagtttggctgaaccccgtctgcccctgcagctggatgatgctgttcggcctg

SEQ ID NO: 696290 - DNA, 96 bp, Homo sapiens
tacaacccacctgagccctgagcactggcttactcgggtgctcttaccttctagtcacttgccccatgggaatggaatgagctgggagccccctcc

SEQ ID NO: 696291 - DNA, 101 bp, Homo sapiens
gtttgaagaactttcagatatcttctcagaccataataaccatttgaccagccgagaactactgatgaaggtggcccacaaactctttaacaacttgaaat

SEQ ID NO: 696292 - DNA, 96 bp, Homo sapiens
tcgagaagattagcaaaggtgctaatccagtggaaatcaggagaggagtggctgagcagtttgccatcgcggaagccaagctccgagcatggtctt

SEQ ID NO: 696293 - DNA, 90 bp, Homo sapiens
cgaggacacgaccttcctgcccttcacgctccaggagctagactgcctcttcaaggtgtgccccatgaaccgctactcggcccagaagca

SEQ ID NO: 696294 - DNA, 98 bp, Homo sapiens
caaggaggcctccattactgtgtctgtgctccacggcacccattctggccccagctacaccccaggggcgtggagaactctgatcgagaaagtgcaag

SEQ ID NO: 696295 - DNA, 75 bp, Homo sapiens
gcgctcaggaggccttcaccctctgctctgggtaaagatgctgagatgaatcgtcacctgtgtgtttggcttttt

SEQ ID NO: 696296 - DNA, 100 bp, Homo sapiens
ttcaacagaagagtgagagatggaacccgaagaagaaaggattcgttacagccagagattgattgtccgtgtggagcccttggtgaccatgggccaggtg

SEQ ID NO: 696297 - DNA, 98 bp, Homo sapiens
agatggtgcagcttcgcaaaagatacgaaaaagctgttcagcatcgaaatgaaagtacagaacctgctaaggccatcaaacctattgatcggaagtca

SEQ ID NO: 696298 - DNA, 80 bp, Homo sapiens
cgcgaggccgacaagagccacccggagcagacaatgcagatcttcgtgaagactctgactggtaagaccatcaccctcga

SEQ ID NO: 696299 - DNA, 60 bp, Homo sapiens
ctgcccggctgccttccacctccagtgctgctgaagaagcatctgtagggaatccagaag

SEQ ID NO: 696300 - DNA, 75 bp, Homo sapiens
gcaggaaggacaaaactattcaacatgtggaagtattttgttatgccaggtatgcaggtgccttgagagcttcag

SEQ ID NO: 696301 - DNA, 88 bp, Homo sapiens
ttggagaagtccagggcgacaacaaggacatgatcatttctgggctccagcctgaaacttcctactccctcaccgtcacagcctacac

SEQ ID NO: 696302 - DNA, 74 bp, Homo sapiens
ctcagttggaagcagccgatccagcctgcggagcctgtggggcagttgtcgccgtgatcctgaaggcgctgacc

SEQ ID NO: 696303 - DNA, 50 bp, Homo sapiens
tgattcacaattatggagactgtgatgcagaaggctatcaacaggctgag

SEQ ID NO: 696304 - DNA, 101 bp, Homo sapiens
gaagacttgaattagattacagcgatggggacacagaagatacaacacggccgccaaggaagagtgaggaagatgggaaggagtaccactttatctcaacg

SEQ ID NO: 696305 - DNA, 100 bp, Homo sapiens
tgggcgttgctggaccctgcccaaaggacactgtacagggatgtgatgctggagaactgcaggaacctggcctcactagacggagtctcgctctgtcacc

SEQ ID NO: 696306 - DNA, 90 bp, Homo sapiens
acagctcggatccatgtcacttgacgagcaacagggctggatctccagaactgttctctggaggaccctggtccaaactttcatcaggca

SEQ ID NO: 696307 - DNA, 83 bp, Homo sapiens
ctgacacggccaccctactgcctggaggccggggagccgacgcctgaaatacactttcgggaaatggcctctaaatcctggct

SEQ ID NO: 696308 - DNA, 75 bp, Homo sapiens
ctgctgccgccccttgggctaaaaggtcctacaacgtgactttaaaaagacagcagaaagcaaaaatgtcccatt

SEQ ID NO: 696309 - DNA, 100 bp, Homo sapiens
ctgccatgccccagccagtccccacagcataacagatgtcatcaatgcttcttggtgggtcatgagcaacaagactcgggatgaactggaaagaagtttt

SEQ ID NO: 696310 - DNA, 100 bp, Homo sapiens
cccgctgtgtaagaaaaagccaagagactgcttttgagtgacatttatttagcagctagtaacttcacttatttcaggggtcttgctacgtacgttgccc

SEQ ID NO: 696311 - DNA, 100 bp, Homo sapiens
cgagtttttcagcgaagagaacgcgcccaagtggcggggactactggtgcctgcgctgaaaaagcctccacatgctgggaagttgctgtctgtgttaaag

SEQ ID NO: 696312 - DNA, 100 bp, Homo sapiens
aacaggcatctaatgttcttagtgacattagtagttgctgtacctcaaccaggagcttctgtacaaacaaagggaattaaaccgggcatgccaagcatct

SEQ ID NO: 696313 - DNA, 75 bp, Homo sapiens
acccgagtcagcaccctcccagcaaccagatgagattgtggggaacctgggtgaaggcacctttggcaaggtggt

SEQ ID NO: 696314 - DNA, 75 bp, Homo sapiens
cctgcccttacacctgtgctcctatacaagattaacattcaatcaccggcgtaatcaacccagcgttggacaaat

SEQ ID NO: 696315 - DNA, 88 bp, Homo sapiens
acacagtttctgcaggaaaagatctctctacttctcctaaggaagtcctggctgagcaaggttggaagccctagttctcgcattgacc

SEQ ID NO: 696316 - DNA, 74 bp, Homo sapiens
gcaagcccatgtgtgttgagagcttctcagactatccacctttggttcgtgtctgggatgtccggccatttgcc

SEQ ID NO: 696317 - DNA, 100 bp, Homo sapiens
taaaaacccatttctacaatatcgccccagaagctccaacattgtctcactttcagcaaacattctcttgactgtagtagactctgatggagctaccaac

SEQ ID NO: 696318 - DNA, 100 bp, Homo sapiens
accgggtgagctcaccgcccagcccaaaccaggagattgcgagggagcgatgcggtgcagcgcggtttacccaaggtccagcctagcccctaggcaccat

SEQ ID NO: 696319 - DNA, 100 bp, Homo sapiens
ttcaggagcgggctgtcctgcacacagactcctctctccctttcagcttcccggatgagctccctaacagttgtctctcttccgccctctctggatgagg

SEQ ID NO: 696320 - DNA, 51 bp, Homo sapiens
cctcctggtctcctttaaatgccaacctaccattacagcagcagatcatca

SEQ ID NO: 696321 - DNA, 88 bp, Homo sapiens
ttcgcagtggtcgcttcttctccttggcaaattggcccaagaactttggtgtggtctgagaaagagcaggtggaaaagtctgcttatg

SEQ ID NO: 696322 - DNA, 82 bp, Homo sapiens
gaaccgcgggctctgccaggagagaagactgacctgcctagagctggaacgttacctccagagcgagccctgctatgtttca

SEQ ID NO: 696323 - DNA, 75 bp, Homo sapiens
cctcatcccctggatgggggaccacaagatcctcatcgacagaccatggtgaatccgggcagcagctcgcagccg

SEQ ID NO: 696324 - DNA, 75 bp, Homo sapiens
gttaacttctgtttacatggaactcagacatctgcaaatcatggtttgacaactattcagccaatgtgatggtgg

SEQ ID NO: 696325 - DNA, 82 bp, Homo sapiens
ccgctgccctcagctccgagtccagggcgagaagtcccgggcccagagcccggccagcaggagcagttggtcttcggcagcg

SEQ ID NO: 696326 - DNA, 100 bp, Homo sapiens
agttactccacggaaagcagcttcagcagcactccaggtcaaactgtgctgaaaatatccgcaaacacattctgcatactggcaaacatgaaggagtcaa

SEQ ID NO: 696327 - DNA, 83 bp, Homo sapiens
cgaagagctgccgtcgctgcagagaccccgctatggctccttatgccagcctggaccatcttggaggcagtgtaggatcatgg

SEQ ID NO: 696328 - DNA, 75 bp, Homo sapiens
cgggcctgtgctgcaggagggcacaggcgaggacatggatttgattgacatactttggaggcaagatatagatct

SEQ ID NO: 696329 - DNA, 83 bp, Homo sapiens
gctgcagctccgcctcctccgccgcgcagtgtgctggagaagagaaacgagttggcacacgcacagtgtttgttggcaatcat

SEQ ID NO: 696330 - DNA, 100 bp, Homo sapiens
gacaagaccaagtactaccttcaagacatccgggaactgatcgaggtggatgatgtaatggaggatgattctctgcgattcggtcccaacggaggattgg

SEQ ID NO: 696331 - DNA, 100 bp, Homo sapiens
cagagatggaacccacctttccccagggttgctgaccagcaatcagccatgtttggagagtgctgcttccagacaggtgatgtgaaattaaccatgggaa

SEQ ID NO: 696332 - DNA, 51 bp, Homo sapiens
attcattgtttgaccgacaggcaatggtgattgttcccactagagaacttg

SEQ ID NO: 696333 - DNA, 82 bp, Homo sapiens
caagagggtgttcgactgctagagccgagcgaagcctgcctgtggaggaaccgattgtgtccacagatgaggtcatcttccc

SEQ ID NO: 696334 - DNA, 115 bp, Homo sapiens
cggggacagcagccggccagccggggggcactgcccgcccgggctctggactcgctcagcagcagcctgaaaacttgctacaagtatctcaatcagaccagtcgcagtttcgcag

SEQ ID NO: 696335 - DNA, 75 bp, Homo sapiens
gtttactgcattgtgagccgcctgggatgcttcagcctcttttcaaggatggaatttcactcttgttgcccaggc

SEQ ID NO: 696336 - DNA, 94 bp, Homo sapiens
gcgagaggtgcggcgaaggaggcagaggcacttatgcttgtcaggagttgatccctgaattttattatctccctgagatgtttgtcaacttcaa

SEQ ID NO: 696337 - DNA, 82 bp, Homo sapiens
ccaacttttcttagcctcagtcctggaatgccctttctataagtgctgggattacaagcgtgagctaccacacccagcgagg

SEQ ID NO: 696338 - DNA, 100 bp, Homo sapiens
gaaaacaaggcgattccgcagtccccccgttccctggaggtcctgtggaatgggtcatcacactgaaacggtgttcaaccgggttttgccagggcctatt

SEQ ID NO: 696339 - DNA, 121 bp, Homo sapiens
ccgacatgttcacgcacgggatccagagcgccgcgcacttcgtcatgttcttcgcgccctgcaattctgtggtgttcttggtcacacatttatggagtttctgaagggcagtggagattac

SEQ ID NO: 696340 - DNA, 101 bp, Homo sapiens
tcccgtcccagcccccaacgccagcttcctgcaggcccagagccggcatgaactctcccaacgagtcggtatctgctgaaggtcaacgaaatcaagattaa

SEQ ID NO: 696341 - DNA, 75 bp, Homo sapiens
tcctggctgtgctcatatacacctgatccagggcagcgacgccggctggactttgggctacatgctgaacctgac

SEQ ID NO: 696342 - DNA, 83 bp, Homo sapiens
cttaaacccagagacaataacaattctctttgtgaaaaccagagcacttgtggacgaaaaggggaagatagtgatgtactcag

SEQ ID NO: 696343 - DNA, 97 bp, Homo sapiens
ggcaaagttttgcagatcttcaacaagaggacccaggagaaattcgccctcaaataatagctcttcaagtctgcaataaaaaatggcctccaacaaa

SEQ ID NO: 696344 - DNA, 98 bp, Homo sapiens
gggacgtgcggcccagcgagttggtcggtcccggggtcacccgctacgggaagcaggcctcgccacaggaaacgggattatgaaggttatttatgctc

SEQ ID NO: 696345 - DNA, 98 bp, Homo sapiens
tcacggccatcattttctgtgtcgcgctcagcggctatgaccaggtgctccacgaagacgaaaccacggacgtggcccagtggaacatcgggagcctc

SEQ ID NO: 696346 - DNA, 99 bp, Homo sapiens
gaccatcatggaagattactttgcgtatcgcggctttaaatacctcaggcttgatgtttgccccaatgtcagatgacgagagccctacatcatcctcgg

SEQ ID NO: 696347 - DNA, 100 bp, Homo sapiens
agagcaaccctgaaaaattactgaatgtgaagaaatgggaagtcaagcctctctactgcttctttttataacctttaagttaattcagaacccagataag

SEQ ID NO: 696348 - DNA, 90 bp, Homo sapiens
caagaattaggagcttatgttggactggagtccagagttgccaccagatgggatattcaaaaatacgccagagaggcctacaacctgggg

SEQ ID NO: 696349 - DNA, 51 bp, Homo sapiens
cagaggatggaacacttcagtgcattcaagttggtaatcagtggataaatt

SEQ ID NO: 696350 - DNA, 75 bp, Homo sapiens
cggagacctcgctgcgctcatggcgtcgcccgggtctaccccacggcaacgcgggccctcggcctgggcacctgc

SEQ ID NO: 696351 - DNA, 100 bp, Homo sapiens
tgacaaagggtatcatactttttgtcttcaaccagttatgaaatcagtaccaaccaatggctggaaatgcaaagaacccgtggcattggaagatgtcaga

SEQ ID NO: 696352 - DNA, 75 bp, Homo sapiens
caccgcactgagatcaacaagaagtgcctccggagccagcgtggtggccatagacaacaagatcgaacaggccat

SEQ ID NO: 696353 - DNA, 83 bp, Homo sapiens
cggaaggacaccaagatgcggatccgggcctttccgacatgggaaagcggaaccaccaaaaggagtgatgatcaacgatctca

SEQ ID NO: 696354 - DNA, 78 bp, Homo sapiens
agagttagcctggcctggcataatggtttgtcccgctggctggaagcctggcagtgacacgattaagcccaacgtgga

SEQ ID NO: 696355 - DNA, 100 bp, Homo sapiens
tgcagagagagagcgcgagagatggagatgggcagacggattcatttagagctgcggaacaggacgccctctgattgaactttgaggcgctgatcatcac

SEQ ID NO: 696356 - DNA, 76 bp, Homo sapiens
tgaaggctgaagattttatagtggatcaattttccagattattcaaagtatcaggatgggcatgtgaagtgactga

SEQ ID NO: 696357 - DNA, 98 bp, Homo sapiens
gggactacagcctggcgcacgtccgcgagatggcttgctccattgtcgaccagaaggttactactttgggattgtgatgatcgaagctatagctacta

SEQ ID NO: 696358 - DNA, 97 bp, Homo sapiens
cggagcggcgccgcgtagcttccatccgccagctgccatgagcgagcgcctccgtcccagctctgctctacaagcccattgaccgggtcactcggag

SEQ ID NO: 696359 - DNA, 100 bp, Homo sapiens
gttgcaccctgttttgcaaaaaccatcagtgtttgggaatgattctgatgatgatgatgagtgccaaacccaagtctgaaatccacgtgtctatggccac

SEQ ID NO: 696360 - DNA, 74 bp, Homo sapiens
aaagatgcacatgtagatttcctgaaaagtgcttaatcctgattatcgagatgcccaaaatgaaggaaaaaatg

SEQ ID NO: 696361 - DNA, 100 bp, Homo sapiens
gagaaaatggcagacgatattgatattgaagcaatgcttgaggctccttacaagaaggattgacttggcctctacttcttgttaaggaaattcatctctt

SEQ ID NO: 696362 - DNA, 75 bp, Homo sapiens
gtgatcttctcgcctcagcctcctgagtagctggagctacaggatatgggccctcacattttccaaacctgtcca

SEQ ID NO: 696363 - DNA, 50 bp, Homo sapiens
acgacatccacttctaccccaccttccggctacctgaacgacctggagcg

SEQ ID NO: 696364 - DNA, 100 bp, Homo sapiens
ccgagccaacactgtgcgcagcttccaccatgaaggttcttcctcaagttcttcctcaaatgcaaccagaactgcctgaagaatgcggggaatcccagag

SEQ ID NO: 696365 - DNA, 82 bp, Homo sapiens
tgtgtctagatgtaattaatcaaacttggacagctctctatgtgcacagccagagaacaacacatcacacacaggaaacagt

SEQ ID NO: 696366 - DNA, 100 bp, Homo sapiens
ttgtagatctagaagtcactttggaagaagtatatgcaggaaattttgtggaaatcctgataacttaagtgactctctcttttccggtgatgaagaaaat

SEQ ID NO: 696367 - DNA, 82 bp, Homo sapiens
cgctgggagagaggtacctctccttttccctctccctttccctaagaagaggactgtcagaaggacgtagaaggcacggttt

SEQ ID NO: 696368 - DNA, 82 bp, Homo sapiens
ccagacgcggcacagagagggcctgggagcttgctgcagcttcagatcatgatgctgccgccaccgccgccaccacggagcg

SEQ ID NO: 696369 - DNA, 73 bp, Homo sapiens
tcatagtcaactgcgtggaagagaaggtaagtcaaatctcatggatgccatcagctttgtgctaggtgaaaaa

SEQ ID NO: 696370 - DNA, 75 bp, Homo sapiens
tatggataaagctctgaaagaagtgaaatcaaatacattgcccatctcgctgcagtctataagaagtagcctact

SEQ ID NO: 696371 - DNA, 100 bp, Homo sapiens
aaacatggcggtggactcggcgatggagctgttatttttagatacttttaaacacccgagcgctgaggcctgtctcctccctcctacacatttccagctc

SEQ ID NO: 696372 - DNA, 101 bp, Homo sapiens
aaccgcaaccattgacgccatgtcgggttattcgagtgaccgagaccgcggccgggaccgagggatatgtgatggcgtccagtttggagctgggataaggt

SEQ ID NO: 696373 - DNA, 75 bp, Homo sapiens
gcggcggcagcgggtcttgggtcctccgagagcagcagcgagcctagaacagaattccagccaagttttccccac

SEQ ID NO: 696374 - DNA, 98 bp, Homo sapiens
cccgcctcgccgggagctgggagcgacgctcagggcccgcaggtcaaaatgcagatcttcgtgaaaacccttaccggcaagaccatcacccttgaggt

SEQ ID NO: 696375 - DNA, 73 bp, Homo sapiens
cggagtggacgaggaggagcgggtccgggtgctgcagggtgtccggcatttggaaacagagccctgggctcca

SEQ ID NO: 696376 - DNA, 75 bp, Homo sapiens
cggcgctggaacagttgcagggtcacagaaacatcgattcgggaactggagcctctcctctgtcacagtgacaat

SEQ ID NO: 696377 - DNA, 100 bp, Homo sapiens
gaggccaccgaggacacctcggtggagaagctcaaggagcgctgcctcaagcacatggagttttaacattgaatgcggagaacactaattatgcctatca

SEQ ID NO: 696378 - DNA, 51 bp, Homo sapiens
agcgacatggacaaagccatcaaggtggattctgaagagccagtctttgag

SEQ ID NO: 696379 - DNA, 96 bp, Homo sapiens
cgcctgagcgcaactagcggcgggtcgtgggcacctccagataacatccctgaggacctcagagaccctttctacgttgaccagtatgagcaggag

SEQ ID NO: 696380 - DNA, 100 bp, Homo sapiens
gatttagctaaacaaaccaagatagaatatggagcagtagaggatggtgcaaccatgacttttttcaagatcatatactcctatgaaaggaggaatctcc

SEQ ID NO: 696381 - DNA, 75 bp, Homo sapiens
ggcaaacctctgacttccggcggcattttgaggcggtcctcctagcggcctggagtttcataatagaagagcaga

SEQ ID NO: 696382 - DNA, 100 bp, Homo sapiens
aaacaggcggatctctacatttctgaatgtgtaatgctgtgtcatggagctaaaatcggatttttccaaggagatatcaggctgctcatggatgacctca

SEQ ID NO: 696383 - DNA, 90 bp, Homo sapiens
gccgccgcttgtgctgcagccatgatggcagaaacggtggacacaagcgaaatggtcaacggcgctacagaacaaaggacgagctctaaa

SEQ ID NO: 696384 - DNA, 100 bp, Homo sapiens
gggggcgggaggcttgccaccttcagcccccccgcgaacgcccaaggggccacctacagatgctcctgcagtggacacagcagaacaagtctatatctct

SEQ ID NO: 696385 - DNA, 83 bp, Homo sapiens
cagctgatgagggacacagagagtctggcaaagagaatctgcaaagacctcggaggttcagcaacatcagatgaccatgaatt

SEQ ID NO: 696386 - DNA, 100 bp, Homo sapiens
gaccatgtgagtgggctccggagcctcagcgccgcgcagtaccaaatatgccccaacagcggcaagaccagcatcatcagagtgccatgatgcacccagc

SEQ ID NO: 696387 - DNA, 100 bp, Homo sapiens
cgcgatgcgtcaagtacactgaaattcatcctgagatgaggggcgacagccagttttgtagtcaaaaagcagtcatctattcattgaattttacagcaaa

SEQ ID NO: 696388 - DNA, 75 bp, Homo sapiens
gtcagagtggaggctgcagactgtggagccgggagccggcaggaagctcttcgtgggcggtcttgactggagcac

SEQ ID NO: 696389 - DNA, 130 bp, Homo sapiens
gggatttaatggtgaagattttgaacggcttacgaaaatttgtgcaacacatcaagagatctagtgaaaagccatttgatgtatgcggtcagagaagaagtggaggtcctcaaagagcaaatcaaagaac

SEQ ID NO: 696390 - DNA, 100 bp, Homo sapiens
cccgggtgctgctggttagtgtgctctgagggagggtccgagccagccgctgttttgccggaggagcccctcaggccactaatagggatgccaaaggaaa

SEQ ID NO: 696391 - DNA, 100 bp, Homo sapiens
ctgtcctccgtttagtctcctcctcggcgggagccctcgcgacgcgcccggcccggagcccccagcgcagcggccgcggatgccctggcccagccccagc

SEQ ID NO: 696392 - DNA, 75 bp, Homo sapiens
tctttctggagtcacctcccatggcctgtcctgcgaaggtcaaagattctaaactgcctgcatataaggatctcg

SEQ ID NO: 696393 - DNA, 96 bp, Homo sapiens
ggaacccctgctctggcctacctggcgggtgtgggccgaagatatgctcatgtggtgttgaggaaagcagacattgacctcaccaagagggcggga

SEQ ID NO: 696394 - DNA, 100 bp, Homo sapiens
aaagaagatacacagcagttgtcttaaacaggtccagcccagaatcaaatgcaggttccatctggatatggattgcatcatcaaaactatattgctccct

SEQ ID NO: 696395 - DNA, 75 bp, Homo sapiens
gatgtcttgggatcaattgcatatggaagaggaatcttcgagtatgcggacggccccaacgcccaggtcatgaat

SEQ ID NO: 696396 - DNA, 82 bp, Homo sapiens
ccgtccttctccactttcgccagcccgtgccgcgagcgcggcctgcaggagaacctaaaggcagacccagaagagcttttta

SEQ ID NO: 696397 - DNA, 128 bp, Homo sapiens
cgcgcacggcttggcagcccagcgggacccagggagaaacaggggggcgagaagagaaacaggtactccaaagattcaggtttactcacgtcatccagcagagaatggaaagtcaaatttcctgaatt

SEQ ID NO: 696398 - DNA, 100 bp, Homo sapiens
gctgagacatgagatcttcagcctccaggctctccagtttttcgtcgagagattcactatggaatcggcaacatttcatttgttgcatttccagtttcca

SEQ ID NO: 696399 - DNA, 75 bp, Homo sapiens
gccattcccaaattatagagctaattacaactttcggggcatgtacaatcagagttgcaggaagaggcagaggaa

SEQ ID NO: 696400 - DNA, 75 bp, Homo sapiens
gataaaagccatgttgagtggcccaggcagtataactccaactgtggaactgaatgggcttgctatgaaaagggg

SEQ ID NO: 696401 - DNA, 100 bp, Homo sapiens
cttgtagaacagctatctcgggagaaacaacaactgctacatctgttggaggagccaactagcatggaagtgcagtagtcgtgaaaggtgccaaattggc

SEQ ID NO: 696402 - DNA, 80 bp, Homo sapiens
ccgctgccctcagctccgagtccagggcgagccgctgccatggcccagacactgcagatggagatcccgaacttcggcaa

SEQ ID NO: 696403 - DNA, 74 bp, Homo sapiens
acagaccgtttgtgtgcaatgccccgggctgtggacagcaattaccagctctggctgggtcgccacaacttgtt

SEQ ID NO: 696404 - DNA, 75 bp, Homo sapiens
acgttcctccgaaaccggtttgcaagtccttgtagagagtgatcagcagctggactgtgccttggacctaatgag

SEQ ID NO: 696405 - DNA, 100 bp, Homo sapiens
tgcagcagacagctccctgggcaccaggcagctaacagatcttagcaaagcaatgtctcaagatggtgcttctcagttccaagaagtcattcggcaagag

SEQ ID NO: 696406 - DNA, 100 bp, Homo sapiens
aggcttatgaggatggctgcaagactgtcgacctaaagcctgactggggcaagaaaacagccttccacagaagtcagacgctgagctacaggaacggcta

SEQ ID NO: 696407 - DNA, 75 bp, Homo sapiens
cgggacacccgcgaggccggaaaatggacagaatgctttgacctccaagctgttttaaatctagtagataagcca

SEQ ID NO: 696408 - DNA, 88 bp, Homo sapiens
cctctgacctgcaggtattggcgatccatagctaagacgccaggtcccccggaaacctagaaatgatcctctggaccttctccatcta

SEQ ID NO: 696409 - DNA, 100 bp, Homo sapiens
cagaagaataaggagaaggataagtcgaaggggaaggcgcctgaagaggacgaaggtgctgtgaggagcaaaggccctgttgtccagtacacacaggatc

SEQ ID NO: 696410 - DNA, 83 bp, Homo sapiens
cccgtggaccgctacttccttatggctaaaagacaatgcagatcttcgtgaagactctgactggtaagaccatcaccctcgag

SEQ ID NO: 696411 - DNA, 76 bp, Homo sapiens
cttttggaattggaagcaccgctgaaaatttgtggagcttctggaagaggtgaagaaggaattgcagaaagtgaaa

SEQ ID NO: 696412 - DNA, 96 bp, Homo sapiens
gccagtccggccccgggcagcggacaccctgaaggtcccggtgctcacttggacatggaaaaagaagatgtccctgtggaaatgtccaatggtgaa

SEQ ID NO: 696413 - DNA, 82 bp, Homo sapiens
ctgccatgagcgagcgcctccgtcccagggagtgcatccgccccaacccttttccccctcgtctcctgtgagaattccccgt

SEQ ID NO: 696414 - DNA, 96 bp, Homo sapiens
ttccctagcgaggacttctaccgctgcggctactgcaagaacgagtcgggcagccgctccaatgaaactgttcatacttggtgcgctgtggactct

SEQ ID NO: 696415 - DNA, 101 bp, Homo sapiens
gcacagtagatccctcccggcttcccggcttcccgtctcgtcaccctctggacccccgcagcaaacacaagtttaagatccacacgtactccagccccacg

SEQ ID NO: 696416 - DNA, 90 bp, Homo sapiens
cgccgaagaagcatcgttaaagtctctcttcaccctgccgtcatgtctaagtcagagatgtggacgagtgctcactagcagaaaaaacct

SEQ ID NO: 696417 - DNA, 100 bp, Homo sapiens
ggagcggatcccacacctccggaccgagggacgcggctagagaccgttggatggcagcttaaccttcagatggctcactctgctcaagcaaaactaaaat

SEQ ID NO: 696418 - DNA, 75 bp, Homo sapiens
cgactatttggcaagaagcagatgcgcattttgatggttgatttggagcatatgcgaacaataaaacctgaaaaa

SEQ ID NO: 696419 - DNA, 101 bp, Homo sapiens
gttaagcgcctccttgatcaccaggataatattctctcattgattaatgtcaatgattcatactttagtggaaagtttgaaactttctatcacagatcaac

SEQ ID NO: 696420 - DNA, 80 bp, Homo sapiens
acgtgtagccgcgtcccctccagtccgctccgggcaggaagttctactacatcaccctgctacgagaccccgtgtcccgc

SEQ ID NO: 696421 - DNA, 90 bp, Homo sapiens
cggcctccccttggattcagacgccgattcgcccagctccaacagaggaagagagggagagcttcctgcgcagaggagacggacggcggc

SEQ ID NO: 696422 - DNA, 100 bp, Homo sapiens
gagaggaaaggctgcggcgcgcagagcgaggctgcgggaccccaggatgggggacaggaggctgcggggcctcaggccgggtgagagcaaaactttcagc

SEQ ID NO: 696423 - DNA, 82 bp, Homo sapiens
gcagaaagcaggcgaacccgcggcgcaataacgaccatggtgaatccgggcagcagctcgcagccgcccccggtgacggccg

SEQ ID NO: 696424 - DNA, 75 bp, Homo sapiens
cttttctggaaaagactcgtgagaaggtgacaatctccaatagacttgtgtcttcaccttgctgcattgtgacca

SEQ ID NO: 696425 - DNA, 90 bp, Homo sapiens
gcggaaggtgatgcccaagatggaccagatggtggagccagggcaagatttactgcttgctgctttgagtgagagtggaattagtccgaa

SEQ ID NO: 696426 - DNA, 90 bp, Homo sapiens
tggcctgacaaattatgctgcagcatattgtactggcctgctgctggcccgcaggaggttacgcacagaaaatagacttttaaaacagcg

SEQ ID NO: 696427 - DNA, 83 bp, Homo sapiens
ctacaggcagctctgaagaacccccctatcaacaccaagagtcaggcagtgaaggcaaaagcaaaagctcgaccagaattggc

SEQ ID NO: 696428 - DNA, 50 bp, Homo sapiens
cggcaaccagatcggggccaagatggagggagcgaggaaccaccggatcg

SEQ ID NO: 696429 - DNA, 74 bp, Homo sapiens
tttgaacagcatagagccaatcacattttgcacaagggcagtcaccatgaaagatctgagtgggacatactttt

SEQ ID NO: 696430 - DNA, 100 bp, Homo sapiens
ctgctccgtcatagaagatgatggtttacaagctgccttcaccacagcccatgaattagaaagatgtgtcatggcaatgctgagaaggaggatcagggat

SEQ ID NO: 696431 - DNA, 100 bp, Homo sapiens
gtcaccataggagacatggacgaagccttcaaatccatcaagctcatcaaaagtctcctgaatatttacgcgttgctgaatctcctgtggacaaaccacc

SEQ ID NO: 696432 - DNA, 75 bp, Homo sapiens
tcctcctttgacagggacatcagtggagccttctcagacccacagattgtaaaccatggctgtgtggatacaagc

SEQ ID NO: 696433 - DNA, 75 bp, Homo sapiens
tttcaacctccggggccacaatagcgagattgagaggatccagaatccagatctctggaatagctaccaggcaaa

SEQ ID NO: 696434 - DNA, 83 bp, Homo sapiens
cacttacggatttactggaccccagtgtgaaagaggttcaaaccttgtactactcagctgatcacaagctgcttgatgggaac

SEQ ID NO: 696435 - DNA, 96 bp, Homo sapiens
cagctaactgtaagctacggaagatcttcaccttaaaatcaaagccacaagacactgctgataaggatggtctcggacagcccgggagacgagccc

SEQ ID NO: 696436 - DNA, 90 bp, Homo sapiens
aaaatacgtggttggagagctcatctggaattttgccgatttcatgactaaccagtctatgatacttgggtccatagtaatgatgttgat

SEQ ID NO: 696437 - DNA, 100 bp, Homo sapiens
gttcttgatcccaaaccgccgccgttgactttggggaaatcctcattgacgattcaatttgttgaaggccaatttgtggactcctacgatccaaccatag

SEQ ID NO: 696438 - DNA, 97 bp, Homo sapiens
gcgaatatcgtcatcgttagaaggtgtttgatttcaccaccatagacttgacatctgagactgatgaaattccagatattatagctttggaagagga

SEQ ID NO: 696439 - DNA, 83 bp, Homo sapiens
ccgcagcctgcctttccttccccctcggaaaatggttcccactgccgggcgaggagccttcacgtaaatgggtccagtcatgc

SEQ ID NO: 696440 - DNA, 75 bp, Homo sapiens
gggaggccagttctacccagcaggagacgggcatcgcctgattatgcgcggcgctcatctcaccgctctggaaat

SEQ ID NO: 696441 - DNA, 98 bp, Homo sapiens
gaaatcaatattgcatttctcccgtatgaatcccaggtgtggtacatggacggctatcacaacaaccgcttcgtacgtgagtacaagtccatggttga

SEQ ID NO: 696442 - DNA, 100 bp, Homo sapiens
tcgaattcatccctgtataatcctgcccttacacctgtgctcctatacaagattaacattcagtccagtccaggtgcagcagcaaggagaacattctcag

SEQ ID NO: 696443 - DNA, 100 bp, Homo sapiens
gcctcccgggaaggagcgccctggcggagaagactcgaacggctcccacagccgggcgttgggggaaagcttcacgcaggccatgctgagccagcccagg

SEQ ID NO: 696444 - DNA, 90 bp, Homo sapiens
aagctgtctaagtccaaagatttttacccagctcaaagcttggattctgccgtgccactcacgaatggcgacacagaagacgatgctgac

SEQ ID NO: 696445 - DNA, 82 bp, Homo sapiens
gagcccagaagatcaagactagtgtgagcaacaaatttggtgccctggttgtcagatgttggaaagcagtaggacggaacat

SEQ ID NO: 696446 - DNA, 100 bp, Homo sapiens
agctctggaacgaaagatgcccttgggaggtgatgacactcaggtacctcatggcagggccaggttccagcagtgaggaggatgaggcctctcacagcgg

SEQ ID NO: 696447 - DNA, 50 bp, Homo sapiens
cggcaccttcggcaaagtgaaggatgccttcaattaagttgcagagttct

SEQ ID NO: 696448 - DNA, 94 bp, Homo sapiens
gccaggaagtcggagtttgagccccggaggcagagcggctgccatggtttggtgcacctcgatttggaggaagtagggcagggcccttatctgg

SEQ ID NO: 696449 - DNA, 80 bp, Homo sapiens
ggcaaagcttctccctcagtatttagaccagattgcagagggaatggcatacatcgagcggaagaactacattcaccggg

SEQ ID NO: 696450 - DNA, 100 bp, Homo sapiens
ctgtgcatcccagcagcggattcaccatctcaaaacctgttactataacaacagtaccaaggtggctgtgaaaaccctgaagccaggaactatgtctgtg

SEQ ID NO: 696451 - DNA, 90 bp, Homo sapiens
gcagaaggtctctggagacatcttcagcagatgctgttccactgccagggactccctccccatatcttcctggaaaacacttgttcaccc

SEQ ID NO: 696452 - DNA, 96 bp, Homo sapiens
gatttacaaactggccaagaagggccttactccttcacagatcggttttttgcatgtctgacacccatgactccacctggaccttatggctccacc

SEQ ID NO: 696453 - DNA, 89 bp, Homo sapiens
taacgtgaatttgtccgtctccgacttctggagagctccaaacgagaatggaagccgctggaggaccgtagctgcacagacataccatg

SEQ ID NO: 696454 - DNA, 100 bp, Homo sapiens
aaacattaagcagtacagctgcctcaaacctttggggccctggccaacgtcaacattgggagcctcatctgcaatgtaggggccggtggacctgctccag

SEQ ID NO: 696455 - DNA, 98 bp, Homo sapiens
agagatgcccactcattcgtcatcttctgttctccaagaaaattgaataatccagaatggctactctgatctatgttgataaggaaaatggagaacca

SEQ ID NO: 696456 - DNA, 100 bp, Homo sapiens
ctggccctcttcaatttctgacaaaaggtccctcgtctgagctggctcactcgcccaccaacagcgggaagaagctctttgctcccgttccgtttccttc

SEQ ID NO: 696457 - DNA, 75 bp, Homo sapiens
gcattgaccccttgtccagttactctaacaagtctggagggtgcaacaccggaggatttcagcaacctcccacct

SEQ ID NO: 696458 - DNA, 83 bp, Homo sapiens
aaggaaattccagcttcacaactgtctccagaaatgctttgggttcatctttcattgctgcaaggaacttccatgcctctaac

SEQ ID NO: 696459 - DNA, 98 bp, Homo sapiens
gctgctagagatccggaagcacagccccgaggtgtgcgaagccaccaagtgaaaaattagacgatttcaagaattggagctgaatctgatgttaagta

SEQ ID NO: 696460 - DNA, 100 bp, Homo sapiens
ccaagtcctatcatctctccttcagccatgcttcctatctaccctgccattgatattgatgcacaggttgggggccgtcccgctcctaaggcaggaagat

SEQ ID NO: 696461 - DNA, 100 bp, Homo sapiens
tgtcgacgactgggacaatgagaacagctctgcgcggctttttgagcggtcccgcatcaaggctctggcagccccatctgctttgatatgattgaagaag

SEQ ID NO: 696462 - DNA, 83 bp, Homo sapiens
caaggcactgctttttcatgacgccctgggcgctgcctatggcacagccaagagcggtaccggcattgcggccatgtctgtca

SEQ ID NO: 696463 - DNA, 50 bp, Homo sapiens
ggagacctggacttttgggtcaaaagcacccagtttggccttctctgagg

SEQ ID NO: 696464 - DNA, 99 bp, Homo sapiens
ggggcctgggggaccgagcagcgggaggctgtctttcccttccagcctggaagtgttgcagaggagcgagctggacgccactgtggggctctgagagtc

SEQ ID NO: 696465 - DNA, 100 bp, Homo sapiens
ctggctgtgctttcatttgtaaaacaagaattgtcaggtgtcatggagaaactccagctgggcccagagattctgcagcgggaaaatccaaggcttattt

SEQ ID NO: 696466 - DNA, 75 bp, Homo sapiens
gacaaagctgttgtctcagggagcacagaagatcatgctcctctgtggagcaagtgcctccatgaaatgccatat

SEQ ID NO: 696467 - DNA, 75 bp, Homo sapiens
cacgcaaccccagatccatttacactttacagtgggtgtttctctatgagaagggctaccagacctcgagcggcc

SEQ ID NO: 696468 - DNA, 100 bp, Homo sapiens
tcctgctctgtggaagaaatgggcatgccagatgcctggaagatcagaggctcacattccaggtgtcatggagaaactccagctgggcccagagattctg

SEQ ID NO: 696469 - DNA, 82 bp, Homo sapiens
cgaggtgtgggagatcgtgggcgagctgggcgacggcgccttcggcaaggtttacaagaatgttggctcaattaagaaacat

SEQ ID NO: 696470 - DNA, 100 bp, Homo sapiens
ctttggaaacaggaagcagttggaagagatgtaccagaccggatcactaaaccttaataatcaatcacatagggtaacaagatgctcaactatagtgctc

SEQ ID NO: 696471 - DNA, 73 bp, Homo sapiens
caatacctctgtccataatagctgacatgtgtatgcaaaaggactaatggctgaaggataaatcaacatggca

SEQ ID NO: 696472 - DNA, 74 bp, Homo sapiens
cacaggtcctgaagctgctgctcaacaaatttaagatgagtgatgtagaagctggtggtgccaccgtcttccct

SEQ ID NO: 696473 - DNA, 82 bp, Homo sapiens
cgagtcgctatgcatgaactgttactgcaatgatgtcctggaacaggtggaggcctatcaagctgaggctcgtgaggctctg

SEQ ID NO: 696474 - DNA, 101 bp, Homo sapiens
gcgcctcctgcccgcggaccgcggcagcccagagcagtaccttctccaggcaaattccgttcccctgcagcaccatctcctttggctcttcggcaaccagt

SEQ ID NO: 696475 - DNA, 100 bp, Homo sapiens
gaccacaacctcttcagtagaagacccctttgctgatgcaagtaagggtgatgacctgcttcctgctggcactgaggattatatccatataagaattcaa

SEQ ID NO: 696476 - DNA, 74 bp, Homo sapiens
aattcacagggaagaaagtgactgaagagcttctgaccgataatagtctcaaaccatgaattatgtgggacagc

SEQ ID NO: 696477 - DNA, 90 bp, Homo sapiens
ccgcaccgcaccctccacctcagaaactgattattgatgagaagaagtattacttatttgggagaaaccctgatttgtgtgactttacca

SEQ ID NO: 696478 - DNA, 112 bp, Homo sapiens
agaagatggtgcagaagaaaccagccgaacttcagggtttccaccgttcgttcaagcacggggtcactctggtgcccattgaggagttcagcccggagttcgtggagccccg

SEQ ID NO: 696479 - DNA, 122 bp, Homo sapiens
atgccggcccggcggctgctgctgctgctgacgctgctgctgcccggcctcgggacaatgcagatcttcgtgaagactctgactggtaagaccatcaccctcgaggttgagcccagtgacac

SEQ ID NO: 696480 - DNA, 74 bp, Homo sapiens
accaaagagcagatgccaaatctgaaagtttcctacactactgaggtttaggggcactgtgaagcaaaagccac

SEQ ID NO: 696481 - DNA, 100 bp, Homo sapiens
gtttgccgagccttgacaggcgtggcagagggagcagtgcccgagcgcgacggaatcagtccccaatgcctggaaattcctcattggattactgtgtttt

SEQ ID NO: 696482 - DNA, 99 bp, Homo sapiens
caacagagtgagctccagagtcagaaatacatgctacaggatttaactatcagaatgaagatgaaaaagtcaccttgtctttccctagtactctgcaaa

SEQ ID NO: 696483 - DNA, 74 bp, Homo sapiens
agaggagcaaggctccggcactaccacgggctgcgggctgcctagacccggcactacgtgggctcagcagctgc

SEQ ID NO: 696484 - DNA, 82 bp, Homo sapiens
caatggaagagctacttcaaaatgaagttaatcggcaagatttaatttacccacacccaaatgcttctgcagaaaaagccag

SEQ ID NO: 696485 - DNA, 50 bp, Homo sapiens
gggagccctacagcgtctcttcaaaaagttgaggagctcaagcttgggaa

SEQ ID NO: 696486 - DNA, 75 bp, Homo sapiens
cagcttctggtcaggactctattcagagactgaaggcactaactcaacagtgacaattgaggaattccactgtaa

SEQ ID NO: 696487 - DNA, 100 bp, Homo sapiens
ccgtgaccgagagcgtgaccgagagcgcgaatatcgtcatcgttagaaggtgaaatgacaatggatgctctgttggctcgattgaaacttctgaatccag

SEQ ID NO: 696488 - DNA, 75 bp, Homo sapiens
gccctggtcttgctcggccgatgaagtgcagaggtttttttctgggctgctaaggaagcaaaaaaggctaagcaa

SEQ ID NO: 696489 - DNA, 100 bp, Homo sapiens
cttcagtgcattcatgaagcatctgaaaaagctgtggaaggctctggataaggaccagtacctgcccaggaaactggtatctcttgggtcacagattgat

SEQ ID NO: 696490 - DNA, 82 bp, Homo sapiens
tttttacattctgtccggagtttgagggtttagatgtagattctctggtcattgagcatatccaagtgaacaaagcacctaa

SEQ ID NO: 696491 - DNA, 100 bp, Homo sapiens
ggtgtgggagcggccagctaggagcgctctgtggtgcctggggctgaacgcggctttctgtgccctataaggactgccaggcaataatgaaggttctttt

SEQ ID NO: 696492 - DNA, 96 bp, Homo sapiens
ctctttccttcaaactacgttaagatgacgacagactcagatccaagtcaacagtttgacattttgctaaaggctgtgggagacactcctattatg

SEQ ID NO: 696493 - DNA, 82 bp, Homo sapiens
tggacaaaagaaagcaagaccccgagtggaagaaatcctaagtaatgcactgaagagaggagagatcattgcaaagcaggga

SEQ ID NO: 696494 - DNA, 83 bp, Homo sapiens
cttcagcggggtttggtggccagaatttattataaggaaataatgcaaaaggtgtcccaaggctcctgaccagtgaacaaaga

SEQ ID NO: 696495 - DNA, 100 bp, Homo sapiens
agatgagcaaagaatgacagcaagaggcaaaacttcggacatagaggccaaccaacctttggagctgccactgcagagccccgccatggaagacacgccg

SEQ ID NO: 696496 - DNA, 75 bp, Homo sapiens
cccgcggccaacatgagcttcttgttgcacccactggaaatcagactgcccagctcgcccgacagccactcctgg

SEQ ID NO: 696497 - DNA, 51 bp, Homo sapiens
agagaacagggtggccgcttggtccagctctccacacaaggagatgcaagt

SEQ ID NO: 696498 - DNA, 74 bp, Homo sapiens
agaacccaccaggcatggatgaccaactttggacgaaatctcacaaaactgtcccttatcttcagtcacatgct

SEQ ID NO: 696499 - DNA, 95 bp, Homo sapiens
gaaggggggctttatatggctgtatttgacttggcaattcctgctgaacaaataatttttcatggcgggtggtataagttgaaatccaaaccagg

SEQ ID NO: 696500 - DNA, 75 bp, Homo sapiens
tcctgattacctgccacccattgtgtcttctcaagaagtgttgttaataacagtactggtagtggaagggattgc

SEQ ID NO: 696501 - DNA, 100 bp, Homo sapiens
agtcgaagcgagggtctgaagttcacgactactagaaggggaggggagtggaaaggctctcagtgaaaaagttctttatagctccaagctctacagattc

SEQ ID NO: 696502 - DNA, 100 bp, Homo sapiens
aaaaagaaacctagcaacaaaaagaaagctgcgttaatgtttgcaaatgcagaggaagaatttttctatgagcttttggaaaagaagaagagagtccaac

SEQ ID NO: 696503 - DNA, 80 bp, Homo sapiens
acactgcaggcctccgcgctcagtgtgccgcagaatggaattcggcattgttcctacacagcttctcggcaacatctcta

SEQ ID NO: 696504 - DNA, 100 bp, Homo sapiens
taccatgcatttcacggtggccttgtggagacaacgccttaacccaaggaagtgactcaaactgtgagaacttcagggcgaactttctgaccaagtatac

SEQ ID NO: 696505 - DNA, 75 bp, Homo sapiens
acaagctggtgcagaacattgcgcggcaggttgtactcagactatctctactttgcaagttcgaataaatccgcg

SEQ ID NO: 696506 - DNA, 75 bp, Homo sapiens
atgtgcagtttgagtctgatgaggagctcttagcttctgccagctatgatgacacagtgaagctgtaccgggagg

SEQ ID NO: 696507 - DNA, 74 bp, Homo sapiens
ttgaaccctgcaaagcctgggagcagctggattccatttaaagaggcctaaagatattggaagacctaaggctg

SEQ ID NO: 696508 - DNA, 100 bp, Homo sapiens
ctcaaaccattggatgtgaaaaccaaattttacaatgcagagattcttcaagagaaacttaatgaaatgagctatgaactaaagtgtgctcaggagtcgt

SEQ ID NO: 696509 - DNA, 97 bp, Homo sapiens
ggaagaaagtgcctgccattcttatcatttctaagcaggttcatgccagcccagaacagagaatcagatgtgactacccctgaatctacaaagaatc

SEQ ID NO: 696510 - DNA, 94 bp, Homo sapiens
gacggattcatttagagctgcggaacaggacgccctctgatgttgacatcatggacatatgtgagtccatcctggagaggaagcggcatgacag

SEQ ID NO: 696511 - DNA, 100 bp, Homo sapiens
gctacagccaaatccttcattactgagttcacaaagatgtccaaaactaatggcttatcagaagatttgatatggcactgtaaaacactgatccaagaaa

SEQ ID NO: 696512 - DNA, 95 bp, Homo sapiens
gctcattgaagcctcaaactcctgagctccaggaatcctcccaccacagtctctcaaatacttgggactacagggtatcactctgtcacccaggc

SEQ ID NO: 696513 - DNA, 90 bp, Homo sapiens
ctctgatccccccctgccggggagggcccagcgcatccgacaggtgccgccggatggtggtggttgtctctgatgattacctgcagagca

SEQ ID NO: 696514 - DNA, 96 bp, Homo sapiens
ccgcgatgagaagaggggcaagcggccgtctcccctcgcacaccagtgggaatgtaagacggacttagatattgcatacaaatttggaaaaactgt

SEQ ID NO: 696515 - DNA, 100 bp, Homo sapiens
tgggagatttggatatcgaatcccagacctgtgcttctgactatcttctcttcaccagctcttcagatcaatatgttgttgagcctccttcaaatttgat

SEQ ID NO: 696516 - DNA, 98 bp, Homo sapiens
ctcggcagtcgcgaagcagcaaccatggtggttctggaatggagccgagatcaataccatgttttgtttgattcctatagagacaatattgctggaaa

SEQ ID NO: 696517 - DNA, 100 bp, Homo sapiens
ttcaaagggaccatcatcctgacagctgtgtactttgccctcagcatctcccttcatgtctgggtcatgatggttcactttcttacacactatgctgaca

SEQ ID NO: 696518 - DNA, 100 bp, Homo sapiens
ttgaagccacacaaagaacaaattgcagttgtttgaggtgtttcagtcacctccagtaacacgggcgtgccagatatctcgggttctgtgtactccaaaa

SEQ ID NO: 696519 - DNA, 50 bp, Homo sapiens
ggaagagatgcgaggatgacaaggtactccaaagattcaggtttactcac

SEQ ID NO: 696520 - DNA, 87 bp, Homo sapiens
gaaggaacgaggcaaggagctaaagcagcgtgcgttcagccctggggaacatcatcttcagcgggctatttcagcacagcaggtgta

SEQ ID NO: 696521 - DNA, 100 bp, Homo sapiens
aggacatggacctgtacagcatcaactacctgcactttggggagcctaagtcctgttggctagagatttactacatccgtccttggaagaggaaaagaaa

SEQ ID NO: 696522 - DNA, 75 bp, Homo sapiens
gtggctttgtggaatattcccatctcctgcctcctaatagctttgagggttgctccttgagggcaggacagttct

SEQ ID NO: 696523 - DNA, 50 bp, Homo sapiens
ctaccgcaactctcagttcgagagtaaagttgatactccagatccctatg

SEQ ID NO: 696524 - DNA, 114 bp, Homo sapiens
atggacatgagggtccccgctcagctcctggggctcctgctgctctggctcccagtctgcgctcctcagaccaccggcaggtgaacagcctgatgcagaccgaggagtgcccac

SEQ ID NO: 696525 - DNA, 100 bp, Homo sapiens
gacttcgtggtagaatccattggctctgaagtggggtctctgggcagtacagaccccagaagggaggcatttgtgttgccaaccatacttcccccattga

SEQ ID NO: 696526 - DNA, 98 bp, Homo sapiens
gctaaactggagccgtccataggggtgaatgggggatggaagggggagagctgtttgacaaagtggtggggaataaacgcctgaaagaagctacctgc

SEQ ID NO: 696527 - DNA, 100 bp, Homo sapiens
tgaggcggagccccggagtcccgctgggcgtgagatgcagagagcggccgcagatgttttcacctcctgtgagcagtgggaaaaatggaccaacttcttt

SEQ ID NO: 696528 - DNA, 50 bp, Homo sapiens
tgcaaggctgagggacgagaacgaggttttaaatgcacagagagcaggat

SEQ ID NO: 696529 - DNA, 98 bp, Homo sapiens
tccttaattctgggcacagacaaagaattctacaggcaatccagctccttccaaagggaaaggggctgtttgccacacagctcatccggaagggggag

SEQ ID NO: 696530 - DNA, 83 bp, Homo sapiens
ctgaaattcatcctgagatgaggtgaggaaaatagcagctgaatactatgacaacctccctcactacaattcctggataaaag

SEQ ID NO: 696531 - DNA, 83 bp, Homo sapiens
aggttaatctgttggattctaatgcagttcatcacatcattcatgattttcagttgaaaatcgagttcgtccgttagtgctgg

SEQ ID NO: 696532 - DNA, 98 bp, Homo sapiens
gggaaatgcgtgcactgcgtccctctagagaccccaccaacaactgaacgctttggtcaggctgctacaatggaaggaattggggcaattggtggaac

SEQ ID NO: 696533 - DNA, 118 bp, Homo sapiens
gcggaacagggcggcactggcccgccacagcgacgccggcgccgagggacaccgcagtatgaggcagagattctgaaagtcaagaagacatcatccggaatattgccaggcacctcgc

SEQ ID NO: 696534 - DNA, 90 bp, Homo sapiens
atatccgaagcctgaagatggttccaagtattccctatctaggtctcgatctagaagacggtcacgaagtaggagtcgcaggagcagccg

SEQ ID NO: 696535 - DNA, 83 bp, Homo sapiens
tccgggagcacttcgagaagctggagaagtatggtttgaagtggtgaacatggatttttctcggcttcacatgtacagtcctc

SEQ ID NO: 696536 - DNA, 78 bp, Homo sapiens
tgttttgccggaggagcccctcaggccggacctcaggatggaaaccagcagcctgcaccgcccgagaaggtcggctgg

SEQ ID NO: 696537 - DNA, 74 bp, Homo sapiens
tcccggggccatggccggaatgcagtaccctcagcagcagagtcctttgtcatggataaaaggcttgaaatggg

SEQ ID NO: 696538 - DNA, 100 bp, Homo sapiens
ccgcggccgggggatgctgcccatcccagtggcggctgccaaggagacgattcttcacagtcagatttccaccattgagaaacaggcaacaaccgctacc

SEQ ID NO: 696539 - DNA, 100 bp, Homo sapiens
atggaggagatccggcggcagggcaagctgtgcgacgtgaccctcaaggtactccaaagattcaggtttactcacgtcatccagcagagaatggaaagtc

SEQ ID NO: 696540 - DNA, 82 bp, Homo sapiens
gcgccttcctcaacgacgcggacatggtcatgagctttgtgaacctgggttaatttggagtggcccctggagtcagtttcct

SEQ ID NO: 696541 - DNA, 100 bp, Homo sapiens
ccagagcctgtgggaagtctccatggtgaagtataggctgaggctacctgtgaacagtacgcagtgaatgttgcttccacctctaccacaggctgccagg

SEQ ID NO: 696542 - DNA, 101 bp, Homo sapiens
gggaagattagttggaatttttgaggatacaatgtctctttgctatatgaccttgaaaatcttccggcatccaaggattccattgtgcatcaagctggcat

SEQ ID NO: 696543 - DNA, 83 bp, Homo sapiens
ctcttacgtctgcggaagtgcagctgcctcagttcttagcgcaggtcccagctagtccacagggaccagcagtgccatggaag

SEQ ID NO: 696544 - DNA, 74 bp, Homo sapiens
atcgcttcaatgatgggaaggtggatcccgccgggaggtactttgctgcttcttggacacttaatgattgttgg

SEQ ID NO: 696545 - DNA, 90 bp, Homo sapiens
acaccccttccagctacatcgaaacgttaatgatgaaatggcaggtaattcacacttttggacagagcgcaccgcccccgtggaatcacc

SEQ ID NO: 696546 - DNA, 82 bp, Homo sapiens
gttcgtggctatcccactcttctctggttccgagatgggaaaaaggtggactgggtggttatggatcaggagacagtgaaga

SEQ ID NO: 696547 - DNA, 119 bp, Homo sapiens
tgacatgcgggtaacaatgggttgtgaaattttcagcatgtggcaaaacctagatggataatgtgcttatggtgtaaccaggtttgagggaggcatatctcatgtgactgggagaagcc

SEQ ID NO: 696548 - DNA, 82 bp, Homo sapiens
gccagtacagcaccggcaagaccaccttcatcaggtttttagaacttcagccataaaaatgggcagaattttccttgatcat

SEQ ID NO: 696549 - DNA, 100 bp, Homo sapiens
gacctgaaacggtgcacgtactacgagacgtgtgctacatacgggctgaatgtggagagggtcttccaggacgacataccagaaggtagttttgctaagt

SEQ ID NO: 696550 - DNA, 75 bp, Homo sapiens
cagaagatgaaggaaacagctgtgttcatcaacatcagcaggcgcagcccagcctcgaaatgcagaacgacgccg

SEQ ID NO: 696551 - DNA, 50 bp, Homo sapiens
cagtaagaacgaggaggatgaaggatgatgaaccaggtggaagggcagca

SEQ ID NO: 696552 - DNA, 83 bp, Homo sapiens
cgagcagcgccagcggccgagcgggcggcttcctggcctgggcgctccggtggcggcggagctacgtcaaaagctacctcctc

SEQ ID NO: 696553 - DNA, 75 bp, Homo sapiens
agcttgtgatgatgccaaacaagaatttacctcctattcgaaatgggaattttaggaaaaagaagaaaggcaaag

SEQ ID NO: 696554 - DNA, 89 bp, Homo sapiens
ggacgccatcagcaagatggaccccaccagatgggatttcgccatgttgcccagtctggtctcaaactcctgagctcaagcaatctacc

SEQ ID NO: 696555 - DNA, 83 bp, Homo sapiens
gctgagaggggctgcggccggagcgggcggctgagacaaaggcgacgccattccacagattttgaagtacaccgaaactggct

SEQ ID NO: 696556 - DNA, 90 bp, Homo sapiens
gttatgaaatattttgtgttacttgtaacagttcaaagactctgcttgcctcagcttgtaagagtacaggggctcaggtccaggtggcag

SEQ ID NO: 696557 - DNA, 75 bp, Homo sapiens
ggcccagagacctgagcagctctgcaaggttctaacaggtactccaaagattcaggtttactcacgtcatccagc

SEQ ID NO: 696558 - DNA, 100 bp, Homo sapiens
ttcagagatggcagcagaagctgcatatcaaactggcgcagcccagcctcgaaatgcagaacgacgccggcgagttcgtggacctgtacgtgccgcggaa

SEQ ID NO: 696559 - DNA, 50 bp, Homo sapiens
cgagcgctgcgaggtggcggcctgagatttataatcgcttagatacaaat

SEQ ID NO: 696560 - DNA, 50 bp, Homo sapiens
gggactgcgaagctatacaggcttactggagaaaatgaaactgggattga

SEQ ID NO: 696561 - DNA, 83 bp, Homo sapiens
cccaagttttgagagaactgggctttcggcgcggggggacagaggaggctcgtggggaggaagaaggtagataatgactataa

SEQ ID NO: 696562 - DNA, 90 bp, Homo sapiens
agtaaaacgcttccatatttatccagagatacccagtatctccaagataccatgaaccatgtcctaagctgtgtcaagaaggagaaggaa

SEQ ID NO: 696563 - DNA, 100 bp, Homo sapiens
cacatttctggagcaagtacaggtgtccgcaatgttgccagtgtctgtctgcagattggctacccaactgttgcatcagtaccccattctatcatcaacg

SEQ ID NO: 696564 - DNA, 75 bp, Homo sapiens
gtgggctccacgttcttacttggaaaagggctcacttatctaaagaatatgaggaggctaatttcagagctatat

SEQ ID NO: 696565 - DNA, 90 bp, Homo sapiens
ccgtcctgagtgccagggaccgagcagggccagccggaccccggcgggcggccgggagaggaccaagtggaccacttgctaaccctaaag

SEQ ID NO: 696566 - DNA, 100 bp, Homo sapiens
acgggcgggtgaagatcggccactacattctgggtgacacgctgggggtcggcaccttcggcaaagtgaagggtactccaaagattcaggtttactcacg

SEQ ID NO: 696567 - DNA, 75 bp, Homo sapiens
aaaatattatggcaacaaatgcattattccatggaagacaatggtgtaaaattggttgatcctttgggtgaaatg

SEQ ID NO: 696568 - DNA, 100 bp, Homo sapiens
gggaaggcgcctgaagaggacgaagacatttctcttgggaagttgtgcatctgacaggaatatagtactgtacgatatgaggcaagctactcctttgaaa

SEQ ID NO: 696569 - DNA, 100 bp, Homo sapiens
gtcagactctgcgaaaggccgagagaagctggtcctgctcacgagagaaaaaggagtcaggatggctaaaggtgaccccaagaaaccaaagggcaagatg

SEQ ID NO: 696570 - DNA, 76 bp, Homo sapiens
atagccgtcttcagcttgagccccatcactaggggactttcccatgcctttcatatctgccaaatcgagtcctgtg

SEQ ID NO: 696571 - DNA, 90 bp, Homo sapiens
tcagcacggactggaatcctgcatacatatctgagctctgtgttctggaatagccaggccagaagaaggaaggcctgtggtgagtgggac

SEQ ID NO: 696572 - DNA, 100 bp, Homo sapiens
cagcagggcccggtcctgcgcctcgggagtcggcgtccaggctcggagcgcgacacggagactaggtggcaggtatgtgaggagcagcgctgtgaggagg

SEQ ID NO: 696573 - DNA, 50 bp, Homo sapiens
cggcgggcgactggacggccggacaggacacattcagctaacgtatttta

SEQ ID NO: 696574 - DNA, 83 bp, Homo sapiens
gtgtcagcctgccctaggacttcatgtctatatatttccccattcactgcccttctccgagttggcagggctctcagggaccc

SEQ ID NO: 696575 - DNA, 96 bp, Homo sapiens
cgggaattggcatctatgtcacccctttctaaggcacaaaatgatgtgatggaaatgaagatgcagtcagagagactttcgaaagaatatgatcaa

SEQ ID NO: 696576 - DNA, 75 bp, Homo sapiens
ccaacatacacgcccatggaagtgcacttaaccccagaagccctgctcatcaatgaggaaaacgagggtttctgt

SEQ ID NO: 696577 - DNA, 75 bp, Homo sapiens
aggattgcacttggaggagtatgtgatcagtctgacattcgaggacacaggaatttatcatggcatccagcattg

SEQ ID NO: 696578 - DNA, 80 bp, Homo sapiens
ggtgctgaaagtccacggatgctatccctggtcaaatcagagatgtgagcgacatcaggcgcttcctcagtgcatttcac

SEQ ID NO: 696579 - DNA, 100 bp, Homo sapiens
tgtgccacccagagactggggcctgctcgaggagaaggcagagcccccccaggctatgaatgccctgatgcggttgaaccagctgaagccagggctgcag

SEQ ID NO: 696580 - DNA, 51 bp, Homo sapiens
acctgtgcgggatggaacaaaagctctgtcaggattgccacaattccagcc

SEQ ID NO: 696581 - DNA, 98 bp, Homo sapiens
cgatggcatcggtcaaggtggccgtgagggtccggcccatgaatcgcagagacggtaaagaacaggtccaagaaaagctcaaagaaagcaaataccag

SEQ ID NO: 696582 - DNA, 90 bp, Homo sapiens
tgcttataagacaactcttagctagaaactccagaaaatcttgccaaacttctgaccaggatgtatttaaaatcagaagtcataggtgat

SEQ ID NO: 696583 - DNA, 88 bp, Homo sapiens
cttaactgttccaaaagagaataaaatacccactgtctcaaagagctgcaagcgtttgctcaccacggccgctccctgccaagattcc

SEQ ID NO: 696584 - DNA, 115 bp, Homo sapiens
tggggattttctactgcatctcgacagcatctcgggtaacaaccgagcccctcctcgcagcatgtacggagcgcaagaggacggcagcgtcggcgaaggtgacctgtcctgcatc

SEQ ID NO: 696585 - DNA, 87 bp, Homo sapiens
ccactacagttcatcaacatcaactacgtccctctgaagggccatgtgaaactttctgactttggtctttgcacaggactgaaaaaa

SEQ ID NO: 696586 - DNA, 50 bp, Homo sapiens
ctcaccactgctccagaagatgatagtataactttgaaaatgcatctcag

SEQ ID NO: 696587 - DNA, 87 bp, Homo sapiens
cgaataccaagctcggatccctgaatttgatccaggaccgtataatagacgctggccccaaaggaaactactctcgatttatgaatc

SEQ ID NO: 696588 - DNA, 101 bp, Homo sapiens
gaggaggaagacgaatcgttaaacatctgaaagggtcaggcgagaaccactgtctctgatcaacgtgcggaagaggaacgtggaatctggggaagaagagc

SEQ ID NO: 696589 - DNA, 75 bp, Homo sapiens
aaaaaagtctgctactactacgacgacaatgcagatcttcgtgaagactctgactggtaagaccatcaccctcga

SEQ ID NO: 696590 - DNA, 100 bp, Homo sapiens
gctgcagcgggcactgcggcgccgaggcgcggcggcaggacgggaaccacgcgagctgcagccagcaattctgtggtgttcttggtcacacatttatgga

SEQ ID NO: 696591 - DNA, 83 bp, Homo sapiens
ctgggatcccggccaccagcaattgtccgttggaatcgaagcctcttaaaatggcagatgacttggacttcgagacaggagat

SEQ ID NO: 696592 - DNA, 100 bp, Homo sapiens
gccccagccgggaagccgggacggcctgcctgcgctcaacaccaagatcctgtacccaacacaccgttccggaaggcaaaagccttgtatgcctgcaaag

SEQ ID NO: 696593 - DNA, 100 bp, Homo sapiens
gtttctggcccagcttattccaggtttggaaatatcttgggatggagacagttttgtagaagtcatggctgcgccgcatctcaagggcaagctctgtggt

SEQ ID NO: 696594 - DNA, 87 bp, Homo sapiens
ggattgctggctacagcttcagaagaccgaagcgttcgtatctggaagggatcatagacggtatttctatgtaaacgaacagtcggg

SEQ ID NO: 696595 - DNA, 74 bp, Homo sapiens
ctgagttgaacccagacaagaactgcattcacacagatgacgacgagaaggttttggaatcattttcaaataaa

SEQ ID NO: 696596 - DNA, 83 bp, Homo sapiens
cgcctcctctgctggatgtgaaatggcggtcggcgagacctgcctagagctggaacgttacctccagagcgagccctgctatg

SEQ ID NO: 696597 - DNA, 100 bp, Homo sapiens
gagacgcaagactccactctccctacgagatcaccacagaccgtctgaatttcctgctgctgttcacaaagatgctttttatctttaactttttgttttc

SEQ ID NO: 696598 - DNA, 98 bp, Homo sapiens
tttgatttcatcgatgatctggcagacctcagctgcctggtaatgccgggtctaagttgtagattttatcaacacaaatttcctgaggtggaagatgt

SEQ ID NO: 696599 - DNA, 100 bp, Homo sapiens
tgactggaagccctggcagccctggtcctgatggcaaaactggcccccctgcccggacatatatccagtccctgccccccatgccccagaaggacctgag

SEQ ID NO: 696600 - DNA, 146 bp, Homo sapiens
ccggcctgagcacggagcgtgtccgggagctggctgtggccttggcacagaagaatgtcaagctctcaacagagcagttcttccggcccctgaatgtacgagtggcactagtgggcctggaggcctggacccagcgtgacctggtg

SEQ ID NO: 696601 - DNA, 82 bp, Homo sapiens
cggcagtccacccaccgccgccgcctcccagcctggctttctccggaccccctgtttctggaacagaggagggtcagagaag

SEQ ID NO: 696602 - DNA, 99 bp, Homo sapiens
tgtttttatgggttccacgaaaattgctaatgactgttgaatctgctaaaaattcagtgttggcctgtgggccaaagctgaccaactcccccaccgtca

SEQ ID NO: 696603 - DNA, 75 bp, Homo sapiens
gacaaatacgcctacaccaagcagaaagcgacagggatggtggatgcttccaaaagcatcgaagctgtccatgag

SEQ ID NO: 696604 - DNA, 99 bp, Homo sapiens
acgtaggatgtgtacatggctctccaggtcagagttgctccaagcaaggagagccttgaacttaggaattcttcgagatcctggatcagaaatcgaaga

SEQ ID NO: 696605 - DNA, 75 bp, Homo sapiens
ctgtcattgtggccatggacgcttccccgggcgctgcctggacaggcctgcctgcgtgctgggacatgtctggcc

SEQ ID NO: 696606 - DNA, 75 bp, Homo sapiens
gacattcaacatgattgcatttgaagtcctggcaaaactggcctgtggactaaacaagcccaaccgccaaaccct

SEQ ID NO: 696607 - DNA, 75 bp, Homo sapiens
atccttgtgggcatgatccataatcggtttcaaggtctagatccagaagaagctcccgaaggcattatacccggt

SEQ ID NO: 696608 - DNA, 99 bp, Homo sapiens
gaatctttaagtgaaaagcaaggcatgacacaagaatcctttgggaagaaggagaaagggccaacccctgaagaagcaatacagaaactgaaggagaca

SEQ ID NO: 696609 - DNA, 100 bp, Homo sapiens
tcgcagtggtcgcttcttctccttgtcttttgagggcaacaacaactatgatacacctgagctgcggacttttccagctctctccacgcgattcatcagg

SEQ ID NO: 696610 - DNA, 82 bp, Homo sapiens
ctacctgcactgctctggtctagtacaaacaggctgctggcattgagagagcagtcatgatggcctgcactccacacaatgc

SEQ ID NO: 696611 - DNA, 100 bp, Homo sapiens
aagaggagaggaggatagcagcagaagagaagaagaagcaggatgaactgaaacggattgccagagaattggcagaagagaccacaccgctgttccagac

SEQ ID NO: 696612 - DNA, 82 bp, Homo sapiens
attcgcagtggtcgcttcttctccttggattgacgtgtctcagaatgaccttccttgggaatttatggtcgatcgtcttcct

SEQ ID NO: 696613 - DNA, 75 bp, Homo sapiens
ctgaacgtcatcaacgagggcggcattgacaagctgggcgagattctccctgactctgctcatctggaccttttc

SEQ ID NO: 696614 - DNA, 100 bp, Homo sapiens
gaaaaacgatcctttgtctttgttagatgattcgaagtttcctatagaggataccccattggttccagttgatggaaatcacaatcttctgacaaagctt

SEQ ID NO: 696615 - DNA, 98 bp, Homo sapiens
cggcgtctgtctctgcggcttctggttctcacttgtcggcagtggagctactgctgtggttcaggcagccctatgcaaacccaggcaagaacgtgtag

SEQ ID NO: 696616 - DNA, 82 bp, Homo sapiens
gggaaacctgggggctccctggacaactccgagcaggacccccacgtggaccagtatgaggccaaagagtggacatttatta

SEQ ID NO: 696617 - DNA, 148 bp, Homo sapiens
caggaggctgagtcctggccgcgggccggggccggggcgccgctggcaggagcgcttggggatcctccaagatgcagcagcttttttatgagaattacgagcagaacaaaaaggggtacattagagatctccataacagtaaaattca

SEQ ID NO: 696618 - DNA, 83 bp, Homo sapiens
ctgagtccctgggcttagaagatttagagattgagtataagtgtgctagcggagtgtctagattgtcctgaattgaaagcaac

SEQ ID NO: 696619 - DNA, 100 bp, Homo sapiens
aatgaagctgtacctcaggtgaagttttatgaagagaaggagctggcaaacagccctgactgtccccagatgtgtgcctataagctggtgaccatcaaat

SEQ ID NO: 696620 - DNA, 90 bp, Homo sapiens
aagatttgcagtggtggcctgataaggccaaggcagaggcttcctcaggagaccatcccactgacacagagatgaaggaggagcagaaga

SEQ ID NO: 696621 - DNA, 83 bp, Homo sapiens
ccggacgcgagcccgctcccctgacaatggctgccatccggaagaaactggtgattgttggtgatggagcctgtggaaagaca

SEQ ID NO: 696622 - DNA, 75 bp, Homo sapiens
tcaaggagatcattctggtggatgacaacagcagtaacggctgatttaaactgcaatattcaagatgatgctggg

SEQ ID NO: 696623 - DNA, 75 bp, Homo sapiens
tgcattttgacaactgtgttcttaagccggccacagaaggaaaacggttatgccaaggacgccctgaatctggca

SEQ ID NO: 696624 - DNA, 100 bp, Homo sapiens
cgcctgcctccgccggctacagcgggaagagcgggagtggggaaggccagggccagattctgcagcgcttcccagagaaggactgggaggacaacccatt

SEQ ID NO: 696625 - DNA, 100 bp, Homo sapiens
caggagcccatgagaagcctggtgctatctcagagcaaggaggcggggcggctcttgtacatcgggcagaacgagtggacacacgtcaactgtgccatct

SEQ ID NO: 696626 - DNA, 98 bp, Homo sapiens
aaaacctcacctcaagccacgcatatgataatgatgttgcttcagagtgtgaagtcaaatgcatgccaacattccagttttttaagaagggacaaaag

SEQ ID NO: 696627 - DNA, 89 bp, Homo sapiens
gaaggaaataaaaacgttggattagatattgagttatctccagaagaagaagagaaaaggagaatccgaagggaaaggaataagatggc

SEQ ID NO: 696628 - DNA, 82 bp, Homo sapiens
tggagtgaggtggccggttcttggtgggatctgagcagctgagctgactgctgcccactttggaggaggcggtgggctcctt

SEQ ID NO: 696629 - DNA, 75 bp, Homo sapiens
ctacactaaaacagagttagcagagtgctgctggttccttcggatgttcacggaagaccagggtgtagatgacag

SEQ ID NO: 696630 - DNA, 87 bp, Homo sapiens
ctcaaatgcaagtccaagaggaggaggaggcggaggtccaagcggaaagcgtgacgacagcatgtacgatccctgaatgggcccgtg

SEQ ID NO: 696631 - DNA, 51 bp, Homo sapiens
tcgcgcccctcccggggtccccaggggctttgttatgcacctaaagccata

SEQ ID NO: 696632 - DNA, 51 bp, Homo sapiens
agaaacaccaacaggatacattgaaaggtaagaatgattgatgttggctga

SEQ ID NO: 696633 - DNA, 75 bp, Homo sapiens
tgccctcagctccgagtccagggcgaggtcatcatcagatttgaaatatttaaagtggatacaaaactatttcag

SEQ ID NO: 696634 - DNA, 104 bp, Homo sapiens
ctgatgccaacagtgtaccagcagggcgttggctatgtgcccatcacagacaatgcagatcttcgtgaagactctgactggtaagaccatcaccctcgaggttg

SEQ ID NO: 696635 - DNA, 76 bp, Homo sapiens
aaggaatttatcgtatttctaaagcaagggcttttttccagacttcaagctcccattccaacagtaagagcttctt

SEQ ID NO: 696636 - DNA, 100 bp, Homo sapiens
tgctggctcagaggctctatgcaggttccactgtcaagggtgtccgcaatgttgccagtgtctgtctgcagattggctacccaactgttgcatcagtacc

SEQ ID NO: 696637 - DNA, 75 bp, Homo sapiens
tgaatgtttccatctcttcagagatgaaccagatcaatgtccgagttaccaccatggatgcagagctggagtttg

SEQ ID NO: 696638 - DNA, 97 bp, Homo sapiens
cggggagcagagcagcaactcacccagcacacaaaatggatctcttacgctccagaagcagctgtctgagctggacgaggacgacctgtgctatgag

SEQ ID NO: 696639 - DNA, 100 bp, Homo sapiens
gcctggccacccagagggcccttgtgtccaagagaccgaggcaaaggcccttttgaaggaacggcagaagaaagacaatcacaacctaagtaagccagag

SEQ ID NO: 696640 - DNA, 90 bp, Homo sapiens
caggtcgaggttctgcagaaggttgtgactttagtatacaatctatgcagttagatcagttgttcccaacaaaagcaataatgaaatagt

SEQ ID NO: 696641 - DNA, 100 bp, Homo sapiens
cttgtgtcaaccatccattccaggagccagctatctgaggtggtcctggctctgccatatgacacccccgtgcccggctacatgaataacactgtcaaca

SEQ ID NO: 696642 - DNA, 100 bp, Homo sapiens
tttgctcccattactctgatcgctccgttaggctgtgtgtctgttacagatgctaacatcagagaagttggccttgagggggcattgttgatcttactag

SEQ ID NO: 696643 - DNA, 74 bp, Homo sapiens
ttcattgctccttcaggacatggtggaagccgtgaggtggtggatgaaggcttgatccctggagatgggctggg

SEQ ID NO: 696644 - DNA, 83 bp, Homo sapiens
tcctggctcccttctgccccagctccgtctcggcggcggcggttacagaatgtctgaaggggacagtgtgggagaatccgtcc

SEQ ID NO: 696645 - DNA, 96 bp, Homo sapiens
gaactccctgatgctgaacttaggaggactttatggagccactatcatccagagatcctgcagttcttctacgcaaataaaattctgtaagcgcag

SEQ ID NO: 696646 - DNA, 100 bp, Homo sapiens
gtggagcagctgcgcagtgagcagctgcccaagaaggacattatcaagtttctgcaggaacacggttcagattcgatggctgatcactgggaaactgcac

SEQ ID NO: 696647 - DNA, 83 bp, Homo sapiens
ggggaggagaccatggctgactacctgctgtacaccctcaacaaacaccagcgctttgggaacccaagacagaccaggatgag

SEQ ID NO: 696648 - DNA, 100 bp, Homo sapiens
agcatgatgttctgaagcttgaggagtgaaacacaaatcttttctaacggctgaggactgctttgagttgggcaaagtggcctatacagaagcagattat

SEQ ID NO: 696649 - DNA, 90 bp, Homo sapiens
agtttttatgacccatttggagttcctcttcacggacagtgggtgttacacataatattgcattacttcgagaggtgataatcaactcac

SEQ ID NO: 696650 - DNA, 75 bp, Homo sapiens
gtaaagggtggtggtcacgtggcccagatttatgccatccagactgaggaagacccggaaacttaggggccacgt

SEQ ID NO: 696651 - DNA, 83 bp, Homo sapiens
tactcatagagtccgactataccacatacaggttgacttcaagcctcgagccagcatggatactgtccatcacatgttacttt

SEQ ID NO: 696652 - DNA, 100 bp, Homo sapiens
cagacttcgtgctgatggacaccgtctccatgcccgagttcatggccaacctcaggctcaggatggcccaatggaatcagctacagcagcttgacacacg

SEQ ID NO: 696653 - DNA, 75 bp, Homo sapiens
agaacaagaggacaggaggtgtcgttccaggtcatcatcagatttgaaatatttaaagtggatacaaaactattt

SEQ ID NO: 696654 - DNA, 100 bp, Homo sapiens
ggcaagtattgctgtgggtgctgggacttcccgtccgcggcgtggaggttgtggaagaaggactctgggaaaatggcctttcctatgaatgtaggacgct

SEQ ID NO: 696655 - DNA, 73 bp, Homo sapiens
cacaatcaagttccaaatgaagaaggtgatgatgaccaaacggaccaaagacatgggcaagttcagttctgtc

SEQ ID NO: 696656 - DNA, 98 bp, Homo sapiens
agtatattggagaatcgcaaggatatgatatcatggaaccagcagcaaagaagtgctatctggaaagagaggttacaggaggttccagtggcatcggg

SEQ ID NO: 696657 - DNA, 100 bp, Homo sapiens
taatttttttttttttccaaacacaaggatttaagtgccctgtatgctcaaaatttgtatcctcagatgaaatggatttgcatcttgtaatgtgtttaac

SEQ ID NO: 696658 - DNA, 51 bp, Homo sapiens
gaacttcccagcatacctgagaatctgaggcaacttctcctagaatctcaa

SEQ ID NO: 696659 - DNA, 75 bp, Homo sapiens
cttcaaggagcacaagtagctgctcttccaagcaaggaagtcgacaggtatgaaattgaaggctgtgaagtgatt

SEQ ID NO: 696660 - DNA, 83 bp, Homo sapiens
ccagccgtctcctgtgaaggccatatttgataaacaggaacttgagatatcattctctgctggaactgggtgagaagcgtaaa

SEQ ID NO: 696661 - DNA, 51 bp, Homo sapiens
aacctggcagaacttcagagacaggcagatgatgttgagggcaaaattaga

SEQ ID NO: 696662 - DNA, 101 bp, Homo sapiens
caagcccgccacgccgcccagcccggccccgcccgcgccggaagagccacgccggtactccaaagattcaggtttactcacgtcatccagcagagaatgga

SEQ ID NO: 696663 - DNA, 74 bp, Homo sapiens
actgaaaactggacattataacattaatgaatggagtgccatagaaaaagaaatgggtgatggactgcagagtg

SEQ ID NO: 696664 - DNA, 75 bp, Homo sapiens
gggaaaatggctgtgctggccaatggtgtgatgaattccttgcagtcttactactttgaccgcgatgatgtggct

SEQ ID NO: 696665 - DNA, 75 bp, Homo sapiens
cagaatcctgtcggagttgtagccatgccctaggtgaagtggatcctaaagagaggatagcacgccaacgaaaat

SEQ ID NO: 696666 - DNA, 96 bp, Homo sapiens
aagtgcaagaatggcttttaccggcacagagaaagggaccgctgtttgccctgcaattgtaactccaaagataaacctctcataatgaaggccccc

SEQ ID NO: 696667 - DNA, 75 bp, Homo sapiens
tcgatctaggttctgcggcacgggatggcggaggcgcctcctgtctcagatggcagttgaattcctgcatgaact

SEQ ID NO: 696668 - DNA, 100 bp, Homo sapiens
caaaaagccaaagccacagataaaccagtggaagcaggagaagcagcaattatcgtccgagcagatgtcatttgtcagagtgaaccgctgtggtccccga

SEQ ID NO: 696669 - DNA, 76 bp, Homo sapiens
ccagatcagcatgggcccatcccttgatggctcctcagatttcaggtatgctgctgaaagtgggaatcctctacat

SEQ ID NO: 696670 - DNA, 100 bp, Homo sapiens
cacacttctgccaagcatagccaccacgtgataatatgcagcatgcatactgggaactgaagagagaaatgtctaatttacatctggtgactcaagtaca

SEQ ID NO: 696671 - DNA, 80 bp, Homo sapiens
agcctcccgagtggctgggactacaggaaaggttgtcaatatagatacaaattcactgagatcctccatgaggcctggct

SEQ ID NO: 696672 - DNA, 101 bp, Homo sapiens
accaggacagaaaagacagtgttctgctttcatggagttcacagaagagtcgaggaggctttcatgagaaggacaagaagccatattgccgaaaggatttc

SEQ ID NO: 696673 - DNA, 91 bp, Homo sapiens
tgcaggaagaccgtgatgggagctgcagcacagtcgggggtgtaggttatgggggactttttttatgaagacatggagtccttgacgcaga

SEQ ID NO: 696674 - DNA, 97 bp, Homo sapiens
ttgccaaattgaggcggagaaaattgaaaaaagaagaaaaactgaattggaaatttttattcggtatgtccgtggttcagaccctgtattaaagctt

SEQ ID NO: 696675 - DNA, 127 bp, Homo sapiens
cgctgagtgaacccatcctgccgtccttctccactttcgccagcccgtgccgcgagcgcggcctgcaggaggcctcgggccagcggccaggagctgcctcccccagcccccgtcccgcggcccccag

SEQ ID NO: 696676 - DNA, 100 bp, Homo sapiens
cacccctatccagacggctgcccttcaagtaccagttatcaatactctggctgaccatcatcatcgtgggactgactttggtggaagtccttggttacat

SEQ ID NO: 696677 - DNA, 101 bp, Homo sapiens
ttcctgggaaggtggagccaccagcctctccttggatgaggatgggacagaagaggataacagtcgtgttgaacctgttggacatgctgacacgggtttgg

SEQ ID NO: 696678 - DNA, 131 bp, Homo sapiens
cgcggcggggaagatgttcagcgtagagtcgctggagcgggcggagctgtgcgagagcctcctcacttgggtggccaaggtggaatacgtcaggaagaagccaaaattaaaagaagtccaggtgaggttag

SEQ ID NO: 696679 - DNA, 75 bp, Homo sapiens
cctgagcctgttaaagaagaaaaactttcgcctgagcctattttggaagctgcacaagccttaatttatgctgag

SEQ ID NO: 696680 - DNA, 51 bp, Homo sapiens
ccggcatcgtcgcctggtgcgtggttttaaaacatgaatcctacactcatc

SEQ ID NO: 696681 - DNA, 101 bp, Homo sapiens
gtacatgctgggcatcctgatttacattcagaaaggagaaggcagagcccccccaggctatgaatgccctgatgcggttgaaccagctgaagccagggctg

SEQ ID NO: 696682 - DNA, 102 bp, Homo sapiens
ctgcatgggttacatttatttcgttcacccctgtcaacaggtggtcttcaagctgacagagaagctgacggaacagaaggagtggatgaagatataattgtg

SEQ ID NO: 696683 - DNA, 113 bp, Homo sapiens
tcccctacgcgctacacaagtggagctccttttcctccacctaccttcccgatgggagattttgataagatctggcgagaacactgtgaggatgaagaaactctttgtgaata

SEQ ID NO: 696684 - DNA, 83 bp, Homo sapiens
agagaaacccactgaagacgtctgcgtgagaatagagaccaccgagtcaagtatatgaaggacgtctcaccgtatttcaagaa

SEQ ID NO: 696685 - DNA, 132 bp, Homo sapiens
aggggcttcataccagctgaagagcgacaagccgctggcagccgcggatctcaccgccgctcagggccaagtacctggcccagatcattgtgatgggcgtgcaggtggtgggcagggcctttgcacgggcct

SEQ ID NO: 696686 - DNA, 50 bp, Homo sapiens
agtcctgagtccggatgaactgctcccgaaaagcccgtgaaacaagagga

SEQ ID NO: 696687 - DNA, 90 bp, Homo sapiens
cgttatattttgtcttctgtgtggattcttcagaaagtgaacttggcattttagatctaattcaatggctgagaaaccctggcccccagc

SEQ ID NO: 696688 - DNA, 74 bp, Homo sapiens
gaaactgcaccggaaatgtgcctaccaggttaaagcggcaactggggaagaagtatctgctgaggatcttggag

SEQ ID NO: 696689 - DNA, 119 bp, Homo sapiens
cagagagacgccacacagccaccagccgcagcaccaggatcagcagatcgggagcggtgccgagaaaaatttccttactagatgacatttcatcgcaatgtccgatcgtttggggcaaa

SEQ ID NO: 696690 - DNA, 75 bp, Homo sapiens
gcagaggcttgggccgccgagctggacccggaccggttttggatgaggaacttgaggcaagtcaccagcccctga

SEQ ID NO: 696691 - DNA, 100 bp, Homo sapiens
caacagaatttatatagagatgtgatgttggagaactacagaaacctcgtctccctggaatgttggctcaattaagaaacatcagggagataaattcaac

SEQ ID NO: 696692 - DNA, 101 bp, Homo sapiens
aggctccaagacctcatcaacaattaagaaactggcgatggaatatgagaggagccctctggaaagaaaaggacagaccctgtgctttcatgaaagtgaag

SEQ ID NO: 696693 - DNA, 74 bp, Homo sapiens
tctttgtgcagcagcccccgggcagaccctgttccgaggcaagccggtatattcggggcccaggagcaaggaaa

SEQ ID NO: 696694 - DNA, 74 bp, Homo sapiens
tccgcatcgagaagatgagctcagaggtggtggattcgaatccctacagcccagtgagtgcaaaaacaaaacct

SEQ ID NO: 696695 - DNA, 96 bp, Homo sapiens
tctgagaagtcgtcctcttcagaaaggcaatgaatcgctccctggctaatgtgattcttggaggctatggcaccacttcaacagctggtggaaaac

SEQ ID NO: 696696 - DNA, 77 bp, Homo sapiens
tggctggaacacacatcagtcacggtcacgatcgtggagtaaactgggctgccttccaccccactatgccccttatt

SEQ ID NO: 696697 - DNA, 98 bp, Homo sapiens
tacttgctctacctgcggcaccattgtcgtggctacatcatcctctcccacctgtccaagctcaagatggcttccgaagatcttctcaaggaacacta

SEQ ID NO: 696698 - DNA, 100 bp, Homo sapiens
aattttaagtcatcgttctaggatagggctggttgatatgtgaagagccaacctgtcgcaatcgaactcgtcaccttccccttcaattctcccgaactgg

SEQ ID NO: 696699 - DNA, 100 bp, Homo sapiens
caggtttccctattacaactccctcaaggactgcctttcctggtcagcccaaggccaaccccactgtcactctgttcccgccctcctctgaggagctcca

SEQ ID NO: 696700 - DNA, 98 bp, Homo sapiens
ttattcctgtccggagacagcctaaggtttcttgcagaacataaattattaggaaacattaaaaatgtggccaagacagctaacaaggaccacttggt

SEQ ID NO: 696701 - DNA, 90 bp, Homo sapiens
gcatcccaagggaaagtaccatcatggcttgagtgctctgaagcccatccggactacttccaagaagagagaagggcacagttacctaag

SEQ ID NO: 696702 - DNA, 83 bp, Homo sapiens
cggcgaacgcggagagcacgccatgaaggcctcgggcacggcagttgtgaaaaacttcaggacaaaaatgtttcatttaagga

SEQ ID NO: 696703 - DNA, 90 bp, Homo sapiens
gtataatctctttgcagtgaacggcattctcttcaatcatgagagtcccagaagagtataacattcaggcttatccaacaacagtggtat

SEQ ID NO: 696704 - DNA, 98 bp, Homo sapiens
gcatagcctgaacatcgtccaccgtgatatcaagccagagaacctgctgggtctaaaattcccaggactccacagctttgcaccagataagcctggag

SEQ ID NO: 696705 - DNA, 50 bp, Homo sapiens
cctcccaggacacaggagtcaagattccaactccacagagtgaccagaga

SEQ ID NO: 696706 - DNA, 99 bp, Homo sapiens
ctcggcttcatcaaggtcctcgagtggacaatgcagatcttcgtgaagactctgactggtaagaccatcaccctcgaggttgagcccagtgacaccatc

SEQ ID NO: 696707 - DNA, 97 bp, Homo sapiens
gatgcccaatgtatctaacgacctctcacagaaactatatgccaccatggagaagcataaagagggaacttctaatggattggggtccatagatgac

SEQ ID NO: 696708 - DNA, 100 bp, Homo sapiens
aagagacaaccgtgcttctgagatacagcctttacagaatgccatgcagattgtgggctttatggatcatgaagctgagtctgtcttggcggtggtggca

SEQ ID NO: 696709 - DNA, 92 bp, Homo sapiens
ggactctgaccgcaaacaaggagagcctactgagcagcctgagtggggaactctaatgatccaggacaaagaagttaccctggagtatgtat

SEQ ID NO: 696710 - DNA, 101 bp, Homo sapiens
acagaactgaaacaactggaaactgttttggatgatcttgaccccgagtttcagagactcctccactctctgggaatgacacggactccctctcctgcgac

SEQ ID NO: 696711 - DNA, 75 bp, Homo sapiens
ctggacgttgtgaacagagttagctggttgggggccgtcccgctcctaaggcaggaagatggtggccgcaaagaa

SEQ ID NO: 696712 - DNA, 83 bp, Homo sapiens
gtggactagaacacgttcctctgggttggagttactggtatgccttgcccaagaagatgaaaggattgttcttgttgacaaca

SEQ ID NO: 696713 - DNA, 102 bp, Homo sapiens
ctccctggacgaactcatcaggaagcgcggggcggcggcgaaaggacggagagtagttatcttgatggaattagaagttttgaagtcagctgaagcagttgg

SEQ ID NO: 696714 - DNA, 95 bp, Homo sapiens
gaaacgcccaccttcaaagaccactccttctttgttttaaaatcaaagatgggaaaatcggagaaaattgcccttccccatggccagcttgttca

SEQ ID NO: 696715 - DNA, 98 bp, Homo sapiens
gggcaccgcggtgctgctggtcacggccaacgtgggctcgctcttcgacgacttgacattcgtgaaattaaggagatccgcccagggaagacctcacg

SEQ ID NO: 696716 - DNA, 100 bp, Homo sapiens
ccttacatcagtaaggtagagatgatgaccccccactacaggccgtcctcatcgtcagcgggaacctcagcttcctgaactggctgactatggtgcccag

SEQ ID NO: 696717 - DNA, 90 bp, Homo sapiens
ggctttgcggggtccgcctgtgtgcaggagtcgcaaggtcgctgagcaggacccaaagattctcagaggattaaacagcaagcaacattg

SEQ ID NO: 696718 - DNA, 82 bp, Homo sapiens
ggaccatgtggctgccttgggctctgttgcttctctgggtcccagctcatgatggagcagtccaagaagtcctccctcatgg

SEQ ID NO: 696719 - DNA, 75 bp, Homo sapiens
aaaaccacaaccgagacctgcagggatttgtcttggctgttactatgacacgggaagcaattgatgaatttcggc

SEQ ID NO: 696720 - DNA, 100 bp, Homo sapiens
aacatacagtgacgcttcacaggggagttctgggaaatcgttcattcatttacagatgaacagaaaagactcttcttgcagtttacaacgggcacagaca

SEQ ID NO: 696721 - DNA, 115 bp, Homo sapiens
caatatctgtcttcggtggactccttcggcagtccacccaccgccgccgcctcccaggtccgcgggagagctgtggggcttggtgagtgtttcgtggcctctcgggttggtcagc

SEQ ID NO: 696722 - DNA, 90 bp, Homo sapiens
atgaggatcctgcatgttaatgggtttaatggagaataccaatggatcagataactccatcccaatggcttatcttacactggatcacca

SEQ ID NO: 696723 - DNA, 82 bp, Homo sapiens
cgcagtttctcacgacgggccgagcctgccactcgtatctggtgcaggccgtgagagcagcgggcaagtgcgatgcggtctt

SEQ ID NO: 696724 - DNA, 82 bp, Homo sapiens
gtccaactcagaggacgaggcctccttcaagtccgaggtacatgtcccagagcaagcacacggaggcccgggagctcatgta

SEQ ID NO: 696725 - DNA, 80 bp, Homo sapiens
aaaagggaagtgaaaagagatctgttttcaggtatgggctacgtgagttcgtggtgattgcccctgctgcacacagtgac

SEQ ID NO: 696726 - DNA, 98 bp, Homo sapiens
tcgatctcaagccgactctcaccatcatcaagacggaaaaagtcgatctggagcttttcccctccccggaaccagcttcttgcaaaaggactgttctt

SEQ ID NO: 696727 - DNA, 74 bp, Homo sapiens
accgtcgaaagcggattccaaggaatccagatatgtgaaagaggccaaagaagcaactaagaatggagacctgg

SEQ ID NO: 696728 - DNA, 75 bp, Homo sapiens
taacctccttgaaaaactgggatacatggatctggcctcaagactggtggcaatgaatcgctccctggctaatgt

SEQ ID NO: 696729 - DNA, 100 bp, Homo sapiens
cggagccgtgtggaccaggaggagcgctaaaaagcttgagtctccacccccatctaccaatcccttcctggaagatgagccaacaccagagatggaggaa

SEQ ID NO: 696730 - DNA, 96 bp, Homo sapiens
aaattgaaagagaaaaggaattagcagaagacattatgtcagtttgggatatgagattgaaaatgacgactcggaattttcctgagagagaagtac

SEQ ID NO: 696731 - DNA, 100 bp, Homo sapiens
cagggaagacatacaccatgggggaggccagtgtggattagtgacaagagctggggttaggatccggttggactctgacatcggatgccctcaaacatac

SEQ ID NO: 696732 - DNA, 75 bp, Homo sapiens
ctgattaaatactggtttcacactccaccaagcatcccattacagatagaagagttataggatattccaagataa

SEQ ID NO: 696733 - DNA, 98 bp, Homo sapiens
cttcatctgcgatggacagaataactgtcaagacaacagtgatgaggaaagctgtgaaagttctcaagaacacaccacagccatcagcactggaatgc

SEQ ID NO: 696734 - DNA, 100 bp, Homo sapiens
agatggcggatctggaggagcagttgtctgatgaagagaagctttggcagcatgtaagcagctgtttgccaagaacccaggtcactgctaagaaagggtg

SEQ ID NO: 696735 - DNA, 83 bp, Homo sapiens
actacccagggagaggaattacgggaacagaaagaaaagtccgaaagagctgccatcactggtgcaagctatatttaacggag

SEQ ID NO: 696736 - DNA, 83 bp, Homo sapiens
cttcatgtgcaaccttgactgccaggaagagccagattcctgcatcagcctgatcgacagaagagggtacatccagcccgaca

SEQ ID NO: 696737 - DNA, 100 bp, Homo sapiens
gctcagctcaggaccgcgcgccgtggtctgaggtccgcggcagggtcccgcatggcggcgcacaggaagcacgggcgtctctggccgagcctctttttgt

SEQ ID NO: 696738 - DNA, 106 bp, Homo sapiens
ctggtattatggtctgggtgatgatcatcatggtgattctggtgctgggctacgccttgctctgtcatccaggctggagtgcagtggcacaatcttggctcactgc

SEQ ID NO: 696739 - DNA, 50 bp, Homo sapiens
gccgccaccacccactccggacacagctcattgctatggacagtgctatc

SEQ ID NO: 696740 - DNA, 100 bp, Homo sapiens
gcgacacagcctggatctcctccatcctgctggccatgctctacgggacagggcgaactttctgaccaagtatacaactacccagagggcctaggagaag

SEQ ID NO: 696741 - DNA, 97 bp, Homo sapiens
gctgagttttcttttcatgtaccaagtcttgaagagcttgctggaggtgcaagaaagcctttgaggtgaaggtgtatgaaagtcatcataacagatg

SEQ ID NO: 696742 - DNA, 110 bp, Homo sapiens
caggatgaacaacgtttccagctgggaattatggatgatgctgcagagtgctttgtctcaagtattcccatgtgttttaaaagcctgaagtcagtgagatgaaattcaac

SEQ ID NO: 696743 - DNA, 90 bp, Homo sapiens
gggaacctagctgatgataggggggttccatctcccaacttgtccataggaagtttgctaactagaagtctagcagaaattgtgaagaag

SEQ ID NO: 696744 - DNA, 88 bp, Homo sapiens
gaggagcgcgcgggcaccctgcagcgcgagctggaccacgagaggaagctgagggagacctgtactaatggtcacttgatgtgcgctg

SEQ ID NO: 696745 - DNA, 50 bp, Homo sapiens
cagaacccccagaccatcatatccagcacacggaagacatggagaacgag

SEQ ID NO: 696746 - DNA, 99 bp, Homo sapiens
ttctcaaacaatgatgaaggccttattaacaaaaagttacccaaagaacttctgttaagaccccctggttgtggaatacgaggcattgctggtacaact

SEQ ID NO: 696747 - DNA, 100 bp, Homo sapiens
aaaagatgatgagaaataaggacaaaagccaagaggaggacagttcgctacacagcaatgcatcgagaatttcacggtccctcatggtgtctcactccag

SEQ ID NO: 696748 - DNA, 90 bp, Homo sapiens
cacggtggcaagcaagtttaatcagacctgctcacacttcagaatagagaaggcttttgaacacttgcagcaattagaattaataaagcc

SEQ ID NO: 696749 - DNA, 49 bp, Homo sapiens
gctactcacagttgaagcctgattgcagtttaagctatgaagaaggaca

SEQ ID NO: 696750 - DNA, 100 bp, Homo sapiens
ccgcggggacgcgaactgcgcagccagaaatccaaggccaagagcaaggcccggcgtgaggaggaggaggagggcttattgtgtaacagaacctggagca

SEQ ID NO: 696751 - DNA, 75 bp, Homo sapiens
gaagagaggttttgaattcacgcttatggtagtgggaactgcaagcacatgttgaccagataactgaaatggcag

SEQ ID NO: 696752 - DNA, 83 bp, Homo sapiens
ccggctacttctcggcgctgccgtctctggaggagtactggcaacaggttcaaggtgtttgcagactatgaagcctacatgca

SEQ ID NO: 696753 - DNA, 74 bp, Homo sapiens
gaaggtgtacatcgtgcatggcgtccagaagctggataagaaatcatctccatccacaggaagcctagattctg

SEQ ID NO: 696754 - DNA, 100 bp, Homo sapiens
gcgcaccgttaaactcctgctctgtttactgtggattggatattctcaaggaaccacacatgtattaagatttgatcatccagacttgaaacatatcgac

SEQ ID NO: 696755 - DNA, 100 bp, Homo sapiens
ccagagtaaagcaaagagaaaggaagcaggcccgttggaagtggttgtgttaccagcacaactttgacacctatgatgatagcttaatcacagacctcaa

SEQ ID NO: 696756 - DNA, 100 bp, Homo sapiens
caattacctcttttttgctctccctcgagaagctccagatggcgtcttccgtgggcaacgtggccgacagcacagttcgaagcattcagcaaacaatggc

SEQ ID NO: 696757 - DNA, 74 bp, Homo sapiens
agggttggcaagaagataggatgtgggaacttcggagagctcagattaggacccagccttgatgcccacttggg

SEQ ID NO: 696758 - DNA, 100 bp, Homo sapiens
gggcagagggcacctgagcggctggagagcctgttggagaaacacaaagagcggtttccaacctagatgaggaaagccgatggacagtccactacactgc

SEQ ID NO: 696759 - DNA, 100 bp, Homo sapiens
gtaccagtccctctgccccacatcctgggttttactcagtggtggagtagactcaacagtttgtacagctttgctaaatcgtgctttgaaccaagaacaa

SEQ ID NO: 696760 - DNA, 75 bp, Homo sapiens
cggagaaggactccaaggcggagcaggccaaagtgaagaaggcagccagataagctggtggtggtatggacccgt

SEQ ID NO: 696761 - DNA, 74 bp, Homo sapiens
gcaagatgtggcagaagaacaagaagttgagaccgagaatgtggaaacagaatgattgactggctatcctggcc

SEQ ID NO: 696762 - DNA, 90 bp, Homo sapiens
ggggagtcgtggcgtcgtctgcgaccgctgccttctcggcgcttctctgaagtagctttggaaagtagagaagaaaatccagtttgcttc

SEQ ID NO: 696763 - DNA, 89 bp, Homo sapiens
agaggaggacagttcgctacacagcaatgcatcgaggtagcaatgaagtgatgaggatactgatctctagaagcctgcttcaggagtag

SEQ ID NO: 696764 - DNA, 98 bp, Homo sapiens
aggactcatgactactgaggattctgtggcagtgcccagttatgtgtctcggtaccacgtgaaagactcctcacgccacgtcatcctaggcacccagc

SEQ ID NO: 696765 - DNA, 75 bp, Homo sapiens
aattcaaggccagaggctaatgaagatggtccagtagtctatgcagcatatttaaaaatggagcacagtgacgag

SEQ ID NO: 696766 - DNA, 100 bp, Homo sapiens
cgcggggaccatgcagcggaggtgggtcttcgtgctgctcgacgtgctgtgcttactggtcgacccgcagctcacgccacactcagggagcccagcccgg

SEQ ID NO: 696767 - DNA, 119 bp, Homo sapiens
cccgttggtgtggaaggaggggcggcagcttctccgacagccttcccttcttcttggtggtgttcttgagtaagataatctggactggcccccgtctttgcttccctgcctgctgctgc

SEQ ID NO: 696768 - DNA, 83 bp, Homo sapiens
gacatcataattgcaccctccgacatgggatggcatgcatgtagcagtgaaaatcgtaaaaaatgtaggccgttaccgtgaag

SEQ ID NO: 696769 - DNA, 83 bp, Homo sapiens
cccgcccgaccccgtcccgaccctggccgccccgagcggagcctggaggttcaggccctctgtggttaaagactgtatccatg

SEQ ID NO: 696770 - DNA, 97 bp, Homo sapiens
agttacctgcaccgttgtcctacttccagaatgcacagatgtctgaggacaaccacctgagcaatactgacccagatgatgtggtaccagttggcca

SEQ ID NO: 696771 - DNA, 88 bp, Homo sapiens
ggcagagaaaaaggccaccgatgtaaagtgttgagagaggagaaccagtgcattgctcctgtggtttccagccgcgtgagtccaggga

SEQ ID NO: 696772 - DNA, 75 bp, Homo sapiens
tgaggcctccccagccacgtgaaactgtcccagcatttgagggtgatgatggattctgtgtgtttgagagcaacg

SEQ ID NO: 696773 - DNA, 50 bp, Homo sapiens
cggcggcggcggcagtgacgtcgccgggtactccaaagattcaggtttac

SEQ ID NO: 696774 - DNA, 100 bp, Homo sapiens
gtgattgctgcggtgtttgaccgagacataaactgcagaagagcagcctctgagggtgtgaagacagagaatgaccacatcaacctgaaggtggccgggc

SEQ ID NO: 696775 - DNA, 98 bp, Homo sapiens
aatgatgaagaagatccttcaaaattaaaagaggagcagcatggcatttcagtcactggtttgcagagtccagtccagatgtataatctcatccctga

SEQ ID NO: 696776 - DNA, 76 bp, Homo sapiens
actattgtctactcacagtgatgaagtaacaggcatttgacattatcacagactgacatggcagcattaacaggag

SEQ ID NO: 696777 - DNA, 90 bp, Homo sapiens
ccatccttcacacccatcaagcaaaaatgagagagatagtggataaatactttccagataattgggaagatgatccctatgatcttgaag

SEQ ID NO: 696778 - DNA, 80 bp, Homo sapiens
tgagggtccccgctcagctcctggggctcctgctgctctggctcccaggtgagaatgagatggtgatcatgagacctgga

SEQ ID NO: 696779 - DNA, 90 bp, Homo sapiens
tggaccttccggagcttctcagaagacagagggttttcttttgaggtacgagtgcttccatatccatttacccaccattggcaatttgaa

SEQ ID NO: 696780 - DNA, 100 bp, Homo sapiens
ccggcgcgagctcaagctgctgctgctcggtgtgaatgacagaggtggtgccatccagcgcgctcagcgaggtcagcctgcgcctcctctgccacgatga

SEQ ID NO: 696781 - DNA, 100 bp, Homo sapiens
agctttagagaagtatggtctggaaaaagaaaaccctaaggattactgcatcgcccggggcaaactctttgattctacaatagctgatgagggaacatgg

SEQ ID NO: 696782 - DNA, 90 bp, Homo sapiens
ctttgaactccgagaggaggtggaccagaacttttggaactagtgccggcggctctccaccccccaggtgccctttaaggaggcagaatt

SEQ ID NO: 696783 - DNA, 75 bp, Homo sapiens
ctcgcccgccgtgagcgcccggagcggtccgcgagccaccgaggcccaggtcttgagagctgatgacaataacat

SEQ ID NO: 696784 - DNA, 75 bp, Homo sapiens
ggaaaactgggccaaagcagtgaaacgctccatgaattgattggagctggagtgagccttccaggaattttggct

SEQ ID NO: 696785 - DNA, 100 bp, Homo sapiens
gcccagcgggagtcgcggaacagcaggcccgagcccaccgcgccgggccccggacgccgcgcggaaaaggtgtctgcttttggggcagagttttcatcgg

SEQ ID NO: 696786 - DNA, 75 bp, Homo sapiens
aaaccagtcacccaagtgcattgcctttggaaacgagggccatgaaatgacaagcattggactgctacttggtgt

SEQ ID NO: 696787 - DNA, 100 bp, Homo sapiens
atgaagccagtcctgacaatgggcagaacgaattcagtgatatcattaagtccagatctggatggacaaccggaaattttctacacattttggaattcag

SEQ ID NO: 696788 - DNA, 83 bp, Homo sapiens
agatgagattcagaagatgcagttttaaaatcaaagatgggaaaatcggagaaaattgcccttccccatggccagcttgttca

SEQ ID NO: 696789 - DNA, 90 bp, Homo sapiens
ggatccccaacggggaggccaacgtgaagaaaagtctgggccaacggtcacaaaagttgtcactgttgtgacaaccaaaaaagcagttgt

SEQ ID NO: 696790 - DNA, 83 bp, Homo sapiens
cgcagactccttctccagcatgggctcgcctgtcaacgcgcagccgcttacaaacacgcagatggcaagaagattgatggcag

SEQ ID NO: 696791 - DNA, 100 bp, Homo sapiens
cccccagagcggagtcccagcgcggcaggcgcagagacagggcagggcattgttcatgcactgaccgacctcagcagccccggcatgacctcagggaacg

SEQ ID NO: 696792 - DNA, 100 bp, Homo sapiens
ctgaacagcacagagcccctcgtgaaggagtatgctgcgtttgtgctgggcgctgccttttccaggttatgaagacagtatggagtttccagaccatagt

SEQ ID NO: 696793 - DNA, 76 bp, Homo sapiens
caacatggcagacattgacaaatgggaatttcttagccataggctcacatgacaactgcatctatatatatggcgt

SEQ ID NO: 696794 - DNA, 82 bp, Homo sapiens
gttcagttgtggcggttgctggtcagtaacagccaagatgctgcggaatctgctggttgttaaaattacacactgtcctaca

SEQ ID NO: 696795 - DNA, 83 bp, Homo sapiens
aatgcaacttgaaagccttggaattttaccagatcgaatctgggccaaatagaaagctccataatgggagaagtaaagaacaa

SEQ ID NO: 696796 - DNA, 99 bp, Homo sapiens
atgaggcagaaaaggagcacagagagttcagagcaaaaactaacagggatcttgaaattaaagatcaggtcaaaatgcagatcttcgtgaaaaccctta

SEQ ID NO: 696797 - DNA, 82 bp, Homo sapiens
cagagtcacacacggtcctaagagctgggcaccaggaagcgaaggctgtttttgaaatcatgaatcctgtttatagtcctgg

SEQ ID NO: 696798 - DNA, 75 bp, Homo sapiens
caggaatgcccggtgctgacggacccccgaagctccaccatgaggcgaggtggatggaggaagcgagctgaaaat

SEQ ID NO: 696799 - DNA, 101 bp, Homo sapiens
cgggaaggcggcggccagcgggcagccgcggcccgagatgcagtgcccggccgagcaaatgaagaaggagccccacaggaaggaattctggaagatatgcc

SEQ ID NO: 696800 - DNA, 100 bp, Homo sapiens
gcaagatcaccgtgacatccgaggtgcctttctccaaaagcccctgcagatcaagtcagtagtggcaccagagcatgtgaagggctacatctacgtggag

SEQ ID NO: 696801 - DNA, 50 bp, Homo sapiens
aaagtatcccacatgacgagtgctgatcgggctgctgaagactgcgcggc

SEQ ID NO: 696802 - DNA, 101 bp, Homo sapiens
ctggaagcccttcctggtcaacatgtgcgtggctacggtcctcacggccggcgcttacctctgctacaggccaaatgatttctcagtatcactaaaagcac

SEQ ID NO: 696803 - DNA, 76 bp, Homo sapiens
ggaaacctgatgatctcagaagggcattttgcatctgaaaccatacgggatgttttagaagaatgtatgtctcttc

SEQ ID NO: 696804 - DNA, 100 bp, Homo sapiens
ttccctcagcacacagaggatgatgctgactttgatgaaggtcctcttcctgatggatgggaacaagccatgactcaggatggagaaatttactatataa

SEQ ID NO: 696805 - DNA, 75 bp, Homo sapiens
caagattacaggaatttcagaattttgaacaaatctttgagtttttcagttatgggacaaaaatattatatcaaa

SEQ ID NO: 696806 - DNA, 100 bp, Homo sapiens
aggtgtacatcgtgcatggcgtccagcacttcccggagactggaccccaaggaacccctgggtaaccagagagcagcttccccaactccgaagcaggctt

SEQ ID NO: 696807 - DNA, 50 bp, Homo sapiens
aacagattttaagccaccggctaaaagagacagagtctcgctgtgttgcc

SEQ ID NO: 696808 - DNA, 75 bp, Homo sapiens
gggacaccccggaagctgggaaatgaggcacagagctttggcctgctggatcccaaactctgctacctgctggat

SEQ ID NO: 696809 - DNA, 76 bp, Homo sapiens
catcttcctcctgtgcaccctcttcatcaggagcatcagatccatgctgctgctgactcggagccccacagcttgg

SEQ ID NO: 696810 - DNA, 75 bp, Homo sapiens
ctccagggaaggcactcaaaagtggggggcaggaaaggcgttcaatgtcatcaatggcggttctcatgctggcaa

SEQ ID NO: 696811 - DNA, 98 bp, Homo sapiens
atgccacgtggcccaggagctgcacttcattgaaaaggcccacacgctgatcctgcagcctccctccgagaaagtgtatcgcattaagttcaaggaga

SEQ ID NO: 696812 - DNA, 125 bp, Homo sapiens
gtaaagttcaccttgaattaaaactgaatgaactgataacggagaatggaactgtatgccagcagcttgttgtacagataccatacttgcagagctccttcagatacataaagaacacattgtag

SEQ ID NO: 696813 - DNA, 99 bp, Homo sapiens
gccatgtgactgtagtccacatggagctctcagcataccgtgcaacaggatggctgcagctcctccaagttactgttttgttgccttccctccacgtgc

SEQ ID NO: 696814 - DNA, 75 bp, Homo sapiens
gaaaatctgggctaagtgctggcaagagcgatgtctactacttcagtgttaagggatcagatcttgatcctgaag

SEQ ID NO: 696815 - DNA, 100 bp, Homo sapiens
ccggcagctctggagactcctgctgtcacgtcacctggcccctcaccatcaccatcctcatctctcttgggaaatggccagcctcaaacgacaattcacg

SEQ ID NO: 696816 - DNA, 100 bp, Homo sapiens
tggataaatcccgaaaaggagaacttcttaagaagagtgtacgaattggagcaatgttggcttatacacctctggatgagaagagccttgctttattact

SEQ ID NO: 696817 - DNA, 78 bp, Homo sapiens
cccagatgcccaccgggatggagaaggaggaggaatcgcactggaagatcaattcttttatcatccatactttagagg

SEQ ID NO: 696818 - DNA, 100 bp, Homo sapiens
caccccggaagctgggaaatgagggtatctcattaggtaattcagaggcagacagacaattgctggaagctgcaaaggctggagatgtcgaaactgtaaa

SEQ ID NO: 696819 - DNA, 100 bp, Homo sapiens
gtcagccaagatccgagtaccatttttacgtcaggttgttcccattagtaaaaagcatttcagatcccccagaccagatgacctatcttccttccagctc

SEQ ID NO: 696820 - DNA, 83 bp, Homo sapiens
atgttctgcacctcaggagggaattcagcctcagtgatgtccatgaggtgtttcccattaaacactaccaggacaaaatcagg

SEQ ID NO: 696821 - DNA, 75 bp, Homo sapiens
ggcggtcgggatccgctgcgcgagctgtctcggtcccacgtgtgcgtggaagaagttgttccgaatgtaattgaa

SEQ ID NO: 696822 - DNA, 53 bp, Homo sapiens
tgatcttctacgagatggcggaaaagttcctggagtttgaggctgaggaggag

SEQ ID NO: 696823 - DNA, 100 bp, Homo sapiens
gtctggtggaaaaacaagcccaagtggctcctccagggcatctaggtgcgcatggctgagatggtgtccatgggtgtggggaacaaggccttccgagaca

SEQ ID NO: 696824 - DNA, 101 bp, Homo sapiens
acgcctggaacaaggaccgcaccccccaattatacagaaatccgacagtactgcaatcactggcgaaattttgctgacattgatgattcctggaaaagtat

SEQ ID NO: 696825 - DNA, 82 bp, Homo sapiens
ataataatgaagttaaaagagcagcactccaaggattcctacaggaagcaagtagtaattgatggagaaacctgtctcttgg

SEQ ID NO: 696826 - DNA, 134 bp, Homo sapiens
cttctctgcattttgtccacatgagaggattacctttccaagccaatgcccaagacattataaacattgccagtagaaagccaacagacggtgcttcctcatcaaattgtgtgactgatatttcccaccttgtc

SEQ ID NO: 696827 - DNA, 78 bp, Homo sapiens
acgctccagtccgagcactttcagctctgcaagattgtagctgtctgcagagaggcagctcttctggctctggaagaa

SEQ ID NO: 696828 - DNA, 75 bp, Homo sapiens
atacagaatgcctatgaccggcgtcgagaatttcaactgtcttattgccagcagttttgaagatgactcccgtgt

SEQ ID NO: 696829 - DNA, 50 bp, Homo sapiens
caacattcagacccatttccagtcatgaacatttgaagacagtgatttgt

SEQ ID NO: 696830 - DNA, 152 bp, Homo sapiens
aaagaagatcctgatagtttcacagtgcgggcactactgaaggccacgcatgaaggcttaaatgcacacctgaagcagggtgactgtcgttcctacagttacgtgtgtggaatctccagtaaagatgaacctgactgggaatcacttatttt

SEQ ID NO: 696831 - DNA, 100 bp, Homo sapiens
aaagtagacaggactaaactgaagaagacacctactgaggctgacgatacctggcggattgttgatggacctgggaaagtgatgtggcttcagggattac

SEQ ID NO: 696832 - DNA, 85 bp, Homo sapiens
ttacaatagcatacattatgctgccgcctatgggcacaggcagtgtctggaattgggtatttgaagtataccatacaactgtttt

SEQ ID NO: 696833 - DNA, 90 bp, Homo sapiens
aacttcactttcttcattcacaatcccaagcgccaggaccttgaagttgagcttgtgaaaaaacagttgaagaagcacctttcaggagag

SEQ ID NO: 696834 - DNA, 90 bp, Homo sapiens
cgctccagaagcttcactttggcctcaggagtgcaagtagctgatgaagtatgtcgcattttttatgacatgaaagttcgtaaatgctcc

SEQ ID NO: 696835 - DNA, 100 bp, Homo sapiens
caacacggtcctgtcactggcccgctccctggcggtgcagagaccagcatccttggagaagctgccgcccctccctgtgtccttccaagaagtgccacat

SEQ ID NO: 696836 - DNA, 75 bp, Homo sapiens
tcacctcgcaggagccctagggggtccattgtagggggagaaagaaatattcaggatttaaagcagctgctctaa

SEQ ID NO: 696837 - DNA, 75 bp, Homo sapiens
cgggactcaagtacaactcccggcacgaggaattaaaccatttcagtgtgaccgctgtgggaaaaagttcaccag

SEQ ID NO: 696838 - DNA, 75 bp, Homo sapiens
caccaggcgacgatattaaaaactctcctggccagtcacggatgataccatcggggaccttaagaagctgattgc

SEQ ID NO: 696839 - DNA, 98 bp, Homo sapiens
tatgtgaaaacatagtggcacagtctgtcagcccgatgcatatgacatgatggttcgcgagcttggctttgaaatgaaggcgcagccctctaacagga

SEQ ID NO: 696840 - DNA, 101 bp, Homo sapiens
tatggcgtggtggcccagtactaccggcccctgcatgaatccagcactacgccctgccctctactgactggaggcaggcctctgcctactttagaagttaa

SEQ ID NO: 696841 - DNA, 90 bp, Homo sapiens
tccgtctcttcctccctacccagcatccctgggggaaagccgtggacccaagtggagagattgtggaactggcgaaaggtgcatgtccct

SEQ ID NO: 696842 - DNA, 100 bp, Homo sapiens
caaagataaaactcctgcccctcttcaacacctggacaccttgttagatggaacctacaagcagattacggtctttggtcaaacaattagagagagggga

SEQ ID NO: 696843 - DNA, 98 bp, Homo sapiens
tccccagagcctcagtttgtgcaggacaccgacatggaacagggactcactgggggtggtttacatcttggagaaaaaacattctcgagcagcaaccg

SEQ ID NO: 696844 - DNA, 90 bp, Homo sapiens
ttttgtttttgtttttgtttttgtttttgagacggagcctcgctctgtcctccaggctggagtgcagtggcgcgatctcggctcactgca

SEQ ID NO: 696845 - DNA, 100 bp, Homo sapiens
catttgctgtctctcaggcccagatgacaccaagcccatctgaaatgttcattccggcaaatgtggttctgaaatgaagtctctattatctgggggaatg

SEQ ID NO: 696846 - DNA, 100 bp, Homo sapiens
ctccccaggggagttctctgtgtctgtgaagtgacttaagagattaaaattaatttggttgctgttggttctgaacaaataatgagttcttttatttgag

SEQ ID NO: 696847 - DNA, 96 bp, Homo sapiens
ttgattgaaagagaaaacatggaactagaagaaaaggagaaggcagagaaaaagaaacgaggaccaaagccttcacaaaagagcagtggctcaggc

SEQ ID NO: 696848 - DNA, 100 bp, Homo sapiens
ggctccctggcccgtatcctgcagcacttccactctgagagcaggtcaaggccaacctgtcagaggtgcttgtgtccagtgtcctgggggtcaacgtgac

SEQ ID NO: 696849 - DNA, 50 bp, Homo sapiens
cccggcaaactccttccacttcaagggcaaacttgaagataaatcttttg

SEQ ID NO: 696850 - DNA, 97 bp, Homo sapiens
cttctgcaacaggaggacattgaaaataagatggaacccatccacataaggatttgaagcattcattaccatctggacttggtctctcagaaaccca

SEQ ID NO: 696851 - DNA, 50 bp, Homo sapiens
cttccatcaatcatatctcacagacctaaggattgtcttcggtctattat

SEQ ID NO: 696852 - DNA, 75 bp, Homo sapiens
gggtgaggatggttcagtacaaatagcaggtaactcacgtagtgctccacctacacgagggcccccgccatctta

SEQ ID NO: 696853 - DNA, 76 bp, Homo sapiens
gagcaggaagcggctgtcaagtcgcagcagctgtcgattcggcagaccgaagtcctcggcccacttctgcacctgc

SEQ ID NO: 696854 - DNA, 101 bp, Homo sapiens
agatactgggaaatccatagctaagatgccaggaccccctgaaagcctagacatggatatgggccctcacattttccaaacctgtccatctgctaactatt

SEQ ID NO: 696855 - DNA, 101 bp, Homo sapiens
acacattctgcaaggccgtggaaacaaagggaggaactgtttgtagccctcgtccagacgccccaaacaaacaatgacatggcagagcttctcctcgggga

SEQ ID NO: 696856 - DNA, 100 bp, Homo sapiens
ggagattggtgcagagatggcattacgaacctttggccacttgcgtgagtgcatctccatccacgttggccaggctggtgtccagattggcaatgcctgc

SEQ ID NO: 696857 - DNA, 101 bp, Homo sapiens
tcgtcggaggacccggttgccatggtgaaggaaaaagatctttaatctcatgaagtacgacagctacagccgcttcttaaagtctgacttgtttttaaaac

SEQ ID NO: 696858 - DNA, 90 bp, Homo sapiens
gatcccggagatcgcccgccatggctttacttactgcggccgcccggctcttgggaaccaagaaaagccaggactctatttgaaaaaaat

SEQ ID NO: 696859 - DNA, 100 bp, Homo sapiens
ttgctgttggctggagtggttccttaaatgtcgaagaaggtgtaattgcttactcggtcatcgtgggagcactgatggcaagtggaaaagaagtagcagg

SEQ ID NO: 696860 - DNA, 75 bp, Homo sapiens
gaacagttttttctaatggctattcaagaatttgaaagacatattggctgacctgatacctaaggagcaggccag

SEQ ID NO: 696861 - DNA, 102 bp, Homo sapiens
ctgctgcacattaggttgcagtatgtggccagttatttgcctcagtaaaagaaacaaattggagctctggcagatcagcatatcattcatgtggcatgtggc

SEQ ID NO: 696862 - DNA, 97 bp, Homo sapiens
tacaggcagctctgaagaacccccctatcaacaccaagagtcaggcagtgaagaccctgcacttgatggaccagctggcaccacccagatcaataaa

SEQ ID NO: 696863 - DNA, 50 bp, Homo sapiens
aaggattccaagtaactcttatttggcagactgccagattcacttacagc

SEQ ID NO: 696864 - DNA, 100 bp, Homo sapiens
ggggacattattgcgcgtggaacggctgcttttggaaggaaacccttttccaaagagaaatgaagaagaaaactgtatgtaccctaaatatgggagataa

SEQ ID NO: 696865 - DNA, 82 bp, Homo sapiens
ccatccacacatcataaagctttaccagaatagcattcctttcgaacaccacggcaagtagctgctcgtctcccatcggaag

SEQ ID NO: 696866 - DNA, 100 bp, Homo sapiens
ctcggagcaaaacagatcttgactgcatttttgggaaaagacagagtaagaagactcccgaggaaaaccagtagattcccagacatcgcgaagtgaatct

SEQ ID NO: 696867 - DNA, 100 bp, Homo sapiens
ccgcagccagggcatccccttcctggagtataagcacttcgtgacccgcaccttcttccccaagattcctggtcgggtggcttccagtggtcttcagtct

SEQ ID NO: 696868 - DNA, 99 bp, Homo sapiens
gatgttcgtcaaagccggccagagccaagacttggctctttgtgacagcactattcctgatcagagaactccagttgcttcaacacacagtatcagtag

SEQ ID NO: 696869 - DNA, 83 bp, Homo sapiens
cgagtgcagaagatctgggtgcccgtggaccacaggccctcgttgcccagatcggccctccaggcactgaagcgtaagaagag

SEQ ID NO: 696870 - DNA, 49 bp, Homo sapiens
atcttctccctcccttgcctcaggtagacatagctgacattgagaatga

SEQ ID NO: 696871 - DNA, 82 bp, Homo sapiens
tccagggggctcccgggtcatcagccactacgccgggcaggatgccacgccgcggcgagtcctttgcacatgttggcaacac

SEQ ID NO: 696872 - DNA, 107 bp, Homo sapiens
agatcccaggcggtgacagagtggagccatggctagaggtgccagtgacggggtggcccgtgagctgatgacgaggactggcttttaatccttggtggtgattaaga

SEQ ID NO: 696873 - DNA, 75 bp, Homo sapiens
gttttgatttgcatttctctgatggccagtgatggaaggaacacacaagtagttatctttcaggctgtctttgaa

SEQ ID NO: 696874 - DNA, 100 bp, Homo sapiens
gtggaatattaccagtcagaggcggaaggactcctggaatgccacaaatgcaaatacttgtgcactgggagaggttgggagccacgtgtaccagtgtgtg

SEQ ID NO: 696875 - DNA, 98 bp, Homo sapiens
tcctatccttacccgacctcagatgctcccttctgctcctgacccatcctcatgccaacaaactacccttgaaggattctttcacttacgaggactac

SEQ ID NO: 696876 - DNA, 74 bp, Homo sapiens
acaaaacagcagatttcccaagagcagcggaaaatgatccagtcacagaataatgcatatactgccatgtcaga

SEQ ID NO: 696877 - DNA, 51 bp, Homo sapiens
gccatgcttcaggcagctgtctgtgaagtgagaaaaactggaagcttgaag

SEQ ID NO: 696878 - DNA, 83 bp, Homo sapiens
atcttaccttgcccaccaacttcagagatttgtccaaggatcgcctggagcatctgcggaggcagtgtggcccccacgtctcg

SEQ ID NO: 696879 - DNA, 90 bp, Homo sapiens
gggggtgctgcggccgtcctgggggccttcagagccgcaatcaagcaggagatcaaagacgctggccttcagacctgatcagactcccag

SEQ ID NO: 696880 - DNA, 75 bp, Homo sapiens
actgtgcggcacatcgcagacctgtcaccaggagacaagctgcatcttcctcccgtgaggctggccgagctccac

SEQ ID NO: 696881 - DNA, 100 bp, Homo sapiens
atccccggagcgtcacatcactttccgatcacttcaaagtgtagttttggatgttgggtgtggaactggaattctctctatgtttgctgctaaagctggg

SEQ ID NO: 696882 - DNA, 75 bp, Homo sapiens
tcactctgggactcgtggggctgcagcaccgttgcatccaagaattgatgcccggagagctgatgaaaaccttgg

SEQ ID NO: 696883 - DNA, 100 bp, Homo sapiens
tcatcacatcatttcactgtggtgtggtggacacaggcctattcatcaacatggctgagagagtctactttgggatgcaggatggctcagtgaacatgag

SEQ ID NO: 696884 - DNA, 100 bp, Homo sapiens
cggaaggacaccaagatgcggatccgggcctttccggggatgtggtcctgtctggctgtagcaccctgagcctgctgactcccacactgcaacagctgaa

SEQ ID NO: 696885 - DNA, 75 bp, Homo sapiens
aagacaactcacatgtaatacaaggaaaatgtttataggaggccttagctgggacactacaaagaaagatctgaa

SEQ ID NO: 696886 - DNA, 76 bp, Homo sapiens
aacgaataacatgatggaatatttacatcatgctgatgacagcttcctggtcctcaccacagatggaattaacttc

SEQ ID NO: 696887 - DNA, 82 bp, Homo sapiens
aatccgaaagattcgggccagagacgacaacccgggcctccgaggcgggcgctaatattgacacctgctcagaagaccagag

SEQ ID NO: 696888 - DNA, 89 bp, Homo sapiens
gtaatcaaggacttcatgatccagggcggagacttcaccaggggagatggcacaggaggttccctgggccccctgctggatggtacagc

SEQ ID NO: 696889 - DNA, 75 bp, Homo sapiens
ctagtcagcttcctccagatggttcgggatgagtatcggcaggactacgatgctgggagaggaggctatggaaaa

SEQ ID NO: 696890 - DNA, 101 bp, Homo sapiens
tgcttggccactacaagttcggcatgagcaagaaggagatggagcagcgacctggccctgcgcaactgcctgctgacctctgacctgaccgtgcgcatcgg

SEQ ID NO: 696891 - DNA, 100 bp, Homo sapiens
aggcctcgctgccaccagatcccagcaaggtgtcccgggagagcatcttcaacaaaatgaacagctctaacctggcctgtgtcttcgggctgaatttgat

SEQ ID NO: 696892 - DNA, 82 bp, Homo sapiens
gctttggagtcaacactgaaaatgaagatcacctggccaaggactattggaaatgcacttcatgcaatgaaatgaatccccc

SEQ ID NO: 696893 - DNA, 75 bp, Homo sapiens
gccgccgagtcgcgcggaggcggaggcttgggatgcatggtcatggaggctatgattctgattttagtgatgatg

SEQ ID NO: 696894 - DNA, 75 bp, Homo sapiens
atgaatatccagtttgagccatcggatctaagatccaaaagggctgcattccagtatggtatcaaaatgtctgaa

SEQ ID NO: 696895 - DNA, 50 bp, Homo sapiens
gcgcccggagcgccccgccgcgcacagaaatctggcattttttaaagttt

SEQ ID NO: 696896 - DNA, 75 bp, Homo sapiens
ttggaccttccggagcttctcagaagacagagggttttcttttgaggtaatcattaccaaatgaggaggaaagga

SEQ ID NO: 696897 - DNA, 101 bp, Homo sapiens
agaactcataaacttggcttcctcgcttctgctcctcagacagttttaatggaccagtctcgcttccacgagctccagttgcagctggaacaactgaccat

SEQ ID NO: 696898 - DNA, 74 bp, Homo sapiens
ggtccgggtccggagcgccacaatgttcccttcggagaggcagctccttcacattcttaacacctggccccaac

SEQ ID NO: 696899 - DNA, 82 bp, Homo sapiens
ggcgccagttctccggcgggaaggaaaaccgcgcagagaggtgtcagctgtgatgcatgtttaaaaggaaattttcgaggtc

SEQ ID NO: 696900 - DNA, 75 bp, Homo sapiens
gcgcaggtcctgcccccagatactctgcccaaccgcacggtcaccctgaacttagtgatttggcccgtgaccctc

SEQ ID NO: 696901 - DNA, 82 bp, Homo sapiens
taaaaacagaacctgagaagaagtcacagtcaaccaaggctggaggcaaagctggaaaggacagtgggaaggccaaggctaa

SEQ ID NO: 696902 - DNA, 75 bp, Homo sapiens
cagagaagtagccaagccaacagagcctgatgagcatgaaatacaggtatcaggatgaagatacacctcctcaag

SEQ ID NO: 696903 - DNA, 99 bp, Homo sapiens
ggaggagggcgagcaggaccgacctcgggcacccgggccctgggaccccctcgcgtccgcagcaggaagcagagcaatgggagagaagcagaatattcg

SEQ ID NO: 696904 - DNA, 98 bp, Homo sapiens
aacaccaacatcgatgggcggcggaaaatagcctttgccatcactgccattaagcaagccctggatgaaaacatggacctcttggaaggtataactgg

SEQ ID NO: 696905 - DNA, 96 bp, Homo sapiens
gtcaaaaccaaacaccctcagctccacattgagagcaaaatctacaagatgatgcagggaggaggtattatccatgcagcagaagagaaggactgg

SEQ ID NO: 696906 - DNA, 100 bp, Homo sapiens
gtttgtttctctgtatggcacagaagaatatttgtcagttcatcagttacttcctcccacttaccgagatgtttggctggagtggagtgatgcagaaaag

SEQ ID NO: 696907 - DNA, 100 bp, Homo sapiens
agcagaagagaaagccagttatccacggactggaagatcaaaagaggagagttttcaacgtcctttatcccatgcctgccgaccagcggagacatgtcag

SEQ ID NO: 696908 - DNA, 100 bp, Homo sapiens
ggcggcggcggcgcgcgggggcgacgcgcgggaacaacgcgagtcggcgcgcgggacgaagggctcaagggttcttgttgatgcacgagataagcttggc

SEQ ID NO: 696909 - DNA, 75 bp, Homo sapiens
gaatattcccaagtccttcacccgggtcctgaacgaggctgtgggggccctgatgtaccacaccatcactctcac

SEQ ID NO: 696910 - DNA, 58 bp, Homo sapiens
ccagctttgtcacttttgaagcgctggagattatcaaggaggtccctccaccccctgc

SEQ ID NO: 696911 - DNA, 83 bp, Homo sapiens
actctctctttctggcctggaggctatccagcgccgtaagttcatcatcgccaacgctcgggtggagaactgcgccgtcatct

SEQ ID NO: 696912 - DNA, 75 bp, Homo sapiens
ctcaggttgccgatttaaaattgcaactgaagcaaactcagacagatccagtgcacattgcaggacgtcggctcg

SEQ ID NO: 696913 - DNA, 75 bp, Homo sapiens
gagggatgtgtcacccttccctgtgaacgcgggcatgtttgggcttcctgtagacacccttttcctgcgcaacag

SEQ ID NO: 696914 - DNA, 90 bp, Homo sapiens
gggcgccctccgccacgcagccggccaccgccgagacccagcacatcgccgaccaggactccatccccgtgtctacctccctccttggag

SEQ ID NO: 696915 - DNA, 100 bp, Homo sapiens
gatcatcttgggagtgatttgcgccatcatcctcatcatcatcatagaaaactgcctggagcagttggagatgggatttccacggggagcccagccagcc

SEQ ID NO: 696916 - DNA, 98 bp, Homo sapiens
cgctctcgcttcgtcctacacttgcgcaaatgtctccgaccagcatctcagacatgtcgaaaaagatgttttgatccctaaaataatgagagaaaagg

SEQ ID NO: 696917 - DNA, 78 bp, Homo sapiens
ggattccaagtaactcttatttgggaatgaggtgattgcagtggattggaagggcctgaaggatgtcgatcaaatcaa

SEQ ID NO: 696918 - DNA, 100 bp, Homo sapiens
gtttgtggatgacaccaacgtctacagagtgactattcacaagccaaaatgaagtttaatccctttgtgacttccgaccgaagcaagaatcgcaaaaggc

SEQ ID NO: 696919 - DNA, 100 bp, Homo sapiens
ggatggaaggaggagcaagtcaatagaagagagagaggaggaatatcaaagggtccgagagagaatatttgcccgagagagatggggtctcgctatgttg

SEQ ID NO: 696920 - DNA, 50 bp, Homo sapiens
aggaccccctggacttccaggactttctgtgcccttaaagatagccgttt

SEQ ID NO: 696921 - DNA, 100 bp, Homo sapiens
ggagaactaaatgggagaagaggaatgttccctgacaatttcgttaagaatacagattctgttcatcttgctctgaaattaaataattctgaactcatgg

SEQ ID NO: 696922 - DNA, 82 bp, Homo sapiens
caaatttccattcactccacctttagagtcattcaacttatgcttctacacttcccaggcttttagcaacctgtggctgtgc

SEQ ID NO: 696923 - DNA, 100 bp, Homo sapiens
cttcaagggcccggctctatgatgttgttgcagtttttccaaagacagaaaagctttttcatgaaaccacacctctagctgaaaaccaagatgaagaccc

SEQ ID NO: 696924 - DNA, 75 bp, Homo sapiens
gcacctggagaccttcgagcaccccaacgtggtcaggcgatatgagtctcatccagtctgtgctgatctgcaggc

SEQ ID NO: 696925 - DNA, 101 bp, Homo sapiens
cacttcttcacggaccagtttcagttcgccgatgggaaacccggagaccaaatccttgggccgttgctccagggagaactgcaaatatcttcatccacccc

SEQ ID NO: 696926 - DNA, 100 bp, Homo sapiens
cttcagtcctagtggcattttcggagcgtttcaaagagcgctccattgccccgcccacagccactactccatctgcactcgcacctgccagggatcctgt

SEQ ID NO: 696927 - DNA, 74 bp, Homo sapiens
ctggctaagctcatcattgttactggagattcctgtcaacgtccgattctgcctcgaaggcatggaggagtcag

SEQ ID NO: 696928 - DNA, 80 bp, Homo sapiens
cttggagctcaaggtgacaggccagagcccaggtccccaggacagtgcaggcccgatgagagaaagggaaagttaaggat

SEQ ID NO: 696929 - DNA, 82 bp, Homo sapiens
ctttcgtcaaacacagtttcgagacttattcgtctaatggaagagatcatgagtgagaaggagaataaaaccattgtttttg

SEQ ID NO: 696930 - DNA, 100 bp, Homo sapiens
actggaagaggcatgccagaggtagagcagatttcagcaacgtccctgatatcacaacaggtctgaaaaggagtcagacagatggcactctggatcaggt

SEQ ID NO: 696931 - DNA, 97 bp, Homo sapiens
gtgtcctgctcgccgtccccgccatgctgtctctagactttttggacgatgtgcggcggatgaacaagcggcagaagtgtatgctgacttgtaaagt

SEQ ID NO: 696932 - DNA, 75 bp, Homo sapiens
agccgatcgccgcggggcagttcgggccggctgtcctggcgcggaaattcgaaatgagtcccatgactatcctca

SEQ ID NO: 696933 - DNA, 83 bp, Homo sapiens
cgctcctaagcctgcacagccgcggcggcagcagcagtgagagtggacatcctcatcatggatgatgacgacgtccccagctg

SEQ ID NO: 696934 - DNA, 101 bp, Homo sapiens
agaattatcatgatcttcagaagctatgaagctactgaatctttacatcaaacgtgcacaaacaggttctggaggagctgatcccactactgatgtttctg

SEQ ID NO: 696935 - DNA, 75 bp, Homo sapiens
acgataccgaagcgggctgtgtgccccttctccacccagaggtggtttcagacaccctcacaggttttctaccat

SEQ ID NO: 696936 - DNA, 82 bp, Homo sapiens
aacagcaatgggaacgccagtatcaacatcacggacatctcaaggaatatcacttccatagccaaggattgtcaccagtgaa

SEQ ID NO: 696937 - DNA, 95 bp, Homo sapiens
gatccacacagctcagaacagctggatcttgctcacactctttcaagagaagcttccttgatgtccaacatcacagtcacatacagagatggccg

SEQ ID NO: 696938 - DNA, 100 bp, Homo sapiens
gccagccagccagcgccttcatcctggggctgcgatgggattttgcttatgtagcaagagataaagatacaagaattttgaaatgtcatgtatttcgatg

SEQ ID NO: 696939 - DNA, 74 bp, Homo sapiens
tgacttcgaggaattctttctaaaaggccggggtcagaaagaaaaaagagggtcccggggccgaggcaggagga

SEQ ID NO: 696940 - DNA, 100 bp, Homo sapiens
cgagctggacccggaccggttttgggtgcagtcagcctcagtttccaaagccggaaaaggatcctctagtagccacggtgtggcagctgctctgaaccag

SEQ ID NO: 696941 - DNA, 75 bp, Homo sapiens
ctttaatacagaaccagcatataaacctgaaaattgggatgtatggtatgaaagcaagtttgatgactgtgataa

SEQ ID NO: 696942 - DNA, 124 bp, Homo sapiens
gacatgttcacgcacgggatccagagcgccgcgcacttcgtcatgttcttcgcgccctgggggatatgagactttctactcggaatatcctgagtgttgcgtggatgtaaaacccatttcacaa

SEQ ID NO: 696943 - DNA, 50 bp, Homo sapiens
gccgctgcagctgccgcgcgtttacagaatgtctgaaggggacagtgtgg

SEQ ID NO: 696944 - DNA, 73 bp, Homo sapiens
gttcggctgcgcgagcggagggaggcggacgcaaacatgcagatctttgtgaagaccctcactggcaaaacca

SEQ ID NO: 696945 - DNA, 75 bp, Homo sapiens
cttcacccgggctccgctcttgccttctccacacttgtttggacccattccaacaatctcgtaaaacatggtgga

SEQ ID NO: 696946 - DNA, 75 bp, Homo sapiens
aattggaccaagagaacaatgggaaccagtctttcaaaatatgaaggtcaccgtgtccaaagggggcgaccggga

SEQ ID NO: 696947 - DNA, 100 bp, Homo sapiens
cagttaagctgcgctccgggagactgggactcttcaattaatctgacatttcacaaatccaaaattgccgtggatgaactctttacttcacttcgggata

SEQ ID NO: 696948 - DNA, 90 bp, Homo sapiens
cgcggctgcacaacgccttggcgctaatccgcctccgaaacccgccggtcaacgcgatcaggatatggtgcctgtcatagttgattactg

SEQ ID NO: 696949 - DNA, 75 bp, Homo sapiens
ttaaactcttggcatttggctttgcctttctggacacagaagtatttgtgacagcatatcgcacggatgactgcc

SEQ ID NO: 696950 - DNA, 74 bp, Homo sapiens
gcagatcccggaatgcctgaaccaactgttttgagatgatgtggaaacctgcctatgattttctgtatacctgg

SEQ ID NO: 696951 - DNA, 75 bp, Homo sapiens
ataaggacaagcctgtcattcctgctgctgccctagctggctacacagggagtctccggtggactgcagcgttag

SEQ ID NO: 696952 - DNA, 100 bp, Homo sapiens
aatcctcatggccacaaggatttggccaactcacccaggaagttggtgaaccatctaaagaagagaaggctgtggccaagtatcttcgattcaactgtcc

SEQ ID NO: 696953 - DNA, 90 bp, Homo sapiens
taaagacgtacgaagccgtcgccaagttaccctccgtctgcatgcccaccatcaaggtatgaggatggtagaagctctcgtcgaaccaga

SEQ ID NO: 696954 - DNA, 88 bp, Homo sapiens
gatcggcccaaggccagttctccgcaggcagattagctgatccaacccgaaggacaaactgtggctatgaatctggagatcatatgtg

SEQ ID NO: 696955 - DNA, 90 bp, Homo sapiens
cccacttccagatcccagaggagacagacatcggatggctgatcctccccggcgtgaaggtcatcatcgcacacaccgagaccaaaggac

SEQ ID NO: 696956 - DNA, 75 bp, Homo sapiens
cactagacagagccgggcctagcccagagacatggagagttgctacaacccagtcccaggtgtgacaccttcagc

SEQ ID NO: 696957 - DNA, 80 bp, Homo sapiens
agcggatacttatttgcctgtggatgaaaccctgattcctacagacatagggtacctccaactttccggggtttcagaag

SEQ ID NO: 696958 - DNA, 100 bp, Homo sapiens
gctgaaggctgcagccgcgaatgccgtagcacccaccaaggctccggatgtgttccccatcatatcagggtgcagacacccaaaggataacagccctgtg

SEQ ID NO: 696959 - DNA, 75 bp, Homo sapiens
agctgtccaagaacgcagacttgtcagacgatgccatggacaatattaccaggcagaaccaattctacgataccc

SEQ ID NO: 696960 - DNA, 87 bp, Homo sapiens
ttggagttttatcctagaggataaaggaaatctttgggaaagtcagtattttatatagcaaggcatacatcacagaaggaagccatg

SEQ ID NO: 696961 - DNA, 93 bp, Homo sapiens
caccgcactgtcgctgcccgcctgccctgaggagtccccgctgcttggatttttagactctgaggagcagttggagctaatccacattatgga

SEQ ID NO: 696962 - DNA, 100 bp, Homo sapiens
acagagatgacatgccagcccagactttcatagattatggagaagtctggcgaggaaggaatgcctgatcttgcccatgtcatgcgcatcttgtctgcag

SEQ ID NO: 696963 - DNA, 75 bp, Homo sapiens
ctctgtatggaatcagtcagaacgcgggggatttccttcaggccataggaaaaggatacagagtagagtttcatg

SEQ ID NO: 696964 - DNA, 50 bp, Homo sapiens
ccttggtggtctcaactgtggaaaccatattaacctggctgcagagccaa

SEQ ID NO: 696965 - DNA, 99 bp, Homo sapiens
tccagccaggagacatagtcatgcaaatcctgaaggaacccaaagtggctgcttctgttttgaatccctatgtgaagcgttccattaaagtgaaaagcc

SEQ ID NO: 696966 - DNA, 75 bp, Homo sapiens
ggcggcggcctcggctcttccagccaccccctctccagtctgctcagtactatactggcaattgctggagaagat

SEQ ID NO: 696967 - DNA, 75 bp, Homo sapiens
cgacaacgccttcatgctgctcacgcagctctgtgacttcctggagactcacttcctagatgaggaagtgaagct

SEQ ID NO: 696968 - DNA, 82 bp, Homo sapiens
ttggagctccacagaaggatgttaaagagacaagagagacacctccaacttcgacaaagagttcaccagacagcctgtggaa

SEQ ID NO: 696969 - DNA, 100 bp, Homo sapiens
ctgacacacctctcagagatgagccgatcagggaaccaggtgtctgaatacatttcaaatactttcttagatcagtacaatggaacatgaattttcaata

SEQ ID NO: 696970 - DNA, 74 bp, Homo sapiens
cagagtcagagttcacggagttcacagaggacgagaatggagatgtatgcatttcgattcttcatccgcctgta

SEQ ID NO: 696971 - DNA, 100 bp, Homo sapiens
gcacggtggcctcctcatccacaggtacaggtttgcagattccgccagcagcacagcaagctctacagatgagtggctctttggcatttggtgctgtggc

SEQ ID NO: 696972 - DNA, 102 bp, Homo sapiens
cggagcccagggccggatggacacccacaggtcggccctgcggacccggcaggtgactttgacctcacgcccaccatcttggattggttctcgatcccgtac

SEQ ID NO: 696973 - DNA, 75 bp, Homo sapiens
gttaagaaccttacaagcaatatgtggcgagttcgagaatccaggatgttgcttcagagtgtgaagtcaaatgca

SEQ ID NO: 696974 - DNA, 83 bp, Homo sapiens
gaacgaggcaaggagctaaagcagcgtgcgttcagccctggggctgtgacaaaccctgtgcccacgctgcctccactgccggg

SEQ ID NO: 696975 - DNA, 101 bp, Homo sapiens
accgacgcgatgaagcccagacctgcagggttcgtggataataaactcaagcagcgagtcatccagaaccctcggcctcaggaaagtcggacagtattcag

SEQ ID NO: 696976 - DNA, 100 bp, Homo sapiens
ttccagtaccagatcatcatgaccatgatcgtccataagaactgggtggtggaggcaatgcccagagctgtggcagccaccttgcagccgtgaagcacca

SEQ ID NO: 696977 - DNA, 99 bp, Homo sapiens
tgctgaacttaaaaagcagtctaaacctgtgaccacccctgaagaaattgcacaggtgaagctgtcagactttgggttctgcgcccaggtgagcaagga

SEQ ID NO: 696978 - DNA, 98 bp, Homo sapiens
aggtcacaaaagaagataagtccttccagaacattatgcgttgttataggactcagccgcaggcccggagccaggatgatcggctgaatgtaacagag

SEQ ID NO: 696979 - DNA, 75 bp, Homo sapiens
tgcctgcccaaagcaccgggactggagcacggagacctaccagggagcttcgagaacaactggaacatttacaag

SEQ ID NO: 696980 - DNA, 100 bp, Homo sapiens
atctgaatgctttggttgacagtgcggtggcccttgaaacaaaggatacctcgctagctagtgacaacactgcagctgaaggaggagttgctggatggag

SEQ ID NO: 696981 - DNA, 51 bp, Homo sapiens
atatgggtcgaccattccaaaaaaatcggcgtttctctttcaggattccgg

SEQ ID NO: 696982 - DNA, 80 bp, Homo sapiens
caagaggtgtcggaggtctcatctttgaactactgccggagcttctgccagaaaactttagaaactgttcctttggagag

SEQ ID NO: 696983 - DNA, 100 bp, Homo sapiens
ccggggccgccctactctggggcttcctgctccagctgtaatggaggggaaagttccagtcgcagcgctgagaagcgatcagctgaagaagaagctgccg

SEQ ID NO: 696984 - DNA, 83 bp, Homo sapiens
cagcctggtgcagatcatctacgacgagaaccggaggctgacccgcggctgattgagtccctctcccagatgctgtccatggg

SEQ ID NO: 696985 - DNA, 83 bp, Homo sapiens
ctggcaggagcagattccaaaggcacaggaagaagcttgcagcctggcagtgttgcccaggaggaggcagtggagttaagaag

SEQ ID NO: 696986 - DNA, 75 bp, Homo sapiens
taacttttccttggagagtcataacatatcactgactgtattgactcggagacaaaaagaggccaagaccaagag

SEQ ID NO: 696987 - DNA, 100 bp, Homo sapiens
gagagaggtggagtccggcccccgaaagagggaaagtacacaggaagatgctatgaaatttccatcttcccaatcttcccagccttccaggcttttaaag

SEQ ID NO: 696988 - DNA, 100 bp, Homo sapiens
tggggctgctcccatcattgatgtggtgcgatcgatgtccagctcgccgctgtccaagaaacgtcgcgtgtccgggcctgatccaaagccgggttctaac

SEQ ID NO: 696989 - DNA, 50 bp, Homo sapiens
gatgagatattctgctgagtggaaggaaatgggtcctgatgaatatgaag

SEQ ID NO: 696990 - DNA, 100 bp, Homo sapiens
aggctcggagaaacaggcgccgcgggctccgcgcccggccggacccgggcccgagggctgggttacgacccctacaaccctgagctgcccaagccccccg

SEQ ID NO: 696991 - DNA, 83 bp, Homo sapiens
cgcatcgtgcccctggagaacggagaggagcaggccgggctctcgccatgggtcactgtcgcctctgccacgggaagttttcc

SEQ ID NO: 696992 - DNA, 90 bp, Homo sapiens
ctgagatcaaatggcacttcattggccacctacagaaacaaaatgtcaacaaattgatggtatgacatgatgggaagaaatcagactgct

SEQ ID NO: 696993 - DNA, 82 bp, Homo sapiens
tgctcgacgtgctgtgcttactggtcgggtcggcactcttcaccctcccgagccctgcccgtctcggccccatgcccccacc

SEQ ID NO: 696994 - DNA, 74 bp, Homo sapiens
ggagagaccgccaagggctgtagtctgggtccgcgagcaagtgtgttcacaatgaaaccaagaatgaattggag

SEQ ID NO: 696995 - DNA, 100 bp, Homo sapiens
gtgttggaccgaattcgcaagctgggtttggacagaggagccaaaggccaaatttccactttcagcagttttatttcagctgttagcccgaagaaagaag

SEQ ID NO: 696996 - DNA, 74 bp, Homo sapiens
agtacagggataagagatgaagagacaggccaggtcaggctcaccaagcaggtcaagagcacctcacagctgct

SEQ ID NO: 696997 - DNA, 101 bp, Homo sapiens
atcagataagcttgacattacagccaagatggtgctgtcccagagacaacgagatgaactgtgtgatccctcacatccacaaatctctgattggaaagaag

SEQ ID NO: 696998 - DNA, 124 bp, Homo sapiens
cagcgatgacgttctacgctctccatcgggcagccagaggcccagcgtctccgatgacactggttcacaagtttttaaacagaaaccgggatcagctggaccctgctgtggtggagatgcttgg

SEQ ID NO: 696999 - DNA, 83 bp, Homo sapiens
ccaagacccacaccaccatgtcagtggctgacaagattttgaaaaagaaagaataccctctttatataaatcaaacctgccat

SEQ ID NO: 697000 - DNA, 91 bp, Homo sapiens
gagcctcagttggaagcagccgatccagcctgcggagcctgtggggcaggttgttcctggtcattgagtacgtcaacggcggggacctgat

SEQ ID NO: 697001 - DNA, 75 bp, Homo sapiens
aaggtggtctaccggcgcttcaccgagatctacgagttccatattggagctggagtgagccttccaggaattttg

SEQ ID NO: 697002 - DNA, 90 bp, Homo sapiens
gcgaggtggcggtgctgaggcacctggagaccttcgagcaccccaacgtggtcaggcatgtaaggaggaatcaagaagctgtgacatatt

SEQ ID NO: 697003 - DNA, 75 bp, Homo sapiens
ggctccctttggatgccagtgtcagttgtcaggagaaataaagtgtagtccttctgaaagccccttaatggaaaa

SEQ ID NO: 697004 - DNA, 74 bp, Homo sapiens
tctcgaccccttctgcccggcgcttcggcccgggccgctcaggtgcaggttatgaagacagtatggagtttcca

SEQ ID NO: 697005 - DNA, 90 bp, Homo sapiens
tgagcgagcgccggggccagcggagccggagccgccgggacatggaatgccagcagttactctgcagagatgacggagcccaagtcggtg

SEQ ID NO: 697006 - DNA, 74 bp, Homo sapiens
gattcacccacagcggggcggcggcggcggcggctgcggcccaatatagaattcagaaggagctggcggacatc

SEQ ID NO: 697007 - DNA, 83 bp, Homo sapiens
atgtgatgctggagaacttggctcttttaacctctctagcatttcagatctgctcggtagacctggtgcaccaccaccatgtt

SEQ ID NO: 697008 - DNA, 89 bp, Homo sapiens
actcttcagataatcagagtggaggaagtacagccagcagcaactcatgcagcaattccagaaccccgacttcccacccgaagtagagg

SEQ ID NO: 697009 - DNA, 101 bp, Homo sapiens
gtgcacctgcacacgcccccggcacctggtgcagacgccagaagtgagatttcagcagcagctggagcagctcaactccatgggcttcatcaatcgtgagg

SEQ ID NO: 697010 - DNA, 75 bp, Homo sapiens
aaattgggaaagaaagtggccttaaaacttttgaacagacacttctacaagcccatgcttcgacggggcagcagc

SEQ ID NO: 697011 - DNA, 100 bp, Homo sapiens
gcagatattcctccgagtagccaccccgcagaaggcgtgcgattcttccagcagatatgaagggatgcttgaagatggaaagaaatttgattcctcccgg

SEQ ID NO: 697012 - DNA, 100 bp, Homo sapiens
atttccagccttccaagctctactgtgacttcagagacactgccaagcagccttagccctagtgtagagaacaacatagacgtttgtcctgaatgtggtc

SEQ ID NO: 697013 - DNA, 90 bp, Homo sapiens
gaccatatgaaaagggtcgcctaatcatcgaatttaaggtttacaaagatgagcaggtggtggtgataaaggataaatacccaaaggccc

SEQ ID NO: 697014 - DNA, 100 bp, Homo sapiens
gtttccacatcggtcagaaaaagatgttttccacaataaaagccagtttgttccaccattcaaaggtaactcagtcatccatgaaactgaatacaaaaga

SEQ ID NO: 697015 - DNA, 100 bp, Homo sapiens
gatagcctctcttactaccactcacccgcagactccttctccagcatgggctcgcctgtcaacgcgcaggctctgcattagctgctaatgtatgtaaaaa

SEQ ID NO: 697016 - DNA, 82 bp, Homo sapiens
cgcaggaccgtggagaaggaggagaggcatggcggccttgaccagccagtgaattcggttccctcaaaattataaaggcagg

SEQ ID NO: 697017 - DNA, 83 bp, Homo sapiens
ctcgagatggaggggcggcaggtgtctgctccatctggacacaagcatctgacggtagaagagttatttggaacctctttgcc

SEQ ID NO: 697018 - DNA, 76 bp, Homo sapiens
gctaaaatgaatctgagcaatatggaatattttgtgccacacacaaaaaggtggttgtgtcaaaccgattggtgac

SEQ ID NO: 697019 - DNA, 97 bp, Homo sapiens
tcagcctgctggacggcgtggtggagaagctcagcgtcctcaagaggaaggaaaagcatacagcctgggccgggctgagtatgggcggctgggcctt

SEQ ID NO: 697020 - DNA, 90 bp, Homo sapiens
cagtcatcatccattaccacaaaattaggttgaatgcctttgagaacttgatgcataaaatttgcatgactcctcactcctttctggatc

SEQ ID NO: 697021 - DNA, 98 bp, Homo sapiens
ttcactgggcagccaaccataaagatccaagtgctgttcacacagtgagatgcattctgctgcaattctcattgcaagatcatcgcctccctggttta

SEQ ID NO: 697022 - DNA, 82 bp, Homo sapiens
gcagaacagcacactaatggccgagttcagcaagggtctccttggcagctgtattctggagtctggatgttgctctctaaag

SEQ ID NO: 697023 - DNA, 100 bp, Homo sapiens
cggaggagctgctgcagcagatgaaagagctcctgaccgagaaccaccagctgaaagaggaattaaggaatttgcaagagcaaatgaaggccttacaaga

SEQ ID NO: 697024 - DNA, 101 bp, Homo sapiens
ctgtgatcattcatcgagccattttgggatcagtggaaagaatgatagccattctttcagaaaactatggcggaaaatgagttatcattaccatgttggtg

SEQ ID NO: 697025 - DNA, 100 bp, Homo sapiens
tgggagaggttgtttaagattttgaatgttgttggaatgagatgtgaatggcagatggataaaggaagacgggcttttgttgtaacaccctgactttaaa

SEQ ID NO: 697026 - DNA, 100 bp, Homo sapiens
cagaaaatgacaacgatgacgatgaagatgttcaagttgaggtggctgagaaagtgcagaaatcgtctgcccccagggagatgcagaaggctgaagaaag

SEQ ID NO: 697027 - DNA, 80 bp, Homo sapiens
tcacccggctggagggcatcaagggacatgttgtcttaacagattttgggctttgtaaagaaggaattgctatttctgac

SEQ ID NO: 697028 - DNA, 85 bp, Homo sapiens
gaacatagaagaagaattctccagatgaacttggagcgtgatgcccagaagtgtgtgaactggtctgtgaccacaaagatgagaa

SEQ ID NO: 697029 - DNA, 100 bp, Homo sapiens
gtaaagcaatatttcgagcagtttggcaagccccctggccactgttctaggtgctgttgttctactaaacaaggaaacagtcaagagtcatcgaatacca

SEQ ID NO: 697030 - DNA, 90 bp, Homo sapiens
cggaggtactgcacctcctccgaggtcgccgcccactactgcaagaaatatagatcacagaagaactgcagcttcctggggagcagtttc

SEQ ID NO: 697031 - DNA, 83 bp, Homo sapiens
cttcacgcagaagttggcaggagcatgggcttcggaggcctatagcccgcagccttatgccagcctggaccatcttggaggca

SEQ ID NO: 697032 - DNA, 100 bp, Homo sapiens
cgaggcgggtggatcacttgaggaagatgaagtcctcagtacattctgaagaagatgattttgttccagagctacatagaaatgtacaccctcgagagcg

SEQ ID NO: 697033 - DNA, 90 bp, Homo sapiens
ctttgctgcaaaaaattacgggtccttccatagtgacgccccccaaggacatctggaatgtcactggtgcccaggtgtacttgagctgtg

SEQ ID NO: 697034 - DNA, 100 bp, Homo sapiens
gatatgcaggttctcgtgtctagggaaaaacagagacccaagttcccagaagcctggaaagaaaatagcctggagcgttttattgtcgtcagagaaccaa

SEQ ID NO: 697035 - DNA, 83 bp, Homo sapiens
atagagcgtttggaagatctggatacctgtatgatctgcttggctttgaggaagagtggcagtactgcctcactgcataaggg

SEQ ID NO: 697036 - DNA, 100 bp, Homo sapiens
ccagcacagaagtgtctggagtggttgattcacagtttcagactgaattgggcagttgaccgaaccggaaagtggcaggagttggagtacccgagccccg

SEQ ID NO: 697037 - DNA, 82 bp, Homo sapiens
gtcggctccttcgtgtgtacctcctgctccggcagcctaccatggtgaatccgggcagcagctcgcagccgcccccggtgac

SEQ ID NO: 697038 - DNA, 49 bp, Homo sapiens
cggctctgccggcacccacagcaacggtctggagcccggcactgtggtc

SEQ ID NO: 697039 - DNA, 75 bp, Homo sapiens
gaagccatggtgaatgcacagcaacttctgatatgttcaaggaatgagtgatttactttcccctcttttatatgt

SEQ ID NO: 697040 - DNA, 100 bp, Homo sapiens
accttgtccacacagtccatttttaccgggcagaagttgaagccctccattcttcgggtatgacagcagttgttaaattcattgactacggaaactatga

SEQ ID NO: 697041 - DNA, 114 bp, Homo sapiens
aaaagacagtgttctgctttcatggagttcacagaagagtcgaggagtttcagagactcctccactctctgggaatgacacggactccctctcctgcgacagtggcagttcggc

SEQ ID NO: 697042 - DNA, 100 bp, Homo sapiens
gcggaagccatcacctggatgcctacgtgggaagggacctcgaatgtgggaccccagcccctctccagctcgaaatcgccactgtggaatctatcatgag

SEQ ID NO: 697043 - DNA, 83 bp, Homo sapiens
gaagcagcagctcaccgaggacggggactcgaggagctcaagcacttcgaagccaaaatcgagaagcacaaccactaccagaa

SEQ ID NO: 697044 - DNA, 132 bp, Homo sapiens
caaagtggtgtgcttctaccggaggcgggacatctccagcaccctcatcgccctggccgacaagcacgcaagccaagactaaggggctgcagagcggggtggacattggcgtcaagtactcggagaagcagg

SEQ ID NO: 697045 - DNA, 74 bp, Homo sapiens
agaggcgctcatccacagagccacatctgttagctatgctaagaaggaatctgatcttaatggcgcccagatca

SEQ ID NO: 697046 - DNA, 98 bp, Homo sapiens
ccgatcctgctgcgccgccttcaagggggaccgccggccgcgagccagatgccatggacaatattaccaggcagaaccaattctacgatacccaagtc

SEQ ID NO: 697047 - DNA, 98 bp, Homo sapiens
cccccagcagctatgatgaactttactatgagattatccgcatgcaccagagctttgacaacctctactccatggaaccagacataagttcagaggaa

SEQ ID NO: 697048 - DNA, 100 bp, Homo sapiens
gtacaaagaaggccagaactggctggaaaagaaggacgtggtgggaagagcaagaggtatatcccaagaatgtacacattctgcaccaattatggaggac

SEQ ID NO: 697049 - DNA, 90 bp, Homo sapiens
agaacagtccgaaatggcggggactgttggtctcggccctgcggaaggtttctgtggatcccttctgaagttctatctgaaaattgcgct

SEQ ID NO: 697050 - DNA, 80 bp, Homo sapiens
gaatcatccacgcacctgcagctctgctgagagagtgcaagccgtggggttaatgttcgtgaagaaattgaagagttttt

SEQ ID NO: 697051 - DNA, 74 bp, Homo sapiens
cccttgtagagtcattcctgcctttgagcggactcccttttaaggtcctggcattgatgtgcctgctccagaca

SEQ ID NO: 697052 - DNA, 90 bp, Homo sapiens
ggcgttggagcgcggaaatctggaaccgggatggcgacgtctacactgagtcggaggcgaagacagccctgcacctggcagccatcctgg

SEQ ID NO: 697053 - DNA, 90 bp, Homo sapiens
atttcccaagagcagcggaaaatgatccagtcacagggaacgtgctcagtcactttcaatgggcaccaggagaaaggttttggttcttgg

SEQ ID NO: 697054 - DNA, 75 bp, Homo sapiens
cagcactgtcagcagatgtcgaataaaccgagcctcttgaagccattcttacagatgatgaaccagaccacggcc

SEQ ID NO: 697055 - DNA, 95 bp, Homo sapiens
cggagggcgcaaagcgagccggtacggacattgctgcaggagaagaggttgccatcaagcttgaatgtgtcaaaaccaaacaccctcagctccac

SEQ ID NO: 697056 - DNA, 86 bp, Homo sapiens
gcctgcccagacggctcacctgtgcgggatggaacaaaagaaaaaaccgggaagatcctgacggagttcctccagttctatgaaga

SEQ ID NO: 697057 - DNA, 90 bp, Homo sapiens
gcaacactgagaagttatcttaagggaggctgggctgggcgagtatctcttcgaaaggctcactctcaagcacgactaagagccttctga

SEQ ID NO: 697058 - DNA, 90 bp, Homo sapiens
ggtgggccccctcctgctcccccgaaccgctcgtcgtcctcttgagttctggcgccttgactactgggaagatgacttgcggcgccggcg

SEQ ID NO: 697059 - DNA, 99 bp, Homo sapiens
cagcgacctgagaccagtggtcatcgatgggagcaacgtggccatgagattttggaagatggcaaagttcatgacacccgtgatccaggacaacccctc

SEQ ID NO: 697060 - DNA, 75 bp, Homo sapiens
agtaacacacctggaacaggaacccagcaacaattcttctgccaggacccagatgatgtggtaccagttggccaa

SEQ ID NO: 697061 - DNA, 82 bp, Homo sapiens
acctcaccatcatcattgaaaccatggttttgatgatgatggttcagaatttcatgaacatatatttctggagaaacacctg

SEQ ID NO: 697062 - DNA, 75 bp, Homo sapiens
gcaggcccggggagggtggttaccgctgaggagctgcagtctctgtcaaggaaacactgatgggaaagtatgggg

SEQ ID NO: 697063 - DNA, 74 bp, Homo sapiens
cgcctgcagacccggaagtggatggcgtggagatatggcgcaactgcggcgcacctgcgaccgcatcaagcagt

SEQ ID NO: 697064 - DNA, 83 bp, Homo sapiens
ccccaggcctaggggcggcgccggcggctgccaggtgggtaattccagaattgattggccataccattgtcactgtattactg

SEQ ID NO: 697065 - DNA, 75 bp, Homo sapiens
gcagtgctgcggagctcccgtgccgtcatgggtgccatgaagccaggtctgtggggtgtggcgggcagtgcctcg

SEQ ID NO: 697066 - DNA, 74 bp, Homo sapiens
gaacaatccgtctggatcacggatgtaggaagtgttcctgaagaatttatgtataacccccttacccgatctta

SEQ ID NO: 697067 - DNA, 90 bp, Homo sapiens
atgagatttcacatattgttaatcgtattgctcctcagttgaaacattgtagtcggtatatacatgacttatttccttcactcatcaaga

SEQ ID NO: 697068 - DNA, 51 bp, Homo sapiens
tcggaatattacagcggcgaccagtcagctgtttgaccacattgccgaatg

SEQ ID NO: 697069 - DNA, 51 bp, Homo sapiens
gggcaaatgaaaatgtttggcatgtgctgtacctggagtagaacagaaaaa

SEQ ID NO: 697070 - DNA, 76 bp, Homo sapiens
ctcgctgggagagaggtacctctccttttccctctccctttccctaaggagcctgcagacagggggatttgcctgg

SEQ ID NO: 697071 - DNA, 97 bp, Homo sapiens
cagcgaccacaagcctgtggctgcccagttcctcctgcagaatctcgctctgtcgcccaggctggagtgcagtgggctcgctgcagcctctccctcc

SEQ ID NO: 697072 - DNA, 74 bp, Homo sapiens
gtcgggctgctgaacaccgggagctactatgagcacgtgaaggctctgcgaacatcaatagatgcttatgacaa

SEQ ID NO: 697073 - DNA, 74 bp, Homo sapiens
tcaaccgcttttctacagtttgtgaggagtgagaaagatcagtctaaagaaaaggagaagaaagtgaaaaaaac

SEQ ID NO: 697074 - DNA, 87 bp, Homo sapiens
cgcggagcccggctcccgcaccatggaggaggacgacagctacggtgatggctggaccggcggaggaggcgggagcccattgtcccg

SEQ ID NO: 697075 - DNA, 101 bp, Homo sapiens
acatccttgtctgtgaagctaaactcaatgctgctgtgtgggaagaagatttgtaaagaaaactcttagtctgaagatgatgagaaactgaaaaagaggaa

SEQ ID NO: 697076 - DNA, 50 bp, Homo sapiens
ggaggccaaaatctgtcatcaaattgagtggccacagatgtctttaattc

SEQ ID NO: 697077 - DNA, 90 bp, Homo sapiens
accgggggacaggataaactgttacgcatatatgacttgaacaaacctgaagcagtactaaggctcgtacgtctgcatcgattatcttac

SEQ ID NO: 697078 - DNA, 82 bp, Homo sapiens
gagtatttcaaccataaagacatcttaattgggcacgaaagaggtggagccatcgaagcccccacccacaggctgacagagg

SEQ ID NO: 697079 - DNA, 75 bp, Homo sapiens
ccatctgggagcattcagtgaatgtttcatgaagaggatcacctagcccgggtagaagaggcaatcacccgtatg

SEQ ID NO: 697080 - DNA, 74 bp, Homo sapiens
attttgcaccactggatgttgtttactggtcacggtctagatcacattctcgatccagaggaaggcgatactct

SEQ ID NO: 697081 - DNA, 50 bp, Homo sapiens
agatcatcgagcatttcaaacgggcctgcggcctcaccatggacccagaa

SEQ ID NO: 697082 - DNA, 100 bp, Homo sapiens
gaggggcatatccgttcacgccgatccatgaaaatgctttggaaattgacggataatatcaagtacgaggactgcgaggcgagcccacaccttaaccgtg

SEQ ID NO: 697083 - DNA, 100 bp, Homo sapiens
ctgtaacccaaaggaggaaacagctggctaagctcatcattgttactggttatgaagacagtatggagtttccagaccatagtagacatttgctacagtg

SEQ ID NO: 697084 - DNA, 74 bp, Homo sapiens
caaggagacgctcctggcactgcaggtgctccatacttgcttgcagtgcctacgtggctctggctttgggtgat

SEQ ID NO: 697085 - DNA, 100 bp, Homo sapiens
gatgtggtcatggagcccacgatgaagaccctcagtgacgacctagatgtcctggaacaggtggaggcctatcaagctgaggctcgtgaggctctggcca

SEQ ID NO: 697086 - DNA, 82 bp, Homo sapiens
cccatacctttgaatcacaacatgagattttatgcttggtttgagtccagccaatgacactggagccaaaaagaagaaaaag

SEQ ID NO: 697087 - DNA, 88 bp, Homo sapiens
agcatattatgctccatgtggaaagaaacttaggcagtaccctgaagtaataaaggcagcagagaccacactggctgtgcgcagacgc

SEQ ID NO: 697088 - DNA, 90 bp, Homo sapiens
ccaggtgcaggagctcttccatgaggcagcccagcagttcacacccaacctcttcctgaagcagatgctagagaggtaccaaaacaacag

SEQ ID NO: 697089 - DNA, 100 bp, Homo sapiens
gtggaccccaagaagaccattcagatgggatctttccggatcaatccagatggcagccagtcagtggtggaggcatcacgtggggcaaggtggtgtccct

SEQ ID NO: 697090 - DNA, 76 bp, Homo sapiens
ggagaaccgcttcattggaatgaagtcccgaggtgacctgagcatctctgcagaccgcctgagtgagaagcgctct

SEQ ID NO: 697091 - DNA, 96 bp, Homo sapiens
gaagaagagcgaccaggccctgaactgcggtgggactgcctcgactggcagcgcgggaaacgtcaaactcgagtggacatttgggagcaataaaaa

SEQ ID NO: 697092 - DNA, 75 bp, Homo sapiens
cgcgacgcgcccggcccggagcccccagcgcagcggccgcgctccagaacctgggtatcaacccagcaaacattg

SEQ ID NO: 697093 - DNA, 100 bp, Homo sapiens
cttggaggctgtagtggggacctgctgtgtgttggacctttatacgtattgtaaagcttcttggacacttaatgattgttggcaagaaatgtgctgctga

SEQ ID NO: 697094 - DNA, 71 bp, Homo sapiens
catggagcaagtctgtcagcaccatctttctaacactgtcttgtcgacggtctcactgatgcctcttctgc

SEQ ID NO: 697095 - DNA, 83 bp, Homo sapiens
ctggtcactccccaggattatgcgcgtgtggacgaatgtggaacctcgctctgtggctgtgttcccttggcactccttagtcc

SEQ ID NO: 697096 - DNA, 100 bp, Homo sapiens
cttctgattggcgactcaggggttggaaagtcttgccttcttcttaggtttgcagatcactactcttggaatcaaagataaatccaaatactgcatatca

SEQ ID NO: 697097 - DNA, 100 bp, Homo sapiens
agtcagtctatgacaacgtctctctgccgtgaatcattcctgcagatgaaaaagtgtgacttggcagctgatgtacctgtgtggtctaagctggaatctg

SEQ ID NO: 697098 - DNA, 100 bp, Homo sapiens
aacagcagatttcccaagagcagcggaaaatgatccagtcacaggaagctgttttaggttatgtgaaagagatgtttcctcatctctaaggcttaccaga

SEQ ID NO: 697099 - DNA, 100 bp, Homo sapiens
aggaagtgggttcctttgacagagcttactccagaagaaagacttggagcttgatgcattagatgccaatgatgagttgactcctttgggacgaatcctg

SEQ ID NO: 697100 - DNA, 100 bp, Homo sapiens
gtcttgagtgtgtatctctacatgcgctctttgaaagcgccccggaatgacctgtcgcctgccagctctgtctataggatcgggtgaaccaccaaccggc

SEQ ID NO: 697101 - DNA, 51 bp, Homo sapiens
tcgcagtggtcgcttcttctccttggaaaatgttggggcttttcaggaagc

SEQ ID NO: 697102 - DNA, 101 bp, Homo sapiens
tcaccgtggttgttggtagaatgttacatgtatcgaagaattcatgaagcaattatccagagtgagggtcgctgtctgcccattgatagaggccagattgt

SEQ ID NO: 697103 - DNA, 100 bp, Homo sapiens
cggaaaattaactataaaggagagcgccaaaccattactgatgatgtggaggttaacagctatctttctgatattcatccgttctatgctgatttgatga

SEQ ID NO: 697104 - DNA, 74 bp, Homo sapiens
tggatccacagcagtgggggctgggcagctatttttgctatgataatcctgctgcccttcagactcaagttaaa

SEQ ID NO: 697105 - DNA, 50 bp, Homo sapiens
tctcagaagacagagggttttcttttgagcccaccttgggacaccttgac

SEQ ID NO: 697106 - DNA, 83 bp, Homo sapiens
cgcccgtgggggctgagcccgccgtctacccgtggccgctgccggtctacgtacatgtcccagagcaagcacacggaggcccg

SEQ ID NO: 697107 - DNA, 75 bp, Homo sapiens
gagcaacagtgtagtggcgtattccacatagcaaacaggtttactttatcatcatcaagaaataagaagcatgct

SEQ ID NO: 697108 - DNA, 87 bp, Homo sapiens
agtttgagccatcggatctaagatccaaaaggtgtgggtacgccacgctgcatcacgtcattgacaagtccacagaagaccggatgg

SEQ ID NO: 697109 - DNA, 100 bp, Homo sapiens
agcgagtctcggagaagatgtggtggcttccgtttgttggtggaggaggtggcaggcctcggcggcataccaatcccattgtggaaaatggacagactca

SEQ ID NO: 697110 - DNA, 98 bp, Homo sapiens
attgagagctgtcgacagttacgtcaacatttgaaggaagaaagtactgtgaacatgactttcagatgctctttgccccttgctgtcatcagtgtggt

SEQ ID NO: 697111 - DNA, 118 bp, Homo sapiens
cctgccgtcttcctatccttacccgacctcagatgctcccttctgctcctggctaattcacctaaataagattgatcctcatgctccaaatgaaatgctctatgggcgaataggctac

SEQ ID NO: 697112 - DNA, 82 bp, Homo sapiens
tggactccttcggcagtccacccaccgccgccgcctcccagtctgcccagtcaagcccgtccaactccagctccagctcaga

SEQ ID NO: 697113 - DNA, 75 bp, Homo sapiens
gctgaatggaggccagatagtaccatgatagctgtatcaaggccccacagtatcaaatatccgcctggctggatt

SEQ ID NO: 697114 - DNA, 50 bp, Homo sapiens
gtttcggaaatgcccttacagcagcaggtgtccctcaatgcatggttctg

SEQ ID NO: 697115 - DNA, 90 bp, Homo sapiens
ctctccattttccctagtaacttgcagttagtagccttcaaagaaaaacctcggtatccaccaagtcaggctcaagcagctcttcaagac

SEQ ID NO: 697116 - DNA, 100 bp, Homo sapiens
agacatgcctgcggccaagaagcagaagctgagcagtgacgagaacagcaatccagacctctctggagacgagaatgccacagaaacactattcagaatg

SEQ ID NO: 697117 - DNA, 90 bp, Homo sapiens
ttgagaacttctctacgaatgccaagacagagcatgggtggtgctcgcacacagcaggatttaagaggaatgcttctagtcacaacagac

SEQ ID NO: 697118 - DNA, 80 bp, Homo sapiens
ctttcacgaaggcaccgacgtcatcatgctgaccaccaatcagatccgtaaggtgatgatgaacagtctacacagatggc

SEQ ID NO: 697119 - DNA, 100 bp, Homo sapiens
ttctgtttagaagatgacactcagagccaactgttggatgcagatggagatcctgaaggagctagacgagtgctacgagcgcttcagtcgcgagacagac

SEQ ID NO: 697120 - DNA, 100 bp, Homo sapiens
gtctggctccagaacaactcttcttcatagttacgttatactgcccctgcattgttggtattgaaaaagctgaccttggggctctggaattatggagaac

SEQ ID NO: 697121 - DNA, 88 bp, Homo sapiens
tcgagatgatgaggaattggtccatcggcacccgacctgacagcgttcagcgacccgcgccagttccccgcgctgccctccatctccg

SEQ ID NO: 697122 - DNA, 75 bp, Homo sapiens
tttgcttagcactgaaaattctggataatggtgaatgggatctgtgccagttcagaagcaggcgagcctcttccc

SEQ ID NO: 697123 - DNA, 100 bp, Homo sapiens
tgcagtgtgccagctgctagaaaacagggaagatattagccaatatggaattgccaggttcttcactgaataatttccatgaggacaacttacaaggacc

SEQ ID NO: 697124 - DNA, 100 bp, Homo sapiens
ctctattctgggaggcatgaaacatctgctttgacggtggaggcaaccagtagcatcagggaaaaagttggttggaagttaaagataagacagatgaagt

SEQ ID NO: 697125 - DNA, 82 bp, Homo sapiens
gccaactcctgccagatcattattccacagaaccaagtcaatcgaaagtcagaccaggacggtgacaagcagctctctgtgc

SEQ ID NO: 697126 - DNA, 90 bp, Homo sapiens
aacttggagaatggaaaagaaccattgaagcttgagagaaaagcccccaaaagcagctattcagtgccagccatttttggagtctccttt

SEQ ID NO: 697127 - DNA, 50 bp, Homo sapiens
gtacttggatagacttatacctcaggtgggtttggaggatttgggacaac

SEQ ID NO: 697128 - DNA, 101 bp, Homo sapiens
ggagtcctgttccaccttcagagcgtcacggcgtacgccctcatggggaaaatctccccggtgactttcagaaggaagaggcccagcagaagggactcgct

SEQ ID NO: 697129 - DNA, 51 bp, Homo sapiens
aatacccctttgaattaattatggctgactggacctcactgtgggaacaac

SEQ ID NO: 697130 - DNA, 100 bp, Homo sapiens
gtcgagggatgtacagcaacagaatgagaagctacaaacaagaaatgggaaaactcgaaacagattttgtgaagtggatcctaaagagaggatagcacgc

SEQ ID NO: 697131 - DNA, 74 bp, Homo sapiens
aaaacgttcaccaagtgggtcaacaagcacttaatgaaggatactgaggaagatgaggaggaagatgagaagga

SEQ ID NO: 697132 - DNA, 75 bp, Homo sapiens
ccatgggcgacaaagggacccgggccagcgggtgaggtaccccaggtaccagacaaggaaaccaaagccacaatg

SEQ ID NO: 697133 - DNA, 96 bp, Homo sapiens
ggaggaatcaggacaagcccccaacgcttactaaattctgtgaaagcatcagtgagcccaaagagatagttgaaaagtccaaaatcccaggccgaa

SEQ ID NO: 697134 - DNA, 50 bp, Homo sapiens
ctgccttccacctccagtgctggttcgtgctggccgtgggcagcgccgtc

SEQ ID NO: 697135 - DNA, 82 bp, Homo sapiens
gtaaatacttggaagataacagcgacctcttttctgaacagatgccatggacaatattaccaggcagaaccaattctacgat

SEQ ID NO: 697136 - DNA, 90 bp, Homo sapiens
gtttaagagaggttctaaactctgtcttccgacatctggatgaagtagccgctacaagtatactggatctttggacatcagacagtgcag

SEQ ID NO: 697137 - DNA, 126 bp, Homo sapiens
gcctggggaatgcttttttatctcatattagtgcctgtgatggcatctttcatctaacacacgaggacctattaaacttggaatggctaaaatcacgcaagtcgactttcctcctcgagaaattgt

SEQ ID NO: 697138 - DNA, 82 bp, Homo sapiens
ccgggacaacatgctgcggggcacagactgaaggggctggacttgctacctgtatagaactgtgtgtaaaggctcttcgctt

SEQ ID NO: 697139 - DNA, 82 bp, Homo sapiens
aggagattgacagtcacaattttgtaataagggcacacgtgtttcacgttgacaggtttgcttgggacgctagtaaccatgg

SEQ ID NO: 697140 - DNA, 100 bp, Homo sapiens
gccacgcggggctcctgcagcatggctgtcagcaggaaggactggtccgcgctgtccagaatgccgaactggggaggaggcaagaaatgtggggtgtgtc

SEQ ID NO: 697141 - DNA, 97 bp, Homo sapiens
aggctgtaggctccttcaacccgtggctgatagctgaaagctctaagcgaaagacatgaggcctcagcctgaaatgaggttgttttgaggtcatctg

SEQ ID NO: 697142 - DNA, 75 bp, Homo sapiens
ctgccagggtccctgaagagggaagacacgcggaaacagagcccacacgatgaagacccccaggcagtgacgtat

SEQ ID NO: 697143 - DNA, 82 bp, Homo sapiens
gcgcccgggaggaaggaacgaggcaaggagctaaagcagcgtgcgttcagccctggggtggggaagaaaacatgacagaaac

SEQ ID NO: 697144 - DNA, 82 bp, Homo sapiens
aacttcggcaagatccagatcgggatttacgtggagatcaagcgcagcgatggttattcagcttctcaaggctggaaaagcg

SEQ ID NO: 697145 - DNA, 88 bp, Homo sapiens
cctttacttttacctacgttggcggccccagaagttgacaaagagatgatgcaaagaattagagaaaaatctattttacaagcacaag

SEQ ID NO: 697146 - DNA, 98 bp, Homo sapiens
gtgccccaattttcaggttgactaaaacatgggcggaaactaaatatattttgccaactttggaaaaagaattattcttggcagagcacagtgacctt

SEQ ID NO: 697147 - DNA, 98 bp, Homo sapiens
tgacactatttagtattcttgaaggagagcttgaagcaagggaccttgttatagaagccttaaagcttactttaccagaactcttccctccagtgagt

SEQ ID NO: 697148 - DNA, 75 bp, Homo sapiens
cacctgcacatccacactccgctgctcgacagacctgcctagagctggaacgttacctccagagcgagccctgct

SEQ ID NO: 697149 - DNA, 83 bp, Homo sapiens
agagccttgaggcagaggcagctggaccgagctgcggctgctgtggtgtctcgactgcattgtgagagtgaatctttcaagat

SEQ ID NO: 697150 - DNA, 83 bp, Homo sapiens
ttgacttattattgcactgtccaagcaacctgagcggtgcatccccgttcctgggcgagaccaagcaggagacgctcaccaac

SEQ ID NO: 697151 - DNA, 50 bp, Homo sapiens
cccacacttatggctgctgttccggaacgtcaaggtcgtgggaaataaaa

SEQ ID NO: 697152 - DNA, 82 bp, Homo sapiens
gcaaggtgatccagcaaggtcggcagagcaaggggcttacgcagaaggacctggccacggttaacacagaaatctgcctcct

SEQ ID NO: 697153 - DNA, 75 bp, Homo sapiens
cagaaagagtcaacagcagtggcaacaggaggagcatattatttaatatctagaagtctagggccagaatttggt

SEQ ID NO: 697154 - DNA, 96 bp, Homo sapiens
acatgaagaagaaagaagacgccacagacagcagcgcagtaccaccttccagagatgtgaaaggtgtagcagtcactcggcctacacccacagcat

SEQ ID NO: 697155 - DNA, 100 bp, Homo sapiens
cggagcagtatttcaatgtggagtttttcagtttccaagatggaatagttatagtgcatatcttcctcatggttgtgaggagtgcatgacacatagcgag

SEQ ID NO: 697156 - DNA, 100 bp, Homo sapiens
ggcccaggtgcgccacgagttccaggagaccaaggaccagctcaccacggagaacatcatccttgtttgctattggctccctgatggacgattacttggg

SEQ ID NO: 697157 - DNA, 100 bp, Homo sapiens
tgtagcgaaaatgctactatgactcttcctggaatacacccacctaccttgaaccagatggtgatggaatttcctgataatgtgttaaatctcgatggac

SEQ ID NO: 697158 - DNA, 100 bp, Homo sapiens
cgtcatcattaagttggagcagggagaggagctgtggataacgggaggtgaatttccatgtcaacatagtcctggacctatctggaagaggagctagtga

SEQ ID NO: 697159 - DNA, 75 bp, Homo sapiens
atctggagcccctcctcctccacatgtgcgaatccaggagccacagaaggccagacttctcgcttcctttctgct

SEQ ID NO: 697160 - DNA, 50 bp, Homo sapiens
gactgagagatggctattatatccaagatcacgccactgcactccagcct

SEQ ID NO: 697161 - DNA, 100 bp, Homo sapiens
caggacctcaagacacctgggcagacactgcaaggacgagattgaggagctgcgggccgagatgctggagatgcgggacgtctatatggaggaggacgtg

SEQ ID NO: 697162 - DNA, 75 bp, Homo sapiens
ggcggcggcgccatggcagggcttgcaggtccctggatggccggttgcaggtgtcccatcggaaggggctccctc

SEQ ID NO: 697163 - DNA, 74 bp, Homo sapiens
tcccgtctcacggatatgcaagctgatccaccttgagatcaagccggccatccggaaccagatcatccgcgagc

SEQ ID NO: 697164 - DNA, 96 bp, Homo sapiens
aaatgtgaaggtgcatggaggaagaaaggagaaaacagagatcctatcagatgaccttacagacaaagcagagggttgttatgatctggtaactag

SEQ ID NO: 697165 - DNA, 90 bp, Homo sapiens
agttcatatagcatctggacagtcaacacgggcaccatgaagcacttcctgagacaacatctggggaagatgtacgagacttcacaaagg

SEQ ID NO: 697166 - DNA, 75 bp, Homo sapiens
tagacatttacgcggatgtcggcgaagagttcaaccagcacttttccagccattaactccaggctctcgagaatt

SEQ ID NO: 697167 - DNA, 90 bp, Homo sapiens
agccccttgccaggagtgttcaagatgctctctctggaccgatcccactagagacaagagagacacctccaacttcgacaaagagttcac

SEQ ID NO: 697168 - DNA, 75 bp, Homo sapiens
agtgctcccagcaagcgagagattgcccagctcaagaaccaggtaccgaggagaaggcattgtatatgggacact

SEQ ID NO: 697169 - DNA, 100 bp, Homo sapiens
caagatggcagccaccacgggctcgggatatccgacatgaagccagtgacttcccatgtagagtggccaagcttcctaagaacaaaaaccgaaataggta

SEQ ID NO: 697170 - DNA, 99 bp, Homo sapiens
gacatttactaccagggcactgaggcagagattcagcggtgtgtcaggcctgatgggcgggtgccactgcttggacgaaccttgacaggatgggtgcag

SEQ ID NO: 697171 - DNA, 87 bp, Homo sapiens
aaaaggaagaacaacttaagagcttcttcaaagagtgaaagcagcagcagtagcaacatctccaccatgttggtgacacacgattac

SEQ ID NO: 697172 - DNA, 100 bp, Homo sapiens
cagttgtccagagaacaaacctctggtcctttagatctgttgccacctactgtgggaactttggggaatatatttgagaagctgggaatttgctccatgc

SEQ ID NO: 697173 - DNA, 112 bp, Homo sapiens
gagatgtctcgctccgtggccttagctgtgctcgcgctactctctctttctggcctggaggctatccagcgacgtggcccagtggaacatcgggagcctccggaccatcctg

SEQ ID NO: 697174 - DNA, 121 bp, Homo sapiens
gaatgggccagtatgaatttcccaacccagaatggtcagaagtatcagaggaagccgcttacaaacacgcagatggcaagaagattgatggcaggagggtccttgtggacgtggagagggg

SEQ ID NO: 697175 - DNA, 124 bp, Homo sapiens
cggcctcagatttccaaagagtcttccatggagcgcaatccttattttgataaggatggcaatggctatattagtgctgcagaacttcgccatgtgatgacaaaccttggagagaagttaacag

SEQ ID NO: 697176 - DNA, 90 bp, Homo sapiens
cgcgggcgtaagcggactgcagccgcgagctcctggaggcggcgggatggaggcggcggccggtcgcaatggaagaagagatcgccgcgc

SEQ ID NO: 697177 - DNA, 128 bp, Homo sapiens
gagagcgaactgcagcctggagctacccccggccagcggtccggccaaggacgctgaggtatggcatttcaaatatagatacaaccattgaaggaacgtcagatgacctgactgttgtagatgcagct

SEQ ID NO: 697178 - DNA, 100 bp, Homo sapiens
caagtataattttcctcacacacagttacttgccaagacgattgaagatcatgaattttctaaaactgaggaactaaaactagaagatgtggatgaggaa

SEQ ID NO: 697179 - DNA, 98 bp, Homo sapiens
cgccgttcgccaaacgaagtcgtggaggtggcgaaacgaggaggagataacgcggccttgggctctgggatgttctgttcttgaaggactgtgtaggc

SEQ ID NO: 697180 - DNA, 100 bp, Homo sapiens
gccgatatggaacccaagcagtggcgaagggaatcgcaaggctcttccctgaccattttctactgtccctgcgcgagccaggattgctacagttgtgatt

SEQ ID NO: 697181 - DNA, 49 bp, Homo sapiens
tcgcggcccggagctcgggaccgtggagcccacagtgaccatctcccca

SEQ ID NO: 697182 - DNA, 83 bp, Homo sapiens
gcagaaggtctctggagacatcttcagcagggcgccatgttttggaagtttgacctgcacacaagctcgcacctggacacgct

SEQ ID NO: 697183 - DNA, 110 bp, Homo sapiens
gaagcaagtacaccacaaagagaacacagagccggaagtgtgctggagaagagaaacgagttggcacacgcacagtgtttgttggcaatcatccagtttcggaaacagaa

SEQ ID NO: 697184 - DNA, 76 bp, Homo sapiens
caattctttagacgctcatgaagaaatcagggatttcctcaggtaaagagaaatgtgtatgaccttacaagtatcc

SEQ ID NO: 697185 - DNA, 100 bp, Homo sapiens
gttccctgtcttgggaaaaggagaactcctgactgattagcattcacaccagtgtgtcaggaagctgtctgggaagccttcaggactttttgggatcgac

SEQ ID NO: 697186 - DNA, 100 bp, Homo sapiens
cctccgcaatgtgtccagcctcgtcgccacccgtgaggactacaggtacaggtttgcagattccgccagcagcacagcaagctctacagatgagtggctc

SEQ ID NO: 697187 - DNA, 100 bp, Homo sapiens
taagttcaaagggaccatcatcctgacagctgtgtactttgccctcagcatctcccttcatgtctgggtcatgatggcccactgcgtgaccttggttcag

SEQ ID NO: 697188 - DNA, 100 bp, Homo sapiens
ggagcagcagccctgtccggcatctgtcttgagctcccagcaagatccattacaagattttggcttttctgttgaaaagtgttccaagcaattaaaatca

SEQ ID NO: 697189 - DNA, 100 bp, Homo sapiens
ccttccctccgcagcctggaacagagcctcctctggtgttgcaaggaagaggctgaatgaggcagagaagcgatggcaagccggcaggtggatattgcaa

SEQ ID NO: 697190 - DNA, 75 bp, Homo sapiens
gaatctgggtgcagttcctgcagtaccccactctacgatcagaagcactaccacaggaagagcaagaaggaagtg

SEQ ID NO: 697191 - DNA, 82 bp, Homo sapiens
ttgtgattctcctcatcagaatctctcaagactgccactgcagagccccgccatggaagacacgccgttggtgatatcgaag

SEQ ID NO: 697192 - DNA, 90 bp, Homo sapiens
cagctgctgtcttcaatgctgttaactggattgagtccagctcttgggatggaggagatgttaaagtaacccatcttgcaggacgacatt

SEQ ID NO: 697193 - DNA, 100 bp, Homo sapiens
agaactgctctccatggagagagtaactctgtccttattatcggaccccgaggatcaggaaaaactatgatctgaattctacaaacacattgtgctttct

SEQ ID NO: 697194 - DNA, 82 bp, Homo sapiens
cccgcgcgtgccctctgagggccccaaggagaactacgatgacccgcacaaaacccctgcctccccagttgtccacatcagg

SEQ ID NO: 697195 - DNA, 100 bp, Homo sapiens
tgcagagagagctagcagctgttattgctttgaaagcaaggaagtctgggatggcaccacagatgtgacgcggacaatgcattttgggacccctacagcc

SEQ ID NO: 697196 - DNA, 98 bp, Homo sapiens
gcagcgtccaccatcttcctcttgctgccagtggtagcgctcgtctggcggagctggaccgcctggacattagggcagcccggattcttctggataat

SEQ ID NO: 697197 - DNA, 90 bp, Homo sapiens
cgtctctctgctgcggcgcggggaccgctgtgctctcgggagctcgaggagcagcacggcatccactgcaacatgacgttactcttctcc

SEQ ID NO: 697198 - DNA, 48 bp, Homo sapiens
cgacatggaacagggactcactggggagatggagtttcaccatgttgg

SEQ ID NO: 697199 - DNA, 100 bp, Homo sapiens
aactctcttctggagaagataacactttagtacagtcgccaactgatgtctacaggggaagcaaccaggggaaaatgaagatatcaccatcagtagtaac

SEQ ID NO: 697200 - DNA, 98 bp, Homo sapiens
cgacatggggcacccggtgtaccgcggcgagaagccccagctgcactacgcgacccaacatgagtgaagtttcctgcaagaaacgggacgactatttg

SEQ ID NO: 697201 - DNA, 75 bp, Homo sapiens
ccaagtttctctctcagatcgagagagatttaccgcattgtttctcagaagcaaatgtcagacagacgcgaaaat

SEQ ID NO: 697202 - DNA, 74 bp, Homo sapiens
gggaaggccatttgatctcaggagaatcgttggtatttcatctgaaggaaaatcgcccaggaccacaccgcagc

SEQ ID NO: 697203 - DNA, 101 bp, Homo sapiens
ccgagaccgcggccgggaccgagggtttaaacttacacgaatcgctttctggaggaggaggggacccgctgcgcgattgacacgcatattcctataggcat

SEQ ID NO: 697204 - DNA, 100 bp, Homo sapiens
cctcattggattactgtgttttaaacagaatttcgtgaacagccttttatctccaagcggaaagaaagggagctacatcagaggttttggtagatgctgc

SEQ ID NO: 697205 - DNA, 90 bp, Homo sapiens
ggcatctctgccgaggctgctggaatcgactggggcatcttcccggaatcagattcaaaggttttgcagacattgggtacagaaacttac

SEQ ID NO: 697206 - DNA, 51 bp, Homo sapiens
taaggattccaagtaactcttatttgatagtaaagctgttacttcgtcacg

SEQ ID NO: 697207 - DNA, 90 bp, Homo sapiens
ctttgtgatgatccacttccacttaatgaatggttcattgcagaagaggccgcggcttctggggccaagtgtgtgctcacccacagcccg

SEQ ID NO: 697208 - DNA, 75 bp, Homo sapiens
gaccgcttagcatggactagaaatataaagaaatgggggctccgagcagtcaagaagaacatgccccaagttatt

SEQ ID NO: 697209 - DNA, 87 bp, Homo sapiens
acgaggaacgaatgggacaagatcccgtccatgaatcaggttatgaagacagtatggagtttccagaccatagtagacatttgctac

SEQ ID NO: 697210 - DNA, 83 bp, Homo sapiens
aagcaacttctatttagtgatcatggttctaaggctctggaatattccaatgggatttttgattgccaatctcccacctctcc

SEQ ID NO: 697211 - DNA, 50 bp, Homo sapiens
ctgcagcccctgctgttgctacaactcagaagctgcacacatacatgtaa

SEQ ID NO: 697212 - DNA, 100 bp, Homo sapiens
ccagctctttgccctggagaaactggatgtcaccgttgctccttgagggcaggacagttcttatggctttatccgttgcgtaagcacagagaggtctgcg

SEQ ID NO: 697213 - DNA, 75 bp, Homo sapiens
cgtggacaacatgatggtcagaaaaggggacacggcggtgcttaggtactactgagcgagtgtgcttgatccagg

SEQ ID NO: 697214 - DNA, 100 bp, Homo sapiens
gcactgcggacgcgactcgagggtgacgctcgctccgctcgtcccgctcgtcatggcctacccgggatacggaggagggatacctgaaactgaccacctg

SEQ ID NO: 697215 - DNA, 98 bp, Homo sapiens
cgacccgcagagggctttcttcgccgtgctggccgcggcccgcctcagcatctggtacagccgatgtgggatgagttggcctactacgaagaaaacac

SEQ ID NO: 697216 - DNA, 73 bp, Homo sapiens
gagaggaaaagtatgagcgttgagaggattctgtaaagcctggtgcccatctaacagtgaagaaaatttttgt

SEQ ID NO: 697217 - DNA, 88 bp, Homo sapiens
gctcgctccgctcgtcccgctcgtcatggcctacccgggatacggaggagggctgagcgggctttggacaccatgaactttgatgtga

SEQ ID NO: 697218 - DNA, 75 bp, Homo sapiens
attttgaagaagcgtttccttcccagggcaccaagccaccaaaaccctcaacaggggcatctctgagttcatcgt

SEQ ID NO: 697219 - DNA, 128 bp, Homo sapiens
cggggatcaaagagcagtgggggttgctgacccagaggagagttctccaaacatgatcgtttactgcaaagtttgtctacagattttgagcgttcgaagttgacccctgactaagtatactttgctgc

SEQ ID NO: 697220 - DNA, 75 bp, Homo sapiens
gacgagaccggcgggcggacagcgactccggtgtccctggccagtgtccttccacctgtccacaagcatggggaa

SEQ ID NO: 697221 - DNA, 100 bp, Homo sapiens
gcacaggtcacagtaaggccaaaaatgtgcatactcacagagttagagagagggatggtgaaaaagatgctatggacgtatggtgcaatggtaaaaaatt

SEQ ID NO: 697222 - DNA, 82 bp, Homo sapiens
aggatggcgcggccgagtccccgtacggccacccggcgggctactgcagcactggggtgtcagttgttggtccgacccagaa

SEQ ID NO: 697223 - DNA, 51 bp, Homo sapiens
cacgtttgagtgtgctcagatatcggaccctgatgcttggtgtgacctgag

SEQ ID NO: 697224 - DNA, 87 bp, Homo sapiens
ggccaggacgctggttcatacactccaagctgacaacatagaaggacccatagccttgaagttctcacacctttgcctggaagatca

SEQ ID NO: 697225 - DNA, 97 bp, Homo sapiens
ataccgtcaagctggccaagcacaaagagcttgctccctacgatgagaactggttctacacgcgagctggtgaatgactggcaggaggactgggtcg

SEQ ID NO: 697226 - DNA, 100 bp, Homo sapiens
ctttttcttcttcaagccaatttcatcgtctgcatatcaggtgctggagaatctggtaaaagcaccattgtgaagcagatgaggatcctgcatgttaatg

SEQ ID NO: 697227 - DNA, 89 bp, Homo sapiens
tttttggaccagcccttcctcctggatttaaaaagcaggatgattctcctccaaggccctgaatgatgtgagctgagcccaggcgccac

SEQ ID NO: 697228 - DNA, 109 bp, Homo sapiens
tcagaaggatatcgacgtcgtgatccagaagtccagagctgaggactgcctgtttgcaggatttttagactctgaggagcagttggagctaatccacattatggaaatg

SEQ ID NO: 697229 - DNA, 96 bp, Homo sapiens
aaaatttggagcatatttgtttctctctgcctgatttctcctgaatttggaaactatttcagcgccctaggacctgcgcggccggtgttcacactc

SEQ ID NO: 697230 - DNA, 83 bp, Homo sapiens
gctggacggcgagcgcgagcggcgcgagaaagacgcagtggcctttgaggatgtggctgtgaacttcacccaggaggaatggg

SEQ ID NO: 697231 - DNA, 80 bp, Homo sapiens
ttctgcagaaggttgtgactttagtatacatctgcgctcctcagaccaccggcaggtgaacagcctgatgcagaccgagg

SEQ ID NO: 697232 - DNA, 100 bp, Homo sapiens
gctgctcagaagcaccactggaaactcaggtcttagtggtgcaatggctagtataagcgtgcgttcgagtaccccaggctctcctacacatgtaagcagt

SEQ ID NO: 697233 - DNA, 74 bp, Homo sapiens
gagatcccaggcggtgacagagtggagccatggctagagcctgaactctttgcttccggaatccgggattgttg

SEQ ID NO: 697234 - DNA, 99 bp, Homo sapiens
agaagaaggggaagaaaagaaggggaagaagatcaaaacccaccatgccccagatgctgagatgaatcgtcacctgtgtgtttggctttttagacatcc

SEQ ID NO: 697235 - DNA, 100 bp, Homo sapiens
tcctacgacgggctcaaccagcgcgtgcgggtgctggacgagaggaaggcgctgatcccctgcaagaggtacctggagtacaagagggtccctaacagca

SEQ ID NO: 697236 - DNA, 75 bp, Homo sapiens
aactctatttttaagggtatatttgttcatagataccggtggagccgccaccaaaatgcagattttcgtgaaaac

SEQ ID NO: 697237 - DNA, 128 bp, Homo sapiens
agatctaatctgccgtgggcctgtcgtgccagtcctgggggcgagatcggggactggcacgacaggcccacggcagattagatcttttcccagtactgatcggtgcgtggaattccagccaccacttc

SEQ ID NO: 697238 - DNA, 100 bp, Homo sapiens
gagcagatgaatgagttccgggcctccttcaaccactttgaccgggtggacaacgcgtactggctgtggactttccagggacgcctcctgcagaagaaca

SEQ ID NO: 697239 - DNA, 73 bp, Homo sapiens
tcggactatttgtagtcatgtacagaacatgatcaagggtgttacactggtggaatctccaactgataaatca

SEQ ID NO: 697240 - DNA, 83 bp, Homo sapiens
ccctggaccgccagcagcagtgagaagcgtgagtgcatctccatccacgttggccaggctggtgtccagattggcaatgcctg

SEQ ID NO: 697241 - DNA, 75 bp, Homo sapiens
ctcatctcgctgcaggaggctaaagatatttgcgaggagcaggtcaacctctcaaaggtctatggccctgtgttc

SEQ ID NO: 697242 - DNA, 100 bp, Homo sapiens
ctcgttctgggcttcgttttcatgttgctggtggaccagattggtaactcccatgtgcattctactgacggtgctggagaatctggtaaaagcaccattg

SEQ ID NO: 697243 - DNA, 74 bp, Homo sapiens
ggagaggacgaggaagagctgagtgggacaaagtggatccaaacttctacagcaaaaacttacttcttttagga

SEQ ID NO: 697244 - DNA, 100 bp, Homo sapiens
caatagtccacgaaagtgaaagactagaggccttaaaacatgctttgcactgtacgatcttagcatcagcaggtctctaattaacagaagatggcaaagc

SEQ ID NO: 697245 - DNA, 50 bp, Homo sapiens
ctggctcggagcagcagcctctgaggctctttctggcaaaggtaatgaca

SEQ ID NO: 697246 - DNA, 100 bp, Homo sapiens
gagggacctcgcagggagccatccgatgattatagtgtcacctatggccattgtccggaaatcacagtatacacaagctgctgttactttcctagtgctg

SEQ ID NO: 697247 - DNA, 100 bp, Homo sapiens
gggctgtagtgaggaaggacctgctgatgaatattacatcatataccgaaatgtttttgataaggtcagcctcagatgtcacaacctctgtgaagctctc

SEQ ID NO: 697248 - DNA, 101 bp, Homo sapiens
tgctgcaatgacgagggcctggagtgtgtgcccactgaggagtccaacatcaccatgcagacctgcgaccgcatcaagcagtccgccagcggaaccaagcg

SEQ ID NO: 697249 - DNA, 72 bp, Homo sapiens
accacagctgaactttcttctaagtgccacagtgaaatgcgtttagcccagcccctgctggtaaccaaggtc

SEQ ID NO: 697250 - DNA, 100 bp, Homo sapiens
cagcagccgcaacagccacctcagcaacagtcccacctggtccctgtatctctcagcaacctcatcaggggaaatgctgtctgtagctgagcacttcctg

SEQ ID NO: 697251 - DNA, 80 bp, Homo sapiens
tcgtacacttcttggcagtcatggacaagagctattgatagaaggctgacacattaaaagagagatatcaaaaaattggt

SEQ ID NO: 697252 - DNA, 100 bp, Homo sapiens
gaaatcatgaatgcaggcatcttacagactatttcaccttcaaacaggaatgttcgccaagcagcttttcagtctctgggacctttcatatctacttttg

SEQ ID NO: 697253 - DNA, 75 bp, Homo sapiens
agcgtagagtcgctggagcgggcggagctgtgcgagagcctcctcacttggctgcagtacggagacagcaaggac

SEQ ID NO: 697254 - DNA, 75 bp, Homo sapiens
cttcacccgggatacgctgcaagagattttccagagaaaccaggagcacccacaccctggacctctccagggagc

SEQ ID NO: 697255 - DNA, 73 bp, Homo sapiens
tggcgacggcggcctacgagcagctgaagctatcttgagccagatgattgtgcatccatttacatctttaatg

SEQ ID NO: 697256 - DNA, 100 bp, Homo sapiens
ctgagccgtctgtcctgcgccaagctgctgaaatagaaaggttcagtgccatgttccaggaaaagaagcaggaagtacagactgcaattttaagggttga

SEQ ID NO: 697257 - DNA, 75 bp, Homo sapiens
tttggaaaatagcgtttgcttttcagggtcactttccgtatcctgatccttcccagtggacagatgaagaattag

SEQ ID NO: 697258 - DNA, 130 bp, Homo sapiens
cctctaccttgcgagccgtcttccccaggcctgcgtccgagtctccgccgctgcgggcccgctccgacgcggaagtttgaaggatgacctctaggaagaaagtgttgctgaaggttatcatcctgggaga

SEQ ID NO: 697259 - DNA, 100 bp, Homo sapiens
caccatgtgtcagatcagtgagcaggccgtcctcatcgtcagcgggaacctcagcttcctgaactggctgactatggtgcccagcctggcctgctttgat

SEQ ID NO: 697260 - DNA, 50 bp, Homo sapiens
aattactgtctcaagtgatacgatgaagaagatgactttatgtgtaagaa

SEQ ID NO: 697261 - DNA, 83 bp, Homo sapiens
aagagacaggaggcagtagccaaacacccaggtgctggagaatctggtaaaagcaccattgtgaagcagatgaggatcctgca

SEQ ID NO: 697262 - DNA, 74 bp, Homo sapiens
gtcgtgatccagaagtccagagctgaggactgcctgtttgcagttcccgatgggtcccggctcggacggtccga

SEQ ID NO: 697263 - DNA, 82 bp, Homo sapiens
aacaagaggaaagacacacctaccaagaagccagtcaagcggccagggtggcccagttgaaatccttcccttcctctacctt

SEQ ID NO: 697264 - DNA, 90 bp, Homo sapiens
gaaaagaaagaattggagaggaaattgtcggacctgttctctgtggacattgactcggagctggtggaggagctgccggccgaaatcgag

SEQ ID NO: 697265 - DNA, 100 bp, Homo sapiens
ccacactcttcagcgaccacgcaggcactttcccggtccccaggtggttgaccagattgacaccctgacctctgacctacagctggaggatgagatgact

SEQ ID NO: 697266 - DNA, 75 bp, Homo sapiens
cagggcattccagagctcattgagatcattaaaatccgtgcccagacggaaggaatcaacatcagtgaggaggca

SEQ ID NO: 697267 - DNA, 100 bp, Homo sapiens
ccagggcatccaaattccattaatttttactctttgaaacagtggggcaatgagctcaatgtaaggcaaacattggtgggcaccgatcttcctgttcatt

SEQ ID NO: 697268 - DNA, 100 bp, Homo sapiens
ggaagtagcaggccgcatgcttggaggacccgtcgccatgggccgtgtgatccgtggacagaggaagggcgccgggtctgtgttccgcgcgcacgtgaag

SEQ ID NO: 697269 - DNA, 100 bp, Homo sapiens
gtcatctttttggagttttttgcttggggactattgacagcacccaccttggtgatgcaccagcaaggaatactgaagaccgatgatctcataacaaggt

SEQ ID NO: 697270 - DNA, 96 bp, Homo sapiens
tcgtttctgatgcacttgagcaggggtccccaacccctgagccatggagccgcaaggagccacacagcaggaggttgactgcattcagccagtgcc

SEQ ID NO: 697271 - DNA, 75 bp, Homo sapiens
gttccttggaagaagatgtctgcagagaaatatggctacacacacctttctgcaggagagctgcttcgtgatgaa

SEQ ID NO: 697272 - DNA, 76 bp, Homo sapiens
tgcttcttatgtcagctgagaatgaagttagaagaaagcgaattccatcaggacagcttaatgaagacaaactgaa

SEQ ID NO: 697273 - DNA, 75 bp, Homo sapiens
actgctccgcctggtggaatctgagcttcagtgatcacagtagaggtctgaaacggagaggacccaccagcaaga

SEQ ID NO: 697274 - DNA, 75 bp, Homo sapiens
tcagttttctctgccagtgtctggaatggtttgcagtgtatgtggaacttaatcagcaaattgcagcactcttga

SEQ ID NO: 697275 - DNA, 90 bp, Homo sapiens
ccaacgatggtagcttcttgcagcagtttctgaagttgcagaaggcacagaccagcacagcaccgcggaggcagccgccctggagcggga

SEQ ID NO: 697276 - DNA, 100 bp, Homo sapiens
ctgggccgccgctgctacctgcagcgccgtgtggcacgacacaaaaatcagcctcgatgacttacgagccctcaaggggaagcattttctcctggacccc

SEQ ID NO: 697277 - DNA, 75 bp, Homo sapiens
ccaccagggaatatatgaacatatcactcttgcttattctgagcttcagaggatgattccgaagaagacggagac

SEQ ID NO: 697278 - DNA, 74 bp, Homo sapiens
ttgacattgagattgccacctacaggaagctgctggaaggcgaggagagcagatcctgacgggtgaggactgga

SEQ ID NO: 697279 - DNA, 100 bp, Homo sapiens
gttgctgacccagaggagagttctccaaacatgatcgtttactgcaaagtatgcaaccactcatgtattcggttcaggaagcattaaatgccagaccatg

SEQ ID NO: 697280 - DNA, 100 bp, Homo sapiens
aaggctcgaacttacactgaaactgtcaaccatcactacttgctctttcaagacacagatttggggtgcacagagcgttttgtatgtagtccagatgaag

SEQ ID NO: 697281 - DNA, 82 bp, Homo sapiens
aaaatggactccctggctgctggagagttgaatgccagccaccagccatggaatctaggtcaacctattaagatacgtttcc

SEQ ID NO: 697282 - DNA, 101 bp, Homo sapiens
cccggaccgccgtcggctgcccgtccagcctggagtgaggaggcgtcttcctttgcatgtcagcttcggaaccaaaaagaagcttcccagagccggggcca

SEQ ID NO: 697283 - DNA, 82 bp, Homo sapiens
caacgtgttggaccttccggagcttctcagaagacagagggttttcttttgaggtgatggcatcagctgagaagggaaggaa

SEQ ID NO: 697284 - DNA, 100 bp, Homo sapiens
acctaatccgcgagacttgctaagcatggaagaggagatggttcgtgttacgcagtggccgtttaactggagatccagatgttttggaatattacaaaaa

SEQ ID NO: 697285 - DNA, 100 bp, Homo sapiens
ggctcggcggtgagatcgtcagcgctgactccatgcaggaccttctaccgctttgaggctgtgtgggatagctctctgcataactcccttcttctgaacc

SEQ ID NO: 697286 - DNA, 75 bp, Homo sapiens
tcctgctcaagatctcagagaaggaggaggtgaccacgcgcgagcggctggctgtcggcaattggattcttccag

SEQ ID NO: 697287 - DNA, 82 bp, Homo sapiens
gatccttcaggtgctggaaaggaatgaggagttacagagggccgagaaggacaggatcagcaggaacgaatgcaggaatttg

SEQ ID NO: 697288 - DNA, 100 bp, Homo sapiens
tcgctatggagaattacgttttaattgactatgacaccaaaaggatctcaaagatttcatgagacaagctggggaagtaacgtttgcggatgcacaccga

SEQ ID NO: 697289 - DNA, 75 bp, Homo sapiens
agtgaatctcagtggctggagaatggagctgaagaaggcatcgtcaaatcaggagttcatgatcaagtgttgccc

SEQ ID NO: 697290 - DNA, 88 bp, Homo sapiens
aacgtcaagcgggagtatgaccacatgaatggatccagcaattctgtggtgttcttggtcacacatttatggagtttctgaagggcag

SEQ ID NO: 697291 - DNA, 82 bp, Homo sapiens
acaatcaacagcaggcctattatctgttccgtgggccgttgctccagggagaactgcaaatatcttcatccacccccacatt

SEQ ID NO: 697292 - DNA, 137 bp, Homo sapiens
ctttgaatgggtgcatgttagtgctcaagagcctcattatctaccacccgagatgccccaagagcatggatcattttgatgacattggtcccagtgttgtaatggcctccccaggcatgatgcaaagtggcttatcc

SEQ ID NO: 697293 - DNA, 100 bp, Homo sapiens
ctggaagggaaagtccctaaaaatcacgagttcaggcgtctgagacttggtgggaacggaccttcctcttaggtctggccagcatgacccagaacttaga

SEQ ID NO: 697294 - DNA, 83 bp, Homo sapiens
catgagctggggcaccgagctctgggtaacgtgaagcacctggttctcttcctccatgaggctgtcctggtgcagtatgtgga

SEQ ID NO: 697295 - DNA, 75 bp, Homo sapiens
ggcggcggtgtgggcgcgtcaggccgcgacgagggcgctgagcgccgtgccgtccctgcagtgacaccgaggtgc

SEQ ID NO: 697296 - DNA, 100 bp, Homo sapiens
cactccaattctaccaggatggctctcttcgctggtggcaaactgatggcttcccagttacgactcttcgatccccagctgaaagagaagccagaagagg

SEQ ID NO: 697297 - DNA, 82 bp, Homo sapiens
aagtatgcaccagctgtcatcgtttgtcagaagaaagcagctggctcagaaaacagaacatccagtcatggataaaaatgag

SEQ ID NO: 697298 - DNA, 75 bp, Homo sapiens
attatgtctgggtcaaaggccaaggtccggaaagcgatcccacgtgtggacggcgagtatgatctgaaagtgccc

SEQ ID NO: 697299 - DNA, 50 bp, Homo sapiens
cggcctcccagacgacgcccacctccagtcatgcggaggaatccctttgg

SEQ ID NO: 697300 - DNA, 83 bp, Homo sapiens
gtttcatgggatcccagccacgccgggcataggaggcttctcacggcattcagcagcagcgttgctgtaaccgacaaagacac

SEQ ID NO: 697301 - DNA, 82 bp, Homo sapiens
agagccgctgggcgccggagccgaggcgagcgccgcgcgcaccactgtacctggtgtgtaagaggaagctggagagtaagaa

SEQ ID NO: 697302 - DNA, 75 bp, Homo sapiens
actgccattggttatagtgagagtacccacaacctaactttacctaagcagaatccagcaactatcacaagaata

SEQ ID NO: 697303 - DNA, 82 bp, Homo sapiens
gtgccgcttcggccgaaggcccgagcgcccgaggcgtctgggatggtgtgggaccgggaaacgttttgatggtaaattacaa

SEQ ID NO: 697304 - DNA, 51 bp, Homo sapiens
ggagtatctggaaagctcgggacaggatgtcctaccctggtccaagcctgg

SEQ ID NO: 697305 - DNA, 83 bp, Homo sapiens
cgaaggtgaagagttgtcccagctcggcccgcgggggagccccgggagccgcacgatggctcgttcggaacaccacctggata

SEQ ID NO: 697306 - DNA, 83 bp, Homo sapiens
ctggtggtacatgaactcttttccagtgtccttcaggagatctgtgatgagctgcctgtggaggaaccgattgtgtccacaga

SEQ ID NO: 697307 - DNA, 100 bp, Homo sapiens
cgtgttcaatgaccggctgtgtgttgggatcgtggcctcggagcgagcaggtgttggttggctcactgtgaccttggagcccaccacagccttcttgtcg

SEQ ID NO: 697308 - DNA, 96 bp, Homo sapiens
tggctttccagatagcactggagatcctcttccaggttgctccttgagggcaggacagttcttatggctttatccgttgcgtaagcacagagaggt

SEQ ID NO: 697309 - DNA, 100 bp, Homo sapiens
accagatgagagccttcaaaagcagtgcaactggctcagtattcacagggaaagctgtgaggtgcttaagaaaagatgcagagtctcgtagaagagaact

SEQ ID NO: 697310 - DNA, 50 bp, Homo sapiens
gatgacatcttccgaatctacattaaagggtggccctgtggagatcttgc

SEQ ID NO: 697311 - DNA, 106 bp, Homo sapiens
ccgctatcctgccaactctatcgtggtcgtaggaggctgtcctgtctgcagctgaaacagaaccgcatgagggaaagaggaaagtggaatctctgtggcccatctt

SEQ ID NO: 697312 - DNA, 75 bp, Homo sapiens
gcgcgtttggctgtgacctgacggagtatctggaaagctcgggacaggatgagttatagatagtagtatgaaaaa

SEQ ID NO: 697313 - DNA, 83 bp, Homo sapiens
cgaaggcgggcggcagaggcgatcaggcctccggtgtggctgtctctgatggtgtcatcaaggtgttcaacgacatgaaggtg

SEQ ID NO: 697314 - DNA, 89 bp, Homo sapiens
tattgctgaaaatgagtgctgtagatgacatgatagcagcatccaggatcctgatgagaaggtagccatgcttacgcaaatcttggaat

SEQ ID NO: 697315 - DNA, 78 bp, Homo sapiens
acagctccggctggaggccggactcaaccgcgtaaaagtaaagagaaatgtgtatgaccttacaagtatccccgttcg

SEQ ID NO: 697316 - DNA, 50 bp, Homo sapiens
ggatttggctggcgtcccgcaacccagcgggtgccgcttctccacccgag

SEQ ID NO: 697317 - DNA, 75 bp, Homo sapiens
ctaggactctatgacacggccggacagaccatcatcaaagaggggatgctgaccaaacagaacaattcattccag

SEQ ID NO: 697318 - DNA, 74 bp, Homo sapiens
ccaggaactgtcggaacagaaccaaaggctattggatcagctcagcagggttcagctctgttcagctccttggg

SEQ ID NO: 697319 - DNA, 100 bp, Homo sapiens
gagatcccagactgcgtggagcagatttgatggtcctcgaagatttgaggatttagggtcaaggtgtgaaggaccgagacccaaagggcctcgttttgaa

SEQ ID NO: 697320 - DNA, 90 bp, Homo sapiens
gtccgcccaggcgcagatgcgggccctgctggaccagctcatgggcacggctcgggacggtgggaatggaagtggccccacatctcaaag

SEQ ID NO: 697321 - DNA, 82 bp, Homo sapiens
ccctgtcccctacgtcctacatgagtgctgagcttgcaagacctctgctgccgggcggtcgtgtcctgcacgccggtgcacc

SEQ ID NO: 697322 - DNA, 82 bp, Homo sapiens
gaaaagattttgcatctagaggaattgaaaagggttattcaacacaatgctttggaagaccgatccatatctgataaacagc

SEQ ID NO: 697323 - DNA, 82 bp, Homo sapiens
cctctacctcctgcgaggcctcccgggctccgggaaaactacactggccaggtgcatctgcagacgcagcaggaggtgaagc

SEQ ID NO: 697324 - DNA, 98 bp, Homo sapiens
ggcggcggcaacggggcactgacctgggtggaagacagagatgtcaatgaccccatgcccaaccgaggcggcaatggactagctcctggggaggacag

SEQ ID NO: 697325 - DNA, 100 bp, Homo sapiens
cccatcactgtggcccacatcgtggtggaggcggcctctctggcagcagacatcagccacgcatctgaccttgttggccaacattggccagaaggaagac

SEQ ID NO: 697326 - DNA, 100 bp, Homo sapiens
gcctctgcagagcctggacggctccctccacgtcccgctaatggaggttggcaggatgctactaccccttcatcagtgacctcccctacagaaggccctg

SEQ ID NO: 697327 - DNA, 74 bp, Homo sapiens
gtgcccgtggaaatccccagctcccctctgggcaccgatgaagacgccattattagcgtccttgcctaccgcaa

SEQ ID NO: 697328 - DNA, 50 bp, Homo sapiens
attcgcagtggtcgcttcttctccttggcctgtcccctcagttcccaggt

SEQ ID NO: 697329 - DNA, 75 bp, Homo sapiens
ttttggccaggcttgcagcagccagaacttcaccttgagcattgctgatgtgctggtggacggacagccatgtga

SEQ ID NO: 697330 - DNA, 100 bp, Homo sapiens
cccaaggatttgattatggactcggaaatagcaaagattgcaaatagaagagtcttccaaaccagtgaggctatcacaacagctggacaaagttgtaaca

SEQ ID NO: 697331 - DNA, 75 bp, Homo sapiens
cgggtcagttggcagccatcaaagttatggatgtcactgaggtgctgcagggtgcacagctgatcgccgtggcct

SEQ ID NO: 697332 - DNA, 75 bp, Homo sapiens
ggagctagccgaattcgaaaaactctcggatcaggtgaagatcagtgaagaagaggcatttcatccttcatgaag

SEQ ID NO: 697333 - DNA, 75 bp, Homo sapiens
taagaaattttatcttttgaaacacgttctgattaaccaaggtcagctctttgtagcctacagaaatggaagagt

SEQ ID NO: 697334 - DNA, 83 bp, Homo sapiens
atcttcctgtcatggttccccttctactacatgctgaagagaaccatggagtctggcagtaccgccgccagtgaggaggcacg

SEQ ID NO: 697335 - DNA, 90 bp, Homo sapiens
cgcctggtgagaatgtattttgacaagtatgttcttaagccggccacagaaggaaagcaggagtgcatccgccccaacccttttccccct

SEQ ID NO: 697336 - DNA, 75 bp, Homo sapiens
ccatcacgaggatgatttcggaacctggagaaaatctgacagcagccatggcgagcggcagtggagacagcgtca

SEQ ID NO: 697337 - DNA, 74 bp, Homo sapiens
ccaaccatgctcaacttcggtgcctctctccagcagactgcgcggagcgtgctttggacaccatgaattttgat

SEQ ID NO: 697338 - DNA, 100 bp, Homo sapiens
ccagcaccggctccagtgggctcttatgaagtattcagaacagaagaggaagaaaaaataaaatctcagggacaagatgttacatcatcagtatatttca

SEQ ID NO: 697339 - DNA, 83 bp, Homo sapiens
ggagcggctgggcatcctcctgagactccggggtcagacgcccactccaggtttttcgttggaatatacgttgcacatttatg

SEQ ID NO: 697340 - DNA, 100 bp, Homo sapiens
ctcaaggacactgcatcgtcaaactgatcccctggccgttggaggagcagttgctctatgtgctgctgtagtgaaaccggatgttctagaaacaatggct

SEQ ID NO: 697341 - DNA, 82 bp, Homo sapiens
ggtgcatctgcagtacaggatatgaagaaattgagggttcttgccatggggtagtaaaaagaatcattcctgcagtagcttc

SEQ ID NO: 697342 - DNA, 98 bp, Homo sapiens
cagctggaaccctggggactacgacgtccctcaaaccttgcttctaggagataaaaaggtaaaataccatgaagattttgaaaaaacaaaggggagag

SEQ ID NO: 697343 - DNA, 75 bp, Homo sapiens
gccaggcggggctggggagctgcggctgttgccgccgggctgcgcaggcggtccctgactatggctccccagagc

SEQ ID NO: 697344 - DNA, 100 bp, Homo sapiens
ctcgcatcgcgcactttttggatcggcatctagtctttccgcttcttgaatttctctctgtaaaggagacctgaagattatcggctataagagaataaga

SEQ ID NO: 697345 - DNA, 100 bp, Homo sapiens
gtctgagcagtgggccaccatcgagcagctgtgcagtcgcaatggaagaagagatcgccgcgctggtcattgacaatggctccggcatgtgcaaagctgg

SEQ ID NO: 697346 - DNA, 100 bp, Homo sapiens
tccattggatttaaaagacagtcctcgtcagcactgactttcagctatggaatcgtttattaaccttgcaagaactcttcaggcacatatggaagatctc

SEQ ID NO: 697347 - DNA, 75 bp, Homo sapiens
tcagccttcccagtagctggaactacagaacaagcgagtgagcatcaataaagatgagctgaagtcaacgtcaaa

SEQ ID NO: 697348 - DNA, 100 bp, Homo sapiens
gttagtaaggcgctccacaatgggacactgagctttgtggaagcatttggcggcataccaccctgcactgtgagtttttacccacctcttgatgaaccat

SEQ ID NO: 697349 - DNA, 88 bp, Homo sapiens
ggaacccgtggtcctccgcttcatgcattgagtattctgaaacatttgaagtcatacagaagaatttctcctcccgtggatctagaat

SEQ ID NO: 697350 - DNA, 75 bp, Homo sapiens
ggtgggggcttagcgcactggaggagcggcgggcttcagacaggaaatccaggatgagtcagctgtgttatggtt

SEQ ID NO: 697351 - DNA, 101 bp, Homo sapiens
atgaagaaggagctgaactactttgcaaaggccttggagagcccagagcgacccttcctggccatcctgggcggagccataagtgtgatccttggtgacag

SEQ ID NO: 697352 - DNA, 82 bp, Homo sapiens
tgggtgtaatacatcatgaactgcaggtttccagccagagacgacactcttccatggcccggatacattccatgacaattga

SEQ ID NO: 697353 - DNA, 50 bp, Homo sapiens
tcgtgggcacgcgctcctacatggctgagaccagtatgatgtctgtgcca

SEQ ID NO: 697354 - DNA, 102 bp, Homo sapiens
gggacacctgtgaagcccaccgccctaacaggaagaagaaaggtggggcgaagccagcaatgacgaggacgatcccaaggataaaaccctccctgaagaccc

SEQ ID NO: 697355 - DNA, 100 bp, Homo sapiens
gtttaattggctctggaaacctcctacctccgttgaaaggagagccagttactaacttggaaaatggagctgatagtatcctggatcttggattagtaga

SEQ ID NO: 697356 - DNA, 83 bp, Homo sapiens
gagaaaaaagattcagattacgaggattatggatgaacgtaacagacagtttctgtagaaaatgtttcctgactgcaatgagg

SEQ ID NO: 697357 - DNA, 75 bp, Homo sapiens
gcggatccagggggtcggctgccaggtacagggagttcccattagacttgaagttgggccacgtgatatgaagag

SEQ ID NO: 697358 - DNA, 50 bp, Homo sapiens
ggtgtgcgagctacagaagcttcattaattggccttggtcctcacagctc

SEQ ID NO: 697359 - DNA, 75 bp, Homo sapiens
ggcggcgaccacgaaaccgagagcaccagcgacaaagaatgtcgttgtctgctgggtcttcccctcttcattccc

SEQ ID NO: 697360 - DNA, 112 bp, Homo sapiens
ccgggcctcaaaatggccacacgcgtacccccgtagcggaaaaacgctgaaggtgatgtggccgccctcaaccgacgcatccagctcgttgaggaggagttggacagggctc

SEQ ID NO: 697361 - DNA, 82 bp, Homo sapiens
cccagggaccaggcggaggcgtcgcgggagcctttggggcaccacagagatgcgggtgcctgtggcatttgatgatgtctcc

SEQ ID NO: 697362 - DNA, 75 bp, Homo sapiens
actgtatggcaagtctccaagactgggaagcaccgctttacatagtcctcaagatggggtctcgctatgttgccc

SEQ ID NO: 697363 - DNA, 90 bp, Homo sapiens
gaagacaaggactcacagtggctgcaagatgcagacagacatgctgaactatctggaagtccactgaaaagcaaaagcactaggaagcct

SEQ ID NO: 697364 - DNA, 76 bp, Homo sapiens
cgttttacattggctgttttcctcacattcctcaagcaggtttctctactcggacgaggtgcagattggcccggag

SEQ ID NO: 697365 - DNA, 75 bp, Homo sapiens
tcctcagctacgaggaggcgctgaggagaggtactggttttggattaggaattgttttctcacttaccttcttta

SEQ ID NO: 697366 - DNA, 98 bp, Homo sapiens
cacttcgttcaagacaggtgtttaagcctctctgatgtaaaggatggagtaaatcaagcagcacctgcatttggatttggcagcagtcaagcagcaac

SEQ ID NO: 697367 - DNA, 89 bp, Homo sapiens
tgatgagaggatgtggtggtctactctgatgtcaatcttgagggctagtcaagctgtattagtcgacaggaccatttacatttcaggac

SEQ ID NO: 697368 - DNA, 51 bp, Homo sapiens
tggaaattgcagagtaatgcctcaggtgctggagaatctggtaaaagcacc

SEQ ID NO: 697369 - DNA, 83 bp, Homo sapiens
ccagcaagagattaaagatgcagtacgccacggggccgctgctcaagttccagatttgatccagagacaatggccccgatggg

SEQ ID NO: 697370 - DNA, 100 bp, Homo sapiens
tcattgcaaactacttctggctgatgaaaatggacacgtgggaggtttaaatcttcttgcagctggagccatggcaggttccagcagcactgatgtgaag

SEQ ID NO: 697371 - DNA, 90 bp, Homo sapiens
gtgccggtgtccgccggggaggactggggaagactgtgaggcaggctctcggctgagcaaaatctattcccagtccaccctgtcactgtc

SEQ ID NO: 697372 - DNA, 100 bp, Homo sapiens
ggagcctcatcacctccagtccacatccagaggacagttatgggatggatgggaaggttaatcagccccgtctcactgcagacatcaactggcaaggcct

SEQ ID NO: 697373 - DNA, 82 bp, Homo sapiens
acaaggagggcaagtttgcttccaaggaatgcccttcaatcagctgggcaccctggcaggcagcaagtactataatgtggaa

SEQ ID NO: 697374 - DNA, 50 bp, Homo sapiens
aaaaaggcagatactgatctggagtacttgattcttcagaaaacctccaa

SEQ ID NO: 697375 - DNA, 98 bp, Homo sapiens
aagcctccttcagcatcaacttgatacttctgtctccattgaggagggctttaggaatatcctgggtgaaatactattgccagtatgagaaagagacc

SEQ ID NO: 697376 - DNA, 50 bp, Homo sapiens
tcatagacaagtttgtacatccaaattatttctcaaactctgaggctgcg

SEQ ID NO: 697377 - DNA, 74 bp, Homo sapiens
gaaatgtcaacatttgacatagcttcagatgcatttgccacattcaagccggaaaactcaaatatatgtgaggt

SEQ ID NO: 697378 - DNA, 100 bp, Homo sapiens
ggtgcaggaccagctgggagccgctgtggtcgccctcaacaggtatgaggatgagatcaataagcgtacagagatggagaacgaatttgtcctcatcaag

SEQ ID NO: 697379 - DNA, 82 bp, Homo sapiens
tggaggagaggttcaaccgcgccctggcgacgttgtggacgtttaccagcgggagttcctggcgctgcgcgatcggttgcac

SEQ ID NO: 697380 - DNA, 78 bp, Homo sapiens
ggctctcccgcgatctgcaccgggggaagcgcatggaaagaccacagcaagattctttcattcgtctcctcctagcct

SEQ ID NO: 697381 - DNA, 83 bp, Homo sapiens
ccaagagggtgttcgactgctagagccgagcgaagcccgccgccatgtctgcgcatctgcaatggatggtcgtgcggaactgc

SEQ ID NO: 697382 - DNA, 101 bp, Homo sapiens
gcagtgaacggcattctcttcaatcatgagagtcccagaagaggtgtagcaagtaatactatccaacctactccacagactatacctgccattgatcccgc

SEQ ID NO: 697383 - DNA, 50 bp, Homo sapiens
tgcagatgtactttgtattttacaagcagaattcaaagaagctttttcac

SEQ ID NO: 697384 - DNA, 100 bp, Homo sapiens
cttacggcagtgggggctgacaggaacgggaggatgaaattgctactatggagtgcatcaacaatggcaagtccatctttgaggcccgcttggacattga

SEQ ID NO: 697385 - DNA, 101 bp, Homo sapiens
caggagactctctgaagaccagcaggaaagcagtgagcccttacagcagatataatttctacagtagaatttaatcattctggagaattactagcaacagg

SEQ ID NO: 697386 - DNA, 100 bp, Homo sapiens
ctcacctcagcatccggagtagccgagactacaggtacaggtttgcagattccgccagcagcacagcaagctctacagatgagtggctctttggcatttg

SEQ ID NO: 697387 - DNA, 82 bp, Homo sapiens
cactacccacccaacattgactgcacatggaacattgaggtagacgaagagcggcggagtgcagcgggcagtgagaaagaag

SEQ ID NO: 697388 - DNA, 75 bp, Homo sapiens
tgatttgcaagatctggtcaaatttcagccatcagcaactttaccgatttgttacaactcaagcaagggccagca

SEQ ID NO: 697389 - DNA, 83 bp, Homo sapiens
actgcccggctgccttccacctccagtgctgcactctcgagtggaccctgaggagctcttcaccaagctcgaccgcattggca

SEQ ID NO: 697390 - DNA, 100 bp, Homo sapiens
tcagtactgtgggtgatatttgcctttagtgcactcttctccttcacagtaaagtggctgatgtatcctccactcctcgctggccaccatcctgctgccc

SEQ ID NO: 697391 - DNA, 82 bp, Homo sapiens
caggagtcggcggctcagttgtccatgaccctgaaggtccaggagtacccgaccctcaagatgacgacaacccccccgtgtc

SEQ ID NO: 697392 - DNA, 74 bp, Homo sapiens
acagcggctttcaacccccacctcagcccagcaattcgaacacagatatgtagaactcttcttgaattctacag

SEQ ID NO: 697393 - DNA, 76 bp, Homo sapiens
gatgctggagaccttgacacttatatcctccctggagatttcctgttagacaagacaaattagagttttcctactg

SEQ ID NO: 697394 - DNA, 75 bp, Homo sapiens
cttcgagtcacccctggagctctcagcccaaggtgtggatgaggtcaccattgtcaacattttgaccaaccgcag

SEQ ID NO: 697395 - DNA, 96 bp, Homo sapiens
ctttaatccggcagtgaccgtgtgtcagaacaatcttgaatcatgaagctactaaccagagccggctctttctcgacaaagccacagacccaagca

SEQ ID NO: 697396 - DNA, 74 bp, Homo sapiens
cagcgccgagcgcggcccgggcgccatcgagccttggcggcggacgtgcaggttccccaaggactctagcacct

SEQ ID NO: 697397 - DNA, 105 bp, Homo sapiens
gcggcgggctcggatctgctggacgaggtcttcttcaacagcgaggtggacgagaaagtggaacccaagacagaccaggatgaggagcattgccggaaagtcaac

SEQ ID NO: 697398 - DNA, 100 bp, Homo sapiens
gcagttgtctgatgaagagaagtggaatgcagtagccctctgggcctgggatattgtggttgataactgtgccatctgcaggaaccacattatggatctt

SEQ ID NO: 697399 - DNA, 50 bp, Homo sapiens
tcaacaccaagaagctgtcagccagaggttatggaggttttgatgactat

SEQ ID NO: 697400 - DNA, 75 bp, Homo sapiens
cctttttgcacacacacgaatacaaagagccatacgaccttcgggctggagtgcgacggcatgatctcagcttac

SEQ ID NO: 697401 - DNA, 100 bp, Homo sapiens
tgcagcagattctaaaaaggaagaataagcaggcttttttagatgagctggttggcgtgcagtggtgtgatctcagctcattgcaacctctgcctcccgg

SEQ ID NO: 697402 - DNA, 105 bp, Homo sapiens
gccgggcgacctgggcaccagcaggacccgaggccaggagccaggggcccagaagtgagtgacctgcaggaagaaggcaagaatgccatcaactcaccgatgtcc

SEQ ID NO: 697403 - DNA, 98 bp, Homo sapiens
ggatgaactcattgaattcttttcccgagaggctgacaatgttaaagacaaactttgcagtaagcgaacagttgaagaacaagagaggcaggaaagga

SEQ ID NO: 697404 - DNA, 75 bp, Homo sapiens
gcttctgagctaaaagcttccatgaaggttcgagaacttgtcttggacaattgcaaatcaaatgatggaaaaatt

SEQ ID NO: 697405 - DNA, 84 bp, Homo sapiens
ccttcggcagtccacccaccgccgccgcctcccaggtgtttgagaagtcccccctgcgggtgaagaacttcgggatctggctgc

SEQ ID NO: 697406 - DNA, 100 bp, Homo sapiens
acacatcactaaaaattatccctactacaggactgcggacaagggctggcaggagagaaaccctttatctgtgaaatctgtggcaaaagcttcaccagcc

SEQ ID NO: 697407 - DNA, 87 bp, Homo sapiens
ctccggtagcagggaggcgacagaaggagcgtgaggatcatccccggagaggacgggaggatcggcagcacagggaaccatcagaac

SEQ ID NO: 697408 - DNA, 99 bp, Homo sapiens
ttgtgttctctgtgtaacgtagaatgtagtcatttgaaggtcaatgagtggtcattgaagataagaaaggaaatgagagttgttgacaggcaaataagg

SEQ ID NO: 697409 - DNA, 100 bp, Homo sapiens
cggacgagaagccgctccggaggaaacggagcgctgccctgcagcccgagcccatcaaggtgtacggacaggcccggtggttctgggaagcgtacttcca

SEQ ID NO: 697410 - DNA, 80 bp, Homo sapiens
tgggatcgatgtttcaatattggaagcgctttgatttacagcagctgcagcggaatggccaaagactatgacgggtcttc

SEQ ID NO: 697411 - DNA, 100 bp, Homo sapiens
ctgggtcagtccgccgctcaccccgcggccgcaccttcccgccttctcagataacgaaggaggcccaacttcattcaataaggagcctgacggatttatc

SEQ ID NO: 697412 - DNA, 75 bp, Homo sapiens
atcaacagtttgactacataataaggatgatgaattgtactctacagttcacacaaaagatgttggacaatttct

SEQ ID NO: 697413 - DNA, 101 bp, Homo sapiens
attgggatgatgacaatgtagaggatgacttctctaatcagttacggagattaacgagaccagaaggaagcatgaaacgcgcttggtagaggtggattctg

SEQ ID NO: 697414 - DNA, 88 bp, Homo sapiens
ggcgttggaggcattaaaagaatggaggatccaagggatgcagatgatgctgtgtatgagcttgatggaaaagaactctgtagtgaaa

SEQ ID NO: 697415 - DNA, 100 bp, Homo sapiens
agtaatattgcttactatgagtctatatatcctggggaatttaagatgccaaagcagctcattcacatacagcgtcatcactggaggccactacgatgtt

SEQ ID NO: 697416 - DNA, 101 bp, Homo sapiens
ccactgtccaacatggcaatgagctcacaatgtctctctgcaccaagctccatgactcaggatttgcctggagttcctgggaaagaccagttgttttcaca

SEQ ID NO: 697417 - DNA, 76 bp, Homo sapiens
attggtttcgtgcagtagaatgttgtgtgagtttgccagggtttggatacctgatccagaggaagtctggaagtca

SEQ ID NO: 697418 - DNA, 90 bp, Homo sapiens
aaaacattttcagagactgtaacaagatcgcattttacagggagtgcatccgccccaacccttttccccctcgtctcctgtgagaattcc

SEQ ID NO: 697419 - DNA, 74 bp, Homo sapiens
tactccatgccgcttcactggcagtgagctggacatcatggagcccaaggtgcctgatgacatctacaaaaccc

SEQ ID NO: 697420 - DNA, 75 bp, Homo sapiens
ttggcgagagctacggcaacagcaagaactgccggcggctcttgtgctgcagggccatgcggaccctcagttgga

SEQ ID NO: 697421 - DNA, 74 bp, Homo sapiens
agccacatactatccgtttgttcaggaaccaccagtgacagaaattttcctgcatggagtgctacatcctcttg

SEQ ID NO: 697422 - DNA, 100 bp, Homo sapiens
gggagggatcctgaaccgcgcggccgaaccctccggatttccagatgtgacttgcactcagaagatcagtggtcaacttcagaagctcttccacgcttag

SEQ ID NO: 697423 - DNA, 118 bp, Homo sapiens
cttggtttcagagagctccctggaccatctaatggctatgggagatgagcgggacaaggagaaccggcatcggaagcgcagccacagccgctctcggagccgggaccgcaaacgccgg

SEQ ID NO: 697424 - DNA, 100 bp, Homo sapiens
gatattagcacagcagaccttggtgatgtgctacaggtggttgctgtatatggaactttatctgatttgctttctgtggccagcagtaaactcggcataa

SEQ ID NO: 697425 - DNA, 110 bp, Homo sapiens
atacattaaaggctgataataacacagttattaatggactgcttggaaatatagcgcctgcctccagcaccctgaagatgctgtgtgatatgtcctccttaccaagttgg

SEQ ID NO: 697426 - DNA, 100 bp, Homo sapiens
tctgtggtgggtccctcagcccttctgagctctgtgctgaacaagggaaaaattgaggaagcagtgaatgcatttaaagaactagtacgcaaataccctc

SEQ ID NO: 697427 - DNA, 150 bp, Homo sapiens
ctgagggaggcgcgagggcgcggagttccaggtcgagcagttaggccgcgagcgactgcggcgccgagccgactgtgccctgtccacggtgcctcctgcatgtcctgctgccctgagctgtcccgagctaggtgacagcgtaccacgctg

SEQ ID NO: 697428 - DNA, 97 bp, Homo sapiens
cggagaccagacctactgcagccacgcgggcgagcggctgtgtggatgtcggcgaagccgcgggcgagaacatccagtcatggataaaaatgagctg

SEQ ID NO: 697429 - DNA, 83 bp, Homo sapiens
ccccaacatcctgctcctgctcatggacgacgatattagaaatggctactccccagtcaattttcatctttgcaatctgcatt

SEQ ID NO: 697430 - DNA, 82 bp, Homo sapiens
ggagatcgaggacgccgagaagtactccttcatggccaccgtcaccaaggcgcccaagaagaaaaggcgacggcggattgac

SEQ ID NO: 697431 - DNA, 83 bp, Homo sapiens
atcccctggatgggggaccacaagatcctcatcgacagggtttccaggcctgaggtgcccgccctggccccaggagaatgaac

SEQ ID NO: 697432 - DNA, 101 bp, Homo sapiens
aaaaactcagtgagacacaatttatcattgaataagtgttttaagaaagtggacaaagagaggagtcaggtctatgttaacaatgaatgggcaaccagtgt

SEQ ID NO: 697433 - DNA, 71 bp, Homo sapiens
gaagagctgggagctgctgaaggaaggaattcctcctgatcagcagagactgatctttgctggcaagcagc

SEQ ID NO: 697434 - DNA, 98 bp, Homo sapiens
ttgggatgtccaccacggtaatggaactcagcacatgtttgaggatgaccccagattatgtttgagaccttcaacaccccggccatgtacgtggccat

SEQ ID NO: 697435 - DNA, 100 bp, Homo sapiens
atcccttgctcccatccctgcagcatgaacaagatgacctctcccgacaggatgacaatgatcccccaaaagaatatgatcctgggcaatttgcaggcct

SEQ ID NO: 697436 - DNA, 51 bp, Homo sapiens
gaagcccctcggagcaggcctagtgatcagcagctggactgtgccttggac

SEQ ID NO: 697437 - DNA, 76 bp, Homo sapiens
tggcaagcaagtttaatcagacctgctcacacttcagaatagagaaggttatcttgacgaatcagattacaaccca

SEQ ID NO: 697438 - DNA, 100 bp, Homo sapiens
attgctactaactacctcatcttcagtcaaaagcctgaatttcaggatctttcagaggaagaagcccctccagatggtgctgttgccgaatacagaagag

SEQ ID NO: 697439 - DNA, 74 bp, Homo sapiens
caggtaccccttccagagaagccaggagcacccggcgtcccagacaacaacacagtcactcctggcggcaaacc

SEQ ID NO: 697440 - DNA, 75 bp, Homo sapiens
atcagggaggctttcagccggagaagcgagtttcagctgccagagactgctgctactttgaaacgtacgatagag

SEQ ID NO: 697441 - DNA, 75 bp, Homo sapiens
cgcggcccggagctcgggaccggagcagcatttctttctattactactatctatgctgagactggttcaggtttt

SEQ ID NO: 697442 - DNA, 98 bp, Homo sapiens
aaaaggaagagatttagagtcacgactcatagaagcatacgttattcaatgtcaggctgaagctcaagaaggtggttatcactaggctaaaactggac

SEQ ID NO: 697443 - DNA, 51 bp, Homo sapiens
gcagtgctacagcatgtacaagccacaagtatatggttatgatgacttgca

SEQ ID NO: 697444 - DNA, 101 bp, Homo sapiens
tgacaaactctggagtaattggagccaagaaatgagtatagatgctgagctttttataccaccaaagatcaacagaagaacccagtggaagctgagcctgc

SEQ ID NO: 697445 - DNA, 50 bp, Homo sapiens
aggattccaagtaactcttatttgatgttgaaagtgtgatgaacagtgtg

SEQ ID NO: 697446 - DNA, 90 bp, Homo sapiens
ctgcgcccaacatacccattatcgattatgagcaaccaaccagtggttcatcccagccgtgaggggggacattccccctgggtgtgcagc

SEQ ID NO: 697447 - DNA, 75 bp, Homo sapiens
aaggattccaagtaactcttatttgcctgctcctgcaaccagcacgcccgacgctgccggttcaactctgagctg

SEQ ID NO: 697448 - DNA, 100 bp, Homo sapiens
ccgcagcccgccgggagctctgaccgaggcgcctcgctggggcggggaccttgccttgcccgggatttatcagcaagactgttgaacgcataactgccca

SEQ ID NO: 697449 - DNA, 75 bp, Homo sapiens
cagataatgaagctgattttttagctgaggccttggacaagattcgctatgagagcctgacagacccttcgaagt

SEQ ID NO: 697450 - DNA, 100 bp, Homo sapiens
agctatgggaacgtcatcgttatcaccattaactaccgtctgggaatactagtggtctgcaagaagaatctggacagtaccactgtggccgtgcatggtg

SEQ ID NO: 697451 - DNA, 100 bp, Homo sapiens
atattcaagaaaaaataactgagtatctggaaagagttcaagctctacattcagcagacagagtctcgttctgtcacccagcctggtgtgcagtggttca

SEQ ID NO: 697452 - DNA, 110 bp, Homo sapiens
agtgttaacagtgtagggaaaatagagtgtgtatcagcagagaccaccgaagactgcatcgccaagatcatggtcaccttccgcaaccctgtcattgagaggattcctcg

SEQ ID NO: 697453 - DNA, 50 bp, Homo sapiens
tgctgatctaaacgtggaaaaaattgttcctgcctgattcataaacatcg

SEQ ID NO: 697454 - DNA, 75 bp, Homo sapiens
taaacaagagatttccacagaagggttctggcttccagtcgtcgcggagggagaagtatggcaacgtgttcaaga

SEQ ID NO: 697455 - DNA, 82 bp, Homo sapiens
acgggtctggagtgcgtgggggaccggctgttggcgggttccttcaatggtgccttagctgctgttcctgtccaggacctgg

SEQ ID NO: 697456 - DNA, 100 bp, Homo sapiens
tattcaaaaaactccaggctggcagcattgcaaatctcctgcaaagaagctgagccatgcaattagtaaatctttggggtgtgtacccacgagagaaccc

SEQ ID NO: 697457 - DNA, 103 bp, Homo sapiens
agcacctgcacctcagagtaaagctgctggacaacaccatggaaatatttgacattgagggtggaagaccaacacacacctccccagacagcccagcacgcca

SEQ ID NO: 697458 - DNA, 100 bp, Homo sapiens
cctgtttctgctggattgcgcaggtctgatgaccctggagctcttggcttccatacgtgtctcagacagttctgaatgcagtgatggggaatggtctgct

SEQ ID NO: 697459 - DNA, 82 bp, Homo sapiens
catagccctgcacctgcagccagctggcctcgggcttgaaaacatggcgggcatcacttataaggaagaggaggacttgaca

SEQ ID NO: 697460 - DNA, 83 bp, Homo sapiens
cctgctggccagcctacccaaccaggtcagaagagatcaattctacagaaatttccagtggttctgttgaggctttatggaat

SEQ ID NO: 697461 - DNA, 101 bp, Homo sapiens
aggatgagcctgcagagcgcgcagtacctccgtgtgaaaaactcaaattactgtcttccatcatataccgcttataagaactatgattattcggaacctgg

SEQ ID NO: 697462 - DNA, 83 bp, Homo sapiens
cagcctgcggagcctgtggggcaggtttgttgataagccggggcccttcgtgggaccctgcggtcactggatcaggccctcag

SEQ ID NO: 697463 - DNA, 90 bp, Homo sapiens
cggaggaggatgctcctgcctcccagagaggggagccggcgaggatcaaaatcttcgaaggagggtgagccctattcccagaggcaggtg

SEQ ID NO: 697464 - DNA, 82 bp, Homo sapiens
gagcccgaggtgctgacgtcgcaaaaaaattggatagtcaaaatgcagatcttcgtgaaaacccttaccggcaagaccatca

SEQ ID NO: 697465 - DNA, 100 bp, Homo sapiens
tgctgctctgcctgctccacaagcggcgccgcgccctcggcctgcacgggtttggtgcacctcgatttggaggaagtagggcagggcccttatctggaaa

SEQ ID NO: 697466 - DNA, 101 bp, Homo sapiens
tcgaatgctccacgccctcctgcgatctagaatggttcttgattattacagacctctttctgaaaagcccggaattggtacaagccatgtttcccaaactg

SEQ ID NO: 697467 - DNA, 100 bp, Homo sapiens
agttgcgttgtaataaacctgagaaaatggacccaagtggggtcaaagtgctggaaacagcagaggacatccaggagaggcggcagcaggtcctagaccg

SEQ ID NO: 697468 - DNA, 100 bp, Homo sapiens
ggtgatgaagtctacgctaactgtatggtgattgatcaggttggtgatgacaaaactgtgaagcagtggaaaatggatgggccaggctatggagacgagg

SEQ ID NO: 697469 - DNA, 100 bp, Homo sapiens
aaagccaagaggaggacagttcgctacacagcaatgcatcgagaagagtcaagtaccattggccaggatcaaacgcttatggaacgtgatacagagggtg

SEQ ID NO: 697470 - DNA, 50 bp, Homo sapiens
gggacgtggggtccaccggtacagatgacggagccctgcgaccaggaacc

SEQ ID NO: 697471 - DNA, 75 bp, Homo sapiens
ctcatataagaagaaatctatgttagccgagaaagccaagagccatctggaggtgccgctggaggagaacgtgaa

SEQ ID NO: 697472 - DNA, 100 bp, Homo sapiens
gtgcactgctacaggactctactatggaggacttcagaaatgggcttgggaaccagctgagttcaggatcccacacctctgctgcatctcagtgtgactc

SEQ ID NO: 697473 - DNA, 95 bp, Homo sapiens
gtttgtggacaaagtcagcgtcccgcagacggacatgaggcctgagaatgcaacaggtgatcgagaaccacatcctcaagctcttccagagcaac

SEQ ID NO: 697474 - DNA, 100 bp, Homo sapiens
cgcagctggtgggtgtacacactgctgtttaccttggcgaggcctttcaccaagtccatggtactactagttcaggggtacctagcaaaatcaggctggg

SEQ ID NO: 697475 - DNA, 82 bp, Homo sapiens
tactgctttaatccgtcactttccacatggaaccattaaagagatcctggggactgcccagtcagtgggctgtaatgttgat

SEQ ID NO: 697476 - DNA, 82 bp, Homo sapiens
gttggcaacatttccgagaaagcttcagacatgcttataagacaactcttagctgatgtacagttacccagcacgtgtacct

SEQ ID NO: 697477 - DNA, 75 bp, Homo sapiens
gaaagttgctgaaggcaggaggggaaaactgtggtatgtctgtgtgtaatggtaaaatatatatcctgggcggaa

SEQ ID NO: 697478 - DNA, 80 bp, Homo sapiens
gattcgggccgtcaccctgcctcccctgcgtcccgccaccggccgcttctgtcctcgtattctaccttgtaaatactgtt

SEQ ID NO: 697479 - DNA, 100 bp, Homo sapiens
caacttcacgctggcgcgagccccgtcctccttcgccgccgcgcacaaccgcacgtgcagcgtttgcctcagcatggagggcggggccgcggcagccacc

SEQ ID NO: 697480 - DNA, 75 bp, Homo sapiens
agtgtaaactcagcacgagccattttgcagttctcacaataccttcatgaaaatgcgtcctatgtccgccctctt

SEQ ID NO: 697481 - DNA, 90 bp, Homo sapiens
gtcccgctcgctgggagagaggtacctctccttttccctctccctttccctaagggttgtccttggctatcttgatgacccaagtgagga

SEQ ID NO: 697482 - DNA, 58 bp, Homo sapiens
cgagcttttcctccaggcctttgagattaacaagcacaagccctggctggagcccacc

SEQ ID NO: 697483 - DNA, 90 bp, Homo sapiens
cacagcgggatttatataggaatgtgttgttagagaactacagaaacctggtctttttgggcatgacagcaagcgctgtggcggctttga

SEQ ID NO: 697484 - DNA, 50 bp, Homo sapiens
cgagtccctccggaactcacactccagggcaagttaaagtcttcagagcc

SEQ ID NO: 697485 - DNA, 75 bp, Homo sapiens
atggcttttgtgctcattttggttctcagtttctacgagctggtgtcaggttaaaaagatcaagtggcatgagca

SEQ ID NO: 697486 - DNA, 75 bp, Homo sapiens
gtcaccaacgtctggatcaatgccaagaagacgctggagggaggctgttaggagggactctgagcttcacacctg

SEQ ID NO: 697487 - DNA, 83 bp, Homo sapiens
gcctgcagtggaccacagtcatcgagaggaccttccacgtggattctccagacgagaggggagaagcccgaggaagattgacc

SEQ ID NO: 697488 - DNA, 100 bp, Homo sapiens
atgaacccagaggtcgtggaggtggccgtggaggcagaggtggcatgggtggtggtcctgctccatgatgtccgtgatgtgagcgtggaggaggagaagg

SEQ ID NO: 697489 - DNA, 112 bp, Homo sapiens
ctgaatggctgtgatactggacatgcaaaaatcacatgtggctatgaccttcctgcaaaatgttcacctttccttgccagtgaagatggcgtgcttggcggagtgattgtcc

SEQ ID NO: 697490 - DNA, 82 bp, Homo sapiens
ggacctgaaagttatgtggctcaaatgattgtgccatcactggtgcaagctatatttaacggagatcctgatgaagttcgag

SEQ ID NO: 697491 - DNA, 51 bp, Homo sapiens
ctcccgaatagctgggactacagtatcctagaaggaaaacatcaccatggc

SEQ ID NO: 697492 - DNA, 98 bp, Homo sapiens
gctgcaggaactacagcgttgggctgggcccctcccagccacgcacctccggcaccttggggaggctttcatctgagtggcacagtaactgagctggc

SEQ ID NO: 697493 - DNA, 74 bp, Homo sapiens
aacagctgtggaaagaagttgcaaaacactgggaatgcctgaactagatgaatacaccatggagagggtcctag

SEQ ID NO: 697494 - DNA, 74 bp, Homo sapiens
cgggcccacgggtcccggggatggcgtcggagccgcgctaactccgctgcatcttcctcccgtgaggctggccg

SEQ ID NO: 697495 - DNA, 95 bp, Homo sapiens
tgtgaggagttgctaaatgctcaggagacggtggctcagggagtaaaggaaggccagttgagcaaacagaagtgttcctctgcatttcaaaacct

SEQ ID NO: 697496 - DNA, 88 bp, Homo sapiens
cgggatcctcatgttcactacccttcatgcatgaaagacaaagctactcaggtgcctccatatgcgtcggagaaccagacctgcaggg

SEQ ID NO: 697497 - DNA, 96 bp, Homo sapiens
atcacctgccccatgcaacttacagggagtttgagaaactctctgatttcttcaaaactcactatcgccttgagctaatggagaaggacctttgtg

SEQ ID NO: 697498 - DNA, 73 bp, Homo sapiens
ggaacatggcgttgctggtgcgagtccttgtcctggacccaagccagaagcctctgcaaagcttccttccaga

SEQ ID NO: 697499 - DNA, 97 bp, Homo sapiens
tgctttcttcaagatggaacaaagactgttgagtatgctccatgtagatcaccggcaacctttggcactgcatccatgagcatgcccacaggattcg

SEQ ID NO: 697500 - DNA, 98 bp, Homo sapiens
cgccgcctccccgcggccccggcgagcagccgccgcccgccgcacccatgaggtgatttgatgaaggctgctgcaggagagttcgcagatgatccctg

SEQ ID NO: 697501 - DNA, 144 bp, Homo sapiens
aaggtggtcctggtgggcgacggcggctgcgggaagacgtcgctgctgatggtcttcgccgatggggccttccccgagggaccatcccgcggtcatcaagcgacgcttcaccagcgtcctggtggtgtccagtctctcacccct

SEQ ID NO: 697502 - DNA, 103 bp, Homo sapiens
tgcaggaggaaggcatggactcggagattggctgcctcatccgcttctatgcaggactcagcccaaaaccatgtttgcccaagttgaatctgatgatgaggaa

SEQ ID NO: 697503 - DNA, 101 bp, Homo sapiens
ctttgggtttagcacgatgagctcaatcggcactggggaactttttacccctgaatgcaagtttaaagaatctgtttttgaaaattattatgtaatctact

SEQ ID NO: 697504 - DNA, 82 bp, Homo sapiens
cccagcgaagtcttcatcaaccgggaccgtggcttcggcttcatccgcttggttgtggcagcactgcctgaaggtatgagac

SEQ ID NO: 697505 - DNA, 53 bp, Homo sapiens
ttgttttcttcgtactggacagtttagggatgacatgccaagctcgaagctcc

SEQ ID NO: 697506 - DNA, 111 bp, Homo sapiens
tgtatttgtggcttaaactcttggcatttggctttgcctttctggacacagaagtatttgtgacagatcctgtggtattgtggaaattcccagaggactttggagaccagg

SEQ ID NO: 697507 - DNA, 74 bp, Homo sapiens
gtctgtacacctgtccccctgcttcagggctgatggaaagatctcagaacaatcagatgcaaagctgaaagaga

SEQ ID NO: 697508 - DNA, 90 bp, Homo sapiens
ccaggatttcctggaagcagagaaatgacggatgtttccagtcctaaagattagtgtcacagggttggaccccaatgccatgtactccct

SEQ ID NO: 697509 - DNA, 74 bp, Homo sapiens
agggaaggaaatgtgcccaacatcatcattgcgctgaccacagtggccgagaagtcgcgcgtgctgcagctgga

SEQ ID NO: 697510 - DNA, 74 bp, Homo sapiens
gcagaccctcgacctccagtgcagttcccaaaggaatgtttgctgggggattgaaggagatggaacaggaagag

SEQ ID NO: 697511 - DNA, 83 bp, Homo sapiens
ccgcaccatgccgctcctaagcctgcacagccgcggcggcagcagcagtgagaggctatgcccactggaagggccaagtgctg

SEQ ID NO: 697512 - DNA, 96 bp, Homo sapiens
tttcactctggtcacgcccgagctctgatgcaagcgaagaaccttttccctaatacgtacctcattgtgggagcataccataaagtctccaaagga

SEQ ID NO: 697513 - DNA, 100 bp, Homo sapiens
atgacagagacccgtgagccagctgagactgggggctacgccagcttggaagaagatgatgaagacctttccccagagttttgcggcctccaggtggtgg

SEQ ID NO: 697514 - DNA, 96 bp, Homo sapiens
tttgaagattctggccaacgcagacaccatgaaggtgctgggagtgcagcggcctctcctacaggctcatcagattcaagagatgtttccccaggt

SEQ ID NO: 697515 - DNA, 73 bp, Homo sapiens
ggatattgaaatggacagtggagatgaagcctaagaatatgatcagaaggtggtcttctgccctgttaaagaa

SEQ ID NO: 697516 - DNA, 98 bp, Homo sapiens
aaggacctaaaggcaaccctgggccccaaggtcctcctgggagaccaggtgctccagctgctgctcctgcccctgcctcagtcccacagatatcccag

SEQ ID NO: 697517 - DNA, 82 bp, Homo sapiens
aacagaaacacttcttttattttcctgtaatatatctgtatcatcggagatcagaccaaacattgtctggcttgcactgtaa

SEQ ID NO: 697518 - DNA, 100 bp, Homo sapiens
tgagggagagaaccagcacttctgggacgcacagagaccgtgaagattccaagttcaggagaactcgaccgattctgtttctggcgtctgcatacgcaag

SEQ ID NO: 697519 - DNA, 100 bp, Homo sapiens
cgagcggcgcccagcccagcgcctcggccgaacccctccgcagcaggtccagcccagaatcaaatgcaggttccatctggatatggattgcatcatcaaa

SEQ ID NO: 697520 - DNA, 83 bp, Homo sapiens
ggcaggaccagcgggcgggggcccacgaacagtcttgcactgtttcctaggctggagtgcagtggcacaatcacagctcactg

SEQ ID NO: 697521 - DNA, 76 bp, Homo sapiens
ggctctgggacgtcctgaatggtaactgtgtaaggatcttcactggacacaaggttgctccttgagggcaggacag

SEQ ID NO: 697522 - DNA, 88 bp, Homo sapiens
ctctgcctggagttaacaacaattgtgcaacagcacttttcatccaaggatttcaaagtgctttacaaatacgcactaattaagcctc

SEQ ID NO: 697523 - DNA, 100 bp, Homo sapiens
tcagcccccatggctgcaggcatcattgcgctggccctggaagccaataggagagaagtttgctgaggaatgccttcaagcacaaagtgatgaatgactg

SEQ ID NO: 697524 - DNA, 74 bp, Homo sapiens
cctccactgactatgacctatctgacaagagcatcaaccctctgctttcaccagtcgcttaagtggcaaccgtg

SEQ ID NO: 697525 - DNA, 80 bp, Homo sapiens
gccgtgccctggggctgagccctcagacaggccgacggtcgcaaggtcctacggtcaagcatccgggagtttctatgcag

SEQ ID NO: 697526 - DNA, 50 bp, Homo sapiens
catcaatgccaactacatgcctacatctgccaccaaatcctggatcttta

SEQ ID NO: 697527 - DNA, 89 bp, Homo sapiens
tccctctccagtcccgcgtcggtcgccgcagtcacggagcgcacagcatccacaatgggtaccccagcctcggtggtcagtgagccacc

SEQ ID NO: 697528 - DNA, 100 bp, Homo sapiens
tgactatgagtatgagctattatagaaaccatggtttactcctggcttgggggcattaggaagcactggaggctcttcgggaactaatggatctaacgcc

SEQ ID NO: 697529 - DNA, 101 bp, Homo sapiens
ctcctgagtagctgggactacaggaaaaatgctttctgaaagcagctcctttttgaagggtgtgatgcttggaagcattttctgtgctttgatcactatgc

SEQ ID NO: 697530 - DNA, 100 bp, Homo sapiens
cctcccacctgtcctcaggcatatcaaaggtcacgcaatatttaaactcacgtatctaagcaatcacgactataaacacctctactttgaatcggacgct

SEQ ID NO: 697531 - DNA, 100 bp, Homo sapiens
ggacgaacaatagaagatctaaaaatgtatgaacaccttttccctgagcttgttgatgattttcaggtgcccctgggcgctgggattgctctagcctgta

SEQ ID NO: 697532 - DNA, 90 bp, Homo sapiens
ggacaagctgcgcatgatcgtcatgggacacagaagacgaacagcctacacctacaaccccgagcctcagatgtacgcccccagcagcac

SEQ ID NO: 697533 - DNA, 74 bp, Homo sapiens
cacttggagtccggacatctgaaacttgatgccgctcctacgaggactgctgtggctccaggtgctgtgtgcgg

SEQ ID NO: 697534 - DNA, 90 bp, Homo sapiens
ctcagtaaaagacagtgctcggattccaccagatgtgttcactgttggcagaatttgtgccagccgtaccagaatttatcataaactgaa

SEQ ID NO: 697535 - DNA, 100 bp, Homo sapiens
ggactcatggaggctgagcatttattcagggacttgccatgaggtgttgaagccttgtttcactgagttggagagactggacctaaatggcgcagcatga

SEQ ID NO: 697536 - DNA, 97 bp, Homo sapiens
ggcgcggcccgcgcgcagccggccgattctgaggttgggaccaagaaggaactatctattttaaaccaaaaattttccgaagaagtaaaaaccccag

SEQ ID NO: 697537 - DNA, 101 bp, Homo sapiens
tgaggaagtccccgaggcgcacagagcaagcccacgcgagggcacctctggaggggagcgcctgcagatatttggagttcttacaacatggcagacattga

SEQ ID NO: 697538 - DNA, 101 bp, Homo sapiens
ccgctgctcacttaaatacagatgaatgaagaccccattcggaaagacacctggccagcggtccagagctgatgcagggcaaagcccaacaccttccccca

SEQ ID NO: 697539 - DNA, 80 bp, Homo sapiens
ctcatctataacctccttgaaaaactgggatacatggatctggcctcaagactggtgaacctcttaaaagcctctgtaca

SEQ ID NO: 697540 - DNA, 90 bp, Homo sapiens
ccacttgcttgggatcctttatcctggtcatcttctatttccaaagtatgttgcacccaggagcggagagtttaataggcaagaaggaag

SEQ ID NO: 697541 - DNA, 100 bp, Homo sapiens
tttggatggcatttcccatgcacctaatgctgtgaaaaccgcattttatttagcagagttttttgttaatgaaggaaggtgtcttgctgcaggtaactaa

SEQ ID NO: 697542 - DNA, 82 bp, Homo sapiens
gccgggtgagggcgccgagaggctcggtgggcgcgggcggcgaggtgctttgtaacagagccagactggtttcctatctccc

SEQ ID NO: 697543 - DNA, 74 bp, Homo sapiens
gcttgggtaaggacatgaagacagttcctgtcataccttttaaaggtgcagtcagcctcagtttccaaagccgg

SEQ ID NO: 697544 - DNA, 83 bp, Homo sapiens
ccgcaaccattgacgccatgtcgggttattcgagtgaccgagaccgcggccgggaccgaggggctcaagggttcttgttgatg

SEQ ID NO: 697545 - DNA, 88 bp, Homo sapiens
gaagcagcgggggggcaggcgatcgaagatggaatggggcgagtccttgctcaagatgtatatgcaaaagacaatttaccccccttcc

SEQ ID NO: 697546 - DNA, 90 bp, Homo sapiens
agctcatcctgaagcttcggcagcactatcgggagctgtgccagcagcgagagggtgtgatccctcacatccacaaatctctgattggaa

SEQ ID NO: 697547 - DNA, 100 bp, Homo sapiens
ttcggaataccctagaggaacatccggagacttcactgcccaaacaggaagtctatgatgagtacaattgatgcgatgaagagagttgaagaaatcaaac

SEQ ID NO: 697548 - DNA, 118 bp, Homo sapiens
cggatgttgcggacagtatgaggcaagcgcagggggacggggaccagcagctgtcgccgccgctctcagaaatacatgctacaggatttaactatcagaatgaagatgaaaaagtcac

SEQ ID NO: 697549 - DNA, 96 bp, Homo sapiens
cacgacttcgacgccagcctctcgggcatcgggcaggaactgggcgccggcgcttacagcatgagtgggtaattccagaattgattggccatacca

SEQ ID NO: 697550 - DNA, 88 bp, Homo sapiens
ctggtcgaatgaggcacctaaaaattgtataccgcagattcagaagctatggagatattttgcatagaatgaaggatctctgcagata

SEQ ID NO: 697551 - DNA, 74 bp, Homo sapiens
cagcgactggatacagaagacagccacctcagagactgaagaatcggactctgaaatacctaagaatgactgga

SEQ ID NO: 697552 - DNA, 100 bp, Homo sapiens
cgggaagcgcagccatggctctgcggaggctgggggccgcgctgctgctgctgccgctgctcgccgccgtggaagggtggacaagtccttcacttctcgc

SEQ ID NO: 697553 - DNA, 100 bp, Homo sapiens
ctctacagactccaaaaggcccttttcagggcccccaaactgtcacagaaagagctgttaacacttcctagataacggggatatgggattagaactgttt

SEQ ID NO: 697554 - DNA, 100 bp, Homo sapiens
atacctccattaatgccaggtgttcctcctctgatgccaggaatgccaccagttatgccaggcatgccacctgggaaatccacactgatttgtacgtctg

SEQ ID NO: 697555 - DNA, 75 bp, Homo sapiens
atgaaaactacttcaactaaaagccaaccacttgaacaaggtatgagaaagtgccagtcatcttggttgggaaca

SEQ ID NO: 697556 - DNA, 96 bp, Homo sapiens
ctccgcggtccggcccggggccccgggatctcggctgtccttcctcccgggaatgaaggatggcagcatgccgtgcattaaaagctgttttggtag

SEQ ID NO: 697557 - DNA, 100 bp, Homo sapiens
gcagaaagttgaacagaacgcggctcccagccacaccaagttcaggttggatggcaagcatgtggtgtttggcaaagtgaaagaaggcatgaatattgtg

SEQ ID NO: 697558 - DNA, 100 bp, Homo sapiens
ggccaggcagtctctgtcctccagccaagttttccctcatcaaaacgatcttcgcagattctgacaggaagctggagaagcttcgagagaaggagcgtaa

SEQ ID NO: 697559 - DNA, 75 bp, Homo sapiens
actaaggagctgcagcagcatgtaaagtcagtgacagccccatcccagctgcagctccagcaggtggcgctgcag

SEQ ID NO: 697560 - DNA, 98 bp, Homo sapiens
agtatagatcctggcctcaaagaagatactctgcaattcctgataaaaggggtctctaataaattcccttaagccatctgggcctacaccagcatccg

SEQ ID NO: 697561 - DNA, 75 bp, Homo sapiens
gctgtattcagctcaggaccaggcaccttctgtggaaggtgtcaggcccatattgtgtctggagttggttcctgc

SEQ ID NO: 697562 - DNA, 100 bp, Homo sapiens
gggatcgtgaccgagaccgtgaccgagagcgtgaccgagagcgcgaatatcgtcatcgttagaaggagcagacgcctccgcctagacctgaagcctaccc

SEQ ID NO: 697563 - DNA, 98 bp, Homo sapiens
gcctgcctgagtctggcaccatttacaacttcagtggctgcatcagcaacgtcttcgtgcagcggctcctgggtagaactgcacttcagcaataatgg

SEQ ID NO: 697564 - DNA, 74 bp, Homo sapiens
tgagaaagcagctacagagaaatgctggtttggtatacaaactggactctcaggacaaaacgacaccagccaaa

SEQ ID NO: 697565 - DNA, 100 bp, Homo sapiens
ccacaaatccagtgaacaacgatggcattttgaaaacagcaaagtttaattggttggggtcagataagaagaggagtgacaatcaagccaacagtagatg

SEQ ID NO: 697566 - DNA, 74 bp, Homo sapiens
gtctctccagatggatccctctgtgcttctggaggcaagatgtggacgagtgctcactagcagaaaaaacctgt

SEQ ID NO: 697567 - DNA, 100 bp, Homo sapiens
gaatgctcctaaatgatcgcaaagtcaattgcctgtggttacctccagtacaattgtgagatgccgttcatgcaggacgtacatcaatcctttcgtcagc

SEQ ID NO: 697568 - DNA, 75 bp, Homo sapiens
tttcacctgatccaggccaacaaggacacattggcgtgagacctgggagtacgttgtgccaaatcattgccactt

SEQ ID NO: 697569 - DNA, 71 bp, Homo sapiens
tgctccggggaggtcacctgacgaggaggaatgtttacccttgcggaagttgcatcacttaatgacattca

SEQ ID NO: 697570 - DNA, 100 bp, Homo sapiens
ccagagtcggcgtaactatcgcctgacagggttgggtatctacagccattggttgctgttcaggtcagctttgctcctaacaacactgggaaagaagtaa

SEQ ID NO: 697571 - DNA, 100 bp, Homo sapiens
cctacgtcccgctgccgtcgccgccgccaccatgcccaagagaaaggaaggtgctcgggtcttcggggcactgggtcccatcggtccctcctcacctggg

SEQ ID NO: 697572 - DNA, 74 bp, Homo sapiens
tcaccgtgacatccgaggtgcctttctccaaaagatgtctttggtggacttgggaaagaggttgctagaagcag

SEQ ID NO: 697573 - DNA, 96 bp, Homo sapiens
cgacataatctgtccctgaataaatgttttcagaaagtggaaagaagccatggcaagcttgttcagattattatcaatacaacacatttggagaaa

SEQ ID NO: 697574 - DNA, 100 bp, Homo sapiens
gcgagagctggagaagctgggattggagattccacccaaacttgctggtcactgggaggctccataaaaatacagactcaccagttcctgctttgatgtg

SEQ ID NO: 697575 - DNA, 75 bp, Homo sapiens
agcatgtggtttggcacccaagtcaggaggccaagggcgagatcccagaagtggcattcatgaagtgatcgtagt

SEQ ID NO: 697576 - DNA, 102 bp, Homo sapiens
ccccacctgcccggtgcccgaggaggcagccaagctcgtggcctgcctctgcgtgcgtgagaagccctaccactgcaactgggacggctgcggctggaagtt

SEQ ID NO: 697577 - DNA, 100 bp, Homo sapiens
cgtcggagacatgggagacccggggtcggaggtttttcgttggaatatacgttgcacatttatggcgattctgagtgtgagggcagacttctgccaggct

SEQ ID NO: 697578 - DNA, 100 bp, Homo sapiens
cgccaccaccctcccagccacctctgaagttgccaggcttcccaacattcttgtctgtgaaatggtggagtcaatgaagaaagtagcagggatggatgtg

SEQ ID NO: 697579 - DNA, 83 bp, Homo sapiens
atcgcctcggtgcagggctccaccccgtcgcctcgacagataacgaaggaggcccaacttcattcaataaggagcctgacgga

SEQ ID NO: 697580 - DNA, 83 bp, Homo sapiens
tgggaacccaggccccgccgaggcggccagtcctcatcaccgggggcatcgtggccacagctgggcgcttcacccagtggtac

SEQ ID NO: 697581 - DNA, 101 bp, Homo sapiens
tcatggtcttgctgattccactcaacggagctgtggccgtgaagatgcgcgccttccagcagcagccgctcttctaaaacattcaaaccaaagaagaatat

SEQ ID NO: 697582 - DNA, 123 bp, Homo sapiens
ggctggatcatctccaataaccctgagttattcagtggcatgctgaaaatacgaatcggagtcaaggaaacttttcttttgagctactgacagcttaactcctgtgaacaaaatttggagcat

SEQ ID NO: 697583 - DNA, 100 bp, Homo sapiens
cagctgcctgacaacaccgatcacagaccaacaaagtggccacaaactcaaaggtgcgggagcaagtgcggctggagctgagcttcgtcaactcagacct

SEQ ID NO: 697584 - DNA, 100 bp, Homo sapiens
cgacgggcagccccggactctggtcagtatagaccttctgatttgctgtgccctgagacatatgtttgggtacccattgagcaatgcctgccttcacttg

SEQ ID NO: 697585 - DNA, 76 bp, Homo sapiens
acctcctttccaactgggcaaaccccgcttccagcaggtattgttgcagcatctggcagtgagactgaggatgagg

SEQ ID NO: 697586 - DNA, 100 bp, Homo sapiens
agagggaatggaccccgatggtgtcatcgaggtaagaaacggttgtggatcttgaagctttggaaaggaatgacaccaaggaagatgtctttgttcacca

SEQ ID NO: 697587 - DNA, 97 bp, Homo sapiens
caattgcaaagagcttagaatatttatttgaaaggaatgaggatcctgcactcttcctccctcaggcttttgcagaaatgctgaaagtgaacaaaac

SEQ ID NO: 697588 - DNA, 96 bp, Homo sapiens
agaaactgatccgcaaagtgtctacctcggggcagatccggaccaagcgctttgaacttcaagattcaggaagctctctacttcctaaagagattg

SEQ ID NO: 697589 - DNA, 100 bp, Homo sapiens
ctccaggagttcgtctcttacgtctgcggaagtgcagctgcctcagttcttagcgcaggcctctggctgtacctggcagggagcagcctgccctgtctca

SEQ ID NO: 697590 - DNA, 74 bp, Homo sapiens
tgccatattgtgtcttccccggccggtccctcgcctcccggccgagctgacgtttgtgaagtgtggatatgcag

SEQ ID NO: 697591 - DNA, 106 bp, Homo sapiens
ccggccctcaccgccctcaccacccctatccagacggctgcccttcaagtaccaaaagctctgggtgtgcggcagtaccatgtggcctcagtcctgtgccaacggg

SEQ ID NO: 697592 - DNA, 97 bp, Homo sapiens
tctagtccagcaagaccttgctcttttgaagaggccatgaaagggacatctctacaccgttcccatccgggaacagggcaacatctacaagcccaac

SEQ ID NO: 697593 - DNA, 98 bp, Homo sapiens
tgtacccagaaagagtcatacctggagcagcagcccccaaatacatcaagatgtttgtactggatgaagctgacgaaatgttaagccgtggattcaag

SEQ ID NO: 697594 - DNA, 83 bp, Homo sapiens
tgtctgtcgtctgccggccggcccggaccctggacaccatccagctggctttcaaggtggagattctggacgcaaagacaagg

SEQ ID NO: 697595 - DNA, 82 bp, Homo sapiens
taaggactattttcatcaaccagccccagctgacaaaattctgcaataaccatgtcagggtgaaaatgggatggaggattgt

SEQ ID NO: 697596 - DNA, 116 bp, Homo sapiens
ttgatgatcgttgtgttgtacagccagaaaccggggaccttaacaatccacctaagaaattcagagaaaggtcccccttctgggaaagaccgagtgaagaaaggtggatcctacat

SEQ ID NO: 697597 - DNA, 100 bp, Homo sapiens
tctgcaggtgcgagagttgtaccagtaaggtccttttggaataaatcatgggattgagcttcattcagatgtggtggaatatgccaaggaaaaactggag

SEQ ID NO: 697598 - DNA, 50 bp, Homo sapiens
cacaggccctcgttgcccagatgctgaccaactgactgaagagcagattg

SEQ ID NO: 697599 - DNA, 100 bp, Homo sapiens
agtagaatcacttgggttcattctattcagtgctgggcctaaaggagataacatttatgaatggagatcaactatacttggtccaccgggttctgtatat

SEQ ID NO: 697600 - DNA, 74 bp, Homo sapiens
aagctaagagcccccttcagtcgcagcctcactctaggtggaaccaagctcacaaatcctcaggaaccaacttt

SEQ ID NO: 697601 - DNA, 74 bp, Homo sapiens
agtttcaagcagtattaagagtaaatggataatttcttgagaggagataactcccgtaaagttcagcaccagca

SEQ ID NO: 697602 - DNA, 75 bp, Homo sapiens
tcatctcgctcggctgcgggaaatcgggctgaagcgactgagtccgcgatggagattgatctggatactattgat

SEQ ID NO: 697603 - DNA, 75 bp, Homo sapiens
acagattcgcagtggtcgcttcttctccttgataaatactgcaacaactgtagctgacttaaagtcaataataaa

SEQ ID NO: 697604 - DNA, 75 bp, Homo sapiens
ggcagaaaaagctgcagatgagagtgagagggatgctgagaacttgctggagtcacagccactgggatcctttct

SEQ ID NO: 697605 - DNA, 80 bp, Homo sapiens
aaactttcatgtagacctttgtcgtccatttgctgctcactgttaagtgggcagaccaacatccacctcagcaaaaactt

SEQ ID NO: 697606 - DNA, 82 bp, Homo sapiens
gaagaagaagagcatgatcggcatgtccaccaagcacggggtcactctggtgcccattgaggagttcagcccggagttcgtg

SEQ ID NO: 697607 - DNA, 75 bp, Homo sapiens
cggaaaatggccttgtctccggtcgttcccgttcaggagcaggcctcttctgaagagctgaaagctgcctaccgg

SEQ ID NO: 697608 - DNA, 101 bp, Homo sapiens
gttgaaagcgacaagtggaggcgccgctctagcggccgggactctgaactatggcggtttcccttgggggctttgaaataacaccaccagtggtcttaagg

SEQ ID NO: 697609 - DNA, 75 bp, Homo sapiens
gagcccagggcgacggtcagcttgttaattcctggctgcaggaagcctacgtgatggccagcgtggacaaccccc

SEQ ID NO: 697610 - DNA, 80 bp, Homo sapiens
agattcacaccgtcttcggtctcctggggtcggcgccgagtgggaggatggcggaagctgaccaactgactgaagagcag

SEQ ID NO: 697611 - DNA, 74 bp, Homo sapiens
cgcacggcaggagaccaaggaaatggcccgcgaggacggtgtcgtggagaggtccagccccaagtctgagattg

SEQ ID NO: 697612 - DNA, 100 bp, Homo sapiens
gttcttttatactcaaggcaaatgaacttcttcaattatggtgacaagctgaacatggagctgagtgagaaatacaagctggacaaagagagctacccag

SEQ ID NO: 697613 - DNA, 75 bp, Homo sapiens
gggtgacgctgggcctgcagcgcggagcagaaagcagaacccgcaggaggctactcacagtcgaactacaactcc

SEQ ID NO: 697614 - DNA, 100 bp, Homo sapiens
gatgtcatccccatggctgatgcagcaggcatcatccgctatgcaattggggagaggcaagagaaagctctgggcatcctgacatacctgggccagagtg

SEQ ID NO: 697615 - DNA, 80 bp, Homo sapiens
gcagcagctcaccgaggacggggactcgttttaaaatcaaagatgggaaaatcggagaaaattgcccttccccatggcca

SEQ ID NO: 697616 - DNA, 88 bp, Homo sapiens
tcagtactgatgcccagtggggcattcgtcttggtaaacttggtgtctgctacaatgctgctgctgcacagagctgtggtcctcaggc

SEQ ID NO: 697617 - DNA, 75 bp, Homo sapiens
gccctgcccagctgcctgcccccggaggtgcccacgcagctgcctggacaactggagctctcaaacactgctgtc

SEQ ID NO: 697618 - DNA, 98 bp, Homo sapiens
tcgctctgggagcctagaatgcatcagtgcccttgtggcgaatggggctcacgtcgaagagagatcatcattgcctgaatttagctttgtgactgcaa

SEQ ID NO: 697619 - DNA, 82 bp, Homo sapiens
ccttattattggccctccagatacactttagatctagtttgaagcactaagaagaataagacatcagtttgaaaagaggctc

SEQ ID NO: 697620 - DNA, 97 bp, Homo sapiens
cagcccaaccgtgttgtatgtgagtggaggaaatacgcagactgtgtacagtgccctgggcctgagggatgcctgccgctccctgccgcagtccatc

SEQ ID NO: 697621 - DNA, 89 bp, Homo sapiens
ggacagccccagggcagaggcctctggccaagtttcttcctaacagtggtgattctactctggccatgtgtgcccgtgacgggcaggtt

SEQ ID NO: 697622 - DNA, 50 bp, Homo sapiens
gagcccctcatcgagctcttcgtcaagcttctaagtgccagatgatggag

SEQ ID NO: 697623 - DNA, 101 bp, Homo sapiens
gggacttctccatctctgtcagtgaagaggtctgcattttatctgcatctggcacagcggctgtactgaatcctagatttctgcaggatggcaccgtggaa

SEQ ID NO: 697624 - DNA, 75 bp, Homo sapiens
cccgcgcccccgccgcgccctcagccaagaaatatttttcttcatggccctgatcagcaagtaaaaataggagac

SEQ ID NO: 697625 - DNA, 83 bp, Homo sapiens
gggccagttcatgaaggccggcagcatcaatgtctggaacatctgtcccctgttcaaagattggaaagattgttgggagtggc

SEQ ID NO: 697626 - DNA, 83 bp, Homo sapiens
gtccgtccgccgccaccacccactccggacacagcatttgacattgtgcagcaaagaaatggttatggagaagcccagtccgc

SEQ ID NO: 697627 - DNA, 108 bp, Homo sapiens
gccaccatcctgggttgacaattctacacaaggagcagtaacatctcagaagaccctgtaccagtcaaacgtcactcagatgcagtcttcactgacaactatacccgc

SEQ ID NO: 697628 - DNA, 99 bp, Homo sapiens
tttggaaagcagtttttaagacaaatccttacaataaatgaggatggatcacttggtttgaaaacccctaaatctcacgtttgtgagcactgcaatgct

SEQ ID NO: 697629 - DNA, 88 bp, Homo sapiens
cggctaagtcccggcagcgggaacacagagagcgaagccaggaccagttgctcttctgtgatgactgcgatcgtggctaccacatgta

SEQ ID NO: 697630 - DNA, 74 bp, Homo sapiens
ctgccccgtggccgcggccgtctcgtaggctcagctgtcgcaggccctggaggagctgggaggccagaaacaaa

SEQ ID NO: 697631 - DNA, 74 bp, Homo sapiens
gcctcccgtttctggctccgggctgagcttcctggagaagaggaaggttgcacgccagggcctgtactgaccac

SEQ ID NO: 697632 - DNA, 83 bp, Homo sapiens
agttcctgccgtctgctcttctgcctcttgatctccgccaccgtcttcaggccagtttggaatggtcagctgtcattgtggat

SEQ ID NO: 697633 - DNA, 96 bp, Homo sapiens
gcggcccggagctcgggaccgacggaatcagtccccaatgcctggaaattcctcattggattactgtgttttaaacagaatttcgtgaacagcctt

SEQ ID NO: 697634 - DNA, 83 bp, Homo sapiens
tctgtcttcggtggactccttcggcagtccacccaccgccgccgcctcccagcggggatctgacgagcttttctctacttgtg

SEQ ID NO: 697635 - DNA, 83 bp, Homo sapiens
ctggaggcccacgtgggagcagtgagcggctgattttttatcaagcagaaatgcatcgaacaacgagaatcaagatcactgag

SEQ ID NO: 697636 - DNA, 90 bp, Homo sapiens
ctgtacgggtgcctggcctcgcttctgtcccagaaaacgaatttgtgcaggagaaggacttgcccgcatggagctatttttatttctaac

SEQ ID NO: 697637 - DNA, 100 bp, Homo sapiens
gattaaacaggctgtgaagaagctgtatgacattgatgtggccaaggtcaacaccctgattcggaggaagacagcgaacccctcccaccacaggatgccc

SEQ ID NO: 697638 - DNA, 100 bp, Homo sapiens
gcggccgcggctccatggggctcctggggctcctgagcctgctgcactcggccttcttcggggaccagtttgtttcgacgccggaccgcgtaagagacga

SEQ ID NO: 697639 - DNA, 97 bp, Homo sapiens
gagagcgcgaatatcgtcatcgttagaaggtacctactgtcaacaacgggaagtggaggccattactgaaggtgtagaggaagatgaaggattttgc

SEQ ID NO: 697640 - DNA, 88 bp, Homo sapiens
agtctattgttgtcagtggagagagtggtgctggaaagcttatcacacagactttcagccaccacaatcagctggcacagaagacccg

SEQ ID NO: 697641 - DNA, 100 bp, Homo sapiens
ttgaagaggtcataggggttccacagtcttttcagaaactcatatttaaggggttggcaatgtttgattgcactgggcatgtccttcctggactgtgggc

SEQ ID NO: 697642 - DNA, 96 bp, Homo sapiens
ctggagtaaacaacagaagaactgagctatttttgaaagaacatgaccaccttcgaaacaaatacttccctggacaagaaagccagatgaaactga

SEQ ID NO: 697643 - DNA, 82 bp, Homo sapiens
gcgccgcgcacttcgtcatgttcttcgcgccctggagcggaaagaatgtcggagcgggccgcggatgacgtcaggggggagc

SEQ ID NO: 697644 - DNA, 90 bp, Homo sapiens
gtgttcgcagtgacctggggaacctgctcaaagccctgggtcgcttggaagaagccaagcaattttccagattattcaaagtatcaggat

SEQ ID NO: 697645 - DNA, 101 bp, Homo sapiens
agtcactttcctgtgggggctgccctgctcacccaggaggggagaatcttcaaaggtaaagagttaatgttctcctcagaggtggaagaatatcctgataa

SEQ ID NO: 697646 - DNA, 100 bp, Homo sapiens
accccggcggccgcggtaatgctggtggtctgcatcaccaccggatcaacttcgacaaatagcccacccttcctccattctgagcacataaaaaccccac

SEQ ID NO: 697647 - DNA, 100 bp, Homo sapiens
aagaggagcattccaggatcttaaagaactagagagactgtgccttatcagcagccagggagagctgggaatacgactctggtgccagggacctccagag

SEQ ID NO: 697648 - DNA, 88 bp, Homo sapiens
cagaatctacaaattttgctactgtcagatggattgactatggaaaagttgccaaattggtggaaggaacagcatatttaagttcttt

SEQ ID NO: 697649 - DNA, 97 bp, Homo sapiens
ctctagactttttggacgatgtgcggcggatgaacaagcggcagttggccagtcagtgctgaaagatgtaagcaaagtgaagaagctgaagcaatct

SEQ ID NO: 697650 - DNA, 83 bp, Homo sapiens
tgttacaagaattcacaaggtccgacagtttaatggatcgagaagtggcgttgcttgctgaaatggacaaagtgaaagctgaa

SEQ ID NO: 697651 - DNA, 100 bp, Homo sapiens
aatcaagatttaacattccaacacataaaaattatttatccaacagctcctcccaggtacttcctatttaacagacattgtgtggtgggctggcacaatc

SEQ ID NO: 697652 - DNA, 90 bp, Homo sapiens
tctgcagacctggaagaggtagctcagaaatgtggcttgtcttacaagatagaagaagtcagagatgccatggaaaatgaaatgagaacc

SEQ ID NO: 697653 - DNA, 98 bp, Homo sapiens
tcaatgagtggtcattgaagataagaaaggaaatgagagttgttgacaggcaaataaggggtatgccattttgaagactgagacgttggagttttatc

SEQ ID NO: 697654 - DNA, 75 bp, Homo sapiens
acttcgagatggattccaacatcctgctagacttgttaaggaatggaagttggatacactttgtgacttgtacga

SEQ ID NO: 697655 - DNA, 90 bp, Homo sapiens
ccgctctgcgcgttttccgatttcttgctggttgaatacctccctctccactcccatcttcagggagatttaaatgaacagtcccaggca

SEQ ID NO: 697656 - DNA, 100 bp, Homo sapiens
ctttgatctaagggttcagcctttcaatgtgacacaaggaaagtattctacagtcctgtgcctcctgattgctgagtgttcacctggaccttctgactac

SEQ ID NO: 697657 - DNA, 100 bp, Homo sapiens
catgaactcagggccggttgtggccatgaccgagaaggacatcctgctgcgacctgagctggaggaactcaggaacaaacattctgcacgcttcaagctc

SEQ ID NO: 697658 - DNA, 83 bp, Homo sapiens
cgcgagtgggagcaccaggatctcgggctcggaacgagactgcacgctccccgcagccaccgccacccattggaatggccaac

SEQ ID NO: 697659 - DNA, 100 bp, Homo sapiens
gccatgatgcctggtgccccattacaacccgtggcatatcacacctgaaaaattttatgtggaagcttgtgatgatggagcagatgacgtacttaccatt

SEQ ID NO: 697660 - DNA, 98 bp, Homo sapiens
tgcacgagcctgctgcagctctatgatgcctccaacagcgagtggcagctggggaagaccaaggtagacatagctgacattgagaatgaagagaaccg

SEQ ID NO: 697661 - DNA, 89 bp, Homo sapiens
cttgcgatggagcatatccggacgaccaaggaaggatgataaagactatgctttaaaacaaatagaaggaactgggatctctatgtcgg

SEQ ID NO: 697662 - DNA, 82 bp, Homo sapiens
agaaaagcgagaccgcgtgcgaggaccggattttttatcaagcagaaatgcatcgaacaacgagaatcaagatcactgagct

SEQ ID NO: 697663 - DNA, 87 bp, Homo sapiens
ttgatgctgtggagaaccagctcaagtgggcatcctgggagctccattccctaaggcactgtgcgcgtcaaccgcttgtactctgcg

SEQ ID NO: 697664 - DNA, 75 bp, Homo sapiens
caggcccatggaggtaccctgcctggatctataacgaatgtcgttgtctgctgggtcttcccctcttcattcccc

SEQ ID NO: 697665 - DNA, 90 bp, Homo sapiens
catctccatggccacggccgtgagccggccctgcgccggcaggtcgcgggacatactgtggcgcattgtccgtgtggagcccttggtgac

SEQ ID NO: 697666 - DNA, 76 bp, Homo sapiens
caaccatgggaaaggagagtggatgggactcagatgatgaggagtctgatgaggaagctgtgaagaaaaccaacaa

SEQ ID NO: 697667 - DNA, 98 bp, Homo sapiens
tttctccaagagccattgaatatgttaagacatcaaaatttacaagctcttcggatattccagtagaatttataagaagaaatgttaaactacgtgga

SEQ ID NO: 697668 - DNA, 50 bp, Homo sapiens
ttgcttgtaatgtcggcgactacagttttctggatatgccgcagaaggat

SEQ ID NO: 697669 - DNA, 75 bp, Homo sapiens
cttaaggaattgcctgatcaaggtcgtttatacgcaatgcagactggaatgaagatcgatagtaaaactcctgaa

SEQ ID NO: 697670 - DNA, 75 bp, Homo sapiens
gtctgcagcaccctccgcttcctctcctaggcgacgagacccagtggctaggttgaaggggcccggccaggactc

SEQ ID NO: 697671 - DNA, 74 bp, Homo sapiens
tgaagacagagggctctgatctgtgcgacagagcgccatgtcagaaccggctggggatgtccgtcagaacccat

SEQ ID NO: 697672 - DNA, 82 bp, Homo sapiens
cccaggtgtaagcgcagaaagcaggcgaacccgcggcgcaataacggttattcagcttctcaaggctggaaaagcgaaggaa

SEQ ID NO: 697673 - DNA, 82 bp, Homo sapiens
gatgatcgagaggatctggtgtaccaggcgaagctggccgagcaggctgagcgatacgacgcagttggaattgatcacacct

SEQ ID NO: 697674 - DNA, 75 bp, Homo sapiens
ctcgcgggtcctcgtggatcagactacagccttctactagtcgaaagcggccccgtgaaggggaagccgagggtg

SEQ ID NO: 697675 - DNA, 75 bp, Homo sapiens
ctgctgatagactccttccagaataactcaaagtggaaaagcgagattgtctttgaccatttgctatggacattg

SEQ ID NO: 697676 - DNA, 100 bp, Homo sapiens
gcctgttcagcagcattggtgaagttgaatctgcaaaacttattcgggataaagtagcaggttacgtcgctggatttgtagacttggaggtgagcaacag

SEQ ID NO: 697677 - DNA, 83 bp, Homo sapiens
cttccagaacgcctgccgcgacggccgctcggaaatcgaatgcctctggctcaggcagtagccattcttcagaagcactgtcg

SEQ ID NO: 697678 - DNA, 75 bp, Homo sapiens
gactttgggcgtcccattgccatgcaaacggggattcagcgtccgatcctttggaacagggactcacgtgaagct

SEQ ID NO: 697679 - DNA, 83 bp, Homo sapiens
cgacaacatgtcacccgcgctccaagacctgtcgcaacccgatcgaaagctgctttgcgtcgcagttggagcagcacccccac

SEQ ID NO: 697680 - DNA, 88 bp, Homo sapiens
agggaggcagcagtggcagtccatcgaggggaccaaactctccatcacccagggctcctggctggtgccccccgggagctcgctgtgc

SEQ ID NO: 697681 - DNA, 98 bp, Homo sapiens
ctgggcttgtccttgctggtgcatgcgtcgtcggcctctgggcagcaggaactgtggctgcaccatctgtcttcatcttcccgccatctgatgagcag

SEQ ID NO: 697682 - DNA, 101 bp, Homo sapiens
gatgtctgccaacccccgagaccctcccctaatggcaggagatggaccgcagtacctctttccccaaggatatgggctggagtgcagtggcgtgatctcgg

SEQ ID NO: 697683 - DNA, 100 bp, Homo sapiens
taccagcatccattgcaaaccttattaatctcagggaactggatgtcagcaagaatgataatacatatgtgtcaagttcagagaatgatgaagatgtgct

SEQ ID NO: 697684 - DNA, 98 bp, Homo sapiens
ggtcatacaccagtactaccaaggacagcttttttcctgcaaggttgtctgcattcaaaagagcattctattaaagctaccttaatttggcgcttatt

SEQ ID NO: 697685 - DNA, 117 bp, Homo sapiens
gggtggactgctccgggaaggggctgacggccgtgcccgaggggctcagcgccttcacccaagcgctatgccttcaattaagttgcagagttctgatggagagatatttgaagttga

SEQ ID NO: 697686 - DNA, 75 bp, Homo sapiens
ggatccccaacggggaggccaacgtgaagaagtccagctgggagctccccgacctccaggagggcaagatccaag

SEQ ID NO: 697687 - DNA, 118 bp, Homo sapiens
ggggctcccggcctgagatgactcccgttagcttacgaagcacaaaggaggggcccgagaccccacccaggtgtgtgcagtggcctcagggatccggaaagtctaggactgaacttct

SEQ ID NO: 697688 - DNA, 100 bp, Homo sapiens
gacctcctgctgcgcggggacggctcggtcggggcgcgggagcccgaggccgcgggtacccactgatggtaatgctggcctgctggctgaaccccagatt

SEQ ID NO: 697689 - DNA, 100 bp, Homo sapiens
ttgctgttcctgctcctgctcccgccgctccccgtcctgctcgcggacccaggggcgcccacgccagtcgggaagacgtctctgattacgaggttcatgt

SEQ ID NO: 697690 - DNA, 83 bp, Homo sapiens
cgggctccgggaaaactacactggccagccattgagacccagagcagcagttctgaagagatagtgcccagccctccctcgcc

SEQ ID NO: 697691 - DNA, 100 bp, Homo sapiens
ccttcacatgtaattcagaaattagggacagggcgtctatgggccaaaagcatatgtagcaactcaaggacctttagcaaatacagtaatagatttttgg

SEQ ID NO: 697692 - DNA, 82 bp, Homo sapiens
actccgggcccaacagcaacaggtctcaattatgatgaacaatggcctcctccaacagccctctgccttgatgttgctcccc

SEQ ID NO: 697693 - DNA, 51 bp, Homo sapiens
attggccaagacgatcaccaaacaggttgggataattcttcactattccac

SEQ ID NO: 697694 - DNA, 74 bp, Homo sapiens
agattgtgaagcaatagcctaaggttattcagcttctcaaggctggaaaagcgaaggaagtttcctacaatgca

SEQ ID NO: 697695 - DNA, 90 bp, Homo sapiens
cagcttctgctgtccttctttgtggagagcaaggcttctcgtcagtgcctcgcaggatggtaaacttatcatctgggacagctacaccac

SEQ ID NO: 697696 - DNA, 80 bp, Homo sapiens
gacacacctaccaagaagccagtcaagcggccaggagcacgtgaattgcctctgcttacgttcaggccctgtcctaaacc

SEQ ID NO: 697697 - DNA, 90 bp, Homo sapiens
cgctgagagcctcacgagtcgaggtcctgcaggtggagctccggcagccgccctggctaaagaattacctccaaagccattgtcaagacc

SEQ ID NO: 697698 - DNA, 50 bp, Homo sapiens
aaggattccaagtaactcttatttggttccttgcattgactccatggaga

SEQ ID NO: 697699 - DNA, 82 bp, Homo sapiens
actccatgtggctctcctttcccctaattcacagggtgaagccagatttggaagatgagaatgtgcctactgctcctgatcc

SEQ ID NO: 697700 - DNA, 51 bp, Homo sapiens
cgcatggcggcgcacaggaagcacggtcaaaatgcagatcttcgtgaaaac

SEQ ID NO: 697701 - DNA, 96 bp, Homo sapiens
tttggccgcctggattgtgttgtcaacaacgctggccaccatgtacaggtggatcatctgaatctcctgaaacagtttgaacacctggaccctcag

SEQ ID NO: 697702 - DNA, 101 bp, Homo sapiens
tgcacgagatcttccgcggcctccatgaagacctacaaggggtgcccgagcggctgctggggacggcggggaccgaggtgtgaacatgtatgccatgttga

SEQ ID NO: 697703 - DNA, 101 bp, Homo sapiens
gcagccagcatcttctttattgagcctcacgtagatctaggtgagttcatcgggtcatcagagacagaggatccagtgctggcgatgactgatgcgggtca

SEQ ID NO: 697704 - DNA, 82 bp, Homo sapiens
ccaggagtcatcggacgccagaatctggtattagaaaactactcggatgctccaatgacaccaaaacagattctgcaggtca

SEQ ID NO: 697705 - DNA, 100 bp, Homo sapiens
agaattgagtgatttcctgcaggctatggaacacactgaagttcttcagcttctcagccccccagctccatcaagtatgatggtgaaggatgaatatgtg

SEQ ID NO: 697706 - DNA, 100 bp, Homo sapiens
ggcttgtacccattggcaagtgttcctgcaatgctggctatgaagaaagaggttttatgtgccaagccactgaagatcctggtgtcgccatgggccgccg

SEQ ID NO: 697707 - DNA, 82 bp, Homo sapiens
cttggccaaatggacgggactattaagcctcctgacaaggtgatccgggcgggccccgcaggaattttatcccctcaccggc

SEQ ID NO: 697708 - DNA, 90 bp, Homo sapiens
agaaaatacaaatcacacgcataatggatgaaaggaaccgacagggtgtcaaattgagaaccaggtagatccccaccacctacagtaaaa

SEQ ID NO: 697709 - DNA, 101 bp, Homo sapiens
agccggcagctccggagctgcccgcgccatgtccgcgcacaatcggggcaccgagctcggctgaagccgacgtagcttctctgaacagacgcatccagctg

SEQ ID NO: 697710 - DNA, 74 bp, Homo sapiens
gggagccgggcgcggggagctgcgcgaagccggggcggagcacgcgagctatgtgcctggagaagttccctgtg

SEQ ID NO: 697711 - DNA, 74 bp, Homo sapiens
ggagctgcctggaggcggccgcactcggggctcagtaaagagacaagcactatatgcctgtagtacctgcaccc

SEQ ID NO: 697712 - DNA, 50 bp, Homo sapiens
cagctacctgcacttctagatgcagatccagttcctaatggtttgcgagc

SEQ ID NO: 697713 - DNA, 83 bp, Homo sapiens
aaaacccggagtgccccgcacaggatgtctccaatacaacgacagcccagaagaggaagtgcagccagacccagtgccccagg

SEQ ID NO: 697714 - DNA, 100 bp, Homo sapiens
aaacgatcctctcaatcaaaataagcccaaagcagcaagccaagatggcggagtactgccgactgatctttggggatgcccttctcatggagcccctgga

SEQ ID NO: 697715 - DNA, 75 bp, Homo sapiens
agccctcgtgcctccatggactcgagtgtaccgagtacagagactcaaaagcctcgaaagtttgactgtgaactt

SEQ ID NO: 697716 - DNA, 100 bp, Homo sapiens
cggccagaaagttccgccatgagctggggcacggagctgtgggagtttccagatgtcttggaatgcactgtatctcatgcagtagaaaagataaatcctg

SEQ ID NO: 697717 - DNA, 90 bp, Homo sapiens
gtgaaggagaagatcacagcttttgtggtggagaggggcttcgggggcattacccatttctctacaataattggagttggtgttggagct

SEQ ID NO: 697718 - DNA, 82 bp, Homo sapiens
cgacgcggacatggtcatgagctttgtgaacctggattagtttttagaggcatgtctatatctcgcccaaatgctgtggtcg

SEQ ID NO: 697719 - DNA, 51 bp, Homo sapiens
acatggagctctcagcataccgtgcaacagagatgtggtcttgctatgttg

SEQ ID NO: 697720 - DNA, 100 bp, Homo sapiens
ttcaagagctgaaggacaaacactggttcaggtgccttatgcccgctcagaggcccacctcacagagctgctggaggagatatgtgaccggatgaaggag

SEQ ID NO: 697721 - DNA, 75 bp, Homo sapiens
tggcaggtgacagtctgcatgtgcagttttcagcatgccaatgaagatgtggaaagaatgttactaggaaacaag

SEQ ID NO: 697722 - DNA, 83 bp, Homo sapiens
attcgtccccgctctgcctcacccaggcggtgcgtctttctacgtgaataggattttgtggctggccagatacactgcatcat

SEQ ID NO: 697723 - DNA, 100 bp, Homo sapiens
ctctccagatggatccctctgtgcttctggaggcaaggatggagatgaagatgaggaagctgagtcagctacgggcaagcgggcagctgaagatgatgag

SEQ ID NO: 697724 - DNA, 82 bp, Homo sapiens
tggagccggagctgggcgcggattcgccgaggcaccgaggcactcagaggaggttcccagtagctgcagcagtgaaagacag

SEQ ID NO: 697725 - DNA, 101 bp, Homo sapiens
gcgggggctgcggccgcgggcgatgccaaaaacgactgcctgcgctgctgacttaaggccccaacaccaaacacagaagcaacagccttacacagagtgtt

SEQ ID NO: 697726 - DNA, 75 bp, Homo sapiens
agaaaacttgatcacatcaatatctgcagttccaatttcccaaaaagagacactcacatgggagtcaagaaggtg

SEQ ID NO: 697727 - DNA, 100 bp, Homo sapiens
gttatgcttgttggaattggtgacaaaatcagaggcatactttataggaacgtgttgtgggctttcacgtactgggtccaaatgctggagaagttacaca

SEQ ID NO: 697728 - DNA, 95 bp, Homo sapiens
aaagaacagtgttctacccatggtttacagagcactagaagctccttccattcagatccagattggacgactgattattggacagaatggcgtct

SEQ ID NO: 697729 - DNA, 100 bp, Homo sapiens
caagcatgtcggaacaggattggtcagctatccagaatttctgtgagcaggtgaacactgaccccaatggtgcccgaaggaggaaacagtgacagacctg

SEQ ID NO: 697730 - DNA, 73 bp, Homo sapiens
cagtgttgctgcaacatagagctgacattaactgtcagccatgtgaagatgtgcttgcttcccctttgccttc

SEQ ID NO: 697731 - DNA, 100 bp, Homo sapiens
gcagcgcacgctgcagtccagagttgtgaacagatgtgtgtacagcacaaccaaggcagccgtgattggcctcacaaaatctgtggctgcagatttcatc

SEQ ID NO: 697732 - DNA, 101 bp, Homo sapiens
cacagagacattaaaccagataacttcctaatgggtattgggcgtcactgtaataagatcatggaagggaagtggttgctgtgtatgttactggtgcttgg

SEQ ID NO: 697733 - DNA, 100 bp, Homo sapiens
ccatgcaataattcccaaatctttctctcgatattaccttccaaatgatgatggagaattttatcagttctgttacgttacccataagggtgaaattcgt

SEQ ID NO: 697734 - DNA, 82 bp, Homo sapiens
cacagcaatgctggactgcagtgactatgttctagtatttgcaaccacgtggcttcacgagtccgccaaaccatcaggtgaa

SEQ ID NO: 697735 - DNA, 74 bp, Homo sapiens
acgcctgtttgagaagcagcgggcaagaaagacgcaagcccagagggtgggagggatgaaggaaattatctgga

SEQ ID NO: 697736 - DNA, 74 bp, Homo sapiens
cgatcaatatgtgactggaaccattggcgagcttcttggacacttaatgattgttggcaagaaatgtgctgctg

SEQ ID NO: 697737 - DNA, 100 bp, Homo sapiens
ttctcagcgggtcaagtgcagtacctggatctcatcaaaaaggacaccagcaagctgttcaatgaggaggtgcgctcccaggccctgctgttcatcaaac

SEQ ID NO: 697738 - DNA, 82 bp, Homo sapiens
gaagcttctgaaccatccacacatcataaagctttaccagagaatggatcttggagaatgtctgaaagtccatgacctggct

SEQ ID NO: 697739 - DNA, 75 bp, Homo sapiens
cctgcataccaattgttgctggaattgtagccagatggacagatatggcttttctaaagactgctttggaaatgg

SEQ ID NO: 697740 - DNA, 82 bp, Homo sapiens
acctctcagcacgattttcccgagagttcacaggatagtaatgatgacactgaagatgtttcactgtttgatgcggaagagg

SEQ ID NO: 697741 - DNA, 99 bp, Homo sapiens
gacacaaaatcagaaattaagattctaagcataggcggaggtgcaggttatcaagttatacccaaccagcagcaaaactaccaaggaatagttggagtt

SEQ ID NO: 697742 - DNA, 75 bp, Homo sapiens
aagacatttcctgctcggaaccttgtttactaattgtttgtcctggttgtggtcaagactggatgatgtaactgg

SEQ ID NO: 697743 - DNA, 100 bp, Homo sapiens
tagtaacccactgaaagtggccaagattaagtacacgggcttcagggaccggccccacgaggaacgccaggcacgcttccagaacgcctgccgcgacggc

SEQ ID NO: 697744 - DNA, 82 bp, Homo sapiens
agaccttcatatttcccaagatgccactggtgaagaaggctgccccaggccctgtgcagacacaccaggccctcagccgcag

SEQ ID NO: 697745 - DNA, 83 bp, Homo sapiens
gttgctgccgccatacgcgctctccctgtttagagcccacacgatgaagacccccaggcagtgacgtatgccaaggtgaaaca

SEQ ID NO: 697746 - DNA, 75 bp, Homo sapiens
atactcacagagttagagagagggatggtgtgtttggccagcgcttggatgagactgtggcctatgaacagaaat

SEQ ID NO: 697747 - DNA, 90 bp, Homo sapiens
ctcaaggtcgccaaggaggtggacccccaggcgagaaattaggcaacagctagcagaaaaagctaaagctggagaactaaaagtcgtcaa

SEQ ID NO: 697748 - DNA, 100 bp, Homo sapiens
ctccacagctccagggaaggcactcaaaagtggggggcaggaaaggaggaagaaggcacctacgatcaaactctggagttccgtaggggaggtgatggcc

SEQ ID NO: 697749 - DNA, 75 bp, Homo sapiens
ccaggccacggaggccgccctgcgctctcggcgggccaaactcaccgtgctcacaggggaaatgctgtctgtagc

SEQ ID NO: 697750 - DNA, 75 bp, Homo sapiens
gggcgccctctccactgcgcgcgatattaataaggcagcggaaagaagaaatatgaatacggctccatcaagacc

SEQ ID NO: 697751 - DNA, 83 bp, Homo sapiens
gtactaccggccaactgaagtggcataatcaccagcaacacccgggacaataatacgggggccacctacccccacctgaactt

SEQ ID NO: 697752 - DNA, 98 bp, Homo sapiens
tcctgcattgtgctgtttggggcctgcattgaaggcgtggtcttacgagataaagttcgaaatttgagcaacccagccaagaagttcaagattgaagc

SEQ ID NO: 697753 - DNA, 82 bp, Homo sapiens
aatcccctcgcttatcctgtgggggccgccgggctgcggcaaggcatatctttttcttgcacatcaaggaggccctcttggc

SEQ ID NO: 697754 - DNA, 75 bp, Homo sapiens
gcctcccgaagtgctgggattacagatcagaatcaagctttgcgactctgtctgggtagcactagtgttggaggt

SEQ ID NO: 697755 - DNA, 75 bp, Homo sapiens
gatggctccacgcatttcccttcgtggattcctcatgtccataacatgttggatgaggctctgcagctcaccccc

SEQ ID NO: 697756 - DNA, 87 bp, Homo sapiens
ggcatcgaattcgcactgatgaaaatgggctttgtcctgcatgtagaaagattgctcgctgtaagcagctcatctgtgaccccagct

SEQ ID NO: 697757 - DNA, 87 bp, Homo sapiens
acttgccctgcaccgccccctgggatccgcaggttccctacacggtctcctgggtcaagctacagcctccgcttggcgtcccgatgc

SEQ ID NO: 697758 - DNA, 74 bp, Homo sapiens
ttaggctgaggccccaggaagaggtgctgatgtatggacagccgtatcgtgttaccttagagcttgagctgcca

SEQ ID NO: 697759 - DNA, 97 bp, Homo sapiens
ccttcttcccacgctgctactgcctgggggctgaggatgacaaaaaagccttcataggggaggaactggacttgcggctcattcggacaaagggggg

SEQ ID NO: 697760 - DNA, 98 bp, Homo sapiens
actttgtggagaaagtcgtcttccacttgcacgaaagctttcctaggccaaaaagaggatgaaacaggcgcctatttaatcgacagagaccccaccta

SEQ ID NO: 697761 - DNA, 119 bp, Homo sapiens
atgagccagccggcccctgccgctggcccctaccccagcatgcccagcactgcggctgcctggcagggtgtggagcgagacctgcgaggccaggtgccgggtggcgagcggggcctggt

SEQ ID NO: 697762 - DNA, 82 bp, Homo sapiens
tggggccactgcgaggccgttttaggaggactttttgtaaatagcccagaagagcccagcctcagcaggatggtcactgagg

SEQ ID NO: 697763 - DNA, 75 bp, Homo sapiens
tcatctggtttctacagtgtatactcaggatgaaaactttcggaagagaaagttgcctgtggtaagttcagttgt

SEQ ID NO: 697764 - DNA, 100 bp, Homo sapiens
gagtttctgacggagctggtcatcagcctggagaagctggagaatgacaagagcttccgcggtgtcattctgacctcgatcgacgacatcgcggatggcg

SEQ ID NO: 697765 - DNA, 75 bp, Homo sapiens
cctgctgaaagtggcgcaaatgcttctagggacctattaaaagagttcccacagcccaaaaatcttctcaacagt

SEQ ID NO: 697766 - DNA, 83 bp, Homo sapiens
aagtggacaaagagaggagtcaggattcatgcttaacaagtctagcatcatcatcacttaaacaaattcttggagattctttt

SEQ ID NO: 697767 - DNA, 87 bp, Homo sapiens
gagggctaccaagttcctccaggagccacatatactgccattgaggctcccaaggacctgggtgcagccgcaggctccaagcgcccc

SEQ ID NO: 697768 - DNA, 75 bp, Homo sapiens
gctacatcggcctctctcagaacaacctgcgggtgcactacaaaggatcatccagcagctcgtcaacggcatcat

SEQ ID NO: 697769 - DNA, 82 bp, Homo sapiens
ttgggtcctccgagagcagcagcggtgtattacctgactgcttaaccgatggctctgatgtggtcagtgaccttgaacacga

SEQ ID NO: 697770 - DNA, 90 bp, Homo sapiens
caaaaccaaacaccctcagctccacattgagagcaaaatctacaagatgatgcagggaggaggtacaggtttgcagattccgccagcagc

SEQ ID NO: 697771 - DNA, 100 bp, Homo sapiens
gggatggctctgaaacagaaaccacctctgccatcctcgcctcagtcaaagaacagattgatgaactcccagagggcgctgtgaagcctccagcaaacaa

SEQ ID NO: 697772 - DNA, 100 bp, Homo sapiens
ctaacgataaggagcggtttgccagtgtgttaacagggcacaaccattatgtgatgtgtgctcagttccaccccacagaagacttggtagtatcagccag

SEQ ID NO: 697773 - DNA, 100 bp, Homo sapiens
catcaagggtccgaaggacgtcgaaaggagtcgcatcttctccaaactctgtttgaacatccgcctggcagtgaaagaaatgacctccaccttcaacccc

SEQ ID NO: 697774 - DNA, 101 bp, Homo sapiens
ctgcatctcggaagagtggaagtgtgataatgacaacgactgtggggatggcagtgatgagatggaaagtgtctgtggatccctacaataatattgtccgt

SEQ ID NO: 697775 - DNA, 74 bp, Homo sapiens
tcccggagagctgagcagtcaagatgaatctggcaatgggggcaggagctgttggagctttgcagctgacctac

SEQ ID NO: 697776 - DNA, 87 bp, Homo sapiens
tccatttctcctattgaggagtcaactttgctggaaaccatgtctcattatacagatgaacccagatttaccatagagcagatagat

SEQ ID NO: 697777 - DNA, 75 bp, Homo sapiens
cggctctccgccgtccccagccctgcctctccctgggctctgctcctggacttctagggatctcagccgtggctg

SEQ ID NO: 697778 - DNA, 76 bp, Homo sapiens
cctagtcgtggccggaggagtctcagagctgtcagaaaggagcctgcagacagggggatttgcctgggaaggagaa

SEQ ID NO: 697779 - DNA, 74 bp, Homo sapiens
aaagttaattcaacagcagctggagaaagaactgtaagccaagatgggtgcatacaagtacatccaggagctat

SEQ ID NO: 697780 - DNA, 100 bp, Homo sapiens
cccgccgccgccggtgtgaggcggcccgtcctggctcccttgtccgggaagcccgcccagagataattgacgaccttgccaacctagtggagaacacaga

SEQ ID NO: 697781 - DNA, 100 bp, Homo sapiens
gcgatgttccgccggagcttgaatcgttttttgaaaacgaggcccactgcgactttgtgaagctgcgggagatgctgattcgggtcaacatggaggatct

SEQ ID NO: 697782 - DNA, 80 bp, Homo sapiens
tgctgtgctagcaatcagcgagactccgtgggcgtaggaccctccgagccagcagtctctggtcccagcccaccccatgg

SEQ ID NO: 697783 - DNA, 75 bp, Homo sapiens
atttagattggattctgaatatcagaactcccccactggaaaggattctgaaagaaatgaagtcagccctcagaa

SEQ ID NO: 697784 - DNA, 75 bp, Homo sapiens
gtttgacgaagaggtggtttttgagatgatatcatcaagttgaatcgaaaggaagggaagaagcagaattttcca

SEQ ID NO: 697785 - DNA, 75 bp, Homo sapiens
gggttgcctcctgttcgaagtgcactggaaaagacagtcattttgtttactcattcagccctgttgcaggtccca

SEQ ID NO: 697786 - DNA, 75 bp, Homo sapiens
gaagcggcagctgaggagactccggcgctcgccatggccgacgaaaagcccaagattgacgagatgcctgaggct

SEQ ID NO: 697787 - DNA, 149 bp, Homo sapiens
ccacacgaacaagcgcgtgtgcgaggagatcgccattatccccagcaaaaagctccgcaacaagatagcagggctccatccgcgaggagaacggcgtgcgctggcatgtgtgtccctactgcgccaaggagttccgcaagcccagcgac

SEQ ID NO: 697788 - DNA, 90 bp, Homo sapiens
ggaacgcacagaggaacgagctgagctggcagagtctgagggccccaaggctgttgcagctcctcgacctgatcggttggtcaatcgctt

SEQ ID NO: 697789 - DNA, 100 bp, Homo sapiens
aagaagttgcttgaacacaaggagatcgacggccgtcttaaggagtatgattcattccggactcgtaatgccagtagcgttccatcttccttttctccta

SEQ ID NO: 697790 - DNA, 90 bp, Homo sapiens
aacttcacggtgtgccaccctacagtactgccctgacccttacatccagcgctttggtaggcagcctgaaattgctcatcaaggaaaaag

SEQ ID NO: 697791 - DNA, 100 bp, Homo sapiens
cgcgaatggcacgagctggagggagaatttcaagaactgcaggagcccaggcttgtgtgctcgtgttctctaccacagatagggaatcttttgaagcagt

SEQ ID NO: 697792 - DNA, 75 bp, Homo sapiens
gccaagcagaaaattacctaaatgcactctttcgaaagaaagggttaatgcgagatgatacaatatacgaggatg

SEQ ID NO: 697793 - DNA, 88 bp, Homo sapiens
caggaaaggctgtgcctgggatcattgatgaggaaagcagtggaaacaatgcccaatgcatcaaattgcaatttggaggagaggcagc

SEQ ID NO: 697794 - DNA, 82 bp, Homo sapiens
atgcagatgtgctgcctgctgagcgtgatgacttcatcctgggggagtacgagagggcctccaaagtggaccagtttgtgac

SEQ ID NO: 697795 - DNA, 75 bp, Homo sapiens
cggtcgtcgcttcagtgaagaaagctattgacctgaaaagtggttctggaaaagtgtaccaaggccctgcaaaag

SEQ ID NO: 697796 - DNA, 113 bp, Homo sapiens
caggatggcgacggcggcctacgagcagctgaagctggccgagatggacgaaaaaatgtggttccttgtgttctctctgtaaatggggacctagaccgaggcatgctggccta

SEQ ID NO: 697797 - DNA, 99 bp, Homo sapiens
gcgtcggactggtctgtctgagggagatggtgacaagctcaaggcctgcgaggatacttttgtggaactctatgggaacaatgcagcagccgagagccg

SEQ ID NO: 697798 - DNA, 82 bp, Homo sapiens
gtccaggagtgacctggggctgtggagagcgacccgtggccttgtgtttcaggaacaagatcactcaaggtgaaggataatc

SEQ ID NO: 697799 - DNA, 101 bp, Homo sapiens
ctaacattactccaaagcataatatgaaagcatttttggatgaattgaaagctgagaacatcaagaagttcttataagccccccaagatgaacccagtggt

SEQ ID NO: 697800 - DNA, 90 bp, Homo sapiens
gaggccactgtcttctcttcctcctccaccgagtcgtgctctcgccccaacccgcgcgccaggcacacaagtctctgaattttgtctcaa

SEQ ID NO: 697801 - DNA, 76 bp, Homo sapiens
cggagagcaatcgccgggacagctgcaaggaaagaccacagcaagattctttcattcgtctcctcctagcctgggg

SEQ ID NO: 697802 - DNA, 75 bp, Homo sapiens
caatgcgttgcctggctccacgccctgctgggtcctacctgtcagagccccaagctctccagtgaagaagccaag

SEQ ID NO: 697803 - DNA, 110 bp, Homo sapiens
ggagaaattccaagttcagattctccagctggagctccgttactctcatggggactttgagaatggtatctgggtgttatggatcatggagcagaaatacagaaggagtc

SEQ ID NO: 697804 - DNA, 75 bp, Homo sapiens
cgcccctccgagctggggttggacgctgccagtttgcacagcagcaggagaaggagaggaacgcgcggaggaaga

SEQ ID NO: 697805 - DNA, 90 bp, Homo sapiens
ttcctgcaactgcactgattctagaaacactctctattcgaactctcatgagcagagtctccttggaggtgacatggatatgggcaaccc

SEQ ID NO: 697806 - DNA, 101 bp, Homo sapiens
agcaagatgaaagtgctgagattcattgcagagctgcggcttgatgagacccaggaggcagagttccaggcccttcggcagcagcttcaacaggagctgga

SEQ ID NO: 697807 - DNA, 96 bp, Homo sapiens
aagaaacgaacaacgctgctattataagagccattccgtagtgccatcccgagcaacgcactgctgcagcttccctgagcctttccagcaagtttg

SEQ ID NO: 697808 - DNA, 114 bp, Homo sapiens
cttccctgtgtgcctgcagtttttcaccctcacgctgatgaacttgtacttcacgcagatcatatggtaaaggaaccagtggaagacacagaccctagcactttatcctttaat

SEQ ID NO: 697809 - DNA, 100 bp, Homo sapiens
cctccctccgcgagctggacgctccgcagcccgcccgccagccggcccgccggccgccgcaggttctcagaggcactgtgactgacttccctggatttga

SEQ ID NO: 697810 - DNA, 50 bp, Homo sapiens
gggacttacagaagtctaccaatgagtctcgctctgtcacccaggctgga

SEQ ID NO: 697811 - DNA, 75 bp, Homo sapiens
tcttccctggatttttcttcaccttttccttactcatgagccaggaaggcccttttgtctacttgtctttagtag

SEQ ID NO: 697812 - DNA, 50 bp, Homo sapiens
tggaggaggacgacagctacgattgtaaaccatggctgtgtggatacaag

SEQ ID NO: 697813 - DNA, 102 bp, Homo sapiens
agggttctagaaatccaggcaggcatctatcttgaagggaaaggaaaacctcttcagcgcaaggtgaaaccacctaagaagcaagaggaaaaggagaagaag

SEQ ID NO: 697814 - DNA, 90 bp, Homo sapiens
ctcctttgtgaggataaacagctcgttggcagtagcagcttatgaggatggtccatctgaactgtttactgtttgttcatcgattagcag

SEQ ID NO: 697815 - DNA, 50 bp, Homo sapiens
ggcagcacaggacctggaaaaattacatgacacagaatttccaggtgttg

SEQ ID NO: 697816 - DNA, 75 bp, Homo sapiens
aacaaatgctgctgctatgaatatgggtcgaccattccaaaaaaatcggtgtgatccctcacatccacaaatctc

SEQ ID NO: 697817 - DNA, 80 bp, Homo sapiens
gcggccgagcgggcggcttcctggcctgggcgctccggtggcggcggaggtctcggcgcggaagatggccggcggcgtgg

SEQ ID NO: 697818 - DNA, 82 bp, Homo sapiens
ccagcgcgggcgcggccggagaccgtggggcccccggttgccgccccctcgggcctcacaccttaaacagcaccagcacctc

SEQ ID NO: 697819 - DNA, 50 bp, Homo sapiens
gccgctcgcgccgggcccgtggccgggttaaaaagatcaagtggcatgag

SEQ ID NO: 697820 - DNA, 100 bp, Homo sapiens
attacaacagtttatagtcacttcagggtcagatcaatgtccgagttaccaccatggatgcagagctggagtttgcaatccagccaaatacaactggaaa

SEQ ID NO: 697821 - DNA, 100 bp, Homo sapiens
ttcattggccacctacagaaacaaaatgtcaacaaattgatgggaagaactgtaggaatagtcacagcttgacaaccgaacacaacctgagtgtgctgag

SEQ ID NO: 697822 - DNA, 102 bp, Homo sapiens
cccacatgcccgctcacctgcgctgtgatgcctgcagagctgtggcttaccagatggtggatgcttccaaaagcatcgaagctgtccatgaggacatccgcg

SEQ ID NO: 697823 - DNA, 90 bp, Homo sapiens
caccagggtgtccccgccgccctcagctcgaagtcagccaccatggaggcgcaggcacaagggttacgactcactgattaaaaagaggga

SEQ ID NO: 697824 - DNA, 82 bp, Homo sapiens
gatgccctggttgctgaagaggaggcggaagccaaggcaaccggtgaccaaaaacactttcaggcagtatcgagtgctagga

SEQ ID NO: 697825 - DNA, 50 bp, Homo sapiens
agcagaagctaaagcaggccaatttgcattgagactccttgcattccgcc

SEQ ID NO: 697826 - DNA, 100 bp, Homo sapiens
gcccaggacggtgctctgtggcttctgccagccttgcaggaggactctggcacctacgtctgcactactaggaaggatctgagtctctccctgcggagac

SEQ ID NO: 697827 - DNA, 88 bp, Homo sapiens
ttgaggatcctgcagaatgagcccctgccagagaggctggaggttgtacatcctggagacctgaagaattctgttgaagtcgcactga

SEQ ID NO: 697828 - DNA, 107 bp, Homo sapiens
cgggactccctgtgccttgcttggagctgacgccgacggacacgatgaggcgagtggtacgacagagcaagtttcggcatgtatttgggcaagcggtgaaaaatgac

SEQ ID NO: 697829 - DNA, 75 bp, Homo sapiens
ctgaagagggaagacacgcggaaacaggccacgttccactaccggacgctgcacagtgacgacgagggcaccgtg

SEQ ID NO: 697830 - DNA, 82 bp, Homo sapiens
tttctggcctggaggctatccagcatgaacgacaatctccttgagagctggagcgacctcgacgagctgaagggagccagga

SEQ ID NO: 697831 - DNA, 100 bp, Homo sapiens
gaaaatggaattgattgcaatcaagtggacaaaccttcagatcgtggcaagcgagcccggggtagagcatggcttctcgctgtttctgggatgctgacac

SEQ ID NO: 697832 - DNA, 83 bp, Homo sapiens
ctgggcgctccggtggcggcggagggctcttccgtgggcggcggcttcgcgggcttggagttcgcgcggccgcaggagtcgga

SEQ ID NO: 697833 - DNA, 100 bp, Homo sapiens
acagtggcctcgagaccctgcctgcctgaggaggcctcggttggatgcgaaggagctgcagcatccagcctcctgacaaggtgatccgggcgggccccgc

SEQ ID NO: 697834 - DNA, 100 bp, Homo sapiens
cctatgggatgcacagggtggaaacaagctgctctcaggtatccagtagaaaaagcactctccagtgttcatctgtggaactggatggttcctacttgag

SEQ ID NO: 697835 - DNA, 98 bp, Homo sapiens
ggccttcgaggaggtcatgaaggacctgagcctgacgcgggccgcgcggatcctgatgcagctcaagctaataagaaccatcaggatgtccggagtta

SEQ ID NO: 697836 - DNA, 75 bp, Homo sapiens
caagaataaaaagcaagtggggaagtatttctgtggccacagatgtctttaattccaaaaacctggccgttcagg

SEQ ID NO: 697837 - DNA, 90 bp, Homo sapiens
gttaatggagccaaatttaataaaggtgtcatctttaagaaatgaaaagcgaggctcatcatatctcatctctgccccagaaggtggttc

SEQ ID NO: 697838 - DNA, 117 bp, Homo sapiens
aatagaaccaaatctgtttgctgatgaagattcacctgtgcatgaatgtcgtactctcaggaggctccaccatgttcagggatttcggacgccgactgcagagggatttgaagagag

SEQ ID NO: 697839 - DNA, 100 bp, Homo sapiens
agaaatcttggagaagggtctaaaggccaaaaagcaaatggatttccacctgacaaatcttcgggatccaagaagcagaaacaatatcagcggattcgga

SEQ ID NO: 697840 - DNA, 82 bp, Homo sapiens
gaagacttgaacttaatacagcaagaaagaccatcaagtttaccaagaatgtgatcaatgggcaggactacgaagtgatgat

SEQ ID NO: 697841 - DNA, 82 bp, Homo sapiens
cagcgaagagagtcaccgaccatgacgggattttttatcaagcagaaatgcatcgaacaacgagaatcaagatcactgagct

SEQ ID NO: 697842 - DNA, 82 bp, Homo sapiens
accagacgttgattcacacaaccgagcagcactgtcagcagatgtcgaataaagttgtgaccgagattcccgacgagagaga

SEQ ID NO: 697843 - DNA, 83 bp, Homo sapiens
cgctgctggcgctctggctgtgctgcgcgacccccgcgcatgcagcccctgtcaaagggaacaggaagcagtccacggagggt

SEQ ID NO: 697844 - DNA, 51 bp, Homo sapiens
tggagaaaagcattgatgacttagaagacaaaaagccttggcatccacggg

SEQ ID NO: 697845 - DNA, 75 bp, Homo sapiens
ccaggaagtagagcagcaggtgcagaaagagctggaacagggagctggatgaccagatccaggccaatctccccg

SEQ ID NO: 697846 - DNA, 75 bp, Homo sapiens
caagcggcgtggacgaccgttgctgagctggtgtggaacgtctgtgatcagaaatctcctttacagacaataggt

SEQ ID NO: 697847 - DNA, 100 bp, Homo sapiens
ctggaaccctgcgtccaggcgtgacggtcatcccgaaaggccggccccaggagttggcatcctttggaagagttcgtgaaagctttctgcccagagctcc

SEQ ID NO: 697848 - DNA, 82 bp, Homo sapiens
tggctggtgtcctggggaccgcatgggtgtcttcaaaaacaaacatatttaaaagattttacttctcatctccaggaagaac

SEQ ID NO: 697849 - DNA, 101 bp, Homo sapiens
ggaagagctcgtggaagaggtggtgtctatccagaagttaaaggagagattgctcgtaaagatgaaaagctgctgtcgtttctaaaagatgtgtatgttga

SEQ ID NO: 697850 - DNA, 82 bp, Homo sapiens
ggaaggaacgaggcaaggagctaaagcagcgtgcgttcagccctggggtcctctccacccggatcctggccatgaaggcctc

SEQ ID NO: 697851 - DNA, 90 bp, Homo sapiens
cagcaatttatccgtgtgcagccccaaactggaaagaagatgctaattaaagtgaaggggctgattcaggagatcaatgatttgaggtta

SEQ ID NO: 697852 - DNA, 83 bp, Homo sapiens
caaggagctgggctgcatcaactcggtcaaaatgcagatcttcgtgaaaacccttaccggcaagaccatcacccttgaggtgg

SEQ ID NO: 697853 - DNA, 75 bp, Homo sapiens
cccagatgtctgacagccctgtgtgacaccaagataagtaacgcagctgccagacccggccatcgaggaccaggg

SEQ ID NO: 697854 - DNA, 97 bp, Homo sapiens
tctttgaaacagcatgggaagcaaaggccatggcagtaatagcgtgtttatctgacacggacatacttggagatgaagttcaacttttttcacttga

SEQ ID NO: 697855 - DNA, 52 bp, Homo sapiens
aaaatgattcgggaatatcggcaaatggttgagactgagctacagttaatct

SEQ ID NO: 697856 - DNA, 75 bp, Homo sapiens
acccgcggtgcaccgcctgctgggagcgccgctcaagctcaaactggaggattataaggatcgcctgaaaagtgg

SEQ ID NO: 697857 - DNA, 75 bp, Homo sapiens
cgagaccgcgtgcgaggaccgacaggggcaagtgtccgagtggtgaatcagctacttacagagatggatggtctg

SEQ ID NO: 697858 - DNA, 87 bp, Homo sapiens
tacagattcgcgaaacccggggcacttagaggcccgtctggaacacgaaggcaggggaaatggaaggtgatgcagtcgaagccattg

SEQ ID NO: 697859 - DNA, 50 bp, Homo sapiens
cggagcagagagctggcgagcaaggtgaaatgacaatggatgctctgttg

SEQ ID NO: 697860 - DNA, 101 bp, Homo sapiens
cgacgagtcagtatttcgacttcgcgcagggcggcggcccgcagtacagattggtgctgaagacatggacggcttccaggcagacacggaggaggaggaag

SEQ ID NO: 697861 - DNA, 50 bp, Homo sapiens
ggtcctcctcacctatggccgctggcagaggtgaaaagccaggcatcctt

SEQ ID NO: 697862 - DNA, 50 bp, Homo sapiens
tccgccaccgtcttcaggccaggtggcagtagagaagagcatcacagaag

SEQ ID NO: 697863 - DNA, 90 bp, Homo sapiens
tggcatgtatgaatattatgccagtgaaggacaaaatcctttgcgaacctggcttctgtatttaccatgtacctggagcattggtttggc

SEQ ID NO: 697864 - DNA, 89 bp, Homo sapiens
cgcagaacccgggagtaggagactcagaatcgaatctcttctccctccccttcttgggtgaatcgaaacgcatcaccctggtcctccag

SEQ ID NO: 697865 - DNA, 100 bp, Homo sapiens
gtaaaggggctaaaaaccccggagtcttcctgatccatggacccgatgaacatagacacagctcctctggtgcaagtgtggtagctattgacaacaaaat

SEQ ID NO: 697866 - DNA, 74 bp, Homo sapiens
gtcaggacgtaaatggaaccctgagggagacgtggtgggcggtccttcctgtgacacgacccttgagtgacagt

SEQ ID NO: 697867 - DNA, 74 bp, Homo sapiens
gggaggaggaagatggcggcgggggcgaggtgagaagccctaccactgcaactgggacggctgcggctggaagt

SEQ ID NO: 697868 - DNA, 100 bp, Homo sapiens
cgtgctgatgaagatccacacctcactgcagtcgaaggtgctggaggtggtgagagccaactatgacacgctcacgctgaagctgcaggatggcctggac

SEQ ID NO: 697869 - DNA, 78 bp, Homo sapiens
ttacaatagcatacattatgctgccgcctatgggcacaggcagtgtctggaattgccttcagtttggaaacctgcaga

SEQ ID NO: 697870 - DNA, 75 bp, Homo sapiens
cgcccgtccccctgccccgttcacaatcggctatgtgactacgtttgtgacctcctcttagaagagtcaaatgtt

SEQ ID NO: 697871 - DNA, 51 bp, Homo sapiens
cggccgcaccttcccgccttctcagggtataaaattcccgtcattgaaaat

SEQ ID NO: 697872 - DNA, 77 bp, Homo sapiens
ctgggttctattttccctcctcaaactgactttgcagccacggagagatcttgagccagatgattgtgcatccattt

SEQ ID NO: 697873 - DNA, 100 bp, Homo sapiens
tactgcaaggaacaaaatgtttgtaaattctccttttaccaagacatatctgaagagatggattaagaatgctttggattaaggattgtggagcacattt

SEQ ID NO: 697874 - DNA, 131 bp, Homo sapiens
tttgaccgaacagctgctgtatgggaagaaatagtaggagaatcaaatgataaactgcgaggacagagccactgggtattgttgcagcatctggcagtgagactgaggatgaggacagcatggacattccc

SEQ ID NO: 697875 - DNA, 83 bp, Homo sapiens
gaggagttaaagcataaaccaggcatggaagaggctctgcgtcgccagcgggagcaagaaattgcattaaggcgacagcgaga

SEQ ID NO: 697876 - DNA, 74 bp, Homo sapiens
ctgtaccaactgccggaaagtgctgcggaaggagcgggacggtatgcgggccatcctggggtcctacgacagcg

SEQ ID NO: 697877 - DNA, 98 bp, Homo sapiens
accacaccggcttcctgacggagtatgtggctacgcgctggtaccgggccccagagatcatgctgaactccaaggaatacggggtgctttgcattcag

SEQ ID NO: 697878 - DNA, 100 bp, Homo sapiens
cgagactgtaggcactgccatggcccctgtgctcagtaaggactcggcggacatcgagcttcatgattgtatccaaaaaaccttgaatgaatggagttcc

SEQ ID NO: 697879 - DNA, 100 bp, Homo sapiens
ttcaggttacttgcatggagttggtgcttaaatatggtggccagcagagatctgcaaccccaggtctgtgccactgaacatccagggccttaaacatgac

SEQ ID NO: 697880 - DNA, 50 bp, Homo sapiens
tacttctgcatgaacatctccagccaggggagaaagagagagcgcgaaag

SEQ ID NO: 697881 - DNA, 75 bp, Homo sapiens
ccaccggcagcagcagcaccaccggacggcagcggaggaggaaatggcaggtcctaatcaactctgcattcgccg

SEQ ID NO: 697882 - DNA, 90 bp, Homo sapiens
gctctgagggcagggacgtgttggacacgctgactttgtaggctccgccaagaggcgccgcaggagatgtatcggcaagcagtgtaaacg

SEQ ID NO: 697883 - DNA, 90 bp, Homo sapiens
atctgttctacaggaagatgctgagaaactgcggaaagaattgcatgaagatgcaacgccaggagcagcatcagccacgctgtaaacaag

SEQ ID NO: 697884 - DNA, 83 bp, Homo sapiens
gtacccggagagcggcaactcgcgcactcaaagaatcagcatgattcttcagaggctcttcaggttctcctctgtcattcggt

SEQ ID NO: 697885 - DNA, 101 bp, Homo sapiens
cagcctgggagaagcagcagaggaaggcccttgatgagcctccctatttgacagtgggcactgatgtgagtgctaaatacagaggagccttttgtgaagcc

SEQ ID NO: 697886 - DNA, 90 bp, Homo sapiens
ctgcaatcttaccagggaggccaagcgaccacccaaagaagaatgtgacagtgatgataacatgggtgccaaaaatacttcaataggaga

SEQ ID NO: 697887 - DNA, 98 bp, Homo sapiens
gacagcaatggttgtatcaactatgaagcggccttcctcacccagtccgtttgtctagatgacacaacagtgaagtttgagatctgggacacagctgg

SEQ ID NO: 697888 - DNA, 100 bp, Homo sapiens
aatgccatccagagctgtgcctcccagcaccacagtccttctgcagtccctcgtccagccacccccaggttatgatgtgattgctcaagcccaatctggg

SEQ ID NO: 697889 - DNA, 98 bp, Homo sapiens
tcgactcaagagttacatgcatcaggtgcggcgatgctgttccccggaggtaacccaccccttggaggagagagaccccgcacccggctcgtgtattt

SEQ ID NO: 697890 - DNA, 100 bp, Homo sapiens
tattcacaatgtatggaaacagagactcaataaactagagcgctttcaaaatttggttcttcaagagttgagcagtcttaagcaggatattcaggccctg

SEQ ID NO: 697891 - DNA, 74 bp, Homo sapiens
tgtaccccacgtagtcgccggttaccgatcggactaagttccaggttcagccgtctgtatatctccccagatac

SEQ ID NO: 697892 - DNA, 123 bp, Homo sapiens
cgcaaggggagctgaagagggccatctgcggctttgatgccctcgccgtggccacgcagcatttctttagaaagagtacccaagtggccttggaccatctggagtctgtgcctgagaaactga

SEQ ID NO: 697893 - DNA, 99 bp, Homo sapiens
atcacaactggattgtagctgcatatgcccattttgctgtgtgttacaggtgaccaagaatatggcccaggtgaccaaagccctggacaaggccctgag

SEQ ID NO: 697894 - DNA, 98 bp, Homo sapiens
ggagaaaaccagacctccacttccaaggatatagagcaggtagattggggtcaactggactacttagttgtagacatgccaccaggaactggagatgt

SEQ ID NO: 697895 - DNA, 99 bp, Homo sapiens
gtcctttatatagaagggagagtagggctgctcttcacctatcgtggtgaagtttgctgacactcagaaggacaaagagcaaaggcgcctccagcagca

SEQ ID NO: 697896 - DNA, 75 bp, Homo sapiens
gaagggcaaggaaagcagcatagagaatgagatagccgtcctgagaaaggaagctgccaaagaatgtcgacgtcg

SEQ ID NO: 697897 - DNA, 90 bp, Homo sapiens
gtaactttctatccgtccgcgtcagcgccttgccaccctcatctccaatatggaaagaaaagagccagctgcagaatagccgagacctgg

SEQ ID NO: 697898 - DNA, 90 bp, Homo sapiens
aggagaccaagaaacttatgcagagggagatgtccatggatgaattgaatgatctggcacgggaccctccagcacagtgttcagcaggtc

SEQ ID NO: 697899 - DNA, 100 bp, Homo sapiens
cacagcatctcccacagcccctgcatgccccagtgacaagccagcaccagtccagaagcctccatccagtgttatatcttaagtgtggtgctgctaacat

SEQ ID NO: 697900 - DNA, 74 bp, Homo sapiens
agattcgcagtggtcgcttcttctccttgattatggtgacaagctgaacatggagctgagtgagaaatacaagc

SEQ ID NO: 697901 - DNA, 83 bp, Homo sapiens
accattgcttctgctttcggggatgcagctggccaagctgatccgacagagaaagggttttgacccaccacatcagagtgaca

SEQ ID NO: 697902 - DNA, 75 bp, Homo sapiens
agaaaaaatcccactttggaggaccagattatgaagaagggcctgtcccagtcggctttaccctatcgacgcagc

SEQ ID NO: 697903 - DNA, 52 bp, Homo sapiens
gagcacgagaaatacggcgtggtgtatgcagagaatatttccaaaatggtgg

SEQ ID NO: 697904 - DNA, 96 bp, Homo sapiens
cttatggcggcgctggagagggggcgctgagctgttggggtgctgggactctggtgcccccaaccctgggcatcctcaggctttgaggagaataca

SEQ ID NO: 697905 - DNA, 51 bp, Homo sapiens
gtcccagaaacgtcactatcaagaagacttcattagaggggtggtagactc

SEQ ID NO: 697906 - DNA, 83 bp, Homo sapiens
cttcttcaacagccacaacgtgtcaaagccggagtcgtcatcggtcctgacggagacaatgcagatcttcgtgaagactctga

SEQ ID NO: 697907 - DNA, 87 bp, Homo sapiens
gtgtggctgtcctcctgtcatctctctggataagatggagcaagagagtgtacatatgaagattgaagaaaagataacattaacctg

SEQ ID NO: 697908 - DNA, 80 bp, Homo sapiens
agctccagaggtttaaccataggatagagaaaccaggtgaggggaagtggcttcgaaacattgactattaccgtttagat

SEQ ID NO: 697909 - DNA, 75 bp, Homo sapiens
gaggggacagaggcaccaaggacctccaagacagaaaaatggctacaaacttcctagcacatgagaagatctggt

SEQ ID NO: 697910 - DNA, 74 bp, Homo sapiens
cggggaggaccctgagggctcagacatcctgaactctctttgctcacaagttaccaaaaaaaaaagagccaaca

SEQ ID NO: 697911 - DNA, 74 bp, Homo sapiens
tgccgccagaggaaggactgctctgcacgcacctgttattaatgctgcactggctttagcagcaaaaccacaga

SEQ ID NO: 697912 - DNA, 100 bp, Homo sapiens
ggagaattacccgaaaaacaaccacactgcttcgatcctggacaggatgcaggcagattctctgctggatgaaccgaatcctaacagtccagccaatagc

SEQ ID NO: 697913 - DNA, 96 bp, Homo sapiens
ccggagccgacgggcggtggccgcactgggaccccggaatcccgcgcgctgcccacgattcgcttctgaggggcaagctctgtgtgattgattgga

SEQ ID NO: 697914 - DNA, 101 bp, Homo sapiens
atagtggaaagaaaccatgtgctgaaatgtttgacgacactgatggtttggtcctcgatgggcttcctggaatattggtgtgtttatttgcatcagatgtg

SEQ ID NO: 697915 - DNA, 75 bp, Homo sapiens
tatcaaatatgagaaagctaggccatctgaataactttactaagccacataaagaagatccctaatagtcatttc

SEQ ID NO: 697916 - DNA, 83 bp, Homo sapiens
aacattgtggagctggccttccagaccacttgccacattgtcactgtttcagtgcagggcttcctaaaacagaagccaactgg

SEQ ID NO: 697917 - DNA, 100 bp, Homo sapiens
tctccaccctgggggagctgaaacagaacctgtccaggagctggcatgacgtgcaggtctctagcgcttgtcgagatgtccacagaaggaggatttggtg

SEQ ID NO: 697918 - DNA, 97 bp, Homo sapiens
cattgacatttaattttagggtcctttatatagaagggagagtaggtgggctacgaactgaaggatgagatcgagcgcaaattcgacaagtggcagg

SEQ ID NO: 697919 - DNA, 87 bp, Homo sapiens
gagggatacagcagtttggtcaatattgtcttaacatgcttcaaataaatcagaattttgattcagctaaagttccatcagatgagt

SEQ ID NO: 697920 - DNA, 96 bp, Homo sapiens
ttgatgttaatgaatggtgctatacttgaattttctaaggtgtcattagacatatctgaagagatggattaagaatgctttggattaaggattgtg

SEQ ID NO: 697921 - DNA, 83 bp, Homo sapiens
gaaaaatctgaggttatcaatgacgaggtgaaatgacaatggatgctctgttggctcgattgaaacttctgaatccagatgac

SEQ ID NO: 697922 - DNA, 101 bp, Homo sapiens
agcaggcttcgaggccgttgagaatggcaccgtctgccgagctccagggcccacaacggcagtgtcctacatgtcggtgaaatgtgtggatgcccgtaaga

SEQ ID NO: 697923 - DNA, 83 bp, Homo sapiens
ggaggaagcaggagcagcccaagcgccttccctcacggtttccaggcctgaggtgcccgccctggccccaggagaatgaacca

SEQ ID NO: 697924 - DNA, 100 bp, Homo sapiens
gtccttcgggaaacaggaggagcaagttcgactccagcgagggaaaacggaggctcaggaagaggccaaagaagcagaaatgagcagaaaggagttgggg

SEQ ID NO: 697925 - DNA, 115 bp, Homo sapiens
cagaactggtgcaagcggggccgcaagcagtgcaagacccatccccactttgtgattccctaccgctgcttagaccagatgatgtgcttctgcatcgcactcatgatgagattgt

SEQ ID NO: 697926 - DNA, 75 bp, Homo sapiens
ggcacctccggtaccgctgcagccaccgcggcccccgcggaatgacagcccatatcaaggcggtgtattcttttt

SEQ ID NO: 697927 - DNA, 100 bp, Homo sapiens
ttgccgctccgggaagtgggcagccagcccagcacaaccagtgtctctgaagaagatgtctcaagtagatattctcgaacagatagaagtgggttcccta

SEQ ID NO: 697928 - DNA, 82 bp, Homo sapiens
ctgaggcggccgcggggcccgagcgcaggtgacttaagagattaaaattaatttggttgctgttggttctgaacaaataatg

SEQ ID NO: 697929 - DNA, 90 bp, Homo sapiens
aaggagaccttgaggaatatggtcaggtagtaaacctattgatggcaattttgctgactgtggaagtgactcatccaaactccatgccag

SEQ ID NO: 697930 - DNA, 97 bp, Homo sapiens
tcagagtcagttggcagtgatgcaccttgtgttgtaaaagtggttcaaaccttgtactactcagctgatcacaagctgcttgatgggaacctactag

SEQ ID NO: 697931 - DNA, 82 bp, Homo sapiens
ggccgctctgggatcccggccaccagcaattgtccgtaaagatgacggcgccttgaggtaagctacaggcaacaccacttcc

SEQ ID NO: 697932 - DNA, 100 bp, Homo sapiens
gcgctggagagggggcgctgagctgttggggaaggcgacatgccaattcatgaacttctcagcctttatggttatggtagtactgttcgactacctgaag

SEQ ID NO: 697933 - DNA, 74 bp, Homo sapiens
gagacttgcagggaggcaagaagacactctggacaccactatggacaggcaaatgttctgaaaaagactctgca

SEQ ID NO: 697934 - DNA, 100 bp, Homo sapiens
ggctgaggaactgctgttgtgaaccttttgccctggtgggattattggacagtatgatttggtgaaatgcctggctcctattcgagaccccaagaccgag

SEQ ID NO: 697935 - DNA, 100 bp, Homo sapiens
tccagcgctgccggagccgcctgagcaggaggatgcattagcacaacaggcctttgaagaggctcggagaaggacacgcgaatttgaagatagagacagg

SEQ ID NO: 697936 - DNA, 50 bp, Homo sapiens
cgatgtgaggaaaggcacctccaccagcgcttctctgaagtagctttgga

SEQ ID NO: 697937 - DNA, 117 bp, Homo sapiens
gggtctggagggctgagcagtcaactcaaatgcaagtccaagaggaggaggaggcggaggtccaagcggaaaggcttctccagggaaagtgaccgaggcagtgaaagaggccattga

SEQ ID NO: 697938 - DNA, 94 bp, Homo sapiens
cgcgggggagccccgggagccgcacggtcctgctcaatctggaattttgtcagatcgtgaagtggtaaacctctttcttcattttactgtcaac

SEQ ID NO: 697939 - DNA, 75 bp, Homo sapiens
caatgactgtggaataatatggaagaagatggaaaaaacttgtttaatgggctttccttaaagtttcccatgtct

SEQ ID NO: 697940 - DNA, 50 bp, Homo sapiens
ccgcgggatacgcctcagcgcgatgcccagacctggaggatccccagggt

SEQ ID NO: 697941 - DNA, 75 bp, Homo sapiens
gcgctggggatccctgctcttcgctctcttcctggctgcgtccctaggactgaagatggaggaggaaggcacaga

SEQ ID NO: 697942 - DNA, 75 bp, Homo sapiens
gcagtctcatatttctcctctgaagagagacaagagagacacctccaacttcgacaaagagttcaccagacagcc

SEQ ID NO: 697943 - DNA, 83 bp, Homo sapiens
gtgttggaaagcactatggtgtggagattgctgcgatgattgacactgagtttgccaagcagacctccctggacgcagtggcc

SEQ ID NO: 697944 - DNA, 75 bp, Homo sapiens
tcctgtctcaacgatacctattttctagtgctgagatcctgagacaatgcatctgacagatacgtctcatggtgt

SEQ ID NO: 697945 - DNA, 95 bp, Homo sapiens
ccgaccttgtccacacagtccataaattgcatctgatggtctcaagggtcgtgtgtttgaagtgagtcttgctgatttgcagaatgatgaagttg

SEQ ID NO: 697946 - DNA, 50 bp, Homo sapiens
cgtgcacatgctggtgccttccaggccctcgggaccaaggatcacgtcat

SEQ ID NO: 697947 - DNA, 100 bp, Homo sapiens
gccgggatcattaagaagcagatcctgaaacacctgtcccgatgcgtttagcccagcccctgctggtaaccaaggtcctcctccaatgatgggtatgaat

SEQ ID NO: 697948 - DNA, 87 bp, Homo sapiens
gtcaatggcattgcttgggccccacattcatcctgccacatctgcactgcagtttgtcagaggaatggctgtgaatggatgcctgga

SEQ ID NO: 697949 - DNA, 100 bp, Homo sapiens
tatgctgcagcatattgtactggcctgctgctggcccgcagggtcagtttgctgagaacgaaaccaatgaggtcaattttagagagataccttcacatgt

SEQ ID NO: 697950 - DNA, 100 bp, Homo sapiens
cgcgggagaggtaaacagaacaccaggacatcccagagtctgggaaatggcctatgttgtccttggccagtttctggtgctaaagaaagatgaagacctc

SEQ ID NO: 697951 - DNA, 50 bp, Homo sapiens
ttggagtgaaaacgacccggcagatgagtcctggagatggagcgcttaca

SEQ ID NO: 697952 - DNA, 83 bp, Homo sapiens
gtgcgtatttgcctgaagaaggtcagtgtgcttgcttggagatcaggacgcaaagaaaaattggaagctccaccacccacccc

SEQ ID NO: 697953 - DNA, 74 bp, Homo sapiens
ctaaagacgggccattttccagacctcatccagaaagtttcctacactactgaggtttaggggcactgtgaagc

SEQ ID NO: 697954 - DNA, 87 bp, Homo sapiens
cgactcggtcctgtttcgacagcgaacatgtcgcggcctgtcagatgccacttcaaatgaacaacaagagcttttctgtcagaagtt

SEQ ID NO: 697955 - DNA, 100 bp, Homo sapiens
ggaagatgatcttaaaaaaaatagctcagttaatgaaggatcaacgtatcataaaagttgcattacaattccaagacgctaaagactgaatcacctaatg

SEQ ID NO: 697956 - DNA, 75 bp, Homo sapiens
ggaccggcgtccccggcgcgaagaggctggactcggattcgttgcctgagcattttgaaagcgaagcagaagccg

SEQ ID NO: 697957 - DNA, 82 bp, Homo sapiens
agcaaccagaagcagacttatacagtgcagggagactgaccctagacaaagctcttgacatgacttactacctccaacatga

SEQ ID NO: 697958 - DNA, 76 bp, Homo sapiens
gaacaattagggtgacgtgtgcattgagtaaacacaagttggatggcttgaggactggtactaaaaggaaacgtga

SEQ ID NO: 697959 - DNA, 75 bp, Homo sapiens
ccttagtcgccgccatgacgaccgcgtccacctcgcaggcatttgttgctatcggggactacaatggccacgtcg

SEQ ID NO: 697960 - DNA, 97 bp, Homo sapiens
tctatctcttctccctgcctattaagctctggccaggctgccgcacctctacaggaactttgccgcggagcagtatgccagtgtgttcgccatctcc

SEQ ID NO: 697961 - DNA, 98 bp, Homo sapiens
ggactacgtctgtgcggctgcgtggggctcggccgcgcggactgaaggagactgaagggtttccaggcctgaggtgcccgccctggccccaggagaat

SEQ ID NO: 697962 - DNA, 96 bp, Homo sapiens
ccgggaggagaaggaaggcatggaaagttccagccggttcgagagctaggtgagaagccctaccactgcaactgggacggctgcggctggaagttt

SEQ ID NO: 697963 - DNA, 96 bp, Homo sapiens
cgcgggcgagcggctgtgtggatgtcggcgaagccgcgggcgaggtcaggttgccaaaaaggaagatctcatcagtgcgtttggaacagatgacca

SEQ ID NO: 697964 - DNA, 82 bp, Homo sapiens
ccggaatcctggtcccggcgtgcacttctgaaggacttcagaaagtttcctacactactgaggtttaggggcactgtgaagc

SEQ ID NO: 697965 - DNA, 82 bp, Homo sapiens
ctcggagccactaatgaaccgcctggaagacaaggacttctgcacggacctggccgtctccagtgccaacttcattcccacg

SEQ ID NO: 697966 - DNA, 88 bp, Homo sapiens
gagcgcgagaacctgccgctcatcgtgtggctgctggtgaaaagcttctccgagaggtcctggcattgatgtgcctgctccagacatg

SEQ ID NO: 697967 - DNA, 96 bp, Homo sapiens
gaggagggcaaacactccagccacgaagtcaaggctctgggggccatgtggaaactacataaggagtgcctgtgaagaaaacggggtattgccctg

SEQ ID NO: 697968 - DNA, 75 bp, Homo sapiens
acagttgcatgctgggcctgccacggaggagccaggtccctgtctgagccaggcacagtcttttgctgagcgcct

SEQ ID NO: 697969 - DNA, 151 bp, Homo sapiens
atggaagtcattcttgtgccagaggagtgtgccatattccaatggctgagccgttttgccccaaaacgagagagagatttccgcatattttgcaactggctcctcaatgacataccattttcaagaacattacactttaagtgaaaactcc

SEQ ID NO: 697970 - DNA, 75 bp, Homo sapiens
cctgaagtgacagtgaggaaagatggaagaagatggtgcacagtgatcaacaaatacaagcgcagacgatttcag

SEQ ID NO: 697971 - DNA, 100 bp, Homo sapiens
tgaccggctgagcccccatcattgggagaaatccccactcctccaagaaccaacccccaaattggctgggacagggaccagttactctccacaagaaaat

SEQ ID NO: 697972 - DNA, 83 bp, Homo sapiens
gtcggcttcaaagagaaaaggcaacatcctgtcacaggccatgctctggcaaaaacgaaatctggcattttttaaagtttgcg

SEQ ID NO: 697973 - DNA, 100 bp, Homo sapiens
ctatgatcgtccagcctcatataagaagaaatctatgttaggtgtgtggatgtctcctagatcttgacttgctcctgaggaaatattgtgtgactgagtt

SEQ ID NO: 697974 - DNA, 75 bp, Homo sapiens
cgctcatgctcgcccggctttggggtcaagcagattgacccaagcaccagccgccgcttcacacctccctccccg

SEQ ID NO: 697975 - DNA, 50 bp, Homo sapiens
gctcaccgcaacctccgcctcccagtttcactcttgttgcccaggctgga

SEQ ID NO: 697976 - DNA, 87 bp, Homo sapiens
gcctggctccacgccctgctgggtcctacctgtcagagccccaaggtgctggagaatctggtaaaagcaccattgtgaagcagatga

SEQ ID NO: 697977 - DNA, 96 bp, Homo sapiens
ttcacaataagagcagaggatggaacacttcagtgcattcaagtcaggatggctaaaggtgaccccaagaaaccaaagggcaagatgtccgcttat

SEQ ID NO: 697978 - DNA, 101 bp, Homo sapiens
ggaagccaagggagattataccaggaagaggatgaaatggattctggcacgatggttcgagcagtgggtgatgagatgggcactgtccgagtagccagcac

SEQ ID NO: 697979 - DNA, 90 bp, Homo sapiens
actgaggaggcggcggccgacggtggcggcgggatgcagactaaaatccacggagtcgggtttgtgaaaatccatgccccctggaacgtg

SEQ ID NO: 697980 - DNA, 75 bp, Homo sapiens
catgggcactttctttgcctttatggagaaaaagtgctactatatcggggccacagatgatgcagccaccaaaat

SEQ ID NO: 697981 - DNA, 100 bp, Homo sapiens
ccattaaacagtgagatcagagagctgttgaaactactgtcaaaacccaatgtgaaggtatgacagcagttatctgtacttaccctcttgacatggttag

SEQ ID NO: 697982 - DNA, 123 bp, Homo sapiens
cgcggtttcctgtacctgccttgggatccggagggaggaagctgggacacccgggagtcaggaaatggtgaaaggcaggattgggaaccccacagaccgcagctcctcccaggagaaccccac

SEQ ID NO: 697983 - DNA, 74 bp, Homo sapiens
cttggatcattaccagaagagataggtcagctcaaacagttaatggagctggtctcggacagcccgggagacga

SEQ ID NO: 697984 - DNA, 98 bp, Homo sapiens
tgatatgcatgcatgtaccgaccttctgaacaaggccaacacctatgcaggccagtactgatgcaggcactgcaggagccctgactccacagcatgtt

SEQ ID NO: 697985 - DNA, 74 bp, Homo sapiens
gtcttgccttcttcttaggtttgcactcgttctccgaaaatggtgtgaattgattcctggggctgagtttcgat

SEQ ID NO: 697986 - DNA, 125 bp, Homo sapiens
gtcatctccaagttggaacaaggagaagagccatggatcataaagagacacataccaaattggatctatccagtgctgggcctaaaggagataacatttatgaatggagatcaactatacttggt

SEQ ID NO: 697987 - DNA, 100 bp, Homo sapiens
gaagctctacccactgccctcggcccgcgattgtccgaagatacatcaaggattggcttgagagaaagaagcctccttttggtgctatcagcagcagtgt

SEQ ID NO: 697988 - DNA, 95 bp, Homo sapiens
atagctgaccagctggaagagttgaataaagagcttactggaatccagcaggataaggagcacaagtgtcctttgatttgtgggaggaaactccg

SEQ ID NO: 697989 - DNA, 75 bp, Homo sapiens
tcttcgtctgcagtgattggcagctcctgcgggtgctgggtaggccaggtttcagcatcgcagacaagaagcgca

SEQ ID NO: 697990 - DNA, 74 bp, Homo sapiens
gccacgggaagggtgcggggctcgccccgtctccgcaggggtggacgaaatggagtcttgctctcttgcccagg

SEQ ID NO: 697991 - DNA, 88 bp, Homo sapiens
ttggtttggtctctaaaagtaaaggagccccccaagatgaacccagtggtggagccactgtcctggatgctgggcacctggctgtcgg

SEQ ID NO: 697992 - DNA, 80 bp, Homo sapiens
cactgcagccatgatctccttaacggacacgcagaattcctgacattcagacaactgacttgtaactgacttataactga

SEQ ID NO: 697993 - DNA, 50 bp, Homo sapiens
cccgagaatagctccgtccagcaggtaacttgggtttttactcctgtaac

SEQ ID NO: 697994 - DNA, 88 bp, Homo sapiens
aaaagaaaagggcaaagctgcttgcacgttatataccgcttattcaaggcgggagacactatattcaatcgtgctaagctcctcaatg

SEQ ID NO: 697995 - DNA, 88 bp, Homo sapiens
ccgaagacaatgttctccaaagataaggtatgcccaagaggacagagaacgaatgcacagaaatattgtcagccttgcacagaatctc

SEQ ID NO: 697996 - DNA, 75 bp, Homo sapiens
gtgttagagtgtgagcgtaaccaacacctggtccagacctcatgggtggcatggagaaatcgttgtcaaaacaga

SEQ ID NO: 697997 - DNA, 101 bp, Homo sapiens
ctgggccagccacctggtgtccgtggagcggaggcggagggacaagatcaacaactggatcgtccagctttcgaaaatcattccagactgtaacgcagaca

SEQ ID NO: 697998 - DNA, 100 bp, Homo sapiens
gcgcgcgcgggaccccggagcccaaacccggggcaggcgggcagctgtgcccgggcggcacggccaggtcagactatgatgactggagaccgtctctggc

SEQ ID NO: 697999 - DNA, 87 bp, Homo sapiens
tattttctgcttccaaaggtccagagcattcagctgtctcaaatgcagggacaggctggcctgacatggaaggtgaaacaaggcagc

SEQ ID NO: 698000 - DNA, 90 bp, Homo sapiens
tttatatctgtaaagtgaccaattcccttggtcaaagaagtgaccaaaaagtcatctacatttcagctgagctccttgccaaaaaacagc

SEQ ID NO: 698001 - DNA, 75 bp, Homo sapiens
gtgctccaggaggccagaaggaaatacttctgggaggtgatcagtgatgaacatggcatcgaccccaccggcacc

SEQ ID NO: 698002 - DNA, 100 bp, Homo sapiens
agctggcagaagaagcaacacgcaaacgagagctgaggctaatgaaaaacaggtctacctgcaagtcggatttcccaggttattgttggagatgagcggc

SEQ ID NO: 698003 - DNA, 100 bp, Homo sapiens
caacagcctcgagtggcctgcagtcacagggaaccctcaggaagaccttccgggcagagaccagagggaagactcaccccacacagaccgcgtttctctc

SEQ ID NO: 698004 - DNA, 100 bp, Homo sapiens
atgccgggggagcggggccttccacaccccctccgtgggtgtgtgagcgcatcagcgaggaggtggggctgctgcagctccttggggaccccccgcccca

SEQ ID NO: 698005 - DNA, 100 bp, Homo sapiens
aacccaatggaatcctgcatattggacatgccaaagccatcaatttcaactttggctatgccaagaattatatccagatcgagagacagaagattctgaa

SEQ ID NO: 698006 - DNA, 75 bp, Homo sapiens
taaggaacaaggtgatgtaataggaataccatttaatgtggatgtttctaagcatgaattgaggaacagaagaag

SEQ ID NO: 698007 - DNA, 75 bp, Homo sapiens
cctggttaatcaacagtcttttcagttacggctagatgaggctcaagaagcagaatgccaggccttgaggctaca

SEQ ID NO: 698008 - DNA, 75 bp, Homo sapiens
caaatgagacccttcctggagaaccgggcccagcagcactgggagtcgggaagacatcactcatgaaccagtatg

SEQ ID NO: 698009 - DNA, 98 bp, Homo sapiens
aggaacttcagcatgaaaatattgtagcactctatgatgttcaggatctcatctggccaccgcgttctggaagaggcgagagggagagcgtgcgcgag

SEQ ID NO: 698010 - DNA, 107 bp, Homo sapiens
cggcggccgcgccatgtggctgctggggccgctgtgcctgctgctgagcagcgccgcgggagaccaagacacattccaccccagtggggggtcccataccactcatg

SEQ ID NO: 698011 - DNA, 100 bp, Homo sapiens
gcactagagtttaactggcacccagtgctcatggtcaccggcttcgtcttcatccagggcatcgatggtggttgctatttcaggcccagacataatcaaa

SEQ ID NO: 698012 - DNA, 100 bp, Homo sapiens
cttcaactcttttctctcgggcttcatctcttgtgtggggagtttcatcctagcggattgggaaaatgaggtacgttagtgttcgcgattttaaaggcaa

SEQ ID NO: 698013 - DNA, 101 bp, Homo sapiens
ccgatttcatgactaaccagtactggagcgctgctcagcgctttcgttcagctgtgccacatttccacgacgctggcagagaagacgtgggtccagctttt

SEQ ID NO: 698014 - DNA, 50 bp, Homo sapiens
gtcacagtgtcttgggccgccggaaggactcggtggtggtttttctagac

SEQ ID NO: 698015 - DNA, 100 bp, Homo sapiens
gggggaaagcgtcttggatgatgtggaagttaaacgagctgagcctcgggacagcaagagccaagcgccgggacagccaggtgccagccagtgggggagc

SEQ ID NO: 698016 - DNA, 82 bp, Homo sapiens
gccgtttgagggaagaaggaggaaaattacccggtatcgttagaggatggcacagtgttcgacggccgccccatagagtccc

SEQ ID NO: 698017 - DNA, 99 bp, Homo sapiens
caggcaacccccagttcagtgtccagaggcacagcccccagggccctgttacataaaccagagatgataaaacagatacttccagaacatagtgtgctt

SEQ ID NO: 698018 - DNA, 130 bp, Homo sapiens
tggcttccagaatcactgagctgtaacaaagcactctgtgctagtgatgtgagcaaatgcctcattcagtaaggatggggatgataagaagagacctgtgatcattcatcgagccattttgggatcagtg

SEQ ID NO: 698019 - DNA, 99 bp, Homo sapiens
ctagtcaggaagaggacacacagagtattggtcctaaagtccagagacagagcactaattagttccgccatggagtcatagttgcagctgactccaggg

SEQ ID NO: 698020 - DNA, 50 bp, Homo sapiens
ctcagtgttgccctgttcagtctgaggtggaaaaacttgtgaaatatttg

SEQ ID NO: 698021 - DNA, 100 bp, Homo sapiens
aacagagggaactacaacagaggtggaatgcccaacagagggaactacaaccagttttcggctttgtgagaaaccttaccatcaaacacgatggccagca

SEQ ID NO: 698022 - DNA, 75 bp, Homo sapiens
tgtcttcggtggactccttcggcagtccacccaccgccgccgcctcccagcttgccttgcgccatggactggcag

SEQ ID NO: 698023 - DNA, 49 bp, Homo sapiens
cagctgcctcagttcttagcgcagtgctggacccaaaggagacaacatt

SEQ ID NO: 698024 - DNA, 100 bp, Homo sapiens
ggtcagcgtgggtgcctcgcagccagagacgggtactccaaagattcaggtttactcacgtcatccagcagagaatggaaagtcaaatttcctgaattgc

SEQ ID NO: 698025 - DNA, 100 bp, Homo sapiens
caagaacatccgagggtgcctgggaatcggtcgcctggaggaccagtatttcccatggaggattcttgctcacttgtggcatctgggctactcaccagaa

SEQ ID NO: 698026 - DNA, 78 bp, Homo sapiens
gaaaacaaagaaaaacatactccagaattcctaatagaacaggtgcaaatagctatgggcaacttggcctcggccata

SEQ ID NO: 698027 - DNA, 50 bp, Homo sapiens
tggctgcctacctgcagaagaactcgggttcatgacgctctcgatattcc

SEQ ID NO: 698028 - DNA, 83 bp, Homo sapiens
caaacccccaacccgcaaacctcatcatccacccacttctagatgagccaacatccatgatagcagtcttctgtaaatcgaac

SEQ ID NO: 698029 - DNA, 80 bp, Homo sapiens
agaggtggaggcgctttgaaaggtcacgagaagagaatgccttctagatgcaaaatcacctccaaaccagaccacttttc

SEQ ID NO: 698030 - DNA, 100 bp, Homo sapiens
gtgtcgttgttggtccttctctaaacgaccatctgaagcatctgcttacaagcgtttattatttccgacaaggacatgaagcctatgtcgaaatggcccg

SEQ ID NO: 698031 - DNA, 50 bp, Homo sapiens
gaagaagagaccatccatatttccagctgatgaacttattagtcctaaag

SEQ ID NO: 698032 - DNA, 124 bp, Homo sapiens
caacttctgctccaggaaattcagcctcaaaaccgtcctgctgcttgctgaccaaatgttggaatcaactggactcggccttagtagtagtagactaagaacaactctaaacagaatacaagaa

SEQ ID NO: 698033 - DNA, 101 bp, Homo sapiens
ggaattcttttaccatcttattaattcactctggcatcaagcatgatggaaccatgtgtgatacctgccgccagcaaccaatcattggcattcgatggaag

SEQ ID NO: 698034 - DNA, 101 bp, Homo sapiens
caacatgctgggcttgtccaacacagtgatgcggctcatcgagaagcgggctttccaggacaagtactttatgataggagttgatccccctcatattgtgt

SEQ ID NO: 698035 - DNA, 90 bp, Homo sapiens
cgtggagttcgaggagtgcgtcaaggactccccgcgcttcaggctgttacaggcgctggaacgcggacgggagcgccagctgcgtccgct

SEQ ID NO: 698036 - DNA, 75 bp, Homo sapiens
gaggatcgtgtgcattacaggagtcctccacttgccactgggaacttgatgggaaacctgcttctcctactccgg

SEQ ID NO: 698037 - DNA, 100 bp, Homo sapiens
cgatacgggagctcaaagtgtgccttctcggggatgaaggtttaaggctcagaaaggtagcacattcggataaacctggatcaacctcaactgcatcctt

SEQ ID NO: 698038 - DNA, 75 bp, Homo sapiens
caccgcctgtgtggggcccaccctccgggcgatgccagtccctccactccagaggagaacgaaaccacgacaacc

SEQ ID NO: 698039 - DNA, 51 bp, Homo sapiens
aatcagtgctgctttctttaggacgaaagggggagtcggtgaagtacttcc

SEQ ID NO: 698040 - DNA, 100 bp, Homo sapiens
tcctccacagctccagggaaggcactcaaaagtggggggcaggaaagacccaacatgagtgaagtttcctgcaagaaacgggacgactatttggaatggc

SEQ ID NO: 698041 - DNA, 101 bp, Homo sapiens
acaaggctgactataagaggggaagggaggcttgtggatcagaatctgaacaaaattgggaaagatgaaatgcttcaaatgattagacatggagcaacaca

SEQ ID NO: 698042 - DNA, 100 bp, Homo sapiens
gcgctactggtgctgtcctggccacccccaggaaccgcaacattttgtgattttccaaaaataaaccatggaattctatatgatgaagaaaaatataagc

SEQ ID NO: 698043 - DNA, 100 bp, Homo sapiens
cgtggtggaggatgaggagatggaggcgtcgggcgtgagcggaaatgaggaggagatggtggaggaggctgaaggaacatcatcttcagcgggctatttc

SEQ ID NO: 698044 - DNA, 98 bp, Homo sapiens
cctggtcctgctgcaggtggcaagctctgattacactagatgtgttggctgatatgggtcatgaagagttgaaagaaataggcatcaatgcatatggg

SEQ ID NO: 698045 - DNA, 98 bp, Homo sapiens
gcaaggtgcaagagtccacaaagggacctgatgaagcgaagatcaagtgttcctaaacccaaaggaaagaaaaccaaagatatgaaaaaacctgtcag

SEQ ID NO: 698046 - DNA, 90 bp, Homo sapiens
gctgggaacacctggagtctccgcgggcagtttcagactgaattgggcagttgaccgaaccggaaagtggcaggagttggagtacccgag

SEQ ID NO: 698047 - DNA, 100 bp, Homo sapiens
caagcgagcctttctacacatgcgcctgccccacgggtgtgcagctgcaggacaacggcaggacgtgtaaggcagggtacctgctcttccgagacttctg

SEQ ID NO: 698048 - DNA, 100 bp, Homo sapiens
acggagccgacgctggggcatttgcgctcgcacctgaggcagtccctgctgtgcacctgggggtacaggtgcagaggccaagaccgttttgcccaagaag

SEQ ID NO: 698049 - DNA, 75 bp, Homo sapiens
aaattcttcagtgcatcttccagggtcggatcaaagaaggattctgaagggagtggtaatggaagtgaagatgct

SEQ ID NO: 698050 - DNA, 90 bp, Homo sapiens
ctgagccacctgaacagatttcctgcccggggccctcatggacggttggatcagggccgaagtattcatgtgattgaacggcgtgctctt

SEQ ID NO: 698051 - DNA, 83 bp, Homo sapiens
caggcctacactctattcaaacagtttgtccacactagaaattgaaaatagagcccaagaccttcatctctttgagactttga

SEQ ID NO: 698052 - DNA, 82 bp, Homo sapiens
cttacgcagaaggacctggccacggtgtggacactgccagcggctgcagccgacttggaatgacctgggagacaaatacaac

SEQ ID NO: 698053 - DNA, 100 bp, Homo sapiens
aacagacttctattttaatattgcaggccaccaagccatgcattattcaagtgccggtggtggtgtgcacattgagccccggtatagacagttcccccag

SEQ ID NO: 698054 - DNA, 75 bp, Homo sapiens
cgcggggaaccaaggagacgctcctggcactgcagaaattgcaggtgctgcagtgtctgaaatttccgggccttt

SEQ ID NO: 698055 - DNA, 83 bp, Homo sapiens
agcgctcgcccagctagccgcaggctccaccgaggacaccgcgtccagcttgtgtggcgaggaggacacagaggacgaggagc

SEQ ID NO: 698056 - DNA, 73 bp, Homo sapiens
cttgaccatgtgacatctgatgctgtggaacttgcaaatcgaaggatttgccagaaactgttccttacttaaa

SEQ ID NO: 698057 - DNA, 75 bp, Homo sapiens
gggagtgctgatcaactaaaagagcttgcctgggaccagtggcagggaccccggaacctgaaggtgctgacaaag

SEQ ID NO: 698058 - DNA, 96 bp, Homo sapiens
aattgagcaggctgatctactgcaggaggctgtcaagtcaccaaaccggatgtgatattcaagttggagcaagaagaggagccctgggtgatggag

SEQ ID NO: 698059 - DNA, 100 bp, Homo sapiens
atgatgtcacccaatggatccattcctcccattcatgtgcctccaggttatatctcacaggaagaggatcacctagcccgggtagaagaggcaatcaccc

SEQ ID NO: 698060 - DNA, 80 bp, Homo sapiens
ccagaacaaagcattgccagaaaacgttaagtactatactggcaattgctggagaagattttgcaattgttgcttctgat

SEQ ID NO: 698061 - DNA, 96 bp, Homo sapiens
agaggccggatggagtccgtgagatgggttttagctgccgccggagtcgagcacaggttggagctgaaggagtgcccaggctgcggatggaggaag

SEQ ID NO: 698062 - DNA, 96 bp, Homo sapiens
agaacctcaagcttttcaggcatcctcatataattaaactgcttgcagggtggcccccgctccgacttcgacatggcctatgagcgtggccggatc

SEQ ID NO: 698063 - DNA, 89 bp, Homo sapiens
agccgctgttttgccggaggagcccctcaggccgtgacgcatccaaagaagacattgacactgctatgaaattaggagccggttacccc

SEQ ID NO: 698064 - DNA, 83 bp, Homo sapiens
acggcctggcactgcgcttcttcaaaggtgattgaattactcagatatgaagatcatcatctaggttttgtgtaaaaggccct

SEQ ID NO: 698065 - DNA, 83 bp, Homo sapiens
ttgtggcccggtgcctgtgggaagaatcacgccttctacagactgcagccactgcggcccagatttggaacattgctaccaat

SEQ ID NO: 698066 - DNA, 97 bp, Homo sapiens
gagccgggtcccaccatggccgcgaatgagaacatgatcgtgtatgtggaaaagaaagtgctagaagaccctgccatcgccagcgatgaaagctttg

SEQ ID NO: 698067 - DNA, 100 bp, Homo sapiens
tgaaagaaaaaggctacaaagctgctttcattggaatagggatttcagtcataatcggttgtctaactggaacatcagcttggaatcacaaacattacag

SEQ ID NO: 698068 - DNA, 80 bp, Homo sapiens
gccgaagaggttcagtgcgaaggcaacagcttccataaatcctgcttcctgtgcatgtctcctttcctcttgggccgggc

SEQ ID NO: 698069 - DNA, 74 bp, Homo sapiens
gggacacgtgggtgcgatacctgggagtcctccctcctgaacctgatctcctatagagcgcagtccatccaccc

SEQ ID NO: 698070 - DNA, 80 bp, Homo sapiens
ctgagaatattagcagctcagcaactcaggtccgggcccaccagctggtcttgccaccttgcgacgtagtgatcaaagcc

SEQ ID NO: 698071 - DNA, 80 bp, Homo sapiens
ctgctggagaagggagactacaaggacagcagcgactttggggcccgtcaccctcagtgtggaagccagctctccaggcc

SEQ ID NO: 698072 - DNA, 97 bp, Homo sapiens
tgacgtctgaggctggagaaaatgatgaaaatgccatggctagtccagggaaagataactatagaatgaaaagttataagaataaagccctaaatcc

SEQ ID NO: 698073 - DNA, 75 bp, Homo sapiens
ctcagctccgagtccagggcgaggcaaccacacctccaaatcaaggaaggccagattctcctgtctatgctaacc

SEQ ID NO: 698074 - DNA, 100 bp, Homo sapiens
gctcgattttgtcaccgttatgtgggaagcgaatccaattgaccaggatgttgtcattactaactcttatgaaacagctatgcgaacagcccaaaacttc

SEQ ID NO: 698075 - DNA, 96 bp, Homo sapiens
atcggattcctcagctacgaggaggcgctgaggagagcagtggccggtgtccagctgcctactttctgcccggatctctggctcctcatctctccg

SEQ ID NO: 698076 - DNA, 50 bp, Homo sapiens
gaagatcatcgagcatttcaaacgggtgctttcttctgcgacctggtact

SEQ ID NO: 698077 - DNA, 100 bp, Homo sapiens
cgccacagaacttacctgcctcttcatgcagttctccatcgtgccaatctcctgggaggcccccgtggagaagaagactgagtgtatccagaaagggaag

SEQ ID NO: 698078 - DNA, 106 bp, Homo sapiens
aagagctttggatgaagctaccaagtatgccctggaaaggaaaactttcggaaagctacttgtagagagaaagtctgtgattgctgtgagcttcatagcagcgttc

SEQ ID NO: 698079 - DNA, 100 bp, Homo sapiens
ggcggtgaatcagagccacaccgagaaccgccgcggagccctcatccctaacggtgaaagtggttctatagatggtaataaccaacttgtaatcaaagga

SEQ ID NO: 698080 - DNA, 100 bp, Homo sapiens
cattcacgccgacagcgtggccaagcgtccggagcacaatagatctgaagccttgaagggtggcggcggcatggaggcgcgcttcacgcgcgggaagtcg

SEQ ID NO: 698081 - DNA, 75 bp, Homo sapiens
gaaggccctggacacagcaatatctctgggctttcacaggtctatcagccacagtctctgcaagtttccaagagc

SEQ ID NO: 698082 - DNA, 82 bp, Homo sapiens
caggacatcactttagatgatgcaattctgtggtgttcttggtcacacatttatggagtttctgaagggcagtggagattac

SEQ ID NO: 698083 - DNA, 50 bp, Homo sapiens
ttcatcgacatcagtgaagaagatcagcagtccagagcgtgagtccattc

SEQ ID NO: 698084 - DNA, 98 bp, Homo sapiens
agtcgagagatcaccacactggccaacaaccagtgcatggctacagagagcgtggaccatgaatcgcaatgtatctgctgagcaaaaagatgaaaaca

SEQ ID NO: 698085 - DNA, 82 bp, Homo sapiens
caaagccaggcaccattcgtggggacttctgcattcaggttggcagtcacccttctagacttcagaccacagacaacctgct

SEQ ID NO: 698086 - DNA, 102 bp, Homo sapiens
agcgccgctgggcctgcaggtctctgtcgagcagcggacgccggtctctgttccgcaggatggtaagaatgattgatgttggctgatattggagtgctcatt

SEQ ID NO: 698087 - DNA, 73 bp, Homo sapiens
tggaagctggctcaggctctggtggaatgagcttatttttatccaaagcagagattatggagaagtctggcga

SEQ ID NO: 698088 - DNA, 83 bp, Homo sapiens
agacagagaaacatgagaagcagcagtgccagcctggacccccttgcaaaggagccaggacccccagggagtagagacgaccg

SEQ ID NO: 698089 - DNA, 82 bp, Homo sapiens
gaaattcagcctcaaaaccgtcctgctgcttgctgaccaaatggcaacatgagtgagaatgaggaagaggaaatttctcagc

SEQ ID NO: 698090 - DNA, 75 bp, Homo sapiens
cccagaagcgaagtggagagcgccagagtaatggaatctcacaaactatgatctctgcagcatttttcttggaac

SEQ ID NO: 698091 - DNA, 83 bp, Homo sapiens
cttcccgatcgttaataactcctcaggtccctgcctgcacagggcacatgatggctccgctacttacttgagattcattattg

SEQ ID NO: 698092 - DNA, 100 bp, Homo sapiens
tgtacttcgtctatgtggcgcccggcatagatattcctcttcgtcaagttatagctgaggaatgtgttgcctttatgttaaactggagagaaaatgaata

SEQ ID NO: 698093 - DNA, 73 bp, Homo sapiens
aagcacctggatgagacatttgctacagcatcccacattaagtcaacggttctacatgaaacattttctcaac

SEQ ID NO: 698094 - DNA, 75 bp, Homo sapiens
atatgatcagatttctccaccaaattctcagcctgataaggaacaccaatcagggtcttcaggcctggaagattg

SEQ ID NO: 698095 - DNA, 98 bp, Homo sapiens
ctttccgcttcttgaatttctctctgtaaaggaggttgatgagaaagctctgaagcacataacggaaatgggcttcagtaaggaagcatcgaggcaag

SEQ ID NO: 698096 - DNA, 75 bp, Homo sapiens
ttcttcgtgaggctgctcttcgagcgccgccaagctgagccaccaaagaaggaggctgccaccacggggccgcag

SEQ ID NO: 698097 - DNA, 100 bp, Homo sapiens
tcttcagcacaattctctttctcttcatattttctcacatatacaacacgattcttctaatggatgggaacatgggcaattctgtggtgttcttggtcac

SEQ ID NO: 698098 - DNA, 82 bp, Homo sapiens
ctcaaaaggtgatctggacaaaggaacaggtatctcagaatctcttccagtaatagcagctccatccatgtggacacgacct

SEQ ID NO: 698099 - DNA, 73 bp, Homo sapiens
tctgcacgacgatgaggtgacagtcacggctttccttaaagtttcccatgtctcaatggactcctgaatataa

SEQ ID NO: 698100 - DNA, 75 bp, Homo sapiens
aggagttactgctctttgaagttgcttgggaagtgaccaataaaggccccttcacagatgtagtcactacaaatc

SEQ ID NO: 698101 - DNA, 100 bp, Homo sapiens
atggaatccaagggggccagttcctgccgtctgctcttctgcctcttgatctccgccaccgtcttcaggccagtgcacagccagagaacaacacatcaca

SEQ ID NO: 698102 - DNA, 90 bp, Homo sapiens
cacagctgcttccattggccagtatgaagtggtgaaggagtgtgtgcagcggtcccaggtgtgacaccttcagcaggtctcagggaagat

SEQ ID NO: 698103 - DNA, 75 bp, Homo sapiens
ctccagaatgtcagcatggaggctgctgggcaggtcatgagtcaccatgacatccacgacagcgatggcagttcc

SEQ ID NO: 698104 - DNA, 98 bp, Homo sapiens
cttgaggttcacagatgatacctttgatccagaacttgcagcaacaatagcgggtcacagaaagtcgagagagccaaatgacgattgaggagaggaag

SEQ ID NO: 698105 - DNA, 98 bp, Homo sapiens
gggactttggagagaccatacacaatgtgagaacccagagaagaatgaggcctttctgccacccgagatcccagctcctgcccaccggcctcctgaag

SEQ ID NO: 698106 - DNA, 76 bp, Homo sapiens
gaccccatatatgattttctttaaggatggtttagaaatggaaaaatgtccaatacctgcaagtaagcgtgcatct

SEQ ID NO: 698107 - DNA, 100 bp, Homo sapiens
cgcccttcctcggcgggccggactgaaagtgactgagaccgaagatgatagtgatagtgacagcgatgatgatgaagatgatgttcatgtcactatagga

SEQ ID NO: 698108 - DNA, 100 bp, Homo sapiens
cctaaaggagatggaagtgatgtaccatcatgggtagcctttgataaacaggaggatagcaaacaagctcaatttttagccttggcagtagtatacttta

SEQ ID NO: 698109 - DNA, 75 bp, Homo sapiens
cacacccaggaatccaagggaacctgaacagctactattcccagcagcaaacggatgtttcagaagacagcaatg

SEQ ID NO: 698110 - DNA, 89 bp, Homo sapiens
gcctcggcgagccctctgcagcggagccccctgcccatttggttttggtaagactttgaccccgacgcaggcttcagtgattgccgcgg

SEQ ID NO: 698111 - DNA, 100 bp, Homo sapiens
cttggctgctgtacatgacgtgcttaatgaaagacactgaggatgctagtgaaactgacctggcaaagcatgatgaagaagactatgtagaaatgaagga

SEQ ID NO: 698112 - DNA, 74 bp, Homo sapiens
gaagagggaagacacgcggaaacagtgtgtcccggcatggatatccggaacaacctcactaggttgcatgagct

SEQ ID NO: 698113 - DNA, 75 bp, Homo sapiens
tgaacaacgccatctggagggcctggtatatccagtgctgtaccagtgcaggtcctcactttaatcctctatcca

SEQ ID NO: 698114 - DNA, 100 bp, Homo sapiens
ctcaatgttgccaaaatgtttcctaaagttcgtgaatctcaacttacctagaggatcaagacataatgggagcatttttagacaagccaaagatggaaaa

SEQ ID NO: 698115 - DNA, 82 bp, Homo sapiens
ccagaaatgccttctaattcaggcaatttgcaaaaggaattgaatgatctggcacgggaccctccagcacagtgttcagcag

SEQ ID NO: 698116 - DNA, 97 bp, Homo sapiens
aaagcaccagtaaaatatggtgaactcattgtcttaggtttggatgactttaacaattggatttctaaagccataagttctcgagaaactgatcgcc

SEQ ID NO: 698117 - DNA, 75 bp, Homo sapiens
tcagctgtgaaaaactctttggatgattctgccaaaaagccagagactgctgctactttgaaacgtacgatagag

SEQ ID NO: 698118 - DNA, 75 bp, Homo sapiens
ttgaggttcacagatgatacctttgatccagaacttgcagcaacaatagacaaatttacatgtattggagaccag

SEQ ID NO: 698119 - DNA, 146 bp, Homo sapiens
cccgaggccgctcggcccggcgcacgcccccacctcctcccgcgcgggcgctgggcgccggcccagctgcagacagcaaggccatcgtggatgggaacctgaagctgatcctgggcctgatctggacgctgatcctgcactactcc

SEQ ID NO: 698120 - DNA, 75 bp, Homo sapiens
agggagcagcgcagcgcgcgcagagcgtcgtccagtgtccccaactcctgcccagccagtccacgcggtgccggc

SEQ ID NO: 698121 - DNA, 82 bp, Homo sapiens
tgttgctgctgcacattaggttgcagtatgtggccagttatttgcctcagtaaaagacatggaggcgccattgtgtcggctt

SEQ ID NO: 698122 - DNA, 90 bp, Homo sapiens
cagccgattggagacgggagccaaccagggctgcattggagggtgtaccagtgatggcaataagaaacaaaatgatatcagaaggactag

SEQ ID NO: 698123 - DNA, 101 bp, Homo sapiens
acacaattataaaatgtcagcttttaaggccctgatgcaaagtttcagagcatgaccagcaagtggccagctgtgtgggtcaagatcagctccagctgggt

SEQ ID NO: 698124 - DNA, 75 bp, Homo sapiens
gcccggtgctgacggacccccggccaacattggccagaaggaagacttcgaggaagccaggaagaaggcactgaa

SEQ ID NO: 698125 - DNA, 51 bp, Homo sapiens
cgagaccaaagccgctgtgaaagggatgatcatggtgattttactgctgct

SEQ ID NO: 698126 - DNA, 100 bp, Homo sapiens
aagaaaacttcatcctagaccaagtgataaactgaaccctaaaacaattaatccggaatctgagaaaaaggggttgattgaaagaatctatatggtacag

SEQ ID NO: 698127 - DNA, 74 bp, Homo sapiens
catgtatggtcaagcttgaagattccccagaacagcgataatattcattctaggcacgggcgcggaggtggatt

SEQ ID NO: 698128 - DNA, 82 bp, Homo sapiens
gagcagccccggctctgggctacggactatgggcgaatagctctgaccacccggcgaagcaagagtgagccatggagctacg

SEQ ID NO: 698129 - DNA, 73 bp, Homo sapiens
agaaaccttatgttgcacttattcatggaattacaatgggtggggttggatggcaagcatgtggtgtttggca

SEQ ID NO: 698130 - DNA, 130 bp, Homo sapiens
aaagtggaattgcatgggaaaatcatggaagttgattactcagtctctaaaaagctaaggttcctctacctggcatgaaatgggtagataatcacaaaggtgtttttaatgttgaagttgttgctgtttc

SEQ ID NO: 698131 - DNA, 73 bp, Homo sapiens
cgacttcgatgatcgtgtgtcggatgaggagaagctgagtcagtgctgattctctcaaatagagcttgaagga

SEQ ID NO: 698132 - DNA, 100 bp, Homo sapiens
taagttggatttccttccagaaatgatggtggatcattgctctttgaattccagtcccgtgctcacctccacctccagtaaaagtttcttctgaacctcc

SEQ ID NO: 698133 - DNA, 75 bp, Homo sapiens
cttttgtccctggagacgctctgccagccagcctgtcaggattggagctgctttccgagcacctggaccccaaac

SEQ ID NO: 698134 - DNA, 50 bp, Homo sapiens
ggacagcctcatcacccggctgctggaggacacgaagatcgattgagaag

SEQ ID NO: 698135 - DNA, 100 bp, Homo sapiens
tgtgtaccaagtgtggaggggctggccacattgcttcagactgtaaattccaaaggccttcctggatgctctgcagaaccaggctgaggccagcagcaag

SEQ ID NO: 698136 - DNA, 74 bp, Homo sapiens
tccaagaagcaaaaaagggactgctaagaagataccaccaggtcctcgatgggcttcctggaatattggtgtgt

SEQ ID NO: 698137 - DNA, 100 bp, Homo sapiens
cggctgcacactacccacccagaagaagtccgtccatgtcaaagatgaggttgagcttcagcgacagcgagagtgacaacagcgccgactcctccctgcc

SEQ ID NO: 698138 - DNA, 75 bp, Homo sapiens
agccttcccagtagctgggaccacaggagtttaccagctacttccaaagacatgacgaggtcctaacagaactgg

SEQ ID NO: 698139 - DNA, 100 bp, Homo sapiens
agcaggatggtggtggatgcggccaactccaatgggcctttccagcccgtggtccttctccatattcgaggttagagcagccagcgggtacagaatggat

SEQ ID NO: 698140 - DNA, 75 bp, Homo sapiens
agaagaaaggattcgttacagccagagattggtgaggcaggcgactaatcagattgtgatgaattgtgctgatat

SEQ ID NO: 698141 - DNA, 51 bp, Homo sapiens
tacaagcacctcctgctccagtaattggccttgtgaaaaagggtaaagaac

SEQ ID NO: 698142 - DNA, 75 bp, Homo sapiens
agctgtcatcacaaaagagttgattgaaattatctctggtgctgcagctctagtttcagattttgaaaagaaaac

SEQ ID NO: 698143 - DNA, 75 bp, Homo sapiens
agtggtgaatcccctgtttgagaaaaggcctaagaattttggcattggtctctaattaacagaagatggcaaagc

SEQ ID NO: 698144 - DNA, 50 bp, Homo sapiens
gtttgccatcccaaggccgaagactggtgaattttcagctcgtttccttt

SEQ ID NO: 698145 - DNA, 82 bp, Homo sapiens
gttctcaagggcttgcagctggatgctcgtcagaagttccgctctgttctggttgaagcaacggtgaaactggatgaactgg

SEQ ID NO: 698146 - DNA, 100 bp, Homo sapiens
tagcttcgcagtctggaaagctttaggagttcacagtgaatccaatgctttgagaaataagaaaaactctcgtcgagtcagctttgcagatactataaag

SEQ ID NO: 698147 - DNA, 88 bp, Homo sapiens
atgctccagtttgagaaacctggatctgcgatctgtttgtgaggcggggtttcaccatgttgcccagactggtcttgaactcctgagc

SEQ ID NO: 698148 - DNA, 71 bp, Homo sapiens
ggccgcctcctgcctcgaagacctgaggagcaaggactgtacaatttgttcaaggaatttttgtagaaaaa

SEQ ID NO: 698149 - DNA, 83 bp, Homo sapiens
gccacagcggcttcgagctctcctctgatggcaggacctgccaagcttccccgggcgctgcctggacaggcctgcctgcgtgc

SEQ ID NO: 698150 - DNA, 74 bp, Homo sapiens
cagatgaagacagatgcaccaacgagagagaagtggagatcctgatgtttctcagtgccattgtgatgatgaag

SEQ ID NO: 698151 - DNA, 88 bp, Homo sapiens
cgtggacatcaccccggacaggctgcagctcgtgtgcaacgcgctactggcccagattgttgttataatgagaggattacctggcagt

SEQ ID NO: 698152 - DNA, 83 bp, Homo sapiens
cttgggcaatggtgaatttgaaaagttccaaagaggtgtttgaaagctcgagaacattttggtacagtaaaaacacatctaac

SEQ ID NO: 698153 - DNA, 83 bp, Homo sapiens
ctctggttcagctcatacaacagcttcttagctgctgaatgccatggtggcaaaactggggaaccgggaggacccactccccc

SEQ ID NO: 698154 - DNA, 82 bp, Homo sapiens
ataggacaggctgaggctgagtctcagtgttgccctgttcagtctgaggtcaaaatgcagatcttcgtgaaaacccttaccg

SEQ ID NO: 698155 - DNA, 100 bp, Homo sapiens
acccaaaacattaaataaccctgaagactccacatactattatctacttcatacctgctgccggcgtgtgatggagaaaggcccactttggcgtttctgc

SEQ ID NO: 698156 - DNA, 102 bp, Homo sapiens
tcacttaatgaggtctgctaaagagagagttcgtcaggaaagaccacagcaagattctttcattcgtctcctcctagcctgggggaccaggctcgaactgac

SEQ ID NO: 698157 - DNA, 97 bp, Homo sapiens
ctgcagccacatactatccgtttgttcaggaaccaccagtgacagagtggtgcggttgtgtcagaacccaaagctggcgctaaagaatagcccacct

SEQ ID NO: 698158 - DNA, 100 bp, Homo sapiens
ctttgcagcgcgtcttcggttgtgtccccgtcttttgtaccaacaggtggaactacatagagggaaccaaattatttgctgcctttttcttagagatggc

SEQ ID NO: 698159 - DNA, 82 bp, Homo sapiens
cccgcgctgcggcctggcggcttccaggcgcactaccgcgcgtgagtgcatctccatccacgttggccaggctggtgtccag

SEQ ID NO: 698160 - DNA, 80 bp, Homo sapiens
cgacggcagcccgagggcggcgcaaggcctgaggcccagcacagcttgccaagaagtatcaccctgacacaaataaggat

SEQ ID NO: 698161 - DNA, 96 bp, Homo sapiens
gtgcagatcaagaccctggagggcgagttctcggtcaccatgtggtcctcaggccgcagcctgggattccccagggacccccccggagccgccgcg

SEQ ID NO: 698162 - DNA, 97 bp, Homo sapiens
ttggtaaattgatcaggatttttggcctaccctccaaagaaaagggagtgcatccgccccaacccttttccccctcgtctcctgtgagaattccccg

SEQ ID NO: 698163 - DNA, 110 bp, Homo sapiens
tttggaatgctgaatagaaaattatagattttgatattgaaggaaatgaagcgaagcctaaatgaaaattcagctcgaagtacagcaggagagccagtttctgagtgccc

SEQ ID NO: 698164 - DNA, 51 bp, Homo sapiens
actacaggaacatggtcttgctgggattcatctaattgatgagtttaatac

SEQ ID NO: 698165 - DNA, 75 bp, Homo sapiens
cttggatccgcgggacaagaaaattcatgcgctgaagaaatcaggggagaaacccctgcttggtggaagcctgat

SEQ ID NO: 698166 - DNA, 110 bp, Homo sapiens
gtgaaaggctctccacccgccagcatccttagcgaggacgagttctatgatgcgctgtcagaatgattgaagatagtgggaaaagaggaaataccatggcagaaagaaga

SEQ ID NO: 698167 - DNA, 97 bp, Homo sapiens
ttacagagggccgagaaggacaggatcagaatcttccacaatctgtaattgaaaatgttggaggaaaaatttttacatttggatcttacagattagg

SEQ ID NO: 698168 - DNA, 108 bp, Homo sapiens
aggagctgtgcagccgcgaggaggcgcgggaggtgttcgagaacgaccccgagacggcaacatgagtgagaatgaggaagaggaaatttctcagcaagaaggcagtgg

SEQ ID NO: 698169 - DNA, 100 bp, Homo sapiens
tcggcccacgtggacttctgcaccctgttccactaccaccaaatcctggcccggctgcagacccgtaatcgacaaaactttgaacgaggctgactgtgcc

SEQ ID NO: 698170 - DNA, 75 bp, Homo sapiens
tgtacttctatatctacaagggggtccgcaaggacacaatgtttgcacgaggactgaagaggaaatgtgttggcc

SEQ ID NO: 698171 - DNA, 74 bp, Homo sapiens
ccttggtttacccacccacgccgactgtgatcagcccctgttccaagtaatgtttgaaacttaccagttttccg

SEQ ID NO: 698172 - DNA, 100 bp, Homo sapiens
gtgagtgggatggtggaagggaaacacacttggagacaaacttcactttaaaatctgaatggcactgttggataagaagaataaagttcttgaagtaaag

SEQ ID NO: 698173 - DNA, 100 bp, Homo sapiens
gtcattttaagacgagtaggcgaagcaaggacttgagccaaggaggtgttgcattggtctctgacatgtgtccagatcctgggattccagaaaatggtag

SEQ ID NO: 698174 - DNA, 100 bp, Homo sapiens
cggctgcgaggcgctgggcacaggtgtggatgaggtcaccattgtcaacattttgaccaaccgcagcaatgcacagagacaggatattgccttcgcctac

SEQ ID NO: 698175 - DNA, 99 bp, Homo sapiens
aggacgcaatcaagcccaatctcatgcagacactggaggaacaggagtacagctgtgtagtaaagatgccttctggtgaatttgcacgtatatgccgag

SEQ ID NO: 698176 - DNA, 78 bp, Homo sapiens
aggtgggcggctttgaccgagaggctgctggagctcgtgtttggacgcgtagcaaattatggagttggaggacagtat

SEQ ID NO: 698177 - DNA, 75 bp, Homo sapiens
gggacttgtacagggatgtgatgttggagaactacagcaacctgatctcattggttggtaggaggacagtttgat

SEQ ID NO: 698178 - DNA, 97 bp, Homo sapiens
atcatccagcagcctttgatataccagaatgcagctactagctttcaagtgcaccaattccagctggacatcactgtgaaaatgggacgggataaag

SEQ ID NO: 698179 - DNA, 100 bp, Homo sapiens
tctcatggagtatccataacaaggaagctgggattttcaaatattattatgcctgccaacaagtcccaaatttggaaaagctgactcatatgaaaagctg

SEQ ID NO: 698180 - DNA, 82 bp, Homo sapiens
tcttcggtggactccttcggcagtccacccaccgccgccgcctcccagggctcctgaccgtggaccccgccaagcggctgaa

SEQ ID NO: 698181 - DNA, 98 bp, Homo sapiens
gggctgccggcacttcgcggcagatgccatggacaatattaccaggcagaaccaattctacgatacccaagtcatcaaacaagaaaacgagtcaggct

SEQ ID NO: 698182 - DNA, 99 bp, Homo sapiens
gtcgtgctgctccagagtgtaaagctttggggccatttggatcacacgatgttttttcaagattttagaccctttctaagtagcagtccactggaccaa

SEQ ID NO: 698183 - DNA, 100 bp, Homo sapiens
atcactgcttccctcagccataacaggttctgtggacaatcacaatgggaatccaaggagggtctgtcctgttcgggctgctgctcgtcctggctgtctt

SEQ ID NO: 698184 - DNA, 100 bp, Homo sapiens
cccaggtctccgtgcagcccaacttccagcaggacaagatctgccaggctggactgtgctgttcctctctgtcctggggctcctggcctcccgggctgtg

SEQ ID NO: 698185 - DNA, 101 bp, Homo sapiens
attaggcacagcatttatcctggagaagagcataagcttaaatcgtctcagaaggacaaggtccgccagtttatggcgtgcactcaggctggcgagagaac

SEQ ID NO: 698186 - DNA, 83 bp, Homo sapiens
cgggagatccgtagctcagacgccaggacatcccggaagctgggaaatggtgagaagccctaccactgcaactgggacggctg

SEQ ID NO: 698187 - DNA, 90 bp, Homo sapiens
ctgggaaccttccccagccatggcttccctggggcagatcctcttctggagactcgtcctcccactgacttgagctttaactttgatgcc

SEQ ID NO: 698188 - DNA, 101 bp, Homo sapiens
cttgtctgtgaagctaaactcaatgctgctgtgtgggaagaagatttgtaaagaaaactcttagctgatgaccaaacacccaggcaaacgtctgggttgtg

SEQ ID NO: 698189 - DNA, 83 bp, Homo sapiens
actgtggggacagggcgacgtgtgtccaggcgtttgccgacaatgcagatcttcgtgaagactctgactggtaagaccatcac

SEQ ID NO: 698190 - DNA, 75 bp, Homo sapiens
tgcttgatatcacagaggaaactctgcattctcgcttcctggaggtggccacagggcagccccatgagggctcca

SEQ ID NO: 698191 - DNA, 75 bp, Homo sapiens
accacagtattccaaccctcctgtgcagggagaagtgatggagagtgatgatgcgggtgtgctggttggtgagac

SEQ ID NO: 698192 - DNA, 100 bp, Homo sapiens
aggagctggtggtggaagtgcggggctccaatggcgctttctacaaggtcttatatccagatggccaggctcagatgattcaccccaagcctgcagactt

SEQ ID NO: 698193 - DNA, 98 bp, Homo sapiens
gcctctcggttccgcggcgcaccggagggcagcatgtcgcggcggcggcacagcgacgagaacgacgtcggatgccacatttattcactaaggatata

SEQ ID NO: 698194 - DNA, 100 bp, Homo sapiens
ttgtgctgagttttcttttcatgtaccaagtcttgaagagcttgctggaggattttcctaagcccagtgaagagaagattaagttaattctcaatcaaag

SEQ ID NO: 698195 - DNA, 97 bp, Homo sapiens
cgaacaccgacctcgtcccggcccctgcagtccggatactcacgccagaagggcccaggagacaccagcgggggctgccgctgcagggtaaatggga

SEQ ID NO: 698196 - DNA, 101 bp, Homo sapiens
tctgcgcgctgctcgcccggctgcagctctatgtgaagaggtgctttggcatacatcagttccctttgccgagaacatgtctctagaatgtgtgtatccat

SEQ ID NO: 698197 - DNA, 50 bp, Homo sapiens
tgacagtgagaccgaagagacccggaaagatgctattaactgagtacttg

SEQ ID NO: 698198 - DNA, 100 bp, Homo sapiens
ggaaatcatgtcaagcgaagccttgaaaaagctgccctgagacggtgtcccgccgaaagagttccacaaacatgtggagtttgatttccttattaagggc

SEQ ID NO: 698199 - DNA, 75 bp, Homo sapiens
aggaggaggtttgccagctaagcatcaatataatgcagggatcgtgggactttaccagatcggtttgtaataaca

SEQ ID NO: 698200 - DNA, 75 bp, Homo sapiens
catgcatgtaccgaccttctgaacaaggccaacacctatgcaggatttgtacacacagatatgacgaaagacttg

SEQ ID NO: 698201 - DNA, 82 bp, Homo sapiens
ggatgcgcgcccggcccctcagcgcccccagcacgccgccgagtcccgctcgccatggaagaaagcagcgtgggcagcagtg

SEQ ID NO: 698202 - DNA, 75 bp, Homo sapiens
tggcctcgcttgttgctcttcggggactccatcacccaggagctgctaagacacatggttgcacagaaggtgaaa

SEQ ID NO: 698203 - DNA, 75 bp, Homo sapiens
aacagaccgcaacactcagatccatgcatgccggcatcccaagtttaattggttggggtcagataagaagaggag

SEQ ID NO: 698204 - DNA, 97 bp, Homo sapiens
ccaaggacaagctggaagggctggtgcgggcctgctgctccctcggagagccctatgagtttgtctctctggaatggctgcaaaagtggttggatga

SEQ ID NO: 698205 - DNA, 100 bp, Homo sapiens
tagatattaatggctatattcttgtgtattctgttacatcaatcaaaaggcatttggctttatgtcccgagttgccctacaagcagagaagatgaatcat

SEQ ID NO: 698206 - DNA, 96 bp, Homo sapiens
accagctgcgctgtcctaaatgtggcgacttgtgcacacatgtagagacctttgtattggcctggtttgctttcgaccctggctcggcgcactcgg

SEQ ID NO: 698207 - DNA, 96 bp, Homo sapiens
cttgtgtccgcttctcgcccaacagcagcaaccctatcatcgtctcctgtggctgggacaagctggtcaaggcccattacgcagtccaggcaagaa

SEQ ID NO: 698208 - DNA, 100 bp, Homo sapiens
cgacgcccgggacccagattgcgggttcaggaatactcccccagttgcaagaggcgcaggaccgtggaagacttcaacaaattctgcacctttgtcttgg

SEQ ID NO: 698209 - DNA, 75 bp, Homo sapiens
ctgctgctgctgcgctacctggtggtcgccctgggctaaatgcactcggtgatggaaagagagccactattctga

SEQ ID NO: 698210 - DNA, 100 bp, Homo sapiens
tgaaggacagcggcaccgccagacggccagaaagttccgccatgagctggggcacggagctgtggaaatatggctacacacacctttctgcaggagagct

SEQ ID NO: 698211 - DNA, 100 bp, Homo sapiens
gatgattatgttgctgtagctaccaggtatttgtaccgcatctacaccttttgtattgttgggagatgttttggattgtcttcctttggatcagtgtgac

SEQ ID NO: 698212 - DNA, 97 bp, Homo sapiens
aactgaagacaagtgagccagatttcacctctgcaaatatgagagattctgcagaagagtatgatttttgagaccactacaaagaatgaaactatag

SEQ ID NO: 698213 - DNA, 100 bp, Homo sapiens
ttatcaaacaagaggaaaaataatcaaggcaactcgtttcaggcaaagagagctcgacttaacaagattactgcggagtttaagagagctgtgaaagtag

SEQ ID NO: 698214 - DNA, 82 bp, Homo sapiens
cagaacgccatcaaccagctgtggtatgcaagattacaattatgtgtgggccaactgttttgagatcacattagaactgtct

SEQ ID NO: 698215 - DNA, 87 bp, Homo sapiens
cccgccgccggcccatgaggatattgccgtgaaaggttgattcttcaccacactgaaaccattaggaaaaatccttgtggttaacag

SEQ ID NO: 698216 - DNA, 90 bp, Homo sapiens
acaccataaaggaagccccttatgaccttcatccatctcttcaagaagcccagccccttcatcttcatcagccagcgtccctccccagag

SEQ ID NO: 698217 - DNA, 82 bp, Homo sapiens
cgccgccgaagaagcatcgttaaagtctctcttcaccctgccgtcatgtctaagtcagagggggatatgagactttctactc

SEQ ID NO: 698218 - DNA, 50 bp, Homo sapiens
catggcccaggcagaccttgcagtcaaagcatagaatgtcaagctaacca

SEQ ID NO: 698219 - DNA, 100 bp, Homo sapiens
gatagacatgggggcctcaaacgtggagatcaactcctctctgttaatggagtggcagcagatggatttttgtttgtcgtaggatgtgaccgagggaaga

SEQ ID NO: 698220 - DNA, 74 bp, Homo sapiens
agatgaccaggatgatagacctactggagaccaccgctgaaacttcacttctacacagaggctttctttcccag

SEQ ID NO: 698221 - DNA, 73 bp, Homo sapiens
accccgccagctccagagccacgtacgatgccacagtggagctatccttggacagcacacaaaataatcagaa

SEQ ID NO: 698222 - DNA, 74 bp, Homo sapiens
gctgcggagccgcgggccggcgagcgcgtcgccaccatgtgaacttgctgactgagaaggcaccttggaactct

SEQ ID NO: 698223 - DNA, 98 bp, Homo sapiens
tggagagcaccccttttaccactgcctggttgcagaagtgccgaaagagcactggactccggaagaatgccgggacattctgcttcctgtcatcacca

SEQ ID NO: 698224 - DNA, 100 bp, Homo sapiens
atccctggcttctgatcgcccggaagactaagagactcaagaatgaacaatccgtcagaaaccagtaaaccatctatggagagtggagatggcaacacag

SEQ ID NO: 698225 - DNA, 82 bp, Homo sapiens
gaacctttcactttctaaagacggtggcaagaaatttaaggttattgcagccgaaggagaaatgaatgcatccagggctctg

SEQ ID NO: 698226 - DNA, 90 bp, Homo sapiens
tggagacacagttgttgtggttgagaaagatcatttcatggatgatttcttccatcaggaggcagacaggcggatcctgcaggccctcct

SEQ ID NO: 698227 - DNA, 75 bp, Homo sapiens
cttggataaagttccagagcctggagtgcccactgaaaccataaaggagtgtagcttttgtgaagaccctcgctt

SEQ ID NO: 698228 - DNA, 82 bp, Homo sapiens
tttgcctgtggatgaaaccctgattcctacaggtaatgaatattcgaacagtactgaacaaactggaaaaaccacaaggcct

SEQ ID NO: 698229 - DNA, 75 bp, Homo sapiens
ctactgtgcgctcgatccagcaccatggggaagcgggacaatcgggtgaaaacgttgtgtgacgtgatcctcatg

SEQ ID NO: 698230 - DNA, 75 bp, Homo sapiens
gagaaaaggcctaagaattttggcattgtgagccccaagccatgtgctacattgaaacatccaacttagatggtg

SEQ ID NO: 698231 - DNA, 82 bp, Homo sapiens
agccgatccagcctgcggagcctgtggggcaggctgcctgctgtttcccggggagatcatgaaacgaggtcgccttcccagc

SEQ ID NO: 698232 - DNA, 97 bp, Homo sapiens
ccaccaccgcggtgactgccgccgcggcctcggacgactcgccttcagaagataaaataccatgaggagtttgagaagagccgcatgggccctagcg

SEQ ID NO: 698233 - DNA, 101 bp, Homo sapiens
ttcctgcaggcggtggtcttcgggtgcacggggttcagggtgtgcatcctgcattcctaggggctcagtacccttattcagtgactcctccctcacttgct

SEQ ID NO: 698234 - DNA, 100 bp, Homo sapiens
gcgggccgggaaaagtggcactgaggctctggaacttctgcccagctctccttgagtattgggaaagggtcgttgtggtgcatagacccagagtatagac

SEQ ID NO: 698235 - DNA, 96 bp, Homo sapiens
ctatgagcgggaccaccctgggcacagcaggcatcggaggctgaccccgcactacatctacccaccagccatcgtgcagcccagcgtggtgatccc

SEQ ID NO: 698236 - DNA, 101 bp, Homo sapiens
gctgaaagaccggcatgccctattctgtgggcttccgcgaaatgaggacggggacttggttgccttttccagtgacgaggaattgacaatggccatgtcct

SEQ ID NO: 698237 - DNA, 98 bp, Homo sapiens
ctgaatgaccaggtgtaaagtgcaagagtaatatgctatgactgagtggctttgaagcgtatgttgaatttcaatgtgcctcatattaaaaacagcac

SEQ ID NO: 698238 - DNA, 98 bp, Homo sapiens
gcggcggaaaggataagcctcgacttagaagctaccgagttaccctaagaaagggcaccatgccggtggaaaggatgcgcatgcgcccgtggctggag

SEQ ID NO: 698239 - DNA, 51 bp, Homo sapiens
gcgaagtctactcaacgtttccaagtgcacgctaggcggctttgaggagct

SEQ ID NO: 698240 - DNA, 100 bp, Homo sapiens
cacctttgccagagtttgagcaggaagaggatgatggagtccccgatgactgtgagtgccgcaacggaggcagatgcctgggcgccaacaccaccctctg

SEQ ID NO: 698241 - DNA, 100 bp, Homo sapiens
agttgtcctcaattgcgtaggaccagatgctgatatgctaactggtgatgagcaagtatggaaggaagttcaagaatccctgaaaaaaattgaagaactg

SEQ ID NO: 698242 - DNA, 100 bp, Homo sapiens
cggagcagtagccgccgtgggagggagccatgaagcattacgagacttctgcctggtgtcgaaggtggtgggcagatgccgggcctccatgcctaggtgg

SEQ ID NO: 698243 - DNA, 82 bp, Homo sapiens
gcaccccgggcgggcggcggctgcttacctggagtagaacagaaaaattattatgtctgtgttcccttgggactcattggaa

SEQ ID NO: 698244 - DNA, 100 bp, Homo sapiens
aagatacatgagacagcagccaaacccccagcagatgatggatgtctagaaaacacccctgacactgcagagttcagtcgagagttccagttgcaccagc

SEQ ID NO: 698245 - DNA, 75 bp, Homo sapiens
cagcccacaactcttgtcctaccacctcagcagatcgggagcggtgccgagaaaaatttccttactagatgacat

SEQ ID NO: 698246 - DNA, 101 bp, Homo sapiens
ggaggtgcgggtactgacacttcccctgcaagcccaccacgccatggagaagatggaagagtttgtgtacaagggctatttaatctccgaggatcagatgt

SEQ ID NO: 698247 - DNA, 96 bp, Homo sapiens
gcggatggtggttcctgctgccctcaaggtcgtgcgtctgaagcctacaagaaagatgctgaagatgaagaattatctaaagctattcaatatcag

SEQ ID NO: 698248 - DNA, 100 bp, Homo sapiens
ggagcttctcagaagacagagggttttcttttgagagctctctttacgagaaaaggaagatcctggctggtcagcatgaggatgcccgggagctgaagga

SEQ ID NO: 698249 - DNA, 88 bp, Homo sapiens
ctttatatagaagggagagtaggtggacgccctgcttcatctggcccgccagaatcgggctgtggcccgcacagcccagaatgaacgg

SEQ ID NO: 698250 - DNA, 75 bp, Homo sapiens
gtgccgtcagccgcctgcgcgcctacctgctgccagcgccgccagctccagatcctgaacccgccgccctccccg

SEQ ID NO: 698251 - DNA, 97 bp, Homo sapiens
cggttggcagagtctatgattcagtactatactggcaattgctggagaagattttgcaattgttgcttctgatactcgattgagtgaagggttttca

SEQ ID NO: 698252 - DNA, 126 bp, Homo sapiens
gaaatgctccacctgtaagaacagaaaatcgtcttatagttgagaatttatcctcaagagtcagctggcaggcaggccagaaagcagacccagggaggatagcacatgtcttcggctacactggtg

SEQ ID NO: 698253 - DNA, 82 bp, Homo sapiens
ctctgggggccttatgcagctgcctaccagcttcaccctcatgcctggcatggaagaggagatggttcgtgttacgcagtgg

SEQ ID NO: 698254 - DNA, 75 bp, Homo sapiens
catgaagtgtgaaggcatctacagagtatcagaggagctatctataagcagcctatgtgattgaggatagagcag

SEQ ID NO: 698255 - DNA, 100 bp, Homo sapiens
caaataacacagccagtcagcaagcagcatcacaagctcagcctggacagcaacagagcagcccgacggccatggaggctgaagagacgatggaatgcct

SEQ ID NO: 698256 - DNA, 95 bp, Homo sapiens
actatgcatgtaaacaaatgaagcagcgctttgaaagcacgaggtagaactaacattgaacttagagagaaattcatcctaccagagggagcatc

SEQ ID NO: 698257 - DNA, 100 bp, Homo sapiens
ctagtttcgataaatctattcgaatctttcctgtagacaaaagtcgaagcaggaattgattatggattaagtttaccacttggagaagactatgaacgga

SEQ ID NO: 698258 - DNA, 100 bp, Homo sapiens
gctgtgcaccgaggtccgtgtggccaacgagctcaacgccaggcgccgctcctttacagctccaccgggggacggctacgtgcaggcggacgcccggggc

SEQ ID NO: 698259 - DNA, 95 bp, Homo sapiens
aacgtccttgagggcatccagctcattgccaagaagtccaagaaccacatccagtggctatataaagatgaagcgcagctgtataaagaagagca

SEQ ID NO: 698260 - DNA, 75 bp, Homo sapiens
gacctcagtgtgatacagccaattgtaaaagactgcaaagaggattcagaatccatggctggaagaggtagtaag

SEQ ID NO: 698261 - DNA, 75 bp, Homo sapiens
aaccaagctttagccgccgaggccgcgtgtcccaaaggccagtctccagcttgtacctcatatcagatgactccg

SEQ ID NO: 698262 - DNA, 58 bp, Homo sapiens
tccagagactggcaggcctcggcctaaaggttgcccccaagtttcctggcagtgtgtg

SEQ ID NO: 698263 - DNA, 75 bp, Homo sapiens
taaagcacaagaatcagtttcttgacatctggcaactgaaaaagggagatttcattgccctggatcttggtgggt

SEQ ID NO: 698264 - DNA, 96 bp, Homo sapiens
tggatgtgatgcctgctagccaaaaggggagtggagcaactgctgtagtccaagcagcttattgtgcccctaaaaaggagaaagtggcaatcaaac

SEQ ID NO: 698265 - DNA, 96 bp, Homo sapiens
acgtgcttcatgaactcggccctgcagtgcctttgctaccctagaagaggaggcttgtacagaacttgttccttaccttgcttatatacttgatac

SEQ ID NO: 698266 - DNA, 100 bp, Homo sapiens
aggaaggaacatctagtgatgatgaactgccttcagcagagatgattgacttccaaaaaagccaagggttatgtggtccgaatcagtggtgggaacgaca

SEQ ID NO: 698267 - DNA, 90 bp, Homo sapiens
gcaagagaaattaaccctatacctctgacccaggtgtaagaacatatgtggacccctttacgtacgaagatcccaaccaagcagtgcgag

SEQ ID NO: 698268 - DNA, 95 bp, Homo sapiens
tgtggagcgcttctttaagggctacgggaagatcctggaggtggatctgaagaacggatcatggaagggaagtggttgctgtgtatgttactggt

SEQ ID NO: 698269 - DNA, 100 bp, Homo sapiens
ctgctgactttgctcaggagcgccgttggaaacggggtgtggcccggaaggtggacaaggctcttcttggttcagtgaaggacagcatcgttcaaggttt

SEQ ID NO: 698270 - DNA, 100 bp, Homo sapiens
cctggggcaggtggacgcccagcttgtgccctacatcatcgacctgcagtccatgcaccagtttcgccaggacacagacgaagttatacggaagcgtctc

SEQ ID NO: 698271 - DNA, 75 bp, Homo sapiens
cttcctctgccactttttaccttggggacctcagtgttctagaacagatcagacattttgtaatgatgcctgaaa

SEQ ID NO: 698272 - DNA, 75 bp, Homo sapiens
gtgtccattcgagggcggatcctctctggtggtgttcccactgatgaagagcaggcgactgggttggagagggag

SEQ ID NO: 698273 - DNA, 113 bp, Homo sapiens
cctttatcttcgatggacggcgtgtcctggatgggctccacaatgaactacaaaccattggcttccagaatgaagactattctcagcaatcagactgtcgacattccagaaaa

SEQ ID NO: 698274 - DNA, 97 bp, Homo sapiens
gaacgtgaggctacgctgaccattgcccagtacagtacgagctcaactggaggcagtcctgtgcggaaatctgaagaaaaaacagatacaaagcgaa

SEQ ID NO: 698275 - DNA, 80 bp, Homo sapiens
gctctgctcctctatgctggacatcaaatttccaggttacacggtgtgggcacacaacctcattgccattgctcgtcttc

SEQ ID NO: 698276 - DNA, 50 bp, Homo sapiens
gtccgcctcctacctccttctgcttcgggctgaacaactttttaaagcaa

SEQ ID NO: 698277 - DNA, 101 bp, Homo sapiens
ggagccgcctctgcggctccaggagggcgcaggagcgggactgagagcgcctggaggctcgagcggaggctatgaagtcttacactccatatttcattctc

SEQ ID NO: 698278 - DNA, 102 bp, Homo sapiens
agacgacaaaatgcaaaaaaggaggccaaagactttgctatgaccagggccagagcactcagatctcagtcagaggagtctgcttctgcctttagtgctgat

SEQ ID NO: 698279 - DNA, 100 bp, Homo sapiens
agcccagatggaacaagggatgttgctgaacagttggagaagatctatgggtcagacagaattaatttacctcctattcgaaatgggaattttaggaaaa

SEQ ID NO: 698280 - DNA, 98 bp, Homo sapiens
tggcgtccctcttcagttctctggagccccagattcaacccgtgtacgtgcctgtgcctaaaatacatgttataaagccagttttaccaaagctaaac

SEQ ID NO: 698281 - DNA, 51 bp, Homo sapiens
cacagccacactcagcggccccagattgttctctggggccggactgagaaa

SEQ ID NO: 698282 - DNA, 98 bp, Homo sapiens
ttcagcaaacaatggcaaggcagagccaccagaaagtttattcatggaggacacactgctaagatttcagattttagctggaaccccaatgagccttg

SEQ ID NO: 698283 - DNA, 90 bp, Homo sapiens
caacttccggcaggtccagaagttcgatgagaggctggtatacacctccttctcccaagggtgtccgcaatgttgccagtgtctgtctgc

SEQ ID NO: 698284 - DNA, 100 bp, Homo sapiens
gagtttgggaccaaggagaagagaatggatcttggaacagcttaggcctgggggagcccatccaggaacatgcagtcccagcagaccaggctcctgagaa

SEQ ID NO: 698285 - DNA, 100 bp, Homo sapiens
ggccctgctcagcgccagcggcactggctccgccgcccaaggtgatggaggacgaggagaaggcagtggagatcttgggcaacacggaagctgctcatcc

SEQ ID NO: 698286 - DNA, 100 bp, Homo sapiens
ctgcaacatggctagagactgccgggactggtcagatgaacccatcaaagagtgcgaaaacatagctctgctggcagaaacagctctgagattcctggaa

SEQ ID NO: 698287 - DNA, 75 bp, Homo sapiens
ccctgccccgagtctgttccccgccgcccagctttgtgacaacaaactgtgctctgcagttttcatcccgtggaa

SEQ ID NO: 698288 - DNA, 114 bp, Homo sapiens
cagttacgtcttcctcaagttcctccaggggggtggcactggcagtacaggaaatttccagaactctttgcacagttcaagtccttcctgggggtaaaagagctgtccttcgcg

SEQ ID NO: 698289 - DNA, 50 bp, Homo sapiens
gagtgtggtgaacctcagtgtgcacgagctggccttgctgaacacctgag

SEQ ID NO: 698290 - DNA, 74 bp, Homo sapiens
ccctttaatccagtgactgtcaggtcgatcatatagctagagccggtgcaggccacgcagaacaagacagggaa

SEQ ID NO: 698291 - DNA, 82 bp, Homo sapiens
gttgcagctacctgcacttctagatatataaaccacagtacttcaggatcccattatgaaaattcccagcggggacctgtgt

SEQ ID NO: 698292 - DNA, 75 bp, Homo sapiens
ccaagctccgagaagaccggcggccaatcacagtccactttggacaggcaaagggcgttgtgaatacagctgtgt

SEQ ID NO: 698293 - DNA, 50 bp, Homo sapiens
ccgcacgatatcatcagaatagataacccaggaggctggagaattcatga

SEQ ID NO: 698294 - DNA, 100 bp, Homo sapiens
gcagatgttgtcaaggtggcctaccaggaggccaggggtgtcgccatgaaggagatccggttggcagctaaaccgcgctgggaacaggggcctgagtcct

SEQ ID NO: 698295 - DNA, 90 bp, Homo sapiens
cgcagccggccaccgccgagacccagcacatcgccgaccaggagttattcctgatgaagctaaagctttgtctctgttggcaccagctaa

SEQ ID NO: 698296 - DNA, 100 bp, Homo sapiens
cgccgctgcctcagtcatgccggagaactacgatgacccgcacaaaacccctgcctccccagttgtccacatcaggggcctgattgacggtgtggtggaa

SEQ ID NO: 698297 - DNA, 142 bp, Homo sapiens
gatgcctagtaaattacagaagaacaaacagagactgcgaaacgatcctctcaatcaaaataagagctgtactctctctggaggcaaacatcatggtcctgttgaagccctgaaacaaatgttatttaaccttcaagcagta

SEQ ID NO: 698298 - DNA, 100 bp, Homo sapiens
aagcagactctgaagatgatcagacaaggcaaagcgaaattggtcattctcgctaacaactgcccagctttgagtatgatgaacatttgactcaacttga

SEQ ID NO: 698299 - DNA, 99 bp, Homo sapiens
gcagagctttggcgagagctacggcaacagcaagaactgccggcggctcttgtgctgcaggggcgccctgcgtccggcagaggaggcgagcatcccgct

SEQ ID NO: 698300 - DNA, 98 bp, Homo sapiens
gcttgaaagtgcattcaaggaaatgtactatactggcaattgctggagaagattttgcaattgttgcttctgatactcgattgagtgaagggttttca

SEQ ID NO: 698301 - DNA, 133 bp, Homo sapiens
gcagtgtctccctaaactcaatagaacagtatcatgcccatctgaaaggatctaaacaccagaccaagactcttcaacatgatgtagaacaagattctgaccagcttgatagcagtgggatgtttcactggtg

SEQ ID NO: 698302 - DNA, 75 bp, Homo sapiens
ctgagcgtgctgcggacggcgctgcggtacatccaggagtgtggccatctggggccgtgtggtatttgccactca

SEQ ID NO: 698303 - DNA, 85 bp, Homo sapiens
caccacgataacatttagcctggaacagagcggcactcggcctgagcggggatcatagacggtatttctatgtaaacgaacagtc

SEQ ID NO: 698304 - DNA, 95 bp, Homo sapiens
atgattgcgcacatcacgggcctgaagattggtccagaaaagggcgtggtgcacctggcgacagcggccgtcctaaacgcggtgtgggacttgtg

SEQ ID NO: 698305 - DNA, 100 bp, Homo sapiens
gccggagtgagaagcaagaaggccctggacacagcaatatctctgggctttcacaggtggaacgtcctggggctgcagggcgcgctcctgtcccacttcg

SEQ ID NO: 698306 - DNA, 96 bp, Homo sapiens
tggaggtgcttctcatgcaaaaggaatcgtgctggaaaaagtatattgaaaactcttgggctgaactgtggaatagtaatttcgaattaaatccag

SEQ ID NO: 698307 - DNA, 100 bp, Homo sapiens
cagtggtcgcttcttctccttgatcacttatgtgaaaggagacctttttgcatgcccgaaaacagactctttagcccactgtatcagtgaggattgtcgc

SEQ ID NO: 698308 - DNA, 75 bp, Homo sapiens
caggctaagtcatgaagatattcgagaagaagttgacaccttcatgtttgaggcctggcatgcgtgggcagtgat

SEQ ID NO: 698309 - DNA, 75 bp, Homo sapiens
aagtctggcctcggcgccaagatcccagtcacaattatcaccgggtatttaggagaagatggtataaactggtcc

SEQ ID NO: 698310 - DNA, 100 bp, Homo sapiens
actacaggaacctggagtctgtgggtgcccttcgttttaaaagaaagattattggattaaaagatgagttttacaaccgctacataatgaaaagtttttt

SEQ ID NO: 698311 - DNA, 90 bp, Homo sapiens
gctgaactgtccccggcgcggccagccggtggcagaaaacagccttccacagaagtcagacgctgagctacaggaacggctatgcaattg

SEQ ID NO: 698312 - DNA, 50 bp, Homo sapiens
gggcgatgcacccgagagcatccacttcctgtccacttccaacgaagcgg

SEQ ID NO: 698313 - DNA, 100 bp, Homo sapiens
ctggacttcttggctggatgcgcgggggctgtgagccgtgagctttgaggcggtgggatgtgtcagcagaatgtctcctgcccccgagagcgaccccgag

SEQ ID NO: 698314 - DNA, 50 bp, Homo sapiens
tgaagtggtgaaggagtgtgtgcagcggatgcttgaggatgacctgaagc

SEQ ID NO: 698315 - DNA, 49 bp, Homo sapiens
atgctttacgcaagagttttgagggtgaggacgcttgagcggaagttag

SEQ ID NO: 698316 - DNA, 78 bp, Homo sapiens
gttctggttttaaaaaatacatatctggttttgaaatttgatgctgatccagttgaattatttgaaattccagtaaaa

SEQ ID NO: 698317 - DNA, 100 bp, Homo sapiens
aaatgatatttgccaaatttgatgaagtgcaaagttcaggcggtatgattttgagtgtctgcaaagacaacagcagttctgtagagagtttaaatatgaa

SEQ ID NO: 698318 - DNA, 75 bp, Homo sapiens
agtaatggttattatcactgtgaatcttccattgtgattggtgtcgtgaaaactacccctaaaagccaaaatggg

SEQ ID NO: 698319 - DNA, 96 bp, Homo sapiens
agaggcagctttgaagaatcttccactagtagataacatttgtgcatatgcaaacagttggccgcccgatccctgttcgtcagactctgaacccga

SEQ ID NO: 698320 - DNA, 75 bp, Homo sapiens
taggtgagtcgcggtgggtcctcgcttgcagttcagcgaccacgtaacaaatgtggcaattattttggatctatc

SEQ ID NO: 698321 - DNA, 75 bp, Homo sapiens
ttgaaaagatgtcaaactgttgtgaagatatccggttgctgaaccaatccccatctgtagtttctgtcttggtac

SEQ ID NO: 698322 - DNA, 100 bp, Homo sapiens
cctgagccgcccggagaggagcctcggccccgtacccagacccagtcatggcagcctccagcatcagttcaccatggggaaagcatgtgttcaaagccat

SEQ ID NO: 698323 - DNA, 75 bp, Homo sapiens
tccgtccctctctatcaaggattcctcatcattggccttttgtctgtgggaaaagcaggagacgcttcgattttt

SEQ ID NO: 698324 - DNA, 100 bp, Homo sapiens
cccacagataggagggaccccgtgctggtgtgcagggccatgtgtgctatggattcagtgcgcctccttgctgtggaagcttgtgtcagtattgcccagt

SEQ ID NO: 698325 - DNA, 100 bp, Homo sapiens
cagaggcgctggagctgggtcagtccgccgctcaccccgcggccgcaccttcccgccttctcaggtgccgaggtaaacagagcatccacggaaggggaaa

SEQ ID NO: 698326 - DNA, 84 bp, Homo sapiens
cacagagatacccagacaacaggatcgtctcgtccaaggtgctggagaatctggtaaaagcaccattgtgaagcagatgaggat

SEQ ID NO: 698327 - DNA, 74 bp, Homo sapiens
aatcagcgcactggcaagtgcagcgcctgtaatgtttggcgagtctgggtcctgaggacaccgtgagccagcca

SEQ ID NO: 698328 - DNA, 100 bp, Homo sapiens
agctgagcagcagcttgccgctctagaaggtcatcatcagatttgaaatatttaaagtggatacaaaactatttcagcaatgcagacaattaagtgtgtt

SEQ ID NO: 698329 - DNA, 101 bp, Homo sapiens
cttccactggcttcatcatccaggaggactggaatgaaattgaccccattaaaaagaaagaccttcatcacagcaatggagaagagaaagcacaaagcatg

SEQ ID NO: 698330 - DNA, 75 bp, Homo sapiens
gtcaaatactttgcacaggaagctataagtgatatggaatgtgcagatgtcccactattaactccaagcagcaaa

SEQ ID NO: 698331 - DNA, 83 bp, Homo sapiens
gggagagaggtacctctccttttccctctccctttccctaaggaagcggggagaggtggtgagagatgacccctgttgaggat

SEQ ID NO: 698332 - DNA, 83 bp, Homo sapiens
ccacaagttgcgctgctcgcgacgaggtaaagaagctaagtggaagagtgtttcctcctctggccgtaaagcaggtactctct

SEQ ID NO: 698333 - DNA, 100 bp, Homo sapiens
caagaacttgagcgacatggagaacgaattctactatcgctacccaacttccttcaaaatgtctactgttcacgaaatcctgtgcaagctcagcttggag

SEQ ID NO: 698334 - DNA, 99 bp, Homo sapiens
gccatgaacagtgggtctccagcacctcagtctaatcagagtaaaaggccaagctatgatagcaactggtggagtgataactggcctggccgccttgaa

SEQ ID NO: 698335 - DNA, 101 bp, Homo sapiens
agagagggcaccaccaaaagtgaggtcttctacccagatctttgtgtcaaaatactgagagaagataaaaattgcccaggatctacacagttagtgaaatg

SEQ ID NO: 698336 - DNA, 98 bp, Homo sapiens
gtaacaacgcgcgcttgagttggtataaactcctgaaggaatgtatcctgtcaggtataatgtcagtgaatggcaagaaagttcttcatatggatcga

SEQ ID NO: 698337 - DNA, 100 bp, Homo sapiens
aattattacagcattagataatgtggaagccaggagatacgtagacaggggcatagaaggaaaaactggaaagtgaggaagttcatcttgagagaagacc

SEQ ID NO: 698338 - DNA, 97 bp, Homo sapiens
agcagctttacactgatgaagtgttagacatcgagatcaatgaacctttagatgaatttacaggaagaatatttctcagccctccgttctcaagaca

SEQ ID NO: 698339 - DNA, 75 bp, Homo sapiens
gaggagtttgaccttgaagctcatagacttctcacacaggataatgaagggcgctatattcctcctcatttaagg

SEQ ID NO: 698340 - DNA, 102 bp, Homo sapiens
caagcatgtggatgtacatctagttcaactaaagggttatgtaccgaaggactctaccgtgtcagcgggaataaaactgaccaagacaatattcaaaagcag

SEQ ID NO: 698341 - DNA, 98 bp, Homo sapiens
gcttggcaccagcgctgtcactagcgccgcctgctcccgcgggcccgcggacccagctgtcaggcaagaatcgaagcaaacgcttggagaaggtccat

SEQ ID NO: 698342 - DNA, 100 bp, Homo sapiens
gcaagagtaacagcagcgccgtcccgtccgacagccaggcccgggagaatgctgggcctaaaggagataacatttatgaatggagatcaactatacttgg

SEQ ID NO: 698343 - DNA, 100 bp, Homo sapiens
aatgaagccacggacccttgcgacagccagctaaaggtgtggatgagcaaatacggctggagtgccgacgagtcggggcagatcttcatctgtagccaag

SEQ ID NO: 698344 - DNA, 115 bp, Homo sapiens
gcttcgagaggccgaggcgcgttcctccttcagcgactcttcggaggaatcgtttgaccaagactagacgcttgaagcaaagctgccatcccagaagacgacatgctctcagcaa

SEQ ID NO: 698345 - DNA, 123 bp, Homo sapiens
tattgcaatcatggtgcagaaataccagtccccagtgagggtgtacaaatacccctttgaattaattatggctgtttttcgttggaatatacgttgcacatttatggcgattctgagtgtgag

SEQ ID NO: 698346 - DNA, 112 bp, Homo sapiens
cgcctgctcgccgggcgctgaaggcatccccgggatccggagcgcagcccgggaaaggacttaaccaccaccatgtcgagcaaaagaacaaagaccaagaccaagaagcgcc

SEQ ID NO: 698347 - DNA, 75 bp, Homo sapiens
ggcttccagtggaggcattttggggcagaatacagagatatggaatcagaacacgagaccaatggtgtggcaaag

SEQ ID NO: 698348 - DNA, 101 bp, Homo sapiens
atttttagtttttatgtgagtgatggaaccagtcgttcagaaattcacagcatcaatatcaccattgagcccatcaaagctcctgagtcagtttccactat

SEQ ID NO: 698349 - DNA, 82 bp, Homo sapiens
tccggactcagccaagttccccaacggctccccgtcgtcctggtgctgcagcgtttgtgaatagcacaatggaagaagctgg

SEQ ID NO: 698350 - DNA, 75 bp, Homo sapiens
tttcaagctggtcatcatgatgaaacttagacacaatttcctcgtcctgtgactgtggagcccatggaccagtta

SEQ ID NO: 698351 - DNA, 82 bp, Homo sapiens
gcgacagtgcccaggggtctgagtctcacagcttgtaaaggttggcagagtcagcatatatgattccaaaaggcaatccggg

SEQ ID NO: 698352 - DNA, 80 bp, Homo sapiens
tccagactctgatgtgaccacggtccggtggcagccttcaaggtcgccacgccgtattccctgtatgtctgtcccgaggg

SEQ ID NO: 698353 - DNA, 126 bp, Homo sapiens
ataccatgaggtcaaaaaggaaatcaccctgcttgagcaaaggaaatagttttgaggcagctgtgccatcaaatagccacattgtttcggaacctggaaagaatgtcacactcacttgtcagcctc

SEQ ID NO: 698354 - DNA, 75 bp, Homo sapiens
cccgattgctgcagccgcttgtcagtgtgatgaagattggcacccagaaacgcttcgttaagggactcaggcagt

SEQ ID NO: 698355 - DNA, 83 bp, Homo sapiens
cggggcctttatttctcgtcggcggcgccctgcaccgcgcctcgcaaagtgacgatgcctggggagcctgtggacgtggcatg

SEQ ID NO: 698356 - DNA, 97 bp, Homo sapiens
tgcacctggagattgacgcagagtgggcggcggtggtgtgcacttgcaggaaagacatggtgaagatttcaatggatatctttgtgaggaaatttca

SEQ ID NO: 698357 - DNA, 100 bp, Homo sapiens
cggagcaatgcgcaggaataaggaagcgacctgcaaccgacggaagctattttgccagccacttcattatgggaggagagaagtttgactcaactcatcc

SEQ ID NO: 698358 - DNA, 74 bp, Homo sapiens
catcctctacctcaagtatgagccagatatggatgcagagagggaagccctgcagagcactgcctaccctgaag

SEQ ID NO: 698359 - DNA, 100 bp, Homo sapiens
gttgcgcgtcgtcccgctgggaatcccgccagggacgcaggtggacccaggtgcggggctggctacggaagctcagtgctgtagtccaactgtcccttgt

SEQ ID NO: 698360 - DNA, 90 bp, Homo sapiens
ctatccttatgaacattcatatggtttggaaggtggaaagcaatttcttgaaaagagattacaggagttggtggtgaccccgcccagttg

SEQ ID NO: 698361 - DNA, 101 bp, Homo sapiens
tttctgcttttctgtggactcctcttctacatcaacttggctgaccattggaaagcctgtggttaccagtcagcttggcacaattaacaatttgatccatg

SEQ ID NO: 698362 - DNA, 90 bp, Homo sapiens
gttctacctcagtctaatcctgctgcagaactatcagattagcctgaggcctgctcagtcgttcctaatgaataaaaatcaagtgccaaa

SEQ ID NO: 698363 - DNA, 90 bp, Homo sapiens
ccttccactaatggcgtgaatggccatttaccaggagatgcacttgcagcaggaagattgccaggttcaaaagatgtcgtgataaaggca

SEQ ID NO: 698364 - DNA, 100 bp, Homo sapiens
ctgcgacccgtcgagcggagcgtcgtggtagctgagacctggtgcccttcgacggcctggctgatccgagaaatcttacaggagatccagagacttcggc

SEQ ID NO: 698365 - DNA, 101 bp, Homo sapiens
tatctcagagcacaccagtcttccctcctgggtcacttcctatcccatcccagcctcagttttctcataaaaagcttgtggtgaaggggggcaaaaaaaag

SEQ ID NO: 698366 - DNA, 90 bp, Homo sapiens
gcaaaatggcggatcatgtgcagcgacatcaccccgcccggagagcctgtgaacagccggcccaaagcagcttcccgcttccccaaactg

SEQ ID NO: 698367 - DNA, 100 bp, Homo sapiens
gttcacgttccgcgaggacctcgcgctcggcacccagctggcgggggtccataggctgctgcaggcgccgcacaaggccaactacacagacccccagagc

SEQ ID NO: 698368 - DNA, 83 bp, Homo sapiens
gggcgcggattcgccgaggcaccgaggcactcagaggaggtatcagaagcatgtgcacacgtatcgcattctgcctgatggag

SEQ ID NO: 698369 - DNA, 100 bp, Homo sapiens
cttggcgacctcagctccggcctccaaggtattgttgcagcatctggcagtgagactgaggatgaggacagcatggacattcccttggacctttcttcat

SEQ ID NO: 698370 - DNA, 87 bp, Homo sapiens
cgaccggagaatccgcatctggggcacggagggaaggtgggagtcaatcattttgacaagtctcctgaaaggaacagctagcaggaa

SEQ ID NO: 698371 - DNA, 98 bp, Homo sapiens
cgggactcagtcccatcactccaaggagagaagctctagaggacaaaatcccagtccttggcacaaactcaggaaatggaagccggagtctgtttttt

SEQ ID NO: 698372 - DNA, 101 bp, Homo sapiens
agtcccccgtggtcacatctgggttgaaggtgatcatcatggacacagttttgacagtaattcttttgggccgattacctctctagtgacccttcagctgt

SEQ ID NO: 698373 - DNA, 89 bp, Homo sapiens
cgcctggcggggcctccgcgaggacgagttccacatcagtgtcatcagggtgatcagcccatgacctaaacctccagacaaaataaaac

SEQ ID NO: 698374 - DNA, 96 bp, Homo sapiens
tcgagaggatctggtgtaccaggcgaagctggccgagcaggctgagcgatacgacggtcacagccaagactgcctttctatttattttacctcagt

SEQ ID NO: 698375 - DNA, 133 bp, Homo sapiens
ggaggcgactagcggcggcgggagcggcgccgagaggccgtgcgggacgcgggcgccaggaccggccgaacgcagaggaggagccgaggaaggtctgcttcacctacgacctgttcctgaacctggaaggcaa

SEQ ID NO: 698376 - DNA, 75 bp, Homo sapiens
agaactcgtgagccggattgatggagactacctaggtggagaagcgtactgggccggcggcctgcacctctacac

SEQ ID NO: 698377 - DNA, 75 bp, Homo sapiens
gaagaggaagaactgaccagagctgatcccgagcagcgtcatgtacccctatgaggaaaatgaggcccaaagaag

SEQ ID NO: 698378 - DNA, 101 bp, Homo sapiens
ggacgggacagggtcgggggacacgcaggatgagccccgcgaccactggcacattcttgctgacagccatgtgacatgcctgctcctactctgccttccat

SEQ ID NO: 698379 - DNA, 75 bp, Homo sapiens
cagcttctggtggggatggtggaagccgccatgaaatctcccatgagagacaatccacgttgctattgtctgcgc

SEQ ID NO: 698380 - DNA, 83 bp, Homo sapiens
acgaagcacagctgtcacccggacatcaagtattcaccagttaatagcaccagataagaatgtgccttttgatgaaagaactt

SEQ ID NO: 698381 - DNA, 100 bp, Homo sapiens
ctacagttcgagcattctttgatcttattgatgctgatactaaacaagtcactgaactgatgcaggagcagtcatacctgaagtctgaattgggcctggg

SEQ ID NO: 698382 - DNA, 100 bp, Homo sapiens
ggaattaagtgagagagatgccatctacaaagaattctccttccacaattttaatcaggtttttcgttggaatatacgttgcacatttatggcgattctg

SEQ ID NO: 698383 - DNA, 100 bp, Homo sapiens
gaactgtttgtagccctcgtccagacgccccaaacaaacaactggtgaattttcagctcgtttccttttgaagctgcccgtagatttcagcaatatcccc

SEQ ID NO: 698384 - DNA, 108 bp, Homo sapiens
ccgggctcggggcctccgcagcgacaacatggaggccgtgaagaccttcaatagcgagatcaatgtccgagttaccaccatggatgcagagctggagtttgcaatcca

SEQ ID NO: 698385 - DNA, 113 bp, Homo sapiens
cgctcggcagccgcccgcagcccctcggagccagaggagaggcgcccccgccggccgccgcgccgcccggcagcctcggcagtcggaggcctgcaggactttggcacccgaga

SEQ ID NO: 698386 - DNA, 88 bp, Homo sapiens
actgaatgagatcaaaggtcacctggaaattgccttattggaaaaacatttcttacagtccactgccagctggttcgactctttgcac

SEQ ID NO: 698387 - DNA, 100 bp, Homo sapiens
ccttccctatccccgacgaccggatcctgaggaggcagctgcggtggcagctgctgagttctcggtgaaggagaatacttatctctggcgcacatcacta

SEQ ID NO: 698388 - DNA, 100 bp, Homo sapiens
ccctaccaaggatacccacagtacggctggcagggtggacctcaggagcctcctaaaaccacagaacactctgctccagccaaggtggtgagggcagctg

SEQ ID NO: 698389 - DNA, 90 bp, Homo sapiens
tgttcttatttgctttatatatcatgtgtgttcctcactcagcagtgggagacatttagtgaacgctcttcaagctcacaaactctgacc

SEQ ID NO: 698390 - DNA, 75 bp, Homo sapiens
gcccagagtccgcggccggggcgcgggaggagaacacaaagttatacctcaatttacttgaaatggaatatagtg

SEQ ID NO: 698391 - DNA, 82 bp, Homo sapiens
ccggcaccatggagtcaccttttagcccgggactctttcacaggctggatgaagattgggatatggtgtaagatacttcttc

SEQ ID NO: 698392 - DNA, 75 bp, Homo sapiens
atgggcacggccgaggacttcgccgaccagctgtcgcctggttgggcccggaaatgggacgtcgcgctttctcag

SEQ ID NO: 698393 - DNA, 98 bp, Homo sapiens
cgggctcctgcgagaagcaagcggaacttcctgagacggtgatgatccctggccctcagctgaaaccagaagaagaatatgaagaggcacaaggagag

SEQ ID NO: 698394 - DNA, 100 bp, Homo sapiens
aataaaaacagagtccgatgaaaggaatgggtctgggaccttaacagggagccatgggctctgggcaccctggcaggaggcatgtcctgtgagtttctgc

SEQ ID NO: 698395 - DNA, 100 bp, Homo sapiens
tcctctgaaccagactataactatgaatttgcacagatggaagttatcatgaaaaccctgaatagtaatggagctgctgctcaagaggtcatcaaaataa

SEQ ID NO: 698396 - DNA, 51 bp, Homo sapiens
ctggagctgggccaggccgtggagggtcatgtaggtacaacagcaaccaag

SEQ ID NO: 698397 - DNA, 101 bp, Homo sapiens
cacccgcgagcacagccaaaaattcttcctgggacacaacgacgacattatcaggtatgtgccagtcaaagatctactgggaatttatgagaaactgtatg

SEQ ID NO: 698398 - DNA, 100 bp, Homo sapiens
ccatcgtgaagacccttgctgctaccgggacaggatttgactgtgctagcaagcattgacaagatatctaaagtcacctctcctgtgttggtcattcatg

SEQ ID NO: 698399 - DNA, 96 bp, Homo sapiens
tgacaaaaaccaaagtctcttctgctgggaaatcccagtacagatccatcctgaggttagcattacacttctcccagtggagcccatgacttctga

SEQ ID NO: 698400 - DNA, 87 bp, Homo sapiens
ttgtcacagacttttataaccctttgatccctaccaacattaaaatgattacggacctgaagccaaagaacaagatgcgctagtgga

SEQ ID NO: 698401 - DNA, 83 bp, Homo sapiens
acagagcgctactcctggcagtgcgtcaatcagagcgtcctgtgcggttttaaaatcaaagatgggaaaatcggagaaaattg

SEQ ID NO: 698402 - DNA, 75 bp, Homo sapiens
ggcaagatcatcgtgggcgacgccacagagaaaggctcaagtggtcctgtcgaagtatttatcactgagactccg

SEQ ID NO: 698403 - DNA, 110 bp, Homo sapiens
ggaccccgaggcgggagcgcgggctgggccgggctgggctacgcgcacgggctcggccgccgcccctgccggtgctggagaatctggtaaaagcaccattgtgaagcaga

SEQ ID NO: 698404 - DNA, 100 bp, Homo sapiens
ctacgggctttggagaaattgaggaaactgaggaaagaggctgcagcgaggaaaggggtctttcatctgggggtgcctgtggaggccttgttcttcgtcg

SEQ ID NO: 698405 - DNA, 73 bp, Homo sapiens
agaaatgaagcagagtggcctaggtggtggtgaagtttattaagaaggagaaggtcttggaggattgttggat

SEQ ID NO: 698406 - DNA, 100 bp, Homo sapiens
tgaaagctaagaaggttcaaacaaatttgcaaatgatatacaacttctaagaaagaatcttcaagagggagacatagggaaaaggaagacataaaaatca

SEQ ID NO: 698407 - DNA, 90 bp, Homo sapiens
agatacgctgggaaccttccccagccatggcttccctggggcagatcctcttctggagcgccgcgcggtgaggttctctagtccacgctc

SEQ ID NO: 698408 - DNA, 83 bp, Homo sapiens
cccccttccccacgcaaccccagatccatttacactttacagtatggcctcacaagtcttggtctacccaccatatgtttatc

SEQ ID NO: 698409 - DNA, 88 bp, Homo sapiens
aaagacatggcaacaggaaagtctaagggatatggctttgtctcctttttcaacaaatggtgtttgaacgtcactcagttattaaaat

SEQ ID NO: 698410 - DNA, 96 bp, Homo sapiens
aagccacggctagtccgcttctaccagcgtttccccgtggaacacagagcattcctaatgacagtcctgcccggggtgagggcacccattctgaag

SEQ ID NO: 698411 - DNA, 100 bp, Homo sapiens
ggcaaggcttcatgaaatacttcagaaagacagagattttactgctgaagattatgaaaagccttttcaggagccaaaaaaacaaatacaaacaaacaaa

SEQ ID NO: 698412 - DNA, 75 bp, Homo sapiens
aagaaccacagaattctggacaatcaaaacttaactcctggatacaggttcgccatcggtggtgtgaactcattg

SEQ ID NO: 698413 - DNA, 98 bp, Homo sapiens
gatgcgcaagttcattgcctaccagttcacagacacgttgaggagctcaagcttgggaaaatggtgtgcattccttgtatcgtcattccagttctgct

SEQ ID NO: 698414 - DNA, 100 bp, Homo sapiens
cgaggaccaggggatgcgaagggatgaggaagtacagacaattggtcagatagaactgtgcctcactaagcaagaccagcagctgcaaaactgcaccgag

SEQ ID NO: 698415 - DNA, 82 bp, Homo sapiens
cagaacgacctagtatttgaatttgctagtaacgtcatggaggatgaacgacaggaaagaagcacttgtaaggaaatatagc

SEQ ID NO: 698416 - DNA, 50 bp, Homo sapiens
agatgatgcagaactacctcaggctgattcccaaatgctggaaaatcctc

SEQ ID NO: 698417 - DNA, 82 bp, Homo sapiens
ataaaatttatcaagaaagagccagccaggcggagagggagatgcaagggctgaaggcctttcggcagcagctgaggaagac

SEQ ID NO: 698418 - DNA, 100 bp, Homo sapiens
atccatgggtggcatttatgaatatatcctggtgattgacaaagcaaaaatggaatcccttgcgcacataaaatccaaatcccacttgaaccaactgaag

SEQ ID NO: 698419 - DNA, 100 bp, Homo sapiens
acgctactacctggtgcagggcctgattgaggactgccagctggcgctgcagaagcggttattgagcattcgctgtgtaccaagtgctgtccttgacaag

SEQ ID NO: 698420 - DNA, 100 bp, Homo sapiens
ccattaacatgatggagtacctgttgcaggaccaagatcactccatggatgaaatgacagctgtggtgaaaattgaaaaaggagttggtggcaataatgg

SEQ ID NO: 698421 - DNA, 100 bp, Homo sapiens
ggaacggcagcgaggaggcctggggggcacttcgggcgccgcaacagcaggatgcctttcaggaggagtactacaggacgggcaccttcccagagacgcc

SEQ ID NO: 698422 - DNA, 82 bp, Homo sapiens
tttctggcctggaggctatccagcctgcatccagtggaactaaagccgttccaggattatcaaaaactgagcagcaaccttg

SEQ ID NO: 698423 - DNA, 104 bp, Homo sapiens
gccaaaatggagtatgcaaagttgatgtctattctcctggagacaaccaagcccaggactggaaaatgcctgccgagtgcctgcgattgcaggcgcgcgccgcc

SEQ ID NO: 698424 - DNA, 100 bp, Homo sapiens
caaacagatgactacccagggagaggaattacgggaacagaaagaaaagtccgaaagagctgggtcctgatgaagaagctgttgtggatcttggcaaaac

SEQ ID NO: 698425 - DNA, 132 bp, Homo sapiens
ggaaacacctcagctttttctaagaagagatgtgagacttcccttggaagttgaaaaacagtcagagcaccataacatggtgtgggaagtgaagacaaatcagatgcctaatgcagtacagaaactcctgtt

SEQ ID NO: 698426 - DNA, 100 bp, Homo sapiens
tggggacttgtggacccagaggattttatggcacatttgttgcacctggacttgatatgaaagtaaccatcagaaaatcaacagagatcttaaacttgcc

SEQ ID NO: 698427 - DNA, 88 bp, Homo sapiens
tcctggcgctgctggctgcgctctgcccggcgagtcgggctctggaggaaaagaaaggtgtcttctctttagggatggtgaggttgga

SEQ ID NO: 698428 - DNA, 100 bp, Homo sapiens
gaagactcagaaacacagcctgatgaggaggaagaagaagaagaagaaaaagtttctcaaccagagccttggggagcagtactacaaagatgccatggag

SEQ ID NO: 698429 - DNA, 75 bp, Homo sapiens
agaccagaagcccttctgaattaagctgaagaaatcaggggagaaacccctgcttggtggaagcctgatggaata

SEQ ID NO: 698430 - DNA, 75 bp, Homo sapiens
acaagatggcgaccgagacggtggagctccataagctaaaggatggatgagggagatgctgcaatcatgcatccc

SEQ ID NO: 698431 - DNA, 97 bp, Homo sapiens
agaattcacaagatccaatcccttgtccttaaaaggtttgcctgcaatgagatttcattctctacatttaaaggacatcctttctgagctgctgtga

SEQ ID NO: 698432 - DNA, 90 bp, Homo sapiens
tttgataaaaattacaaggactggcagtctgctgtagagtgtatcgcagtgttgggtcttaaagaaagtgcagaagagatggtcaaaaac

SEQ ID NO: 698433 - DNA, 50 bp, Homo sapiens
cttggatgaattgcttgctttggaggtgtggaaacaggaagagaactaga

SEQ ID NO: 698434 - DNA, 90 bp, Homo sapiens
attaaaacatttttcagggacgtagccatccagagcaattctgtggtgttcttggtcacacatttatggagtttctgaagggcagtggag

SEQ ID NO: 698435 - DNA, 98 bp, Homo sapiens
ctgggaaggtggagccaccagcctctccttggactgcaatgtgccgatcttagctgctgcctgagaggatgtctggggtgtccgagcccctgagtcga

SEQ ID NO: 698436 - DNA, 82 bp, Homo sapiens
cgcgaaggcagtaccgtttcctcagcggcgggtcatgcaagacaagataatctgccttccgaaaagagtgcagcctgctcag

SEQ ID NO: 698437 - DNA, 90 bp, Homo sapiens
gtgaaaaatgaccctgaactggaccagcagcacccagtcagcttgaagagtttcaaatggaccctaccactgagaaatcaagatggcagt

SEQ ID NO: 698438 - DNA, 51 bp, Homo sapiens
cctccacacatgcttgtaaaataaagtgttgaacagtcatcggatctacag

SEQ ID NO: 698439 - DNA, 83 bp, Homo sapiens
attcgccgaggcaccgaggcactcagaggaggttgcacactgggccacagaggatccagcaaggatgaagaaatggagcagca

SEQ ID NO: 698440 - DNA, 74 bp, Homo sapiens
ttgtgttcctggcttccctctggatgctgacagaaacaaggaacctgatgttgttgttaaacgacaagaagctt

SEQ ID NO: 698441 - DNA, 100 bp, Homo sapiens
gccctggtgaccctgcagcgctcgcccacgcccagcgccgcctcctcctcggccagcaacagcgaggaagagaattgagtttggtcggccctttcccagg

SEQ ID NO: 698442 - DNA, 100 bp, Homo sapiens
ggcagcggcagccggcatcctccctgggcgagagatttgttggacgatttaagtctcgtaaagaacgagaagctgaacttggagctagggcaaaagaatt

SEQ ID NO: 698443 - DNA, 100 bp, Homo sapiens
ggaagtcctaggactgatctccaggaccagcactcttctcccagcccttagggtcctgctcggccaagcttcctggacaagatcgacgtgatcaagcagg

SEQ ID NO: 698444 - DNA, 100 bp, Homo sapiens
ctggtcacctgtctggagcaaataaaagagccctgcaatttgaagatacatgagacagcagccaaacccccagtgagggtcgctgtctgcccattgatag

SEQ ID NO: 698445 - DNA, 100 bp, Homo sapiens
cacagctacgtgctgggcacagtcagcccttcccgccccaaagcaggtttggaacaaactctcccttcacttgttgccctgtagcactacagaaaccctg

SEQ ID NO: 698446 - DNA, 82 bp, Homo sapiens
cgacatcgacgccgcctggcaggccctgcgcaccaggcctgaggtcctttcgagactgctggggaacctggtggtgaagaac

SEQ ID NO: 698447 - DNA, 83 bp, Homo sapiens
tgcccttcccgttcttcggtgccgagcactccggactctacgtaatagcctgcagctggtgttttgagaagccctactgctga

SEQ ID NO: 698448 - DNA, 75 bp, Homo sapiens
gaaatgagactccctcagatccagtgataattgacagtgcagaatacagaaactgcagccatgaccacgcacgtc

SEQ ID NO: 698449 - DNA, 98 bp, Homo sapiens
ccgagtgactcactcggccaaggaaactcccagggcccgcccaggacccccaagccgccgcggacgcagggagttctgggaaatcgttcattcattta

SEQ ID NO: 698450 - DNA, 100 bp, Homo sapiens
ggacatctgctgccggaaggggtcccgaagccccctgcaggaactctacaacccaatccagagagacaagagagacacctccaacttcgacaaagagttc

SEQ ID NO: 698451 - DNA, 100 bp, Homo sapiens
gtgctgcctttggctgagtgtgtggagtcctgctcaggtgttaggccagatcagaaaagggagctcaggtaccttccagagagtgagacccagcgccctt

SEQ ID NO: 698452 - DNA, 82 bp, Homo sapiens
ctcagctccgagtccagggcgaggaagatgttaccgagtacttcagtgaattccttagtgcaggggaacggagtcttgaatt

SEQ ID NO: 698453 - DNA, 98 bp, Homo sapiens
catcaaaaatagtgatagctttgataagtgccagcgagatttcagattcctgtaaacctctaaagaaaaggagtcgcgcctcaactgatgtagaaatg

SEQ ID NO: 698454 - DNA, 83 bp, Homo sapiens
cgcccgggaggaaggaacgaggcaaggagctaaagcagcgtgcgttcagccctggggtgctgctgcatgaggaggcgggtgat

SEQ ID NO: 698455 - DNA, 80 bp, Homo sapiens
gcctgctgaactgggtgctttatatagggttctcaggaatcagatagctcgcagtcggccaagaaggacatgctggctgc

SEQ ID NO: 698456 - DNA, 75 bp, Homo sapiens
gccggcagcggcgcgggaggccgtgcggctattgtggaaaacatggctgagttccggcctgagatgtgtacagag

SEQ ID NO: 698457 - DNA, 128 bp, Homo sapiens
aagaaattcttcttgaaggctgtgctgagaaaagtaaacagctgaaggatgaaggagccagtttggctgaaaataaaagaagccctgtcaatgaagacaatcaagatggtgtcacgcactctgatggt

SEQ ID NO: 698458 - DNA, 73 bp, Homo sapiens
ctgcctcagtctcccaaagtgctggaattacagggcaatgccattgggcctctggttgctttatatttggttt

SEQ ID NO: 698459 - DNA, 95 bp, Homo sapiens
ccacgttcgtgctacagaagaagggcatcgtgcgtgccaagcggcgaggtactccaaagattcaggtttactcacgtcatccagcagagaatgga

SEQ ID NO: 698460 - DNA, 75 bp, Homo sapiens
aatatttttaataccgtcactctcaagaagcttgcaggtaaactgaaggaacttaatggaactgcacctgaagag

SEQ ID NO: 698461 - DNA, 98 bp, Homo sapiens
ccggtaacaaacgagggttcccgggattggaccgacgcagccatggactttgcctcccgggccaaactggcagttcaaaaactagtacagaaagttgg

SEQ ID NO: 698462 - DNA, 87 bp, Homo sapiens
gaagagcagtacttccagttcctggccaagtttgagatcgccctgcccgtcgccaatgacagaccgcctggacattagggcagcccg

SEQ ID NO: 698463 - DNA, 101 bp, Homo sapiens
cagaaataccagtccccagtgagggtgtacaaatacccctttgaattaattatggctgtgaaaaattagacgatttcaagaattggagctgaatctgatgt

SEQ ID NO: 698464 - DNA, 88 bp, Homo sapiens
tgaaatgtggggaaatgcgtctgatttttaacctaaaggcagacccagaagagctttttacaaaactagagaaaattgggaagggctc

SEQ ID NO: 698465 - DNA, 96 bp, Homo sapiens
tcctctcagcagaagtccaggttcccatgcagagtgcttgtgatttcacgtatttttgctgaactcgtaaaagagacacttggatggtggattaac

SEQ ID NO: 698466 - DNA, 82 bp, Homo sapiens
tagacatcatgccagggctggaaactgctgtcgtctttcaagaaaaggtcaagtctggcaccatctttgacaacttcctcat

SEQ ID NO: 698467 - DNA, 50 bp, Homo sapiens
ctggactgcgaggtggtgcagagactttgcagcaattgatcatgatgtcg

SEQ ID NO: 698468 - DNA, 98 bp, Homo sapiens
actgaggcagatgtggcgctaccgctcctgggacgtgccacagatcccatcagaggcaccccagacacagtactccaaagattcaggtttactcacgt

SEQ ID NO: 698469 - DNA, 100 bp, Homo sapiens
tgtgtcaggatggatttttgaaatttgaaagtcatattttcatggtaactccatttccaaatactggatttataaatgggtttacgtctccagcgttcaa

SEQ ID NO: 698470 - DNA, 50 bp, Homo sapiens
acgacctgacggacaccacccgggcggggcttatttcaaaacctttgtcc

SEQ ID NO: 698471 - DNA, 75 bp, Homo sapiens
acttgtgtcgtccagtaaagaagataacctcaatcatggccataccgagcagggagtggttttcagagacatttc

SEQ ID NO: 698472 - DNA, 83 bp, Homo sapiens
catgggcatttatgtgggtgccaaagtcttcctcatctacgagtgtctccagaacgctatagctatggcacctccagctcttc

SEQ ID NO: 698473 - DNA, 83 bp, Homo sapiens
acggaaccgccacagcactcaaggcgtgatggtgggcatgggtcagaaggattcctatgtgggcgacgaggcccagagcaaga

SEQ ID NO: 698474 - DNA, 83 bp, Homo sapiens
cacaacatcaccagcttagacatctctgacaatgggagaagcatgacactggccaacactgcgtccagcatttgggtggccct

SEQ ID NO: 698475 - DNA, 50 bp, Homo sapiens
gtcaatcagagcgtcctgtgcgggactttgaacatgtcggggatcgccct

SEQ ID NO: 698476 - DNA, 98 bp, Homo sapiens
tgtggagcagttcgttttgaagtttgggcctcagcagacttgcatatatttgactgcaagacgagattgaggagctgcgggccgagatgctggagatg

SEQ ID NO: 698477 - DNA, 90 bp, Homo sapiens
cggaactggtcgaatgaggcacctaaaaattgtataccgcagattcaggcaagtgaaccggagcaaacgacttccgatccagtctgcgct

SEQ ID NO: 698478 - DNA, 75 bp, Homo sapiens
tcttgctgcgaagaagattcctggaatctcatcaactgtggaccccaaggccctggtgaaggaggagcaggccac

SEQ ID NO: 698479 - DNA, 97 bp, Homo sapiens
gaaattggattggcggtgattttcatgactacaaagaattactgtgatcctcagggccatcccagtacaggtgtacacttaaagcgttctgggaata

SEQ ID NO: 698480 - DNA, 75 bp, Homo sapiens
ccgggaccctggcccctgtcgaggagcgcctggaccatgctgctgagcgcctactggcacggcctccacccgggc

SEQ ID NO: 698481 - DNA, 87 bp, Homo sapiens
aactcgtctttggcgaggacggggcgccggcgccgccgcccccgggctcgcggcctgcagaatgattacggacctgaagccaaagaa

SEQ ID NO: 698482 - DNA, 100 bp, Homo sapiens
tgaggaggaccaaaagaaacagcctgtccaggggctccatccttgcctccctggacacctttaagaagatgtgggtctccaaaaaggaatatgaggaaga

SEQ ID NO: 698483 - DNA, 75 bp, Homo sapiens
tgtcaacacggatgatcacaggagcttagaaaccaagatagccaagtggaacctgcaatcaagaatgaataagaa

SEQ ID NO: 698484 - DNA, 90 bp, Homo sapiens
tacattggctgttttcctcacattcctcaagcagcaacacagtcactcctggcggcaaaccaaacaaaaccagagtcatctggggaaaag

SEQ ID NO: 698485 - DNA, 97 bp, Homo sapiens
tcccggcggcgtgtgggagagttggagcgggctctctctgctgtctccacgcagcagaagaaggcagacagggtgaaaaggagaacagcttgaagac

SEQ ID NO: 698486 - DNA, 75 bp, Homo sapiens
gaaaggtgatattgtagacatcaaggtaatgggtaaagtgccaaccatatccatcaacaaaacagatggctgcca

SEQ ID NO: 698487 - DNA, 100 bp, Homo sapiens
ggccatctacctggacatcgatggacgcattcagaaggacccttgaacatctgtgaagaaatgactattctgcatggaggcttcttgctggccgagcagc

SEQ ID NO: 698488 - DNA, 51 bp, Homo sapiens
tgctgttgctgagtctgttgccagctttatttgaaggtagacgcatcgaat

SEQ ID NO: 698489 - DNA, 97 bp, Homo sapiens
agcccccgaggacggccgtgcggcccatcacggagcgcagcctcctgcagggggacgacttcttggacacttaatgattgttggcaagaaatgtgct

SEQ ID NO: 698490 - DNA, 87 bp, Homo sapiens
ctgacttacctaggaatgagagggacaggagtatctgaggatggagaactcagcagatatgttcaaggaatgagtgatttactttcc

SEQ ID NO: 698491 - DNA, 74 bp, Homo sapiens
gatgctttacttttagacctcagacaaaaatttccacccaaatttgtgcaggtcaaaatgcagatcttcgtgaa

SEQ ID NO: 698492 - DNA, 96 bp, Homo sapiens
cctggattgggatgagaacacatcagctgggcgctatgttcgtgagaactgcaaaccgctgcgggccagccatgtgactgccttcctcccctgcgg

SEQ ID NO: 698493 - DNA, 97 bp, Homo sapiens
tacagctgaggaacccgccgcgccgagttaagctgaaatatgtaaaactaaagaattatctgaaggaaatatgtgaatctgaaaagaaggctcatac

SEQ ID NO: 698494 - DNA, 83 bp, Homo sapiens
catgccctgaaaaagtatcgtcgagaagcctatcatcgatgtgttcagagcaacattgttttgttgacacaagcatttagaag

SEQ ID NO: 698495 - DNA, 122 bp, Homo sapiens
ctggtgatcacatccccaccccacaggatctgccccagagaaagtcctcgctcgtcaccagcaagcttgcgggattagtgacaagagctggggttaggatccggttggactctgacatcgga

SEQ ID NO: 698496 - DNA, 75 bp, Homo sapiens
aggactacccctttgccaggttcaataaggaagccttggctcaagctttctggattgacatcaagcgcatggatg

SEQ ID NO: 698497 - DNA, 90 bp, Homo sapiens
aagaccgaattcagaaggatatcgacgtcgtgatccagaagtccagagctgaggactgcctgtttgcagaagtctgggccaacggtcaca

SEQ ID NO: 698498 - DNA, 100 bp, Homo sapiens
ggtgctcacagctgcccattgcctaaagaagtcttcggggacgaggaagccacagccccatgagaactccagacccttgtcccttgagcacccctgggcc

SEQ ID NO: 698499 - DNA, 90 bp, Homo sapiens
gttcttcatcggtttcaccgcgctcgttatcatgtggcagaagcactatgacttaattcagtgcacaaatgagatgaatgtgaacatccc

SEQ ID NO: 698500 - DNA, 75 bp, Homo sapiens
atatggacaggtctacgccacatcacttagacccaacatgagtgaagtttcctgcaagaaacgggacgactattt

SEQ ID NO: 698501 - DNA, 82 bp, Homo sapiens
cgaaaacatcgggtttgagattatccacgtgtgtaaggctggaggagattgtatttcgttactaccacaaactcaggatgtc

SEQ ID NO: 698502 - DNA, 82 bp, Homo sapiens
gaagcttctgaaccatccacacatcataaagctttaccagcaaccatgtccaagggacctgcagttggtattgatcttggca

SEQ ID NO: 698503 - DNA, 75 bp, Homo sapiens
cagaccggcctcgcggagcccgcgcgccgagccccacatggtccagtagtctatgcagcatatttaaaaatggag

SEQ ID NO: 698504 - DNA, 103 bp, Homo sapiens
gaagaagggaaggcgcgagtgaggaaaggaggtactgtagatcatggaagggaagtggttgctgtgtatgttactggtgcttggaactgctattgttgaggct

SEQ ID NO: 698505 - DNA, 100 bp, Homo sapiens
tcaccatttctggccaaaactacaaacaagacttcgcaggaacatcatttacagcgagcaatttcagcacagcaagtgtttagagaaaaaaaagagagta

SEQ ID NO: 698506 - DNA, 106 bp, Homo sapiens
ccgcgcacagctgctcccttcgccttcgccctttccacctcgcggcagttcgggcctctgaaaaatggaaccaaattctctgaggactaaagtcccagctttctta

SEQ ID NO: 698507 - DNA, 82 bp, Homo sapiens
gcggtctgcaagctgacgtatataacgaaggaggcccaacttcattcaataaggagcctgacggatttatcccagacggtag

SEQ ID NO: 698508 - DNA, 73 bp, Homo sapiens
agcatcagccatgaggagcagaagtcagtccggctggttacatccactaccagcctgcccaggaccggctgca

SEQ ID NO: 698509 - DNA, 87 bp, Homo sapiens
acccgctgctcagcgtcctcatgtggggggtaaaccactcgaattcctcagagagagaagactgtaataatggcgaaccccctagga

SEQ ID NO: 698510 - DNA, 100 bp, Homo sapiens
ctgcttttcggttccgggtcttggccccgtccttacctcacaggaatgactgtgataaatatgtttttcgtatgcaaaaatatcataaaagtaatggtgg

SEQ ID NO: 698511 - DNA, 75 bp, Homo sapiens
ctcctttctctgatatttggccccaagccgatgcatcacaggggtagaaatatttctgtcatggctcattcaaag

SEQ ID NO: 698512 - DNA, 90 bp, Homo sapiens
caagagcactagtgtctagaaggcactaaggaaaaagcttgtggtgaaggggggcaaaaaaaagaagcaagttctgaagttcactcttga

SEQ ID NO: 698513 - DNA, 74 bp, Homo sapiens
tttgaccttccgaagatcatgcagagaaggcttccagacagttcgtgttgggacagtgggcacccctgtgggca

SEQ ID NO: 698514 - DNA, 90 bp, Homo sapiens
accgacgccaacatggcggcgcccagtggcgtccacctgctcgtccgcagagatgtcatcgcaacagataaagaagacgttgccttcaaa

SEQ ID NO: 698515 - DNA, 97 bp, Homo sapiens
aaacttatgtgaccccgcggagacccttcgagaaatctcgtctcgaccaagagctgaagctgatcgtactcccctgccctcaacaagatgttttgcc

SEQ ID NO: 698516 - DNA, 100 bp, Homo sapiens
tcaagtacttggcagatcactctcttagcaggaatctaagtcctttgctgtgggaatgttcaaaggccagctcaccacagatcaggtgttcccatacccg

SEQ ID NO: 698517 - DNA, 100 bp, Homo sapiens
agcagaagatgagcaggtgttcctaatgaagcaacagctgatggatgtgctgactagtgagagtgcttgggccctcccccagcacctagggaaaggcttc

SEQ ID NO: 698518 - DNA, 74 bp, Homo sapiens
cggcctgcgggcgatcgggccgaggggtcttcacggcttctctgcccaggggccagaaccgaggaggccaggag

SEQ ID NO: 698519 - DNA, 101 bp, Homo sapiens
ggcgcggctgcctccgcgctcgcccgggctgcgctgggcgctgccgctgctgctgctgctgctgcgcctgggccaggtatccgttacagcactgatgtgag

SEQ ID NO: 698520 - DNA, 75 bp, Homo sapiens
cttggagcacttcctattccactggattgggaaagaccatggcaggactttgcctcccgggccaaactggcagtt

SEQ ID NO: 698521 - DNA, 83 bp, Homo sapiens
tgtctccttcgacttggagtctttgtccaggacgcctaaattatacagatctgtgattgaagatgtcattaatgatgtgagag

SEQ ID NO: 698522 - DNA, 51 bp, Homo sapiens
ctgcaggagatggaggacaatcagtatgactttttttatgaagacatggag

SEQ ID NO: 698523 - DNA, 105 bp, Homo sapiens
ctccgcaccgcggcttaaatgatgtattttgtgatcgcagcgatgaaagccctgggcgctgcctatggcacagccaagagcggtaccggcattgcggccatgtct

SEQ ID NO: 698524 - DNA, 99 bp, Homo sapiens
tgcaagcattctatccaaatgatcagagagttgtactgtacatgtttagaaaagaacatatgggattcagaggagtatgcatcagtcttgcagctgctg

SEQ ID NO: 698525 - DNA, 90 bp, Homo sapiens
caaatgagatgaaccatcttcctgcacacagccaaagtctgcaaagaagctgcagttcatcatctgctgtgatagttccacaaccagagg

SEQ ID NO: 698526 - DNA, 100 bp, Homo sapiens
ctggactgctcagggtgccagacctcatcgatttttggcaggtatatcaatgatgttttataaaagcacaacaatttccatgtatttagcgtccaaattg

SEQ ID NO: 698527 - DNA, 100 bp, Homo sapiens
ctcctccgtgcggagaagaagctgcggccgcacctggccaagggagagcgccgcgggtccctggccttcatccgctcccccagcaccgacaacgtggtca

SEQ ID NO: 698528 - DNA, 100 bp, Homo sapiens
gtggagtttgatgactctcaggacaaagcaggagaactgtgtttatgaaactgtagttttgcctttggatgaaagggcatttgagaagactttaacacca

SEQ ID NO: 698529 - DNA, 75 bp, Homo sapiens
caggagtttgacaatcacattaattcatatgaccatgctcacaagcagtctctagtgatccctgaaaagttccag

SEQ ID NO: 698530 - DNA, 74 bp, Homo sapiens
atggcagccagtcagtggtggagtaaccccaagaaaggcatcagggttctggagtggttgtttgagtgacacag

SEQ ID NO: 698531 - DNA, 82 bp, Homo sapiens
ggaggtagacatccttatcagcacagcacttattccaggtgatgtttgcagacagaaaaagtaaactgtcaaggaattcaga

SEQ ID NO: 698532 - DNA, 90 bp, Homo sapiens
aaggatctgaacaaagtctgctcaaatctcctgctgtgaaccagcagaatttttgaacagtcctggtacctgggctagcttggttccttt

SEQ ID NO: 698533 - DNA, 75 bp, Homo sapiens
tttcgatctccgccctggggtcattgtcaggaggcagtgggctttggaagactttgaaattggtcgccctctggg

SEQ ID NO: 698534 - DNA, 100 bp, Homo sapiens
aggcttttccagtttgcataatctgctaaatcctgaagatgacctcttaccagggaagattcgagacagcaatcgttcaactcttctagcaacaattcag

SEQ ID NO: 698535 - DNA, 75 bp, Homo sapiens
attcacacaccatttaccccgttttgagccgacttctatcttgcaagtagttagaaacaaacctgtggcaaggca

SEQ ID NO: 698536 - DNA, 97 bp, Homo sapiens
aacatgtgatggaaaattatactcagtggctgcaaaaagtgcgagaagatgtactaaattcattgaataacaactttcttcaaacgctaaatcaagc

SEQ ID NO: 698537 - DNA, 100 bp, Homo sapiens
aggacacacctaaacatgtggaatcccaatgccggcacaggtaacagcatcatggtcatgaaaatgaatggatccctccatcaagaattgaagattgagg

SEQ ID NO: 698538 - DNA, 100 bp, Homo sapiens
catgaaatgattgaatctggtgttatcaacttaaaagatgccacctctaaggattgcagtaacggatgctccgcagagtgtaccggagaaggaggatcaa

SEQ ID NO: 698539 - DNA, 98 bp, Homo sapiens
ttcgctgcgcgtgcacattccgatggtgtgggagagcggctgcgtggtgatcgtcatgctgacacccctcgcggagaacggcgtccggcagtgctacc

SEQ ID NO: 698540 - DNA, 111 bp, Homo sapiens
atgagagacacgaagcaaatgaagttttatactaggagacataagacatcagtcagtacatgtgaggtgtgcattggattgatccagaaagtcaggacgactccaagtgga

SEQ ID NO: 698541 - DNA, 100 bp, Homo sapiens
aaagcgttggagaggtgttaccggaacggcggcgacaagggtgttcccgaactagagtggatagaaaatgctgctgaagaacctagagtcttatgtatta

SEQ ID NO: 698542 - DNA, 149 bp, Homo sapiens
gttggccatgaagtaccaccctgacaaaaataagagcccggatgctgaagcaaaattcagagagattgcagaagtacaacaatactgcagatggagtttataaagttttcaatggaaaagataacataagtaaagttgccataatcgac

SEQ ID NO: 698543 - DNA, 100 bp, Homo sapiens
ctggctcaggcctaataggagatgtggatgaaggagcagatttactaggtatctctggagacaaagtagagatagaccctgttacgaatcagaaagccag

SEQ ID NO: 698544 - DNA, 90 bp, Homo sapiens
aaagaaacaagccgtggaataggtgtatcaagtaatggtgcaaagcctgaaaaacttctcctttcagaagaacaaagagtagactatgtc

SEQ ID NO: 698545 - DNA, 100 bp, Homo sapiens
cgcagctggcggagctggagctggagctctcggaggagagcggaacaggcgaggaaaagtagtcccttctcggcgattctgcggagggatctccgtgggg

SEQ ID NO: 698546 - DNA, 100 bp, Homo sapiens
cgaacacctccaacatgaagcttcttcatgttttcctgttatttctgtgcttccacttaaggttttgcaagatcatctctgttaatgcccatgttagaat

SEQ ID NO: 698547 - DNA, 88 bp, Homo sapiens
ctttggtctcctgggaccactcgttgctgacagtcagaaaatatctgagaaatatgggctgcccgtggagaagatagcaaagctttac

SEQ ID NO: 698548 - DNA, 90 bp, Homo sapiens
tgatattattacagcttcatatgcaccagaaggagatgaaggatggcatagtcaatccaacaataagaaaagatttgaaaactggaccga

SEQ ID NO: 698549 - DNA, 87 bp, Homo sapiens
gctcccgcaccatggaggaggacgacagctacgtgtggacgaatgtggaacctcgctctgtggctgtgttcccttggcactccttag

SEQ ID NO: 698550 - DNA, 98 bp, Homo sapiens
gcactgcccgggccgccgtggccgctgctgctggcgctgtgcggctgcccggcccccgccgcagtgcccttccgagaggccccggcgtactccaaccg

SEQ ID NO: 698551 - DNA, 103 bp, Homo sapiens
ctggatgttggtagaaaaagcaagagtttgttatatagcagagaaccagcagaaatccaccaatgtagtctatcaggcccaccatgtgagcaggaataagaga

SEQ ID NO: 698552 - DNA, 100 bp, Homo sapiens
tcatgagcatagtgatcccattgggggttgatacagcagagacgtcatacttggaaatggctgcaggttcagatgcccttgctaccagttccgagccagc

SEQ ID NO: 698553 - DNA, 74 bp, Homo sapiens
agacaagatccatggattcaccgtaaaccagggcgtctctggccgagcctctttttgtggaaaacgacagcagc

SEQ ID NO: 698554 - DNA, 98 bp, Homo sapiens
acagcaacagcaagaagaagagcccagctagcaccttcgccctctccagccaggtaccttgctttccaagtgccattgccagtcatgtggcagcagag

SEQ ID NO: 698555 - DNA, 75 bp, Homo sapiens
gtcaggttgaaaatggaagagtaattgcctgctttgattccctaaagctaatcacatatggctctgatagaactg

SEQ ID NO: 698556 - DNA, 98 bp, Homo sapiens
aaaagtccggcatttacagaaggcttttgcttcaagagtagataaatccacacagactgaactactatgctatgatgaaagaccacagcaagattctt

SEQ ID NO: 698557 - DNA, 100 bp, Homo sapiens
cttgtgcagtagaacctgaaagtatgatgtactttgatggaaacctggagaagctctttgctgagtgtcatgtaattaatccaagtaaaaagtctcgaac

SEQ ID NO: 698558 - DNA, 76 bp, Homo sapiens
tgtgcttcaacaaaggacactacatcaaggactgcccccaggctggacaacgttcatggctctcgggtagaaccta

SEQ ID NO: 698559 - DNA, 75 bp, Homo sapiens
aaagatgagggggattcttaaggcatgtggagaccccaaggcaaaaccatcctatcttatcgacaaaaacctgga

SEQ ID NO: 698560 - DNA, 98 bp, Homo sapiens
gccaccggcttccctttgtaaattgagctctgcacgctggggagtttgttggggtatggctttcccaacgaaaggctaagaattcaagaacggtctta

SEQ ID NO: 698561 - DNA, 113 bp, Homo sapiens
cataatatatgtgtctgagagtgtaacttcattacttgaacatttaccaggtttggacagaggagccaaaggccaaatttccactttcagcagttttatttcagctgttagcc

SEQ ID NO: 698562 - DNA, 111 bp, Homo sapiens
cattcccatgcagtttgggatcatccagaagcatctgaagaccatggatcacaaccggaaccgcaggtgccggtggtggtgtgcacattgagccccggtatagacagttcc

SEQ ID NO: 698563 - DNA, 100 bp, Homo sapiens
gttgggattcgtgtctggctctggaattgctactgctgcctctgtcactcctggtgaccagcattcaagcaactattggatgattatccgaaatgtttca

SEQ ID NO: 698564 - DNA, 51 bp, Homo sapiens
cgaatatcgtcatcgttagaagaaaaagcttgtggtgaaggggggcaaaaa

SEQ ID NO: 698565 - DNA, 100 bp, Homo sapiens
aattccagaaccatgactgatagacggggttttaccatgttggccaggctggtctcaaattcaaattcctgacctcgtgattcacctgcctcggcctccg

SEQ ID NO: 698566 - DNA, 100 bp, Homo sapiens
aggttatccgtctctccctcttctccaaaagcagtgatgtctggaggcaacgccctgctgcggcggctggtccgcattggggtgctggatgagggcaaga

SEQ ID NO: 698567 - DNA, 82 bp, Homo sapiens
cagaccctggagcctcagttggaagcagccgatccagcctgcggagcctgtggggcagaggcctgtgggagcaaatctgtgt

SEQ ID NO: 698568 - DNA, 100 bp, Homo sapiens
gactggtagcaaagcccccacgcccagccaggagcaccgccgaggactccagcacaccgaggatgggggctccggaggtggcgcccaggctctgagctac

SEQ ID NO: 698569 - DNA, 100 bp, Homo sapiens
gccgacttcgatgatcgtgtgtcggatgaggagaaggtttcgcgtctcgcatcttcccagaccctcgggcgcgatgtggaggagctgcctccggctgcgg

SEQ ID NO: 698570 - DNA, 101 bp, Homo sapiens
cgactgcggcgcgctgctggacgaagagctctcctccttcttcctcaactatctcgctgacacgcagattaactgctgaagtactgatcgagttctgcatt

SEQ ID NO: 698571 - DNA, 83 bp, Homo sapiens
gcaaaaagttattggagtggtttaatgacccgagcctcagggataaggaaagtgactattttaccccacagggagaattccgt

SEQ ID NO: 698572 - DNA, 98 bp, Homo sapiens
gcagcccctttcctctggaagctgtggcccccaccaagcctagcaaggctgacaaacgggctcatcataatgcactggaacgaaaacgtagggaccac

SEQ ID NO: 698573 - DNA, 98 bp, Homo sapiens
agagttcgaggtggtgggactcaccgctctggccagggtgcttttggaaactttgaagtagatctgtaccaaaatgaaacagcctgtcagagtccttt

SEQ ID NO: 698574 - DNA, 82 bp, Homo sapiens
ctaccaatcgtgaaaactatattcacaggaactgtggctgcaccatctgtcttcatcttcccgccatctgatgagcagttga

SEQ ID NO: 698575 - DNA, 100 bp, Homo sapiens
ctgaatttgggaagcagctgcctgctatgctgaaaacccctggaaacttgctaaagagctgtggtagacggagtgcaccacccttgaacctcactggcct

SEQ ID NO: 698576 - DNA, 101 bp, Homo sapiens
ggcaaaagagggaggagatgcgactcgaagcagaaaggacttgagagagacaagtttgataataaaacggtttcatttgaggagcacattaagtcagaaca

SEQ ID NO: 698577 - DNA, 82 bp, Homo sapiens
aaggaagagaggaaacgcgagttggaggagaaggtcaaggcagtggaagatgttcttggcagccctgtcattcagctatatt

SEQ ID NO: 698578 - DNA, 100 bp, Homo sapiens
ctgccctggccctgctcagcgccagcggcactggctccgccgcccaaggaatgcttctagtcacaacagacacccttggccatgactttcatgtcttcca

SEQ ID NO: 698579 - DNA, 73 bp, Homo sapiens
cctcgaggtgtacgcgctgttcagcaccgtcagtaaaatgtttatcggtggactgagctggcagacctcacca

SEQ ID NO: 698580 - DNA, 82 bp, Homo sapiens
tggcgggcgtgggaacccaggccccgccgaggcggccagtagatattcagactgacaatgatttgacaaaggaaatgtatga

SEQ ID NO: 698581 - DNA, 98 bp, Homo sapiens
gtatattactcttccatggatgccccttgataacagttttgtaccaatggctagaagcagatcgtcatggcaagagccaaggtgctgcaaatacgact

SEQ ID NO: 698582 - DNA, 51 bp, Homo sapiens
agcaggagctggcgtctctggagaaaggggatggagaagtttatgtttggg

SEQ ID NO: 698583 - DNA, 75 bp, Homo sapiens
ctgcaaagtgtccccggcaagaagggatcgcttacacctgagacgaactacagaacagcacgtaccagaggtgga

SEQ ID NO: 698584 - DNA, 96 bp, Homo sapiens
gcaaagacaacagccagaagacgtctgtgtataggagcatgctgctatgtggaatgttcagctttaacccagaagggattgaagactgtttttgat

SEQ ID NO: 698585 - DNA, 92 bp, Homo sapiens
tcaacgacgcggacatggtcatgagctttgtgaacctgggtctcggcgcggaagatggccggcggcgtggacggccccatcgggatcccgtt

SEQ ID NO: 698586 - DNA, 101 bp, Homo sapiens
cagaactccttgtaatgctgggaccttctctcagcctgaaaagggagaggcgcacctccttctccacgagcgacgtctccaagctcctcccgtccctggcc

SEQ ID NO: 698587 - DNA, 75 bp, Homo sapiens
cggacgtccaggcggccttcagcaccatcgtctcacggatacagagatactacccgtacagtgaggacgcccgcc

SEQ ID NO: 698588 - DNA, 89 bp, Homo sapiens
ctcagttacttcatcgtctccatcctctacctcaagtatgagccaggtggctttggctgaagcctaattccacagctccttgttttttg

SEQ ID NO: 698589 - DNA, 100 bp, Homo sapiens
cctggatgtcatttggaaaaacactagagacagacggctggcagatgacatttgatccagaaatcttcttcaatgttttactgccaccaattatatttca

SEQ ID NO: 698590 - DNA, 50 bp, Homo sapiens
ggacggatgatgaagtagtacagaggcaaggaggacttcttgttaatttc

SEQ ID NO: 698591 - DNA, 100 bp, Homo sapiens
ctcccccagggccgccacctctgctggttgctctgtgctttcaccttaaagctctggtctgagagtcactggagctaccagaagcatcatggggccctgg

SEQ ID NO: 698592 - DNA, 100 bp, Homo sapiens
ctctgaatgatgaatacttttactactgtgacaacattaacgggtgttttgaatgctgtatcaaatgcctggggggcattccctatgcctctctgattgc

SEQ ID NO: 698593 - DNA, 73 bp, Homo sapiens
acatcccaggatccatcatctgggccaagcaatacggttacccctgatatagaaatctctactgaagaggaaa

SEQ ID NO: 698594 - DNA, 75 bp, Homo sapiens
gctggaggcatgttcctctatatttctctggcagatatggtctcgtctacagaggactggtctttcaatagcaag

SEQ ID NO: 698595 - DNA, 75 bp, Homo sapiens
ctacagatagatgttaaggacatctgcaaatctttcaccaatgctgtggaaaatctctgttctcacaaagtctcc

SEQ ID NO: 698596 - DNA, 75 bp, Homo sapiens
cgtcacagctctggattaccttgcaccttatgccaagttgctgggcatattggattttacccatcataggcgctg

SEQ ID NO: 698597 - DNA, 99 bp, Homo sapiens
ctaagtgaagagcccctgattcctcctcctcttcctcctcgaaaaaagtttgatcatgatgcttcaaattccaagatgcagtcatcatttacatcttca

SEQ ID NO: 698598 - DNA, 82 bp, Homo sapiens
ccacagctgcctacagaaccgtcccaaaatatggcaaagaaacctattctgagccgaggaggagctggtggaggctgacgag

SEQ ID NO: 698599 - DNA, 100 bp, Homo sapiens
caggatcgtgcaggatacagcaccacccctcaattattactgggttcctatactgaacctcaagaaggcatgaagccagcccctgcagtgccgtccaccc

SEQ ID NO: 698600 - DNA, 75 bp, Homo sapiens
acgtatttaagagcctgaatattccaggcagcttgaaatccactctccagatgctaagcacacggtgatcctaag

SEQ ID NO: 698601 - DNA, 100 bp, Homo sapiens
cagagttcaaggaggccttccagctgtttgaccgaacagaccaaatacacgctgatcgatgagcaggacatcccgctggtggagagctactcctttgagg

SEQ ID NO: 698602 - DNA, 83 bp, Homo sapiens
gagctactggcgtggtagttaaaggcccagatgataggaatcccatctcatttagacaatgcagatcttcgtgaagactctga

SEQ ID NO: 698603 - DNA, 100 bp, Homo sapiens
ggccgtcatgggcaccttctcatctctgcaaaccaaacaaaggcgaccctcgaaagtctccatctgctgctgcctcttcatcctcttcctcttcctctcg

SEQ ID NO: 698604 - DNA, 100 bp, Homo sapiens
ctcagattcactccaagatagttggtgcactgcagccggaacatccagaatagaccaggcatcctctggtatcacgattccaaaacccccaaagccacca

SEQ ID NO: 698605 - DNA, 74 bp, Homo sapiens
tgactggtcccaagaattcatctctgaagttacagagtgttgccagggacggcagtatctctttgtgtgaccct

SEQ ID NO: 698606 - DNA, 51 bp, Homo sapiens
gctgaggagaaagcggcgcgcggaggtgatgtgtccaatctagatcccaac

SEQ ID NO: 698607 - DNA, 82 bp, Homo sapiens
tgcacagtcgccttttccagtttggagagacgttgtgccagaaccctgtggagcatcatgaactgggaagagtagctgagcc

SEQ ID NO: 698608 - DNA, 101 bp, Homo sapiens
gccatttatgaatgtgtggcctcaaataatgtgggagaaataagtgtatccaccagactcacagttttgcgggatggagacgagagatctggacttctgaa

SEQ ID NO: 698609 - DNA, 97 bp, Homo sapiens
accacccgagtcaatggggagaggaagagactggaatgttgacttgattcccaagttccttatggctaatgcaatgcatggccatttggaggcagtc

SEQ ID NO: 698610 - DNA, 83 bp, Homo sapiens
gccgagctgggtgccagggccgccgtggtggagagccacaagctgggtggcacttgcgaggaagttaagtcttcagagcctac

SEQ ID NO: 698611 - DNA, 100 bp, Homo sapiens
ctcagacaatgaattcacaacctcaaacccgttctccgaatgaattcccagttcctgagcagttcaagaccctatggaacgggcagaagttggtcaccac

SEQ ID NO: 698612 - DNA, 82 bp, Homo sapiens
gaaaggaagcaagcagttcagaagagccaaggaataaacatgcaatgaacccaaaaggggcactgtaaattggtctgttgat

SEQ ID NO: 698613 - DNA, 82 bp, Homo sapiens
tcctggaattacttcaatcaagtcatgcttcaccccttcctccatctgctgcacctaccactgattctacagattccataac

SEQ ID NO: 698614 - DNA, 51 bp, Homo sapiens
caccaccggcacagtgacggcttcagaggctcttgtagtgagatttctgac

SEQ ID NO: 698615 - DNA, 76 bp, Homo sapiens
cacttcacggtggactgtactgaggctggggaaggttcttccgaatgatccagtctttcttgagcctcatgaagaa

SEQ ID NO: 698616 - DNA, 100 bp, Homo sapiens
gtaggaggaagtagaagtgctgagtaagccgagaaaatgggtcacttggcctaagaccatttgtgggagaaatgatatggatggatcagatggtgatgat

SEQ ID NO: 698617 - DNA, 100 bp, Homo sapiens
ccttgcctcggtggttgccatggcaccagggacggtgactgtggttaagcagctacttacaccaagatgaagataatttattagttcaggaagaatctgc

SEQ ID NO: 698618 - DNA, 132 bp, Homo sapiens
gcaacggacactttcgcaacatcaagggagttttccggggccctctcagcaagaacgggaacaaaactctgggtgacgcagacttacgatgcaggtgcttgtatctacttctattttgcctttaactacagg

SEQ ID NO: 698619 - DNA, 100 bp, Homo sapiens
ctccaaaaagagaaagatctctctgccaataggtaaaacttccttttcctgtagatcaaatcacagatcttccaaggaacgatttccagatgatgattaa

SEQ ID NO: 698620 - DNA, 100 bp, Homo sapiens
cagaaccatcctgggctacaagacgctggccgcgggctccatcagcatggctgagctcggcaagatgtcggtgaaggagggcgcacagcgcaagtgggca

SEQ ID NO: 698621 - DNA, 83 bp, Homo sapiens
cgtgaagctcaccgacagtgccctgagggccttcgagagctaccgcgccagacagacaaagatcattccactcagcctgggac

SEQ ID NO: 698622 - DNA, 100 bp, Homo sapiens
ctgggcagagctccaccatgacgggcacctacgcgggacagttcgtgatggagaccattactgggacttccacccccaccacgtgcacagcgagttcgag

SEQ ID NO: 698623 - DNA, 100 bp, Homo sapiens
tttcctcctcggctgcgccgcgtgtcctcggagcgcggtccctgtattggtctcctgctcctagaggtctctaattaacagaagatggcaaagcccagcc

SEQ ID NO: 698624 - DNA, 87 bp, Homo sapiens
gccctattccttcacatgtaattcagaaattagggacaggtcgacgtgttgatgcccaatgttggtgagattgtgggaggctcaatg

SEQ ID NO: 698625 - DNA, 100 bp, Homo sapiens
ctattggatgctgccctctgatgtttgtggaatgaactgcttttgggaagcggcttttaggatttgaatttgttgaaatgagcagtcgtaaatcaaagag

SEQ ID NO: 698626 - DNA, 99 bp, Homo sapiens
cgccacagctgaaggctgcgagggactaagagcagagtcctcgatgggcttcctggaatattggtgtgtttatttgcatcagatgtgctggaattcata

SEQ ID NO: 698627 - DNA, 83 bp, Homo sapiens
ccgcggggttagccactgctggctgcttccagtgttcgccgagaggtcctggctataagtcaccatggcacagcaagctgccg

SEQ ID NO: 698628 - DNA, 85 bp, Homo sapiens
gtgcaggagcagctccgggtgacacgaggggactgaagatactcccacaggggctcagcagaccgagacatgggtgcccggcacc

SEQ ID NO: 698629 - DNA, 100 bp, Homo sapiens
aagactctcaactccacaggcgcctcctgccaggtctgctcctcggtcgcccacccgcctgcccgccatgtgcttgggcactgtttaaaggaaagttccg

SEQ ID NO: 698630 - DNA, 102 bp, Homo sapiens
gaccccgtcccgaccctggccgccccgagcggagcctggaggtgcccgtggttgacacgagctgtgtccccagctgttcccgtctacaatggcatcatcttc

SEQ ID NO: 698631 - DNA, 73 bp, Homo sapiens
tttttggtgccctgaagggagctgtggatggaggcttgtctatccctcacagtctgaggaagatgatattgaa

SEQ ID NO: 698632 - DNA, 74 bp, Homo sapiens
cccagagaggtgaagtgacctgtcacagaattaaaggtcttaaaacattttggaaaaagttgaagctctccttt

SEQ ID NO: 698633 - DNA, 100 bp, Homo sapiens
ggcccgctctgggcgctcattgatgtctacggcatcaccgacgaggtgcagcttctggattgatgaactcccagagggcgctgtgaagcctccagcaaac

SEQ ID NO: 698634 - DNA, 152 bp, Homo sapiens
gttacatcttggaggtgaggacgtgcctcgtggtctaaagcttcggcacaagggcccaactggaattccacttacggattcaccaaggcctgaaaagagggagaccaagtgcccgatccctggatgtgatggcacgggacacgtgacagggc

SEQ ID NO: 698635 - DNA, 50 bp, Homo sapiens
caacattcagacccatttccagtcatgactgacatagcccagagatacag

SEQ ID NO: 698636 - DNA, 75 bp, Homo sapiens
tggaatccttactgcatgttttgcacgtatgcttcttggacacttaatgattgttggcaagaaatgtgctgctga

SEQ ID NO: 698637 - DNA, 90 bp, Homo sapiens
atagtcaactgcgtggaagagaagaacttggagcgtgatgcccagaagtgtgtgaactggtctgtgaccacaaagatgagaaccgcatgc

SEQ ID NO: 698638 - DNA, 100 bp, Homo sapiens
gatctgcccatcttgttactccctagcagtgtggtaaggtggccccagcagatggcttctctgatcttgccatgcaagtaatgacgtctccatctaagaa

SEQ ID NO: 698639 - DNA, 75 bp, Homo sapiens
catttatgatgctaattcatgcagatcagttttggatacagcaggacaagaagagtttggagccatgagagaaca

SEQ ID NO: 698640 - DNA, 100 bp, Homo sapiens
agatggcgaaggtctcagagctttacgatgtcacttgggaaggagtcttacacatataaagacccaattacagaatttgttgaatgtttatatgttaact

SEQ ID NO: 698641 - DNA, 75 bp, Homo sapiens
tggaactgaaccagaggttcacaaaacaagtgtagtaggcaaacctgtcttcattaaagtccctgaggaccagac

SEQ ID NO: 698642 - DNA, 111 bp, Homo sapiens
ctctcatctcgctcggctgcgggaaatcgggctgaagcgactgagtccgcgatggaggcttgggcactgtttaaaggaaagttccgagaaggcatcgacaagccggaccct

SEQ ID NO: 698643 - DNA, 75 bp, Homo sapiens
tgagcttcttcctatttgccatgggtgcacgtcggcgacgaggacttcgtacacctgcgagtgttccaatctctc

SEQ ID NO: 698644 - DNA, 97 bp, Homo sapiens
agaattgcacttggaggacaaggagcatctttccttgaagaagtacattattgacattgtggttgaaagtacagctccagcagaagctttgaaagat

SEQ ID NO: 698645 - DNA, 50 bp, Homo sapiens
ggagcgctaagctgccggggaggttttccaacctattggtggtatgtctg

SEQ ID NO: 698646 - DNA, 83 bp, Homo sapiens
gaaaaaaatagtgaaaaggaacaggatagtgaagtgagtgaggataccaaatcagaaaatggtggctgtccagccaacagaag

SEQ ID NO: 698647 - DNA, 97 bp, Homo sapiens
tttatgttctatgctccctaatgaagatgctattaaggagaaatatggctacacacacctttctgcaggagagctgcttcgtgatgaaaggaagaac

SEQ ID NO: 698648 - DNA, 112 bp, Homo sapiens
attaaccattataccaaggttcaacaagcttatcgacttcttggaaaaacacagccatcctccgttacctgaagaacgatgggaaggtgcatttggtggttttcaacaacct

SEQ ID NO: 698649 - DNA, 98 bp, Homo sapiens
tggctcggactccgctccccgccccgccgcggccatggaggacgagcggaaaaacggagcctacgacgaaggccttcatccaccacgagctgctggcc

SEQ ID NO: 698650 - DNA, 51 bp, Homo sapiens
gctagtgtccgggatctacctggtctgaagcagcacacttctgcttttgtt

SEQ ID NO: 698651 - DNA, 76 bp, Homo sapiens
ggataagctggagtctattcctggattcaatgtcatccagagcccagagcagaggtgtgggcctcagcttcctctt

SEQ ID NO: 698652 - DNA, 75 bp, Homo sapiens
gaagcctttgaagaattaagagtgccaatgggtcatgtttggttagaaggtgacaatctacagaattctacagat

SEQ ID NO: 698653 - DNA, 100 bp, Homo sapiens
gccatgcaaggctggcgcgtctccatggagcattttgaaagcgaagcagaagccgtagaatcagcggcgagcctgttgaaagaacccacaggtgcatttc

SEQ ID NO: 698654 - DNA, 51 bp, Homo sapiens
cagaggaatttctctatggcgttcaggcattgtgtcgggcagaagatgaag

SEQ ID NO: 698655 - DNA, 75 bp, Homo sapiens
tgcccgctcacctgcgctgtgatgcctgcagagctgtggcttaccagccgagaggccccagcaacatgcagctac

SEQ ID NO: 698656 - DNA, 98 bp, Homo sapiens
tgcattttcctgatccaaacaagcttcattgttttcagctaacagtaaccccagatgagaccctttttgctcttcctgctgcatctgagcctgtgata

SEQ ID NO: 698657 - DNA, 100 bp, Homo sapiens
ggcggcaacatggcagagaccgcggccggagtgggccgcttcaagaccaagccctggtgcccttccacaacctgggccttctcatcggcctcttctcccc

SEQ ID NO: 698658 - DNA, 82 bp, Homo sapiens
gcgcggggcgacgctggctgcagggacccggtgacagcgtgagaggttcgcagaaacccttaggagaaatcttgagagtgga

SEQ ID NO: 698659 - DNA, 95 bp, Homo sapiens
ccgcgaccgagtcatggctgagacctacgctgtttttcagagtgacggatgaccgggccaagcaatctgaactgtacttagttggaatgatctgt

SEQ ID NO: 698660 - DNA, 115 bp, Homo sapiens
aaccacagacgcagcaacaacagcagccggcccttgttaactacaacagaccatctggataaaagaatcagagtgtctcaacccttgacaagaggaccaagtgcctttattccag

SEQ ID NO: 698661 - DNA, 75 bp, Homo sapiens
gcggatttagataaactcaacatcgacagcattatccaacggctgctggaaggctttcagtccagtgtaaagctg

SEQ ID NO: 698662 - DNA, 100 bp, Homo sapiens
taaagcaattgagcaggctgatctactgcaggaggaaacccagcgtttgctggcagaaccagttcctggcatcaaagccgaaccagatgagagcaacgcc

SEQ ID NO: 698663 - DNA, 102 bp, Homo sapiens
atcattatgaaaaaagactctgaggacatgggtgtcgtcgtcagcttgggaacagcaaaccagtccagctacgggggcccagccagccagcagctgagtggg

SEQ ID NO: 698664 - DNA, 83 bp, Homo sapiens
tgtaatggaaagcatatggacaggtctacgccacatcacttagtatggctgtaccgcattacattatgcctgtgaaatgaaaa

SEQ ID NO: 698665 - DNA, 100 bp, Homo sapiens
attcctgtggtgtaacctatgaaatagtatccaatataccaaagttgaggagctcaagcttgggaaaatggtgtgcattccttgtatcgtcattccagtt

SEQ ID NO: 698666 - DNA, 75 bp, Homo sapiens
ggagtagtcgctggagtccgcgcctccctggccattccaccctatggtgaatctggattgttctcgggatttccg

SEQ ID NO: 698667 - DNA, 83 bp, Homo sapiens
ggaagctgacggcgtccaagacccacatcatgaagtcggcggatgtggagaagtttggtgcacctcgatttggaggaagtagg

SEQ ID NO: 698668 - DNA, 98 bp, Homo sapiens
cgtcaccaacacccgcttctctgtggatgaagggttttgctttgtcacccaggctggagtgcaatgacatgatcacagctcactgcagccatacctcc

SEQ ID NO: 698669 - DNA, 50 bp, Homo sapiens
gcagtgcagccccaggatgcctcgcagaacttccaactctgaaccaagaa

SEQ ID NO: 698670 - DNA, 100 bp, Homo sapiens
tgctcttcgaagtgaccagcgctaacgttgtcaaggacccgccctccaagtacgtgcccactttccttgtggaactgtccagagtgctggcaaatccagg

SEQ ID NO: 698671 - DNA, 73 bp, Homo sapiens
cacgcatccatccagatgaacgtggccgagctcctgaaagaggcagtagagtcccagaggatgtgtgagctga

SEQ ID NO: 698672 - DNA, 83 bp, Homo sapiens
ccaggaggggaacactggagactgggagatggcagctgcacttcttgcggctggatcacagggatatgaagattggttacggc

SEQ ID NO: 698673 - DNA, 98 bp, Homo sapiens
gaatttccatgtcaacatagtccagctttttcctgaaaccaagtacctctggtgacagtttacaaagtggaagcattccattggcaaatgaatccttg

SEQ ID NO: 698674 - DNA, 100 bp, Homo sapiens
gccatggccgccgccgatgccgaggtctctgccgaagcatgagcgattggtggatctccatggttcagtcattgactacaactatggtggtggctccagc

SEQ ID NO: 698675 - DNA, 90 bp, Homo sapiens
gccatggaactgatccgcgagctgcatcgcgcgcccgaagggcaactgcctgccttcaactcctggttcctctgataagatcgacaaaag

SEQ ID NO: 698676 - DNA, 100 bp, Homo sapiens
actccattccaaaaaaataagaaaaacagaaaaataataattacatctgcaaagaccttatttccagaaggaagaggcccagcagaagggactcgctgag

SEQ ID NO: 698677 - DNA, 155 bp, Homo sapiens
acccacagccaggcgggacgcgcacagtccctccacgcggaaagaagtaccttcgccggtcaccggctcctgcaggctataaggaagaccagatggatgagaaactaatggaacctctgaaatatgctgaacaacttcctgtagctcagataata

SEQ ID NO: 698678 - DNA, 90 bp, Homo sapiens
cgaaggagcggaagaatggcagtgctcaaactcaccgaccagccccaaggaggcccgcctgacgactgaccagttgccatggcatcctac

SEQ ID NO: 698679 - DNA, 74 bp, Homo sapiens
tcgtgccaagcttcgagcctggaatgatgtagatgccctattcaccacaaagactacagtggtagtggaggccg

SEQ ID NO: 698680 - DNA, 100 bp, Homo sapiens
gagccagcggcccatggggacctcaaggaggggactccgaggccctgcccagggtgttcgggcctctgcatatttggcccccagaacccccacccaccga

SEQ ID NO: 698681 - DNA, 100 bp, Homo sapiens
caaccatgagatcagagctcggcaaactctctctggacaaagtcttccgggcccgccaagctgccccctgtgtgctattctttgatgagctggattcgat

SEQ ID NO: 698682 - DNA, 75 bp, Homo sapiens
cagcaaagaagacgtcatcttcttctaaaagggccgtgactcaagggagtgcatccgccccaacccttttccccc

SEQ ID NO: 698683 - DNA, 75 bp, Homo sapiens
gggcttcaacaagctagctgagagtgctgggatgagaaatttacctgcacaaggctctactctgtgcatcggccg

SEQ ID NO: 698684 - DNA, 83 bp, Homo sapiens
atccctcagatctgtggagcagatccgatggagaggctgagctgctccaggacttgggagccaacacagatctatagatttct

SEQ ID NO: 698685 - DNA, 83 bp, Homo sapiens
ccccagacaagatggacaccgcggaggaaggctctgggcgtggggaggctgagacacgggagtgcatctactacaacgccaac

SEQ ID NO: 698686 - DNA, 101 bp, Homo sapiens
catggtaaataccaagcccgagaagacggaggaggactcagaggagtcctcagatgcagatctcttggttaggccagccgaagttagaagacttaaatcgg

SEQ ID NO: 698687 - DNA, 75 bp, Homo sapiens
gtggcatcagtccccactgcggtccacggccaggtgaacaatgggggggccctcagcctcttggccttgaacggg

SEQ ID NO: 698688 - DNA, 96 bp, Homo sapiens
ggttctcgaaggcccgcggcgccccgtgctgcagcagcagctgtcgattcggcagaccgaagtcctcggcccacttctgcacctgccattactcag

SEQ ID NO: 698689 - DNA, 100 bp, Homo sapiens
cggatctcagaaggccagttcaaaggtaactataactacccaatattgcagccatggagtccatgcttaataaattgaagagtactgttacaaaagtaac

SEQ ID NO: 698690 - DNA, 82 bp, Homo sapiens
ttcccttcgctccggcccggtgaaactgaacttataatcgtcactggattaattaaagctatagagagtcccaacaaagaag

SEQ ID NO: 698691 - DNA, 100 bp, Homo sapiens
aaaacgcaagccaggctaaacagttggcaggcaaccccaaaggagcaatggtcactcaccgaaacatagtgagcgattgttcagcttttgtgaaagcaac

SEQ ID NO: 698692 - DNA, 50 bp, Homo sapiens
ttcacatcctggagatgtacgagggaaggagaccgcttaagtgatgaaga

SEQ ID NO: 698693 - DNA, 80 bp, Homo sapiens
taagggaaaatggatgtagaaaatgagcagatactgaatgtaaaccctgcagttccatgccattgcagtgtcaactaggc

SEQ ID NO: 698694 - DNA, 76 bp, Homo sapiens
ttaatggagataagggtgctctacagaggctcatcgtaggtgaccaagaatatggcccaggtgaccaaagccctgg

SEQ ID NO: 698695 - DNA, 100 bp, Homo sapiens
tacttgcggcctgtacccagaatcaatccaggatgagaagactgataaaagaagaagctagctgaacagctgtaaaatgcccaaatctgggttcacaaaa

SEQ ID NO: 698696 - DNA, 50 bp, Homo sapiens
gaggaggttcttcagtgtatgcctggatgaaaactttgacctgtcaaaaa

SEQ ID NO: 698697 - DNA, 75 bp, Homo sapiens
tcggaaaccggtagcgcttgcagcatgcttccatgaggcaggctgaacctgcagatatgcgcccagagatatgga

SEQ ID NO: 698698 - DNA, 75 bp, Homo sapiens
taatattacagctggaaatagggcacagatccagaacgccaatctgaattgccaacgcaaagcaaagcgagcttc

SEQ ID NO: 698699 - DNA, 75 bp, Homo sapiens
ttgttgtgggtttttgggtgaccaggtctttcactaccattcctacagtgattggcaagataccgtttctacctc

SEQ ID NO: 698700 - DNA, 82 bp, Homo sapiens
cgatccagcctgcggagcctgtggggcaggatagtaatgatgacactgaagatgtttcactgtttgatgcggaagaggagac

SEQ ID NO: 698701 - DNA, 83 bp, Homo sapiens
gcggcgctctgagctggtcttctggcggtggatgggactttgaacatgtcggggatcgccctcagcagactcgcccaggagag

SEQ ID NO: 698702 - DNA, 99 bp, Homo sapiens
cgtgaaaagaaaaaactgaagaaaaaacttgtcaggtctgaagaaaacatctcactttagtgcagccgtcattatccatgacaccggaaactgtgaaag

SEQ ID NO: 698703 - DNA, 75 bp, Homo sapiens
ttactaccataaagtggtcataaggttacacaggtcagcagtcggctttgattataaaggagaagtggagaagca

SEQ ID NO: 698704 - DNA, 98 bp, Homo sapiens
gcgggatgagtggctgcaggctgggggacctgtggaccctagatattgtgtttatcactgataagatctccagcttctgtcttcaagtggctttacag

SEQ ID NO: 698705 - DNA, 97 bp, Homo sapiens
agttcaagacccgacatgagggaaaagggacgtaggaagaagggcaggacctgggcggaggccgccaagacggatatcaacttacgagtgaagtggc

SEQ ID NO: 698706 - DNA, 53 bp, Homo sapiens
aacggggaggccaacgtgaagaaggagaagaaatgggtgaccgttggtgacac

SEQ ID NO: 698707 - DNA, 100 bp, Homo sapiens
cgtttggatcaggacggacgcttgcatcctgaggttagcattacacttctcccagtggagcccatgacttctgatcaggacgctaaggttgtggctgaac

SEQ ID NO: 698708 - DNA, 74 bp, Homo sapiens
tggttttcctgaagcagctggctagtggcttattacttgtgactgaaaaacctatacctgctgaacgccaccga

SEQ ID NO: 698709 - DNA, 82 bp, Homo sapiens
cgtgttcgacatcctggccgtgctgcaggggcctagaagacagttcccaggaggccgaggacgaggcatcggggctggggct

SEQ ID NO: 698710 - DNA, 96 bp, Homo sapiens
cccgaataccaccccgacgcctcagcccaaggctttgatgaactaggtggacttctcaaaccaacagtggcctctcagaaccagaaccttcctgtt

SEQ ID NO: 698711 - DNA, 100 bp, Homo sapiens
ggctatgtgaccatgtcggtgggaaaagtctttcaccctgggtctcttgcaacgtgtgagctgcctcttgccaagagtgagtggcaaaagaaactaaccc

SEQ ID NO: 698712 - DNA, 90 bp, Homo sapiens
gaagatggcaaactgtactatgacaaaagatgtactatactggcaattgctggagaagattttgcaattgttgcttctgatactcgattg

SEQ ID NO: 698713 - DNA, 82 bp, Homo sapiens
aacaagaggaaagacacacctaccaagaagccagtcaagcggccaggtccggcctctttggcctacccccgttggctccgct

SEQ ID NO: 698714 - DNA, 75 bp, Homo sapiens
gatcgctccgccaccgtcacccggctggaggacctgctgcaggatgcccagaaacttccaacttggagcacttgg

SEQ ID NO: 698715 - DNA, 74 bp, Homo sapiens
ggatttgccaagtcgatatgttgaaatagattacagcccaaattaaattcctgtacgaggaacttggacttgac

SEQ ID NO: 698716 - DNA, 83 bp, Homo sapiens
ctcgggaccggctgccatcttagtctagggactgaggagtcgccgccgccccgagtcccggtggatccataaagaacccagcc

SEQ ID NO: 698717 - DNA, 98 bp, Homo sapiens
aaaattcctactggacaagaatatgctgccaaaattatcaacaccaaaaagctttctgctaggggggaaacaggaatgtcactttgaccctgtcttgg

SEQ ID NO: 698718 - DNA, 82 bp, Homo sapiens
aggcgtccgcagctgctggctgctcatttgccggtgaccggagatcgaacaccagggggacaagctggagatggcgagagag

SEQ ID NO: 698719 - DNA, 75 bp, Homo sapiens
agacttggccaaatggacgggactattaaggagaccaagacacattccaccccagtggggggtcccataccactc

SEQ ID NO: 698720 - DNA, 82 bp, Homo sapiens
tggccttagctgtgctcgcgctactctctctttctggcctggaggctatccagctccagggccaaggcttgtgttcaatcgt

SEQ ID NO: 698721 - DNA, 75 bp, Homo sapiens
tcctaatccctagccactatggaatgtttacccttgcggaagttgcatcacttaatgacattcagccaacttacc

SEQ ID NO: 698722 - DNA, 98 bp, Homo sapiens
aagaaaaacaatcgcttcaatgatgggaaggtggatcccgccgggaggtactttgctgatatgatggtaattccctgctaagtagcattgaatgttat

SEQ ID NO: 698723 - DNA, 75 bp, Homo sapiens
gcgtctcggaaaccggtagcgcttgcagcatgaactctgcagccattctttgaaggattattaccccgagataat

SEQ ID NO: 698724 - DNA, 82 bp, Homo sapiens
ctgaaaatccgaagtgccgcggaaagtggaggttcaacttcttggggccgatggcctagagcaagatgttggtgaaactgaa

SEQ ID NO: 698725 - DNA, 98 bp, Homo sapiens
ggggccgccatggagcccgactcggtgattgaggacaagaccatcgagctcatgttgcatccaagaattgatgcccggagagctgatgaaaaccttgg

SEQ ID NO: 698726 - DNA, 100 bp, Homo sapiens
caacaactataactacaggattaactctggagtcgagagaaagaacttatgggtttcagcaaatcggtaaatgaagcacgttcaaagatggatgtagccc

SEQ ID NO: 698727 - DNA, 97 bp, Homo sapiens
attctaaatgggtggaagttgatacatgggaaagtcttcagaaggagtggaaagagactctgaaggtgctaaggcccctggatcctcctggaatccc

SEQ ID NO: 698728 - DNA, 100 bp, Homo sapiens
aatgtcatcaacatctccagcctggtgggggcaatcggccaggcccaggcagttccctatgtggccaccaagctgtttgagggcatgaaggcgttcaaag

SEQ ID NO: 698729 - DNA, 100 bp, Homo sapiens
aacaaaagctgctcagagtctcaatgaacttggacagtggtgattatcctcttaccatgcctggacctcagtggaaaaaatttcgttcaaacttttgtga

SEQ ID NO: 698730 - DNA, 102 bp, Homo sapiens
tcaatgatcgtgtcatgagaaccatacaagcatccgaactattgaagaattggctggaaaaatagaatttgaaaacgaattgaaccacatgtgtggtcattg

SEQ ID NO: 698731 - DNA, 88 bp, Homo sapiens
ttcccatgaggcaggctcttcagagatcatgaatcagacagataaaaatcaacaagaaatcccatcataccttaatgatgaaccacca

SEQ ID NO: 698732 - DNA, 74 bp, Homo sapiens
cccgcccggccagccgccccggccgggagggccaggaaggaatactgggagaatcttcggatagcctcaggccg

SEQ ID NO: 698733 - DNA, 75 bp, Homo sapiens
ggcccagctctctctgacacagaagtctcaggggatccagaactgcagccagtccttgctgggctgttcctgtcc

SEQ ID NO: 698734 - DNA, 100 bp, Homo sapiens
gtgccccacaacacccctgtggctgaagcagcctatagatatattcttgtctcatgattggccaagaagtatatatcattatggaaataagaagcaactt

SEQ ID NO: 698735 - DNA, 100 bp, Homo sapiens
atatctcgaagcgatgcggtggattcctgaggaagctcagcttgcgaggctgcattggtgttggggattcctccttgaaatcattatgtagaagttctgg

SEQ ID NO: 698736 - DNA, 82 bp, Homo sapiens
gcaggactgcgccgcgtcttcctcaagctcttggagtttgacaaggagttgtctgtctttaaggacagactgtatgaactgg

SEQ ID NO: 698737 - DNA, 100 bp, Homo sapiens
tggaagcaggactgcgccgcgtcttcctcaagtcattgaaattatgagactatcattcaaatggaagcattatagttcttcggaaccattatgatctcaa

SEQ ID NO: 698738 - DNA, 100 bp, Homo sapiens
agaactacattcctcaggtctgcgagataaacctctcataatgaaggcccccgctgtgcttgcacctggcatcctcgtgctcctgtttaccttggtgcag

SEQ ID NO: 698739 - DNA, 98 bp, Homo sapiens
tgggggagatgcaccaaccttaagattactatgcagcataacaggtaaagaggatgaatatccaaagaagcccttggggcagcttccacctgaacttc

SEQ ID NO: 698740 - DNA, 100 bp, Homo sapiens
gaatgtacagtctatgtttggagaaatggaataatcgtatcgctgatctacgtaaacaaattgaagaattgtctgaaagaaaatatgttatgtctaaact

SEQ ID NO: 698741 - DNA, 76 bp, Homo sapiens
agcagcaccatcggggagacaagcaagctcccccccaaccaagcggcagcggcggagtcggggccggcccagtggt

SEQ ID NO: 698742 - DNA, 75 bp, Homo sapiens
agagggaagacacgcggaaacagctgggggctcctatttcatgatctctcgttcactggggccagaatttggagg

SEQ ID NO: 698743 - DNA, 118 bp, Homo sapiens
cacccagaacccccaccccgagtcaaagcgctgaaatgagccccgcggcaggtcacactgcagaacagagtgatattgcaaaaagccaaattatcagtctacgtgcaaccaccattag

SEQ ID NO: 698744 - DNA, 100 bp, Homo sapiens
gccctgcgccccgctctgctgtgggcgctgctggcgctctggctgtgctgcgcgacccccgcgcatgctccagtggctgttggataattatgaaacagcg

SEQ ID NO: 698745 - DNA, 100 bp, Homo sapiens
ccctgccactgtcttgttccgaggcggccccagaggtgtggacactgccagcggctgcagccgacttggaatgacctgggagacaaatacaacagcatgg

SEQ ID NO: 698746 - DNA, 82 bp, Homo sapiens
actcagcccacatgcccgctcacctgcgctgtgatgcctgcagagctgtggcttaccagttaattggccttggtcctcacag

SEQ ID NO: 698747 - DNA, 101 bp, Homo sapiens
ttcagcacttggtctctaccagtgggactttgccagttatgatattctcagatggagtcatcagaacccactgtgaggaagtgacttctccttgaggtcac

SEQ ID NO: 698748 - DNA, 75 bp, Homo sapiens
ctcaaccttgtgggatgtgaaaactctgttactgaaggcaatgagaagcacgaccttcatgttacctcccagcag

SEQ ID NO: 698749 - DNA, 100 bp, Homo sapiens
cgccgctctgtctacaacccgaggacacaatgtttgcacgaggactgaagaggaaatgtgttggccacgaggaagacgtggagggagccctggccggctt

SEQ ID NO: 698750 - DNA, 74 bp, Homo sapiens
acacaatacccgataacacaagtgcagcctccagctagcactggacaggactcagaattcatgattgaagaaat

SEQ ID NO: 698751 - DNA, 83 bp, Homo sapiens
gtaacgagcggcggcggcggcagcgggtcttgggtcctccgagagcagcagcggaatgtatcctgtcaggtataatgtcagtg

SEQ ID NO: 698752 - DNA, 100 bp, Homo sapiens
gataattcgtgtgttacaactcacctcttgggatgaagatgcctgggccagcaagggtggttctcttcccaaagtggaagccaaattcatcaattatgtg

SEQ ID NO: 698753 - DNA, 80 bp, Homo sapiens
acaaaccctgcaggttctaagaagactcttcccggttgatcgtggattatttgagggtacctttcaacagatgtggattt

SEQ ID NO: 698754 - DNA, 101 bp, Homo sapiens
aagattgcaaggtgaataaagaagtggagcgtgtcctgaaggagttccaccaggccgggaagcccatcgggccaacagagcacttatggcaaggcatctcg

SEQ ID NO: 698755 - DNA, 75 bp, Homo sapiens
ctaaaatctccgcagctctggttcctgttgcggccggctgacaaacgggctcatcataatgcactggaacgaaaa

SEQ ID NO: 698756 - DNA, 98 bp, Homo sapiens
cctgaacctctccacaaagactcccagatcctggtgtggaaaatgtaactatccaactggatttggaagcagaattccattttactcatctcataatg

SEQ ID NO: 698757 - DNA, 75 bp, Homo sapiens
cccagccctgcctctccctgggctctgggtatgttagagcccaccaaggaaccactgaaaccactttctgctgca

SEQ ID NO: 698758 - DNA, 99 bp, Homo sapiens
gttgtcatgactatcctcctggtggttctgtataaatacaggtgctataagggatggaagaagcgagcctgtgccttggagtgtcttcggcggagccgg

SEQ ID NO: 698759 - DNA, 100 bp, Homo sapiens
cagcaacggacactttcgcaacatcaagggagttttccggggccctctcagcaagaacgggaacaaaactctgggcagcaggatgggtgtggaagcagtg

SEQ ID NO: 698760 - DNA, 74 bp, Homo sapiens
gaggcagcgaggcaagggggagatcactcccgctgcgattcagaagcttatgttcctgaggaagaattgaaggc

SEQ ID NO: 698761 - DNA, 51 bp, Homo sapiens
ctatgattccttcagataccagggactgcgcaagcaccaggaaatccgagc

SEQ ID NO: 698762 - DNA, 75 bp, Homo sapiens
gaagaagaaaggattcgttacagccagagattgaatcactgagcttcagctcaaacttgagagtgcccttactga

SEQ ID NO: 698763 - DNA, 75 bp, Homo sapiens
taagagcaaagaacactgttgttgccacaggacaaagggtggaggatatgaaagtgaaagtgcttacccaaatgc

SEQ ID NO: 698764 - DNA, 100 bp, Homo sapiens
gttttccagcacgagtggaaactctgtgttcgagctgactgtcactacagttctaatacccgatttacaattacattgaactacaaggatcccctcactg

SEQ ID NO: 698765 - DNA, 75 bp, Homo sapiens
cctgaaatacatccaggaaagacatggagattctcttaaaaagctcgagatgctgctgtgcagaagattgagact

SEQ ID NO: 698766 - DNA, 74 bp, Homo sapiens
acggcagtcccagtcctactgcacagacacagagtgtcttcaggaatttacctggctacagaaagaagatgcca

SEQ ID NO: 698767 - DNA, 100 bp, Homo sapiens
agtctgtgcagtggcacctgcgcgaagctggccaaagcctgcccagacggctcacctgtgcgggatggaacaaaagctatcatggtgaacttacttcaga

SEQ ID NO: 698768 - DNA, 98 bp, Homo sapiens
tgccaatgtgcaaagctgcagaaaccacagtggtagaggaggactggaatgaaattgaccccattaaaaagaaagaccttcatcacagcaatggagaa

SEQ ID NO: 698769 - DNA, 88 bp, Homo sapiens
cggcgtttgggctacggttgttgttggcgactgtgcttcaagcggagtggttattattgagtcgagaatttttgggaaaagtaacacg

SEQ ID NO: 698770 - DNA, 100 bp, Homo sapiens
catactcaaaggaacggagagaaccgggacccccctgcggggacccggaactgagggccaagatgggtcgccgagctcaacaggagtcagcgcaggccga

SEQ ID NO: 698771 - DNA, 100 bp, Homo sapiens
cctcagcctcctgagtaactgggattacagcaggaagctaggaaacctggcagtgccagctgatgagaagtggaaagcggtgtttgacgaatgttggcgc

SEQ ID NO: 698772 - DNA, 97 bp, Homo sapiens
ttctgcagccagtgcggagagaggctgcctcctgcagcccccatagcaggtctctgcatggattcccccagccctatggacccccacatggcggagc

SEQ ID NO: 698773 - DNA, 83 bp, Homo sapiens
cgaaagactaagcgtcccgttggccagtgcaacgaagaacggaggaagcgacacctcctgccccccgaggtctgcagtctcct

SEQ ID NO: 698774 - DNA, 74 bp, Homo sapiens
aaagtcgagtatctggtgaagtggaaaggatggcccccaaaatcaggatcctcatgaccagccaaagagaagaa

SEQ ID NO: 698775 - DNA, 100 bp, Homo sapiens
aaggatcttgtgtgctccatagtttatcaaaagagtgactcctctttcttcccagagtgtggtgattcaccatggccagacccaggaatacgtgctcaag

SEQ ID NO: 698776 - DNA, 83 bp, Homo sapiens
ccaaatggcagaggcggtaacggagagcatccctgaacggtgtcgtgaaaactacccctaaaagccaaaatgggaaaggaaaa

SEQ ID NO: 698777 - DNA, 74 bp, Homo sapiens
gggcctggagccctactttgacttcatcatcaccattgggcactcgaggctgggcgacatggagtccaatggga

SEQ ID NO: 698778 - DNA, 100 bp, Homo sapiens
tcgccgccgcgcacaaccgcacgtgcagggccaattcctgtccccccagcagcatggcatcgtgtgctgaaccctctgagccctctgccccactgcccgc

SEQ ID NO: 698779 - DNA, 126 bp, Homo sapiens
gagactcagacctctcatctgccagaatcagaaagaattcatcacactgttgacttttttgaacgaaccattctgtgcaacagccttgtgtggagttgtgctgtgacgggtagacctggactgacg

SEQ ID NO: 698780 - DNA, 96 bp, Homo sapiens
caaatagggacctggaagatggtgatatgtgtgggataaaggcatatcacacctgaaaaattttatgtggaagcttgtgatgatggagcagatgac

SEQ ID NO: 698781 - DNA, 75 bp, Homo sapiens
ttcctctgcattgctgatcttgtacttggattcagcaaggaaccttccggttctgcctgtagaaaagattgtaac

SEQ ID NO: 698782 - DNA, 100 bp, Homo sapiens
gttagcaatgcccttatgggaatttttaacttcacggagcttattcaaatggagagcacttcattttctcgtgattaattggaattcttcaaaatgtcag

SEQ ID NO: 698783 - DNA, 100 bp, Homo sapiens
accgagaccgtgaccgagagcgtgaccgagagcgcgaatatcgtcatcgttagaagggccagctctatgggggcctcaccgactgcatggtgaagatctg

SEQ ID NO: 698784 - DNA, 78 bp, Homo sapiens
tgatccttcgggacaagattcgcttctatgaggggcgcaccctacgacgcgcacaccaccggcatgaccggcgccatc

SEQ ID NO: 698785 - DNA, 99 bp, Homo sapiens
tctctcaaccatcctcatatcatcagtatttatgaagctaaattttcaggagtgaaaagaaaaagaggaaggaagaaacccctctcaggcaatcatgta

SEQ ID NO: 698786 - DNA, 80 bp, Homo sapiens
catggtacagaacaccaaagccgaactcacgcactcccgggagaaggtggagtttgtccatatgctcaatgctaccatgt

SEQ ID NO: 698787 - DNA, 138 bp, Homo sapiens
tatatcagataagcttgacattacagccaagatggtgctgtcccagagacaacgagatgaactgcccggtacaagcagagccttgacccaactgtggatgaagtcaagaagctctgcacgtccttacgtcgcaacgcc

SEQ ID NO: 698788 - DNA, 80 bp, Homo sapiens
ctgctgtgtgcggtgctgctgagcttggcctcggcgtcctcggagagagcaggagattcggatgggtcagatggctatgg

SEQ ID NO: 698789 - DNA, 76 bp, Homo sapiens
acccggcgcccagcggtagccctccttgcgcctccgattcccaggagccttggtcatcatttgatatatacacccg

SEQ ID NO: 698790 - DNA, 75 bp, Homo sapiens
acagtgatatcttcagcgaaagtgaaaccaggagttttccgtctgatgaaggttggccatttgcaaagtatcttg

SEQ ID NO: 698791 - DNA, 100 bp, Homo sapiens
tgagtctagctgcgtctggaggatatgttaatatcattaagattctgcttaatgctggggcagaaattaattcaaggatccatcaattaagggaaccttt

SEQ ID NO: 698792 - DNA, 100 bp, Homo sapiens
cctggtgcccgtggtcaggctggtgtgatgggattccctggacctaaaggtgctgctgccctgtgccctggtggcagcccccagcaccaggacctcgctg

SEQ ID NO: 698793 - DNA, 100 bp, Homo sapiens
gctggggctttgaactccgagaggaggtggaccagaacttttggaactagtgccggcggctctccaccccccagagcctaatgggaggtgactggatcat

SEQ ID NO: 698794 - DNA, 100 bp, Homo sapiens
caccgaggctgagcttgccctcttcgaccccttctccaaggaagtgctgttccctcgtcacaccaatgccagtgctcgagacaacaccatcaacctgatc

SEQ ID NO: 698795 - DNA, 99 bp, Homo sapiens
tcaatccagttccaaggactccacgggaagactcactccatagttcatggccccgtgatccagagtccctgctggcgccttcgagtggggcaggctgag

SEQ ID NO: 698796 - DNA, 98 bp, Homo sapiens
ttcttcctcaacaccagcaccgcagatgttgtcaaggtggcctaccaggaggccaggggtgtcgccatgagacgttttctttggaccaaagatctctt

SEQ ID NO: 698797 - DNA, 75 bp, Homo sapiens
ctacctaaaattgatctcattgctattgcagactttgcagctgatctgaagaagacacttgaatcatgggtgacg

SEQ ID NO: 698798 - DNA, 83 bp, Homo sapiens
tgccagctgccgaggcgttcggtcctgctgttgcggccgctgccccagggctgcggggacggagccttcacgtaaatgggtcc

SEQ ID NO: 698799 - DNA, 90 bp, Homo sapiens
aaattgatgtacttctgcaacagtctccctctccctctctttccaccgtctccctctgatgccgagccgaagctggactgtgctgccgcc

SEQ ID NO: 698800 - DNA, 101 bp, Homo sapiens
gcgagctgagtggttgtgtggtcgcgtctcggaaaccggtagcgcttgcagcatggtatggcccatctcctgtacgcttggagcgacctttggctacgtgg

SEQ ID NO: 698801 - DNA, 89 bp, Homo sapiens
atgtgagaaaagggggaaaatgcccaggaggaagcaggagcagcccaagcgccttccctcacatgcacaaagcagggtcatcagaagcc

SEQ ID NO: 698802 - DNA, 98 bp, Homo sapiens
tggaagagattgggttcttggtgcttggcatgagggaatgtatcctgtcaggtataatgtcagtgaatggcaagaaagttcttcatatggatcgaaac

SEQ ID NO: 698803 - DNA, 100 bp, Homo sapiens
cagttggtattgctcaacaaggagaaggaggaatatgatgaagaatgggctaagaaaattcagagtgaaaagtttcgctggcataactctcagtggctgg

SEQ ID NO: 698804 - DNA, 117 bp, Homo sapiens
ggcactctgcccttccagagcaagcatggagcaacaggatcagagcatgaaggaagggacaatgcagatcttcgtgaagactctgactggtaagaccatcaccctcgaggttgagcc

SEQ ID NO: 698805 - DNA, 100 bp, Homo sapiens
tgtgaagaaggcagtacattttgggttaccggtataagcgtgtcttttcagttggaactcatgcgattactacatataatcccaataccttagaagtaac

SEQ ID NO: 698806 - DNA, 103 bp, Homo sapiens
cacagtggtggaggagtcccagggcaccccggaagaggagtctccagccaagtgacagagctgaatgaacctctctccaatgaagatcgaaatctcctctctg

SEQ ID NO: 698807 - DNA, 83 bp, Homo sapiens
ccggagctgggcgcggattcgccgaggcaccgaggcactcagaggagcaaccatgtccaagggacctgcagttggtattgatc

SEQ ID NO: 698808 - DNA, 100 bp, Homo sapiens
ggagcaaccccaagtcaccacaaaaacctatcgttagagtcttcctgcccaacaaacagaggacagtggatatgatgtttcagcttctccgaggtctgga

SEQ ID NO: 698809 - DNA, 75 bp, Homo sapiens
cttcgtgccagcctcctcccccatgtaccacacctgtgtggccttcgcctgggacctttcttggccaggactcgc

SEQ ID NO: 698810 - DNA, 108 bp, Homo sapiens
gcactggcaagtgcagcgcctgtaatgtttggcgagtctgagggcctttctggttctctagttcaggaaccttttcagctggctactgagaagagagccaaagagcgg

SEQ ID NO: 698811 - DNA, 100 bp, Homo sapiens
ctattgctgggattttgaggaggggcccagatcattgatctgatgatgctggtcatcgatgtgaccaaggggatgcagacccagtcagcggaatgccttg

SEQ ID NO: 698812 - DNA, 75 bp, Homo sapiens
tatgtctatcaacacgcatcttggcaaaggcactggtgaggtggattgatgatgaatcttctggcacacctggag

SEQ ID NO: 698813 - DNA, 90 bp, Homo sapiens
gcaggaggtcggagcagctccgcgaggaccgcaccatcccgctcattatcggaagttgcacccatcaaatgggtcagattgccatcgtct

SEQ ID NO: 698814 - DNA, 100 bp, Homo sapiens
atcttttatacactcttagtgctgtccagtcttccctgcgttgactatttggaatgtgatctgggacagacagaatttacccctcctggttgcatttctt

SEQ ID NO: 698815 - DNA, 83 bp, Homo sapiens
cccaaccccaaaagagccaaactcagctcgcccggtttctcggcgaatgacagcacagaccaggtgataggtttgatcgagac

SEQ ID NO: 698816 - DNA, 102 bp, Homo sapiens
cacgaatctgcccacccctcctgtaacccagcctgtttcacttcttgggttatatcctgtgttgtgacctcatggtttaagtgggaataaagatgagtataa

SEQ ID NO: 698817 - DNA, 107 bp, Homo sapiens
gttcatcggctcccagagaaaaatcggcagatgttacagctgctcatgaaccacttggcaaatttggaaattttagcattcaggtgccaggaatgcagatgggacag

SEQ ID NO: 698818 - DNA, 75 bp, Homo sapiens
gcggccccctggagggggcagtcccgggagaacctgcggcggccggagcggccctgagacgggagttaaaggaga

SEQ ID NO: 698819 - DNA, 50 bp, Homo sapiens
ggtcttaaaaggttctggaaagcagatcacactgtgaattaaccttggag

SEQ ID NO: 698820 - DNA, 100 bp, Homo sapiens
cctctggaactgccaccattgctgaacggagaggtagccatgatgccccacttggtgaatggagatgcagctcagcagaaaggggagtgtgtttgcctac

SEQ ID NO: 698821 - DNA, 100 bp, Homo sapiens
cccggggcgcggcccgtagctacgacctgtcagacatcacccaggctggaaccagtgaccttccgggatgtggctgtggactttacccaggaggaatggg

SEQ ID NO: 698822 - DNA, 74 bp, Homo sapiens
acgcagccagaatcctttagcagtgggtcccaggacgtgcaccagaaaagagcgagaaccctctgcccacagtg

SEQ ID NO: 698823 - DNA, 88 bp, Homo sapiens
atccggatcgcatggaagacgcagcctggccgcgctctcccatttcagctcctggcatcagctctattcaaatctggttcagatttta

SEQ ID NO: 698824 - DNA, 95 bp, Homo sapiens
tgaagatactacaaaatcagtttatcaaattgagctccttgatttcaaaggagaggatttatttgaagatggaggcattatccggagaaccaaac

SEQ ID NO: 698825 - DNA, 98 bp, Homo sapiens
aggatgtagcctcagaagtgaatttaacagcatataaaccaaaatatttcacttctgctgcaatgggaacatcaacgagtctcactctctcacccagg

SEQ ID NO: 698826 - DNA, 100 bp, Homo sapiens
caaattctttggaaaagatattagcacaacactcaatgcagatgaagcagtagccagaggatgtgcattacagagaaccatggagtctggcagtaccgcc

SEQ ID NO: 698827 - DNA, 100 bp, Homo sapiens
taagtagctttagcgatcgggagacagccgggcgctgcaagaatcatttgctgtttcaaatagagaactgtgcgatgatgagaaagagttcatacatttt

SEQ ID NO: 698828 - DNA, 100 bp, Homo sapiens
aggatttggtctccacggtcaacgtggtatactcgcagacaacccaaccggtatacaatggtgggccatgcacagacacagctcatgtctcattaatcac

SEQ ID NO: 698829 - DNA, 101 bp, Homo sapiens
ttgcctgttattcctgtgactggtcctgtggctcagctctacagcttacctcctgaagatcatccaattatgatgggttttgaaccccttgtgaaccagag

SEQ ID NO: 698830 - DNA, 75 bp, Homo sapiens
ctgaaacagaaattctggaacacctatatgcctcttagcaaatatccggctgtgatcaatgatatttcattctgg

SEQ ID NO: 698831 - DNA, 147 bp, Homo sapiens
aggagagggaagaccagctgccttcatcaggaactcacaggtggcatttctatggggaatcagcacaagagataattggttctacaaatcttataattctgctagaggatgaagtctttgccgattttttcaacacatttctttccc

SEQ ID NO: 698832 - DNA, 82 bp, Homo sapiens
ctctgaactgactgccccgcatcaccggagcgtcccagctgcgaggagggagtgcatccgccccaacccttttccccctcgt

SEQ ID NO: 698833 - DNA, 96 bp, Homo sapiens
tatattttggctgtgcctgtgttaaacctaaatcttcaacataataagatatttgtgaaccaaggcacagatgaggagagcatcctgactctgttg

SEQ ID NO: 698834 - DNA, 98 bp, Homo sapiens
tttggagcaagtggagagccagaaaaggatccagaactggagtggaagcatcatggcagaacaggatgtggaaaacgatcttttggattacgatgaag

SEQ ID NO: 698835 - DNA, 83 bp, Homo sapiens
cttgtcctggctcttgccctcatcctggttctggaatcctcagttcaaggaaactactaaagttcctggggaagcaaagtaga

SEQ ID NO: 698836 - DNA, 90 bp, Homo sapiens
caactcacagcctgaaaatgaaaaggaagcttcaggtggagacagcccgaaggttgcaaaggagtttggcttccaaaataatggcttctc

SEQ ID NO: 698837 - DNA, 90 bp, Homo sapiens
gttttggaactgtcaggtacctcaaagcagtttgccagatccggcccggtgcctgggttccaggaggacacgctgcagttggccttcatc

SEQ ID NO: 698838 - DNA, 83 bp, Homo sapiens
ccaagagggtgttcgactgctagagccgagcgaagcgtgtttgagaagtcccccctgcgggtgaagaacttcgggatctggct

SEQ ID NO: 698839 - DNA, 88 bp, Homo sapiens
agaactggagacccttttggctaaactcatccaaacctgtcaacatgttgaagaggagcgagctgggctggaggcctcactcctggca

SEQ ID NO: 698840 - DNA, 83 bp, Homo sapiens
ctcccccctcctaggcgggagggggggtggtgcgcacgcccccgaggacgcagcataagctgtggccatgactactgaagtag

SEQ ID NO: 698841 - DNA, 100 bp, Homo sapiens
tccagtatggtggttatagatgtaaaaatgctatcaggatttactccaaccatgtcatccattgaagagatgttggagtccggggtgacctggtctcagt

SEQ ID NO: 698842 - DNA, 75 bp, Homo sapiens
cagacgggagactgaacttgagggaacctcagaacctgttctggatccacagcaaatccaagcatttgatcagct

SEQ ID NO: 698843 - DNA, 96 bp, Homo sapiens
tcagccctcagtggatttggttcatcagatgttgttattcatgaggaccaatggattggcgagacagtactacaatcaacatttagcagtcagtta

SEQ ID NO: 698844 - DNA, 100 bp, Homo sapiens
ggcagagcgtgtctgaggtggtgcgcggctccgtgctcctgatgaacacaatgacgtacagaagaaaacctttaccaaatggataaatgctcgattttca

SEQ ID NO: 698845 - DNA, 100 bp, Homo sapiens
gcagaggggccactgctgggccctgaggctgcaccaagtggcgaaggagccggctccaagagcgccgccctgtgctgggctgccgggagctcgtcttcag

SEQ ID NO: 698846 - DNA, 100 bp, Homo sapiens
ccctccggaaggacattgccaactacaacaaggaggatgacattaaaaagaaggggagcgttcaattccaaacagctgctttatttggagaaataccgac

SEQ ID NO: 698847 - DNA, 75 bp, Homo sapiens
ttgtcttaacttccaaacatcatgaagcttggagttatgacctacagtgatacagggaaactaagtccagaaacc

SEQ ID NO: 698848 - DNA, 100 bp, Homo sapiens
ccgagccctgcggcgggcgggagttgctctaggtcgtaaccagcctttgaaaaaggagaaaccaaaatggaaaagcgattatcctatgacagatggacaa

SEQ ID NO: 698849 - DNA, 89 bp, Homo sapiens
aaaattataactttttgctccagcttcaagaggagctgctgaaggaattaagacatggttcaacagagtttggaaaagatttctaaact

SEQ ID NO: 698850 - DNA, 75 bp, Homo sapiens
gctgtttgccctgaacatcatgaattcccaagaaggagatgatggatgcaataaaaggaacaatgacagaaatat

SEQ ID NO: 698851 - DNA, 49 bp, Homo sapiens
tggaaaagacaattgatgacctggaagggaaacactactatgaagtatc

SEQ ID NO: 698852 - DNA, 51 bp, Homo sapiens
ttcttcagcctccttgtcctagagtttattaaccacttaacctctcagaac

SEQ ID NO: 698853 - DNA, 75 bp, Homo sapiens
ctcaattcccatacatgcactagaggtctgtgctgccaacatagtctcacaagatggtgaacagaatggtctcat

SEQ ID NO: 698854 - DNA, 113 bp, Homo sapiens
cacgccatgagggccctgtgggtgctgggcctctgctgcgtcctgctgaccttcgaacactctgctccagccaaggtggtgagggcagctgttcctaaacagcgcaaaggcag

SEQ ID NO: 698855 - DNA, 98 bp, Homo sapiens
cggcgaccactgcggatctcgggacccattccaacaatctcgtaaaacatggtggattactatgaagttctaggcgtgcagagacatgcctcacccga

SEQ ID NO: 698856 - DNA, 51 bp, Homo sapiens
ccggtttgacgcacacggcaccaaactactattgggaagaagttacctgca

SEQ ID NO: 698857 - DNA, 75 bp, Homo sapiens
cacctgagtcccggggtaggggtctcccgcgagacctgcctagagctggaacgttacctccagagcgagccctgc

SEQ ID NO: 698858 - DNA, 97 bp, Homo sapiens
ggaaggcacatgaactgaagcttctgtcagaatgccaatacaagcagttggacactgcccatctctaagataagaacctggaaaggggactctgttg

SEQ ID NO: 698859 - DNA, 98 bp, Homo sapiens
caagacctgccttctcatcagctacaccaccaacgcctttcccggagagtacatccccaccgtgaggcgatcgagatcggatgacagcaaatcatgaa

SEQ ID NO: 698860 - DNA, 73 bp, Homo sapiens
tgaagagacatgagatcatggtggccaaacccacagaccatgaaatggaggctcagggggtgaagggactgat

SEQ ID NO: 698861 - DNA, 100 bp, Homo sapiens
ctccgtattctctgaagcctggaaacgaggcactcagttggaagagtccagcaagacgttggaacttgccaggaatccagcaatgatgcaggagatgatg

SEQ ID NO: 698862 - DNA, 50 bp, Homo sapiens
cgggccgactccatcatccacatcgactgtattggtgatcacgtaccgag

SEQ ID NO: 698863 - DNA, 100 bp, Homo sapiens
tggaggggtctgtcgggagtcctgccgagaaggacgggggacttgggggcctgtttctgccagaagacaagtggacccaagtggagagattgtggaactg

SEQ ID NO: 698864 - DNA, 89 bp, Homo sapiens
ccaaaccaccggcacagagcaagaataaatactgactttgagtaacggccttgagatggagtctcgctctgtcacccaggctggagtgc

SEQ ID NO: 698865 - DNA, 75 bp, Homo sapiens
agcatcctagcagccttctccaaagccacatacccatctctgacagttagagccgatatcactggaagatattca

SEQ ID NO: 698866 - DNA, 75 bp, Homo sapiens
cgctgggttggacctttacctgtggaggcaacactggccaagaagaggaaaggaatacaggagtttccagaaaat

SEQ ID NO: 698867 - DNA, 75 bp, Homo sapiens
gcagaagatgaagctttgagtaacattgccagagagcaatgatcgtgcgcttcctgaccaagagattcattggag

SEQ ID NO: 698868 - DNA, 89 bp, Homo sapiens
gtgcagaacagattgttgccaaaattgaagaagtattgtatgatctcgtgaaaccttgagagaaactgaatgacgaatgaaactattgt

SEQ ID NO: 698869 - DNA, 100 bp, Homo sapiens
ctaatgatggagcagaggtcgcagatgctgaagcagatgcagctgtccaagaacgagcaggagcgagaggtggccctcatgacactgacgctcttcccgg

SEQ ID NO: 698870 - DNA, 74 bp, Homo sapiens
cacagaggctcagaagcaagtccagagctccttaataagcatttatagtcagtttttggcagcaatagaatcac

SEQ ID NO: 698871 - DNA, 100 bp, Homo sapiens
gggacgtgccacccccaggctttgagcacatcaccccaatgcagtacaaggccatgcaaggcctgcactgcccaaagtcttggaaacttgctggatatga

SEQ ID NO: 698872 - DNA, 82 bp, Homo sapiens
ctgctttccactcggctcctgtcgtccgttctctcaggctcccgttcaggctgaagctcagggccctgtctgctctgtggac

SEQ ID NO: 698873 - DNA, 100 bp, Homo sapiens
tcttcacaatccgagaaaaagatcccaagaatctcgagaatggagctcttcagccatcggacttggacagaaataagggggaaggatttgaaagaacagc

SEQ ID NO: 698874 - DNA, 100 bp, Homo sapiens
gggccactcgcctcacctgtgcgtgcagcgcctcgcgcgccctgtccggctgcggagatgagcgaggtagagtacagagagatggatgaaagcttggcca

SEQ ID NO: 698875 - DNA, 96 bp, Homo sapiens
accatgtcagccttcccagtagctgggaccacagaagaaatatttgccattgctaaggaattgctaaaaacagaaattgatgctgattttccacat

SEQ ID NO: 698876 - DNA, 100 bp, Homo sapiens
caccccgacggcagtccatgacggtgaagaagggagagggtgggaaaccccgtaaacaccggaaggatcggctacaagatttaattgatataggctttgg

SEQ ID NO: 698877 - DNA, 90 bp, Homo sapiens
tgcgcaatatgtttagccaccgtcttcctgtgcacaggaagtatgacctcaagatttcaccacccaatcctcagtcctttggaaagcagt

SEQ ID NO: 698878 - DNA, 90 bp, Homo sapiens
gggaggatgacggagctgcagtcggcactgctactgcgaagacagctggcaggtcagcccaaggccaaccccactgtcactctgttcccg

SEQ ID NO: 698879 - DNA, 75 bp, Homo sapiens
agtctttccaaaaggtcaaggttcacaagaggtcctgctgtactagccaccaaagcagctgctggtactaagaaa

SEQ ID NO: 698880 - DNA, 76 bp, Homo sapiens
cctgaatacatgatttaaacaagagatttccacagaagatccccaggggagaactgccagcacctcctggcccgag

SEQ ID NO: 698881 - DNA, 100 bp, Homo sapiens
gcccctgcgttgtaccatccgcctgtgggacacctaccagatggtcatccagactcagagctctctctacagagaggaaattctccactgtgcacaccca

SEQ ID NO: 698882 - DNA, 100 bp, Homo sapiens
gtgaagttttcaagtacaatcgaaggcctgcagtcctccatgaatgccatgggctccctttccgtcctgtcgccggaccgggtcctcccacagctcatca

SEQ ID NO: 698883 - DNA, 100 bp, Homo sapiens
ctgatccaaacaagcttcattgttttcagctaacagtaaccccagcccatcacctcttcatgaccactgcctgccaggaggctaactacggtgccctcct

SEQ ID NO: 698884 - DNA, 100 bp, Homo sapiens
agcaaaagcagctggaggaggctgaggaggagaggacagaggtgcctggggcaacctccaccttgacggttccaggttgcaatgaatgtgtatgagttat

SEQ ID NO: 698885 - DNA, 75 bp, Homo sapiens
agacacagtctccatcatcccagagggccaagatcagtcagggaaccaaggtcccggaagaaaagacgaccaaca

SEQ ID NO: 698886 - DNA, 100 bp, Homo sapiens
gaagaagagatgaatgtatcagtgtgtggcctgccacggcagagacaacgtgtgtaccccaagtgcacatggctgaccacccctaaaagcacctggcccc

SEQ ID NO: 698887 - DNA, 98 bp, Homo sapiens
cggacgagagctccgtgcgggtggctgtcagcttcagacagcaaagtcctgacatgtgcagccgtgtggaggatgccgaaggaattggaatcaggcag

SEQ ID NO: 698888 - DNA, 100 bp, Homo sapiens
gcggagcttcgccaaggctggcgcagtcggttattcagcttctcaaggctggaaaagcgaaggaagtttcctacaatgcactagcctcacacataatctc

SEQ ID NO: 698889 - DNA, 83 bp, Homo sapiens
agaccactcatcctgtcgaatagagcgtttcctgcaggttcaagaagacgtggaagctgcgggctctgaaggaaggcaagaca

SEQ ID NO: 698890 - DNA, 75 bp, Homo sapiens
gagcacttcaacaacatgtcctactggtcagtgaaacatgacgacttcttcccttacgcggatggcccccaccag

SEQ ID NO: 698891 - DNA, 76 bp, Homo sapiens
attccacagagtttaggccaaatgccccagttcctctggttagaaaatggatttctgactggaatctcaccactga

SEQ ID NO: 698892 - DNA, 51 bp, Homo sapiens
agcgcaatgaggcgggcagcactgcggaaggatgtgcccgtggaacaggtg

SEQ ID NO: 698893 - DNA, 75 bp, Homo sapiens
aaggagcagtagatgatgatgtagcagaaggattgtgcagactggtgcttaaaatggaagtcgatattaatggag

SEQ ID NO: 698894 - DNA, 100 bp, Homo sapiens
gctcaagttgctactcgggacgctgcacctcccgcgccgcacggtggacgaggcctttgcccagtttgatgctgagggtgatgggacagttgatgccgag

SEQ ID NO: 698895 - DNA, 86 bp, Homo sapiens
tggctctggcacggaaacacccgtaccttacccaactctactgctgcttccagaccaaggctgaccaactgactgaagagcagatt

SEQ ID NO: 698896 - DNA, 90 bp, Homo sapiens
agaggctgctggagctcgtgtttggacgcgtaaagcttcagcgactgaaggagtgtggactttttgaatttcaagaacagtaaagttgga

SEQ ID NO: 698897 - DNA, 100 bp, Homo sapiens
atgcccctgccggagatccctcagccctggctgaccctgtattcagtggatcagctggcaccacccaaatagataaattggcccatctggtcttgtggcc

SEQ ID NO: 698898 - DNA, 83 bp, Homo sapiens
gcagttcatcacatcattcatgattttcagattatagcatttgatgagctgaagactgattacaagaatcctatagaccagtg

SEQ ID NO: 698899 - DNA, 83 bp, Homo sapiens
aaaatgcaaaaaaggaggccaaagactttaatgatcaagtctcggcctctggattatacctttgttcctcgaacttggatctt

SEQ ID NO: 698900 - DNA, 75 bp, Homo sapiens
gcctgcccagacggctcacctgtgcgggatggaacaaaaggtcagaaagcaacattgaatgcagaagaaatggcg

SEQ ID NO: 698901 - DNA, 96 bp, Homo sapiens
gtggaaggcgctgattcccagttctcagtgatttgctgtcctctgaatacatagagagacacattgaacatggaggcaagactgtggaagttaaag

SEQ ID NO: 698902 - DNA, 100 bp, Homo sapiens
tgaagatgaagatgcacatgtctgggaggataattgggatgatgacaatgtagaggatgacttctctaatcagttacgaaatgcactcggtgatggaaag

SEQ ID NO: 698903 - DNA, 50 bp, Homo sapiens
aagattgtccccattgccatccaggacgcgtgaccaaaaccaaagacggc

SEQ ID NO: 698904 - DNA, 48 bp, Homo sapiens
ggggtgccagaaggaaagcatagaccttcacggcatggtgcaactccc

SEQ ID NO: 698905 - DNA, 100 bp, Homo sapiens
gaactcctagctcatttcgacagccttttgcacgtgcattatttaatcacatagacaagtcaggattgaaggatagttctgtcgaagaactcaagaaaag

SEQ ID NO: 698906 - DNA, 83 bp, Homo sapiens
ctgctctgggaccggaggagacatcggcctctgcaggcttgccgaagaagggagggcaaactctttgattctacaatagctga

SEQ ID NO: 698907 - DNA, 100 bp, Homo sapiens
aatacaggaacagaaatttttatgaactgagccctcacatggcatttttggtcgaagagagctgaagtaatgagaagacatcatggaggcccagtcccac

SEQ ID NO: 698908 - DNA, 101 bp, Homo sapiens
aacgggaccttggccagttacccgtcagatcactggtgaaaggtgtagcagtcactcggcctacacccacagcatcgaccttgtgaacccagcgacctgac

SEQ ID NO: 698909 - DNA, 100 bp, Homo sapiens
attccacccaaatcctcttctccaagaaggctgctctttggcgtaaattgcaatcgattagggatcgtttctcagaatcaagttagaagtgagagttcag

SEQ ID NO: 698910 - DNA, 88 bp, Homo sapiens
tcgatgccgctgaatgggctgaaggaggaggacaaagagcccctcatcgagctcttcgtcaagagagaactcgatgccaccgcaacgg

SEQ ID NO: 698911 - DNA, 100 bp, Homo sapiens
acatattccagtaatggtggatgaagttgttcattgtttgtcaccacaaaaaggacaggtggattcaccaatgaacttgaagcatcctcatgacctagtc

SEQ ID NO: 698912 - DNA, 145 bp, Homo sapiens
aaggcaagaccgaattcagaaggatatcgacgtcgtgatccagaagtccagagctgaggactgcctgtttgcaggtgtcatggagaaactccagctgggcccagagattctgcagcgggaaaatccaaggcttatttatgccagg

SEQ ID NO: 698913 - DNA, 82 bp, Homo sapiens
ccgccctgggccgggccccaccggacgatgccactgccgccaggagccctgtaacatcagccatcgtcaaccccaccgtgtt

SEQ ID NO: 698914 - DNA, 50 bp, Homo sapiens
ctgtggtcctgggtaccatgggctttcatgagaaggacaagaagccatat

SEQ ID NO: 698915 - DNA, 75 bp, Homo sapiens
gtggatgtcatcgagaagaacgagagcgtttctgatgaagaattgaaaagaagagtagctgaggagctggcattg

SEQ ID NO: 698916 - DNA, 100 bp, Homo sapiens
gccatcaccgcatataagaagtacaacaaccggtgtctggacgcagaaaaatatggctcaggagactaaccagaccccggggcccatgctgtgtagcaca

SEQ ID NO: 698917 - DNA, 75 bp, Homo sapiens
tgccaggagtgttcaagatgctctctctggaccgatcccactgcaaggcatctttacatatgtgattatcataaa

SEQ ID NO: 698918 - DNA, 100 bp, Homo sapiens
cacagataccgtttattaaaagagctgtggctccaataggagctctgaacccaaaaagagcagcattcttcgctgagcgttatgaatcatgggaagatga

SEQ ID NO: 698919 - DNA, 100 bp, Homo sapiens
ttcggctttggcgctcggggtgactcttctcaaatgccttctcatccccacatagattttttacccagatctccaccttggctgatgtgcaggagaatgt

SEQ ID NO: 698920 - DNA, 78 bp, Homo sapiens
actctgggattcagacaccgcaagctgctttcggaagggcttcaggaggggtaatctatgccagcaattatgacaatg

SEQ ID NO: 698921 - DNA, 101 bp, Homo sapiens
gtctaggagagcatttgtatgttatggtgaatgccaaatttgaagagcaacttatgactctcatctctgctgcacgagaatatgagatagagttcatctat

SEQ ID NO: 698922 - DNA, 50 bp, Homo sapiens
aaccacgggaccctgcaggaagctgaggtctatgaaaattatcctactta

SEQ ID NO: 698923 - DNA, 100 bp, Homo sapiens
agtcaagacgatcatagtcactgatcaacctctagaatcccgtagactctgcaacaagccaattcagagcttgcccaacatggacagcatttttagtgag

SEQ ID NO: 698924 - DNA, 100 bp, Homo sapiens
tggataacgacaagaaaaacaatcgcttcaatgatgggaaggtggatcccgccgggaggtactttgctggtctggccgtgggcctgggcttcggggcact

SEQ ID NO: 698925 - DNA, 100 bp, Homo sapiens
gctgcccggagttccgctcctgcgggcttagcaggaaagggtgcctaagtcgtattggctgctatgtgaccatcttccaaaacatttccaacttgaggga

SEQ ID NO: 698926 - DNA, 100 bp, Homo sapiens
ctgatgtcaaatcatggacgggatgttagcaattcaggcctgtccgactccccaggttaaccagcttcgtggcatcctcaagcttctgcagctcctaaaa

SEQ ID NO: 698927 - DNA, 75 bp, Homo sapiens
gttttcttcagcgcccaggatgcagccggctaagttttccaagagataacttcaccaagatgtccagtgataggc

SEQ ID NO: 698928 - DNA, 88 bp, Homo sapiens
cggagcggcgtcccctgcagccgcggaccgaggcagcggcggcacctgccggccgaggacatggatttgattgacatactttggaggc

SEQ ID NO: 698929 - DNA, 82 bp, Homo sapiens
ccgggaggaaggaacgaggcaaggagctaaagcagcgtgcgttcagccctgggatacctgaaaaaagcggcagtctgcaacc

SEQ ID NO: 698930 - DNA, 98 bp, Homo sapiens
ctttgctgacctgataatgaagaattattttgcaccactggatgttgtttactgcgcggagacccacatcaagggcttcacactgaacgatgctgcca

SEQ ID NO: 698931 - DNA, 75 bp, Homo sapiens
accaaagtacctactatgtgtgtggactggagtaacatcagacaactcttcattagtgccagcagtagttcccaa

SEQ ID NO: 698932 - DNA, 75 bp, Homo sapiens
tatgaagagacacagtatggtagccacacccccaggtgctgaccttaaggaaagagccaaaatgagttccagtga

SEQ ID NO: 698933 - DNA, 100 bp, Homo sapiens
ttgttggacactgaagaagggacggggatttctcctcctaatctgggcctcttgtcatggctttacaggaagtatggtgctggcatctgcttggcttcta

SEQ ID NO: 698934 - DNA, 82 bp, Homo sapiens
aatcaagctgggccggagaaatgggcttcacctccccagagagactcaggaagacaagatcgcagaggaaggtgggcggcgg

SEQ ID NO: 698935 - DNA, 75 bp, Homo sapiens
ccgtcgtggaagcaggactgcgccgcgtcttcctcaagcgctcctggttgcagccagaatgcatgacttcaggag

SEQ ID NO: 698936 - DNA, 100 bp, Homo sapiens
caggtccaaccacgctggtataccctcaaacccctcagacaatgaattcacaacctcaaacccgttctccgattacactagatgtgttggctgatatggg

SEQ ID NO: 698937 - DNA, 82 bp, Homo sapiens
tggaggcacatctcaaaaacagggggatatgagactttctactcggaatatcctgagtgttgcgtggatgtaaaacccattt

SEQ ID NO: 698938 - DNA, 74 bp, Homo sapiens
gaagtttctcacagactgaactgctcccgagagaccacatagcccacatcatagagctgctaggcagtattcca

SEQ ID NO: 698939 - DNA, 82 bp, Homo sapiens
cggctcagccccatcatgctggatggcctactgccagcatattggggtggagttcatgttcatcaatgacctggagcagtgc

SEQ ID NO: 698940 - DNA, 100 bp, Homo sapiens
gcggcgccaccgctcgccctccagcacccttacccttctgaagaacagaaaaagcagttggcacaagacacgggactcaccatccttcaagtgaacaatt

SEQ ID NO: 698941 - DNA, 76 bp, Homo sapiens
cccgggagcaggagctgggcctaggtctgcgccctgatctgccgacaccccaggccatcgagccccaggccatcgt

SEQ ID NO: 698942 - DNA, 99 bp, Homo sapiens
gcgaccacccctacattgtgaagctcctgggagcctactatcacgacgggaagctgtggataagtaatggaacatcatctgtgatcgtctccagaaaga

SEQ ID NO: 698943 - DNA, 82 bp, Homo sapiens
gtgaaccctgaagtcggtgtctgctgcgttcacggcaggattcggttaggcttgttagcagtggcacaagatcttacagagg

SEQ ID NO: 698944 - DNA, 74 bp, Homo sapiens
cctgccccgcggccaacatgagcttcttgttatctaatgaggcgtcaagaagaactcagacgcttggaagaact

SEQ ID NO: 698945 - DNA, 100 bp, Homo sapiens
gcagaagccatttcaggagtacctggaggctcaacggcagaagcttcaccacaaaagcgaaatgggcacaccacaggctctgcgaacatcaatagatgct

SEQ ID NO: 698946 - DNA, 74 bp, Homo sapiens
gtttgttccctgacaactttgtaagagtcctctcctggaagcttgtgcctgacaattaccccccaggtgaccag

SEQ ID NO: 698947 - DNA, 76 bp, Homo sapiens
gcatgaagtcacagggctactgttttccaatcctcaggctgaaggggatgctaagggagataaagcaaaggtgaag

SEQ ID NO: 698948 - DNA, 90 bp, Homo sapiens
gatttctaccctgtccgaaggagctccaggaagagcaaagccgagctgcagtatacgctcaacggcaagaaagtggaagttgccgtcaaa

SEQ ID NO: 698949 - DNA, 80 bp, Homo sapiens
atacccctttgaattaattatggctattgcttatgcccgtatagagggggatatgatagtctgcgcagcgtatgcacacg

SEQ ID NO: 698950 - DNA, 100 bp, Homo sapiens
cccccctctgcgctgagcggcggccagccggcagcttcgtcagaccatggctaagttccttcaggagcacctggcccccaaggcccaggagatcgatcgc

SEQ ID NO: 698951 - DNA, 104 bp, Homo sapiens
atgaagcgggactggatgcacacaggccggcgcccctcgggcctctgcggagcagactacgtctactttgagaactcctccagcaacccatacctgatccggag

SEQ ID NO: 698952 - DNA, 76 bp, Homo sapiens
cagaggagcaggcagagctgcgacgctgggagcacctgatcttcatttgcagtaccatgcaggactagcatctggc

SEQ ID NO: 698953 - DNA, 87 bp, Homo sapiens
ctgaggcggccgaggcggccagttgggtaccgggaggggcgaaggcgggcggcagaggcgatcagctgtggtcgccaggaccccccc

SEQ ID NO: 698954 - DNA, 98 bp, Homo sapiens
ccggccccggggaactagggagcgtctccggctgcacagcgctcagggtcttactgaagtaacacaaagcttaaaaatggaaaatgaagagtttaaga

SEQ ID NO: 698955 - DNA, 90 bp, Homo sapiens
cacaggagccactcaaagtctcccgaaaggactccaacctgtctgtgcacacagaaaacccggacctcactccctgcttccagaactccc

SEQ ID NO: 698956 - DNA, 75 bp, Homo sapiens
aagtacctcatgttcgccttcaacctgctcttctgggggacggcaaaacagaacagaaaggcggagataaaaaga

SEQ ID NO: 698957 - DNA, 90 bp, Homo sapiens
agaaacttgaggccatgttacaaggagcttgcggtcccctcaggagcagatcatcttggcgccgtccctggctaaggttgacatggagat

SEQ ID NO: 698958 - DNA, 83 bp, Homo sapiens
tacagccaagctccaagtcaatatagccaacagagcagcagctacgggcagcagactctctgatccttctgacttaccaagga

SEQ ID NO: 698959 - DNA, 98 bp, Homo sapiens
ctgcagaaacagtagtagcactgtgtcatacctgaaaaagttacagatgacatgtatgcagaacagacggaaaatccagagaatccattgagatgtcc

SEQ ID NO: 698960 - DNA, 82 bp, Homo sapiens
cggtggccgcgctcggacccggtcatactccctgtcacaaactccagctgaactaacttggaggaggatcttccctgacagc

SEQ ID NO: 698961 - DNA, 100 bp, Homo sapiens
ctggaccttggaatggtgctgcttccagtggccagccagatggaagcatcctgcctcgtcatccagttgggagctgagcacataacgacttacacgttca

SEQ ID NO: 698962 - DNA, 100 bp, Homo sapiens
ccacgaggcgttcatcgaggagggcacattccttttcacctcagagtcggtcggggaaggccacccaggtatgcatttatagagtttgcttcattcgaag

SEQ ID NO: 698963 - DNA, 74 bp, Homo sapiens
gctggtctcaaactcccaacctcagctggccctctcctcctccatctccttgactgggtccggctccatgtgtg

SEQ ID NO: 698964 - DNA, 51 bp, Homo sapiens
atgggaaggacaggcagagctaaacaaggctgctctttggcgtaaattgca

SEQ ID NO: 698965 - DNA, 82 bp, Homo sapiens
cagcagtttcctcatccctgcagctgtgtttgaacagaactgctatgatcttctggtcagaaagaaaagacttattgttctc

SEQ ID NO: 698966 - DNA, 75 bp, Homo sapiens
caaaccaacttttctatcagacgatgaattgaaacacctcattctcaggctctaagcgaaagacatgaggcctca

SEQ ID NO: 698967 - DNA, 98 bp, Homo sapiens
agtttaatgagaggaatatactcatcatcagtctatttagaagagatgcctgaggaagtgcaccatggagaggaggaggtggagacttttgcctttca

SEQ ID NO: 698968 - DNA, 80 bp, Homo sapiens
tagtgagtcggcggctgatttagaaggaggttcaggctacggtgagccgaaggagatggcgtctaccagaaggggatgga

SEQ ID NO: 698969 - DNA, 73 bp, Homo sapiens
ttttactaaccacttctgaaaaaccacagtttaaggttgccaaggaaagtgtactgcagttttacccgaaagc

SEQ ID NO: 698970 - DNA, 51 bp, Homo sapiens
cagcctgttgctgacactagtgaaacccagcgtttgctggcagaaccagtt

SEQ ID NO: 698971 - DNA, 83 bp, Homo sapiens
ccagttctcacaagcagtttttaaggccagagcaaaaggtttccaggaactgtggctgcaccatctgtcttcatcttcccgcc

SEQ ID NO: 698972 - DNA, 78 bp, Homo sapiens
gctccgacggcggtccatcctggcagcctgcttctgcaaagtggtacgatcgaagggactatgtcttcattgaatttt

SEQ ID NO: 698973 - DNA, 98 bp, Homo sapiens
actatggacagggctttccttctttcctacggaagctggataagaaatcatctccatccacaggaagcctagattctggaaatgagtccaaagagaaa

SEQ ID NO: 698974 - DNA, 97 bp, Homo sapiens
gagctccagccgaaggagaaggggggttgtttacattcagagctctatcaataagaggaatacatattacagtgaattcgacaaccgcacaagttgg

SEQ ID NO: 698975 - DNA, 82 bp, Homo sapiens
gcggacggcgacgcagcccgcggcagaagaaactatgttccaacttcctgtcaacaatcttggcagtttaagaaaagcccgg

SEQ ID NO: 698976 - DNA, 74 bp, Homo sapiens
agttgcgctttcctgcctgcttctagcaaatgatgtgatgccagccacttactgtgaaattgatttagataaag

SEQ ID NO: 698977 - DNA, 100 bp, Homo sapiens
aggcccagaggtccgtgcggcagcagctccagagctttgtcaaagatttcctgtgcctggtccccgaggaagccaagacctctgccttcctggaggagac

SEQ ID NO: 698978 - DNA, 74 bp, Homo sapiens
accttggagagaggagaacgaacatcttctggacctttgtccagaaatttctgaataaattggcagaagaacgc

SEQ ID NO: 698979 - DNA, 85 bp, Homo sapiens
actaggagtttttgctttagctggactaacagatttgatccaaaaggaaagtcctcggccgtagagattcagatgatgaccactc

SEQ ID NO: 698980 - DNA, 85 bp, Homo sapiens
tcactcacttacacagtattgggaaatctgtgaaagatatgattctataacagactcttccagaaatgatatgaagaggaaattt

SEQ ID NO: 698981 - DNA, 98 bp, Homo sapiens
tttgtcatacgctgcctgcagtggaccacagtcatcgagaggaccttccacgtggattctccagacgagagccattccacagattttgaagtacaccg

SEQ ID NO: 698982 - DNA, 83 bp, Homo sapiens
ggatgatgccgcatttccagaaggctgcgactcagctgcgaggccacgccacccctgtaaaagagcccaacagtgaaaatgta

SEQ ID NO: 698983 - DNA, 89 bp, Homo sapiens
gggccttccggtcgctggtgcagcttcacctggccgggctgcgtcgcttcgatgccgcgcaggtgaaggaaatgtccctgatccgaaac

SEQ ID NO: 698984 - DNA, 100 bp, Homo sapiens
agactccgtacgccttcacgtcctcctccatgctgaggcgcaatacaccgcttctgggtcagcacaaccagtgtctctgaagaagatgtctcaagtagat

SEQ ID NO: 698985 - DNA, 83 bp, Homo sapiens
ggagttcagcccactactctgaaccagtacctggagtagaacagaaaaattattatgtctgtgttcccttgggactcattgga

SEQ ID NO: 698986 - DNA, 100 bp, Homo sapiens
aatggacagattccccaggctacacattctgtcagtgctgttctccaagaggcccagagacatgctgaaacatcgaaggctgaccaactgactgaagagc

SEQ ID NO: 698987 - DNA, 88 bp, Homo sapiens
cgggacgccgcatcggctctgctgaagagcctgcgggttggagcggatactctgttttcaaggaagctgaatgggaaatacagacttg

SEQ ID NO: 698988 - DNA, 80 bp, Homo sapiens
ggcgaagcgggcgagcggtggtttggacgccggcggagacgcgggcgaggccttgaaccggggcattgctgctgtcaagg

SEQ ID NO: 698989 - DNA, 74 bp, Homo sapiens
gcccctggagatgattgagccgcgcacgctacagtacaagtactcccctgccctcaacaagatgttttgccaac

SEQ ID NO: 698990 - DNA, 98 bp, Homo sapiens
gtggaaaaggagttggacgtcctgcagggtcgtgtggctgagctggagcacggtcacccttgtggttggagcgtcccaggacatcatcccccagctga

SEQ ID NO: 698991 - DNA, 100 bp, Homo sapiens
agttcaattatgaatctcaggaacaccaccttctgtcaggtagagatcttttcctagcaagctgttcacaagattgcctgataagaatatggaagctgta

SEQ ID NO: 698992 - DNA, 83 bp, Homo sapiens
ggggaccctgtggcgcgctactttgggataaagcgtgggcagtgcccctctcagctgaggaggaaccgagagcggcgctgggg

SEQ ID NO: 698993 - DNA, 100 bp, Homo sapiens
agacatagaagctggggccttgacaatttgcacttagtgaaagactggagaactgtgaatgaagacagcatgttttcgtgaagaaagggatgtattagtg

SEQ ID NO: 698994 - DNA, 100 bp, Homo sapiens
cttcctctctgaaatcccagtcccaaaatccagtttcctggccgcctcctggctcaggtctcggcgcggaagatggccggcggcgtggacggccccatcg

SEQ ID NO: 698995 - DNA, 80 bp, Homo sapiens
ccgaggccaggagccaggggcccagaaggggcaatttgaaattcgatatgcaccgtggttccagtggacaagttttccag

SEQ ID NO: 698996 - DNA, 98 bp, Homo sapiens
agggtcagccatcctcaagtagcttaacaggggtttcatcttcccaacccatacaacatcctcagcagcacatgcagatgacaatccaggctctccag

SEQ ID NO: 698997 - DNA, 83 bp, Homo sapiens
tagcaagtgcgtctgaaaaagtaccgaggagaaggcattgtatatgggacactagaggaggtgtgggactgtgtgaagccagc

SEQ ID NO: 698998 - DNA, 51 bp, Homo sapiens
agcctgagagacacaatctgacgaatttacatagtacatgacgaagttaag

SEQ ID NO: 698999 - DNA, 95 bp, Homo sapiens
gaaatagcgcggctgtgcaagtacctgccagagaacgacctgaaggaacttgctactaccagcaccatgccctaccaatatccagcactgacccc

SEQ ID NO: 699000 - DNA, 100 bp, Homo sapiens
cccgtgcctgtcttcagatcttcacagcacagttcctgggaaggtggagccaccagcctctccctgagacatattgatgtctttgactgttggaaacctt

SEQ ID NO: 699001 - DNA, 82 bp, Homo sapiens
cgacagtgccctgagggccttcgagagctaccgcgccagacagtgtggacgaatgtggaacctcgctctgtggctgtgttcc

SEQ ID NO: 699002 - DNA, 80 bp, Homo sapiens
aaggtggcctaccaggaggccaggggtgtcgccatgaattccttcgacaatcctgagtggttttatcggcatgtggaagc

SEQ ID NO: 699003 - DNA, 50 bp, Homo sapiens
gccaccactgcggcgggctctgggaacaggagtacagctgtgtagtaaag

SEQ ID NO: 699004 - DNA, 100 bp, Homo sapiens
ctggcatgttcaggaatggcttggaagatggatgtgttcagagcaacattgttttgttgacacaagcatttagaagaaagtttgtgattcctgactttat

SEQ ID NO: 699005 - DNA, 100 bp, Homo sapiens
gagatttcatgaagatggcgccaggacgaaggccctactgggcaaggccatggttgcttgttatccgggcaatggaacgggttatgtacgtcatgttgat

SEQ ID NO: 699006 - DNA, 51 bp, Homo sapiens
caaaattgtggaaaagtcactctggacaactacacctttgcccaacctggg

SEQ ID NO: 699007 - DNA, 100 bp, Homo sapiens
gacgacagggtcaaagatgttcattctgggtgacacagcctacggcaggatcaagcgtgctttccttatcgaggagcagaaaatcgttgtgaaagtgttg

SEQ ID NO: 699008 - DNA, 100 bp, Homo sapiens
tggatgctcacccgaaggctgattactttggtgctggagaatctggtaaaagcaccattgtgaagcagatgaggatcctgcatgttaatgggtttaatgg

SEQ ID NO: 699009 - DNA, 90 bp, Homo sapiens
cgagcggaggagcaggcgccggagatgatgattattctccaccgtctaagagaccaaaggccaatgagctaccgcagccaccagtcccgg

SEQ ID NO: 699010 - DNA, 75 bp, Homo sapiens
cccagacggctcacctgtgcgggatggaacaaaagttgattggctgcataatcgggcgtcaaggcgccaaaatca

SEQ ID NO: 699011 - DNA, 100 bp, Homo sapiens
gagagaagagggcagagccgtgcatggggctgctccccaggacctgagcaggaacctggagttttcaggagcagccaccatatcctagctacaattctaa

SEQ ID NO: 699012 - DNA, 90 bp, Homo sapiens
gaaccgtgtccagccagggtcctgggccgcgacctggttctcccggagtctacaggaaagcaggcaggatgggagagtcgccgatagaac

SEQ ID NO: 699013 - DNA, 75 bp, Homo sapiens
cacgcatccatccagatgaacgtggccgagctactcccgagcccggagaggacccacgcgtgacccgggccaagt

SEQ ID NO: 699014 - DNA, 101 bp, Homo sapiens
aaaatcaaccgggaccccagcttttcagaactgcagggaaacagccatcatgagacttaattcagtgcacaaatgagatgaatgtgaacatcccacagttg

SEQ ID NO: 699015 - DNA, 74 bp, Homo sapiens
ggtctcctctcaagaaatctcaagatattaaagttactgctgttaaaaagacgcagggtgatggtgaggattcc

SEQ ID NO: 699016 - DNA, 74 bp, Homo sapiens
cagaatatgccaagtatctaaaggatttcagtcataatcggttgtctaactggaacatcagcttggaatcacaa

SEQ ID NO: 699017 - DNA, 82 bp, Homo sapiens
tcccgggagatcccaggcggtgacagagtggagccatggctagaggtctccctgagtctttgaggacacagcctcgctggag

SEQ ID NO: 699018 - DNA, 100 bp, Homo sapiens
gcagagaagagcctgaagcagactccccatagtgagattgattttgtagcccatgatgatattccttattcatctgctggcagtgatgatgtttataagc

SEQ ID NO: 699019 - DNA, 82 bp, Homo sapiens
gccaccggccgcttctgtcctcggaccaagaatcgccttcagccctgtctggtgcatccttggcagaaagtgaggaggaaaa

SEQ ID NO: 699020 - DNA, 87 bp, Homo sapiens
tcactgtgcaagctggggctgcagacaatgcttctggagaagctgcgtgtggctcggcgcccagccagtgaagccacattcaacgtc

SEQ ID NO: 699021 - DNA, 50 bp, Homo sapiens
caagctcatattttgaagtgtttacggggtttcgaaaaaacgatgaaatg

SEQ ID NO: 699022 - DNA, 101 bp, Homo sapiens
agcaggtttaaaattttacataagaagttacctttttcagcttctcacctggggcgggtgggttctgcaccaccctcccaccctccttcctccgtgtggac

SEQ ID NO: 699023 - DNA, 107 bp, Homo sapiens
gaggaaggaacgaggcaaggagctaaagcagcgtgcgttcagccctggggaggccccgtgtgggccgcggcccggccctcaccatggagtccatgttcgaggacgac

SEQ ID NO: 699024 - DNA, 75 bp, Homo sapiens
cgacatgttccaggtcccggatagcgagggcggccgcgccggctccaggtcccgcggcagtgctggtggccatgg

SEQ ID NO: 699025 - DNA, 96 bp, Homo sapiens
ctgagttttttgatcttccaagtctcaataaaaacatccccgtcatcgagtatgagcagttcatcgcagccctggcaggtgcccggcccgcccccc

SEQ ID NO: 699026 - DNA, 100 bp, Homo sapiens
attggcttcgggctgagctagcagtgagcaccttttggcccaatgaatatcaggtgtatctacatcagcaatcaaaatggcatcaaccagacttccttcc

SEQ ID NO: 699027 - DNA, 99 bp, Homo sapiens
tgaatgtttggagatagacttcaagtcccggaccttatccgtgcgccgcttcggtttgcagatgtgccgtttgggggtgctaaagctggtgttaagatc

SEQ ID NO: 699028 - DNA, 84 bp, Homo sapiens
tggcggtccctgtgacctgtggagacacggccagatctgccctccatgtttctgttcactgtaaaaagaaacacaagcgagagg

SEQ ID NO: 699029 - DNA, 75 bp, Homo sapiens
gcaaacgtttgtccttgctcctgagaatttgccattttcagtggaaaacaagtggtcgttactagctaagatgtg

SEQ ID NO: 699030 - DNA, 98 bp, Homo sapiens
cacagagccatggtccatccgagagaagctatgtttagcatcttctgtcatgagaagtggcgatcaaaattgctgtcggaaaaggtaacagaagatgg

SEQ ID NO: 699031 - DNA, 74 bp, Homo sapiens
acggagtacaaaaacggcccttggatgatggaggtactccaaagattcaggtttactcacgtcatccagcagag

SEQ ID NO: 699032 - DNA, 50 bp, Homo sapiens
attaccttaaccatattacatggagtctcgtgctgtcacccaggctggag

SEQ ID NO: 699033 - DNA, 74 bp, Homo sapiens
atggcggagaaggatgacaccggagtttgacgaagaggtggtttttgaggcatcagaagttgagagacaactct

SEQ ID NO: 699034 - DNA, 75 bp, Homo sapiens
ctgtaaagtcaccaacgagatcttccgccactacgaggttggggtgctggaggactgcttcaccttcctgggcat

SEQ ID NO: 699035 - DNA, 80 bp, Homo sapiens
gagggaaatatgtcatgtatcccatagctgtgagtggcgatcacgagaacaataagagtacccaaaggcaagtggaacag

SEQ ID NO: 699036 - DNA, 90 bp, Homo sapiens
gcgttggttcccctctttgacctggtaaatgcaggcttttatgcgagagaaacgatggaaagaactttctaaggaagacttatctcctgc

SEQ ID NO: 699037 - DNA, 100 bp, Homo sapiens
caacctataaggactgcaaagtatggccagggggtagtcggacttgggattggagagaaacaggaactgaggatggaatacaggggggacagttagattc

SEQ ID NO: 699038 - DNA, 74 bp, Homo sapiens
agctctttcctttccgtctggcggcagccatcagatggagtcatcagaacccactgtgaggaagtgacttctcc

SEQ ID NO: 699039 - DNA, 120 bp, Homo sapiens
cccgcgtccagcacctacgtcccgctgccgtcgccgccgccaccatgcccaagagaaagggcgtgatggtgggcatgggtcagaaggattcctatgtgggcgacgaggcccagagcaaga

SEQ ID NO: 699040 - DNA, 100 bp, Homo sapiens
catgggcagtgggatcctgggcttgtcctatgccatggccaacacagggatcatactttttatacattatgatctcaaccagctgctggagcctcgaagc

SEQ ID NO: 699041 - DNA, 100 bp, Homo sapiens
acacagacgagcctttcttatttctttactcaacctctttgatgacacagcaggctggtgaattaccatatctccgtcaagtgcagtaaccagttcaagt

SEQ ID NO: 699042 - DNA, 100 bp, Homo sapiens
accaggcggcttgggagaatgagctgcagaagatgacccgggggcaggtgaaaggtgtagcagtcactcggcctacacccacagcatcgaccttgtgaac

SEQ ID NO: 699043 - DNA, 83 bp, Homo sapiens
gtttgtatcccaacttctgagcacctttctgaagcttactcacatagcatattggtatatcaaaatgaaatgcaaggaaccaa

SEQ ID NO: 699044 - DNA, 83 bp, Homo sapiens
aaagacgggccattttccagacctcatccaggttgtgcagcctgactctgaagaagctggtggtcttcaaggagctggagaag

SEQ ID NO: 699045 - DNA, 100 bp, Homo sapiens
atcctactcagaagaacttgtacagagatgtgatgttggagaactatagcaatctggttttcttgggtagctacagcaagctgggtagcaggcagatcca

SEQ ID NO: 699046 - DNA, 83 bp, Homo sapiens
cctggaccaggaggaggttttcaggaccaaaattgtggaaaagtcactctgatcgaaaagtatcctccttgcacacctcccga

SEQ ID NO: 699047 - DNA, 96 bp, Homo sapiens
ggtggaaacagacactttagttagagatccactgctgtgcgtgcacacatactcacacaggttttggagattttaggtaagaagtttcctgttact

SEQ ID NO: 699048 - DNA, 71 bp, Homo sapiens
aatgtgactgccatggagtgaagggacaaaaggatgaatgctatcaagtaagacaagtgtttgcccagaaa

SEQ ID NO: 699049 - DNA, 100 bp, Homo sapiens
cgtgcatgggaatcggagaccatggcagtgcagctggtgcccgactcagctctcggcctgctgatgatgccttcaattaagttgcagagttctgatggag

SEQ ID NO: 699050 - DNA, 75 bp, Homo sapiens
tctgcctaaatattatatattactgcacatcatgctgggggagattctcaggtaatagcctgcagctggtgtttt

SEQ ID NO: 699051 - DNA, 100 bp, Homo sapiens
ttcttccacagctatagaactggtccagcagaaatgatggaagaattgcatagcctggacccacgacggcaggaattattggaggccaggtttactggag

SEQ ID NO: 699052 - DNA, 100 bp, Homo sapiens
tggaaagtttcattgtgtatgtagaagaccagaagtggatggagagggagtttatcaaagctttgtatgagtccgatgagaactgtgaagtggatcccag

SEQ ID NO: 699053 - DNA, 100 bp, Homo sapiens
ggagatccggatgctcatccataaaactgaagatgtgaatactctggttcagccgtctgtatatctccccagatacctgaaactgaccacctgagtacgt

SEQ ID NO: 699054 - DNA, 100 bp, Homo sapiens
ggaacccgtggtcctccgcttcattaactctcaggagccttctccgcagttggcttcctcggtagcttccacacggagcatgcccgagagcctggacagc

SEQ ID NO: 699055 - DNA, 75 bp, Homo sapiens
gctgcggagaacaggctcacggagatggagacgctgcagtctcagggtgtccgcaatgttgccagtgtctgtctg

SEQ ID NO: 699056 - DNA, 75 bp, Homo sapiens
acagatattcaggaaccaatgctgagtgctgcacaagagcagggagaaaactggttgtcctggatgtttgaaaag

SEQ ID NO: 699057 - DNA, 75 bp, Homo sapiens
tggggtgtcggcgcctcattcgggtggagctgagccggagacaggtttgcctgcaatgagatttcattctctaca

SEQ ID NO: 699058 - DNA, 100 bp, Homo sapiens
gctgtgtggttgcaacggagataaattcccggaaccgcgattcggcgtgtcaggcagaaggagaagacagcctgaagaagatgcagctgatggagcttgc

SEQ ID NO: 699059 - DNA, 154 bp, Homo sapiens
cccctggaatctaaagcctcctcagccttctgagtcagcctgaaaggaacaggccgaactgctgtatgggctctgtgtcatggagaaactccagctgggcccagagattctgcagcgggaaaatccaaggcttatttatgccaggctgagtgga

SEQ ID NO: 699060 - DNA, 100 bp, Homo sapiens
ctgaaagcagtaagacaattccagaagagaaaaatccaagtggagagagagttagatgatacggagtctcactcttccgccaggctggagtgcaatgcag

SEQ ID NO: 699061 - DNA, 88 bp, Homo sapiens
atgtctgtacacctgtccccctgcttcaggaccagctgtactggcgctacgatgaccacacgaggcacatggaccccggctaccccgc

SEQ ID NO: 699062 - DNA, 51 bp, Homo sapiens
cgagaaagctgcacagtatcaaagctgagaaaacagaagtccttagtgaag

SEQ ID NO: 699063 - DNA, 105 bp, Homo sapiens
ttgtcaccaatttcctgcccgggatcccagagctacccttcttggagcccacaggggtactccaaagattcaggtttactcacgtcatccagcagagaatggaaa

SEQ ID NO: 699064 - DNA, 90 bp, Homo sapiens
ctttgttcaccgccaaccccttcgagcaagacgtgggctaagaaatggcatttcaaaaggcagtgaaagggacgattcttgttggaggag

SEQ ID NO: 699065 - DNA, 98 bp, Homo sapiens
aagagctcacgggcgtgcggttcaaggctcagctgaaggacccgcagggccccgggccaggtatccgtacttgaaaactggaaggagagtgaagtgta

SEQ ID NO: 699066 - DNA, 51 bp, Homo sapiens
ggaagcgtcgggattaggtgaaagaatgaatctgaagtctgctgcagtaaa

SEQ ID NO: 699067 - DNA, 98 bp, Homo sapiens
tggccgtggacacctgtgtcagcatgtgggacctggttctctccatcgccttgtctgtggggtgcactgatgaagactggcccatttgcagagcactc

SEQ ID NO: 699068 - DNA, 97 bp, Homo sapiens
atgcactacaacaggaaaatcatattatagatggagtaaaggcccaggaaggacgtgccccacagatgcagcactcactttgacgcggtggcccaga

SEQ ID NO: 699069 - DNA, 99 bp, Homo sapiens
tgacagattacgccccctatcctatccgcaaacagtatttctgggaaaagccagcttctgtttgcactggtcttcacaactcgttacctggatcttttt

SEQ ID NO: 699070 - DNA, 80 bp, Homo sapiens
cgacctgctaacagaactggaccttttcggtccagccctgctgggagttttctgccacacagatttgcggaagaacctga

SEQ ID NO: 699071 - DNA, 74 bp, Homo sapiens
ctcagatgctgccagggtccctgaagagggaagacacgcggaaacagtccgggaccatgtctggagaactacca

SEQ ID NO: 699072 - DNA, 88 bp, Homo sapiens
gctcttaagaaaatccagtttgcttaaaaagaaatgagccgtcagactgctacagcattacctaccggtacctcgaagtgtccaccat

SEQ ID NO: 699073 - DNA, 100 bp, Homo sapiens
cgggagttacaccgccaccgccagggcaatcccagggcccaccgaccccacccaccacccccaaaaccgacgtgcagccgggcaaggctgacctgaagcg

SEQ ID NO: 699074 - DNA, 89 bp, Homo sapiens
actgtgatgtgcctgcaacaacaggaaaggcaatgttatattaaggtgctgtaaaatacctggagtgctcggcgctcacacagcgaggc

SEQ ID NO: 699075 - DNA, 90 bp, Homo sapiens
ggaaggccgcagggacctctgcctaggaaagccaggcaaaggtagctgcagcagatgagaagaagttccagcaacagatcttggcccagc

SEQ ID NO: 699076 - DNA, 100 bp, Homo sapiens
gggagggtccgagccagccgctgttttgccggaggagcccctcaggccgccaagtcctgtatctgccatgtctgtggcgtccacctcaacaggctgcatt

SEQ ID NO: 699077 - DNA, 75 bp, Homo sapiens
gcacatttcactcccccaggccacagtcacaccccccaggaagaattatatccagatcgagagacagaagattct

SEQ ID NO: 699078 - DNA, 50 bp, Homo sapiens
ccgaggtggccgaggcgctgaccaagcaaataaagcatgagctgttggaa

SEQ ID NO: 699079 - DNA, 100 bp, Homo sapiens
tggatcaagcctccccaaccccaccatcccaccaaagggggctgctgaccgagagagctcactcagccagctcgcactgcctccgagcagccgccttcta

SEQ ID NO: 699080 - DNA, 100 bp, Homo sapiens
agcctgaaaaaactaaagcagtagagaattaccttatacagatggcaagatatggacaactaagtgagaagggtgtccgcaatgttgccagtgtctgtct

SEQ ID NO: 699081 - DNA, 82 bp, Homo sapiens
tgtgccgcaccgaggcgagcaggagcagggaacaggagccttcacgtaaatgggtccagtcatgcctcccagtaagaagcca

SEQ ID NO: 699082 - DNA, 75 bp, Homo sapiens
tcacaaaacagcagatttcccaagagcagcggaaaatgatccagtcacaggatcccatgacagattctgttgtca

SEQ ID NO: 699083 - DNA, 100 bp, Homo sapiens
ttcacggtgaccttcgcttggtgtcctcctggcctcagcaacctgacaattctgtcgtgtcccgaaatcctgcaggacggactggactggtgggccgggg

SEQ ID NO: 699084 - DNA, 75 bp, Homo sapiens
aacggctccagcatcaagatccgtctgacagaaagcttatagcttcattgcaccatgtgtggcatttgggcgctg

SEQ ID NO: 699085 - DNA, 50 bp, Homo sapiens
attttaattgccagaaacaaagggtgatcagcccatgacctaaacctcca

SEQ ID NO: 699086 - DNA, 50 bp, Homo sapiens
gcctgttctcatcaccatggcaacagagatggagtttcaccatgttggcc

SEQ ID NO: 699087 - DNA, 51 bp, Homo sapiens
ttctcctggagacgcaactcaaggtcctcagaatggttggaatgaccctcc

SEQ ID NO: 699088 - DNA, 100 bp, Homo sapiens
ccgggggtgaagatgacaaagccttcgtatggcggctcagcgatggggagctgctctttgagtgtgcagcccatactgaatgaacacaccttctgtgctg

SEQ ID NO: 699089 - DNA, 100 bp, Homo sapiens
ttatccaaagattaaaacttgaagcaacccttaatgtgcatgatggttgtcaaaagtactttgactcaggagactacaacatggccaaagccaagatgaa

SEQ ID NO: 699090 - DNA, 103 bp, Homo sapiens
gcgtcgcgcccgggaggaaggaacgaggcaaggagctaaagcagcgtgcgttcagccctgggctgtgagccgtgagctttgaggcggtgggatgtgtcagcag

SEQ ID NO: 699091 - DNA, 98 bp, Homo sapiens
agccagcgagagggcaagcgagaagggccctgccctaaaggaagctgaatatggtgggcatgatcagatagatttgtatgacgatgtcatatctccat

SEQ ID NO: 699092 - DNA, 80 bp, Homo sapiens
ctggtcagtgccatgatccggcaggagcgctccacatcctaccaggagacaatgcagatcttcgtgaagactctgactgg

SEQ ID NO: 699093 - DNA, 74 bp, Homo sapiens
aatctctagactcagatgagagtgaggatgaagaagatgactaccaggtgacaaacagcatgtttggtgcttca

SEQ ID NO: 699094 - DNA, 100 bp, Homo sapiens
cctgatactaacagttttacgatttaaaacttcgccagaatttttactgaatcaaatggatggatttgatactctgcatagagttaaaatgatcatggct

SEQ ID NO: 699095 - DNA, 83 bp, Homo sapiens
cgaagctggccgagcaggctgagcgatacgacgatggagaaggaggagacaacccgggagctgctgctgcccaactggcaggg

SEQ ID NO: 699096 - DNA, 100 bp, Homo sapiens
ctggtgtaccaggcgaagctggccgagcaggctgagcgatacgacgagttgcatgctgagaatttgaaaaatgaagatgatgtagacactggactattag

SEQ ID NO: 699097 - DNA, 100 bp, Homo sapiens
taaggagacctgctttgccgaggaggcagtgatagaacacccagacgcaggttggtgtccacatccccaagagtgtctacctgagtggtattttatttaa

SEQ ID NO: 699098 - DNA, 75 bp, Homo sapiens
agttttgaaaatgaaactgatgagacgacaactgctgtggaaaatctctgttctcacaaagtctccccaatgctc

SEQ ID NO: 699099 - DNA, 88 bp, Homo sapiens
aggagaacgagtcatgttcatgggaaactcaatctgggtgtgaaggtgcctctgccaactggtggaatcatcgccacttccagcacca

SEQ ID NO: 699100 - DNA, 100 bp, Homo sapiens
caacagaaccatattgggagtgtgattaagggcatccgcttcgatcctgaaattccgcaaacactacgactagagtttgctaaggcaaacacgaagatgg

SEQ ID NO: 699101 - DNA, 99 bp, Homo sapiens
cgagacaaccatccgtgtggtgtccatggacagagactaccacgtggcatgttaccactgtgaggagcaggggagagaagacagaagaggttggagagg

SEQ ID NO: 699102 - DNA, 100 bp, Homo sapiens
gtggtcaccaaccagaccacctggacagagttgctgggagcctgagcacctttcgtttttcggctcagagaaagccaagtgcaacttgcttcagtcatcc

SEQ ID NO: 699103 - DNA, 75 bp, Homo sapiens
ccgagccaggccgccgcaaagcaggtatctcttgggtcacagattgatttacagaagaagaagcggcgagcgcca

SEQ ID NO: 699104 - DNA, 100 bp, Homo sapiens
gcgtgaggccgcggagcgccagctcaatgaataagactttgaccccgacgcaggcttcagtgattgccgcggatcagaagcctgagcactttggctcgag

SEQ ID NO: 699105 - DNA, 89 bp, Homo sapiens
cttcatcaatttcatagccatttattaccatgcttcaagagccattccttttggaacaatggtcccactaagcagctggtctaactgga

SEQ ID NO: 699106 - DNA, 90 bp, Homo sapiens
gtgaaggggaagaggcccaccctggagtaaccctcactggagaatccagagaggacaaaagcatgtcttcccttcctgggtgcattggtt

SEQ ID NO: 699107 - DNA, 82 bp, Homo sapiens
aaaggtcatctcggagactagaggctggataccaaatagcagtggaaaccgggggatatgagactttctactcggaatatcc

SEQ ID NO: 699108 - DNA, 90 bp, Homo sapiens
gggagagatgaagcagtccactccaagaacattctcatcctacggattacgaggatgttaaagtctttagtgaagatgggacaagcaaag

SEQ ID NO: 699109 - DNA, 75 bp, Homo sapiens
caagccagttaacgcgacacattaggatacacacaggttttggggccttgtcacagatgccagatgatttgcatc

SEQ ID NO: 699110 - DNA, 100 bp, Homo sapiens
attctcttcactcgagagatgaggacactgaaattcagagaggggaagtgatttgcctcagcttgtactgtggaacctaacttcttgtggaacaagtgtt

SEQ ID NO: 699111 - DNA, 80 bp, Homo sapiens
tttgaggaactactacgaacaatggggaaagcttacagactgtgtgaatgttcgcatcttaccacatacagttctttaca

SEQ ID NO: 699112 - DNA, 100 bp, Homo sapiens
acgggccatacccaataaccaggtgcttggcaaaatcgagcgggccattggtacctaatcatcgagaacttcatcccgccggaggagaagaacaagatca

SEQ ID NO: 699113 - DNA, 100 bp, Homo sapiens
attacaagcggacacgggaatatatccgaagcctgaagatggttccaagtattccctatctaggtggacttaaatgaagaagaaactatattgatcatca

SEQ ID NO: 699114 - DNA, 98 bp, Homo sapiens
agaaggaaatttccaccagttggtggcactgctacactgccgcagcctgcacaagtgtggcgtccagaacttcaaacgccgagagaagtgcttcaaat

SEQ ID NO: 699115 - DNA, 75 bp, Homo sapiens
ctccgtcaccagccacatctaccaggtcatggaatatcagcctggaggggacttgctgtcacttttgaatagata

SEQ ID NO: 699116 - DNA, 74 bp, Homo sapiens
agccttctcagggccccacctttggaataaaagccaaggccacctttgatgccatttctaagacctacagctac

SEQ ID NO: 699117 - DNA, 50 bp, Homo sapiens
gagaactatagcaatctggttttcttggttctggagagtcttggcttctg

SEQ ID NO: 699118 - DNA, 86 bp, Homo sapiens
cagtggcgcttgagttggtcgggggcagcggcaggacgaaaaggaggttgtgctaaagggaaaggaggatcgatgcacatgtatgc

SEQ ID NO: 699119 - DNA, 87 bp, Homo sapiens
cagctcaagaaaatggtgtccaaggatcatcctgaacatggggtcctgtttcttgttcgagagcttctcaacgtgatccaggactac

SEQ ID NO: 699120 - DNA, 82 bp, Homo sapiens
taaagtcgagtatctggtgaagtggaaaggatggcccccaaaaaagaagcttccggttctgaggtcctggaggtgccatttc

SEQ ID NO: 699121 - DNA, 96 bp, Homo sapiens
acggcaacggcttaagctctcggaggagtggcagagtacgatctgaaggaggggcttctggttagcccaggtacatgtcccagagcaagcacacgg

SEQ ID NO: 699122 - DNA, 75 bp, Homo sapiens
gaatgatcatgattttcttgaaaaggaccttgtagaacctctttgcagcctgactggctcatggagaaagcctac

SEQ ID NO: 699123 - DNA, 100 bp, Homo sapiens
aacggagaaagcagccagagtactggtttgctgttcctcgggagagatttgtgacccagaaggaaatctctgacctcagctgtggctcttggtgctggcc

SEQ ID NO: 699124 - DNA, 88 bp, Homo sapiens
cctcccaaagtgctaagattacagcttgctactccagaaaaagcttcataagtttgagttggcctgtttggccaacctttgcccagag

SEQ ID NO: 699125 - DNA, 100 bp, Homo sapiens
aaaagagcaaagataagaagagaaaaagagaagatgaagaaacccagcttgatatgttggatgattatgtacttgaagtgaggcactttcagtgtcctaa

SEQ ID NO: 699126 - DNA, 83 bp, Homo sapiens
agctgcttataagactcacgggcacagaattcctgttgccatcaccctggggtcccaatcttccatgatgcacttaaggtgag

SEQ ID NO: 699127 - DNA, 95 bp, Homo sapiens
ccgcacgcgctgggattcggagcttcagcgggaaggagcttccgccctgcgctgccagtctcctacctgcaggccgagctggccttcgagggcga

SEQ ID NO: 699128 - DNA, 100 bp, Homo sapiens
aggcacccgggcgccgggcctcccagccgacatgtctctagtggcggaagccttcgtctcccagattgcaggtgatcgtcacatcagttccaggccaaga

SEQ ID NO: 699129 - DNA, 90 bp, Homo sapiens
ggagaacaccccgagcgaggccaaccttcaggaggaggaggtcttgccaagaaatattgctgttccttactgccaactctccaagaaact

SEQ ID NO: 699130 - DNA, 82 bp, Homo sapiens
cagccgcccgaagagccaagagtcagtattccggccagcttcacgaagtcagagagatactccatcttctaaaccaacactc

SEQ ID NO: 699131 - DNA, 83 bp, Homo sapiens
atggtcttcctgctggggctcatgtttgaggtgcaactgacatgggtgaaccccagggatccatgcggattctagtgacaggg

SEQ ID NO: 699132 - DNA, 100 bp, Homo sapiens
aacattgtcgtcattggacacgtagattcggacgcaaacatgcagatctttgtgaagaccctcactggcaaaaccatcacccttgaggtcgagcccagtg

SEQ ID NO: 699133 - DNA, 100 bp, Homo sapiens
gtcatcctccacagctccagggaaggcactcaaaagtggggggcaggaaagatggcccactgcgtgaccttggttcagctgtccatttcctgtgaccatc

SEQ ID NO: 699134 - DNA, 100 bp, Homo sapiens
tgctggtattggaacagtctttggcagccttatcattggttatgccagaaacaagtgttgaaaatgttaaaggctgtgctgaagaagagccgagagggag

SEQ ID NO: 699135 - DNA, 88 bp, Homo sapiens
tcaggcagcttatgatgccaatttgtcccatgatgaagtggccattctgcctgcccctcagaacctctctgtactctcaaccaacatg

SEQ ID NO: 699136 - DNA, 93 bp, Homo sapiens
agactttctccttcaagtacttggcagatcactctcttagcaggagcctccatcgacctgcagaagacatcccacgattacgcagacaggaac

SEQ ID NO: 699137 - DNA, 82 bp, Homo sapiens
ccaggcagagtcagcagctgcagtgtggaagattctgaaggaagatttccattaggtaatttgtttaatcagtgcaagcgaa

SEQ ID NO: 699138 - DNA, 83 bp, Homo sapiens
cgcctcgggacccgcggtccccgctcttgctgtacgctggggaggaggaggaggaagggagcggcagcagtgaaggatttgac

SEQ ID NO: 699139 - DNA, 99 bp, Homo sapiens
ttctggcgaatgatctgggagtggaaatcctgctctatcgtgatgctaacagaactggaggagagaggccagttgcaaagcctcattccttttgttcag

SEQ ID NO: 699140 - DNA, 100 bp, Homo sapiens
gggtcttcactggtattgttaccagcttgcatgactactttggggttgtggatgaagaggtcttttttcagctaagtgtttgaagaacctgaagatccca

SEQ ID NO: 699141 - DNA, 101 bp, Homo sapiens
ggcacgtttgagatggcagccgtgatgtcacaggaagagagaagggcacagttacctaagtatcaacgtaatcttcctcggccaggacaggcccccatcgg

SEQ ID NO: 699142 - DNA, 128 bp, Homo sapiens
agttggttatgatgctatggctggagattttgtgaatatggtggaaaaaggaatcattgacccaacaaaggatgtacgaagtaggtccaaagttgttgaccgtatttacagtctctacaaacttacag

SEQ ID NO: 699143 - DNA, 75 bp, Homo sapiens
gattctctgtcaggcattagagaatccaaactgtaacctaaaacacctacggactggaaggatcaccagcacata

SEQ ID NO: 699144 - DNA, 82 bp, Homo sapiens
cctgcacagccgcggcggcagcagcagtgagagccagatctcggtgctcagcggcggcaaggccaagtgctcgcagttctgc

SEQ ID NO: 699145 - DNA, 100 bp, Homo sapiens
gcccggggctcggagaatgggcaggtcttatatccagatggccaggctcagatgattcaccccaagcctgcagacttccggaatcctggcccagggcggc

SEQ ID NO: 699146 - DNA, 100 bp, Homo sapiens
ccgagaacgtgcgggaagagaagatcatcgagcatttcaaacgagtgtgaacatggctacgcctcttcattcccgtccatgccgagcccccgactgcagc

SEQ ID NO: 699147 - DNA, 100 bp, Homo sapiens
aactccctcatcactgctccgggtgaattctcagcaaatggttatgagccttagagtttctgaactccaagtactgttgggctacgccgggagaaacaag

SEQ ID NO: 699148 - DNA, 89 bp, Homo sapiens
tccgaaccccttcatgcccaaatcccggaaactccagcgtgtctccagccgtgctggagaatgctggaggagaccttaaggatggccac

SEQ ID NO: 699149 - DNA, 75 bp, Homo sapiens
taagacgctgtttcagagcgtttgggtcctctgaggccccttgaccaggagatggcgtctaccagaaggggatgg

SEQ ID NO: 699150 - DNA, 74 bp, Homo sapiens
agttattgaatatcaagaggaggagttgttggacagaggtgttccgggaggagctgggggcccggccagatgcc

SEQ ID NO: 699151 - DNA, 75 bp, Homo sapiens
gcaattttgggactgatttagaacagaaactccattggaaccccgaggacaaagaaacttttgagaagaactttg

SEQ ID NO: 699152 - DNA, 97 bp, Homo sapiens
gccgccccgggcggtggcagcaagaagagggactccctggggactgcgggctcagcgcacctcattatcaaggtcaaaccggcacgatgtccaggca

SEQ ID NO: 699153 - DNA, 100 bp, Homo sapiens
aggacccactggaagcctagaaatggcaagtgtcaattgaggagggagagaggaaagccaaagagctgaatgttatgtttattgaaactagtgcaaaagc

SEQ ID NO: 699154 - DNA, 83 bp, Homo sapiens
cattcgaagtgacctcagcagggcatccaggtttggacatatttgactcttttccccccaggttgaattgaccaaagcaatgg

SEQ ID NO: 699155 - DNA, 101 bp, Homo sapiens
ctggaacaagttgccggccaacgtgagacagtctgttgtccaggctggagtgcagttgcgtgatcccggctcactgcaagctccgcctcctgggttcaagt

SEQ ID NO: 699156 - DNA, 89 bp, Homo sapiens
acagcttcatatggacagatggacttcaaatgctgtttgtattccagagactagctgtccgcaggcttgtccaaaaggaaacatcggaa

SEQ ID NO: 699157 - DNA, 99 bp, Homo sapiens
aatccaagagatgagagaggacccaacatggggcagaagcttgaaatcctcattaaagatactctcgatggaatctgcctgtgtttcaattcacgaagc

SEQ ID NO: 699158 - DNA, 50 bp, Homo sapiens
cttatatccaggaccaaggagtgagtctacctggaccagccctgccttga

SEQ ID NO: 699159 - DNA, 90 bp, Homo sapiens
gcttggatccttgtgggcatgatccataatcggtttcaaggtatgcctataacataagtctaaaggaggtgatgcaggtactgagccacg

SEQ ID NO: 699160 - DNA, 100 bp, Homo sapiens
cttgcaacagtggccgcacgcataggtgacaaacagcatgtttggtgcttcaagaaagaagtttgtagagggggtcgacagtgactaccatgacgaaaac

SEQ ID NO: 699161 - DNA, 88 bp, Homo sapiens
ggacacagcctcgctggaggcagtttctgatacgtggttgcagtaggattggagtgtggaaagatttgcttatatacctggaaaaaga

SEQ ID NO: 699162 - DNA, 95 bp, Homo sapiens
tcggctccgcgcccgccgcgccgggagcagcaccgcggggccaggccagtctatccatatggggatggggaagccttggcattgtcctttttctg

SEQ ID NO: 699163 - DNA, 50 bp, Homo sapiens
tggagttcacgactctgagtgctgactttgctaccaggacttgctggccc

SEQ ID NO: 699164 - DNA, 96 bp, Homo sapiens
ttaacacatcatgaaggctagtttggatgtggaggggaatagactccatctatccatatgaggccctgagcctgtgcaattatttcgagagtcaaa

SEQ ID NO: 699165 - DNA, 89 bp, Homo sapiens
taaatgctgcggagattgaggtgtcggttcgtgctgctgagctgcccaggcttcacggagcggtatctttcagatgaaggcattgaagc

SEQ ID NO: 699166 - DNA, 101 bp, Homo sapiens
aaccccaaaatcagtgattctacatctcaagctcatattttgaagtgtttacggaggctgaggggatctggcggtggagcgctaggatcagacgcccccgc

SEQ ID NO: 699167 - DNA, 83 bp, Homo sapiens
cgtagtgctgctggcggcgctcctcagcctccgtcttggctcagacgctcatggtctgagagtcactggagctaccagaagca

SEQ ID NO: 699168 - DNA, 75 bp, Homo sapiens
ctggaggcggagctgcaacgctacagggtgggccaggaggcagattctcatcagatttggaaggaagcaaccatt

SEQ ID NO: 699169 - DNA, 100 bp, Homo sapiens
gagcccggagctggggcgacgaggcgattgcgggggcctgggctaggcttatcaggagggcagacttcaaaagctactaaaaatgaacggccctgaagat

SEQ ID NO: 699170 - DNA, 75 bp, Homo sapiens
cttcagtgtccatagtggattactatgagccaagtgttggagagcacaatggctgaacaagtccttcctcaggct

SEQ ID NO: 699171 - DNA, 75 bp, Homo sapiens
ctgttccgcacaggcctgctgaactgggtgctttatataggatgagcacaatgcctggactccccacccggccct

SEQ ID NO: 699172 - DNA, 75 bp, Homo sapiens
aaggggtgaaagaaaacccaagttgtggaagatatcaataagcgcagagagccgctccccagcctggaggctgtg

SEQ ID NO: 699173 - DNA, 82 bp, Homo sapiens
tcatcccctggatgggggaccacaagatcctcatcgacagtacctggagtagaacagaaaaattattatgtctgtgttccct

SEQ ID NO: 699174 - DNA, 101 bp, Homo sapiens
cttatatgtgatgccattccagcactggactcatggaggctgagcatttattcagttttgcagtggctcctgggataagatgctaaagatctggtctacag

SEQ ID NO: 699175 - DNA, 75 bp, Homo sapiens
tctgcccctattgtaagtgcagatggaacacaacagaacaaaatgtgcatgtcttcaactgacagcaaggaatgc

SEQ ID NO: 699176 - DNA, 101 bp, Homo sapiens
caccatccttctcgctgcagggctgaaggtgatgtggccgccctcaaccgacgcatccagctcgttgaggaggagttggacagggctcaggaacgactggc

SEQ ID NO: 699177 - DNA, 88 bp, Homo sapiens
ctttaccgcaattatggcatcctggccgatgccacggagcaagtgggccagtgagacctcgctacagtggtccagcacctcctcccaa

SEQ ID NO: 699178 - DNA, 75 bp, Homo sapiens
cctcaatgtcgtgctagaggggccgaagaaggccgtgaacgacgtgttgtgtgaattacgtgcctgagcctgaga

SEQ ID NO: 699179 - DNA, 100 bp, Homo sapiens
tagccagcccgagcaagtaaagattgccagtcggatgatgattctgggtcagcttcaggctctggatctggttcgagttctggaagcagtagtgatggaa

SEQ ID NO: 699180 - DNA, 98 bp, Homo sapiens
aaattctactgaccctgcagcatctaccgctcactgtagaccatctcaagcaggtggggctcctgtacgaagagggtgttcgcaaggcccagagcagc

SEQ ID NO: 699181 - DNA, 90 bp, Homo sapiens
tcaagggccctccacctgaggcagatcttcctaggagccctggaaacttgacggagagaggtgcagtagacattgttgcaatcatgatcg

SEQ ID NO: 699182 - DNA, 99 bp, Homo sapiens
ataatgataatgaagaacttatcaaggttgaagggaccaaaattgtcttggggaaacagctaattgagagaattatatccatggaagcagtcaagccca

SEQ ID NO: 699183 - DNA, 75 bp, Homo sapiens
ttgtacggcacttggcgtaaagccgcttccctcaagagtaactacaatgattacagtggcgagatcttgaacaac

SEQ ID NO: 699184 - DNA, 101 bp, Homo sapiens
agtatcaaatatgagaaagctaggccatctgaataactttactaaggtatagacacgtgtggccgtttacgctgtaggatcctcattcccactggctttga

SEQ ID NO: 699185 - DNA, 95 bp, Homo sapiens
accaaggatctggggatcttcgcactatcccaaggacccttgaacatctgtgaagaaatgactattctgcatggaggcttcttgctggccgagca

SEQ ID NO: 699186 - DNA, 95 bp, Homo sapiens
ggaggcacctgtcggcagactggtgacttcacttttgagtgcaactgccttccaggagtctccccaggacagtgctatcacccgggatattaacc

SEQ ID NO: 699187 - DNA, 75 bp, Homo sapiens
cggccgtgcgacagcgacccagccacccccggagcgcagtccccgaaggtgctggagaatctggtaaaagcacca

SEQ ID NO: 699188 - DNA, 100 bp, Homo sapiens
tggattacaactgttcatcctcacctatgcaaagaaagggaagctattgctgggattttgaggagaatgtgacagtgatgataacatgggtgccaaaaat

SEQ ID NO: 699189 - DNA, 87 bp, Homo sapiens
gccacccacaaacaaactacccattttcttttttggaactcatgagacccccatggctgggggttatggagtgatgggtgacgatgg

SEQ ID NO: 699190 - DNA, 82 bp, Homo sapiens
ccgcatctggctggagccctgcattcgcggcgtgtgcagcctcaaggaataggttctcctagtgtctatcatgcagttatcg

SEQ ID NO: 699191 - DNA, 100 bp, Homo sapiens
ggcaacatcaggtgactgtcccagaagtgaatcgcagagatggagtctccctatgttgcccaggctggtctcaaacttcctgtgctcaagttatcctcct

SEQ ID NO: 699192 - DNA, 100 bp, Homo sapiens
cgctggatggttttaagaaattcctggagagcggtggccaggatggggcaggggatgatgacgaagctgatccagttcgggcttatgaagaacctcatca

SEQ ID NO: 699193 - DNA, 100 bp, Homo sapiens
ctgcctcagcctcccaagtagctggggctacaggatatttctacccagctctcagacattttggacaatgtcaattgtgtcatcaaccgcttccaggaag

SEQ ID NO: 699194 - DNA, 101 bp, Homo sapiens
ggttttgccttacactaaaagcattacctcacctcatccaggtgtgggcacaggcagttcctcactgtggaatctgatgggcaatgccatggtgatgaccc

SEQ ID NO: 699195 - DNA, 90 bp, Homo sapiens
tcctccgatacttcccgcagtcgccacagatccatgatgtgcagttctctggagcaggcgctggctgtgctggtcactaccttccacaag

SEQ ID NO: 699196 - DNA, 90 bp, Homo sapiens
gcggcggcggcgtagccgtagagggaatgttacgttcataacttactaaggattagtgtatattttccaaccttgaggcatgaaattctg

SEQ ID NO: 699197 - DNA, 75 bp, Homo sapiens
cgagaggcagcgccatggcggagcagacctactcgtggtactgtctgatgagcgtgaaaggttgtttcaccgact

SEQ ID NO: 699198 - DNA, 100 bp, Homo sapiens
aatctgcccacccctcctgtaacccagcctgtttcacttcttgatatgaaaaacagtagctccgtatcgaatacattgacaaatggatgtgtcatcaatg

SEQ ID NO: 699199 - DNA, 97 bp, Homo sapiens
ggacgcctccattgtttgaccacaacaagggccggattctcacccagggaggcaaatacatgcaggcggtgattcagtatgggaagatagtgtcctg

SEQ ID NO: 699200 - DNA, 87 bp, Homo sapiens
tctgccacggtctgcccacccaacgcgaagacggtaacccgtgtgactttgactggatctattaatgagatgaagcggttggaagaa

SEQ ID NO: 699201 - DNA, 50 bp, Homo sapiens
ccgatgaagtgcagaggtttttttctggttacgtcggcgctgctaccgtg

SEQ ID NO: 699202 - DNA, 50 bp, Homo sapiens
cggaaacaaagttattttgctcgtgtatcctactcagtacatgtatctga

SEQ ID NO: 699203 - DNA, 100 bp, Homo sapiens
ctcaaggataatcactaaattctgccgaaaggactgaggaacggtgcctggaaaaggtcctaaagaagacgaagagaagccttcagcctcagcacttgag

SEQ ID NO: 699204 - DNA, 51 bp, Homo sapiens
ggccgggagccgaccggcacagcagggaaaagaagatctcccggagcagtg

SEQ ID NO: 699205 - DNA, 100 bp, Homo sapiens
agcaaagagtggatccgacctttggcttcaggaaatggccagtgatgaactgagggagttgaggaatgccatgacccaggaggccatccgtgagcaccag

SEQ ID NO: 699206 - DNA, 101 bp, Homo sapiens
cctgtttgagaaaaggcctaagaattttggcattggaatgctgaaatacttttaaagctgataaacctagggaaactgcctcctgatgccaagccccctgt

SEQ ID NO: 699207 - DNA, 83 bp, Homo sapiens
ctattctgtactctgaatggtttagcaactcagtgtattcaccgcttacaaacacgcagatggcaagaagattgatggcagga

SEQ ID NO: 699208 - DNA, 75 bp, Homo sapiens
acaacgaccacgtctccaaaatgagtcgcatcttcaacccccatcttctgaagatgatgagaaactgaaaaagag

SEQ ID NO: 699209 - DNA, 100 bp, Homo sapiens
gtgcatgttacgcagcggccagatgatgctggcacagggccttctgctgcatttcctgcccagaggagtccattgagaccatgcggacccggctggagcg

SEQ ID NO: 699210 - DNA, 75 bp, Homo sapiens
attgcggaataacatcggaggagaagttctccactcagcattggagccaggagaaatgaaggtgggaccctcagg

SEQ ID NO: 699211 - DNA, 75 bp, Homo sapiens
catttttgatcaggagaaagaagacagccatcatttgaaagatatttggagtctgggagtgatccttttcatgtt

SEQ ID NO: 699212 - DNA, 105 bp, Homo sapiens
ctggcatctgccggctgctccgcaccccggggtcccaggaagggcggcccagacaatgcagatcttcgtgaagactctgactggtaagaccatcaccctcgaggt

SEQ ID NO: 699213 - DNA, 90 bp, Homo sapiens
gcctttataagtcagtttttgagcagtcacttagtcaacaagaggcagaggaggtggacacggtggacgtctccggcgtgcccgcagagg

SEQ ID NO: 699214 - DNA, 100 bp, Homo sapiens
tcttttctctaagacttacaaattacaagaacgatctgatcttacagtcaagatctgtgccatcattggcgggaccttcaccgtcgccggcatcctggac

SEQ ID NO: 699215 - DNA, 51 bp, Homo sapiens
ctttgccacacccagcgtggtgccaggattctggttgatctgaaaaatgaa

SEQ ID NO: 699216 - DNA, 100 bp, Homo sapiens
tacgtgcacaacagcagcttgaacaagaatttaatcaaaagagagcaaaatttaaggagttatatttggctaaagaggtttccaacatggctagatccat

SEQ ID NO: 699217 - DNA, 100 bp, Homo sapiens
cagctgtgtgtccagaacgtgccatggagacgcttaacgatgacgtccggttgtttgccttcgtgcgcttcaccaccggggatgccatgagcaagaggtc

SEQ ID NO: 699218 - DNA, 82 bp, Homo sapiens
ctctactggacaaacatttcctccaagacctgatggccaaaagaaaggaagaaaatttttcctctcctaaaaatgccaaaag

SEQ ID NO: 699219 - DNA, 51 bp, Homo sapiens
tgtgatgtggaggaagaagagctcagacgatgtacctgtcccagctccagc

SEQ ID NO: 699220 - DNA, 75 bp, Homo sapiens
gttcgactgctagagccgagcgaagcgtgtctcccagtctgctaaagccctaaggccatcaccatggacttccag

SEQ ID NO: 699221 - DNA, 90 bp, Homo sapiens
accaccttcatctccaccatcgagagcatcagtgatgtcacgtttggagcaggggtcagttacatcgggacaccacggactccgtcgtca

SEQ ID NO: 699222 - DNA, 75 bp, Homo sapiens
tgaggatcgaatcttcactcccgctgtctcagcagtctacagcacgagagcacgttttcaatatcataggagcat

SEQ ID NO: 699223 - DNA, 75 bp, Homo sapiens
gcagtggtcgcttcttctccttgatgatgaggagtctgatgaggaagctgtgaagaaaaccaacaaatgtgtact

SEQ ID NO: 699224 - DNA, 74 bp, Homo sapiens
tccagaagggccaccccgacctccaagggcagcctggtcctgtcccagtgcagccatcaccctgtgaagctgat

SEQ ID NO: 699225 - DNA, 100 bp, Homo sapiens
taccacctgcgggtgcttggggagaagtcacggacaagttcactgagagcgtctacgtcctggccaacgagccatccgtggccctgtaccggctgcagga

SEQ ID NO: 699226 - DNA, 82 bp, Homo sapiens
acacctcagctggctgacattgttgcaacagggtttgcagtaagcattggctactggcatgacccttacatacagcactttg

SEQ ID NO: 699227 - DNA, 50 bp, Homo sapiens
caaaggcagcaagagatgcacaggagtttccagctgttaaccatcctcag

SEQ ID NO: 699228 - DNA, 82 bp, Homo sapiens
ggcgcgcccggtgacggcggagaggcgccccccgcagcagtccctgaagaggaaggagaaggaatatgagcatgaaatggag

SEQ ID NO: 699229 - DNA, 100 bp, Homo sapiens
ggatgagaaggacgacaagcccatccgaggatgcagatgtctccagccctcacctgcctagtcctgggcctggcccttgtctttggtgaagggtctgctg

SEQ ID NO: 699230 - DNA, 90 bp, Homo sapiens
cttgccccggtgggccatcattggttggctcctgacaacgtgcacggctacgactggcaaagatgagggaggctgaagcggcccaggggc

SEQ ID NO: 699231 - DNA, 89 bp, Homo sapiens
ctgagaccctccagcgctgcctggaggagaatcaagagctccgagtgcctccggagccagcgtggtggccatagacaacaagatcgaac

SEQ ID NO: 699232 - DNA, 89 bp, Homo sapiens
cggcggtacccgggtggttaaacttcgcaaaatgagtggtgagatcaagtcggtagatcccagactaatccatgtgatgctgatggata

SEQ ID NO: 699233 - DNA, 100 bp, Homo sapiens
gacagctcgagtgagcggactgcccaggacttcggaactagacgaggagtccatgaagaatatcagctgccatattacgacttagtgccctctgaccctt

SEQ ID NO: 699234 - DNA, 90 bp, Homo sapiens
ggaacggcggcgacaagggtgttcccgaactagagtggctccatcaagtatgatggtgaaggatgaatatgtgcatgactttgagggaca

SEQ ID NO: 699235 - DNA, 100 bp, Homo sapiens
tttcagggagcagcaagacaatcactgcagagataccagagcactagacaaactgaatggatttcagttagagaatttcaccttgaaagtagcctatatc

SEQ ID NO: 699236 - DNA, 98 bp, Homo sapiens
cttgatccccgtgctccggacaccccgggcctcgccatggccctcagcatcctcatgctccctcacaacatcccgtccagcctgagcctgctcaccag

SEQ ID NO: 699237 - DNA, 97 bp, Homo sapiens
gtgggctgcgtgtgggacgggtttagcggcagcctcttcgatgttgatcttgtctcagaatattgcccaactggaggcccaggtggaaaaggttaca

SEQ ID NO: 699238 - DNA, 105 bp, Homo sapiens
gagttgttcctttggccacatatatgcgaatctataagaaaggtgatattgtagacatcaaggaaatgaaggccgaatttataaaggaagcccagccagggaaaa

SEQ ID NO: 699239 - DNA, 100 bp, Homo sapiens
tttgaaattgtaacaacgtctcgaactttctatgtgcagatcctgataacttaagtgactctctcttttccggtgatgaagaaaatgctgggactgagga

SEQ ID NO: 699240 - DNA, 82 bp, Homo sapiens
gctgaggggaaccatacatcagagttacgttctgaaaaattggagactggtctatgtacagacatggagcactcagaatctt

SEQ ID NO: 699241 - DNA, 115 bp, Homo sapiens
caacgtctgcctccctggttcaagtgattctcgtgcctcagcctcacaagtaactgggattatacagggaaagaatcatgtgatgtacagctttatataaagagacaatctgaac

SEQ ID NO: 699242 - DNA, 90 bp, Homo sapiens
gcccttctgtggaccaggcgagcaggtcagccagagcagcctccccatgctgtcctcgccgtcaccgggccagcaggtgcagaccccgca

SEQ ID NO: 699243 - DNA, 100 bp, Homo sapiens
tggtctccaggtttccctattacaactccctcaaggactgcctttcctgggcttcctgaggctgcggtggtcacgcttcgcccgtgtcctcctcacccgc

SEQ ID NO: 699244 - DNA, 83 bp, Homo sapiens
caagaatgttactaacaatctgaaatctctggaggctgcatctgaaaagacgtccttctatggccgcttcaggcacttcttgg

SEQ ID NO: 699245 - DNA, 98 bp, Homo sapiens
gccaggaccaatgctgaaaaacaggtaattaataaaatgtctccaacatctctaaagatcacactaaggcaactcatggaggggtcttcaaagacctt

SEQ ID NO: 699246 - DNA, 100 bp, Homo sapiens
ctgcctccttctccacccccatcacctgcctcagaacagactgtcacagtggaggaagggagactgcattgcttattgatccaaaaaattcctgttcttc

SEQ ID NO: 699247 - DNA, 82 bp, Homo sapiens
ccgcgtccgccgattcctcctccttggtcgccgcgtccttggctggcgtacagtactactggtatgacgagcgggggaagaa

SEQ ID NO: 699248 - DNA, 82 bp, Homo sapiens
caaccttgaggaaccttgacgagtgtccggagtttagaaaacttagggatgggtactccaaagattcaggtttactcacgtc

SEQ ID NO: 699249 - DNA, 90 bp, Homo sapiens
aagctgtctaagtccaaagatttttacccagtggcaggagatgccaaagataaagacatctcctggttctcccccaatggagaaaagctc

SEQ ID NO: 699250 - DNA, 82 bp, Homo sapiens
cgcgtcggggcgccctctccactgcgcgcggggaccctcacaatgatcccaatgctcagggggatgccttcaagactctctt

SEQ ID NO: 699251 - DNA, 100 bp, Homo sapiens
tattgtggctggagacatgagcaagaaaagcctctgggagcagaagggaggctccaagacctcatcaacaattaagctacttgggaggctgaggcaggag

SEQ ID NO: 699252 - DNA, 74 bp, Homo sapiens
ggggctgcgaccgcatcgtgcccgtggacatctacatcccaggctgccccctcggtcactctgttcccgccctc

SEQ ID NO: 699253 - DNA, 89 bp, Homo sapiens
ctgctgctcaaagctgctgccgccccttgggctaaaaggttttaaaatcaaagatgggaaaatcggagaaaattgcccttccccatggc

SEQ ID NO: 699254 - DNA, 90 bp, Homo sapiens
cagctgcgcttcttctttcagctgttcgttcaaggctatgccctgcaactgcaccagttacagaaataccgctaccaagatgaagacacg

SEQ ID NO: 699255 - DNA, 123 bp, Homo sapiens
ccagcatctaactaacacggtttttattgacagagctctgatagttgttccttgtgcagaaggtgttggagcgggccggagagaagtagagtgggctgcgaggagaaggaaacaggcctttcg

SEQ ID NO: 699256 - DNA, 97 bp, Homo sapiens
cgttgcagggtgcgggcgagcgtcgacccgggccgctcctggaggaggaggtgggaggttacaatggccaacattggaataaatggaaatcattctc

SEQ ID NO: 699257 - DNA, 101 bp, Homo sapiens
gtggccaaggtcaacaccctgattcgttcattgactccacttgatgcgagagatatattgatgcaaataggaaaacaggaggatgagaaagtagttaacat

SEQ ID NO: 699258 - DNA, 100 bp, Homo sapiens
gtttaatcagtgcaagcgaaattaagggaaaatggatgtagaaaatgagcagatactgaatgtaaaccctgcagtactatactggcaattgctggagaag

SEQ ID NO: 699259 - DNA, 83 bp, Homo sapiens
agcgcgaatatcgtcatcgttagaaggttattcagcttctcaaggctggaaaagcgaaggaagtttcctacaatgcactagcc

SEQ ID NO: 699260 - DNA, 100 bp, Homo sapiens
tgcctctgctccgcctgctgctgcggctctgacgaggacccagccgccaggtaactaggatttctacctcaaccgcgagacctatgcaaggacggtgtgg

SEQ ID NO: 699261 - DNA, 74 bp, Homo sapiens
cgtcgatccagctgccagcgcagccgccagcgccggagatcgagatggtgatcatggagcgtagcaagctctca

SEQ ID NO: 699262 - DNA, 98 bp, Homo sapiens
ggaaatgtctgccgccgccggctctcgggagcgcaacactgcagtggccacagatgtctttaattccaaaaacctggccgttcaggcacaaaagaaga

SEQ ID NO: 699263 - DNA, 100 bp, Homo sapiens
gaaaaattcaagaagttgaaaaacgcttttcacgtcacctggagagatgcacagcaggcgcggggcgaaggagctgctagaacaatgctgaggcgggtga

SEQ ID NO: 699264 - DNA, 90 bp, Homo sapiens
aaggataagtcgaaggggaaggcgcctgaagaggacgaaggtggcgacatgtctaagaatgtgagccagtcacagatggcaaaattgaac

SEQ ID NO: 699265 - DNA, 101 bp, Homo sapiens
cgtggaagcaattcatagagctgtggaatttaatcctcatgttccaaaagtttgctgtaatggcacaagagtatttgtgcagaaagaaattcttgataaat

SEQ ID NO: 699266 - DNA, 75 bp, Homo sapiens
cctaccagccagatcaacacaattgatagctttcttcgagagtcacccagctccttcagctgagcgtaccatcca

SEQ ID NO: 699267 - DNA, 98 bp, Homo sapiens
ggatttctgaacccaaaacatcaaatctgtgtgggaatcgagcatatggaaaatctctgacgcaaacatgcagatctttgtgaagaccctcactggca

SEQ ID NO: 699268 - DNA, 90 bp, Homo sapiens
ctgcccggtgcccgaggaggcagccaagctcgtagcctgccactccgtgcgaatgtatcctgtcaggtataatgtcagtgaatggcaaga

SEQ ID NO: 699269 - DNA, 137 bp, Homo sapiens
agaggtgtatgtgcccacagtgtttgagaactatgtggcagatatcgaggtggatggaaagcaggttgtggagcatggcctgtttgtcaagcactgcaaagtcgaggtgtatttgctggaactgaagctctgtgaga

SEQ ID NO: 699270 - DNA, 89 bp, Homo sapiens
tcttcagccgaggccgccgccgcctctccttgctgcagccatggagtcaaaatgcagatcttcgtgaaaacccttaccggcaagaccat

SEQ ID NO: 699271 - DNA, 90 bp, Homo sapiens
aaggaagaagtgggctgaagaatttaatgatgaaactaatgtgagatgctcttaatgctcagcagtataaagtcctcattggtaaccggg

SEQ ID NO: 699272 - DNA, 74 bp, Homo sapiens
ccggtttgacgcacacggcaccaaactgccttagaaaatttacgtgtatacctgtgtgagaaaatcatagctga

SEQ ID NO: 699273 - DNA, 75 bp, Homo sapiens
gaaacagtaacaaaggactgcctcagtctacgtccggatgctgctgatagcacgtctttcgatgtccagctagga

SEQ ID NO: 699274 - DNA, 90 bp, Homo sapiens
caggaggttgctaacccagaacactatattaaacatcccctacagaacaggcggatggcaggatgaaacctggccagatggttggactgc

SEQ ID NO: 699275 - DNA, 83 bp, Homo sapiens
cgggacgcgggtcgcgtcgttgtcctccgcgagcgtccggattgcaggtttttcgttggaatatacgttgcacatttatggcg

SEQ ID NO: 699276 - DNA, 115 bp, Homo sapiens
ccccgggatcctgtctggagagaagcagcggatcagcagagacaatgcagatcttcgtgaagactctgactggtaagaccatcaccctcgaggttgagcccagtgacaccatcga

SEQ ID NO: 699277 - DNA, 82 bp, Homo sapiens
aggcaaggagctaaagcagcgtgcgttcagccctgggtttaagaaaacccctcctaagatcccttataaggccatcgcactt

SEQ ID NO: 699278 - DNA, 76 bp, Homo sapiens
cttcttttttgagaaaggaaggaatatatcctgactgattcaatggctgccatccggaagaaactggtgattgttg

SEQ ID NO: 699279 - DNA, 100 bp, Homo sapiens
gttaaagccatcgccacaacctggacaggcagcaagccgcctgtcttggttagatggctctggattaggattctcactggaataccccaccattagttta

SEQ ID NO: 699280 - DNA, 75 bp, Homo sapiens
tctttacctgcttcccaatcccactgatgaggatcagcccatggcagctcactttgctggtggccagtgaggact

SEQ ID NO: 699281 - DNA, 101 bp, Homo sapiens
ctgatcgcaaatacctgaaagattgggcaagagaagaattcagaagaaacaaaagtgccaccgaagagtcagaagaagaagttgtagaaggagagaaggaa

SEQ ID NO: 699282 - DNA, 82 bp, Homo sapiens
cgcgagtgaggaaaggaggtactgtaggtgtggacactgccagcggctgcagccgacttggaatgacctgggagacaaatac

SEQ ID NO: 699283 - DNA, 100 bp, Homo sapiens
ttcaggaacaccccattttctctgaagttatctcggaccaggaggctgtggccgccattgagaagttcgtggtcctggaaagacaagcatcatgcctctg

SEQ ID NO: 699284 - DNA, 97 bp, Homo sapiens
caggagatggttcgggcctagcggagccgggactggagatgatatcatcaagttgaatcgaaaggaagggaagaagcagaattttccaagactaaat

SEQ ID NO: 699285 - DNA, 100 bp, Homo sapiens
gtgtggtactttggcctccactatgtggataataaaggatttcctacctggctgaagctggataagaaggcatgcccaagagaatcgtaaatgcaaaaat

SEQ ID NO: 699286 - DNA, 82 bp, Homo sapiens
cccagctccacatcaccccagggacagcatatcagagctttgaacaggtaactcagcagttgaaggcgcgattcttaccaag

SEQ ID NO: 699287 - DNA, 50 bp, Homo sapiens
gaaaagcctccttctggttccaaatggtcctccacagcctgtgaatcccc

SEQ ID NO: 699288 - DNA, 83 bp, Homo sapiens
ggacacagtgatgaagaaagtgttagaaacagtagtggagaatcaagtgtcctggtgaagacctagttcttgccggagacaat

SEQ ID NO: 699289 - DNA, 74 bp, Homo sapiens
ggccgaccagggacctgcccgcctgcggctgctccgggaacgggaggatgaaattgctactatggagtgcatca

SEQ ID NO: 699290 - DNA, 100 bp, Homo sapiens
tgggggactatgtggtggacttggacacgtcccagctctctctgggcatctggaaaggtaacttgggtttttactcctgtaacaactgaaataacaagtc

SEQ ID NO: 699291 - DNA, 82 bp, Homo sapiens
catcaagttgcaagagattccaaccttccagccccttttgaaagattacctaggaacagtacgatttggggttatcacaaat

SEQ ID NO: 699292 - DNA, 114 bp, Homo sapiens
cgcgcccgggaggaaggaacgaggcaaggagctaaagcagcgtgcgttcagccctggggatgatcggctgaatgtaacagaggaactaacgtccaacgacaagacgaggattct

SEQ ID NO: 699293 - DNA, 100 bp, Homo sapiens
ggcgagatgccgtgtggggaggattggctcagccacccgctgggaatcgtgcagggattcttcgggtcagtatagaccttctgatttgctgtgccctgag

SEQ ID NO: 699294 - DNA, 96 bp, Homo sapiens
acctgagggactggctcctgggattctgaggatgacggagagtccgaggcggccaagcagctgattcagccgatagctgagaaaatcattgccaag

SEQ ID NO: 699295 - DNA, 98 bp, Homo sapiens
ctgaaaagctggtctttggaaagggaacgaaactgacagtaaacccatgtgcacaagcttctcatcgtggtggagctgttgctgggggagatccctga

SEQ ID NO: 699296 - DNA, 142 bp, Homo sapiens
aagatggagctgtctgcagtgggcgagcgggtcttcgcggccgaatccatcatcaaacggcggatccgaaagatgccggtggccgtgggtccctacggacagtcccagccaagctgcttcgaccgtgtcaaaatgggcttcg

SEQ ID NO: 699297 - DNA, 75 bp, Homo sapiens
ccaggtcacgtggcacaagcgtggaggaaacctccctgcccggcaccagccgtccacccatgacattcccaagtt

SEQ ID NO: 699298 - DNA, 71 bp, Homo sapiens
aaggatgcccggtccccatcaccggcacacattgtcattcacaatcgctatgaaggcaaggatgtttcaaa

SEQ ID NO: 699299 - DNA, 75 bp, Homo sapiens
ccggggaggtgggctcggccgaagtagtaaaagaggacttcaaaggtttactcttatctgactacaagttcagct

SEQ ID NO: 699300 - DNA, 100 bp, Homo sapiens
ggaagaaagctatctagggacgagatctagaatcaactgagagagatgcttaaaaatcaccagttactttaatgaacgcaaacatgcagatctttgtgaa

SEQ ID NO: 699301 - DNA, 82 bp, Homo sapiens
cccagccagcgcagcgacggggcgctgcctggcccaggcgcacacggaagtggtgaagaacaaattggttttgagctagtgg

SEQ ID NO: 699302 - DNA, 100 bp, Homo sapiens
agcggtcatctacctggtgtcaatagtggttgcggttcccctatgcgtgtgggaattacagaaactggaggccctggagagtgaatttgtttcctgccag

SEQ ID NO: 699303 - DNA, 87 bp, Homo sapiens
tctacaagatggcggcggtcggggccgaggcgcgaggagatattattgataataaggcctctgtaaccatggctagttctgacgtaa

SEQ ID NO: 699304 - DNA, 80 bp, Homo sapiens
ggagtgaacggagagcgtagtgaccatcatgattttgacacttcatgacatgtcattatttagagcaataatgaatattg

SEQ ID NO: 699305 - DNA, 75 bp, Homo sapiens
attccaacgccaccaattccaacctgacaatgcagatcttcgtgaagactctgactggtaagaccatcaccctcg

SEQ ID NO: 699306 - DNA, 100 bp, Homo sapiens
ccggaagcgcggagggagccgcgggatggaccgcaggcaacagagacatccagatgatcagctgtggggctgacaagagcatctactttcgcagtgccca

SEQ ID NO: 699307 - DNA, 100 bp, Homo sapiens
aacagccagactgctgtcagcctcagagaacttgaggaagagaacacgagcttgaagaacaccttccaccatgaccacctcagcaagttcccacttaaat

SEQ ID NO: 699308 - DNA, 100 bp, Homo sapiens
tgctgcttatggagcaagacagaaacgaagaggccatcaaacttttggaatctgccaatggactgcccctgatggtgattattcataaatcctggtgtgg

SEQ ID NO: 699309 - DNA, 50 bp, Homo sapiens
catagctcttcttgccttgccaagttgtactcgtaaaacaaggatcatcg

SEQ ID NO: 699310 - DNA, 75 bp, Homo sapiens
attatgaagaagatgcacgatcagttacatctatgggccagctctcaatgttgcaagaaaaaatagaccatttgg

SEQ ID NO: 699311 - DNA, 73 bp, Homo sapiens
acactcgatggctggaggcctctgttgtaggcaagatcaacaaagaacagccctgtggcccccacagcccagc

SEQ ID NO: 699312 - DNA, 100 bp, Homo sapiens
ggcgggcggcaaaggagcagccatgagggccgggcccagtcaccgaccctccttcgagaactcatagaacggaagaccagctccttggatcccaacgatc

SEQ ID NO: 699313 - DNA, 83 bp, Homo sapiens
ttctctgtactatgtcgattcgacagtgtgaaatggcctttccccgggtcaagccagcacctgatgaaacttccttcagtgag

SEQ ID NO: 699314 - DNA, 100 bp, Homo sapiens
tttcatgcagtgacatgttgataaaaaatgatgtcacccacaaaagctgtatataatgccagacattggaatcatccagattcagaagaactgcctgggc

SEQ ID NO: 699315 - DNA, 51 bp, Homo sapiens
acaaaatggtggtctctttataatgtctagagcatgtttggaaaggattca

SEQ ID NO: 699316 - DNA, 88 bp, Homo sapiens
ccgccgccgggctcggggcctccgcagcgacaacatggaggccgtgaagaccttcaatagcgagatgcagattgagttcataaaacaa

SEQ ID NO: 699317 - DNA, 50 bp, Homo sapiens
ggaataaagagctgtatttgatcagccaattttggaatcaggagccgtag

SEQ ID NO: 699318 - DNA, 100 bp, Homo sapiens
agctgtaatagaatgccagcaaccagaagcagacttatacaggaaaactgtggtatgtctgtgtgtaatggtaaaatatatatcctgggcggaagacggg

SEQ ID NO: 699319 - DNA, 90 bp, Homo sapiens
caacaccagcaccgcagatgttgtcaaggtggcctaccaggaggccaggggtgtcgccatggacaatctctatgggaagcagaaggcaag

SEQ ID NO: 699320 - DNA, 88 bp, Homo sapiens
cgtgcagacatctacaaccttcgatctcctgacgaaacatacatatgatagttgagaaagacacatattctgatcatgaagaaataaa

SEQ ID NO: 699321 - DNA, 100 bp, Homo sapiens
gcgcgtggaacggctgcttttggaagaaccttcgagatctgcggtctggggtctggttgaaagatggcggccctcactaccctgtttaagtacatagatg

SEQ ID NO: 699322 - DNA, 75 bp, Homo sapiens
ctggctcttgccctcatcctggttctggaatcctcagttcaagggttggggtgctggaggactgcttcaccttcc

SEQ ID NO: 699323 - DNA, 75 bp, Homo sapiens
atttcaaaatccatatgaagaaccaccaaagttaccacgaagccggaagcagagagtccataaaacagacctgga

SEQ ID NO: 699324 - DNA, 97 bp, Homo sapiens
gctctcccagccgtccgacctggatctccaagacgtagaggaagtggagatcggcagagacaccttctggcccggaaagatatggagagagatttga

SEQ ID NO: 699325 - DNA, 97 bp, Homo sapiens
ctgacctgcctgagaggttccaggccctggccaacgtcaacattgggagcctcatctgcaatgtaggggccggtggacctgctccagcagctggtgc

SEQ ID NO: 699326 - DNA, 50 bp, Homo sapiens
gggttctggagagcggggtgtggggtattggcaagcttgccagtgtacct

SEQ ID NO: 699327 - DNA, 82 bp, Homo sapiens
ccaaggctgcagaagccaaagccacgggccccctgctgcgctggctcaaggtgaacttcagtgaagccttcattgcctggat

SEQ ID NO: 699328 - DNA, 98 bp, Homo sapiens
atctcgctcggctgcgggaaatcgggctgaagcgactgagtccgcgatggagagaaaccctaaagcaggcagcagctcagaagtcccagcagctttca

SEQ ID NO: 699329 - DNA, 90 bp, Homo sapiens
cggcggggtttcttcgttgcattgcctgagaggagcggagtctgccaggtggtgtccatcatggtttttcgttggaatatacgttgcaca

SEQ ID NO: 699330 - DNA, 75 bp, Homo sapiens
ctgcggcgaggatggagggcctggcagtgcggttgctgcgcggcagcaggctgatggagtctcgctttgtcgccc

SEQ ID NO: 699331 - DNA, 100 bp, Homo sapiens
atggcatatcagttatacagaaatactactttgggaaacagtcttcaggagagcctagatgagctcatacagcaattgcccccacatgtgcgcatctggg

SEQ ID NO: 699332 - DNA, 75 bp, Homo sapiens
atttttggacctgaaacagaaattctggaacacctatatgcagcagtgttgtactgctacttctataaacggaca

SEQ ID NO: 699333 - DNA, 98 bp, Homo sapiens
gaaaaaattcaaaactagtccttattttccaaccacagaagtctgcggtcttgcagttcttcagactgctttaataaagtgatgccaccaaggaaaaa

SEQ ID NO: 699334 - DNA, 74 bp, Homo sapiens
agtggatccttcccccgaaagcccggctttcagttgcatttgctggtctggcctttgcgtccttctacctggca

SEQ ID NO: 699335 - DNA, 110 bp, Homo sapiens
catatccgtggacctccatatgctcataagaacccacacaatggacaagtgggcagagcggcttgggtaaatccaccttaatcaacaccctcttcaaatccaaaatcagc

SEQ ID NO: 699336 - DNA, 73 bp, Homo sapiens
ggcggccgggccctcgagacggggacggcaatgccaccgtagataagttggaggacttcatcaacaacattaa

SEQ ID NO: 699337 - DNA, 51 bp, Homo sapiens
ccggtgcgccgaggctgctcacaaaacagaagatggctgtgccacccacgt

SEQ ID NO: 699338 - DNA, 82 bp, Homo sapiens
ggcggccacggcatcctgtgctgtgggggctacgaggaaagatccagtttgctgaccagaagcaagaattcaacaaacgtcc

SEQ ID NO: 699339 - DNA, 100 bp, Homo sapiens
cggattctcccacttggaggcactgctggatgacagcaaggagttgcagcgagagaatggcttactacacctccaggatgcagttccccatggagatggc

SEQ ID NO: 699340 - DNA, 96 bp, Homo sapiens
cctgtcctgctgcctccactactgcaaagacaaggctaaggacttcatgcccgccagcaaaggaaagaccacagcaagattctttcattcgtctcc

SEQ ID NO: 699341 - DNA, 100 bp, Homo sapiens
ctccatccagccacatcaacctcctcacccaacagacaagttggatggcttgaggactggtactaaaaggaaacgtgactgggaggccattgccagcaga

SEQ ID NO: 699342 - DNA, 89 bp, Homo sapiens
ccaagatgcagttttttgatgctgaggagctcctggtcgatgaagaggatgatgtttttggtgaaggcatgaacaaccgggaggtgctg

SEQ ID NO: 699343 - DNA, 82 bp, Homo sapiens
tcaacacgaaaatcccaggaatcagagtactacaaagtgatcatttcttacatttactgcaagctgacaatgtccaaatagg

SEQ ID NO: 699344 - DNA, 100 bp, Homo sapiens
gcgcgacgaccctagtgctcgtcgccgtggcgccatgggtgttgtccgcagccgcaggaaagtaatggaccagtgaaggtgtggggaagcattaaaggac

SEQ ID NO: 699345 - DNA, 89 bp, Homo sapiens
ctctcataaacagcctattcctaactgatctgtacccagaaagagtcatacctggagcagcagtttcagaagaggagccccgccgaggc

SEQ ID NO: 699346 - DNA, 51 bp, Homo sapiens
agagagatggagagagacctagttagtgagaaagatcagtctaaagaaaag

SEQ ID NO: 699347 - DNA, 114 bp, Homo sapiens
ttcccagagctttcacgaaggcaccgacgtcatcatgctgaccaccaatcagatccgtaagacaatgcagatcttcgtgaagactctgactggtaagaccatcaccctcgaggt

SEQ ID NO: 699348 - DNA, 80 bp, Homo sapiens
tgtccccgctccgccgcccgagcagggagtgcatccgccccaacccttttccccctcgtctcctgtgagaattccccgtc

SEQ ID NO: 699349 - DNA, 119 bp, Homo sapiens
ggcgggaggctcggcggcgggcggcagcatgtcggtggcggggctgaagaagcagttctacaaggcgagccagtaagactttgaccccgacgcaggcttcagtgattgccgcggatcag

SEQ ID NO: 699350 - DNA, 105 bp, Homo sapiens
acgcgttttggttcccggttggtgcttcctgttcgcagctgcggcagtgaggtgatacaattctggagactggagaagtaattccaccaatgaaagaatttcctg

SEQ ID NO: 699351 - DNA, 51 bp, Homo sapiens
ttgattactcagtctctaaaaagctaaggaactggataatttctgtaaccc

SEQ ID NO: 699352 - DNA, 97 bp, Homo sapiens
ccggcctgtggcccccgcgccccccatggttctgggccggagaaggggcgacgttcgggcaccccccgaatggacaatctttccttctgtcaacggc

SEQ ID NO: 699353 - DNA, 100 bp, Homo sapiens
cggtgctcgagtgcctgcaggatgtgagggaggtggagcagttctggaggttttatagccacatggtacgtcctggggacctgacaggccacagtgactt

SEQ ID NO: 699354 - DNA, 74 bp, Homo sapiens
gtggcccgggtcttccagaaggctgtagaccagagtatcgagaaggttgtggcagcactgcctgaaggtatgag

SEQ ID NO: 699355 - DNA, 100 bp, Homo sapiens
gtcgccgcgtccttggctggcgtacatttatgcagtgtgtgattctttctaaaacaactccctggaagagaggacatttaattcaacaatttattggcca

SEQ ID NO: 699356 - DNA, 101 bp, Homo sapiens
cctctccatgtggctgctgtctgtggagtgatttggagaacaatgcatgtaagtctgacatcatgatgtccatccggcaaagaagagaaataagagccaca

SEQ ID NO: 699357 - DNA, 101 bp, Homo sapiens
atgcataatatggaatgttcttaacccagaagtagctgaatgtgttactccattgctgaggagtgcaggaacgaatgcaggaatttgggaactgagctgtg

SEQ ID NO: 699358 - DNA, 100 bp, Homo sapiens
tggccgaaggggcgtctgcggctctccgccgtccccagccctgcctctccctgggctctgggtgaagagggaacagaaatctttgccccctgactttgga

SEQ ID NO: 699359 - DNA, 100 bp, Homo sapiens
ggcattggaacttcctgttctgatagcgtggaagacttaattcagtgcacaaatgagatgaatgtgaacatcccacagttggcagacagtttatttgaaa

SEQ ID NO: 699360 - DNA, 75 bp, Homo sapiens
cccaccatgtcagacgcagccgtagacaccagctccgaaatcaccaccaagtgtgctggagaagagaaacgagtt

SEQ ID NO: 699361 - DNA, 98 bp, Homo sapiens
ggagagttctgcatgttgattcttcaagacccggcaggccccctaagcgttctttgggagtgttgcaggaaaatgcccgccttctgacccatgcagtc

SEQ ID NO: 699362 - DNA, 100 bp, Homo sapiens
ctatagatgagaaaccatacaagctgtgaatgacatcttcgagtggtccagggaccaccgagcccaccacaagtactcagagacggatgctgacccccac

SEQ ID NO: 699363 - DNA, 100 bp, Homo sapiens
gtctgaggcggcgcggccatggctcacctccggggatttgccaaccaggtgggacgagctatggccattgcagccctggacatggcggaatgtaatccgt

SEQ ID NO: 699364 - DNA, 82 bp, Homo sapiens
gccagcggccgagcgggcggcttcctggcctgggcgctccggtggcggcggagagctccacgcaggagatcggtgaggagct

SEQ ID NO: 699365 - DNA, 51 bp, Homo sapiens
acgaggaggtgcgcgagaagtacaaaggaatgtatcctgtcaggtataatg

SEQ ID NO: 699366 - DNA, 74 bp, Homo sapiens
aaggaacttggttccccctccctcagcttccgccccaaaaggaacttaagagatttgagaacttcataaaatct

SEQ ID NO: 699367 - DNA, 105 bp, Homo sapiens
gggccatggccggaatgcagtaccctcagcagcagatggctctgagagattcctctgcgaatctgtttttagctatcaagtggcatccacgcttaaacaggtgaa

SEQ ID NO: 699368 - DNA, 75 bp, Homo sapiens
gacctgaaacagaaattctggaacacctatatgaagaagctcattcacacagaagacccatttaatgatgaacat

SEQ ID NO: 699369 - DNA, 82 bp, Homo sapiens
aaacctcctgcaaaagtggaagcgaagccgaaaaaggcagcagcgaagatattcatgatcagaacagtaagaagcccgtcat

SEQ ID NO: 699370 - DNA, 82 bp, Homo sapiens
gtttgcacggagcagcaaacgcagagacaaaagaaacgggccccgactgagacgagttgtactgctgtcacaggaaatggac

SEQ ID NO: 699371 - DNA, 90 bp, Homo sapiens
gagaggatctggtgtaccaggcgaagctggccgagcaggctgagcgatacgacgggaaagcaggcaggatgggagagtcgccgatagaac

SEQ ID NO: 699372 - DNA, 75 bp, Homo sapiens
tccactgccactacagggaagtgcatcacatgtcagatggttgaaaaagaaggttatctgcaaaaagctaaaatt

SEQ ID NO: 699373 - DNA, 98 bp, Homo sapiens
gctggaccacttctctgtcgacggctatgacagttctgtctcagaccagtatccttcaggggttctcttactctgatttgcggaaatttggcatcgtc

SEQ ID NO: 699374 - DNA, 101 bp, Homo sapiens
gtgaccagaagcctgcatttctgcattctgcttaattccctttccttagatgccttcaattaagttgcagagttctgatggagagatatttgaagttgatg

SEQ ID NO: 699375 - DNA, 101 bp, Homo sapiens
aagttgaagaagtcttgaatgactggaaactgattggaaactctttgggaaagccactcgaaaagagctgtaggtaaaacttgcctactgatcagttacac

SEQ ID NO: 699376 - DNA, 75 bp, Homo sapiens
cgaggtgctctgtggccgcgagtgcatcttccacacctggccatgacccccctgatccctcagagcaaggatgag

SEQ ID NO: 699377 - DNA, 111 bp, Homo sapiens
tgccggacaccgtggcgcctcaggaactgaaccctcgcggccgcaacgtgtgccgtgctcccgggtaccgagttttggcaattggggatgaaaaagatcaaaccaggaaag

SEQ ID NO: 699378 - DNA, 75 bp, Homo sapiens
tgctctacagcgtggtcaacacggccgagccggacgctgatggactttccttatcccagttgattgtgcagaata

SEQ ID NO: 699379 - DNA, 90 bp, Homo sapiens
gtcttgctcggccgatgaagtgcagaggtttttttctgcaatggccaatgtacatggtggactatgccggcctgaacgtgcagctcccgg

SEQ ID NO: 699380 - DNA, 50 bp, Homo sapiens
acgcacctcgtcaccaaggccaagcactgcaggagtttgtgaccaagaac

SEQ ID NO: 699381 - DNA, 82 bp, Homo sapiens
tacttttacctacgttggcggccccagaagcaccaatgttgttatgaattattcagagatcgagtctaaggttcgagaggca

SEQ ID NO: 699382 - DNA, 100 bp, Homo sapiens
gtgattttttgcctttgttgattaactggacaaattcaggtggtttagattagaatccaaacaaggaaaacgaatcaaaaacaggggtgagataaaggtc

SEQ ID NO: 699383 - DNA, 75 bp, Homo sapiens
ggaagccgtgcggagcgagttacgagaattcccggccgctgcaagggtttggaaattttagcattcaggtgccag

SEQ ID NO: 699384 - DNA, 114 bp, Homo sapiens
ttaaaagaggagcagcatggcatttcagtcactggtttgcagagtccagagacctacagagttgaaacagtgaaacctggaaagattgtctggcaggaagaccctcgtttacaa

SEQ ID NO: 699385 - DNA, 98 bp, Homo sapiens
ttttcgaagccaagaagatctgaatgagccaattaaacgagatggcaaaaaggagtgtgatattgtgaccaagaatatggcccaggtgaccaaagccc

SEQ ID NO: 699386 - DNA, 88 bp, Homo sapiens
agacggctcacctgtgcgggatggaacaaaagaaccagaggaagagatcattgccgaggactatgacgatgatcctgtggactacgag

SEQ ID NO: 699387 - DNA, 83 bp, Homo sapiens
acagaatagacctgaagacaaaaatccagaagtacaagcagtctgatgccagtatggacagaatagcttatgatgcttatccc

SEQ ID NO: 699388 - DNA, 100 bp, Homo sapiens
cgggagcagggcagcacccccagccgcagcccccgctggatgttaaagtctttagtgaagatgggacaagcaaagtggtggagattctagcagacatgac

SEQ ID NO: 699389 - DNA, 75 bp, Homo sapiens
gtgatgtggatgtggaagaaagtgatgaggtcactgcagccagaggggtccagaagagagaggaggcactgcctc

SEQ ID NO: 699390 - DNA, 75 bp, Homo sapiens
tcgtgacctgcttttcggttccgggtcttggccccgtccttacctcacaggtcagccatgtcatctgagcctccc

SEQ ID NO: 699391 - DNA, 100 bp, Homo sapiens
ccaagaacgagatggtattatcaatgcgaagataaagaatgttgccttaggagatgaaagctcaagaagtggagctggctttggaagaagtagaaaaagc

SEQ ID NO: 699392 - DNA, 57 bp, Homo sapiens
atggccgggctgccccgcaggatcatcaagaaatgcactcggtgatggaaagagagc

SEQ ID NO: 699393 - DNA, 100 bp, Homo sapiens
atcgtgggcctgggactcatgtactcgcagttgcctcatcacatcctagccgatgtctctctgaagggcggcgactggcggcgcgatggacctgaccggg

SEQ ID NO: 699394 - DNA, 118 bp, Homo sapiens
aagccggagcctgccagagccaaggccaagctctccaagttcagcatccccaagcagggggaggagttcaaagaaggacgcagagccagccacacagccccacaggtcctctttagcc

SEQ ID NO: 699395 - DNA, 74 bp, Homo sapiens
ccatgagcaaagctcaccctcccgagttgaaaaaattggtggaacgagaatgcctacacgcagccacaggaatc

SEQ ID NO: 699396 - DNA, 90 bp, Homo sapiens
aaccacctttgtcaccagaatgaatgaagtgcttcagatttaaatagtcgagtctatgctgtcttgtcaaagagagaaggtcgggtactt

SEQ ID NO: 699397 - DNA, 112 bp, Homo sapiens
cactgactcctacttcctctgtatagagcaactgttgaactcagctgcctgtagacccaacatgagtgaagtttcctgcaagaaacgggacgactatttggaatggccagag

SEQ ID NO: 699398 - DNA, 76 bp, Homo sapiens
aggatgttaatgtaaattttgaaaaatccaaacttacattcaggctatggatcgaagttgtaatcgtatgtcttcg

SEQ ID NO: 699399 - DNA, 82 bp, Homo sapiens
cgtgcactccgcacctcggggacattattgcgcgtggaacggctgcttttggaagtgtactaatggtcacttgatgtgcgct

SEQ ID NO: 699400 - DNA, 100 bp, Homo sapiens
aagagatcatccctaagcaggagagaagctactaaaggctgcggcaaatctacagggaccctgagaccctcgtgttccgggactcctcttcgtggcgttg

SEQ ID NO: 699401 - DNA, 98 bp, Homo sapiens
tggaattgagcaagggagtgatgccggttatctctgtgaatctcaggttcagtgtacaaaacctgagtgtagaaaatggaggcagcttaccaaggaaa

SEQ ID NO: 699402 - DNA, 151 bp, Homo sapiens
tcttcatccctctctggccactatggaattctaatttgaaccatgtttggattgaagccgcctctgtattacttaccagatcgcccaggaccacaccgcagcgtaactgcaggcctctcagcgaaaaagggggaaagcaaagacccgggtg

SEQ ID NO: 699403 - DNA, 100 bp, Homo sapiens
cctcagagggaaacattcactgcacagaaccggcagcagtgtggaatttgattggtgtgctgtctctagtatccgcacactgcgtcaacttggcaagaag

SEQ ID NO: 699404 - DNA, 87 bp, Homo sapiens
gcccgacgaggaagttttctactgtaaagtcaccaacgagatcttccgccactacgagctgatcagctgaccgaagaacagattgct

SEQ ID NO: 699405 - DNA, 100 bp, Homo sapiens
actaatgttgctattaatattccaaggctcttacttgacaaaattgagaaacaaatgtttcaggtccaagggcagccattaatggtgcaggtcagtggag

SEQ ID NO: 699406 - DNA, 87 bp, Homo sapiens
agaggaaggacagtcacgtctcgctggacttgtgcaccatggacaattttgctgagggagatttcactgtggcggattatgccttgt

SEQ ID NO: 699407 - DNA, 100 bp, Homo sapiens
aagatatttagagatggtgaagaagcaggtgcttatgatggacctaggactgctggccatgaccacaatgtttcttcagtagccatcatgcccaatggag

SEQ ID NO: 699408 - DNA, 97 bp, Homo sapiens
gaagttgattactcagtctctaaaaagctaagcaagtgcagccgcggagccctgtacacaggcttttccatcctggtgactctgctcctcgctggcc

SEQ ID NO: 699409 - DNA, 100 bp, Homo sapiens
aacgaaaaagaacgacatgatgcaatcttcaggaaagtaagagggctcgtgctgtcttggaaagagaatttaacaaccttttggtcatggggactgatag

SEQ ID NO: 699410 - DNA, 76 bp, Homo sapiens
caaattttgctactgtcagatggattgactatggaaaagttgccaaattgcacccccaaattcagaaggagtccca

SEQ ID NO: 699411 - DNA, 75 bp, Homo sapiens
ccggagacagcccaaatatcctcggaagagcgctcccaggagaaacaactgaagaaggactaccttgatggcgtg

SEQ ID NO: 699412 - DNA, 100 bp, Homo sapiens
agacgagagagcgaacgccagggaccctgtgcaggcctgctcctccgtttgcaaggtgactattatatggttaaaaagattttggaggaaaacagttcag

SEQ ID NO: 699413 - DNA, 83 bp, Homo sapiens
ccccagtcctcatcctggatgaagccaccagcgctttggatgccgagagcgagtatctggcaaatgttctgaaaaagactctg

SEQ ID NO: 699414 - DNA, 82 bp, Homo sapiens
gccgcaccttcccgccttctcagtgttacctggaatgtcagagagctgaaagcagtcatattttgggatcatgcacctactg

SEQ ID NO: 699415 - DNA, 100 bp, Homo sapiens
ttgctgctgaacctgagctgcaagttggaattgatataatgaagactagttttccagtctgttcccagtattctagaggagtatttgccatttttggact

SEQ ID NO: 699416 - DNA, 90 bp, Homo sapiens
cactcggggactctgccttttaccgctcgggtgaagagaaccgatctggacaaagcgaggacttttgttggcacctgcctggatatgtgt

SEQ ID NO: 699417 - DNA, 87 bp, Homo sapiens
atcacctatgtttacagcgacagattctggctgtgactcagtcactgacactgagcctgaggacgagaaggttgtttcctactcgaa

SEQ ID NO: 699418 - DNA, 100 bp, Homo sapiens
ggggcccgtctgggccagccacctggtgtccggtcagaaatgtgaattccaggatgcctatgttctgttgagtgaaaagaaaatttctagtatccagtcc

SEQ ID NO: 699419 - DNA, 74 bp, Homo sapiens
ctgtgtcaatgttcacggccgccaggaattttctacttctggtcatgcttacactgatacagggaaagcatcag

SEQ ID NO: 699420 - DNA, 82 bp, Homo sapiens
cccatcctgccgtccttctccactttcgccagcccgtgccgcgagcgcggcctgcaggaggcaagagcggtgagcggggcgc

SEQ ID NO: 699421 - DNA, 82 bp, Homo sapiens
gcactagtgtctagaaggcactaaggctgctggagccagttctgcttctcggcaaggagcgatttgctggtgtagacatccg

SEQ ID NO: 699422 - DNA, 75 bp, Homo sapiens
aagctaccgggagcgtgtgcggccgtctcagtctcataaaaggggatcaggcaggaggagtttgggagaaacctg

SEQ ID NO: 699423 - DNA, 111 bp, Homo sapiens
atcattcacaatatctgtgtcgttcttggcagaaattatattttccagcccgtgtctgcaggtgggccatgcacagacacagctcatgtctcattaatcacaccaacaaaa

SEQ ID NO: 699424 - DNA, 98 bp, Homo sapiens
ctggtcatcaatgttactcaggtagaggattgtggataatatgcctgtaacgtggtgttacgatgttgaagatggtcagaggttctgtaatcctggat

SEQ ID NO: 699425 - DNA, 100 bp, Homo sapiens
caccgggatccctacgcgacctccgtgggccacctcatagcgtggtgatggtggatgaggcacacgaaaggaccctacacacagacattctctttggatt

SEQ ID NO: 699426 - DNA, 83 bp, Homo sapiens
ggagaagacacggtcgtgatcgcgtgcacttacatttcaatcgaccaagttccaaggacctatgccataatgataagcagacc

SEQ ID NO: 699427 - DNA, 91 bp, Homo sapiens
ccacctccagacgctaccacactctgggacagtgggagatttggaacagctttgagaagagcaaggaagtggttctgaaagatggaagaat

SEQ ID NO: 699428 - DNA, 88 bp, Homo sapiens
cagcggctgtgaaatttaattcagatcagcttaatcatttgtttgttctcattcagaaggaggagatgttaaagtaacccatcttgca

SEQ ID NO: 699429 - DNA, 83 bp, Homo sapiens
agagggaaaagaagcccaaagttttaaagatgtcatcattgccaagaagagcgaaagtacaggtccaggatgtggtactgaaa

SEQ ID NO: 699430 - DNA, 75 bp, Homo sapiens
gcagtacctcctaggactctatgacacggccggacaggatagtaatgatgacactgaagatgtttcactgtttga

SEQ ID NO: 699431 - DNA, 97 bp, Homo sapiens
tacatccgagcccgcacggagtccagggatgtggacagtcgccctgagatccagcgcctggacacgcgcacctatgttggcagcatgcctggtcgca

SEQ ID NO: 699432 - DNA, 83 bp, Homo sapiens
ggcgacccagcccccgcccgcagcctggacgacatcgacctgtccgccctgcggacttcccaagtaagaagcggaagaggagc

SEQ ID NO: 699433 - DNA, 80 bp, Homo sapiens
cagaccatggccgcggccttcggattttttatcaagcagaaatgcatcgaacaacgagaatcaagatcactgagctaaat

SEQ ID NO: 699434 - DNA, 74 bp, Homo sapiens
gccagggaaccctggtcaccgtctcctcaggcatccgtgtcattctggaccttactcccaactaccggggtgag

SEQ ID NO: 699435 - DNA, 73 bp, Homo sapiens
tcctggagaagcggccgcggccagggaacggggcatcgcggttccaacgagctgaggcttcgaagacctcaga

SEQ ID NO: 699436 - DNA, 75 bp, Homo sapiens
aacttatcactattagatttcattaggttggcagtggcaatgacccctggtcagcctggagtgcctccaaatctg

SEQ ID NO: 699437 - DNA, 74 bp, Homo sapiens
ttttctggaatgtcattatcagacacaatgaagtagagaagatcctctaatggatcccagtgtgcccatccctc

SEQ ID NO: 699438 - DNA, 90 bp, Homo sapiens
gaaaagcctctgggagcagaagggaggctccaagacctcatcaacaattaagttaagtgggcagaccaacatccacctcagcaaaaactt

SEQ ID NO: 699439 - DNA, 82 bp, Homo sapiens
gacagacagtctccagggaggacgtgaagtacctggctttcctccgcaagcggatgaacaccaacccttcccgaggccccta

SEQ ID NO: 699440 - DNA, 99 bp, Homo sapiens
gcgcctgccgcccctgcgccgccgagccagctgccagcttcgttgttccctctggcttgtgggggcacggctgtgctccatgtggcaaggtggaaggca

SEQ ID NO: 699441 - DNA, 100 bp, Homo sapiens
atctctctcatctcgctcggctgcgggaaatcgggctgaagcgactgagtccgcgatggagccagagactgctgctactttgaaacgtacgatagaggcc

SEQ ID NO: 699442 - DNA, 101 bp, Homo sapiens
ggaggtgcggctgcaggccgttgttggtcgagctggcgggtcccgcgggccaggccgtggagcctctacggcagacacatgcaggccaacccagaaccacc

SEQ ID NO: 699443 - DNA, 102 bp, Homo sapiens
ccgggaggaaggaacgaggcaaggagctaaagcagcgtgcgttcagccctggggtgtcccgacccaggctaagcttgagcatggctgagcaggagcccacag

SEQ ID NO: 699444 - DNA, 101 bp, Homo sapiens
aaactcttcaacactgttattgtaaacaaagccctttctaaggcacaaaatgatgtgatggaaatgaagatgcagtcagagagactttcgaaagaatatga

SEQ ID NO: 699445 - DNA, 86 bp, Homo sapiens
acagctgcccattgcctaaagaagaccttgcagatgcttcgggagaacctggaggaggaggccatcatcatgaaggacgtgcccga

SEQ ID NO: 699446 - DNA, 83 bp, Homo sapiens
cccggcgtctgcggccttcgttggactttgacaagatgaatcagtggagacctttggcgacttggcctttggcgacatcttcc

SEQ ID NO: 699447 - DNA, 75 bp, Homo sapiens
ccggtactgtgcactattctttcccaggaaccattggataaggataaagctttatagcaggccaaatcgactctt

SEQ ID NO: 699448 - DNA, 87 bp, Homo sapiens
gggagatgcacagctaagatgccaggaccacctggaagcctagaaatgcctgctgttcatgtacaaggtcaggaacctttgactgct

SEQ ID NO: 699449 - DNA, 75 bp, Homo sapiens
cccagcacgactcctcgggcagcctcaacgagaactcggagggcaccggagatataaagatgaagcgcagctgta

SEQ ID NO: 699450 - DNA, 74 bp, Homo sapiens
tgaagagggaagacacgcggaaacagaaccatatttatttagagtcagaatggagcgatttgtagtaacagcac

SEQ ID NO: 699451 - DNA, 90 bp, Homo sapiens
atgacagaggatatgatcggggctatgatgatcgggactactatagcagatcatacaggaatggaagttggatacactttgtgacttgta

SEQ ID NO: 699452 - DNA, 75 bp, Homo sapiens
aaactcgaagaacagctgtggaaagaagttgcaaaacactggtttcactgttacatgccttgaagtgatgaggag

SEQ ID NO: 699453 - DNA, 127 bp, Homo sapiens
aaatgaccaatgtgtgatttcagtggaataaatggcgtccaaagtcacagatgctatagtctggtatcaaaagaagattgttaaaggaaatgggctggcaggaagacagtgaaaatgatgaaacatg

SEQ ID NO: 699454 - DNA, 89 bp, Homo sapiens
gcccctgtctcccagcctgatgcccctggccaccagaggaaagaccttgaagctgatgatgttaagggcagtgtaccactgtcttcaag

SEQ ID NO: 699455 - DNA, 100 bp, Homo sapiens
aaataccaggctaccatggtctacaagactctcttcgctctttgcatcttaactgcagactgcctctttaagctatgtcccatgaaccgctactctgccc

SEQ ID NO: 699456 - DNA, 78 bp, Homo sapiens
ccgctgttttgccggaggagcccctcaggccaaaagggagatttcattgccctggatcttggtgggtcttcctttcga

SEQ ID NO: 699457 - DNA, 51 bp, Homo sapiens
ggatgatcaaacttggtctggtttttccagaaaggaggagtcaaggaagcc

SEQ ID NO: 699458 - DNA, 99 bp, Homo sapiens
tacacaaaacttcatcttctgtaggatctgatgaaaattctcttcattctcttggactgaacttaaatactgatagacggagccggtgggagaggagag

SEQ ID NO: 699459 - DNA, 100 bp, Homo sapiens
tgggaagttggtagctctgaaggtgatcaggctgcaggaagaagaagggacacctttcacagctatcagggaaggtgaagctgaggaccaggaagagaaa

SEQ ID NO: 699460 - DNA, 100 bp, Homo sapiens
ggcccgcggctgcgcttccgacggggcggccgggggctcagagatccaagtgcgcgccctggcgggtccggaccaaggggacaaggaccacatgtgcagt

SEQ ID NO: 699461 - DNA, 83 bp, Homo sapiens
cattggtgaagttgaatctgcaaaacttattcgggataaagtagcaggtaaaagtacacctgtaagccagcttggttccgcag

SEQ ID NO: 699462 - DNA, 82 bp, Homo sapiens
ttttgttctctggcatggaaggggtcctcagagttactgggactgagaactatgagcagagaatacgtgaacaacaggaaca

SEQ ID NO: 699463 - DNA, 100 bp, Homo sapiens
atatgcatgcaaatagcatagaagaaatttcaggattaaagcaaggagagccaatcatgactggcaaaacacagaccagcaacgtcaccaataagaatga

SEQ ID NO: 699464 - DNA, 101 bp, Homo sapiens
gtactcgggcaagaccaccttcgtcaatgtcatcgcggtgggttgcctatgaaaaagaacattttaaaggccagcagtttctgcttgaagaaggagacttt

SEQ ID NO: 699465 - DNA, 82 bp, Homo sapiens
agccacccggagttccttagttgaaaggtgcgccctgctgtgacagaggcgtagaggctccggtgttttttgtgccaattgc

SEQ ID NO: 699466 - DNA, 74 bp, Homo sapiens
gcgtacgcctatctcttcaagtacatcataatcggcgacacaggctgtctgtccccagaccccagagcacgtcc

SEQ ID NO: 699467 - DNA, 90 bp, Homo sapiens
gaaggaaaggaatggggttccttctactactcctttaaggcaatagccctctggaacaagacaattcatgtgagataagaaagaagagcc

SEQ ID NO: 699468 - DNA, 74 bp, Homo sapiens
caggaggaggaggaggggctccggctggtctgtggtgagctctattaccaggttttaaacttcgccatgatcgt

SEQ ID NO: 699469 - DNA, 50 bp, Homo sapiens
ggggcaagtacagttactctggggagggccaattcctgtccccccagcag

SEQ ID NO: 699470 - DNA, 95 bp, Homo sapiens
accagtggtctgagacggtccagccaattatggaagcacttagaggttttgctgttactgctcagtgtagtcacaccttgaataagaaatggaaa

SEQ ID NO: 699471 - DNA, 82 bp, Homo sapiens
tgatgatgcctgagttcagccctcagcaggctgaaggtgatgtggccgccctcaaccgacgcatccagctcgttgaggagga

SEQ ID NO: 699472 - DNA, 83 bp, Homo sapiens
agtggattcaggagtacctggagaaagctttaaacaaaattcagaaggagctggcggacatcactttagaccctccacctaat

SEQ ID NO: 699473 - DNA, 100 bp, Homo sapiens
ggtaccgagcccctgaactacttcttggagcaaggcattataccaaagctattgtacgaggatgtcgtccaggaaagattgtgcagatgactgaagcaga

SEQ ID NO: 699474 - DNA, 100 bp, Homo sapiens
tgcaaaccttattaatctcagggaactggatgtcagcaagaatgagccctaatttgtttagaactgtaatatgcacagttaaaacaacttgtcctctcag

SEQ ID NO: 699475 - DNA, 75 bp, Homo sapiens
agcggcaggacagtcatcctctataaggaaatctgaaatagagtactatgctatgttggctaaaactggtgtcca

SEQ ID NO: 699476 - DNA, 83 bp, Homo sapiens
agcagagtacgatactcaggtcaaaggaggaggagctggctaccctatctgaggaggagattgctatggctgttactgcttgg

SEQ ID NO: 699477 - DNA, 80 bp, Homo sapiens
caactttctggcttttgaaaggctccttcttcagtaagactttgaccccgacgcaggcttcagtgattgccgcggatcag

SEQ ID NO: 699478 - DNA, 50 bp, Homo sapiens
cacccagcaggagatacggaccctggaggctgaccggttccctgatgtgt

SEQ ID NO: 699479 - DNA, 100 bp, Homo sapiens
cccggtgctaggggtgcaggaggaggacggcagcaaccgcagcagcagccttcagacggaatcagtccccaatgcctggaaattcctcattggattactg

SEQ ID NO: 699480 - DNA, 82 bp, Homo sapiens
tgatctggtcgatgctgattgctgagtttgtacaatgacgacagaaacctgcttcgaattagagagaaggaaagacgcaacc

SEQ ID NO: 699481 - DNA, 100 bp, Homo sapiens
acgcagtcagctgcgtgattcccgtgattgcgttacaagctttgtctccttcgacttggagtctttgtccaggacgatgacgtccggttgtttgccttcg

SEQ ID NO: 699482 - DNA, 101 bp, Homo sapiens
tgttaaaggaacctctacaacgaaggtgaagccacggaagataaggagtgcctgtgaagaaaacggggtattgccctgaggcttatattctgcctcagttg

SEQ ID NO: 699483 - DNA, 75 bp, Homo sapiens
gcgcaaactgcacagccagaccaacccaattatgattccgaagaggctcaatctgtaaatccttctagtgttgat

SEQ ID NO: 699484 - DNA, 75 bp, Homo sapiens
cctctttctcaacccagagcaaattgagacgtccgggccagaagcggactcctagaagaggggagcagcaaggat

SEQ ID NO: 699485 - DNA, 82 bp, Homo sapiens
ctcaccccgcggccgcaccttcccgccttctcaggttttaaaatcaaagatgggaaaatcggagaaaattgcccttccccat

SEQ ID NO: 699486 - DNA, 75 bp, Homo sapiens
aagggtgaaggaggcgaattttcagttgataggtgttcctccaagaaaagctggttatattgaagacctggtttt

SEQ ID NO: 699487 - DNA, 75 bp, Homo sapiens
catttctgtctaaagaagatgtagatcctgcatattttgatgaaaattggctaaacagaatcaaaactgaagtag

SEQ ID NO: 699488 - DNA, 83 bp, Homo sapiens
ccaggctccgcgggatgcaccgtggtagccgagggcggaggcgacactctcaggctggcagtgatggtgaaagcataggaaac

SEQ ID NO: 699489 - DNA, 100 bp, Homo sapiens
aagaagatgcctcgaactaaacaaattcatcccagaaatctaagagaaatctggttaagaagtactgccccaaacgttcatccaaagatgaagagccacg

SEQ ID NO: 699490 - DNA, 75 bp, Homo sapiens
tctctggtgcaggaaaaatgttcactgcaggtcagaaacccttcccttgtcaaaaatgcgatgccttcttttcta

SEQ ID NO: 699491 - DNA, 100 bp, Homo sapiens
cttcctgggcagctcgtcggtgttctgcaaagactgcaggaagattgttctctggggccggactgagaaatgcctgaaggagacgacggaggagatccgg

SEQ ID NO: 699492 - DNA, 75 bp, Homo sapiens
gccgcgtccccagagagcgccctgagagaacagggtggccgcttggtccagtgacagctggagtatcagccttgg

SEQ ID NO: 699493 - DNA, 100 bp, Homo sapiens
gaactgctggacatgcccaatgttagagagaccagttcaaggagctgatcctcacactgtgcgatctcatccgccgaggccagctcacagcccctgcctg

SEQ ID NO: 699494 - DNA, 82 bp, Homo sapiens
tttaatcagacctgctcacacttcagaatagagaagattcctgacattcagacaactgacttgtaactgacttataactgac

SEQ ID NO: 699495 - DNA, 80 bp, Homo sapiens
aaacagaagaaaagccttcagtttggctgtgtcttaaatgtggccatcaggagtgaaagctggacattgaagaagccaaa

SEQ ID NO: 699496 - DNA, 90 bp, Homo sapiens
atcgtcttatagttgagaatttatcctcaagagtcagctggcagatcaccggggaacccttgatccgtcgatcagatgataatgaaaagg

SEQ ID NO: 699497 - DNA, 100 bp, Homo sapiens
gctatcacaagctgcaccagcttctaaccgatttggaaattttagcattcaggtgccaggaatgcagatgggacagccagtgccagaaacaggcccagct

SEQ ID NO: 699498 - DNA, 74 bp, Homo sapiens
attagccagcagacccagctacgtggactagaggaaaatgtctctctgatcaaggaaattaatgagctccgcag

SEQ ID NO: 699499 - DNA, 83 bp, Homo sapiens
ctaatttgaaccatgtttggattgaagccgcctctgtattacttaccagcagaaatgatggaagaattgcatagcctggaccc

SEQ ID NO: 699500 - DNA, 100 bp, Homo sapiens
ccatcaagcgggtgaaatctggcatattagcgctagccctgcagacagaggtgtgctgacgacctgctacaacagaagaggagacatcacagctttccca

SEQ ID NO: 699501 - DNA, 80 bp, Homo sapiens
gtcgacatgagtgatgtggaggaaaacaacttcgagggcagactctagaggacaaaatcccagtccttggcacaaactca

SEQ ID NO: 699502 - DNA, 100 bp, Homo sapiens
ctccccagccatgtggaactgggaacacttaagaatctgtcctcaggaatatacatgctgcaccacagaaatggaagacaagttaagccaacaaagcaaa

SEQ ID NO: 699503 - DNA, 75 bp, Homo sapiens
acaatgatccttttgctcctggtggaacagttgttgcagcaagcgattcaggatcttacacatttgttccatggc

SEQ ID NO: 699504 - DNA, 50 bp, Homo sapiens
gagcacatgaagcgccacacgctggtgaagctttgttctaagaatatttg

SEQ ID NO: 699505 - DNA, 75 bp, Homo sapiens
ctcggaggcgttcagctgcttcaagatgaagcctgatttagcagctaatgaagcccagcttctgaggaaaattca

SEQ ID NO: 699506 - DNA, 99 bp, Homo sapiens
ctcagttatggcacacacagtgggacctagacaaagggagagggtgaccgacatcccaactaggaatgtctgaatctgaacaggctcttaaaggtactt

SEQ ID NO: 699507 - DNA, 82 bp, Homo sapiens
cctacaccatgacaacgccttacccttcgctcccagcccagttgctggatttgtgcgactcggtgaaggatgatgcccggag

SEQ ID NO: 699508 - DNA, 83 bp, Homo sapiens
tctctccttaacgcctttcaccattaagaggaaagcgatggaggagctgagcgctgatgagatatgtgtcacaaagatgtcta

SEQ ID NO: 699509 - DNA, 98 bp, Homo sapiens
gctggggtcccttttgcctcagatactattttgaaggatcaaccacaggtttgtctgctaccccccctgcctcattacctggctcactaactaacgtg

SEQ ID NO: 699510 - DNA, 100 bp, Homo sapiens
cgggatcgtgaccgagaccgtgaccgagagcgtgaccgagagcgcgaatatcgtcatcgttagaaggtgagttgcctttgcctggaggaaaatgtggaaa

SEQ ID NO: 699511 - DNA, 100 bp, Homo sapiens
cagtggagagaggaattcctcaagacaccattccagcctcgaagcggaggatccctgtgtcccagccgggcatggccgacccccaccagcttttcgatga

SEQ ID NO: 699512 - DNA, 101 bp, Homo sapiens
gagaacgtccactgcgggccggcgaaagctgatggcccactgcgtgaccttggttcagctgtccatttcctgtgaccatctcattgacaaggacatcggct

SEQ ID NO: 699513 - DNA, 98 bp, Homo sapiens
atttacaaactggccaagaagggccttactccttcacagatcgactgctgagaaggaagaatttgaacatcaacagaaagagctggagaaagtttgca

SEQ ID NO: 699514 - DNA, 100 bp, Homo sapiens
agtgggcctgcagccaaggaaggaggcctgcaaattcatgacaggattattgagctgctactgtttgaacggtcttggatgaacagatggaagtctgctg

SEQ ID NO: 699515 - DNA, 98 bp, Homo sapiens
gctgggttcgcggcgcgccctcctgctgcctccccggagctcccgggccagtaggtcctcagccagcagagccacgttccttatgagcaccgtgggtt

SEQ ID NO: 699516 - DNA, 100 bp, Homo sapiens
agtggaagagattttaagtgtggcatacaagaaaggttgctccttgagggcaggacagttcttatggctttatccgttgcgtaagcacagagaggtctgc

SEQ ID NO: 699517 - DNA, 75 bp, Homo sapiens
ctctatcaaggggctggtgtactccagcaacttccaggttttaaaatcaaagatgggaaaatcggagaaaattgc

SEQ ID NO: 699518 - DNA, 87 bp, Homo sapiens
gcgctgctcaaggacacggtctacaccgacttcgacgagaggtggagaagagcgagtacttgagaaagaagaggaagaagatgatga

SEQ ID NO: 699519 - DNA, 95 bp, Homo sapiens
gtcacacccctgcccgaacaggaggcgtctccagcaaggcctgcaggacagagcgggatgccaccagcttgtccaaagggaagttccaggagctc

SEQ ID NO: 699520 - DNA, 78 bp, Homo sapiens
tgccgtgccccgaggccagacggccggctctgtgagcgccaagaccggctgaagccgaacgaccctgtcaccaacatt

SEQ ID NO: 699521 - DNA, 73 bp, Homo sapiens
actctgatgtcaatcttgagggctagtgtaaacaggaacatcgataagtagtgtaaaaacttgcacaatgaaa

SEQ ID NO: 699522 - DNA, 98 bp, Homo sapiens
aaagcgtttccgcagacagaagtggggagaagcggagggtgaatcatttgatgtaaaagacttgactccataatctgcatctgtcctaatgctgtcat

SEQ ID NO: 699523 - DNA, 83 bp, Homo sapiens
ggtcagagggctgtgaagacgcacggtgccaggaccaagtatctgattgtctacaacctgttgtctctgcgcttcaactcacg

SEQ ID NO: 699524 - DNA, 98 bp, Homo sapiens
ccttcagactgcccggagagcgcgctctgcctgccgcctgcctgcctgccactgagaggcaaatttctggagatgtgcaatgatctcttagctagagt

SEQ ID NO: 699525 - DNA, 75 bp, Homo sapiens
gagttaaattcatctaactcccattctataagtatttcagatgactgcagttgtagacggggttttgccatgttg

SEQ ID NO: 699526 - DNA, 90 bp, Homo sapiens
cgagagcgcgaatatcgtcatcgttagaagaccggttggagggtgacagatcagaaggctctggtcaagagaatgaaaatgaggatgagg

SEQ ID NO: 699527 - DNA, 146 bp, Homo sapiens
gcgcacaacacttcaccctctcgcctcgggtctcgggggccgctctgggatcccggccaccagcaattgtccgatttattgctaaacatgggtgcatttttggataaacccaaaactgaaaaacataatgctcatggtgctgggaa

SEQ ID NO: 699528 - DNA, 100 bp, Homo sapiens
catcacacaaaatgtgctggttgatggtgttaagaaactctcagtttgtgtttctgagaaagattgtcttcgcagttttaccgacttagaagaacttgat

SEQ ID NO: 699529 - DNA, 74 bp, Homo sapiens
ccatttctgaagaatctgaagagctggatcagaagacattcagcattgacctagatgtgaaggctggtggaggc

SEQ ID NO: 699530 - DNA, 76 bp, Homo sapiens
cattaatctcccaaaatattctagaaggggaaaagctacttcaaggtctcggcgcggaagatggccggcggcgtgg

SEQ ID NO: 699531 - DNA, 110 bp, Homo sapiens
ccgcgtccccaagtgagccaaaagttagtgaatcgccatctcctgtgactacaaacactccagcgcaggttacgaaggtgagaatctgatgaaaattctaaaagacattg

SEQ ID NO: 699532 - DNA, 50 bp, Homo sapiens
tggctgtgcttgccaggcctggctccagtccacagtatggcattgcccgt

SEQ ID NO: 699533 - DNA, 50 bp, Homo sapiens
ctgctattgaaagagagtatgcacagcttttctgggagaagaggctacaa

SEQ ID NO: 699534 - DNA, 75 bp, Homo sapiens
gagcgaacacctgccgcggtcctcccgccggcgctgggttaacacagaaatctgcctcctgggccatgccgcttc

SEQ ID NO: 699535 - DNA, 100 bp, Homo sapiens
ggacagtgtccgcgcttgtgcttccctggtggtgctcagcttccctgagctcgaggacctggtgtgaattattcagggtgtcagatcacatgggctaaat

SEQ ID NO: 699536 - DNA, 100 bp, Homo sapiens
ccctgtccttgcaaaagcagatggaacatgctaaccagcagactggcttctccgactcaacccctttgctgatgcaagtaagggtgatgacctgcttcct

SEQ ID NO: 699537 - DNA, 100 bp, Homo sapiens
gcacagataagaagccagccctgtgcaagagctaccagaagctggtctctgaggtctggcataagaaacggtgaacacacagtgttcatcccctcaggag

SEQ ID NO: 699538 - DNA, 90 bp, Homo sapiens
acactgtacaagctttcaaagtcaatatgagaactggactgatgaccaactgcttggttttaaaccatgcaatgaaaaccttattgctgg

SEQ ID NO: 699539 - DNA, 135 bp, Homo sapiens
ctctgttggctgtgacatctattccatctgtgagtgactctttgacatggagagaatttcactatattcagctgtcacaagatgaaggtagaggcacattatacaaatacagacctgaagaagtagatattgatg

SEQ ID NO: 699540 - DNA, 75 bp, Homo sapiens
tgcggccacaggtagaggacccagtaaccatcatggaaggcacagcttcaacatctcttctgggccctcctcctg

SEQ ID NO: 699541 - DNA, 126 bp, Homo sapiens
cggagtttgatgaggatttcgaggaggaacccacatcccccataggtcactgtgtggccatctaccactttgaagttcctgtgccttaagaacattagaaccttcctgtccacctgctgtgagaag

SEQ ID NO: 699542 - DNA, 100 bp, Homo sapiens
ctatctcagcagtgatggggagagccatagcgttctttaaggaaaaacagtagtgctctgcatagtttactgaaacgagtggtcagcacatttagtaagg

SEQ ID NO: 699543 - DNA, 96 bp, Homo sapiens
caacctagaggagtggatcctggagcagctcacgcgcctctacgactgccagcgagacggtcatctgttccagccgggccactgtgatgctttatg

SEQ ID NO: 699544 - DNA, 74 bp, Homo sapiens
gttcgaagtggctgtgggtattgctgcggctggtgcgtcgtcgctctagggcagcccaatggatccaatggtga

SEQ ID NO: 699545 - DNA, 100 bp, Homo sapiens
gagaggggctgtgacagtcggagtcccaagctgcggttcggctgctgccgagattggcggcagtaagcacacaatgaatgatcacctgcatgtcggcagc

SEQ ID NO: 699546 - DNA, 100 bp, Homo sapiens
tcaggtcttacaattctaaaaccatgacctgtgatctcacttgcttatctgaagaagattgtccaggctcatattgggaatgcttatgaggaaattcatg

SEQ ID NO: 699547 - DNA, 98 bp, Homo sapiens
acttgcagaagtaccacaacagggacacctggttccagctgcagcacgtggacgctgactcggaagtgcagaaacttgggtccctgaacaatgagcct

SEQ ID NO: 699548 - DNA, 82 bp, Homo sapiens
ctctatctgcgcaccttggagtccaagcttgtgctctttgctccacggagaagaactgctgcgtgcggcagctgtacattga

SEQ ID NO: 699549 - DNA, 100 bp, Homo sapiens
ctcgagagctcgccccgaacgggggtcttcctcctccgccgttgacaggtcgagtttgagtggctgaggcagttttggtttcaaggcaatcgatacagaa

SEQ ID NO: 699550 - DNA, 98 bp, Homo sapiens
ttcaacaagatgctgactgggacagcgttctgtcatctcagcaaagaatgctcctgggcaacgtgctggtctgtgtgctggcccatcactttggcaaa

SEQ ID NO: 699551 - DNA, 100 bp, Homo sapiens
agaaaaccgacaaccttcccagaaagtccaagctcgtggaaagtgaaaaggtttctgaatatccagcagtgattgtggagccagttccaagtgccagatt

SEQ ID NO: 699552 - DNA, 83 bp, Homo sapiens
gggaccatctggattcatatccttcgaaaacgacgggtgataaaagaaaatgtggctgaagttacccgaagttcagcttgcag

SEQ ID NO: 699553 - DNA, 75 bp, Homo sapiens
ccttgatcctcctcctaattgcaggttgcccacattcccaaatcagatgctttgtactttgatgactgcatgcag

SEQ ID NO: 699554 - DNA, 82 bp, Homo sapiens
gtattttgatgatgctcatgtcaaggaggtgattgtgatgtcagctacgatggatgtggacctgttctctcagtatttcaat

SEQ ID NO: 699555 - DNA, 101 bp, Homo sapiens
ccttcagaaacagtgctgaagcctttaaatgcagcatctgcgatgtgaggaaaggcacctccaccagttttctgagtttaaccagtaatgccattcagttg

SEQ ID NO: 699556 - DNA, 90 bp, Homo sapiens
ccgggcatcgggccttatcctgttggaaacgatcctttttggatctctgctcctatactttccagtttgtctacagattttgagcgttcg

SEQ ID NO: 699557 - DNA, 100 bp, Homo sapiens
tcgacccagggcccgcgggccaggagagcgctcggcgggcttcctggactgggtccccaagaagatgcagcgggtgggctgtgtggagctgctcaacacg

SEQ ID NO: 699558 - DNA, 100 bp, Homo sapiens
ggccatctttgctcctccctgcaactaactccattcttaattggaatcagtaacatgatagccaagcttgccaaaacctgcaccctccgcatcagccctg

SEQ ID NO: 699559 - DNA, 89 bp, Homo sapiens
cgcaaataaaggcttcagagccctgattatatcaccaacacgagaacttgccagccaggctttcttcgagagtcacccagctccttcag

SEQ ID NO: 699560 - DNA, 83 bp, Homo sapiens
ctgtcgctgacggcgactgcgggaggccagcatgcacttaatgaagttgatcctggtgactggcagaaattcgtgaagaaggg

SEQ ID NO: 699561 - DNA, 90 bp, Homo sapiens
cagcagcgcgggagagcggactcccctcgccaccgcccgagcccaggttactcctggatggagcacctctgatagcaatccacaaagcca

SEQ ID NO: 699562 - DNA, 100 bp, Homo sapiens
tacaaagacagcacgctaataatgcaattactgagagacaacttgacatatattccagaagatattcttaagaatttagtagaggagcttcctcaaccac

SEQ ID NO: 699563 - DNA, 88 bp, Homo sapiens
gacctcagttgccacgtgcacatgctggtgccttccaggcaaatcgacagacctccgacagcagttcagccaaaatgtctactccagc

SEQ ID NO: 699564 - DNA, 50 bp, Homo sapiens
ccgccagtcaataggaagtacgagtgtgatgcgaccaagaccagtgcatt

SEQ ID NO: 699565 - DNA, 74 bp, Homo sapiens
gccgcatcctgcagcattcccacgacgtgcctctgaactcagagcaggcccgcagcgaagcttagagcacacgg

SEQ ID NO: 699566 - DNA, 130 bp, Homo sapiens
ggatcaccggcgtgccccaccatgtcagacgcagccgtagacaccagctccgaaatcaccaccaagatgatatcatcaagttgaatcgaaaggaagggaagaagcagaattttccaagactaaatagaag

SEQ ID NO: 699567 - DNA, 97 bp, Homo sapiens
cccaacagaagaaattgaaattcttcttcgttatggacagcatccaaacattatcactctaaaggatgtaattcagaggtccgtggggccagccagc

SEQ ID NO: 699568 - DNA, 90 bp, Homo sapiens
catcaaggtgaacgggcggcccctggagatgattgagccgcgcacgctacagtacaaggcctgggccgaggccactggtgcatatgttcc

SEQ ID NO: 699569 - DNA, 90 bp, Homo sapiens
atacagcagatggtgtatctcaggagctcttctctgctggcttggtggatggtcacgatgtagttatagagcctccattatggcatgctg

SEQ ID NO: 699570 - DNA, 82 bp, Homo sapiens
gttcctacagagattcatatgagagttatgtttgaaaaagtaccagaaggtcctatccctccatctacaccaaagtttgcat

SEQ ID NO: 699571 - DNA, 90 bp, Homo sapiens
aaaagagatcaccgacaagatcaccacggacgagatgatcaaacgcctgaaggattggcagccaccatttgcatgtgatgttgataaact

SEQ ID NO: 699572 - DNA, 100 bp, Homo sapiens
ctctgcccggcgagtcgggctctggaggaaaagaaagatccggagttaggtgttggcacgctaccagaacatgacagccaggatgcagggccgattgtcc

SEQ ID NO: 699573 - DNA, 97 bp, Homo sapiens
ccgcagcctggcagaagaggctctgcgcacggacatcctgtgcaacctgcccagctacaaggccaagtcccacccgctgtacctgtgcaatgccagt

SEQ ID NO: 699574 - DNA, 100 bp, Homo sapiens
tggtcatcctgtggttctcccgagaccccggcttcatgcccggctggctgactgttgcctgggtggagggtgagacaaatccttcagtgaatctacagac

SEQ ID NO: 699575 - DNA, 51 bp, Homo sapiens
gggcatagatccggccaagcatcagaggaattcttcagttggataaagtgg

SEQ ID NO: 699576 - DNA, 90 bp, Homo sapiens
gtggatttctaccatttgatgatgataatgtaatggctttatacaagaagattatggtccgaataaatactggaaagaataccactttaa

SEQ ID NO: 699577 - DNA, 75 bp, Homo sapiens
gctctccgggttccccggctcgcggggcccggcgaagggcagagccaaatctcctcagccacctgttgaagaaga

SEQ ID NO: 699578 - DNA, 83 bp, Homo sapiens
ggtcactaatgtacaggcagaaaacgagaggctcaccgcagtcgtgcaggatctgaaggagattcctgacattcagacaactg

SEQ ID NO: 699579 - DNA, 98 bp, Homo sapiens
ttcaaggaggccttccagctgtttgaccgaacagacagcacccaagaaaacctcatttggctcgctgaaggatgaagaccggattttcaccaacctgt

SEQ ID NO: 699580 - DNA, 90 bp, Homo sapiens
cggcggccacggcatcctgtgctgtgggggctacgaggaaagcggcttcatatacagatagctctgatgatgagacatcgcccagggaca

SEQ ID NO: 699581 - DNA, 98 bp, Homo sapiens
accttaaagatgctgaagctgttcagaagttcttccttgaagaaatacagcttggtgaagagttactagctcaaggtgctcaggaacagcccatggaa

SEQ ID NO: 699582 - DNA, 98 bp, Homo sapiens
ggacgcagggcgctgggccgggtttcggcttcggccacagatattttcctcttctggaccctatctagaagaagtattccttagacaatttccggctt

SEQ ID NO: 699583 - DNA, 75 bp, Homo sapiens
gaagcggatacttatttgcctgtggatgaaaccctgattcctacaggatcccatggtccattattgcctttacca

SEQ ID NO: 699584 - DNA, 75 bp, Homo sapiens
agtgcgtgggggaccggctgttggcgggttacctgtcctgctgccgattcctggatgacaatcagatcgtcacca

SEQ ID NO: 699585 - DNA, 100 bp, Homo sapiens
ggcaaaaccccgactctgggtggcggcttccacgtgaatctggggaaggagtcgagagcgcagaccctgcagaatgtgttctaagaacggaagcatctgg

SEQ ID NO: 699586 - DNA, 75 bp, Homo sapiens
caacgtggaggcctcacgcagctccacagacagccccagctcggtgttcctcagagtcatggaggtctggcatgg

SEQ ID NO: 699587 - DNA, 101 bp, Homo sapiens
gatcccatccccttcatgatccagcacttgcatagagacaacgacaatgaatctgtctatgatcttctcccaaaggagttacagttacctccatctagaga

SEQ ID NO: 699588 - DNA, 74 bp, Homo sapiens
acagaatacttaaggtggctgcgacaagtctccaaggttcagcagactgtacaggatctttttggcagagcccc

SEQ ID NO: 699589 - DNA, 98 bp, Homo sapiens
cttcaccagccgccagcctggacagacagctactccacgtgcaatggactggaaggatcaccagcacatatgcggccagtcagcagctgtcaccgtcc

SEQ ID NO: 699590 - DNA, 100 bp, Homo sapiens
taggatgacttcagtgactagatcagagatcatagatgccccaccagctactggaagtcccttgcccctgatcggtcagatgatgagcacgaccctctcg

SEQ ID NO: 699591 - DNA, 75 bp, Homo sapiens
caaggtcaccaaacattccgcataaacgaggtggtcaaggaatgtcaggttatcaatactctggctgaccatcat

SEQ ID NO: 699592 - DNA, 93 bp, Homo sapiens
tgagagcctgaggagccattttgagcaatggggaacgctcacggactgtgtggtggcctctgtcagcctcttgcagctgggccaggagactga

SEQ ID NO: 699593 - DNA, 75 bp, Homo sapiens
tgcggcagaagccgagttcaacatcctcctggccaccgactcctacaagaggatgtccggcttccagatcaacct

SEQ ID NO: 699594 - DNA, 90 bp, Homo sapiens
caagaactatatcagccagtattctgaaattgctatccagatgatgatgcacatgcctgatagcgcatatcaaggtggagtcttctttct

SEQ ID NO: 699595 - DNA, 100 bp, Homo sapiens
ctactttgaaaaacattcaggactactttaatccagctactctacctctaacacagtacctgttaacaacatgtcatacttgtaacaccacagatcgaaa

SEQ ID NO: 699596 - DNA, 82 bp, Homo sapiens
cgcgcgcagggcctgcagcgggagctggacggcgagcgcgagcggcgcgagaaaggcgaagctgtgctcaggcccgggctgg

SEQ ID NO: 699597 - DNA, 100 bp, Homo sapiens
catccgtgtccgtgtaaagggtggtggtcacgtggcccagatttatgcaactattggatgattatccgaaatgtttcattgtgggagcagacaatgtggg

SEQ ID NO: 699598 - DNA, 83 bp, Homo sapiens
ctagaccctactgcggtctcggatattgccggcaattctgtggtgttcttggtcacacatttatggagtttctgaagggcagt

SEQ ID NO: 699599 - DNA, 88 bp, Homo sapiens
gacaccactttttagtaggcaaagacacttctaccacaacaatcaggtgccagtcattgaaatcccaggttttggaaatctttctgct

SEQ ID NO: 699600 - DNA, 100 bp, Homo sapiens
cccagctgtgctgctgtgttaacctggaggcattatggaacaggccggcagtgcgagtggcgctccattgacggcagcatcgtgctgcccctggcccggg

SEQ ID NO: 699601 - DNA, 90 bp, Homo sapiens
ctgcagagacgagagatctttctgctgtctatactcttggaaagcacatcctaaggtgggtgagcaagcacattaaaaagccgattcgct

SEQ ID NO: 699602 - DNA, 82 bp, Homo sapiens
ccggcgctgagaggggctgcggccggagcgggcggctgagacaaaggcgacggctgataccatgttaaagatgggttttcaa

SEQ ID NO: 699603 - DNA, 75 bp, Homo sapiens
gtcgactgcccagagtccgcggccggggcgcgggagggtctccgtctctccaccgggggcttcatccttccaggg

SEQ ID NO: 699604 - DNA, 74 bp, Homo sapiens
cgtaatgagcgtcaaaattatccgaaaccgcctcactgggattcgctaaatattgtaatggatcaaggagatac

SEQ ID NO: 699605 - DNA, 88 bp, Homo sapiens
ccgtcacccacctcatctttgacatggacggacttcttctgggtgctggagaatctggtaaaagcaccattgtgaagcagatgaggat

SEQ ID NO: 699606 - DNA, 147 bp, Homo sapiens
cttgcagaagtaccacaacagggacacctggttccagctgcagcacgtggacgctgactcggaagtgcagactcagcccacctgcacccaggtgaaataaacagctttattgctcacacgaagcctgtttggtggtctcttcacacg

SEQ ID NO: 699607 - DNA, 100 bp, Homo sapiens
tctgcccacccactcatcctgcagatctggagcagcattccagggcctgcaaaagctggcaggctgacagaggcggcctcaggacggaccttctggctac

SEQ ID NO: 699608 - DNA, 100 bp, Homo sapiens
ctgttagagatgcagccacggaaaccgtgacaactgccatgtcacaagaaaatacctgccagtcaacagagtgttgcggagataggaacatgggagagaa

SEQ ID NO: 699609 - DNA, 82 bp, Homo sapiens
tggaggaatccgagaagagcagagcggagggagccccagacacgtttttgaatcagagccgacaggcacttgaattgaaaat

SEQ ID NO: 699610 - DNA, 50 bp, Homo sapiens
agggtctccagggttctttggggcccgagcccagatgacttactcaatgc

SEQ ID NO: 699611 - DNA, 75 bp, Homo sapiens
gcagtggtcgcttcttctccttgtacgaattggagcaatgttggcttatacacctctggatgagaagagccttgc

SEQ ID NO: 699612 - DNA, 76 bp, Homo sapiens
cttcaactccatcgccaagatcttggcccagcagacaggccgtagggttgaaaaagatcatctagcaaagcctttt

SEQ ID NO: 699613 - DNA, 100 bp, Homo sapiens
ccttgttctcggagagggtgagttgaaacgctgcctggaaaggaagtaccaggacttgcacagacattcaacgtctgcagttggatctgcagaaaatgga

SEQ ID NO: 699614 - DNA, 82 bp, Homo sapiens
tgatcttgaaaacatggtcctatcactgagctgtttctgtaccaaattctacgtggtttggcatattgccatagaagaaagg

SEQ ID NO: 699615 - DNA, 100 bp, Homo sapiens
cccgaagggagcaattatgggacaatagatcctgggtttgagcagtttaaaatgtcagaaagattgcatgggaactggatcagactgtacttggaggaaa

SEQ ID NO: 699616 - DNA, 74 bp, Homo sapiens
acccccgcaaggtcaacctgggagtgggagaatggcctgtccagaagacagccaaatacatccttcaaacagac

SEQ ID NO: 699617 - DNA, 136 bp, Homo sapiens
ctcggttctccatacccgtgacctggggatcgctacggaccttaaaatacccgcaacagccccttcgtcccaactctgtgacttcctggagactcacttcctagatgaggaagtgaagcttatcaagaagatgggt

SEQ ID NO: 699618 - DNA, 75 bp, Homo sapiens
ctgctcagtcttttgaatgatttccactctggaaaacttcaagcatttgttaccagatgtatgctactcatggtg

SEQ ID NO: 699619 - DNA, 82 bp, Homo sapiens
gtctgacatggaggatgatttcatgtgcgatgatgaggaggactacgacctgatagaagcagatttgggatatcctggaggt

SEQ ID NO: 699620 - DNA, 83 bp, Homo sapiens
gactattgcaccacgcccggggggacgctcttctccaccacaccgggagcaattctgtggtgttcttggtcacacatttatgg

SEQ ID NO: 699621 - DNA, 76 bp, Homo sapiens
ataccttctatctttgattctccatatcacctacaggttctctacttttagagtcgaaaataaatcctaacactgc

SEQ ID NO: 699622 - DNA, 98 bp, Homo sapiens
gtgggagaagagctgaagagacctggagccgacagacgttggtgacaaagttcctgctgatataaggttaacttccatcaaatctaccacactaagag

SEQ ID NO: 699623 - DNA, 98 bp, Homo sapiens
gagtatgtgaggagtggctgggacaactacgagtttgacatcaatgaagaatatggtcttcgattggcaagccatatatttgttaaggaaatttcaca

SEQ ID NO: 699624 - DNA, 74 bp, Homo sapiens
ccaaagaaggaggctccgtacacgcttgtgggtgaccatcgggatgaggaggaagagacccacatgaagaagtc

SEQ ID NO: 699625 - DNA, 127 bp, Homo sapiens
gccagcagcgccaggcaaggggcttgggagcccggaccccgccccctgcggcccagcgcccccagctgttccatttcctccaagtcaccggcttacagcaaaagaagtgtttgataatgatggaaaa

SEQ ID NO: 699626 - DNA, 83 bp, Homo sapiens
gaggaatttgaagtgaccaaaacagcaggttcatgacatcttctatcccttcccccaatcagagggagaggacgagctctgct

SEQ ID NO: 699627 - DNA, 75 bp, Homo sapiens
tgtgggctgtgattttcagaggggaatgctaagagcccattccagatgatgggatttattggcaggccaaccttg

SEQ ID NO: 699628 - DNA, 90 bp, Homo sapiens
acaactgcctctaccaatgtctctgcatctgatcgctttgcagcctccaactttggggcgcatattaaatttcctattgactacccctat

SEQ ID NO: 699629 - DNA, 75 bp, Homo sapiens
gattcgcagtggtcgcttcttctccttgcatgattttgaagtcagaggagatgtggtcaatggaagaaaccacca

SEQ ID NO: 699630 - DNA, 82 bp, Homo sapiens
gaggtgttcgagaacgaccccgagacgaacgtgctggccaaagcgctctatgacaatgtggccgagtccccggatgagctct

SEQ ID NO: 699631 - DNA, 90 bp, Homo sapiens
ggagaagtatgagcttgctcacccaccagaggagtggaagtttttcccactcggctttcacgtttgggattgagagccacatcagccagt

SEQ ID NO: 699632 - DNA, 51 bp, Homo sapiens
cccagcccccatggcttcagaagagagtatgtgaacatgcaggatcccgag

SEQ ID NO: 699633 - DNA, 100 bp, Homo sapiens
caaattccagcagatgctaacttccactctgcgtctttctctgacacagaccatccacgagtcttaattacaggtgctgtacttctttgcagtatacaag

SEQ ID NO: 699634 - DNA, 75 bp, Homo sapiens
aatgcgcttccagcaggaggtcatggacagccctatggaagaggtttgtgaaatggctgctgacatttctgaatc

SEQ ID NO: 699635 - DNA, 97 bp, Homo sapiens
cggcggtggcggcggcaccaaggcccccaagccctccttcgtgtcgtacgtacgccctgagcattggttggatggtacaaaaagcatcaaaaagcaa

SEQ ID NO: 699636 - DNA, 100 bp, Homo sapiens
cgaaaggcgatgttggaaaaagacggagatgctcgacatgcagcagaaggagaaatatataccaaactgaatcaaaaaattgatgaatttgttcagcttg

SEQ ID NO: 699637 - DNA, 83 bp, Homo sapiens
gcgacttccttgcagcctcttctccggatttcgctgcctcatcacccacatctcccaatgcattgcctcctgctcgcaaagcc

SEQ ID NO: 699638 - DNA, 75 bp, Homo sapiens
ggccaagcagagctgggggggcggtggccggcaccgcaagcggagaagcatccttgtttgaggtgaacatccgct

SEQ ID NO: 699639 - DNA, 75 bp, Homo sapiens
actacctgctgtacaccctcaacaaacaccagcgctttgggtgaagcaaatcatggaggaggctgtcaccaggaa

SEQ ID NO: 699640 - DNA, 136 bp, Homo sapiens
gcagatcaactatgggaagaacacaattgcctacgatcgttatattaaagaagtcccaaggcacaaatcctgaagagcccgtgggcgtggactgctcatctgtaaagaaagtggagacatgaccttgagatttggc

SEQ ID NO: 699641 - DNA, 98 bp, Homo sapiens
ttaatggaagtgaaccaagcattcctcaggaccgtctcattgcacttgatgctgcagaagagttctttaagcttgctcgtcgaacttaccccaagaag

SEQ ID NO: 699642 - DNA, 90 bp, Homo sapiens
catggctgccgcgccgccgctacgggaccgcctgagctttctacaccgggttcggagtgttcagtggacacacgcttggcagtgtaattt

SEQ ID NO: 699643 - DNA, 82 bp, Homo sapiens
agtgctggcaagagcgatgtctactacttcagggcgccctgcgtccggcagaggaggcgagcatcccgctcaggtgatgagg

SEQ ID NO: 699644 - DNA, 76 bp, Homo sapiens
ggagatgggcagacggattcatttagagctgcggaacaggacgccctctgatagactggggatatttatatctggg

SEQ ID NO: 699645 - DNA, 50 bp, Homo sapiens
tggagtttgatgaggagcgagcccagctcctgggctataacgaaaagcca

SEQ ID NO: 699646 - DNA, 100 bp, Homo sapiens
gaagacagtggctggcggtgcctggacgtacaaaacccctgaacagtgcccaagtgttgtctctttgttgtcagagagttacaaccctcatgtgcgctac

SEQ ID NO: 699647 - DNA, 75 bp, Homo sapiens
gaaaacagagaaagaagtgataggagggctctgtagtgtggacgaatgtggaacctcgctctgtggctgtgttcc

SEQ ID NO: 699648 - DNA, 100 bp, Homo sapiens
gaagctgcatccctttgatgccggaaaatggggcaaagtgatcaatttcctaaaagatatgtcttgtcgttcaagacttgcaacactaaacgagaaattg

SEQ ID NO: 699649 - DNA, 50 bp, Homo sapiens
ctccttgacggagcccatgaagacggtgaacctgctcctcaacaagggag

SEQ ID NO: 699650 - DNA, 103 bp, Homo sapiens
gcgcttttcaccgcggccatcctgcaggcacagttgccgattacaggtaatcccgtttgttggcaccattcctgatcagctggatcctggaactttgattgtg

SEQ ID NO: 699651 - DNA, 100 bp, Homo sapiens
gcggccttcacacatcccagccggtgactgcagtgagtggagttggatcacaggattgattttgaactcagagaaggccttgtggagagccgctattggt

SEQ ID NO: 699652 - DNA, 75 bp, Homo sapiens
ctaaaccagaagaggaggttgcccagaagaaaaagccatattctcacatgatgccacggagactgagcacccaga

SEQ ID NO: 699653 - DNA, 100 bp, Homo sapiens
aatttgtgtggagcgaggaaaggtgtgctgtgcctgaggccagatgtgggaggaggccattgccttgggcaaggagctagccgagcagtatgagaacgaa

SEQ ID NO: 699654 - DNA, 100 bp, Homo sapiens
gccatagggcgctacgacgggactcacccgtgcctggcggccgccacccaaacgggcaaggctgaagccgacgtagcttctctgaacagacgcatccagc

SEQ ID NO: 699655 - DNA, 83 bp, Homo sapiens
gggcggcaaggacttcgagcagcctctcgccatttcccgggtgctggagaatctggtaaaagcaccattgtgaagcagatgag

SEQ ID NO: 699656 - DNA, 100 bp, Homo sapiens
cctctccaaagcctgcgcgagaggagccgggacacgcctagcgcgggctccagggctccttggtaatgaccagtctaagggattaggaccagcatcagaa

SEQ ID NO: 699657 - DNA, 100 bp, Homo sapiens
gctggcttgctctgagctgcggttactgtgtccaggccccgggttctcaggtgccaatgggtcatgtttggttagaaggtgacaatctacagaattctac

SEQ ID NO: 699658 - DNA, 75 bp, Homo sapiens
gccaaaggctgccaggaaggagttgtattccctgaatgactataaaccacccatttcgaaagcgaaaatgaccca

SEQ ID NO: 699659 - DNA, 82 bp, Homo sapiens
agtgttgggattataggtgtgagccaccacacccagccactaagataaggctcaattacttgaaatagccaaagctaatgca

SEQ ID NO: 699660 - DNA, 74 bp, Homo sapiens
gtctttgtgcacatttacatcaagtgcaccaattccagctggacatcactgtgaaaatgggacgggataaagtc

SEQ ID NO: 699661 - DNA, 100 bp, Homo sapiens
cggcgggtccctgagctggaagccgtatggtttgaagtggtgaacatggatttttctcggcttcacatgtacagtcctccccagtgtgtgccggagaaca

SEQ ID NO: 699662 - DNA, 110 bp, Homo sapiens
tgagaacttcctgatctctctcgctgtgagacatgtctgagactcctgctcagtgtagcattaaggatcaactcactatcctgaaggtccattctcccaagaagagggga

SEQ ID NO: 699663 - DNA, 99 bp, Homo sapiens
atgtagaatttgagctgagtgcagacacagatggttgggtagcagttggattctcttcagacaagaaaatgcatccctggctggctcatggagaattcc

SEQ ID NO: 699664 - DNA, 75 bp, Homo sapiens
aggcgagctcgcgatgagtggtctcggcaggctcttcgggaagggtcaccattggtatgttcctgctctctggag

SEQ ID NO: 699665 - DNA, 99 bp, Homo sapiens
aaggtgccccggacaggtgtggccagcacgtcttgccaagaccccaccaccccacccacccgcatctgtggccttctgatggagtctcgctctgtcacc

SEQ ID NO: 699666 - DNA, 124 bp, Homo sapiens
ggagagtatgctcatcagtggctatgcactcaactgtgtggtgggatcccaggttgtttggcccaggaattcagccccatcactgtgaccttaccaacatggatggagtggtcactgtgacgcc

SEQ ID NO: 699667 - DNA, 100 bp, Homo sapiens
cctcgcctcctcgcagcagcgccatggaaagaccacagcaagattctttcattcgtctcctcctagcctgggggaccaggctcgaactgaccctggacat

SEQ ID NO: 699668 - DNA, 74 bp, Homo sapiens
agcctcctggccgccgaagaggccgccgccaaggtgaccgtgctctttgctggccagaacattgaacgcagtcc

SEQ ID NO: 699669 - DNA, 50 bp, Homo sapiens
cctcctgagtggctgggactacaggtctggctctgggagaggagtggaca

SEQ ID NO: 699670 - DNA, 75 bp, Homo sapiens
ccatcgagcaggctgacctactgcaagagaaggagccacggaggaggagaagttactgagccggaagatgatgaa

SEQ ID NO: 699671 - DNA, 90 bp, Homo sapiens
ttctgtgtaagagctgcagaaaatgatcagcttccagggaaatcctcattgacgattcaatttgttgaaggccaatttgtggactcctac

SEQ ID NO: 699672 - DNA, 113 bp, Homo sapiens
caaatttttataacactgcccagtcaccaagtgctctccagcagggcttttttccagacttcaagctcccattccaacagtaagagcttcttccacatcacagcccttggatc

SEQ ID NO: 699673 - DNA, 51 bp, Homo sapiens
aaggagcatcccaggacctaccagaatctgtggaagacttataaccctgcc

SEQ ID NO: 699674 - DNA, 78 bp, Homo sapiens
ttccgcgcccggccggaaaccccttcgcatggcagccggttccggttcggtcaaaatgcagatcttcgtgaaaaccct

SEQ ID NO: 699675 - DNA, 82 bp, Homo sapiens
gccgccttcccaggaccctcagggagagcgggcagccttccaggtggacaggttccagttacagctatatcagagaatgagt

SEQ ID NO: 699676 - DNA, 100 bp, Homo sapiens
agtcaagctgccttaggcttataacatcacatttaaaagcatctcagccatggccatgcagaaaatctttgcccgggaaatcttggactccaggggcaac

SEQ ID NO: 699677 - DNA, 100 bp, Homo sapiens
ggctgttcttttgctgcaaatgaagttgatggaattacactgtgatacgactgacttcaaataaagtgcccgtggtgcagccatcccatgcggtccatcc

SEQ ID NO: 699678 - DNA, 51 bp, Homo sapiens
tctctccctgccaggctcttcatccaaggatgtacagttacccagcacgtg

SEQ ID NO: 699679 - DNA, 100 bp, Homo sapiens
tggacatcgatggacgcattcagaaggaaagaccacagcaagattctttcattcgtctcctcctagcctgggggaccaggctcgaactgaccctggacat

SEQ ID NO: 699680 - DNA, 73 bp, Homo sapiens
gtgtggtgatgatcgaaaacacaaatggaatcctgtgctgaacccgaatcttccaaaaaacagcctacaatct

SEQ ID NO: 699681 - DNA, 75 bp, Homo sapiens
caagcggcgccgcgccctcggcctgcacgggcttatttataaagctgaatcctgctaaaagtctgacataaagag

SEQ ID NO: 699682 - DNA, 101 bp, Homo sapiens
ccgctcctgatcatgttttatgccccctgttctactgggacttcaccatgctgctgttcatggtgggaaacctcatcatcatcccagtgggcatcaccttc

SEQ ID NO: 699683 - DNA, 96 bp, Homo sapiens
ctctccgcccggcagccaccccatctgggaagaagaaatgttggctatttggcgatgagaggtggtgaacagtgaccatactggtatacaacacta

SEQ ID NO: 699684 - DNA, 75 bp, Homo sapiens
caatcctaccatgtcagccttcccagtagctggaactacaggtggtgttatcaaggagaagaaattcctgccttg

SEQ ID NO: 699685 - DNA, 75 bp, Homo sapiens
atgagatgatcacctcagcagaaaactgatggcagaatagctgtgaaggcatgtgaaggcttgatgctgttagta

SEQ ID NO: 699686 - DNA, 98 bp, Homo sapiens
agacgccgtggcagcctgaacggagtgtgcgacggattgggagataggggagtgtatacatcaccacaccagctgtccaggaattaggaggaagtgcc

SEQ ID NO: 699687 - DNA, 99 bp, Homo sapiens
cacgacacagattttggggcaaagcctttccaactggacagcaccatgtccaccaaagcggagcagtatgctattaactgagtacttggatatgaaaaa

SEQ ID NO: 699688 - DNA, 74 bp, Homo sapiens
atggggcaggagtgcatcaagtgccacatcaacgtgtatccacacaagcaggctaaagaattacctccaaagcc

SEQ ID NO: 699689 - DNA, 100 bp, Homo sapiens
agccgggcctgaggttgaactggggtgaaccgctgaggcaacttctcctagaatctcaatctcagctcgatgccgccaagagcgaagcccagaaacagag

SEQ ID NO: 699690 - DNA, 97 bp, Homo sapiens
catcctttttaagctgcaaagaagcatttgcagacgttgtctcatgggtaccgcttgccaactttggagttacatccttaatgttcagtcaagcagt

SEQ ID NO: 699691 - DNA, 98 bp, Homo sapiens
gaggaacccagctggaaaatgccgtctgaacgctgcctcagtgggatggagtaggacctcttccagactgtgctgaaccaccaaaagggatccagatg

SEQ ID NO: 699692 - DNA, 100 bp, Homo sapiens
gagattctctccttcctcttccagctcagcttctctactctgggcaagctccagcctgaaccatgtttttcacttgtggcccaaatgaggccatggtggt

SEQ ID NO: 699693 - DNA, 88 bp, Homo sapiens
acaggcggggacggcttctcgtcaccttcaggccattcagaggaggaaagagaggggaatatgaagtcagccaagccccaagtgaacc

SEQ ID NO: 699694 - DNA, 101 bp, Homo sapiens
atagatcgagcctgcagacaagaaacattcgtttatgagatggaggccagatgctccagtgcctgatggcgaaagtgagaaaactgtagaagaaagttcag

SEQ ID NO: 699695 - DNA, 98 bp, Homo sapiens
ttttgagaacagagtgctgttttagagctggcagcagcatctcagcccaagagaagttcctctgtgacgagggtgcaggtatctctggggactacatc

SEQ ID NO: 699696 - DNA, 83 bp, Homo sapiens
ggagctcatcgggcagattagcgacatccgagtgcagaacctgcaaggtcaaaatgcagatcttcgtgaaaacccttaccggc

SEQ ID NO: 699697 - DNA, 100 bp, Homo sapiens
agcctgcccatctacaaactgaaggagcaattggtccagtggacgtgactctggacccagacacggcctaccccagcctgatcctctctgataatctgcg

SEQ ID NO: 699698 - DNA, 78 bp, Homo sapiens
agagctctgcgcagtgagacggagctgctgctgtctgggaagatggccctgattaataaagaactcttcagaattcct

SEQ ID NO: 699699 - DNA, 100 bp, Homo sapiens
ctgggtcgagcggtttcttttggctcacaattatcctagagtgaggacttcaggttcaggagaagtggcacctggtggaggacctgtcgcgactgctgcc

SEQ ID NO: 699700 - DNA, 100 bp, Homo sapiens
aaatactcatctactaggcaagcatggagttggcaccccaaaagaaaggagaggcagatgcgaaccagaacaatgggacctcctctcaggacacagcggt

SEQ ID NO: 699701 - DNA, 83 bp, Homo sapiens
cccgcgccgcatggaggccggctgaggagcgccgctgcctcgcctcgaccgtgagcgaattgggcaggattcagcttatgagc

SEQ ID NO: 699702 - DNA, 82 bp, Homo sapiens
gacaaggggaaatggaaggggcctccagggtctgcagacaaggcagggataacctagggtctcagtttagccacatgagtct

SEQ ID NO: 699703 - DNA, 75 bp, Homo sapiens
acgcatcatgccagggagccaagcgtcctgcccggccgtaaggatcgcttacacctgagacgaactacagaacag

SEQ ID NO: 699704 - DNA, 75 bp, Homo sapiens
ctgcactatctgcagtcgggcatacacatcagtggacaaacacattcggcggctggacacagacctggcccgttt

SEQ ID NO: 699705 - DNA, 75 bp, Homo sapiens
tggggctggagtccgattgccgattcagcccagcagtgctgttcctttgggaaccacggccaaagaagagatgga

SEQ ID NO: 699706 - DNA, 76 bp, Homo sapiens
tgaccacttttggaccaaaggcctgtgtgctgcagaacccccagaccatcatagcgccatgctgcactgcccctac

SEQ ID NO: 699707 - DNA, 98 bp, Homo sapiens
actgaccaccaggccaacttaacatcagcagatatcctgtctcagatgaagagatgagaccctttttgctcttcctgctgcatctgagcctgtgatac

SEQ ID NO: 699708 - DNA, 82 bp, Homo sapiens
ccgactactgtcagcagctgtgccagcgggtccatatggaatatttgctggtagggatgcctccagaggactggccacattt

SEQ ID NO: 699709 - DNA, 100 bp, Homo sapiens
catgaagaacacacagcggtggaaaaggctcagaacgcccagcagctccatgaacgaatccagtcctcgagtatggatgccaagctggaagccctgaagg

SEQ ID NO: 699710 - DNA, 75 bp, Homo sapiens
gccggtggtgcgagtcttcggagcgaccccggcagaaaaactgattgcttatcaacgagaattccttgctttgaa

SEQ ID NO: 699711 - DNA, 82 bp, Homo sapiens
gtctgggcttcatagcattcgcctactccgtgaagggccatgaagcccccaggaggagaatcgagcaatctttttggaagtc

SEQ ID NO: 699712 - DNA, 74 bp, Homo sapiens
ctccagcggcgctcttcagcattagatgtaggtgcaaaaaactacagacatctctgtgctgtttattacaacaa

SEQ ID NO: 699713 - DNA, 75 bp, Homo sapiens
tacacacacagccggaggtcatactgcatcagaaccatgaagaaggttctccagcatttggctcaaggccccaag

SEQ ID NO: 699714 - DNA, 82 bp, Homo sapiens
agcagatggcggatgccctgcagtacctgcagaaggtctctggagacatcttcagcagtgcagagcagagcgggcggaggac

SEQ ID NO: 699715 - DNA, 100 bp, Homo sapiens
cagagacattgttcttgccggctccctacggtgccgtgtgtgcgtgagagaagaccagtctttcctctagcctgaaagaatagacccaagcgcatcacga

SEQ ID NO: 699716 - DNA, 87 bp, Homo sapiens
agagcgcgaatatcgtcatcgttagaagcgcatcagagcagagtgacgatgatcctgtttgtcctggagctggagtgggtgctgagc

SEQ ID NO: 699717 - DNA, 75 bp, Homo sapiens
tgtctgtgcagatgtacgcccaagccgccctggatggagactcccaggaatggaagttggatacactttgtgact

SEQ ID NO: 699718 - DNA, 101 bp, Homo sapiens
gacggcgagcgcgagcggcgcgagaaatgcaccaattccagctggacatcactgtgaaaatgggacgggataaagtccgagaaatgtttatgaagaatgcc

SEQ ID NO: 699719 - DNA, 50 bp, Homo sapiens
gcccctcatcgagctcttcgtcaagtaggagagaagtttgctgaggaatg

SEQ ID NO: 699720 - DNA, 98 bp, Homo sapiens
gggaatccggaatgctgcccgatggccctgggtcctcgctgtggggcaatccgggcttgcagacgagagacactatggacagcgtgaagcagagcgcg

SEQ ID NO: 699721 - DNA, 75 bp, Homo sapiens
cgggctcccttcgccaaactcttcattttctctatagcaaagccattgtggatgggaacctgaagctcatcttgg

SEQ ID NO: 699722 - DNA, 75 bp, Homo sapiens
ccgagcccggcgggaccatgttcaccagcaccggctccagtgggctctcggcaacctttggcactgcatccatga

SEQ ID NO: 699723 - DNA, 75 bp, Homo sapiens
ggaacagccacagcagcctcccaaggagtctgcaagttggttcattttccagacactgaaagagcagaatggcta

SEQ ID NO: 699724 - DNA, 98 bp, Homo sapiens
gcgcccgccagttgcttgatcaggtggaacagattcagaaggagcaggattaccaaagggagaaatccagcggtcgcaccgcccattacaagttgacc

SEQ ID NO: 699725 - DNA, 100 bp, Homo sapiens
tgtattttgctattcatgtaagcacagtcttcacagtattgcaggaacaggatctggacttggcacatttcttttaaaggtgcttgaagacgaattccca

SEQ ID NO: 699726 - DNA, 119 bp, Homo sapiens
gcttcagactttgatgacagtggttcccttctaggattcaagtatggctcaggacaaaaactttgagaatcactacaagaaaaactccttgtggtgaaggttctaagacgtgggatcgt

SEQ ID NO: 699727 - DNA, 100 bp, Homo sapiens
atcgagaagatgagctcagaggtggtggattcgaatccctacagacaggtgatttggcttctgcacagttaggaggagcaccaaaccgatgggaggtttt

SEQ ID NO: 699728 - DNA, 75 bp, Homo sapiens
caccactgccacaaacgccgcaccaggtcttgtagcagcgcctcctcggaaggagatggataaagcagatgttta

SEQ ID NO: 699729 - DNA, 88 bp, Homo sapiens
gcggatcaggatcggaagcctgcgtaactttctcccttgatccgggagtctttccactgggtgaatgaaaactttgccattgatttga

SEQ ID NO: 699730 - DNA, 74 bp, Homo sapiens
ccacgtctgtctggtgataccaggggcagagggaccactctgacaggtcgtcacgctgtggtacagagcacccg

SEQ ID NO: 699731 - DNA, 87 bp, Homo sapiens
ggaatgtgattcttcatcttccaaggatgatcagaagctacaggagagtttaaggcaaggtgctatcattattgcttcattaatcaa

SEQ ID NO: 699732 - DNA, 51 bp, Homo sapiens
tctggtcagagatacttcttaaaggatttgtcttggctgttactatgacac

SEQ ID NO: 699733 - DNA, 75 bp, Homo sapiens
cccttcaccaacaaagatgcctatacttgtgcaagtactccaaagattcaggtttactcacgtcatccagcagag

SEQ ID NO: 699734 - DNA, 88 bp, Homo sapiens
ccatggccagcgacggggccaggaagcaattctggaagcgcagcaacagcaagctcccgggcagccaagaaatatttttcttcatggc

SEQ ID NO: 699735 - DNA, 101 bp, Homo sapiens
caacaggctgccaataaaggagcaagatggctaggggtgtaaattttgataccaccattgccgccttcccctcaaaaaaggtgagaactgactaaactact

SEQ ID NO: 699736 - DNA, 100 bp, Homo sapiens
ctctgctaatgcctctgagagagacgaaacagattgtctcagtttacctagctttgaaaatgccatacccatgggagagaagaaggatgtgtataaggcg

SEQ ID NO: 699737 - DNA, 74 bp, Homo sapiens
cacagcccgagaaaccgcagcactacacacatccacgacagcgatggcagttccagcagcagccaccagagcct

SEQ ID NO: 699738 - DNA, 82 bp, Homo sapiens
aggacgagtgttcgtgaaagtgaaccccaaggcggaggtttgtcaagggctatttaatgagttactagaaaatgggatttct

SEQ ID NO: 699739 - DNA, 83 bp, Homo sapiens
aagtttgcagatcgggagcgcaaggtcgccctcaaggccatgatcaaaacgagaacaaggggtctgtggaaatcatgagaaag

SEQ ID NO: 699740 - DNA, 100 bp, Homo sapiens
tgattgagcagtttgaagacttgctagttaggattttattactggcagcatgtatatcttttgcaatcttgctgccaatgatctctccccgtcccgaata

SEQ ID NO: 699741 - DNA, 80 bp, Homo sapiens
gtatttgactgagagaaacccactgaagacgtctgcgtgagaatagagaccaccgagcgtgagtgcatctccatccacgt

SEQ ID NO: 699742 - DNA, 100 bp, Homo sapiens
agttcaagaagaacactccagagttccaggaagaagcttagcccaggaaaaacaaagaccagttggacccagagatgcctgagttggagatgaactttgg

SEQ ID NO: 699743 - DNA, 82 bp, Homo sapiens
cccaaggagaatgcgctcttcaagcggatcttgatgcctgaggaaacccagacccaagaccaaccgatggaggaggaggagg

SEQ ID NO: 699744 - DNA, 90 bp, Homo sapiens
cagctgcctgcccccggaggtgcccacgcagctgcctggacaagtctacgacgttcctccatcggtgagcaaggatgtgcccgatggccc

SEQ ID NO: 699745 - DNA, 100 bp, Homo sapiens
aggcgggggtgctgcagaggacacgaggcggcgggctggagacatggaccgcggcgagcaagtataaaagaacgtgtggatcactttgctgagtacatcc

SEQ ID NO: 699746 - DNA, 83 bp, Homo sapiens
tccttctggtgggttcgtggtctcgctggctcaggagtgaagctgcagaccttcatgtgggtaattccagaattgattggcca

SEQ ID NO: 699747 - DNA, 101 bp, Homo sapiens
atgcggtctggctccagaacaactcttcttcatagttacgttatactgcccctgcattgttggtattgaaaacggagggcacccggctgcagaaggatctc

SEQ ID NO: 699748 - DNA, 83 bp, Homo sapiens
tccacagtgtcctctggaaaatgagggtgaaggggaaccagagcgcacaagggaactgactcaggaggcagagaagatgggca

SEQ ID NO: 699749 - DNA, 82 bp, Homo sapiens
caacgtatactggaccagaagtttcatacatgggttgtgtggaggtcctccagtcaatgcgtgccctggacttcaacacccg

SEQ ID NO: 699750 - DNA, 97 bp, Homo sapiens
gcatggctcatattctacttcattcagaagatcaggtacacaaatgcacgcgacaggaaccaggttgcataccctgtcctgagggcgcggcacggag

SEQ ID NO: 699751 - DNA, 90 bp, Homo sapiens
gcggcggggagcacacggagcactgcaggcgccgggtgctggagaatctggtaaaagcaccattgtgaagcagatgaggatcctgcatgt

SEQ ID NO: 699752 - DNA, 75 bp, Homo sapiens
cttgctgcactttattatgccggagaatttggtgaggattcatcaacctccagtatgatgtctgtgaactttgat

SEQ ID NO: 699753 - DNA, 97 bp, Homo sapiens
ttacgtggggctgcaggctgaggatgggcactggacgggtgattatggtggcccacttttcctcctgccagagaaaaaagagtgccggcgggaccac

SEQ ID NO: 699754 - DNA, 83 bp, Homo sapiens
gcccgggtccccgcgttcacagccccagcgcaggatgatcggctgaatgtaacagaggaactaacgtccaacgacaagacgag

SEQ ID NO: 699755 - DNA, 75 bp, Homo sapiens
aaaaggtgtacttgcaagaaacctcaggacttgagtaacagcaacatgatcatacatctgtcggtggcctgggag

SEQ ID NO: 699756 - DNA, 100 bp, Homo sapiens
ctctgcagtggaccacagcattcctgaaatacatccaggaaagacatggagattctcttaaaaagaggcaccaaataatgtcatctgaaatgttgccagc

SEQ ID NO: 699757 - DNA, 74 bp, Homo sapiens
ccccggagagcggcgaggcggcagccacagatgaaggatttgggggcagagcacttggcaggtcatgaaggggt

SEQ ID NO: 699758 - DNA, 100 bp, Homo sapiens
ctttgttcaagatgccaagaacctggacaccctccaccggtgacacagccatgtggaactacgatgttccacaggagcccgtgcccacgctgtggaacga

SEQ ID NO: 699759 - DNA, 101 bp, Homo sapiens
gtggaagagaaaattgtgaactaaggccccctgcccccttttcctggtgcatgtgaagttatcaaaaacagatcatctctgaaagtggtgaaggcagcagc

SEQ ID NO: 699760 - DNA, 80 bp, Homo sapiens
ccaaagtgcccggacccaaaacaggaaggcaactgtactcctgatgatattggtctgtgaaaccccgtatggctgctatg

SEQ ID NO: 699761 - DNA, 76 bp, Homo sapiens
aatggcgattctgcaaccaagcacctgaaacagcagaaaataatgttgagtttccatgaagaacaggaagtactgc

SEQ ID NO: 699762 - DNA, 100 bp, Homo sapiens
gatgccaaagaattgagctgaagcagggctacacatttttcatcccttccgtatgtgacactaaaagagatgccagctgtgcttgttttcaaagatgaaa

SEQ ID NO: 699763 - DNA, 50 bp, Homo sapiens
aaatggtctgctctgcgaatcgggagtgcatccgccccaacccttttccc

SEQ ID NO: 699764 - DNA, 75 bp, Homo sapiens
gccgaggaacccggctgaggcggcagttatggatgtacaagcattcgagaggcttctggggccctgcatggacat

SEQ ID NO: 699765 - DNA, 50 bp, Homo sapiens
tcacagaaggcttccctcctggagctatcatggtgaacttacttcagatt

SEQ ID NO: 699766 - DNA, 75 bp, Homo sapiens
acgctcagcgccgagggcgagatcgtgcagacaggtgatttggcttctgcacagttaggaggagcaccaaaccga

SEQ ID NO: 699767 - DNA, 90 bp, Homo sapiens
ctaagcaaaaccctgcagaacggctgcctaatttacagcaaccatgagttgaagcttcttgtcatgacggggatgaaacaattgaaacta

SEQ ID NO: 699768 - DNA, 98 bp, Homo sapiens
cgcagggctgcgggactacaatcttcgcatgaaatggaagagagggtggtgcggatagcttgaggaagacatatgtagagtgtgtcggtcagaaggaa

SEQ ID NO: 699769 - DNA, 90 bp, Homo sapiens
gtgaacaaactggctctacccccaggcagtgtcatttcgtaccctttggagaatgtttcggagggcaatgcttgccatgttcaaatgtca

SEQ ID NO: 699770 - DNA, 74 bp, Homo sapiens
ggcaagagaggcatcctccttgaagtatttggctgaggagttttcaatcccagaaaactaggtgtctgtgttca

SEQ ID NO: 699771 - DNA, 100 bp, Homo sapiens
atcggaaacatggcactgttgcctatcagaagtcaattcaaaggacctgcccccagagagatgagaaagatcagtctaaagaaaaggagaagaaagtgaa

SEQ ID NO: 699772 - DNA, 75 bp, Homo sapiens
agcagaactcgtttcaggcagcctcaacggagatgccagtggctggagaatcgggaagggagaaggctacgccga

SEQ ID NO: 699773 - DNA, 97 bp, Homo sapiens
cataggacaggctgaggctgagtctcagtgttgccctgttcagtctgaggttttgacctgtagcagagaaccaattctggagaacagcctcacttct

SEQ ID NO: 699774 - DNA, 75 bp, Homo sapiens
ggagccaagcccctcttcaggagtaagtctatatcggcacaggatgaaaacctctcaaaaacaatgtttctgccc

SEQ ID NO: 699775 - DNA, 51 bp, Homo sapiens
gggaacccaggccccgccgaggcggccagtactgaccaagtgccaggaaga

SEQ ID NO: 699776 - DNA, 75 bp, Homo sapiens
agctcccgggcccggccgccaggcgcctctactccaggtttcctccagcctggtggtgccctgtccttgcaaaag

SEQ ID NO: 699777 - DNA, 100 bp, Homo sapiens
acctccccaaggagatggcctctctgtgagcaatttacagcaatgagggatttatacatgaaaaatggacaaggatttgcattagtttattccatcacag

SEQ ID NO: 699778 - DNA, 60 bp, Homo sapiens
ttggactccctattgtatttgccagagcacatctgaggcgtggagctatttcctatgaca

SEQ ID NO: 699779 - DNA, 87 bp, Homo sapiens
ggtttgtcgccagaaggaagatggcggatctggaggagcagttgtctgatgaagagaagtgagaaagatcagtctaaagaaaaggag

SEQ ID NO: 699780 - DNA, 82 bp, Homo sapiens
tggtgacaacagagtccatgagtagctttgcagtttggggagggctgttttccatgattgactgtagtatggttcaagtcag

SEQ ID NO: 699781 - DNA, 98 bp, Homo sapiens
ttcgatcaatcatcgggagtaagctgtgcagagtcgagatgcagcctggtaccagctgctgatggcaccactcagcgaggatcagaggacagcactgc

SEQ ID NO: 699782 - DNA, 153 bp, Homo sapiens
ggacacccccgtgccccgaagacataaatccctgagtgcccgggaggagccttaacaagcgcacggagccctcaagaggagtattcaagctgtagtcggcatccgtgccaaaatgggggcacgtgcataaatggaagaactagctttacctgt

SEQ ID NO: 699783 - DNA, 90 bp, Homo sapiens
acaaagtgaccaagaacgtgagcaagcccaggcacagccgacgccgcgggatgcagatgttggacaaatttcccatggaaggaggacaga

SEQ ID NO: 699784 - DNA, 75 bp, Homo sapiens
tccggcagctggggagtgcggccctggctaggcatggcactgatgcttgggcactgtttaaaggaaagttccgag

SEQ ID NO: 699785 - DNA, 99 bp, Homo sapiens
tggccatgagagtggagagctcaaccagtatagtgccaagaatgactcccggcgtggctcgggctccccggaagacacccctcgaagcagtggtgcctc

SEQ ID NO: 699786 - DNA, 74 bp, Homo sapiens
gataaccggggccgcagtcgcgctaaagtggtttcacagtcccagcccgcttgatggcattgaaacgaatggga

SEQ ID NO: 699787 - DNA, 102 bp, Homo sapiens
agaaaggagtgcctggctgttatggaaaggtatgagactgagagaggaatacgtctaacagtggaagctgatctccaaggcctgaataaggtctttgatgac

SEQ ID NO: 699788 - DNA, 75 bp, Homo sapiens
acacagcttgggggacagctggcagggaaaacggcaccttttcattaagcagcccgacggccatggaggctgaag

SEQ ID NO: 699789 - DNA, 75 bp, Homo sapiens
caacaccacaataatccacagccaaggtttttcgttggaatatacgttgcacatttatggcgattctgagtgtga

SEQ ID NO: 699790 - DNA, 82 bp, Homo sapiens
gctgcggcgcgggccgagaaggaagacctgcctagagctggaacgttacctccagagcgagccctgctatgtttcagcctca

SEQ ID NO: 699791 - DNA, 100 bp, Homo sapiens
cttggacttggccatgtgagatacaaggctacacagagacagatcaaagcagctccacttttccagccattaactccaggctctcgagaatttgaagatg

SEQ ID NO: 699792 - DNA, 75 bp, Homo sapiens
cacagcatgagatccaaaggcagggcaaggaaactggccacaagaacctagaaagattgtacaatgaatggtgat

SEQ ID NO: 699793 - DNA, 100 bp, Homo sapiens
aatgaaatggtggagtttgcacatctgagtggagatagacaaaatcctaaatgcgatggccaggtattactgacacaagtgtggaagcgtttaaacctgg

SEQ ID NO: 699794 - DNA, 75 bp, Homo sapiens
agcattaccaacttgatgatcaagagggcatttcattactgactcagcaatggagatgttatcggcaaaatgcca

SEQ ID NO: 699795 - DNA, 75 bp, Homo sapiens
catttttagaacctagagaaatcacactgcctgaggccaaagataagattgttaaaggaaatgggctggcaggaa

SEQ ID NO: 699796 - DNA, 100 bp, Homo sapiens
gtcagatcatgaagaactttcaggctcctccacaaatctcgctgaccatacatctgtggaatttaagaacagtatggagctcatcagagtatatcattga

SEQ ID NO: 699797 - DNA, 151 bp, Homo sapiens
aaagcatccacctaacagacgaggaatcagctttgaagtgggagcccagttggaagcccgggaccgtttaaaaaactgtgaccattgtcagtggccttctcatgctgctactgttcctgtccgagctgcagtattacctcaccacggaggt

SEQ ID NO: 699798 - DNA, 96 bp, Homo sapiens
gcgaaccaaagcgaccattgagctcaaggccctcaggctgctgaacttccagaggcaggggctgcttgctctcggtgactacatgaatgtccagtg

SEQ ID NO: 699799 - DNA, 100 bp, Homo sapiens
ttgtcagcaaaggaagagatggggtaactaaggaagtggatgctacatctaaagaggccaaatccttcttcaagcagaatgagaaagaaaaaccacaggc

SEQ ID NO: 699800 - DNA, 75 bp, Homo sapiens
atcttcaggtcctactccaggggcgctcaggccatgggtgtgtacctctacggggagctgatggtgagtgaggac

SEQ ID NO: 699801 - DNA, 100 bp, Homo sapiens
ggaggcgggagaggcgagctcgcgatgagtggtctcggcaggctcttcgggaaggatggccgccctgctcccccaatgaaaggccagcttcgaagaaaag

SEQ ID NO: 699802 - DNA, 100 bp, Homo sapiens
gaagcagcgagacgttccctgtgctttagactggagcaagttctgcttgagatttcaagaattttgaatactggcttagatatggaaactctgtctattt

SEQ ID NO: 699803 - DNA, 100 bp, Homo sapiens
aaatccagactctttttaagaggcttcgcgcagttccaaccaacaagggcctgaagtaatcaaacctgtctttgaccttggtgagacagaggagaaaaag

SEQ ID NO: 699804 - DNA, 99 bp, Homo sapiens
acaagtgtttccggaagtgtatagggaaacctgggggctccctggacaactccgagcaggacctcagcagccatgtcgaagccccatagtgaagccggg

SEQ ID NO: 699805 - DNA, 100 bp, Homo sapiens
gttattatcactgtgaatcttccattgtgattgtgcctacaccaactaatgttacaattgaatcctataacatgaaccctatcgtatattgggagtacca

SEQ ID NO: 699806 - DNA, 100 bp, Homo sapiens
gcctgggccgcttcctgcaagaaaacaagcagcttctgcacgacgcactggcccaggacctgcacaaggattctcatcgctttggaaggcacctgaaaga

SEQ ID NO: 699807 - DNA, 75 bp, Homo sapiens
gagtcgggggagtcgtaaacaaccctgaagagaacagccaggcctggttggcgtgggagccagcctagggcttcg

SEQ ID NO: 699808 - DNA, 100 bp, Homo sapiens
caccgccgccctgggtccatgcagccttcctcctctgcctcctcagtcttggcggagccatcgaaattcctatggatcagtcggggtttcaccgtgttag

SEQ ID NO: 699809 - DNA, 100 bp, Homo sapiens
ggcgtttctgtacatggattatctgacaatgcagatcttcgtgaagactctgactggtaagaccatcaccctcgaggttgagcccagtgacaccatcgag

SEQ ID NO: 699810 - DNA, 88 bp, Homo sapiens
atgagaaagctaggccatctgaataactttactaagtcttggccaccatcaacttgcagtcaacacacgagctgcagctactgaccac

SEQ ID NO: 699811 - DNA, 90 bp, Homo sapiens
gacaccccggaagctgggaaatggtgaagaacaaattggttttgagctagtggagaaattatttcaaggtcagctggtattaaggacgcg

SEQ ID NO: 699812 - DNA, 100 bp, Homo sapiens
aaaaacctgagaacttcctgatctctctcgctgtgagacatgtctgagactcctgctcagtgtagcattaaggatgtttcgtctgaactcactttctgct

SEQ ID NO: 699813 - DNA, 74 bp, Homo sapiens
tgaagatgtgcacctagggggcggctaccccgtggggaaacttggatttaactggccagaagcaggtattcaaa

SEQ ID NO: 699814 - DNA, 74 bp, Homo sapiens
ttttagccttttaacattcaaggattagcataagcagtactataatggatgtagacagcacaatttccagtggg

SEQ ID NO: 699815 - DNA, 80 bp, Homo sapiens
agtgcaaagccttggcatgttacacagctgacgtaagagtgatagagcagtacttctggaatagaaattctaaacattag

SEQ ID NO: 699816 - DNA, 115 bp, Homo sapiens
tcggttagccagccacgaagttctcgcgagagtcgtctcctcgataccaagtgctggagaatctggtaaaagcaccattgtgaagcagatgaggatcctgcatgttaatgggttt

SEQ ID NO: 699817 - DNA, 100 bp, Homo sapiens
gatccttgagatgcatcctttcctgagccacttgcacacctacccctgtggagcgtgcaccctataagggagaagtcgccacactgaaatccagagtgac

SEQ ID NO: 699818 - DNA, 83 bp, Homo sapiens
ctgctggctgcttccagtgttcgccgagagggccgagaactactggtggcgtggccagaacacacggacgctgtgtgtggggc

SEQ ID NO: 699819 - DNA, 82 bp, Homo sapiens
ttcactttgcccaagactgactctggatattcagtcggagctggtcattttcggagccagcatactaccgaagtagtcggag

SEQ ID NO: 699820 - DNA, 90 bp, Homo sapiens
gaaaccctgtctttcaggattcctgggacacagaggagaacgcccatataaatgtgaactttgtccttactcaagttctcagaagactca

SEQ ID NO: 699821 - DNA, 98 bp, Homo sapiens
agctgtttcctaccaggtcacacactgttgcagcacagtctctagtgatccctgaaaagttccagcatattttgcgagtactcaacaccaacatcgat

SEQ ID NO: 699822 - DNA, 100 bp, Homo sapiens
gaaaagattttcacaagacgcttccgaaacagacgtttgagtcggaaaccttggagtgcagtgaacccgctgctcaggttatcaatactctggctgacca

SEQ ID NO: 699823 - DNA, 96 bp, Homo sapiens
ggaaatcccagagcttcaaactggtgagccgagagccaaggattgtcaccagtgaagaggtcattattcgagacagccctgttctccctgtcaccc

SEQ ID NO: 699824 - DNA, 75 bp, Homo sapiens
tacaggccctctattgccaactgttaaggacattagtcatgagtgccgagtgtgcggggtcacagaagtgggtct

SEQ ID NO: 699825 - DNA, 98 bp, Homo sapiens
ttcaaggactccgtgaaggtcatgacagtgaattacaacacgcatggggagctgggcgagggcgccaggccgtcactatggggctgtcagttgtgaag

SEQ ID NO: 699826 - DNA, 75 bp, Homo sapiens
cggcggcgcagttgcgagtgcaggtggcttctggcacagcagcttaattgaccggaacctcattgattattttgt

SEQ ID NO: 699827 - DNA, 109 bp, Homo sapiens
ctccgaataactgaggcgtttctgtacatggattatctgattattcttggagaaaccctgtctgtttactgtaaccttttgcactcaaattcctttatcaggaataact

SEQ ID NO: 699828 - DNA, 75 bp, Homo sapiens
gcctcccctgtcccgaacgcagtgtgtggaaagatgtggttgccctgcttggctttccttatgcctccagtggag

SEQ ID NO: 699829 - DNA, 75 bp, Homo sapiens
ccatcctgaccacctcctttgtttccaaaagttttggaaggtctccatcaagaaaacaaaattattcatcaaaaa

SEQ ID NO: 699830 - DNA, 50 bp, Homo sapiens
ccgggagaacctgcggcggccggagcgtaaggaagagcccaacactgctg

SEQ ID NO: 699831 - DNA, 112 bp, Homo sapiens
aagtggtttatcctataagacttcatccactgcataaaagagaggccaaagagccagagcaacagacaaacctacctatcttcaagctaaaggagtcctgcgtacggcggcg

SEQ ID NO: 699832 - DNA, 100 bp, Homo sapiens
ctcaacagagaggttgagcaaacttgtgtatgcggatacctgcttcagtaccatcaagttaaaagcagaagatgcttctggtagagagcatttaatcact

SEQ ID NO: 699833 - DNA, 100 bp, Homo sapiens
agatcgagaacaccggcacaaagaacacaagaaggagaaggaccgggaaaagtccaagcatagcaacaggatgtacagttacccagcacgtgtacctcct

SEQ ID NO: 699834 - DNA, 101 bp, Homo sapiens
ctccccttggaccgagccgatcgccgcggggcagttcgggccggctgtcctggcgcggaattgtcttagaagaaagaaggcaagccaccattttacccacg

SEQ ID NO: 699835 - DNA, 90 bp, Homo sapiens
gtagcccaggaatgtagtgctggtgtttgtggcttgatcgtcccccaggaagacatgccattttgtgattctggcatctgtccggacatc

SEQ ID NO: 699836 - DNA, 50 bp, Homo sapiens
cggcctcctccgaggaggagcgcaagattcatgttacatgtaaagctgtc

SEQ ID NO: 699837 - DNA, 100 bp, Homo sapiens
agctacaacatcatcttctgggttttgggcggaaagacgtagttgaatatttgcttcagaatggtgcaaatgtccaagcacgtgatgatgggggccttat

SEQ ID NO: 699838 - DNA, 95 bp, Homo sapiens
atccggaaatatggcctcaatatgtgccgccagtgtttccgtcagtacgcgaaggatatcggtttcattaagatagccaccatcctggactgcca

SEQ ID NO: 699839 - DNA, 101 bp, Homo sapiens
attatggaggcccctctgtcttttctgtgacgggagcaatgctgacctcggtttcctggacccattccgactcaggctgatcagctgaccgaagaacagat

SEQ ID NO: 699840 - DNA, 75 bp, Homo sapiens
ctacatcatcgacctgcagtccatgcaccagtttcgccaggacacaggtggagccgccaccaaaatgcagatttt

SEQ ID NO: 699841 - DNA, 80 bp, Homo sapiens
tctaaagatcctaggattgctgcaggtcagcagtctccactggaaaaaaagatcttgtgaaaatgcctcgtgtaaaagca

SEQ ID NO: 699842 - DNA, 50 bp, Homo sapiens
aaagaagtcattccttttttgaagacatgcaagaaagcacttcagccaag

SEQ ID NO: 699843 - DNA, 100 bp, Homo sapiens
gtgcagcatgacacggcctgtaccatcgcagccacggccagcgtggtcaaggagaagctggctgaccctgatgctcccataagacagaaaatgccccttg

SEQ ID NO: 699844 - DNA, 97 bp, Homo sapiens
aagatctcagaaaatagtttatatttgttgtggagaagatcatactgctgctctaaccaaggaagaagttcataaatatgtacaaatgatgggcgga

SEQ ID NO: 699845 - DNA, 92 bp, Homo sapiens
cacctcctcgccagcagccgtccggagccagccaacgagcggttctagagcacaagttgaaagaagctgatgaaatgcacacattgttacag

SEQ ID NO: 699846 - DNA, 110 bp, Homo sapiens
gcttattgttgtgtcagtgaattaggagaacttggaaaggttcagtttcgtgacatttctcgaatgctggcagccaaaaccgttttggctatccgttatgatgcttttgg

SEQ ID NO: 699847 - DNA, 83 bp, Homo sapiens
ggtggctgcgccggaggcctgactctgggagcacgcagtggtgatgatgtccagcaactctgtgaagcaggagaagaggagtt

SEQ ID NO: 699848 - DNA, 96 bp, Homo sapiens
tcagcccttctgagctctgtgctgaacaagggaagatcagttttcctgccatccaggctgctccctccttcagcaactcattcccacagatcttcc

SEQ ID NO: 699849 - DNA, 100 bp, Homo sapiens
ccccaaaacatcgagacgctgcagaacgcggcttgaaatggcgattgaaaacctccaaaaaagcgaaggaatcacatcacacaaaagcggtttactcaac

SEQ ID NO: 699850 - DNA, 95 bp, Homo sapiens
gcaggcctgcgaaggaaacttacccaaagggaagtctggagtcgtcgcatggtggatgtcatggacgtgaacacacagaaaggcattgaaatgac

SEQ ID NO: 699851 - DNA, 96 bp, Homo sapiens
agagatcccagactgcgtggagcagagcatccacaagaatctagaagcaaaaatagcccgcttccaccagcgggaggatgccatcctctatcccag

SEQ ID NO: 699852 - DNA, 75 bp, Homo sapiens
ttcttaattacctactgactatgcatgaggttggatggcaagcatgtggtgtttggcaaagtgaaagaaggcatg

SEQ ID NO: 699853 - DNA, 75 bp, Homo sapiens
agcaaacaggacgggaagatttacagaagccgagacccacagctagttttgcggcctccaggtggtggatccaat

SEQ ID NO: 699854 - DNA, 75 bp, Homo sapiens
atgctgtttgccctgaacatcatgaattcccaagaaggagatgccactgccgccaggagccctgtaacatcagcc

SEQ ID NO: 699855 - DNA, 80 bp, Homo sapiens
gatctgcctcaatggaacccctgctctggcctacctggcggtggctgaatccacagaggagcctgctggttctaatcggg

SEQ ID NO: 699856 - DNA, 100 bp, Homo sapiens
tggtcgcgtctcggaaaccggtagcgcttgcagcatgcttgtactcccagagtacctcatccacgctttcttctgtgtcatgtttctttgtgcagcagag

SEQ ID NO: 699857 - DNA, 83 bp, Homo sapiens
aagtttatcaaggctgtcacacatcaagttaaatttggtcaacaaaatccacgtcaggtgaaggtacaagtaagaagctggcg

SEQ ID NO: 699858 - DNA, 100 bp, Homo sapiens
ccaggagcaggatctgcagaagacgcagggctcaagtgattacagtggcgagatcttgaacaactgctgcgtcatggagtaccaccaagccacaggcacc

SEQ ID NO: 699859 - DNA, 100 bp, Homo sapiens
aacttttgacgacaataaaagccgtggtcatgttggaatacgtcgaaagagcaacatggaatgaccgtttctcacattgtggatatcaagcctgccaata

SEQ ID NO: 699860 - DNA, 75 bp, Homo sapiens
ctgccaacagtgcaaggaagcctggttcagcaggtggccctaaggttggagggttttttgattaactcaaaacca

SEQ ID NO: 699861 - DNA, 74 bp, Homo sapiens
gaggaaatgtcactgccaaagctggagtcgttcaacgggcctccccaaagccagtcctgtgtcaccaatcaaag

SEQ ID NO: 699862 - DNA, 98 bp, Homo sapiens
aagagcaagtgtcagaactgcttcaagccccgcgagtcgcatctgctcaacgacgaggacctgacgcagctcctcaagagttactgatctatgaaatg

SEQ ID NO: 699863 - DNA, 80 bp, Homo sapiens
caactctacttccctctgctccttcccaggctgggtttccatcatggcagaagcaatgaaatctccccacattatggagt

SEQ ID NO: 699864 - DNA, 50 bp, Homo sapiens
atttcaccacaagaagggctgccagacagtgggagtagctcaccgttacc

SEQ ID NO: 699865 - DNA, 100 bp, Homo sapiens
aaccctcctcaaggttgaggtcatgcagtgtcaccgacgcagttgcagaacagggccatctaccaccgtgcacctatgatatgtgttttagaaatagccg

SEQ ID NO: 699866 - DNA, 100 bp, Homo sapiens
gagatggcggctcagaagataaacgaggggctggaacacctcgccaaagcagagaaatacttgaattcggagtgatttaccactgcacagaggagcggct

SEQ ID NO: 699867 - DNA, 80 bp, Homo sapiens
gcggaaggagaagatgtgccgccgctgccaacgtcgagcggcgacggctggtcagagatgaaaggaacatgcttaaggtt

SEQ ID NO: 699868 - DNA, 101 bp, Homo sapiens
cagtctgcaccttctcttactgctggcctggtacctcagccagcatggcagcctctttcccacccaccttgggactcagttctgccccagatgaaattcag

SEQ ID NO: 699869 - DNA, 89 bp, Homo sapiens
ctaatgctcgacgagaagtcaagaactatcttttgaagagggagaacagcagattgctcagttacatgggtctggattttaattctttg

SEQ ID NO: 699870 - DNA, 51 bp, Homo sapiens
tcggtgctggagaacttcgtgggccggtgtcagagccagaggagaagagtg

SEQ ID NO: 699871 - DNA, 83 bp, Homo sapiens
agccttcgagtcgttcttgctcttcgagggcgagaagtacttgagaccagaaactgcacaggggattttcttgaatttcaaac

SEQ ID NO: 699872 - DNA, 131 bp, Homo sapiens
accaaccccacatccctcccggctgtagccaagaactattcggttctctacttccaacagaagctacagatctgggacacagcaggtcaagagagatttcggtccattacccagagttactaccgaagcgc

SEQ ID NO: 699873 - DNA, 90 bp, Homo sapiens
tctgacggccaatgaaacccccaagatgggcatctattacattccagttgacatcatggacatatgtgagtccatcctggagaggaagcg

SEQ ID NO: 699874 - DNA, 75 bp, Homo sapiens
tttgcaggggtgcagtgtgtctggtcttatgaggtttcccatccacataccaagctgatgaggatcccatcgttc

SEQ ID NO: 699875 - DNA, 75 bp, Homo sapiens
catgatccataatcggtttcaagacagcttatctcctgtgctgcacccttctgatttgatcctgactcgaggaac

SEQ ID NO: 699876 - DNA, 96 bp, Homo sapiens
aacaccccccagaaggctgacaaggatgccggcctggcccaggtttttctatatgagtggagaagacagctgttaccagggaggtcatacaacatt

SEQ ID NO: 699877 - DNA, 51 bp, Homo sapiens
ggccgatgaagtgcagaggtttttttctggcgcattgaacagtcctgggca

SEQ ID NO: 699878 - DNA, 75 bp, Homo sapiens
gggagaagcatcatggttcaacgttttaaaatcaaagatgggaaaatcggagaaaattgcccttccccatggcca

SEQ ID NO: 699879 - DNA, 100 bp, Homo sapiens
agtcttccctcctgggtcacttcctatcccatcccagcctcagttttctcatgcatggctaatgtaaaagcagccccaaagataattgacacaggaggag

SEQ ID NO: 699880 - DNA, 90 bp, Homo sapiens
gcggccgactcgcaagatggcgccggcccattgctagaagactgggacataatcagccccaaagatgtcattggctccgacgtgttgctg

SEQ ID NO: 699881 - DNA, 85 bp, Homo sapiens
caagcagccaaccatgctcaacttcggtgcctctctccagcagactgcgatgatatcatcaagttgaatcgaaaggaagggaaga

SEQ ID NO: 699882 - DNA, 89 bp, Homo sapiens
ggagaccagacctactgcagccacgcgggcgagcggctgtgtggatgtcggcgaagccgcgggcgagtaccacatgcggatccacaagg

SEQ ID NO: 699883 - DNA, 88 bp, Homo sapiens
agccgggccgcgccgccgctgccgccgccgcgcgcggcaataggcgaatatgaagaccttagagcagagaaccagaaaacaaaggaga

SEQ ID NO: 699884 - DNA, 100 bp, Homo sapiens
agagctcccattgaccacgggttggaacagctggagacatggctttatcctgtggataaacgcagagtgaacgagtttggggagtcctacgaggagaagg

SEQ ID NO: 699885 - DNA, 100 bp, Homo sapiens
ctggcccctgatccggttcttggtgcccctgggcatcaccaacatagccatcgacttcggggagcagacacgaatgcagagtttgagtccagatcccaaa

SEQ ID NO: 699886 - DNA, 50 bp, Homo sapiens
gattcgcagtggtcgcttcttctccttgtggtggtgaccgcggtggcttc

SEQ ID NO: 699887 - DNA, 50 bp, Homo sapiens
aacctatcctccttcaggaccaaccatccgcacttccactaatagccaag

SEQ ID NO: 699888 - DNA, 98 bp, Homo sapiens
cacattgtccaggccttcgccaacagcggcaacgccatcaagcccgtctccttcatccgagacctgaaaagtgctacgcatgatggtcggagtaaata

SEQ ID NO: 699889 - DNA, 90 bp, Homo sapiens
gtctcctggtgtacggccaacgccaagtaggggattgcgttccctccagtcgcaggctgaagccgacgtagcttctctgaacagacgcat

SEQ ID NO: 699890 - DNA, 97 bp, Homo sapiens
ccaccatcaacaatgagtacaactaccgctgctggaccacaaaccgctgccagaaaacttttcttggacagtgacttactttgattcttttgaacca

SEQ ID NO: 699891 - DNA, 75 bp, Homo sapiens
gagtcatttctgttccgcacaggcctgctgaactgggtgctttatatagggagacggtggctcagggagtaaagg

SEQ ID NO: 699892 - DNA, 85 bp, Homo sapiens
ctcgctggctcaggagtgaagctacagaccttcgcgtctatccttcactggagtctgatgatgatgaccctgctttgaaatctcg

SEQ ID NO: 699893 - DNA, 100 bp, Homo sapiens
cagctccagcgtctggaactcagcactgacatccagaccatcgagctccagatcaaaaagctcaaggctgctctttggcgtaaattgcaatcgattaggg

SEQ ID NO: 699894 - DNA, 83 bp, Homo sapiens
cctgtacaggtcgcgggagtcgtagggaggacgccgggacacctggaagccgagaaatggaaaactacatctcagacccaact

SEQ ID NO: 699895 - DNA, 100 bp, Homo sapiens
ttccaaatgaatttgcaaaacttactgtagatgggccatcaactgagaaagaccttgacgaaaagaagaaagaacctgcaattacatcgcagaacagccc

SEQ ID NO: 699896 - DNA, 83 bp, Homo sapiens
cagcagaaccccagctctacccacggattttttatcaagcagaaatgcatcgaacaacgagaatcaagatcactgagctaaat

SEQ ID NO: 699897 - DNA, 80 bp, Homo sapiens
cagcaaaaacaagagtccctctaaagcagctcaaaaggtaaagtgttgagagaggagaaccagtgcattgctcctgtggt

SEQ ID NO: 699898 - DNA, 82 bp, Homo sapiens
aggagtcatcggacgccagaatctggactggagactgatgcatgagggggctacggaggcgcaggagcggtggtgatggtct

SEQ ID NO: 699899 - DNA, 96 bp, Homo sapiens
gctgcggagatcggtagcgcctgctgcccccaccaggccaggtcagagcagcccaccatgggatggggagggggtggaggctgcaccccgcgccca

SEQ ID NO: 699900 - DNA, 75 bp, Homo sapiens
tcgcagcccccgccgtagccgcctccgagcccgccgccacatcctctgaggtgctggagaatctggtaaaagcac

SEQ ID NO: 699901 - DNA, 75 bp, Homo sapiens
ctgcctcagcccccaggtagctgagacctacaggtcatctaatacatgggagaaacatggattttggagtatttc

SEQ ID NO: 699902 - DNA, 51 bp, Homo sapiens
ctgagaactaccgccgctccgcagccacaaagtgccagcgatgccgcccct

SEQ ID NO: 699903 - DNA, 83 bp, Homo sapiens
acgatctccatatttcattgcaagaatttaagcagaacggtgggaagccctatttgtctgtgattacggggagaggaaaccac

SEQ ID NO: 699904 - DNA, 100 bp, Homo sapiens
cgagtacgtcaaccgctgtctgttcataaaatcttcacttctgggctcaggagaatcaggaaacccaggcccaacggcaggtggatgcaagaagaaatgt

SEQ ID NO: 699905 - DNA, 100 bp, Homo sapiens
tctagaaaaaaaaaaaaaaagccggagtattttactaagcccctaaaatgtcgagatttgtacaagtgccgcagaatggaattcggcattgttcctacac

SEQ ID NO: 699906 - DNA, 151 bp, Homo sapiens
aagagctagtggttatttaatggaccttataaattttttgagaagcatctttcaagtgtttactcatttgcctgttccagcaacagatagaaatgctttaagttcactctggggaaagctggcctctgaaatcttaatgcagaattgggat

SEQ ID NO: 699907 - DNA, 101 bp, Homo sapiens
ggtttgagtcttgaagaatttattgcttttgagcatcctgaagaagttgattatatgacgcaacgaagtaaacgaggaggttggtccaaaggaagaaagag

SEQ ID NO: 699908 - DNA, 83 bp, Homo sapiens
tgcagaaacttcataaatatatgcaggacacagcattgttggttttgccatgtactattttacctatgacccgtggattggca

SEQ ID NO: 699909 - DNA, 75 bp, Homo sapiens
gtgcagtttcgatggaaaatgaaggaagctgttttaggttatgtgaaagagatgtttcctcatctctaaggctta

SEQ ID NO: 699910 - DNA, 90 bp, Homo sapiens
gagacatggaccgcggcgagcaaggctcaggctgcacgaagaaaaggttattaaagatagacgtcatcatctcaagacctacccaaactg

SEQ ID NO: 699911 - DNA, 76 bp, Homo sapiens
ggatgagagctgcaccgcgcgggacaagtcgccggcggcgcccgacggagcaggatgtgtgcccctgtgatggtgg

SEQ ID NO: 699912 - DNA, 101 bp, Homo sapiens
tcctgataccaaactcatcggaaacatggcactgttgcctatcagaagtcaattcaaaggacctgcccccagagagagtgtaattgaaaagtgatcctctc

SEQ ID NO: 699913 - DNA, 100 bp, Homo sapiens
ttcgggacagctctctagaaactcgctctaaagacggaaccgccacagcactcaaatgagcagcaccagcagtaagagggctccgaccacggcaacccag

SEQ ID NO: 699914 - DNA, 90 bp, Homo sapiens
ggaggggcaaagctcaagatggcggacaaaacgccaggcggatctcagaaggccagttcaaagggctggttgatatgtgaagagccaacc

SEQ ID NO: 699915 - DNA, 100 bp, Homo sapiens
ccggatggaaatcctaatgacagtctccaaattcgcctccatctgtaccatggtccttccatagtgacgccccccaaggacatctggaatgtcactggtg

SEQ ID NO: 699916 - DNA, 75 bp, Homo sapiens
tgtccatatggccatatctccaaaagatggcttccttagcggtatccaactggcctaagcccatgccattgattc

SEQ ID NO: 699917 - DNA, 90 bp, Homo sapiens
cctcactctgtccagtatacatttcccaacacccgccaccagcagggatttcccagatgacccaggcatgcagtgggacacagagcacgt

SEQ ID NO: 699918 - DNA, 75 bp, Homo sapiens
ttttggctctgggatgctggaacccttaaaataaaattacaatactgtgatgagactgttcctgtaacttttgat

SEQ ID NO: 699919 - DNA, 73 bp, Homo sapiens
tgaatgggaagaaatatgcatggcaagatggagtggtttaataattataaaagatctcttgctacttatatga

SEQ ID NO: 699920 - DNA, 99 bp, Homo sapiens
gcaggagcgattccgtcgccaaacagggggacagccgcgccgctgctgcttttccgaagaggtgacttcgaccgagctctccagtggagaccagagtca

SEQ ID NO: 699921 - DNA, 88 bp, Homo sapiens
agccaaaggagcagcttcagaaggccatcagggaccgcgacgaggccattgcaaagttccccagactctcgctacatccgcgtggaga

SEQ ID NO: 699922 - DNA, 74 bp, Homo sapiens
cgggaacgcggggcctccgtgttctgctgtcttcatcagcgtgggccgcggtttccaggcacttgggctggttg

SEQ ID NO: 699923 - DNA, 100 bp, Homo sapiens
gcgaaaggagctggtgcctgtgcaagttgttgagggtgataaaagaaaatgtggctgaagttacccgaagttcagcttgcagtgtaattcagaagagtta

SEQ ID NO: 699924 - DNA, 74 bp, Homo sapiens
gagcaagcggaggacctacgccggcctggccactgaggcggctcccagctgcgttggcgacatggccgacaccc

SEQ ID NO: 699925 - DNA, 100 bp, Homo sapiens
tagttgcttcaggaatcttgcagaagaccgcagtgggataaatctcaaagatctcgtacaagatccttctttgtttattacccagaactctttgtctggg

SEQ ID NO: 699926 - DNA, 100 bp, Homo sapiens
ggccgcggctcatggacctgtggccccctcttccccagaacagatgtccagctcgccgctgtccaagaaacgtcgcgtgtccgggcctgatccaaagccg

SEQ ID NO: 699927 - DNA, 80 bp, Homo sapiens
tgacaaactgctgagcctgccaatgcaacagccacggaagattaagcagaagacacccactgcagacccccagcccagcc

SEQ ID NO: 699928 - DNA, 74 bp, Homo sapiens
ggttccgaaagtggctctacaaacccaaggattgaaagaaggtggcaagaggaagaagcagaagcagagagagg

SEQ ID NO: 699929 - DNA, 96 bp, Homo sapiens
tgtggaattctccgtccctttccagggagggaacaaagcccacagcaccgaagactcccaacctgatgaaatctcagagaagagcccagaaaatca

SEQ ID NO: 699930 - DNA, 83 bp, Homo sapiens
gaagaagaaggctgagatgcttgcagactatttctctttggaaattgatgagttatgcaaagggtgacctggacatatcttac

SEQ ID NO: 699931 - DNA, 98 bp, Homo sapiens
ttgagatcaattcttggagaacacaaagaagtgtgatgtcctattttgtaacggattatgatccaaccattgaagattcttacacaaagcagtgtgtg

SEQ ID NO: 699932 - DNA, 100 bp, Homo sapiens
agcgacctacccactacaatacctcttgggactgggctcgatttgaggccaaaattgtgcgcaatgccaaggacacagcacacacacgggctgagcggaa

SEQ ID NO: 699933 - DNA, 82 bp, Homo sapiens
aaacctggaaaacccaagggaaagaaaaagctttcttctgttcgtcagaaatttgatggtcatgatcagagttcgactcttg

SEQ ID NO: 699934 - DNA, 82 bp, Homo sapiens
ctatgcaaatatagaacactaaagtgttacatgacagatgtatgagtcgacttgggaataagtgtcaagacggataatgtgg

SEQ ID NO: 699935 - DNA, 49 bp, Homo sapiens
gacaaatttagagaaacctcggcagatgttggggatcagccaggtgagg

SEQ ID NO: 699936 - DNA, 98 bp, Homo sapiens
ttctgggctatttgattattgaagaagattttaatattgcactaggagtttttgctttagctggactaacagatttgagtggtggacatgacaacaga

SEQ ID NO: 699937 - DNA, 100 bp, Homo sapiens
caactgaagaaacccgaatggcaggtcgagcgcgagagtatcagccgcctcatgcagaactatgaaaaggatcttctcttagaaatctacagaagtatag

SEQ ID NO: 699938 - DNA, 112 bp, Homo sapiens
attcatcaaagacgtaatcaaagacggcaacgcgcttatcagcgctatgagaagattccagacagcattggaaaagacatagaaaaggcttgccaatctatttatcctctcc

SEQ ID NO: 699939 - DNA, 100 bp, Homo sapiens
ccccgttcctggagattctgattgagaacaccttccaccatgaccacctcagcaagttcccacttaaataaaggcatcaagcaggtgtacatgtccctgc

SEQ ID NO: 699940 - DNA, 100 bp, Homo sapiens
cactgtgacatgtctgatcccttgctcccatccctgcagcatgaacaaggggaactgtgtcaatctgacagaagcactgtcgctctatgaagaacagctg

SEQ ID NO: 699941 - DNA, 75 bp, Homo sapiens
ctcacatgcactgcgtgtggcgcatctctgtcacacccggggagaagatcacagacaacctgacgaagaaggaga

SEQ ID NO: 699942 - DNA, 80 bp, Homo sapiens
gcttgccgcagccagcaactatttcagaaaacctcggatcaattctcagctggtggcacaacaagtggcacaacagtatg

SEQ ID NO: 699943 - DNA, 100 bp, Homo sapiens
cagtggatatccaaccctgaagatatttagagatggtgaagaagcaggtgcttatgatggacctaggactgctgtttgtagtctatcatctggaaaattt

SEQ ID NO: 699944 - DNA, 75 bp, Homo sapiens
gtgcgggtggtcaccgagaagtccccgaccgactgctgacagggagttcatcgaggccaggaggagagccctgaa

SEQ ID NO: 699945 - DNA, 95 bp, Homo sapiens
tgggacttaggagggcaggaagagctgcagtctttgtgggacaaggttaatttggagtggcccctggagtcagtttcctacaccatccgaggccc

SEQ ID NO: 699946 - DNA, 75 bp, Homo sapiens
cccccgagtgtccagtgctgtgaaggcggaacttcgacactgcgtgttcatctggcacctgggcccggagatcac

SEQ ID NO: 699947 - DNA, 90 bp, Homo sapiens
caagaagaggaagaagaccaaggcccaccatgccccagatgctgacggatctgaacacgtacctcaacaaagccatcccggacactcgcc

SEQ ID NO: 699948 - DNA, 74 bp, Homo sapiens
agaccttctacgagcagcccccactggcccggaaacaaaactcatgctgtgccatcatgtgatgcagcctgcca

SEQ ID NO: 699949 - DNA, 100 bp, Homo sapiens
tgcagcgaaaacgggaagctatgcagaataaagctcgagccgaaggacatatgggaggaataagtttttttcatctgtaatttggaagccaagtcagtaa

SEQ ID NO: 699950 - DNA, 98 bp, Homo sapiens
gtggactcagcagcagcaactgtgggactttttgactacaattctcaacaacagattcagaatggacagtttagaagaacctcagaaaaaagtcttta

SEQ ID NO: 699951 - DNA, 74 bp, Homo sapiens
agccggatcaacaagacatccccagctgcaggacgtcttcaacctgctgccagatgtcagcctgcaggagttcg

SEQ ID NO: 699952 - DNA, 100 bp, Homo sapiens
gtcgctcttcagacttttggaaaccagactacaattatcccagctggtggtgctgggttctccaaaaaatgtggaatcctttgcatctatgctgagacat

SEQ ID NO: 699953 - DNA, 100 bp, Homo sapiens
caaggattctgggggaggcctcagtcaccttcaggccattcagaggaggaaagagaggggaatatgaagtcagccaagccccaagtgaaccacagtcagc

SEQ ID NO: 699954 - DNA, 101 bp, Homo sapiens
ccacgctggactggtgcgaggagaactactccgtgacctggtacatcgccgagttctgccacgtgctgtacgccgacatcaagatggagaatgggaagtcc

SEQ ID NO: 699955 - DNA, 75 bp, Homo sapiens
gccaagctcatctctgagacccggaggaggttcgaagctgagtatgtgacagactaaacttcagtggctctgtga

SEQ ID NO: 699956 - DNA, 74 bp, Homo sapiens
tgacacggaaccctcacctcaacaaggaccgtataatagacgctggccccaaaggaaactactctcgatttatg

SEQ ID NO: 699957 - DNA, 132 bp, Homo sapiens
gttccagctctgcgccgatctatgcacgcagatgctggagaagtccccttatgaccaggtcattttttccaggacactttctgtcttcatgacaggaacatcgagaagccaaggctagtggctgggttactg

SEQ ID NO: 699958 - DNA, 100 bp, Homo sapiens
gtacctggaggctcaacggcagaagcttcaccacaaaagcgaaatgggcacaccacagaaatgactgctgtccatgcaggcaacataaacttcaagtggg

SEQ ID NO: 699959 - DNA, 82 bp, Homo sapiens
cttctgtccggaaacctgcagtcaatataaagcaaggaaattgacaatggcccttcagctatgctaggtctataatgggaag

SEQ ID NO: 699960 - DNA, 83 bp, Homo sapiens
gaagaattcatgctcatccgggaacgtcaaggtcgtgggaaataaaaggcagttctacacagactgcagcaacggttgcatct

SEQ ID NO: 699961 - DNA, 98 bp, Homo sapiens
gctagcgttcccctgtcttccccaacgccccggagccgccggccgctagcgtcagcgccagccaggcccacagcagcagaacttttaaaatgcaaatt

SEQ ID NO: 699962 - DNA, 90 bp, Homo sapiens
actgtgtttgggagcctcatcattggttatgccaggagtgttgaagcctggaaatcccctccccttccccctcccccctttacagtatcc

SEQ ID NO: 699963 - DNA, 76 bp, Homo sapiens
ccacttcaacaagggcccttcctatgggctctcggccgaagtcaagaacaagggaagaggaagaacgtctgagaaa

SEQ ID NO: 699964 - DNA, 100 bp, Homo sapiens
gttcaaggaggccttccagctgtttgaccgaacagattagttggagtcccgacagcacccatttgctttctgcttctggggacaaaacttccaagatttg

SEQ ID NO: 699965 - DNA, 74 bp, Homo sapiens
gcatcccgacagcagcaacctgatccccaagctttttcgacctgcaggttcaactactcaatttcatgctggca

SEQ ID NO: 699966 - DNA, 101 bp, Homo sapiens
cgcggccaacatgagcttcttgttgcagaagtcaattcatctggaaagactatctctgagtcagacttaaaccactctttttcactaactgatttacaaga

SEQ ID NO: 699967 - DNA, 80 bp, Homo sapiens
acttcaatttagcagcaaatgctggcaattcacatgccatggcctttttgggaaaggcagcctggcatcctcgctacaac

SEQ ID NO: 699968 - DNA, 98 bp, Homo sapiens
gggaccccattgtggccctgtcctggctgcacaatggtgtgaaactggccctgcacgtggagaagattcccactggaaattcgttgtatgaatcttat

SEQ ID NO: 699969 - DNA, 83 bp, Homo sapiens
ctcctgcgccacgccaaggtcgtctgggagatgctcaagtttgaagtggcgctcagcaagagtgagccatggagctacgtgtg

SEQ ID NO: 699970 - DNA, 100 bp, Homo sapiens
gcggcggcggcgcgggtcggcagcgggagggcgcgcggccgagcggaggcggagtcggcgccgagaacatgctgtttgcagacaaggtcccaaagacagc

SEQ ID NO: 699971 - DNA, 101 bp, Homo sapiens
tgccccaccatgtcagacgcagccgtagacaccagctccgaaatcaccaccaagactcggtgaaatacctggagtgctcagctctcacccagagaggcctg

SEQ ID NO: 699972 - DNA, 50 bp, Homo sapiens
ctgtttatatgaagtagcctaccagaaagctgatggtgtgcccgtctacc

SEQ ID NO: 699973 - DNA, 51 bp, Homo sapiens
cagattgctggactttgtcatgatctcgatggagtctcgctttgttgccca

SEQ ID NO: 699974 - DNA, 78 bp, Homo sapiens
ctcctgatctccgtgtgcagtacctccgccagatccacgccaaccacgagggaaacaaaggacccatcgcaaatgttt

SEQ ID NO: 699975 - DNA, 78 bp, Homo sapiens
agacagtggcttctccaggtgtaactgttgaggaggctgtggagcaaattgacattgagatggagtttcgccatgttg

SEQ ID NO: 699976 - DNA, 90 bp, Homo sapiens
cgcgggatggtcgcgcgtcccctgcacagcacagaggggcagccggagagcctgggaaaggtccctgtgcgttttattgcgacctgccgg

SEQ ID NO: 699977 - DNA, 75 bp, Homo sapiens
agcagttgtctgatgaagagaagcccatgcagaatgccaccaagtatggcaacatgacagaggaccatgtgatgc

SEQ ID NO: 699978 - DNA, 87 bp, Homo sapiens
gagcacttcctattccactggattgggaaagaccatggcaggtaaagaagcttcttaataaagtagtgctccgtgaatcttgctttt

SEQ ID NO: 699979 - DNA, 75 bp, Homo sapiens
cagtccacccaccgccgccgcctcccagcccgtgtcccagcccacccaggtaactctgatcacggcacctagtgg

SEQ ID NO: 699980 - DNA, 80 bp, Homo sapiens
caactaccgctgctggaccacaaaccgctgccagaaaagcataatcaccagcaacacccgggacaataatacgggggcca

SEQ ID NO: 699981 - DNA, 97 bp, Homo sapiens
ctttagaccctccacctaattgcaggttgactatagtcaatggggccaatggagccaagtgtatggaaacccacaacagtatggacagtatatggca

SEQ ID NO: 699982 - DNA, 95 bp, Homo sapiens
agatgcccaccggaatggagaaggaagaggagtcgaatctccgggggcatcaaacctgaagatttctcgaatggacaagacagcaggctctgtgc

SEQ ID NO: 699983 - DNA, 97 bp, Homo sapiens
aaaccaggaagtgatccttgaggaagtgagagattttcagcttcgggacaagtacatgtttgctacaaaggtggtgtaaagacggggtttcaccatg

SEQ ID NO: 699984 - DNA, 98 bp, Homo sapiens
tggtgtggaattgagaaaactggaaatgaccttggggtcacagttcaagtgaccattgacccagacttaattcagtgcacaaatgagatgaatgtgaa

SEQ ID NO: 699985 - DNA, 50 bp, Homo sapiens
ggaagaattcccaagccaaagctttccagatggagaaatcaaggcataga

SEQ ID NO: 699986 - DNA, 98 bp, Homo sapiens
caacaatatcggcattctgtgctacgaagaatgttgtaccatctttgggtaggcagacttccctgacgacatcagtgatacccaaagctgagcagagc

SEQ ID NO: 699987 - DNA, 100 bp, Homo sapiens
gtttgtggcagacagacttatgctggaactgggttttagcaagataaagtcagacctaaagccaaaaggaaagaagaaccaagctctatttttcagagac

SEQ ID NO: 699988 - DNA, 75 bp, Homo sapiens
cctgcctgcctgaggaggcctcggttggatgcgaaggagctgcagcatccagggttccaggacatagtctgaggc

SEQ ID NO: 699989 - DNA, 100 bp, Homo sapiens
cttctcgcagtccccgcgcgtggtcatccaggaaaactttattctcaagagatttctcattccgcagaaataaggatctggcatgtcaacacaaacatag

SEQ ID NO: 699990 - DNA, 90 bp, Homo sapiens
tatccccctcgcctgccgggcgatctccattgaaggtttccctaggacttctgcatgcccatgccacacatatcctgtggcccccagagc

SEQ ID NO: 699991 - DNA, 98 bp, Homo sapiens
gaaggactaaaggatcttcgaagacaactggaactacataaagatcagatggtggacattatgagagcttctcaggtctcactctgtggcccaggctg

SEQ ID NO: 699992 - DNA, 75 bp, Homo sapiens
ggggccggggcgccgctggcaggagcgcttggggatcctccaaggtggtcgtgtgatggtaacagatgctgacag

SEQ ID NO: 699993 - DNA, 99 bp, Homo sapiens
gtgcagaagagagacttcctggtggacgatgcggaggtcgagcggttaaggtgaatttgacaggcaagaagatgacattcacttagtgacattatgtgt

SEQ ID NO: 699994 - DNA, 82 bp, Homo sapiens
acacaataccaggcatacatttggcagaataaatgaaccagaatatcctccgaatcctaaatctagagctccaaggatgctg

SEQ ID NO: 699995 - DNA, 100 bp, Homo sapiens
ctcgaaatgaagcggaaagcagatatgcgcgtcagcatactttggcggttcctgggcttcccgatggactcgagtttttactatgtgagcatcccggtgc

SEQ ID NO: 699996 - DNA, 96 bp, Homo sapiens
caaatggatgaatgtagaccatcccattcatctaggagatcaagcgacgtgcctcagaggctttgcccgaattgcttcgtcctgtcacccccatca

SEQ ID NO: 699997 - DNA, 100 bp, Homo sapiens
gagttcatgcttatgaatgctcgacttcagttggaaaatggatataccttatttgattatgatgttggactgaatgatataattcagctgctagttcgcc

SEQ ID NO: 699998 - DNA, 75 bp, Homo sapiens
cggcgcgaagaggctggactcggattcgttgcctgaggtgcagcagtaccgcgtcgccatgactgccaaggactg

SEQ ID NO: 699999 - DNA, 74 bp, Homo sapiens
cagagtatgagcattggcacatgctgttttcctggaacaaacaggttggaggcatcaagcctgggtgctttaag

SEQ ID NO: 700000 - DNA, 100 bp, Homo sapiens
attcatcggtgaaattcgcttctggtaatactgtaggttatcggggcccaccagggccaccaggttctgctgctcttcctggaagcaaaggtgacacagg

SEQ ID NO: 700001 - DNA, 100 bp, Homo sapiens
cagaaggccgagaagctctacccactgccctcggcccgcggtgagcctgaatttaaatacattgggaatatgcatgggaatgaggctgttggacgagaac

SEQ ID NO: 700002 - DNA, 88 bp, Homo sapiens
tcgatggtggagtaggtcctgacactgtccataaatgtgcagagaacaccttccaccatgaccacctcagcaagttcccacttaaata

SEQ ID NO: 700003 - DNA, 75 bp, Homo sapiens
aaggaaacttgccttatcaccttcttgcttgcaggtctgttgccacagttattgggagttgccccagagaaggcc

SEQ ID NO: 700004 - DNA, 101 bp, Homo sapiens
ctggcctggcgtgcactccgcacctcggggacattattgcgcgtggaacggctgcttttggaaggccttgccccgggccagctgtatacataccctgcccg

SEQ ID NO: 700005 - DNA, 88 bp, Homo sapiens
aaccactccaaggtcccccaaaggaccaagatgatgaggtggtggaggtggatacagcagtcggagaacatctggcagagacaaatac

SEQ ID NO: 700006 - DNA, 100 bp, Homo sapiens
tccaaatcctgtagccataaatgtctggctaatggcatttacaggaggactccctggaggaaaagcggaagcggcagcggtctgaacgcctggaacggat

SEQ ID NO: 700007 - DNA, 100 bp, Homo sapiens
caggacctcaagcagcacgtgctcatccacactcagcctacccgggaaagcgatgacgaggacgatgaggagaagaagggacgaggctgctccctgcagt

SEQ ID NO: 700008 - DNA, 75 bp, Homo sapiens
ctcactggaatattgacccttatttatccagaagattgatcatcatatgggttgccaactgtgatttgagacggc

SEQ ID NO: 700009 - DNA, 58 bp, Homo sapiens
acaatggtaaatgtgccacatattcatgcaagttggaaagatccaaataatgacttca

SEQ ID NO: 700010 - DNA, 82 bp, Homo sapiens
ctcgtctgaaatggctgcctcccagtgtctctgctgctcaaaatttctcttccaggaattgaatgatctggcacgggaccct

SEQ ID NO: 700011 - DNA, 100 bp, Homo sapiens
ccccaagccctccttcgtgtcgtacgtacgccctgaggtgtcatggagaaactccagctgggcccagagattctgcagcgggaaaatccaaggcttattt

SEQ ID NO: 700012 - DNA, 97 bp, Homo sapiens
gccttggccatgccaagagaggagttggaccttctggagtgttacaagtccagagcctaaggaccagactttgaaaatgattaaaattttaagtggt

SEQ ID NO: 700013 - DNA, 74 bp, Homo sapiens
ttaccgaacatctcataaataagtgcgacttcatgatagcatatcagaagagggctttcactacttggtgtttg

SEQ ID NO: 700014 - DNA, 90 bp, Homo sapiens
ctccgatccctgcgcgggctcgagagctcgccccgaacgggggtcttcctcctccgccgttgacaggtccgactacagccacctgtcctc

SEQ ID NO: 700015 - DNA, 50 bp, Homo sapiens
aagataagtttaggccagacatggagggtgaatcctggttctttcgttgg

SEQ ID NO: 700016 - DNA, 100 bp, Homo sapiens
cagcattggaaggaatgaaggcttgtatgacctatttccctcgggcttgtggttctctcaaatctacgtaggagctggtatgaggatcacacaatgcaag

SEQ ID NO: 700017 - DNA, 112 bp, Homo sapiens
agcgctgcagggggctgcgcctgcctgctccgccccagacctgtcggcgaaaggattttgtggaagtataatactttgtcattatgagatgtcgtctctcggtgcctccttt

SEQ ID NO: 700018 - DNA, 74 bp, Homo sapiens
tcacctttgattccagtgtgaactgtcaatcataagtacataccgagcatcaaatattaaggcacccggagaac

SEQ ID NO: 700019 - DNA, 98 bp, Homo sapiens
tgagtattgtctttatatcctgacactatgaatgctacttggatgcctcttaaggtgtgttccagagaacaagccttcagacatttgctatattgacg

SEQ ID NO: 700020 - DNA, 83 bp, Homo sapiens
cggacccactggctgctggagcttgtcaccaccaggttttgggatttgagattgacgcggtgaactctgtccagttttcaaac

SEQ ID NO: 700021 - DNA, 125 bp, Homo sapiens
atcctggactggatgttgaatcaagatttcaccacagcctacagaaatctccatccagttcctggtgtacaggcgcagcaccgccgcctcggagcttgagcccctcctccccagctgaccagaac

SEQ ID NO: 700022 - DNA, 99 bp, Homo sapiens
ttaaggataagaaactgagacacagagaagaaaaaactcttaccagggtctcccaaaataggaaatcctcattgacgattcaatttgttgaaggccaat

SEQ ID NO: 700023 - DNA, 75 bp, Homo sapiens
gagcaagacacacttccgcgccgtggaccctgacggggacgtaagactttgaccccgacgcaggcttcagtgatt

SEQ ID NO: 700024 - DNA, 100 bp, Homo sapiens
cctaaacgtcagaaatccagtactaaactttctgagcttcatgacaatcaggacggtcttgtggcaattgctggctactttgatatatattttgagaaga

SEQ ID NO: 700025 - DNA, 82 bp, Homo sapiens
ctaaatgggagaagaggaatgttccctgacaatttcgttaagaacaagttgaaatcatcgcagaaggataaagttcgtcagt

SEQ ID NO: 700026 - DNA, 100 bp, Homo sapiens
tcagcttctgttgtatcatcagattccatttcaacttctgccgacaacttttctcctgatttgaggaaaaacagttggtgttttctgttgtggacccaat

SEQ ID NO: 700027 - DNA, 75 bp, Homo sapiens
ggagctgggcctaggtctgcgccctgagtgatcagcagctggactgtgccttggacctaatgaggcgcctgcctc

SEQ ID NO: 700028 - DNA, 90 bp, Homo sapiens
cggatgggtgcttggtgctctgggcactgcaggggtgctggctggactgcggttaccgccgttaattaaggaaaagttgagccagggcgt

SEQ ID NO: 700029 - DNA, 101 bp, Homo sapiens
tctggagagtcattgagagaagaacatccagtcatggataaaaatgagctggttcagaaggccaaactggccgagcaggctgagcgatatgatgacatggc

SEQ ID NO: 700030 - DNA, 75 bp, Homo sapiens
gcactctcatcgctctcggcctcggcctcggcctccgacacggtgaaatgacaatggatgctctgttggctcgat

SEQ ID NO: 700031 - DNA, 82 bp, Homo sapiens
gcacgaggagatgctgtgggtggggagccacggggtctgctgagaacagacccagtccctgaggaaggagaagatgttgctg

SEQ ID NO: 700032 - DNA, 114 bp, Homo sapiens
acttcctctttcctcacctgcgggaggagatcctcagcggcgccttgcggagggaccccagactatcggacaaaacctttctgctgcagcgcttgtccattttcctcaaaattc

SEQ ID NO: 700033 - DNA, 75 bp, Homo sapiens
aggaggacagttcgctacacagcaatgcatcgaggctgaacatatgcagaagaaaaggagaaaacaagaaaacaa

SEQ ID NO: 700034 - DNA, 101 bp, Homo sapiens
cttcattgttttcagctaacagtaaccccaggtgctggagaatctggtaaaagcaccattgtgaagcagatgaggatcctgcatgttaatgggtttaatgg

SEQ ID NO: 700035 - DNA, 90 bp, Homo sapiens
aaagaaactaaaaaatggcagctctcagaatgggaagaatgagagaagtcatatgcccggcacagttgctgaaaagccaggagtcaaaat

SEQ ID NO: 700036 - DNA, 95 bp, Homo sapiens
ggcagacatcagctcctggttcaacgaggccattgacttcatagcattttgaaagcgaagcagaagccgtagaatcagcggcgagcctgttgaaa

SEQ ID NO: 700037 - DNA, 121 bp, Homo sapiens
aggtgcgggaacgtccactcccgcgcgcccctctcggggaccagggcggcctcccaggaggagcttggttttgcacactagggaccaagaagccctcggggacactgctgagaaaagactg

SEQ ID NO: 700038 - DNA, 74 bp, Homo sapiens
ccgcggcgagcgagctcctgagatattgcggtggtggagatgagcgatgccttccggcagccgtccttgtttta

SEQ ID NO: 700039 - DNA, 75 bp, Homo sapiens
ttagtagagggcaataaatgccacatgagatgatcacctcagcagaaaactgtatgtttctataaaacctgataa

SEQ ID NO: 700040 - DNA, 82 bp, Homo sapiens
gcaacttttccgaggaggaggacagcgagcgcagcagtgacggcgaggaggccgagatgatatcatcaagttgaatcgaaag

SEQ ID NO: 700041 - DNA, 117 bp, Homo sapiens
gacagaaggcgtctcatggcgttggaataccggctctcagcggctgagtccagtgtattccacaacgagcagcacttctgaaatccatgttgaatttcctcaagaaggccatccaag

SEQ ID NO: 700042 - DNA, 100 bp, Homo sapiens
catcacgatgctcttcacaggatacttcgtcctgtgttgtagctggagtttcagacgtctgatgctctatgcccaggtctctgtggctgggctgctccag

SEQ ID NO: 700043 - DNA, 88 bp, Homo sapiens
cgccacctaccgcagcctgctcgagggccaggacgccaagcatggatgagttgatggaggtgtctttctcgcccctggcggccacagg

SEQ ID NO: 700044 - DNA, 82 bp, Homo sapiens
gcccgcgggccaggagagcgctcggcggttgatattcactgatggactccaaagaatcattaactcctggtagagaagaaaa

SEQ ID NO: 700045 - DNA, 102 bp, Homo sapiens
gcttccacgaattaaagaacacactctggtcatcatctgtcctcaaggcaggttatcaatactctggctgaccatcatcatcgtgggactgactttggtgga

SEQ ID NO: 700046 - DNA, 100 bp, Homo sapiens
aaactgaagttaatttttttttttttccaaacacaagttggccacggacagagcgaaggggagaggatggtagtgtctgacttccacgttttcgtcaggg

SEQ ID NO: 700047 - DNA, 100 bp, Homo sapiens
ccggagcaagcggagctcccccaagagccggaaagctgatgtagcccagcagttccagtatgctgtgcgggtgattggcagcaacttcgccccaactgtt

SEQ ID NO: 700048 - DNA, 51 bp, Homo sapiens
gtgcacctttgagaatgatcattgagaagaactgaagagagatctggccaa

SEQ ID NO: 700049 - DNA, 75 bp, Homo sapiens
ctccggggacccttccgtatctgcctaggcattttgctgtctcctcctaatacgactcaccccacacagaccgcg

SEQ ID NO: 700050 - DNA, 92 bp, Homo sapiens
cgagcgggcggcttcctggcctgggcgctccggtggcggcggaggttctgggccggagaaggggcgacgttcgggcaccccccgaatggaca

SEQ ID NO: 700051 - DNA, 100 bp, Homo sapiens
gaaggggaggggttacagactgtggtgcctacccccatcactgcttccctcagccataacagcttcatcgctgtggagaacattgacagctactgcgtgc

SEQ ID NO: 700052 - DNA, 116 bp, Homo sapiens
atcacaccatggatgattttgagcgtcgcagagaacttagaaggcaaaagagggaggagatgcgactcgaagcagaaagggtgctgataagactgtgaaaggcccagatggactga

SEQ ID NO: 700053 - DNA, 88 bp, Homo sapiens
aatcgcttggttaaaacctgacacttttaacagacttcagattttcctgtccttgatcccagctggactgctcaagaagaaatggccc

SEQ ID NO: 700054 - DNA, 100 bp, Homo sapiens
aataacaatggaagaaattgggaacattatcacaaagctatcatcctgccaaactccaggctcagatgtcacagtttttgaagagcctgaagatcccagc

SEQ ID NO: 700055 - DNA, 82 bp, Homo sapiens
ctacggaggtggcagccatctccttctcgtccagaacacatattacataatggagccgggagacagactagggctggcttga

SEQ ID NO: 700056 - DNA, 97 bp, Homo sapiens
gaagatccccactggaatttccaggaagagacgctgaaggccaagaacatcatcttcagcgggctatttcagcacagcaggtgtatggcgagaagag

SEQ ID NO: 700057 - DNA, 74 bp, Homo sapiens
ggaatattggggggctcggctgcagacttggccaaatggacgggactattaagattttaccaaatgttgcaaga

SEQ ID NO: 700058 - DNA, 100 bp, Homo sapiens
tggaggctggctgctgaaggatgaacggagaggaagaattctttgatgccgtcacagtaccctatgatgagaggacctgatcctgctgctgctccatata

SEQ ID NO: 700059 - DNA, 82 bp, Homo sapiens
ctgcctcactgagcaaccaagaatgatgtctttctacctaaagatattgacctagacagtgtggatatggatgagacagaga

SEQ ID NO: 700060 - DNA, 74 bp, Homo sapiens
cgatccttggcacccagcctcctggacagaaataaaactggacctctgtgagtgaaagccttcagagggaagct

SEQ ID NO: 700061 - DNA, 87 bp, Homo sapiens
tagtaatcaaaaatcttgtacctgatgccgatattcaacgctttcgtttctccacagacactacccaaagcagtccttcactacagt

SEQ ID NO: 700062 - DNA, 100 bp, Homo sapiens
ggggcaagaagcacagcatcatcctaaggacgcagctgtctgtgagggtccatgcctgcatcgggctgggagagggttctgccctccttcatccagacag

SEQ ID NO: 700063 - DNA, 90 bp, Homo sapiens
gcgggacagcctcagccaggttctccagagatgtcttcaatgaaatttatccagtatggacttactcttacctggtgctactgtttcctg

SEQ ID NO: 700064 - DNA, 74 bp, Homo sapiens
cgagttcaacatcctcctggccaccgactcctacaaggcattcctgcatcgcatccggcagaacgtggccgact

SEQ ID NO: 700065 - DNA, 90 bp, Homo sapiens
cccccttcctctgctgaagcgtgttcagctctacgaccttgggctgcagatccataagggggagttttacagtgagaaccaccacaatcc

SEQ ID NO: 700066 - DNA, 85 bp, Homo sapiens
ccagttcctgccgtctgctcttctgcctcttgatctccgccaccgtcttcaggccaggtcaaaatgcagatcttcgtgaaaaccc

SEQ ID NO: 700067 - DNA, 75 bp, Homo sapiens
aatccagatggcagccagtcagtggtggagtttcagaaagtgctttctctctgtggacatgaggattggattaga

SEQ ID NO: 700068 - DNA, 100 bp, Homo sapiens
ctggggccggcgggagcgcgaacgagcgacggcggaacccgtgggcctgtggactgcagcctcggcggtcagcagataacgtggttagaaggccattcac

SEQ ID NO: 700069 - DNA, 87 bp, Homo sapiens
cggcggcgctttcggcgcgggcccgggccccgagcgcccgaacagccctgcagagcccagggagatggaagacttcgcccgaggggc

SEQ ID NO: 700070 - DNA, 75 bp, Homo sapiens
ctccatcgtgatgaaggcagagagcagagacatcccgatctggggaagtgatgtgtccaatctagatcccaactt

SEQ ID NO: 700071 - DNA, 83 bp, Homo sapiens
ggaattctcggctggagagcagaagaccgaaaggtgtttcccattaaacactaccaggacaaaatcaggccttacatccagct

SEQ ID NO: 700072 - DNA, 100 bp, Homo sapiens
acgcggcctcggaccagccatttcggtgtagaagtggcagcacggcagaactctaagaaggagctgatgtggaggagcagctgagacagttcaagatgac

SEQ ID NO: 700073 - DNA, 90 bp, Homo sapiens
gtttttctgttttgcctgaatacatgatttaaacaagagatttccacagaaggtatcactggacaggccatggctccacggtcccggcga

SEQ ID NO: 700074 - DNA, 87 bp, Homo sapiens
atgagttcaacttcatcaaggtgttgggcaaaggcagctttggcaaggaaagagccagacttctcagaggtcagtctgttcaacaag

SEQ ID NO: 700075 - DNA, 75 bp, Homo sapiens
ccatttaacctgtgcatctccgtgctggccgatgagtaccagcggtcagatagcatcagacctgcattgaacagt

SEQ ID NO: 700076 - DNA, 75 bp, Homo sapiens
tctacctgggagaatccaccgccatccgccaccatgaaaccaaggtgtatgttggtaacctgggaactggcgctg

SEQ ID NO: 700077 - DNA, 82 bp, Homo sapiens
ctgccgccggcgaaggaggaggcgttgccggtgaaactggaacgccaagctgaagaagaacgaatacggaagcacaaagcag

SEQ ID NO: 700078 - DNA, 74 bp, Homo sapiens
gtcacaggggatgatattcagacacagctagaacgagtaaatctgtctgcagcccagacactgagagccgcttt

SEQ ID NO: 700079 - DNA, 75 bp, Homo sapiens
cctccggcccggcggggccgacgagtccggaggggctgccgcgggaggaggacaaagacactgattctaccaaag

SEQ ID NO: 700080 - DNA, 48 bp, Homo sapiens
aggaaccctggattgcttgttacagcctatcaagactcttccacctgc

SEQ ID NO: 700081 - DNA, 82 bp, Homo sapiens
ggtcgctgctgctgctgctcggagtcttcgccgccgccgccgcggccccgccagagttgtctgctggttctcagcttgaaga

SEQ ID NO: 700082 - DNA, 51 bp, Homo sapiens
tgttactccattgctgaggagtggttatgtgaaattacctccagagaaatt

SEQ ID NO: 700083 - DNA, 50 bp, Homo sapiens
gggccactcagagtcgcccgagaatcctggaaggtgggaatgatctggag

SEQ ID NO: 700084 - DNA, 100 bp, Homo sapiens
acatttacatgggacaaaaagcttgagatggttgtgaaatcaacaggaattttaggtggacaagccttcttagattcttcaaccttgcagctgttttttg

SEQ ID NO: 700085 - DNA, 94 bp, Homo sapiens
ctggaattttgccgatttcatgactaaccagtattgggaaaatgaggtacgttagtgttcgcgattttaaaggcaaagtgctaattgatattag

SEQ ID NO: 700086 - DNA, 90 bp, Homo sapiens
atcctctcatcttgtcctacctgaagtatgccattagttcccagattgctcgctgtaagcagctcatctgtgaccccagctacgtaaaag

SEQ ID NO: 700087 - DNA, 98 bp, Homo sapiens
gcggcgggccgagccctgcggcgggcgggagagtgcctggtgaagaatgtgatgggatcactagcatgtctgcggagagcggccctgggacgagattg

SEQ ID NO: 700088 - DNA, 104 bp, Homo sapiens
gcgacatcaccaagctggaggtggacgccatcgtcaacgccggtgttaactgtctggcctatgatgaagccatcatggctcagcaggaccgaattcagcaagag

SEQ ID NO: 700089 - DNA, 102 bp, Homo sapiens
gaccgagatgacctctatgctgagcagggcactgtaaattggtctgttgatgacattgtcaaaggcataaatagcagcaatgtggaaaatcagctccaagct

SEQ ID NO: 700090 - DNA, 101 bp, Homo sapiens
cacataccatatgctggagagacattaaagtgtaagaaccttgatgctgtccatgatatcactgtggcgtatcctcacaacattcctcaatcagagaagca

SEQ ID NO: 700091 - DNA, 98 bp, Homo sapiens
gagaactgggaataggaaggcttccggtagtgcttgcccagtgagaaagatcagtctaaagaaaaggagaagaaagtgaaaaaaacaattccttcctg

SEQ ID NO: 700092 - DNA, 100 bp, Homo sapiens
cgcacatccccagccattttcctgagttccctgatccccacacctacatcaaaactccggaaaggagatgtggcattactgaactgtacagccattgtga

SEQ ID NO: 700093 - DNA, 50 bp, Homo sapiens
ctgatgccaaggggccagtcgcgaggatggaatccgacgtggtaggccca

SEQ ID NO: 700094 - DNA, 75 bp, Homo sapiens
cgcagctccacgagcacatcaagatggatatggcagtggacgtggatttggggatggctataatgggtatggagg

SEQ ID NO: 700095 - DNA, 98 bp, Homo sapiens
ttgacatctgacgacgtgaaggagcagatttacaaactggccaagaagggccttactccttcacagatcggtgcctgactgacagaagttcttgcccc

SEQ ID NO: 700096 - DNA, 50 bp, Homo sapiens
ccgctgccccggctgcctcctccctgagcagcagccgctcttctaaaaca

SEQ ID NO: 700097 - DNA, 96 bp, Homo sapiens
agcccttccaggaggaccagcaagggctctgtgtgcccaggatgcgccggcctccagagggagacgctgttgcggcagctggagacgaaccagctg

SEQ ID NO: 700098 - DNA, 100 bp, Homo sapiens
cagtgtgtcgtgtgtggggacaaggcaactggttatcactaccgctgtatcacttgtgagggctgcaagggtgaggtggctttgaccccgggttgcccgg

SEQ ID NO: 700099 - DNA, 136 bp, Homo sapiens
gtacctttcagctgcgccggccgcgaggccacggagagctcgccttggagagcccaggagcaggggagacatgaaaggtgcaaaattccttagtgatgctgagatcatccagttagtcaatgctaagcatatccca

SEQ ID NO: 700100 - DNA, 90 bp, Homo sapiens
ccgagagcgcgaatatcgtcatcgttagaagctttctatgggaggattctcgtaacagcagcacaccaactgaaaagcccaaactgctcg

SEQ ID NO: 700101 - DNA, 90 bp, Homo sapiens
atattcatctcaaaaacaaaattctgaactcaggacttggcaagtagtgggcagcagtcagtgacaggtgtaacctctgtggatgacagc

SEQ ID NO: 700102 - DNA, 75 bp, Homo sapiens
ctgaagcccggggacacgattatcgagccgacatccgggaacaccgagatgtgaaagggcagaatcattagcgaa

SEQ ID NO: 700103 - DNA, 98 bp, Homo sapiens
ttataaaggaatatcggattcctctgccaatgaccgtggaggagtaccgcatcgcccagctgtacatgatacagtgttttccaagcagtgaagcactt

SEQ ID NO: 700104 - DNA, 89 bp, Homo sapiens
gaagtggtccgctttgccaagaagatggacaagatggtgcagaagaagaacgcgtctcacagaaagttctccgctcccagacatgggtc

SEQ ID NO: 700105 - DNA, 100 bp, Homo sapiens
gccccagccgaagtctcatctcagtgtggccacgggcttcggctgtgcaaccatcttctggcttttgaaatatcggttggacaagaagacgaggctgaga

SEQ ID NO: 700106 - DNA, 100 bp, Homo sapiens
ctcggaagagcgctcccaggagaaacaacacctccttttgtggctcgggagacgctaagggcctggcaagagaagaatcacccctggctggagctctccg

SEQ ID NO: 700107 - DNA, 76 bp, Homo sapiens
tgagccccgcgaccactggcacattcttgctgacaggtctctgggtgtgacactttgggagctttttgacaatgcc

SEQ ID NO: 700108 - DNA, 100 bp, Homo sapiens
caccgatgatgtgcagatcaatgacatttccctgcagatccaacttagaaataatgtttcattcaagataaggctcgtggcttaggagattgtgacctgg

SEQ ID NO: 700109 - DNA, 98 bp, Homo sapiens
caccgacctggccgagctgcccagcgagatcctcggggccccagaggccgcggacaccgacctggagttcgcctctacggaccaaacttcatccttca

SEQ ID NO: 700110 - DNA, 100 bp, Homo sapiens
tgcagaaggaatctcactctcagagacggtctcgccacattgcccagactggtctgaaagtcttgggctcaagagatcctcccgcttccgccttccaaag

SEQ ID NO: 700111 - DNA, 90 bp, Homo sapiens
ccgggacaccgcacagccgggaaatgcctcggccaccttcgaggacttccagatccgcccgcacgccctcacggtgcactcctatcgggc

SEQ ID NO: 700112 - DNA, 100 bp, Homo sapiens
gctcggccgtcgatcacctccgggcacaggatgcgagatgtgtcttgctgaatcagggctctcttatccctgccatcgacttacagtgggaagaagatct

SEQ ID NO: 700113 - DNA, 100 bp, Homo sapiens
atggcgagagggggcaccggaggtgacaacaataacaagactgtccttcggacaagttttagaccagcatctcagacatgtcgaaaaagatgttttgatc

SEQ ID NO: 700114 - DNA, 75 bp, Homo sapiens
aagagggaagacacgcggaaacagtaacatccaggagatgagggctcggcacaaagaggcttttttgaagaaaca

SEQ ID NO: 700115 - DNA, 51 bp, Homo sapiens
catgagggaacagctcaaaggggtaaactggtccatgctaattttggtact

SEQ ID NO: 700116 - DNA, 100 bp, Homo sapiens
ttggcaccagctacatcaatccttgagtatcctattgaacctagtggtgtattaggtgggaaaagctatgtcttctaatgaaacagcagcctataaaatc

SEQ ID NO: 700117 - DNA, 75 bp, Homo sapiens
ctggccctaccaaaagctgggagagggaatgagagcctcgagggcaagagggatcagtgtccttcagggatgtgg

SEQ ID NO: 700118 - DNA, 100 bp, Homo sapiens
ccgggaagatggtgctgatcaaggaattatcagaccaaacattgtctggcttgcactgtaaaactagttagctgaagacgacttctcaggtttcttcagg

SEQ ID NO: 700119 - DNA, 98 bp, Homo sapiens
gctgccctgcgatttctctcccagttggaagatggagacactgatgtttttggttagagattggagtttcccttatgaatatagctatggactccaag

SEQ ID NO: 700120 - DNA, 82 bp, Homo sapiens
caagaagatcttcgagttcaaagagaccctcggaacgagtgtggccatctggggccgtgtggtatttgccactcaggagaca

SEQ ID NO: 700121 - DNA, 88 bp, Homo sapiens
tcagcaggaagcaaacatggacagtggcatattgaatgttcatcccagttgcctcccgagatggcgtggcccagcccctgtaatccat

SEQ ID NO: 700122 - DNA, 96 bp, Homo sapiens
agagcactagtgtctagaaggcactaagggtgtttaaaattatccaactgccatagagctaaattcttttttggaaaattgaaccgaacttctact

SEQ ID NO: 700123 - DNA, 100 bp, Homo sapiens
tctccatacccgtgacctggggatcgctacggaccttaaaatacccgcaacagccccttcgtcccaagattgcttatggatgcccaaatgcgttaagttc

SEQ ID NO: 700124 - DNA, 75 bp, Homo sapiens
gctggacgccactttccggggtgcacagcaagtggaagacagagatgtcaatgaccccatgcccaaccgaggcgg

SEQ ID NO: 700125 - DNA, 100 bp, Homo sapiens
cgcggggctaccggatcggtcggaaatggtttacccaaggtccagcctagcccctaggcaccatgtcggacagtgatctaggtgaggacgaaggcctcct

SEQ ID NO: 700126 - DNA, 100 bp, Homo sapiens
gattagatgatccaagtcaccaagaaattactgtctcaagtgatacgcttttcggagactgggaagcccaactgcgaagaataatgaagctcattgctgg

SEQ ID NO: 700127 - DNA, 82 bp, Homo sapiens
gtcccaaggaacacctgggcaacagaatattggtcaagttgctgaccttgaagtcttgggcgtctttggtactggctttttt

SEQ ID NO: 700128 - DNA, 96 bp, Homo sapiens
caacatcctgctagacttgttaagactcagggtttgggcactgctctgaagatcttattttctgagaaattgatagcaaatatgccagaaagtgga

SEQ ID NO: 700129 - DNA, 101 bp, Homo sapiens
attcagtggaaccatcacacaaaagcacacaaagacctcctcctccacaggggagacagaggttaatgttcgtgaagaaattgaagagttttttccaagaa

SEQ ID NO: 700130 - DNA, 80 bp, Homo sapiens
gaccttcacgcagtcaagaacgacttccagtttatgggaaaaacagatggagactattacaccctggatgacatgtttgt

SEQ ID NO: 700131 - DNA, 98 bp, Homo sapiens
ggtcgcggccgccgcgcttcccggggagagaggcgagcgcggcgcccggaccgcggtgctggagaatctggtaaaagcaccattgtgaagcagatgag

SEQ ID NO: 700132 - DNA, 90 bp, Homo sapiens
aagaagtactccagggaaacctcccaggccagctgcgggccgtccagcggctgtgccacttctacagcgccgtcatgcccagcgaggccc

SEQ ID NO: 700133 - DNA, 75 bp, Homo sapiens
cagacagcatatttgagtcatttccttcgtacccacagtgcttcatgagaggacttccttcgctgggcatctggc

SEQ ID NO: 700134 - DNA, 51 bp, Homo sapiens
tgtcaggaaatggcagagaactttgtcaggaggaagaagacctagctttag

SEQ ID NO: 700135 - DNA, 75 bp, Homo sapiens
attgccagagcaagagctggatctcgtctttctagagcccgagcccagcacattgtgccctgtactatatctcag

SEQ ID NO: 700136 - DNA, 110 bp, Homo sapiens
ggggctgactgcaaaggagacccaaggaacagtgccaagttagatgccgattacccacttcgagtcctttattgtggagggggcagtacccaaaggaaacgctacgaaag

SEQ ID NO: 700137 - DNA, 100 bp, Homo sapiens
cctggctcaggaacagggacagcacctcatcccctggatgggggaccacaagatcctcatcgacaggcatccgtgggctctgagaagctctttgcgccgg

SEQ ID NO: 700138 - DNA, 90 bp, Homo sapiens
gccaccccctcttcctcacttccctgtactctcatcgctctcggcctccgacacgtgcacttggaggctcctcagctcttcatatcccag

SEQ ID NO: 700139 - DNA, 111 bp, Homo sapiens
gcctgggaagctgtgaatccagagttggctcctgtaatgaaaacagtggacaccggacatgccacaaaatgttgaatgaagataggcagcgttggcaaggagagtttctga

SEQ ID NO: 700140 - DNA, 51 bp, Homo sapiens
tcggtagccatggcacaagaatatagcccttccttctaccatgattatagt

SEQ ID NO: 700141 - DNA, 74 bp, Homo sapiens
ctttgactaccacccccatgatggggatgaggccatcaccatcgaggctgagccaagagctgatggcagccgcc

SEQ ID NO: 700142 - DNA, 98 bp, Homo sapiens
gaacagttccacaagcacagtcagggcaattgaaggaacagactaaaaatcgtgtcctggaaggaaactacaggtactaccagggattttcagtctga

SEQ ID NO: 700143 - DNA, 96 bp, Homo sapiens
ttgccaggactgatgcagatgcccctcctccaccagaggactgggaggagcatgtcaacagggcccatcaaccgtgagatgcgccacctgattagt

SEQ ID NO: 700144 - DNA, 100 bp, Homo sapiens
ctacatcttgcctcaagtttctttcaccgcagtgggctaccataaacacatcaccttgatttttaatcccacggcgttcgtggcattcagggatgtggct

SEQ ID NO: 700145 - DNA, 100 bp, Homo sapiens
gtcagtccggtcttgtcttccagacccggaggaccgaagcttccggacgacgaggaaccgcccaacatggcctcggagttgttgacctcctgtactggag

SEQ ID NO: 700146 - DNA, 90 bp, Homo sapiens
gtcatcctcctgcctcagccacccaagaagctgggaccacagcttaaagaaagtggttattgtacaggtcatgaaccagattccctggag

SEQ ID NO: 700147 - DNA, 75 bp, Homo sapiens
actagtggagggggtccaatgtcaccccaggatgatgaagcagaagaggctgtatgcaggagctattcttgaagt

SEQ ID NO: 700148 - DNA, 76 bp, Homo sapiens
accgcactcgaccaggaccacagcggcaaggtctccaagtcccagctcaaggctcgcatgtcttgggatagagagt

SEQ ID NO: 700149 - DNA, 125 bp, Homo sapiens
aggatctggtgtaccaggcgaagctggccgagcaggctgagcgatacgacgatggtgaagagcgctcgcccggtagcagaaccgaacccgggcttctggtctcagctccagaagtatgaggaggc

SEQ ID NO: 700150 - DNA, 99 bp, Homo sapiens
aggactcgccctctgggaggcttaccgagagtttgaaagtgcgattgtggaagctgctcgggtaatgagagatccaaacaccaagcgctccaggggctt

SEQ ID NO: 700151 - DNA, 100 bp, Homo sapiens
ctgggaggtggaccggagctcgtccagctgcgtgcctagacatggccgcttaccaacaagaagggcagatgcagcttccccgagctgatgccattcgttc

SEQ ID NO: 700152 - DNA, 92 bp, Homo sapiens
atcatcctgctgggcttcgtccagatcgggaaggcgtccagcctgcatgccgtgcggactgcacccaccagcaaggtgatcaagacccgcta

SEQ ID NO: 700153 - DNA, 98 bp, Homo sapiens
gtcagcatcatcaagagactgggcgcagctgcccttgtgcccgaggcccaggacagccaggtcaccagcaccaagaatgtaaagaacctatatccatc

SEQ ID NO: 700154 - DNA, 50 bp, Homo sapiens
gcagtttttgatgaaattgtagagaactagcatatcatgtcccgagtggg

SEQ ID NO: 700155 - DNA, 76 bp, Homo sapiens
gctgtttctcatctttatactcttccagattttctccctgggccactgccctaaccaggactggctggcggtcgga

SEQ ID NO: 700156 - DNA, 83 bp, Homo sapiens
caatgacaaaagacaatttctgctggagcgactgctggatgcagtgaaacagttaatatgatcctctgttgaagcaagaagac

SEQ ID NO: 700157 - DNA, 75 bp, Homo sapiens
agcaggagatacggaccctggagaagactggactttatgagtataaagtctttggtgttctggaggactgctcac

SEQ ID NO: 700158 - DNA, 51 bp, Homo sapiens
aaagaatatgctgaaattattagtttttcagaagaagtgaagtcaagatga

SEQ ID NO: 700159 - DNA, 100 bp, Homo sapiens
gaaccagtggtagaaagcacagaaactgaggggacataatcatcactcagtaggtgactctgttttgagaagtgcaaccagatctctcctggaattcaac

SEQ ID NO: 700160 - DNA, 74 bp, Homo sapiens
ctaccggaatgtcatccagcgagtgattagcaccctggaggagaagaggttctgctggaacaagctggtgtaga

SEQ ID NO: 700161 - DNA, 100 bp, Homo sapiens
aaaaatgattcgggaatatcggcaaatggtggattcaccaatgaacttgaagcatcctcatgacctagtcatattaatgagacaagaagcaacagttaac

SEQ ID NO: 700162 - DNA, 83 bp, Homo sapiens
aggaaagcagacattgacctcaccaagagggcgggagaactcactgaggatgaggtggataagaaggagctgacaggtcgcac

SEQ ID NO: 700163 - DNA, 100 bp, Homo sapiens
cactttgtgattccctaccgctgcttaggaagtcctggctgagcaaggttggaagccctagttctcgcattgaccgcacaaacttttctaatgaaaaaac

SEQ ID NO: 700164 - DNA, 73 bp, Homo sapiens
ccagctagcaccttcgccctctccagccaggtacctgagctggaagctatcaaagctcgagtcagggagatgg

SEQ ID NO: 700165 - DNA, 100 bp, Homo sapiens
ggaaagagttttctccatttggtacaatcactagtgcaaaggccggaaggtggtggtcgtacgctgtgaaggcatcaacatttctggcaatttctacaga

SEQ ID NO: 700166 - DNA, 101 bp, Homo sapiens
aaagaagagaataagatttttggaagaaaagaatccacttggttctggtctagcccttgcaatttctcatgcttcacattttcttcaacctccgcctcacc

SEQ ID NO: 700167 - DNA, 75 bp, Homo sapiens
ctttcctgcttttggtttccctggcaggggttgaactgtggagtgtgtgggtagctacagcaagctgggtagcag

SEQ ID NO: 700168 - DNA, 100 bp, Homo sapiens
gatgaccatgtcacaatcaggaagaaacatctccaaagacccatctttagaacgctgtaaatgtaagcctattagagctacacagaagacctatttccgg

SEQ ID NO: 700169 - DNA, 100 bp, Homo sapiens
tgacctgcaggtactgggagatccatagggaggacggcggaacatctggaggctgggaaatggctggtgcctctgccgagatcacccttttattccttat

SEQ ID NO: 700170 - DNA, 75 bp, Homo sapiens
ttgcaacgcagttcggagttattatgagattctgaaggaagatttccattaggtaatttgtttaatcagtgcaag

SEQ ID NO: 700171 - DNA, 100 bp, Homo sapiens
cagcccccgggcacgacctctcggacacggtgcaggcagctctgaacagcaacatggggtgcaaagtcctgctcaacattgggcagcagatgctgcggcg

SEQ ID NO: 700172 - DNA, 96 bp, Homo sapiens
atgaccaggaatgggaaagccccagattgggaaaatgaggtacgttagtgttcgcgattttaaaggcaaagtgctaattgatattagagaatattg

SEQ ID NO: 700173 - DNA, 100 bp, Homo sapiens
tgacggagatggtgcagaagatggaggaggtggtgatgatgtccagcaactctgtgaagcaggagaagaggagtttttggaaatcatggcactcgtgggc

SEQ ID NO: 700174 - DNA, 100 bp, Homo sapiens
cggatagctccaaactgggatatataacatttggtcagccaggcttggacattcagagcagaagtatggaatacgtacagcggcaaatatccaaggaatg

SEQ ID NO: 700175 - DNA, 100 bp, Homo sapiens
tgggccggacatctactgggtcagcttcatcctcggcggcggtggccgctagctccaaggaaggttgcccccaagtttcctggcagtgtgtgatactgag

SEQ ID NO: 700176 - DNA, 100 bp, Homo sapiens
tgtgaggtgctggactacttcttgcggcgcctcggctcctcccaggtggcctcccgcgtgctggccatgaaggatgccttcgtgaagatcgtgaggcacg

SEQ ID NO: 700177 - DNA, 98 bp, Homo sapiens
cgccgccgccgccgccgctgccgctgccgctgccgcacctccgtagctgactcggagtccaaaactacttacctggaagaccttccaccaccccctga

SEQ ID NO: 700178 - DNA, 100 bp, Homo sapiens
gtagcaatggagattcaacagaataatgctacaaagacatttcgagaattttgtggacctgctgatccttctgaacaggaattaagaataactcaaagtg

SEQ ID NO: 700179 - DNA, 100 bp, Homo sapiens
ctactgatttgcaagatctggtcaaatttcagccatcagcaaacaatgcagatcttcgtgaagactctgactggtaagaccatcaccctcgaggttgagc

SEQ ID NO: 700180 - DNA, 75 bp, Homo sapiens
ttgaagtatatgttgaagtggcctatcccaggacaggtggcactctttcaggcaccgaccgtcacgagctaactt

SEQ ID NO: 700181 - DNA, 98 bp, Homo sapiens
caaaggcgaagttgccaaagcagccaaggtgaagcagaaagcacctgggctgtcccccatgcagaccctgaaggtttctgtgtctgcagtgactctgg

SEQ ID NO: 700182 - DNA, 98 bp, Homo sapiens
gcgagtggcgatgggcgagccggacttgcacgtggagaaagcgaaaattgcctaagaattatgacccaaaagttaccccagatccagaaagatggctg

SEQ ID NO: 700183 - DNA, 100 bp, Homo sapiens
atttcatgtgcgatgatgaggaggactacgacctggccagagatcctcagcaggagcctatggaagagatagaaaatttgaagaaacaacatgatttatt

SEQ ID NO: 700184 - DNA, 75 bp, Homo sapiens
ctattttactgataagaaaacacatctttacacactaatcaccaggagactaaagtccatcaaaaacatccagaa

SEQ ID NO: 700185 - DNA, 90 bp, Homo sapiens
gaaaaaaaccttcgactatgcagagacatgagatggtagccaacccctcaggtgttgacttcaaaatcaaaactgtagagctaagaggaa

SEQ ID NO: 700186 - DNA, 83 bp, Homo sapiens
cgtgtaaccctcacggcaacgggctgctctacgccggcttcaaccaggaccacgcgccgtgccgtccctgcagtgacaccgag

SEQ ID NO: 700187 - DNA, 101 bp, Homo sapiens
gtgaattggcaccaagccttcccagttatcataaccttgaatggcgactagatgtacaggggcctttatcatctgctggactcctggattggttttgttac

SEQ ID NO: 700188 - DNA, 99 bp, Homo sapiens
gctggaaaaactccaacagcttcatatggacagatggacttcaaatgctgtttgtattccagagactagattgaggaaactcggcttaacattgacaag

SEQ ID NO: 700189 - DNA, 84 bp, Homo sapiens
acgggagtgtcctggacccagctgagcgggcggtcattcgcatcgcaggttttgggatttgagattgacgcggtgaactctgtc

SEQ ID NO: 700190 - DNA, 75 bp, Homo sapiens
caccatggaggaggacgacagctacggccaagtcatcaaggcatgggacattggggtggctaccatgaagaaagg

SEQ ID NO: 700191 - DNA, 98 bp, Homo sapiens
cggctaccactatggtgtggcatcctgtgaggcctgcaaagccttcttcaagaggaccatccaggagagaagtggagatcctgatgtttctcagtgcc

SEQ ID NO: 700192 - DNA, 100 bp, Homo sapiens
cagttcccatttctgaagaatctgaagagctggatcagaagacattcagcattggaactgctcgcagaaagaagaaggtggttcatagaacagccacagc

SEQ ID NO: 700193 - DNA, 99 bp, Homo sapiens
gcggcatgcagcagttacttccactcaagaatcgtaggccaggctgatggagagctgaacattactcttccagaagagagtaattccctcctggtccca

SEQ ID NO: 700194 - DNA, 124 bp, Homo sapiens
cgtgaggggggccttagagggcctccccaggccgcctccgcccgtgaaggcagaagtcaattcatctggaaagactatctctgagtcagacttaaaccactctttttcactaactgatttacaa

SEQ ID NO: 700195 - DNA, 116 bp, Homo sapiens
caccagcatataattcccagtatcttctcagaccagcagctaatgttactcccacaaagcttctcaaaagtgaaataagaagattggaaaggaatcaagagcgagagaagtctgca

SEQ ID NO: 700196 - DNA, 88 bp, Homo sapiens
gaaacagaacctgtccaggagctggcatgacgtgcaggtctctagcgcgtgctcttacagcctgttccaagtgtggcttaatccgtct

SEQ ID NO: 700197 - DNA, 100 bp, Homo sapiens
ctttgttcaccgccaaccccttcgagcaagacgtgggatttggtgctatggagaaatttttggtagaatataagagtgcagtggagaagaaactggcaga

SEQ ID NO: 700198 - DNA, 75 bp, Homo sapiens
cacgcgggcgagcggctgtgtggatgtcggcgaagccgcgggcgagaaatggaatctatttggaatttgcagaag

SEQ ID NO: 700199 - DNA, 75 bp, Homo sapiens
aaatcacattggaccctcctcccaactgtagttggaaatgcagaaatcacctgtcttctgcgtcgatcaggctgg

SEQ ID NO: 700200 - DNA, 101 bp, Homo sapiens
gaagggcttcacgaccaaaggtgtcacctcagtctctcagatcttccacagcccagagcatagcggcctgaccacaggggtggccttcgggcatcacgcca

SEQ ID NO: 700201 - DNA, 100 bp, Homo sapiens
cccaggtaaacgccgctgtgaaggactccaggaaagctgctcccatcacaatccccctgcctgacagccacagttccgggctgtcttgggcgaagtgaaa

SEQ ID NO: 700202 - DNA, 83 bp, Homo sapiens
ctttttcatgggccggctcccattgctccggcgcgttctcaagggcttgcagctgttggattggatgctgctggcaagacaac

SEQ ID NO: 700203 - DNA, 74 bp, Homo sapiens
tccctcctccttctcctcttgctaggtgcatgtgagggaaccctggcttgttcaacctgtcacctcatctttga

SEQ ID NO: 700204 - DNA, 83 bp, Homo sapiens
gacagtcctcgtcagcactgactttcagctatggaatcgtgttgaagggctccatgccattgttgtgtcagatagagatggag

SEQ ID NO: 700205 - DNA, 98 bp, Homo sapiens
ctgtgtgtccagaacgtgccatggagacgcttaacgcctctgacagtgacggcaccatccctaaccattgcggagaatatggctgacctaatagatgg

SEQ ID NO: 700206 - DNA, 110 bp, Homo sapiens
aactgatacatttggtcctggagatgatgatgaaattcagtttgatgacattggagatgatgatgaagatattgatgacaatggacagcaaattatggatgaacctatgg

SEQ ID NO: 700207 - DNA, 100 bp, Homo sapiens
gccagcttcacgaagtcagagaggaaacccttttccaaagagaaatgaagaagaaaactgtatgtaccctaaatatgggagataagaagtatgaagacat

SEQ ID NO: 700208 - DNA, 100 bp, Homo sapiens
cgtaagggcaacacgctccggaagggtggtcagcgccgtggaggagggattctcattctgtctcccatgctggagtgcagtggcgcggtcttggctcact

SEQ ID NO: 700209 - DNA, 100 bp, Homo sapiens
tgaaaatgaaaggagattactaccgttacttggctgaggttgccgctggtgatgacaagaaagatctcactgatgaaaaggcctccaggtttttcacctt

SEQ ID NO: 700210 - DNA, 100 bp, Homo sapiens
ccctgtcggaagcaactgccgccgccgcctctttcatctcttctggggcaggggccagggccaggtccagacatcatctgtcggtggtggacgtctgcaa

SEQ ID NO: 700211 - DNA, 98 bp, Homo sapiens
gggaagtggttcctgaacctgttgccagatggtgcaatgttcaaagtactcaagatgaatttgagttttagaaagagcgttttcgctacgtaaagcac

SEQ ID NO: 700212 - DNA, 101 bp, Homo sapiens
acaagaaacattggaaaagaaatcctgataagaactgcttttgtgaaaaactcaaattactgtcttccatcatataccgcttataagaactatgattattc

SEQ ID NO: 700213 - DNA, 111 bp, Homo sapiens
ggaacctatacaaagaagtgatgctggaaaatctcaggaatctggtctcattggcaatggctgccatccggaagaaactggtgattgttggtgatggagcctgtggaaaga

SEQ ID NO: 700214 - DNA, 97 bp, Homo sapiens
cacctgtgccttcacggaatgtatcctccgaagctatggcctgaagacgggattctttagctcagaccatgaccgacttcataccttggtaactgaa

SEQ ID NO: 700215 - DNA, 100 bp, Homo sapiens
gaggcagtccagccgcaggggccacccgaacagtctctcctcctcacagaagcctgctcctctctgtacaaggcaccgtgggcacgggtgctcgtatatg

SEQ ID NO: 700216 - DNA, 100 bp, Homo sapiens
gacagaggcaccccggacagagacgtgaagcactgaatattttaacctttgagaccaagaacccgtcggaattagcagaacgtttgcgctctgtttgtgg

SEQ ID NO: 700217 - DNA, 100 bp, Homo sapiens
ctgagcccgcggaaccgcagccatgtcattgaaattatgagactatcattcaaatggaagcattatagttcttcggaaccattatgatctcaaaacgaaa

SEQ ID NO: 700218 - DNA, 100 bp, Homo sapiens
tcccgagtagctgggattagaggtgctgccatggccacgactgatgttacactcgagctgaggaggccggctgcagccccaagacagagcgctactcctg

SEQ ID NO: 700219 - DNA, 82 bp, Homo sapiens
cgaggggctccgggtcttccagagcgtgaagatcaagatcgacccgtgcctgtatattccacgctttgcgcacctgctggaa

SEQ ID NO: 700220 - DNA, 83 bp, Homo sapiens
ctttgacgtgatggtgaacggcaagggagtgcatccgccccaacccttttccccctcgtctcctgtgagaattccccgtcgga

SEQ ID NO: 700221 - DNA, 106 bp, Homo sapiens
tgcccaagacaaaggaggacttattcctttacataatgcagcatcttacggggaactcagcgagatgctgtacacagaccggcccgactggcagagtgtgatgcag

SEQ ID NO: 700222 - DNA, 83 bp, Homo sapiens
gcggaggcagaggtggaggcgctttgaaaggtactgaacgacacctgggtctccttcccttcctggtctgaggactccacgtt

SEQ ID NO: 700223 - DNA, 96 bp, Homo sapiens
gaaaatcggggacacccctatggtcagaatcaacaagattgggaagaagttcggcctgaagtgtgagctctctcagagccagaggagtggtgcccg

SEQ ID NO: 700224 - DNA, 75 bp, Homo sapiens
cctgcccccggaggtgcccacgcagctgcctggacaagatcctgttcccagtgggttttctgcaggggaagttct

SEQ ID NO: 700225 - DNA, 82 bp, Homo sapiens
cttggaatgaatccttctagagacgtccacggaaatctggcattttttaaagtttgcgccccacaaagaggaaatattccaa

SEQ ID NO: 700226 - DNA, 100 bp, Homo sapiens
attatctaccacccgagatgccccaagatgttcctcctgctgatcaagagaagctttttatccagaagttacgtcagtgttgcgtcctctttgactttgt

SEQ ID NO: 700227 - DNA, 80 bp, Homo sapiens
acatctgcgtgtgcggggtgcgtgggtgcctggagatgaagctggaaaggccctttctggttactgtggctttatggcag

SEQ ID NO: 700228 - DNA, 83 bp, Homo sapiens
aaacaagacagttctgtctgcagaagcccattatggctgtaactggagatgacacaggaacagtaagaggaccttgtgcatga

SEQ ID NO: 700229 - DNA, 101 bp, Homo sapiens
gatttggggaatctatagttaatcttggcgacattgacaatgatggctttgaaggtgctggagaatctggtaaaagcaccattgtgaagcagatgaggatc

SEQ ID NO: 700230 - DNA, 90 bp, Homo sapiens
ggcggaggctccatgttgtcccctcagcgagtggcagcagctgcctcaagaggagcagagctgtaggtaaaacttgcctactgatcagtt

SEQ ID NO: 700231 - DNA, 100 bp, Homo sapiens
gagcagccctggtgtcacctatcagtaaaagatcccttcattaacaggagaaatgcaaataccttcatatcccctcagcagagatggagagctaaagtcc

SEQ ID NO: 700232 - DNA, 75 bp, Homo sapiens
aagcgcatacaggaccctaaacaggttggctctgactgtaccaccatccactacaactacatgtgtaacagttcc

SEQ ID NO: 700233 - DNA, 89 bp, Homo sapiens
cagagcagttctcctttaaggagtccatctcaggttttgcgcacagctgcttccagtatgccatccagaagaaatggccgctgtacatg

SEQ ID NO: 700234 - DNA, 100 bp, Homo sapiens
cctcagcctcccgagtacctgagattagcccaggtttggtgcacctcgatttggaggaagtagggcagggcccttatctggaaagaagtttggaaaccct

SEQ ID NO: 700235 - DNA, 96 bp, Homo sapiens
ttgatctcgccaaaaaggacatctttggagccaggtccaggacctacagctggaacgggagatggcactggccaccaaccggagcctggcagagcg

SEQ ID NO: 700236 - DNA, 74 bp, Homo sapiens
aaagcacagaaactgaggggacataatcatcactcagtaggagttggtggtgaccccgcccagttggcccagag

SEQ ID NO: 700237 - DNA, 96 bp, Homo sapiens
cggccgggagccatggagcgcggccctggggcccgggggcgcgggccggggtggataaacatcacgatgctgctcatgaaatcatcgagaccatcc

SEQ ID NO: 700238 - DNA, 100 bp, Homo sapiens
aaggcttttgggaagaatttgaggtactggaggcgcaaagaaggcatcagaaggagaaatctggcatcatacctacctcaccgacgccctacacttacaa

SEQ ID NO: 700239 - DNA, 80 bp, Homo sapiens
taactgaacattggtctaaagtctttccaaaaggtcaaggttcacaaggtgaaaggtgtagcagtcactcggcctacacc

SEQ ID NO: 700240 - DNA, 83 bp, Homo sapiens
gatggaagatgtgaatgactggctgactgaactctggtctgcgcttcgcagccgggatgaagctggtttccgtcgccctgatg

SEQ ID NO: 700241 - DNA, 100 bp, Homo sapiens
gaccaggatgtgtcgccatccagtaatctcagaaagtgaagttttccagcagttcctaaatttccgagatgagaaggaagtttgtctgccatgcgtttcc

SEQ ID NO: 700242 - DNA, 50 bp, Homo sapiens
cttcgggaagcagggattccagtgccaagaggcgtggagctatttcctat

SEQ ID NO: 700243 - DNA, 98 bp, Homo sapiens
tctctcgggctgcccaagcgacagctgtcagaggggcaggagcttctgggagccaccgtctgaagggcagcacgctgaggaaacgcaagatgtacgag

SEQ ID NO: 700244 - DNA, 90 bp, Homo sapiens
tgcccgtctgctgaagcatgtagtgagatgttaccttcgactttcagataaccccagctgctgcagcagtgccgcctggtggagcggatc

SEQ ID NO: 700245 - DNA, 98 bp, Homo sapiens
aaatggcaatgcattccaacagcattacatgaggcaccagggacactttgtgagaaatttaggtgatgttggagagaaagagactgaaacagaagttt

SEQ ID NO: 700246 - DNA, 98 bp, Homo sapiens
ttcaagacacaccggaggcgacggccatggccacagctttatcttcaagccaggatgaagggagactgggcaagactcttacgccccacactgcaatt

SEQ ID NO: 700247 - DNA, 82 bp, Homo sapiens
tgctgatcgccccagggatcaggagacttcctcttcaaattcctggtgattggcagtgcaggaactggcaaatcatgtctcc

SEQ ID NO: 700248 - DNA, 73 bp, Homo sapiens
gttggaggtatacacaagcggaggttatattcccagaggatgtcagtcccaaggaccagtagctgccatcagt

SEQ ID NO: 700249 - DNA, 80 bp, Homo sapiens
tggcgtcttccgtgggcaacgtggccgacagcacagcaagatggattctggatatactctgagtattgtaacaaccacct

SEQ ID NO: 700250 - DNA, 98 bp, Homo sapiens
cctgtatgcatggtgtggggttggtgtgattagcttcgcagtctggaaagctttaggagttcacagtgaagcagacagtatgagcatgaccagtggag

SEQ ID NO: 700251 - DNA, 83 bp, Homo sapiens
cagacgccaaacaagcaaatctggctatcttctccatccaggtcctcagccagcagagccacgttccttatgagcaccgtggg

SEQ ID NO: 700252 - DNA, 97 bp, Homo sapiens
gaagaatttcaacaatctctatggcaccaaaggtggagccgccaccaaaatgcagattttcgtgaaaacccttacggggaagaccatcaccctcgag

SEQ ID NO: 700253 - DNA, 90 bp, Homo sapiens
ccacaagaggacatcgggaaaccagagccatctgtgagtaccagagtgcccactggttccaacagttcttctcagaccacagagtgtctt

SEQ ID NO: 700254 - DNA, 98 bp, Homo sapiens
gcgagcccgctttccaccccgacctctgcccaggccgcagcctcaggcccagagccagcacgagacatccgctgcgagttctgtggtgagttcttcga

SEQ ID NO: 700255 - DNA, 83 bp, Homo sapiens
tgggagcagctggctctgggccttgaacattccgaaactgtcaagattggcaaggccaggagacaagcttctcaagtctttac

SEQ ID NO: 700256 - DNA, 114 bp, Homo sapiens
ccaagggctgaaccaactcagaatgcattgccattttcacatagttttggggctcagccactagtcatcagcaaattgataccacatttgtgtatcctgtttggagactccaac

SEQ ID NO: 700257 - DNA, 100 bp, Homo sapiens
ggctgtggcagtttaaggaggaacaaatgtctgtacagagatggacagagacgtatgtgcgttggtctcctaagggcacctacctggctacctttcatca

SEQ ID NO: 700258 - DNA, 102 bp, Homo sapiens
atggccatggcataaggaactctatcccaggaatacagctttgcattaggtccaagtgtgcctgccatcaactaactatccaggctacagcctgtaccccag

SEQ ID NO: 700259 - DNA, 50 bp, Homo sapiens
agggttggaattgcagatgtgaggggatgctgcactgtatcagtccctgc

SEQ ID NO: 700260 - DNA, 101 bp, Homo sapiens
gctgaaaacaacatccagcccatcttcgcggtgaccagtaggatggtgaagacctacgagtgtgtagcccacaatgccctggagtgtgcacgagccatcta

SEQ ID NO: 700261 - DNA, 131 bp, Homo sapiens
gagccatcagcttcagctccagctccgctctcttcggctgccccaatccccggcagctctctcaggcagacatctggtccctgggcataacagctattgaacttgcaagaggggaaccacctcattccgag

SEQ ID NO: 700262 - DNA, 75 bp, Homo sapiens
agtgaatcccaactgttatgccaaagaccctgcgggagattgtgattggcgtcctgcaccaattgaaaaaccagc

SEQ ID NO: 700263 - DNA, 50 bp, Homo sapiens
cagcagcctcttctctgccctgcacagtaatctatgccagcaattatgac

SEQ ID NO: 700264 - DNA, 135 bp, Homo sapiens
agttcctcatcgacaagaacggctgcgtggtgaagcgctacggacccatggaggagcccctggtgtcccgcatgagatgtctgcagaatgagacttacagtgcgctgagccctggcaaaagtgaggacgttgtgc

SEQ ID NO: 700265 - DNA, 100 bp, Homo sapiens
gtctacagatgctggcattgcctttgccccagtatattcaatgggagccccaggcggcgactggcggcgcgatggacctgaccgggctcctgctggacga

SEQ ID NO: 700266 - DNA, 95 bp, Homo sapiens
taaagaaatccaacttaccttgtcagtggttggttctagctattgccatggtacgtttttatatggaaaaaggaacacacagaggtttatataaa

SEQ ID NO: 700267 - DNA, 100 bp, Homo sapiens
gagacaacttactaccaaacagcacttcctggcaatgatagatacatcagtgtgggaagccaagcagatacaagacatccataaaaattcatcagagagc

SEQ ID NO: 700268 - DNA, 101 bp, Homo sapiens
cgtgcccgggacatcgtcccaggggacattgtagaagtggcaggtatcgagaaccttccctgcgaacttcagaggaacttccagctgatgcgagagctgga

SEQ ID NO: 700269 - DNA, 128 bp, Homo sapiens
tcctctggtgcgaaattccggatttccttgggtcttccggtaggagctgtaatcaattgtgctgacaacacagtaagcaagaagagtgcaccacaacatcaacagccccagtccctacaacagaaatt

SEQ ID NO: 700270 - DNA, 50 bp, Homo sapiens
gtcttcctcttcagccatccaggcgataggaagaactatgcctctgccaa

SEQ ID NO: 700271 - DNA, 101 bp, Homo sapiens
ctcagtttgatgcgtcacactacgacagtgagaaaggaggtgcactcagctaaacacaaaagtggccaaactcaccaacgagctcaaagaggagcaggaaa

SEQ ID NO: 700272 - DNA, 73 bp, Homo sapiens
aagcatctgccctgttgttcagcagtgatgaggaggatcctgatggtgaacatgccaggagagcaatgcaaaa

SEQ ID NO: 700273 - DNA, 75 bp, Homo sapiens
aggatgcttcgcagtttacgaaaaactatgttccaacttcctgtcaacaatcttggcagtttaagaaaagcccgg

SEQ ID NO: 700274 - DNA, 51 bp, Homo sapiens
agcatttgtcaaaacagttaaagcggaagatggagaaccgtgattaccggg

SEQ ID NO: 700275 - DNA, 74 bp, Homo sapiens
tagagtcgcagggagcccaccgggcgggcctggccaagcattgtcccagatatagccgttggtacaaaggtagg

SEQ ID NO: 700276 - DNA, 101 bp, Homo sapiens
ttagacagtcgtggttcctgtgatctgtgtcctctttgcagaagactctgatgccagtatggactggagatgatgggagccagttggatagccccatggaa

SEQ ID NO: 700277 - DNA, 100 bp, Homo sapiens
ggcggatcggctcacgcagcttcaggacgctgtgaattcgcatcagaggctccttgaaatgctagatacagagaaggaactgttaaaagaaaaaataaag

SEQ ID NO: 700278 - DNA, 76 bp, Homo sapiens
agtgctgcccaggatggacaacagcaaacagcaccaaccactgtatcaaacctgaaccttagccggccgatcgagg

SEQ ID NO: 700279 - DNA, 78 bp, Homo sapiens
cggtctacaccgacttcgacgaaacgcttcgttaagggactcaggcagtacgggaagaacttcttcagaattagaaag

SEQ ID NO: 700280 - DNA, 100 bp, Homo sapiens
cgctttcttcctggagcggagcgcaggcgccgagactgacaacgcggtcccacaggtgctggatccgggactccctggtcagctacatcaccaacctggg

SEQ ID NO: 700281 - DNA, 50 bp, Homo sapiens
ccgccccctgcggcccagcgcccccagtttccagagtgtggattctttgg

SEQ ID NO: 700282 - DNA, 96 bp, Homo sapiens
tgggattcgcgctgctgggcacccacggagcctccggggctgaaaaaaccgggaagatcctgacggagttcctccagttctatgaagaccagtatg

SEQ ID NO: 700283 - DNA, 128 bp, Homo sapiens
aggctccttcctactgtccgagggccaccaggccgccgggggcctgctgcgcccgggaaggtgctcgggtcttcggggcactgggtcccatcggtccctcctcacctgggctcaccctcgggggtctg

SEQ ID NO: 700284 - DNA, 90 bp, Homo sapiens
agccacaccacaaccaggcgaagcaggtagtggcgctgaatcgctcctgccgcgggttactaaaagatgtaactgaactgcagatccttg

SEQ ID NO: 700285 - DNA, 100 bp, Homo sapiens
tggaaagtcgggggctttcgcccgggtcctcctagaaattccccccgaagaagactcccccacatctggactctaaaatagagctcaagcttgagaagag

SEQ ID NO: 700286 - DNA, 82 bp, Homo sapiens
agagagaggaccaagacaaaattcagaagctcccgatgtccagaattaggttcttgccagttacataaatcccgtcagtagt

SEQ ID NO: 700287 - DNA, 74 bp, Homo sapiens
gctgaggtctacacggaggaagatgcggcatcctatgttagaaaggttcatgttgctgaggaggcagagggctg

SEQ ID NO: 700288 - DNA, 100 bp, Homo sapiens
tggttctgggaactcggcgggtatgacccaggcttggagatctggggaggggagcagtatgaaatctccttcaaggtgtcagcatttgcaggtatacagg

SEQ ID NO: 700289 - DNA, 90 bp, Homo sapiens
aagcccctaggaatctgcctgataatcgattgcattggcaatgagacagctctctgatgtaaaggatggagtaaatcaagcagcacctgc

SEQ ID NO: 700290 - DNA, 90 bp, Homo sapiens
gcctgcagcgggagctggacggcgagcgcgagcggcgcgagaaagtcctcagccctcgctctcgctggcggagcagcacctggagtcgcc

SEQ ID NO: 700291 - DNA, 100 bp, Homo sapiens
gaatggaggcatgcggaactcacccaacacctcgcctaagctgatgagcaatcagccatgactgcctttgcactgtccatgctctcagcccaccacctcc

SEQ ID NO: 700292 - DNA, 96 bp, Homo sapiens
caagtcgccctcggggtggcagttcccgttaaccttagccacaaagtcaaaggtatataatgtttacatggcagggaggcagctgtgttctaagcg

SEQ ID NO: 700293 - DNA, 100 bp, Homo sapiens
atcaacaatgagactggtgacatcatcacagtggcagctggacttgatcgagaagaaatggcagcagtgtctgcttttcttcaaccaggagcacctaggc

SEQ ID NO: 700294 - DNA, 75 bp, Homo sapiens
tgccaaattaaaaaacgttcagcttctctaaactccaagatgtgttcagagcaacattgttttgttgacacaagc

SEQ ID NO: 700295 - DNA, 100 bp, Homo sapiens
gaagctgcggtctctggccagcacgctggactgcgagacggcccggctgcagcgagcgctggacggagaggaaagcgctccatttatcttaaagaaattg

SEQ ID NO: 700296 - DNA, 100 bp, Homo sapiens
tgaaatcaacaaagcctttgaactgatgcattctggaaagagaatacaaatggagagatttgcatgggatgcagaaatatggaagactaaccaagcagac

SEQ ID NO: 700297 - DNA, 83 bp, Homo sapiens
gctgagcttgccgcacaaaaagctagagaggatatggtggtaccaggagacgataaagtagaaagttggagtcaaacactgga

SEQ ID NO: 700298 - DNA, 74 bp, Homo sapiens
cgagggcagccgcggccctgtggaggacagagcgggatgccaccagcttgtccaaagggaagttccaggagctc

SEQ ID NO: 700299 - DNA, 50 bp, Homo sapiens
caactctctacgctttgcctccaagtgctcgccaaacccggagtcatcag

SEQ ID NO: 700300 - DNA, 80 bp, Homo sapiens
tggagcctcagttggaagcagccgatccagcctgcggagcctgtggggcagtttaaaattggtggtgaatggtggacatg

SEQ ID NO: 700301 - DNA, 75 bp, Homo sapiens
catcttcccggaatcagattcaaagggaagaaggagaaagggccaacccctgaagaagcaatacagaaactgaag

SEQ ID NO: 700302 - DNA, 101 bp, Homo sapiens
ggacaacccgacgcgaggcagggagcttccaggttataggaaaatgtttataggaggccttagctgggacactacaaagaaagatctgaaggactactttt

SEQ ID NO: 700303 - DNA, 80 bp, Homo sapiens
ttcctggccttcaactgtctggcactgttttttgaaagaatccaactcaagtcggaacagctcttcaggttttctataat

SEQ ID NO: 700304 - DNA, 83 bp, Homo sapiens
cacggccagttttgaaatcgacacacaaagaatagagttgagcctgtgggacacttcggattattttcgaaataccagtattt

SEQ ID NO: 700305 - DNA, 90 bp, Homo sapiens
ccagtgtaatgattattgacaacagtccccgcccagagaagggagccagggggagctgactccagccaacagccagtcccggatgagcac

SEQ ID NO: 700306 - DNA, 99 bp, Homo sapiens
aaagctgagctgcgaggaaaatggcggcgggaggctcttgcagccaatgccggaacaggatttgctgttgctgagcctcaaatcgcaatgttttgtggg

SEQ ID NO: 700307 - DNA, 102 bp, Homo sapiens
gcgggtgtgtgctgcgttcacaggtgtttctgcggcaggtgttgtcctacatcaatggggtcacaacaagcaaacctggagtatccttggtctactccatgc

SEQ ID NO: 700308 - DNA, 90 bp, Homo sapiens
ctttacagtaaaaatgacccatctatggctgcttaataaaacaaccctttttgctgcacatgtaagtggagctgtgcttacctttggtat

SEQ ID NO: 700309 - DNA, 100 bp, Homo sapiens
gcgagaggtgcggcgaaggaggcagaggcacttatgcttgtcaggaatgtgttccagaagatctagaactgaagaagaagatttttgctcagttagattc

SEQ ID NO: 700310 - DNA, 82 bp, Homo sapiens
gtttgcggaagtaggaggaagtagaagtgctgagtaagccgaggtctgcagcccagagggcaccttctgcaaacatgtctgt

SEQ ID NO: 700311 - DNA, 75 bp, Homo sapiens
aaaagagcatgtaccttgatattgaatatttcgccagaagtttgagtatcactactcctgaagagatgattgaaa

SEQ ID NO: 700312 - DNA, 82 bp, Homo sapiens
atcctgccgtccttctccactttcgccagcccgtgccgcgagcgcggcctgcaggaggagctgacatggacccaaatcctcg

SEQ ID NO: 700313 - DNA, 90 bp, Homo sapiens
gctttttgatggccatggcataaggaactctatcccaggaatacagctttgcattaggtgcagtagacattgttgcaatcatgatcggca

SEQ ID NO: 700314 - DNA, 75 bp, Homo sapiens
gggatttcagggacccctccatccactcgagtgaccgtctccttatcaagggaggcagaatcgtcaatgatgatc

SEQ ID NO: 700315 - DNA, 100 bp, Homo sapiens
ggaaatccacaaggattcttttcaatacatcctaaaacagatgccatggctagtccagggaaagataactatagaatgaaaagttataagaataaagccc

SEQ ID NO: 700316 - DNA, 100 bp, Homo sapiens
cagatattatgaatacaaccatgatctcttccaaagaatgccacagaatcaggggaggcatgcttcagattctgaagggagtggtaatggaagtgaagat

SEQ ID NO: 700317 - DNA, 82 bp, Homo sapiens
gccgatccagcctgcggagcctgtggggcagccaaaagaatgcaatggtgtaaagattccagttgatgccagtaaacctaat

SEQ ID NO: 700318 - DNA, 100 bp, Homo sapiens
cccggagtccgactcgctacgcgggtcttgcgagatatctggccgcctctgccgcagctggaggtgaaaagaacggaggggagcccgatgacgctgaact

SEQ ID NO: 700319 - DNA, 90 bp, Homo sapiens
gggccttcttggtgaccaacttctgggaccctctcaaccaagataaggaagtgtgtcgggtacatgtcccagagcaagcacacggaggcc

SEQ ID NO: 700320 - DNA, 75 bp, Homo sapiens
aaactgaggaacagagatactgatatgggaacacaggaagatattcattttaagtagagacggggtttcgccgtg

SEQ ID NO: 700321 - DNA, 100 bp, Homo sapiens
ctttagaccctccacctaattgcagaaatttgcctgtaatggtactgtgattgaacatcctgaatacggagaggttattcagcttcaaggtgaccaaaga

SEQ ID NO: 700322 - DNA, 100 bp, Homo sapiens
acctggcttacatgaaccacatcatggtctctgtctccccgcctgaagagcacgccatgcccattgggagaatagcagatcttcagtttagatcttggag

SEQ ID NO: 700323 - DNA, 88 bp, Homo sapiens
gctgtgccacctggtttcaagaccctacccgcttcactggcaccatggttttgcagacattgggtacagaaacttaccggcctagttc

SEQ ID NO: 700324 - DNA, 90 bp, Homo sapiens
cggggagccgagctggagctgccgcggcgcagccaggacatgcggaagcacgtggccatgaccctgctggacacagagcagtcgtatgtg

SEQ ID NO: 700325 - DNA, 136 bp, Homo sapiens
aacatcagccgaaattcagatcgatttgtctcaatgaaggttgatttcatcagactaaaaagttacaggggcaaatgtgccagcaaagccatgtactccattgacatcaacgatgtgcaggaccagtgctcctgct

SEQ ID NO: 700326 - DNA, 82 bp, Homo sapiens
tggtttccatctcatgctccctttcatcacatcatataagtctgtgcaggtttaacaatgcatgcatcaattcttgcatata

SEQ ID NO: 700327 - DNA, 100 bp, Homo sapiens
attgaccaatatctgggacttgtgaggactcacataaatgctgttgtggcaaaggagaagcaggaagagctagcaaggaagcatgcaaggtttgtcctgt

SEQ ID NO: 700328 - DNA, 98 bp, Homo sapiens
aacagacaggctacggatggatatgtcaggaatgtgattcttcatcttccaaggttgaagccatccttgtcaatatatttggtggtatcgtcaactgt

SEQ ID NO: 700329 - DNA, 99 bp, Homo sapiens
gctttggagccggccccaggcagcgtgtgtcggtcgcctagtctggagaactagtcctcgactcacgatcgtcagtatttaaacagatcacatcatgcg

SEQ ID NO: 700330 - DNA, 79 bp, Homo sapiens
ccggaaggggtcccgaagccccctgcaggaactctacaacccaatccagactgtggatattcataaggagaaagtggca

SEQ ID NO: 700331 - DNA, 76 bp, Homo sapiens
cctgagactctgctgggggagatggaggcgaagacaagagagctcattggaaccactcgttttgactattatttta

SEQ ID NO: 700332 - DNA, 60 bp, Homo sapiens
gcgcactggaggagcggcgggcttcagacaggtctcaacatatgcactagtggaagtgcc

SEQ ID NO: 700333 - DNA, 100 bp, Homo sapiens
atggtacaggaagggaacgtggaaagcgcatacaggaccctaaacaggatgctccagaccttgtatgattacttctggtgggaacgtctgtggctgcctg

SEQ ID NO: 700334 - DNA, 100 bp, Homo sapiens
gaggagttaacgcagccagacggagagtgataccccagcagagtggagcactgtacatacctggctggattgagaatggccctggccaacgtcaacattg

SEQ ID NO: 700335 - DNA, 101 bp, Homo sapiens
agacctggatgacatcagcaccaaaacaggcatcaccctcaagagctgccggagacaggcctccggtgtggctgtctctgatggtgtcatcaaggtgttca

SEQ ID NO: 700336 - DNA, 75 bp, Homo sapiens
tccgggcacccccgagggccccgagcccgagcgccccagcccgggtgagaagccctaccactgcaactgggacgg

SEQ ID NO: 700337 - DNA, 82 bp, Homo sapiens
gtgagattcccttgcaaatttacatacgagaatggcttgtgaaatcatgcctctgcaaagtttccaacatggctagatccat

SEQ ID NO: 700338 - DNA, 82 bp, Homo sapiens
aaaaccttcctcaccgtgtactgaaacatttactagggacaacttttgagtgtcagaccctgtggacacaaagaaaaagctt

SEQ ID NO: 700339 - DNA, 98 bp, Homo sapiens
ggtctggagagtcaccgcggcggcgccgggtggtggttaaaccatgttaaggaggattttacagaggtttgaaggatgacctctaggaagaaagtgtt

SEQ ID NO: 700340 - DNA, 90 bp, Homo sapiens
atgagatcaagaaagagaatggagaagtaaagattttgctgaaaaggcgttacctactgcggagaaagttcagcaagcagtcttaccatg

SEQ ID NO: 700341 - DNA, 110 bp, Homo sapiens
cagacatctgcgaagtggttgagaagcctgtacctgttttatacttgcttttgcttcagcgttctgtggttgtcaacagctgcagaaccttggcctgaaaatgctacatt

SEQ ID NO: 700342 - DNA, 50 bp, Homo sapiens
aatgatgacctcggctcctatcaagggacattttctgcactgccccgagg

SEQ ID NO: 700343 - DNA, 90 bp, Homo sapiens
ggagccctggatggttgtgagggaagagacaggaagatggtgcccagtgccggtggtggtgtgcacattgagccccggtatagacagttc

SEQ ID NO: 700344 - DNA, 75 bp, Homo sapiens
atacagctaaagccatggaaagccactccacatcacttgaattatctcctgatttccacctctgctcagatccgc

SEQ ID NO: 700345 - DNA, 100 bp, Homo sapiens
gggtgcagatgcagtgtggctctggatagcaccttatggacaggatctaaaatgtccactgaggcacaaagagttgatgacagtccaagcactagtggag

SEQ ID NO: 700346 - DNA, 75 bp, Homo sapiens
caagtggtcagtttggttgtggaaaggagtcacatgccataggaaaaaagcctgaaaattcagcagacatgattg

SEQ ID NO: 700347 - DNA, 74 bp, Homo sapiens
gtgaactcaaagaactatttaattggaaagatcaaaggtttggatgcatctgctcagactacttctcatgaact

SEQ ID NO: 700348 - DNA, 50 bp, Homo sapiens
tctcgctaacaactgcccagctttgagcccctgaaggacgtcgtccctcg

SEQ ID NO: 700349 - DNA, 83 bp, Homo sapiens
gcaagaggagcagtccagcggcatgaccattttcttcagcctccttgtcctaggttgcgacctttccttccccagcaataaac

SEQ ID NO: 700350 - DNA, 50 bp, Homo sapiens
ccggtacatctgaaagccgggaaatgcgtgagtgcatctccatccacgtt

SEQ ID NO: 700351 - DNA, 100 bp, Homo sapiens
ccaaaaagtcggacatgtgcgagtgtgttaacagggcacaaccattatgtgatgtgtgctcagttccaccccacagaagacttggtagtatcagccagcc

SEQ ID NO: 700352 - DNA, 90 bp, Homo sapiens
agatttctccgaagaccctacctcctcaggtgccactgattaatgaacttgaatcagcaatacatcagctgtacaaacagcgagcttccc

SEQ ID NO: 700353 - DNA, 100 bp, Homo sapiens
cttgatgatcattgtgtgtattgatcaatggaagaacaaaatctggcctgaaataaaaggatggatagaatgacagaagatgctcttcgcttgaatctgt

SEQ ID NO: 700354 - DNA, 82 bp, Homo sapiens
tgaccgcggcagcaagatggtctcggagatctacttgacacggctactggccaccaagggcacactgcagcagtttgtggac

SEQ ID NO: 700355 - DNA, 100 bp, Homo sapiens
tgctctgagctttggctttggaatgtacaagtggatccttttcataccttatttggaattgctggattgtcacttttgggagaagaacagattaaacctg

SEQ ID NO: 700356 - DNA, 100 bp, Homo sapiens
gagaagaagctgcggccgcacctggccaagggcatgacgtccttgatgaaggccgcgctggacctcacctaccccatcacgtccatgttctccggagccg

SEQ ID NO: 700357 - DNA, 75 bp, Homo sapiens
agtttaggccaaatgccccagttcctctgacaattataggagattttcagaaggaacagaaaaaatttgttgaag

SEQ ID NO: 700358 - DNA, 100 bp, Homo sapiens
aatcaactgcttttcccagaacacagagagcagagcataaagccaaggtagaagcaatgaccctggacctcgctctgctccgtagcgtgcagcattttgc

SEQ ID NO: 700359 - DNA, 75 bp, Homo sapiens
gcgcaacactcgcttggttggggagatcggcgcttggccgcatcatggataccgacttatatgatgagtttggga

SEQ ID NO: 700360 - DNA, 50 bp, Homo sapiens
ttcaaagagaccctcggaacgacccagatgatgtggtaccagttggccaa

SEQ ID NO: 700361 - DNA, 51 bp, Homo sapiens
tcctgatagatctgtatgactggacagaatatgacagatacctagcatcta

SEQ ID NO: 700362 - DNA, 74 bp, Homo sapiens
ttttcacaaccttcaagaaattcggcatccagtcctggatgagccaatagctgaagctgtctgtattatcgcag

SEQ ID NO: 700363 - DNA, 75 bp, Homo sapiens
cctgagccactctccaggctgctccagtactcaagggaacggtggttataaactgttttcaccttcaagattctt

SEQ ID NO: 700364 - DNA, 75 bp, Homo sapiens
ccatccgtccagataacatgtcggagtacagcaagcagatgcagagatgtccacagatccaaccgtccaatcatc

SEQ ID NO: 700365 - DNA, 83 bp, Homo sapiens
tccccagttctggcagattctggaaactgtacattgaagcagaggtgaccctggcagcaaccccaacaaacgccagaggcagc

SEQ ID NO: 700366 - DNA, 90 bp, Homo sapiens
gtggtgaaggagtgtgtgcagcggtaacaaatcggaagtacccaaaactgaaagaagtggatgatgtgcttggtggagcagctgcctggg

SEQ ID NO: 700367 - DNA, 100 bp, Homo sapiens
acagctccgaccgcgaggacgacttctccgcaggttctgcgttagacctgcatcttagcaatgtgaatattgcatccctagagaaggacctggaagagca

SEQ ID NO: 700368 - DNA, 90 bp, Homo sapiens
taagactgcaataagctcttttacaggttttatgaatgaagctatggctacagattccccaagaagacccagtcgttgtactggtggagt

SEQ ID NO: 700369 - DNA, 50 bp, Homo sapiens
agagcttcgaggcagattacatcctactcatccagagagagggtggatca

SEQ ID NO: 700370 - DNA, 126 bp, Homo sapiens
atcacaattactgatgggagcaagttgactaccaccagtggagtccaggatgagtgattctaccagaaaggaatgaagaacagaaccttcaggaattgagtcacaatgcagacaaatatcaaatgg

SEQ ID NO: 700371 - DNA, 96 bp, Homo sapiens
gcttctgacagtggagacactggcattggaacttcctgttctgatagcgtggaagaccctcaaactgacacaagacctacagagaaaaccctttgc

SEQ ID NO: 700372 - DNA, 100 bp, Homo sapiens
acactggaatttgcatcgggttttgcctcggaacagtgtcccgagggcattgtggccatctccaccaacaccctacggtatgaaaactttcaaagacgac

SEQ ID NO: 700373 - DNA, 100 bp, Homo sapiens
cccagcgagagatctgcagctaggctggctgcacttgctccacgggtcaggggatcggaggggattactcttgtctctgctgctcctgggaaagtgattt

SEQ ID NO: 700374 - DNA, 100 bp, Homo sapiens
gtgccaggcccgcagtcctaccccattgtgacagcgggagatacagatgacccaccaagaattactcagaaccctgtgatcaatgggaatgtggccctga

SEQ ID NO: 700375 - DNA, 75 bp, Homo sapiens
gaggaacatcattctgggcgcagggatcctgttcgtggcagcagcttgctgagcgagagcgagaagcggcccttc

SEQ ID NO: 700376 - DNA, 100 bp, Homo sapiens
atgttcgaactacttccaggtgaatccaacaagatcccccgtctgaggactgacctttttccgaaaagaagatttttcagatcccctggatgcatgcggc

SEQ ID NO: 700377 - DNA, 75 bp, Homo sapiens
tgtgggcatttgatgtgcacctcttgccttacggcatggcagtgataccaagaagaagcaggggatgaagaagag

SEQ ID NO: 700378 - DNA, 51 bp, Homo sapiens
aacgagagtatatgcgatgagtttggagaaaagccttacagatgctcatgg

SEQ ID NO: 700379 - DNA, 97 bp, Homo sapiens
cttctcatgcagaggcagaaaaatgaggggatcaacagcccaggcctcaggggcacccttcttggcccttacagaactgataaatttcaaacggaag

SEQ ID NO: 700380 - DNA, 75 bp, Homo sapiens
gtctaaacctgtgaccacccctgaagaaattgcacagaccggacaggaacatgagcttatcgagagcatgcccct

SEQ ID NO: 700381 - DNA, 98 bp, Homo sapiens
acctgcccagcgccaccatcgcctgtcacctggacccgcgcgtgttcgtggacggcctgtgccggagggctacttctccaggagaacagcaggtttgc

SEQ ID NO: 700382 - DNA, 74 bp, Homo sapiens
ttcagggtttccaccgttcgttcaaggatagtggctacccagagacgctggtcaacctcatcgtcctgtcccag

SEQ ID NO: 700383 - DNA, 88 bp, Homo sapiens
gtttttaaagtaggagagcctacatattcttgcagaaagatgttctcgtccgtggcgcacctggcgcgggcgaaccccttcaacacgc

SEQ ID NO: 700384 - DNA, 85 bp, Homo sapiens
gagactcagacctctcatctgccagaatcagaaagaattcatcacactgtagcccactgtggctttgccagccttctggactccg

SEQ ID NO: 700385 - DNA, 75 bp, Homo sapiens
cagctctgcggctcgggccctgaggttggtttgttggaccttgaactcaatcggctgacgaaagcgctatttttg

SEQ ID NO: 700386 - DNA, 75 bp, Homo sapiens
cttggagtccggacatctgaaacttgacgccttcctgagtcctggatctttcttccttctggaaatctttgactg

SEQ ID NO: 700387 - DNA, 100 bp, Homo sapiens
cagtggcggatgtgcactgctacaggactctactatggagctattgacctgaaaagtggttctggaaaagtgtaccaaggccctgcaaaaggtgctgctg

SEQ ID NO: 700388 - DNA, 110 bp, Homo sapiens
cagaagtcgcgtgtctaggtgagtcgcggtgggtcctcgcttgcagttcagcgaccacgctgtcccccgaggcagcctatgatgtgctgagcgtcgccgacatgtacctg

SEQ ID NO: 700389 - DNA, 83 bp, Homo sapiens
ccggaccgcgcctcaggctcccccagaatcagcatgattcttcagaggctcttcaggttctcctctgtcattcggtcagccgt

SEQ ID NO: 700390 - DNA, 74 bp, Homo sapiens
ttacaacaatcccagatggagactggttttgtccagcttgcattgctaagtctacatcagcatcagcatctgcg

SEQ ID NO: 700391 - DNA, 100 bp, Homo sapiens
agttggatcttgctcagtctctgtcagaggaagatcccttgattacaattcctagaccttctgtggcatctacacagtcaacttcaggaagctttcactg

SEQ ID NO: 700392 - DNA, 89 bp, Homo sapiens
gggaaggattggacccatcagggcatcgctaagctgtaccataaagtgagccaactgcctctgtcaccgggtccctccacccttgtctc

SEQ ID NO: 700393 - DNA, 50 bp, Homo sapiens
gggcgtaggaccctcagagccagtctccgtctcctggcagctcctccccc

SEQ ID NO: 700394 - DNA, 49 bp, Homo sapiens
agcaggcatcatccgctatgcaattgggacaagcttaccattgttcaga

SEQ ID NO: 700395 - DNA, 83 bp, Homo sapiens
ccgggatctgagcgagcgccggggccagcggagccggagccgccgggacatgggcctgaccttcataagaagacccagagtaa

SEQ ID NO: 700396 - DNA, 80 bp, Homo sapiens
ggagccgcccggggcagggctcgggagagcggcggagctggagtttgttcagatcatcatcatcgtggtggtgatgatgg

SEQ ID NO: 700397 - DNA, 75 bp, Homo sapiens
ttgctaactttgcacatttcaacagtcatgcaggacagtcattttgtttactcattcagccctgttgcaggtccc

SEQ ID NO: 700398 - DNA, 100 bp, Homo sapiens
gagtggaaaaagtaccatcatttgaaacaggttgctgaatgctataaagccaggacttgttaaaaagatcaatagattgcctacccccattgcaggactg

SEQ ID NO: 700399 - DNA, 80 bp, Homo sapiens
gactgctttatgaccatattaatgcagatgaggcgttctttgggagcatttcctgaagacgtagtcatgcagcacgtcag

SEQ ID NO: 700400 - DNA, 100 bp, Homo sapiens
atgtgctgagactcaaccgagtgaacgacgcccaggaatacagacgggtaccgaggagaaggcattgtatatgggacactagaggaggtgtgggactgtg

SEQ ID NO: 700401 - DNA, 76 bp, Homo sapiens
agcttgaaggcctggagagccgcccagcagcacaacacagggaagcttggggaggggataaaaacattcagatggc

SEQ ID NO: 700402 - DNA, 98 bp, Homo sapiens
ctggtgccacaagcgtagatgttaaactggatatggtggtggttttaatgaaagagaaaatgttgaatatatagaaagagaagaatctgatggtgaat

SEQ ID NO: 700403 - DNA, 103 bp, Homo sapiens
gcgttcttccgctggctcagccgcaagtacccgtccatcatagtcaactgcgtggaagagaaggaaactggagcacccatcctaactgatgatgttagcctgc

SEQ ID NO: 700404 - DNA, 82 bp, Homo sapiens
cgactccttgcagctgctgtcagcatggcccaggctcctgctgacccgggcagagaaggccctagactggagctggttacag

SEQ ID NO: 700405 - DNA, 95 bp, Homo sapiens
aacgaattcagtgatatcattaagtccagatctggttatccagaaaatcagtgctgtggataaagatgagccatccaatggacaccagttttact

SEQ ID NO: 700406 - DNA, 142 bp, Homo sapiens
tcagatactgaatgccgtgaaagtgacgccttcgctcaacgaggacctgcaggtggaagtgatgaagttgcccagcaggaggctgaaatgttcaaacgctacaatggaacatttccattacctggaatacaccaaagtcaag

SEQ ID NO: 700407 - DNA, 149 bp, Homo sapiens
tcggcccaggccgcgccatcctccagctttgccgccgcgctgcgcaagctcgccaaacaggcggaggagcccagaggcattggcagtggcaggcctgagccccctcctccagagaagccattcccctgcctcattccctaggccttttg

SEQ ID NO: 700408 - DNA, 100 bp, Homo sapiens
ctgcaggccattcccaagaatatacctcggaacaccgagcgcctctttcccatggtttggcatggacattgggggaactctagtaaagctctcgtacttt

SEQ ID NO: 700409 - DNA, 50 bp, Homo sapiens
agaaggaagaggtgtttgaaaaggcccgatgagagaaagggaaagttaag

SEQ ID NO: 700410 - DNA, 90 bp, Homo sapiens
agagcatgggtggtgctcgcacacagcaggatttaagaggtccatctgaactgtttactgtttgttcatcgattagcagaagagtccagg

SEQ ID NO: 700411 - DNA, 83 bp, Homo sapiens
caagatcccagtcacaattatcaccgggtatttagtggctagaagtgaccccaggatttttttattatcaagagagactagaa

SEQ ID NO: 700412 - DNA, 82 bp, Homo sapiens
gaagaggaggatccacctggagctgaggaaccggaccccggcagctttttcaaacctcagccaaccccggaagaacctttgg

SEQ ID NO: 700413 - DNA, 101 bp, Homo sapiens
cgccggggaggcagcgcgggatcccagcctcaggcgtgcgcggacggtgtgcggggcattgtctaaatataggagcagatctgcagatggggccaagaatt

SEQ ID NO: 700414 - DNA, 75 bp, Homo sapiens
atagacaccctccatgagagtgaagagggagcagaagtgctcatcgatgctctgtaggataagttctgaacgtcg

SEQ ID NO: 700415 - DNA, 75 bp, Homo sapiens
accaacccccaaattggctgggacaggttgactatagtcaatggggccaatggagccaagtgtatggaaacccac

SEQ ID NO: 700416 - DNA, 73 bp, Homo sapiens
aaatgagatcacctttacttgcaggagcatcatcatggggtctagtgccacagagattgaagaattggaaaac

SEQ ID NO: 700417 - DNA, 78 bp, Homo sapiens
gaccccgcggcgcccctcggcctcggagcaacgagcgcagcgccggttgacatcatggacatatgtgagtccatcctg

SEQ ID NO: 700418 - DNA, 75 bp, Homo sapiens
tgtacaaatacccctttgaattaattatggctcggggatctgatgagcttctttcttctggcatcattaacggac

SEQ ID NO: 700419 - DNA, 75 bp, Homo sapiens
ttggttacctatgtacctgttaccactttcaaaagaaaactcaatgtgagtagtgacactgtccagcatggtgtg

SEQ ID NO: 700420 - DNA, 74 bp, Homo sapiens
ccagcccgtgggcgagccgcccgcccgccgagcagccatgagttttccaagagataacttcaccaagatgtcca

SEQ ID NO: 700421 - DNA, 100 bp, Homo sapiens
taaaacgctttcaggtcggcgtctcgtttcatcctcacaacagccagattatcttagaagacctaggactccaaaaatgtttcccctgaaggacgctgaa

SEQ ID NO: 700422 - DNA, 100 bp, Homo sapiens
ggcttgccctggtcttgctcggccgatgaagtgcagaggtttttttctgtgttgggtggtgaattcctcaagtacatggaggcctttaaacccttcctgg

SEQ ID NO: 700423 - DNA, 73 bp, Homo sapiens
atcctgccggttgcgccttcttcctggacatgaccaactggttgcagagcctgaggcctgtgatcagatgtac

SEQ ID NO: 700424 - DNA, 51 bp, Homo sapiens
ggcgccaggacgaaggccctactgggcaagccacccacacagaatatgcct

SEQ ID NO: 700425 - DNA, 100 bp, Homo sapiens
gctctcgctgcggcagacgggctcccccgggatgatctacaggttggcgctgtacgtttatgagtacctgctgcacatcggtgcccagaagtcagcccag

SEQ ID NO: 700426 - DNA, 75 bp, Homo sapiens
aagaatcttgaccttttcaaacagagtatctgactgtcttctctcagatgattgcatttcatgatccagagctga

SEQ ID NO: 700427 - DNA, 100 bp, Homo sapiens
atccacgaggcctggactgacgatctgttcagcctgtgtgcgctgtaagagctgtggggcaactccaggcaagaactgggacgtcgagtggtctggagat

SEQ ID NO: 700428 - DNA, 100 bp, Homo sapiens
aagagaaaggccaatcactgctgactaagaattcattatattggcttagtacacagaaattctgcagatgattctcctgagaatgatattcctatggaga

SEQ ID NO: 700429 - DNA, 100 bp, Homo sapiens
ttcatagatttttgcaagaaaaggggccttctgtggattggggaaaaatccagagaccccctgaagattcggcaggtttaacaacttactttcatcctgg

SEQ ID NO: 700430 - DNA, 90 bp, Homo sapiens
gtcgggaaatggccgctgtgtggttgcaacggagataaattcccggaaccgcgattcggcgtgtcaggatgttgcttcagagtgtgaagt

SEQ ID NO: 700431 - DNA, 100 bp, Homo sapiens
gtggaagtggatgacgaaaactggatatacagagcccagcccagaaaaggtacaacttggccaagtagaaatcaaatgccccatcacagagtgttttgaa

SEQ ID NO: 700432 - DNA, 87 bp, Homo sapiens
tgaaaagccctcaagaaagcctcagtgatcttggtgccatagagagtctccgggtccctggaaagaggaagtatcattctgcaaagg

SEQ ID NO: 700433 - DNA, 87 bp, Homo sapiens
ggacagcggctccgtggagaacgtgctgcaagtcgggccgcgatgggcctcttggaacattggtgtgttcatctgcattcgatgtgc

SEQ ID NO: 700434 - DNA, 76 bp, Homo sapiens
catcttcctcctgtgcaccctcttcatcagaactcagcctcctcccaagctccctgtgggtcctagccacaagctc

SEQ ID NO: 700435 - DNA, 82 bp, Homo sapiens
aaaagactctcctccaccggagtgggattccgttccagttcacaaacctggcagctctgaaccatccgttcatcttcaagcc

SEQ ID NO: 700436 - DNA, 83 bp, Homo sapiens
agaaacaaatggaagtaaggatgcgttgaataagttttcaggtcctaggcctacttacaagcctccagtctcaaattatccag

SEQ ID NO: 700437 - DNA, 100 bp, Homo sapiens
tggccaccccgaagagttctacaacctggtgcgcttccggatcgggggcaagcggaaggtgatgcccaagatggaccagtcctcatcaccgggggcatcg

SEQ ID NO: 700438 - DNA, 75 bp, Homo sapiens
atatctgatgacagttgtatagcagaatacagattctgttcatcttgctctgaaattaaataattctgaactcat

SEQ ID NO: 700439 - DNA, 100 bp, Homo sapiens
gattctgaagagggtctggaggagccttctcaagaacagagatacgtaggtaacctttccagagatgtgacagaagtccttatacttcagttgttcagtc

SEQ ID NO: 700440 - DNA, 100 bp, Homo sapiens
gaaatctccacaaagtgacagtgaatgatggagggggagttctcagagtcattacaggcagctgcaatgactctccgcacggtattattgtcattgcaag

SEQ ID NO: 700441 - DNA, 103 bp, Homo sapiens
ggaggggctccggctggtctgtggtgagccaggaagaaagctcaggcccattagtgatgactctgaaagcattgaagaaagtgatacaaggagaaaagttaaa

SEQ ID NO: 700442 - DNA, 100 bp, Homo sapiens
ttatttatgtcatcaagaagaatgacgatggaactttatagtggtagcagagactgcaacattctggcttgggttccatccttatatgaaccagttcctg

SEQ ID NO: 700443 - DNA, 83 bp, Homo sapiens
tcagactccagcagccaagatggtgaagcagatcgagagcaagggctgggttacgacccctacaaccctgagctgcccaagcc

SEQ ID NO: 700444 - DNA, 90 bp, Homo sapiens
ctgtcacttcttgttttcaatccagagtccctcgattcttgcccagctgttcagatgcttctcagctgcttcagatattacagagtctcc

SEQ ID NO: 700445 - DNA, 100 bp, Homo sapiens
ggacttgaaagaagctgcagcggaggaaggcgaggatgaagatttgataaagtggaaggcactgtttgaggaagtccctgagttactcactgaggcagag

SEQ ID NO: 700446 - DNA, 82 bp, Homo sapiens
cccgaccccgtcccgaccctggccgccccgagcggagcctggagccatcccaggcctcaggacctgagttctccgacgccca

SEQ ID NO: 700447 - DNA, 100 bp, Homo sapiens
ctcgctctgggagcctagaatgcatcagtgcccttgtggcgaatggggctcacgtcgagtaatgaaagtactaaattcttccaatgagcatgtcattagc

SEQ ID NO: 700448 - DNA, 100 bp, Homo sapiens
acatcgtagcgaacacggtgctactcaaggcccgggaaggaacaagatcactcaaggtgaaggataatctactaataccagcactttgaatgaaaatttg

SEQ ID NO: 700449 - DNA, 50 bp, Homo sapiens
gatttccaatcatttctaaatgactcttcgacctctgaatcagaagtttc

SEQ ID NO: 700450 - DNA, 77 bp, Homo sapiens
ggcgtggctgctgctggcaatctggatggcccactgcgtgaccttggttcagctgtccatttcctgtgaccatctca

SEQ ID NO: 700451 - DNA, 140 bp, Homo sapiens
acatgtgcttggtgtcgtttttccttgagctgaacgtcttgcaacagtggccgcacgcataggtaaaataccatgaagattttgaaaaaacaaaggggagaggctttactcccgtcgtggacgatcctgtgacagagaga

SEQ ID NO: 700452 - DNA, 99 bp, Homo sapiens
ggtcgcggtgcctgggcccacagtcgcgccgcgctcgaccgcctggagaagctgctgcgctgctcgcgttggttgcacagacagcagatggtgtggatg

SEQ ID NO: 700453 - DNA, 100 bp, Homo sapiens
cggcagaatgctcttctggagcagcaagggaacaacaccctggacatggctccagagatcaacttgccgggcccaatgagcctcattgataacactaaag

SEQ ID NO: 700454 - DNA, 100 bp, Homo sapiens
cttttttgcaacatttcacccactcaaggattattgtctagagacctgctgaacaaccacatcttgaagtcagctatgtgtgctgaagccatcgttgcgg

SEQ ID NO: 700455 - DNA, 100 bp, Homo sapiens
gacgcgcggcgtttacccagcgcagcgttccaccgctcgggtttggctgggtaagaagtttgatagctgtaggactgggtgttgcagctcttgcatttgc

SEQ ID NO: 700456 - DNA, 100 bp, Homo sapiens
cctttatcaaattggaggctcatcagaacagacttgacaaaagtaagctgaagccaggaacaagagttgctttggatatgactacactaactatcatgag

SEQ ID NO: 700457 - DNA, 83 bp, Homo sapiens
taagcagacagaagagccaagcagctatggaggaaaatcaggacactcatgaggaccatgatacttccactgagaatacagac

SEQ ID NO: 700458 - DNA, 97 bp, Homo sapiens
aacgtgataagaagcacctggatgagacatttgctacagcatcccacattaagtcaacggaagtggcagtttttgtctttgataaaaaactgattga

SEQ ID NO: 700459 - DNA, 75 bp, Homo sapiens
gcgtgccctacttcaaggataagggtgacagcaacagctcggcgggctggaaggccgttcatattctgtgtgttc

SEQ ID NO: 700460 - DNA, 74 bp, Homo sapiens
cggaccggagactttggggcctaactaggtggtcataatgtcacaatctccttgcagtccaggactgggcatac

SEQ ID NO: 700461 - DNA, 82 bp, Homo sapiens
cggctctcggactctgctcctcactcaccgcgtggacacgatcgaaatggaggcaaacgaccattttaactttactggcctt

SEQ ID NO: 700462 - DNA, 75 bp, Homo sapiens
agagaatgacgatgacgtctaccgcagcctggaggagctggccgagtcctgaacgaggctgtgggggccctgatg

SEQ ID NO: 700463 - DNA, 75 bp, Homo sapiens
ggctgcggaccatttataaccgcgacttcaagatcagttgggatgaatgggttccggagagcagagtactcaaat

SEQ ID NO: 700464 - DNA, 50 bp, Homo sapiens
caaatcttaccttctggaccatgctggtcatcaatgctgctttgggattt

SEQ ID NO: 700465 - DNA, 90 bp, Homo sapiens
cgcctgtagctcgcgggcctcgcaggcatacttttttgatgcaccagagatggaccatctcccaacaactacagctactccaaaccaaac

SEQ ID NO: 700466 - DNA, 100 bp, Homo sapiens
cgccacttgcctgagcgccccggcggcccgagcgcgccccaagcccgggcgccaccgctgccacctccgcgagaggaggagctccggaagctgcgagaag

SEQ ID NO: 700467 - DNA, 83 bp, Homo sapiens
aagagctgtcctgaccaagaggaccagactttgttaatgaagaagtctggcaagttgatgagcagatagatcactacaaggaa

SEQ ID NO: 700468 - DNA, 73 bp, Homo sapiens
gtgacagtctgcatgtgcagttttcagactctaaaatagagctcaagcttgagaagagagaaccactaaaggg

SEQ ID NO: 700469 - DNA, 96 bp, Homo sapiens
gtggagaggaaaagaattaagaggcaagataattgttttcaagtgttggaaggctgctatggagaaatagagacggggtttcatcgtgttagccag

SEQ ID NO: 700470 - DNA, 75 bp, Homo sapiens
cagggctccaccccgtcgcctcgacagggcatggtgctgatgtgaaatgtgtagactggcatccaaccaaagggt

SEQ ID NO: 700471 - DNA, 51 bp, Homo sapiens
gctgggtaggaggacctgaaattgagctctggaagagaaatggccccagtt

SEQ ID NO: 700472 - DNA, 98 bp, Homo sapiens
gaagatccagagacattctccttaccaagacgttaagaaatgcacagactgggatggaaaggtgtctgagattaagaagaagatcaagtcgatcctgc

SEQ ID NO: 700473 - DNA, 101 bp, Homo sapiens
agtaatactgaatttgagaagtttgtgaactcaactggctatttgacagagggcatgcacgaactgttagcacctatagtctttgtccttcactgtgacca

SEQ ID NO: 700474 - DNA, 90 bp, Homo sapiens
gaaagagatataatttcccagaatcccaatgttcgatggttcagcaaaaggatgtcactgaaattgatattttagttaagaaccggggag

SEQ ID NO: 700475 - DNA, 82 bp, Homo sapiens
tgagatcaaatggcacttcattggccacctacagaaacaaaatgtcaacaaattgatggagcagcccgacggccatggaggc

SEQ ID NO: 700476 - DNA, 98 bp, Homo sapiens
ttcacttggcaaactcaacaaggtttggtgcacctcgatttggaggaagtagggcagggcccttatctggaaagaagtttggaaaccctggggagaaa

SEQ ID NO: 700477 - DNA, 100 bp, Homo sapiens
ctgtgtcctggttgagggtctccagggttctttggggcccgagattttaccaaatgttgcaagaactctggagttcttatggtagtaaaatgccggaaag

SEQ ID NO: 700478 - DNA, 75 bp, Homo sapiens
ttaacctccagctttttaagcaggccaactgccaaatagccatcttgtaccagagattccagagagtggtctttg

SEQ ID NO: 700479 - DNA, 96 bp, Homo sapiens
cgagcgggtggaggctctcaatgccgctgccctgcgcttctcccagctgcagggagctggagtcagatggcagcactatggaggactattcacagg

SEQ ID NO: 700480 - DNA, 100 bp, Homo sapiens
cagggagagcagacgcgccagacgcgccaccctcggggcgccgacggtcacgggtttgccttcccggattgggcctacaagccagagtcgtcccctggct

SEQ ID NO: 700481 - DNA, 101 bp, Homo sapiens
ctcgtcttatggaggtgtctgtaactgaggttgatgctatgaaactgggagtaaaggaaatgaagaaggcatacaagcaagtgaagatcgaccagattgag

SEQ ID NO: 700482 - DNA, 116 bp, Homo sapiens
cgttctaaaaagaggcgaaaggaagcaagcagttcagaagagccaaggaataaacatgcaatgaacccaaaaggttcagctctggactgttggaaactatcactggtatctcaagc

SEQ ID NO: 700483 - DNA, 82 bp, Homo sapiens
cacgttcttccaagaaaccaacattcccaacagccaccaccaccaccagatgatcgccatggatcggatgaagaagatcaaa

SEQ ID NO: 700484 - DNA, 98 bp, Homo sapiens
taattattgaaaacctcttttaccctgttaccctggaagttcttcatcaggcaattaagttggaatatgcaaggttggttaagttggcccaagaagac

SEQ ID NO: 700485 - DNA, 90 bp, Homo sapiens
cagcaaaggagactttataactataggatgtgttcagagcaacattgttttgttgacacaagcatttagaagaaagtttgtgattcctga

SEQ ID NO: 700486 - DNA, 75 bp, Homo sapiens
cgccaggccaccaccggccgcctcagccatggacgcgtccctggagaaggaggagaaggagaagcggcgcctcga

SEQ ID NO: 700487 - DNA, 82 bp, Homo sapiens
cttttccacagggaattgagttgccttggaccgcagttgccggccaggaatcccagtgtcacggtggacacgcctccctcgc

SEQ ID NO: 700488 - DNA, 96 bp, Homo sapiens
cccccgccccgccgcgcccgcggcgacctcacccactctggtctgtggcgggtgtgctgcatcgaaggattaccgagaggatgggatggatctagg

SEQ ID NO: 700489 - DNA, 100 bp, Homo sapiens
acgggaagcgatgataactgcgcggcattctttgagggacccccattcaagttcaagttcacaattggcattttctggcatccttaaatcttgtgtcaag

SEQ ID NO: 700490 - DNA, 74 bp, Homo sapiens
ccggctcccgcaccatggaggaggacgacagctacgttccctgacatcgtggagttctgcgaggccatggccaa

SEQ ID NO: 700491 - DNA, 95 bp, Homo sapiens
ctcctgaaggtcctaggaactggaggtgaaataaacagcgttgttgctcacacaaagcctgtttggtagtctcttcacatggacgcgtgtgacat

SEQ ID NO: 700492 - DNA, 100 bp, Homo sapiens
gaggggagatggcgtcctacgtagataacagcttccgccaggcggtgatgaagaatccccccgaaaggaccccccagagttactggaggtgaactgtttg

SEQ ID NO: 700493 - DNA, 100 bp, Homo sapiens
caggagtacgcacctgctggggacctgtttgacatcatccctccccaggttaaacatggtggttttgtttattaccaagaaggttgttgcttggttcgtt

SEQ ID NO: 700494 - DNA, 82 bp, Homo sapiens
tgttgttgctatcagaactgctaaaggagagaagtttgtcatgcaggaggagttctcgaaataatgcaaaaggtgtcccaag

SEQ ID NO: 700495 - DNA, 78 bp, Homo sapiens
gaatgttacaggatgtagtaattactataactttttgcggtgcacgttcttgcaagtgttggtggcctctacacttct

SEQ ID NO: 700496 - DNA, 75 bp, Homo sapiens
ggatactcagttgtggagagctgattcccaaatctaaagggtaatccaaatctatttctggaaccatgaaaattt

SEQ ID NO: 700497 - DNA, 97 bp, Homo sapiens
gcagcgaatcaagcgggagttcaaggaggtgctgaagagcgaggaggagcaccagcatgtttgacatgcggtgtgaggaggaggccgcggtgcagcc

SEQ ID NO: 700498 - DNA, 75 bp, Homo sapiens
aacaggccctccagaatgagctggagagactgaaagaggtgtaatggataggtaacagagaagacctcgtccctt

SEQ ID NO: 700499 - DNA, 96 bp, Homo sapiens
accttagctcaagaagagccctatgaagagatcattcacgatcttcccgtactgtcgagtaagctttccctgaatgtggtttctacggaatgtatg

SEQ ID NO: 700500 - DNA, 82 bp, Homo sapiens
gccttcaaagacaggagcgtcccggtgcggctgcacgtctcgcggatcatgctgttttaaaatcaaagatgggaaaatcgga

SEQ ID NO: 700501 - DNA, 75 bp, Homo sapiens
tgcatgcaaggacactgacaactctgagggagatgcctgaggaaacccagacccaagaccaaccgatggaggagg

SEQ ID NO: 700502 - DNA, 74 bp, Homo sapiens
gtctacagagaaaaagaagatatgtatgacgagattattgagttaaagaaggctgaaggggatgctaagggaga

SEQ ID NO: 700503 - DNA, 50 bp, Homo sapiens
ggaagaaattgttcagttcttctcaggtccaagcatctcattttgaaggc

SEQ ID NO: 700504 - DNA, 75 bp, Homo sapiens
ggggatgtggcagttgttcgaattaactctcccaattcaaagtaacaacatgctgtaccccaaggaagacaagga

SEQ ID NO: 700505 - DNA, 82 bp, Homo sapiens
gaccgaggactgtacgcctctcatgctgacctccacaggcttaagtatgatctcgtgaaaccttgagagaaactgaatgacg

SEQ ID NO: 700506 - DNA, 98 bp, Homo sapiens
tttctgctgttgtagcacagatttatgtaatgtcaactttactgagaattttccacctcctgacacaacaccactcatgaatggtagtgtctagaaag

SEQ ID NO: 700507 - DNA, 96 bp, Homo sapiens
gccctgggacaaccacgtctccggccacggttgaaatcacaaagattagacacctttttagataggtgttcttcagcaccactgacaacacggttc

SEQ ID NO: 700508 - DNA, 100 bp, Homo sapiens
ccaccacgaactgaaccagttctgcagtgtgcacacgcttcaagaggtctacattgagctgtttgagacagggcagggcattgttcatgcactgaccgac

SEQ ID NO: 700509 - DNA, 73 bp, Homo sapiens
acagaagacagtagccaaacacccagatgaacagcacagccagtactccaagttgctgctggcctctaaggag

SEQ ID NO: 700510 - DNA, 75 bp, Homo sapiens
ggtttccattacccctgccatcgtcaggtgccggtggtggtgtgcacattgagccccggtatagacagttccccc

SEQ ID NO: 700511 - DNA, 51 bp, Homo sapiens
gggccaagctccactgttcagatgcaaagcattgccatttttgaaaaatac

SEQ ID NO: 700512 - DNA, 100 bp, Homo sapiens
tgcagccccaagacagagcgctactcctggcagtgcgtcaatcagagcgtcctgtgcgggaaatgatcttcattggttagcatgtgccttatatgtggct

SEQ ID NO: 700513 - DNA, 78 bp, Homo sapiens
cctcacggagctgggcgacgagctgaccctgggagacatcgacgatggtcatcatgggccagtgctactacaacgaga

SEQ ID NO: 700514 - DNA, 74 bp, Homo sapiens
agttctttaagcccccatatctaagcaaaggaactgggatagtaaagctctgaaggatgaaaatctacctcctg

SEQ ID NO: 700515 - DNA, 75 bp, Homo sapiens
ggcggggagcgccggagttccttgtggccgacgtgcaccaaggtatttatgagcctccatttcttatactactgc

SEQ ID NO: 700516 - DNA, 82 bp, Homo sapiens
ccattccgtggagtggcggccagcagaggagcccaggcacgtggaggagttcagccccagagctgtctacaccagtggtaaa

SEQ ID NO: 700517 - DNA, 100 bp, Homo sapiens
agaaactcaaggagcggaaagactagatgccgatccaaaagctgacacagcccttggcactgatgatgtatatgatgaaaaaggatgccagtgtgatgta

SEQ ID NO: 700518 - DNA, 100 bp, Homo sapiens
aagtattgcatcctcacagacagccagttggtattgctcaacaaggagaaggaggaaaaactcattgtatccaacgaacaagaagttttgcgagttcatt

SEQ ID NO: 700519 - DNA, 95 bp, Homo sapiens
cgggatcgtgaccgagaccgtgaccgagagcgtgaccgagagcgcgaatatcgtcatcgttagaaggaagtgtttggattgtgagctatttcaga

SEQ ID NO: 700520 - DNA, 83 bp, Homo sapiens
aatttctctatgatgagcactaacactgtgggacttggtttgcctatgtcaagatcacagatgtatcctccactcctcgctgg

SEQ ID NO: 700521 - DNA, 122 bp, Homo sapiens
ctatgatagaacaacttagcaaaatgttctttactactaagcaccgttggtatcctcatggacggtgaccatgctttgggattttcatagtttgagtaattcctatgggctctaccacccag

SEQ ID NO: 700522 - DNA, 88 bp, Homo sapiens
ctctgcatatatcaagaattcaaggccagaggctaatgaaggcggccggggcgctgtggagaatgaggaggacctgccagaactgtcg

SEQ ID NO: 700523 - DNA, 128 bp, Homo sapiens
cagatccattacctgcggctcactatcgccatcctgaggcatgagaagtcccgcaagtttctgcttagcaatgtcctcacggatgataccatcggggaccttaagaagctgattgcagcccaaactgg

SEQ ID NO: 700524 - DNA, 88 bp, Homo sapiens
catctgccggctgctccgcaccccggggtcccaggaagggcggcccagtaaaagaatgtgtggatcatttaagtagagatgaggatga

SEQ ID NO: 700525 - DNA, 136 bp, Homo sapiens
agaaactgaagcaaaagatcagcgaggagcagcagcagctccagcaggcgctggctcctgctcaggcagaggcaaggctggcagcaaaacgggctgcccgggcagaagcaagagatatacgcatgagagaactgga

SEQ ID NO: 700526 - DNA, 75 bp, Homo sapiens
gcatggattgggagatactggatgtcatttgtcagagtgaaccgctgtggtccccgagttggtgtaagaaagaca

SEQ ID NO: 700527 - DNA, 75 bp, Homo sapiens
ctctggggaatgtttctaatgatgaaagcccttgcttctttctgtcgtgtcccattggcattgaggacttccgga

SEQ ID NO: 700528 - DNA, 98 bp, Homo sapiens
tcagcgagggcgccgagcaacttcgccggcacagtcttcactaccgtagaagaccttggctccaagatactcctcacctgctccttgaatgacagcgc

SEQ ID NO: 700529 - DNA, 98 bp, Homo sapiens
ccaacaatgcctttgaccagtatcgagacctgaatttcagggaagagccaggtcctgtttgctgtggtgttcactgcccgatatctggacctcttcac

SEQ ID NO: 700530 - DNA, 100 bp, Homo sapiens
caagtgaccaacagttgaatcaaagtatggacacaggagtacaagcgcaagctagccagagtttccctggtgcgcaaagaactcaggtcccggatccaga

SEQ ID NO: 700531 - DNA, 74 bp, Homo sapiens
aggttgaactggggtgaaccgctcttttgtgacagggacggcttgttgcgggcacttctcacccctgagaatct

SEQ ID NO: 700532 - DNA, 74 bp, Homo sapiens
tgaaatctgccatcgtctttctttgactagaccttcaatggagaaaccataaacaggaccttgccctgtcactc

SEQ ID NO: 700533 - DNA, 51 bp, Homo sapiens
agccgaaaaaggcagcagcgaaggatagagactcttaatggaacaatgatt

SEQ ID NO: 700534 - DNA, 98 bp, Homo sapiens
ggatttcccagaatgagcggcggaaaatgaaagacctgctggggaggaaacccaagctccgccgagcgcggcgggtctgtgccttcgcttcgcttcca

SEQ ID NO: 700535 - DNA, 100 bp, Homo sapiens
ctgctcacggccattcactgcccatgctgagcgcctctcacacagatgtctttggtggacttgggaaagaggttgctagaagcagcaagaaaaggccaag

SEQ ID NO: 700536 - DNA, 82 bp, Homo sapiens
tggctcttgccctcatcctggttctggaatcctcagttcaaggaaggaggagaatcagaaggtcgccattgaaactattgaa

SEQ ID NO: 700537 - DNA, 75 bp, Homo sapiens
gccgcagaggcttgggctgcaggcatttccggagagttcttttgaagtcacttcagaaggatctacatgaggaaa

SEQ ID NO: 700538 - DNA, 99 bp, Homo sapiens
ggacaagctcgtggaggaccacctggcagtgcagtcgctcatcagggcatatcagatcaggatcctcatgaccagccaaagagaagaagaattaggaag

SEQ ID NO: 700539 - DNA, 100 bp, Homo sapiens
ctctttcatctcttctggggcaggggccagggccagtttgcagacctgacagacgctgctgcccgcaacgcggagctgctccgccaggccaagcacgaag

SEQ ID NO: 700540 - DNA, 97 bp, Homo sapiens
ccgattatgtccattgttctcttggagcagctggtcatcatgagtgactgaatttctcccagtaacttttggtaatggtataaatggttgaaaatag

SEQ ID NO: 700541 - DNA, 75 bp, Homo sapiens
atggagggcatcttcaaccacaaagtacagtgctgtggataccaatccactttctctgtatgtcatgcatccatt

SEQ ID NO: 700542 - DNA, 83 bp, Homo sapiens
ccggtccccaacgcatcatgccagggagccaagcgtcctgcccggccgtgtccctggccagtgtccttccacctgtccacaag

SEQ ID NO: 700543 - DNA, 98 bp, Homo sapiens
agacattacatcaggaagatactgcagagatattctactccatctcattcattgtacagtttgcacctgagtttcaggtaggagatggaattggaatg

SEQ ID NO: 700544 - DNA, 101 bp, Homo sapiens
ggaggtcagcgggggtcagcagcagcggctccgagggcgcggcggacgcagattttgcaagaacgaggctcaaggatgtgagggacacagtattgacagct

SEQ ID NO: 700545 - DNA, 95 bp, Homo sapiens
atatcatctcagagcatcagggtcacatggaaggttgtggagatgttggaggttcccaataaacccacacaactgtcgtacaagtactactttat

SEQ ID NO: 700546 - DNA, 113 bp, Homo sapiens
atcaaatacttcatatttggcttcaatgtcatattttgggaatttatgcaaatattctcatgaggttctctcagaagagaacttcaaagtcctgaaaaatcacgaactctctg

SEQ ID NO: 700547 - DNA, 125 bp, Homo sapiens
aaaggactggaacagtacgggaaattgggtcacaagctgtttggtcactctcatcttgcaaaccagatgttcaggcggttgcttatgaggaaccaaaacactggtgctctattgtctactatgag

SEQ ID NO: 700548 - DNA, 100 bp, Homo sapiens
gctcaacctcatgtagaatccaggacaaggtgttgtgttggagcgctccatcttcagtgactttgtgttcctggaggcgatgtacaaccagggattcatc

SEQ ID NO: 700549 - DNA, 90 bp, Homo sapiens
gactccaaggcggagcaggccaaagtgaagaaggacaaattgatggccaggagatcactgccaccgccgtgctggccccctggcctaggc

SEQ ID NO: 700550 - DNA, 100 bp, Homo sapiens
gagacttcatttcattgctccctaaagaggaatctacagaagttttaaaagctcagtcagcagggacagtcagaagtgctgctccaccccaagagaagaa

SEQ ID NO: 700551 - DNA, 100 bp, Homo sapiens
gaagataaacgaggggctggaacacctcgccaaagcagagaaatagggcatggtctagtggcccagtcaggacgcggaaacactccctggaggttctgac

SEQ ID NO: 700552 - DNA, 96 bp, Homo sapiens
gcgatttcctccgcctcttccaaagcgtgtaaacaggaacatcgataagtagtgtaaaaacttgcacaatgaaatccgaagccaaggatggagagg

SEQ ID NO: 700553 - DNA, 75 bp, Homo sapiens
ggggagtcagccagacccccatcctgacaagagttttgcggcctccaggtggtggatccaatttttcattaggtt

SEQ ID NO: 700554 - DNA, 75 bp, Homo sapiens
cggcgttgtcaacctcaccaaccacctgcaccagggattgaagaggttaatgaccatttgccagaaacactttcc

SEQ ID NO: 700555 - DNA, 75 bp, Homo sapiens
cttggcattacgcaggccagcaactcccagctcaatgcaatgaggatgatgtggacctggaagccctggtgaacg

SEQ ID NO: 700556 - DNA, 83 bp, Homo sapiens
aggagaagcccccagaaccaggcccccaactcagccatctgcggaggtcaaggtgctggagaatctggtaaaagcaccattgt

SEQ ID NO: 700557 - DNA, 100 bp, Homo sapiens
tccgggagtggttcgctacctttctgtttgtgcagaaactgaccctcctccaggtagccagcagacagaaacatcttcctaaggatacccttctatctcc

SEQ ID NO: 700558 - DNA, 76 bp, Homo sapiens
ggctccgtcgtggaagcaggactgcgccgcgtcttcctcaaggttaaacccatccagagtaatggctgcggcctta

SEQ ID NO: 700559 - DNA, 100 bp, Homo sapiens
ctatggccagagcagctattcttcttatggccagagccagaacagagccagatgaccaagatgctccagatgaacatgagtcgcctccacctgaagatgc

SEQ ID NO: 700560 - DNA, 83 bp, Homo sapiens
cggcgagcagccgccgcccgccgcacccatgagtttggtgccctggttgtcagatgttggaaagcagtaggacggaacatact

SEQ ID NO: 700561 - DNA, 100 bp, Homo sapiens
gtatgttgtaccttgtgacagaatatgccaaaaatggagaaatttttgataccaatggggaaaacattgcagaatcactggttgcagagggcttagccac

SEQ ID NO: 700562 - DNA, 74 bp, Homo sapiens
aatgaggcacctaaaaattgtataccgcagattcaggcctattttcacaatggagactatcctggagaaccctt

SEQ ID NO: 700563 - DNA, 100 bp, Homo sapiens
tttataggaattagaggaaggtggaagaagctcattccagagtgtccacagctcaagtgagcctcttaggaacctacacctggacattggggcactgggg

SEQ ID NO: 700564 - DNA, 100 bp, Homo sapiens
taccagccggcagctccggagctgcccgcgccatgtccgcgcacaatcggggcaccgagctcggcagtttggtggttatgccaaggaagcagactacgta

SEQ ID NO: 700565 - DNA, 100 bp, Homo sapiens
tgggggcgccgcccgcgcccgggaccgacccctctgctcgcggccgcgcctttgagatgccttcaattaagttgcagagttctgatggagagatatttga

SEQ ID NO: 700566 - DNA, 75 bp, Homo sapiens
cgccattggagacttggtaaagagcaccttgggacccaaaggcatggtattttctaaggaagagctaaggaagtt

SEQ ID NO: 700567 - DNA, 102 bp, Homo sapiens
cccactcagaaggtgccctctttgcaacatttcaggaaaacagagaaagaagtgataggagggctctgtagacaatgcagatcttcgtgaagactctgactg

SEQ ID NO: 700568 - DNA, 82 bp, Homo sapiens
ggcctcgactacggcgagcctgagcgcggcggcggcccacgcgcagcgacagggagagctcaccatggatgatgatatcgcc

SEQ ID NO: 700569 - DNA, 100 bp, Homo sapiens
ctgagctgcgaggaaaatggcggcgggaggttggggtgactcagtgggaacgccatctgagcggggcatgacctatgacgcactccacgtttttgactgg

SEQ ID NO: 700570 - DNA, 82 bp, Homo sapiens
gggagggagccatgaagcattacgagatacctgaaaaaagcggcagtctgcaacccagaagagggccttacttggaacctaa

SEQ ID NO: 700571 - DNA, 73 bp, Homo sapiens
tcggcctcccaaagtgctgggatgacaggtgtgcggcgtgggacaggggtgcttgtggagttcagtgagctgg

SEQ ID NO: 700572 - DNA, 75 bp, Homo sapiens
ttggattcaaagacagcccagaatctctggtgaagagtctttgcaggttggtggtcaacagggtcagagatgcca

SEQ ID NO: 700573 - DNA, 100 bp, Homo sapiens
aaaagatggaggacctgcggcgggagaaggatgctgccgagatgctgggcgccaagatcaaggaaattgatgggaaggctctgttcctactcaagagtga

SEQ ID NO: 700574 - DNA, 98 bp, Homo sapiens
ggaggacctcacttccccggggtgtaataatgttaactgaggacccagatgatgtggtaccagttggccaaagaagagcctggtgttggtgcatgtgc

SEQ ID NO: 700575 - DNA, 50 bp, Homo sapiens
ccggctgccggcccccgctctgccctgagtgatcagcagctggactgtgc

SEQ ID NO: 700576 - DNA, 101 bp, Homo sapiens
agaatacaaaggcaatgcttatcatttaatgcataaaaactgcaatcatttttcttcagctttatcagagaaaatatttacaccagcagctccagttcata

SEQ ID NO: 700577 - DNA, 100 bp, Homo sapiens
ggagaaaagcgtggaggcagcggccgagttgagcgccaagcattcgcaacgacaggcgcctcctctgccaaccggtttgtcagcatcggaccccgggacg

SEQ ID NO: 700578 - DNA, 100 bp, Homo sapiens
caggagccttggagtatgatcagcagaaaaagtcctacctggagcgaagcgttaaggaagctgaggacaacatccgggagatgctgatggcacgaagggc

SEQ ID NO: 700579 - DNA, 74 bp, Homo sapiens
gacgtcgtgatccagaagtccagagctgaggactgcctgtttgcaggagaacaaggggtctgtggaaatcatga

SEQ ID NO: 700580 - DNA, 127 bp, Homo sapiens
cacccagtcggtgggccttagtctgcaacttgtgcaagttgaagacgggggcttgtattcaggtgagaacccgcccggaggaagaaggaaggcgcgggccggggattaggagacggaggcggactcg

SEQ ID NO: 700581 - DNA, 74 bp, Homo sapiens
ggacaatggggacccgggacgacgagtacgactacctattcaaaggatgagagggccttaccaaaaggagattt

SEQ ID NO: 700582 - DNA, 90 bp, Homo sapiens
gtgaggggtaacaagatggcgaccgagacggtggagctccataagctaaaggaggaggaagccaagaatctggtgagcgaagccatcgca

SEQ ID NO: 700583 - DNA, 58 bp, Homo sapiens
caatctcctcagggaaggggcagcacaggctagtagtagaatgccaacaagaaagatc

SEQ ID NO: 700584 - DNA, 73 bp, Homo sapiens
ggatattgaaatggacagtggagatgaagcctaagaatatgatcagcaagatgtgagtgaattcacacacaag

SEQ ID NO: 700585 - DNA, 100 bp, Homo sapiens
ggttcgggctggttgttccgttgcgagctgcagctgcgatctctgtggtaggcccaggacacatcggataaccatcaccaacttctgcctcgggaagcat

SEQ ID NO: 700586 - DNA, 96 bp, Homo sapiens
gcacactcaacggccggaccggctggttccccagcaactacgtgcgcgaggtcaaggccagcgtccaatatcagatggaaatgatgcggagccttc

SEQ ID NO: 700587 - DNA, 49 bp, Homo sapiens
gctgtaatatttcttttcactcccaggaaaatgtttcaacgtgcgcaag

SEQ ID NO: 700588 - DNA, 80 bp, Homo sapiens
acgaggcaaggagctaaagcagcgtgcgttcagccctgggcagaattacctgattctaggacaaaggaaattgaagccat

SEQ ID NO: 700589 - DNA, 100 bp, Homo sapiens
cttttgatgttgaaaggaaaaagccagctatgaccgttcatggcgcttatgggatttggaggctcaagaggagatcctgcatcaggaaggccatagcatg

SEQ ID NO: 700590 - DNA, 100 bp, Homo sapiens
tcatccataatgaacttctctggaccaacttgaccgtctactggaaatctgaatgctgttatcaccagttggtagcaagaccttccagtataaactatat

SEQ ID NO: 700591 - DNA, 75 bp, Homo sapiens
aaaactggatgttggtagaaaaagcaagagtttgttatatagcagtgttaagtgtgatgcttccataatacattt

SEQ ID NO: 700592 - DNA, 100 bp, Homo sapiens
ctttcgggccgctttccaggaagcagcaggatgcgccgctccactgtcggtagcaacaaggacattcatcttcaaagaaatctgaagattctctacttag

SEQ ID NO: 700593 - DNA, 123 bp, Homo sapiens
tgctacaaatggaggaggaggaggacgacgacgatggggatatcggccactgtgagcatgcatttcaggttgttggcgcagctctgctccatgatgtcgatctgaaacccagattttccttct

SEQ ID NO: 700594 - DNA, 73 bp, Homo sapiens
accacattgtcaattcacaccgccaaaagaatgcaatggtgtaaagattccagttgatgccagtaaacctaat

SEQ ID NO: 700595 - DNA, 89 bp, Homo sapiens
ccgcgttcccagcccgggtccccgcgttcacagccccagcgcaggagcttttgatgggaggccagcagactatttattcatgctcctct

SEQ ID NO: 700596 - DNA, 135 bp, Homo sapiens
ggtcttaccagagagactccttcaaggctggaggctcagcaagtgccatgctacagcccctgcttgacaaccagctcttctgttagaaatagtatctttgttttcctttgctgttcctcaatcccctactcttca

SEQ ID NO: 700597 - DNA, 50 bp, Homo sapiens
ctgctattgaaagagagtatgcacagtcctattttgtaacggattatgat

SEQ ID NO: 700598 - DNA, 97 bp, Homo sapiens
aagaagaaaagcgaaaagttcaaacacacgtcagcagaatatgccgagtttctacattgcaaaggaaagaaatttacagattttgatgaagttcgcc

SEQ ID NO: 700599 - DNA, 83 bp, Homo sapiens
cggcattctcttcaatcatgagagtcccagaagagtgtgtaaaggttgccataaaggacaaacaagtgaaatacttcatacat

SEQ ID NO: 700600 - DNA, 100 bp, Homo sapiens
ttcatccatcgcaagaagaagatcctcgctcaaggagcacccccggggcaccctcctgtccgatggcagcccggccctgtccaggaatgtcggtatgacg

SEQ ID NO: 700601 - DNA, 83 bp, Homo sapiens
caacaagttaagctgaagaccgaagcaagagctggttcagtaatctcaggggcgatataatcaatgaggtggtcctaaagttg

SEQ ID NO: 700602 - DNA, 108 bp, Homo sapiens
cttatttctctgctgagtgtccagatcctccaaagacagatctggtgattcgcaaggggtggctcaccatcagcaacattggcatcatgaaaggcggctcgaagggat

SEQ ID NO: 700603 - DNA, 96 bp, Homo sapiens
caacatcaaggctctcttccgcaagggcaagtggctcacaggcccggggcattcaaagctgagctgtccaagctggtgattgtggccaaggcatcg

SEQ ID NO: 700604 - DNA, 108 bp, Homo sapiens
cccccctaggagtgcaccacccccggagcccccctcaacacggaccgcgcccgccgggcacacaagaatggtcactggtcctggcggcagagaccacgtcccagcagg

SEQ ID NO: 700605 - DNA, 51 bp, Homo sapiens
gcgctgccgccgctctgaggagttaaagttgctgatatgtgttcaagatga

SEQ ID NO: 700606 - DNA, 98 bp, Homo sapiens
agcatacattatgctgccgcctatgggcacaggcagtgtctggaattgcttgcccaacagaaggtggaaaaaatcactgaaagtaaaaataaactggc

SEQ ID NO: 700607 - DNA, 83 bp, Homo sapiens
gggatgagaaggatctaggctgttgtaccaagcactacaacacaggtcaccatcagaaaagctaagtttgctgtatagtgagg

SEQ ID NO: 700608 - DNA, 83 bp, Homo sapiens
caccagtcccaagcctacctcccagaaacattaaacctccgtttgacctaaacctatttgatggctttgcagatggactagga

SEQ ID NO: 700609 - DNA, 74 bp, Homo sapiens
accggcaacatggtgcggtcggggaataaggtgggcaccatgtccttgaagcttcaggcaagcaatgtaaccaa

SEQ ID NO: 700610 - DNA, 80 bp, Homo sapiens
gaccgctctcagctggtgaagacatgacgaccctggactccaacaacaacacagggaaatcctcattgacgattcaattt

SEQ ID NO: 700611 - DNA, 50 bp, Homo sapiens
aagggaccaaggtggaaatcaaacatatgccatctctatggcccgaaaaa

SEQ ID NO: 700612 - DNA, 100 bp, Homo sapiens
cccaagaagaccattcagatgggatctttccggatcaatccagatggcagccagtcagtggtggaggtcccaatgccatttcggtgagcctgtccccaat

SEQ ID NO: 700613 - DNA, 100 bp, Homo sapiens
ccccgcgcgccaggcaggcttcgcggctgcgcccccggcccgcgcaggaatccctttgcccacgtccagctgaagccgacagtgaccaacgacaggtctg

SEQ ID NO: 700614 - DNA, 75 bp, Homo sapiens
ggaaaatggaatctatattcagaaaagttgaaacagactggcacatggcgagtgttgtgtataaaggaagttgaa

SEQ ID NO: 700615 - DNA, 98 bp, Homo sapiens
ccccgtgccccgaagacataaatccctgagtgcccgggaggagccttaacaagcgcacggagccctcaaggtttgttggagactgaaccgttgcaagg

SEQ ID NO: 700616 - DNA, 90 bp, Homo sapiens
gtccggggcttgccctggtcttgctcggccgatgaagtgcagaggtttttttctggatctgcatctccaatggatactgaggggtttggt

SEQ ID NO: 700617 - DNA, 90 bp, Homo sapiens
caacaatggaacactttcatcagttttactctatgaagtcttacactccatatttcattctcctgtggagtgctgttgggatagcgaagg

SEQ ID NO: 700618 - DNA, 50 bp, Homo sapiens
gggactgggagtcgttagtgaggccccttcacagatgtagtcactacaaa

SEQ ID NO: 700619 - DNA, 51 bp, Homo sapiens
ccttcgccacccactattggaccagtgttctaagaacggaagcatctgggc

SEQ ID NO: 700620 - DNA, 100 bp, Homo sapiens
agacgatattgatattgaagcaatgcttgaggctccttacaagaagagcttgggaaagtcgaggtgacggtgtttgaccctgactccctggaccctgatc

SEQ ID NO: 700621 - DNA, 100 bp, Homo sapiens
aaaacgccggaattgtcctttccaacatccagagctgcatcattccttggggcaaaatgtggacaagggttggtgttagcatcaaaatgagcagtttcaa

SEQ ID NO: 700622 - DNA, 75 bp, Homo sapiens
gggccacagccggactcacggcctgcactgctgccgcaggatgtagcccatcggatgctggccacaggcgagtgt

SEQ ID NO: 700623 - DNA, 100 bp, Homo sapiens
tgaggacccacctgcagccgccgccgcgatgcccaccatgcggaggaccgtgtcggagatccgctcgcgcgccgaaggttgcatcataaatacaaaggac

SEQ ID NO: 700624 - DNA, 75 bp, Homo sapiens
gaggcctccgatctgcagggactggtagtctgtgagcagcagagcagggaagactcagacgatgccctgctgaag

SEQ ID NO: 700625 - DNA, 98 bp, Homo sapiens
caggatggcttggccttgcacataaggcgcattctacattctaaaggggagctcagtgaagatagacataaacagtatgaggaatttgctatgtctta

SEQ ID NO: 700626 - DNA, 50 bp, Homo sapiens
ccacgctttctgtacagcctgcagaactggcaagttaaagtcttcagagc

SEQ ID NO: 700627 - DNA, 58 bp, Homo sapiens
aagcatccctgcccttggatggatagctgtgggtacagctctgccggggggggaaaaa

SEQ ID NO: 700628 - DNA, 100 bp, Homo sapiens
aagtctggacatcaatgcctttaggtcagaaaaagtggacagggcagtgctgaaggaactgagtgaaaaactggaactggcagagaaggctctggcttcc

SEQ ID NO: 700629 - DNA, 50 bp, Homo sapiens
gcctcccgagtggctgggattacagtagagacgaggtcttaccatgttgc

SEQ ID NO: 700630 - DNA, 82 bp, Homo sapiens
tgccggctgctccgcaccccggggtcccaggaagggcggcccaggtcagcccaaggccaaccccactgtcactctgttcccg

SEQ ID NO: 700631 - DNA, 98 bp, Homo sapiens
gcccagacaagtccccagggaatgccacagcatcctccagcacctcagacagctggaaatgatccctattgttttgtggagtttcatgagcatcgtca

SEQ ID NO: 700632 - DNA, 100 bp, Homo sapiens
gagttcttacaacatggcagacattgacaagtgatggcttggacaacagtgtagcttcccccagcacaggtgacgatgatgaccctgataaggacaaaaa

SEQ ID NO: 700633 - DNA, 80 bp, Homo sapiens
ggaaggctctggataaggaccagtacctgcccaggaaactgatccgtgggcgtgagcgcttcgagatgttccgagagctg

SEQ ID NO: 700634 - DNA, 73 bp, Homo sapiens
caccaagagggcgggagaactcactgaggatgaggtggccgaagacgcagcagaagtccagaccggagacgtc

SEQ ID NO: 700635 - DNA, 100 bp, Homo sapiens
ctcatgcagtagaaaagataaatcctgatgaaagagaagaaatgaaagtttctggtggagccgccaccaaaatgcagattttcgtgaaaacccttacggg

SEQ ID NO: 700636 - DNA, 89 bp, Homo sapiens
gtgaccaggagcccacagtgggcgaggaacttgctactaccagcaccatgccctaccaatatccagcactgaccccggagcagaagaag

SEQ ID NO: 700637 - DNA, 100 bp, Homo sapiens
atttttctagtctataaaatggagataacaacagcacctacctcagaagactgttatgaagaagttcacagttaccagccaagaaaacttgaaaatgagc

SEQ ID NO: 700638 - DNA, 100 bp, Homo sapiens
tgttcaccacggagcatgaagacagagcgggtgactggaggtggctccccagtggacagaggactgcagaaaatcaacctatcctccttcaggaccaacg

SEQ ID NO: 700639 - DNA, 75 bp, Homo sapiens
gcaacctggaattggaacggaggttcagattcagaacaagaaagtggacatctctaaggtctcctccaagtgtgg

SEQ ID NO: 700640 - DNA, 80 bp, Homo sapiens
cttcgacttagccctgctccaggaatgggacctcgagtcactgtgctgcctgtggaggaaccgattgtgtccacagatga

SEQ ID NO: 700641 - DNA, 100 bp, Homo sapiens
tatgacttcctgcccaactactgctacaacggctctaccaaccggccacatccacgtcctccgagcctacatcaagacccaagtgaacaaagagctggag

SEQ ID NO: 700642 - DNA, 82 bp, Homo sapiens
ctaagcctgcacagccgcggcggcagcagcagtgagaggtgtccttaagtttgctcgcttggtcaagtcctacgaagcccag

SEQ ID NO: 700643 - DNA, 100 bp, Homo sapiens
gattcgcagtggtcgcttcttctccttggctcgtggtcccaagaagcatctgaagcgggtggcagctccaaagcattggatgctggataaattgaccggt

SEQ ID NO: 700644 - DNA, 100 bp, Homo sapiens
cgcgggacaaaatcattttcctacacgggaagtaccaaaagaattggtggagctccatttgaagctgatgaggaaaattggcaaatctgttactgcagac

SEQ ID NO: 700645 - DNA, 75 bp, Homo sapiens
aaagaagatgcctcgaactaaacaaattcatcccagaaatctaagagggggagtcggtgaagtacttcctggaca

SEQ ID NO: 700646 - DNA, 82 bp, Homo sapiens
ctactctctctttctggcctggaggctatccagcgatctcattttgcccaacggtggtactccagcaggtacttcaagtcca

SEQ ID NO: 700647 - DNA, 150 bp, Homo sapiens
tgggaaaccagagtatttggggtctacctcctgtggtttttgattcaagtcctgttctacctactgccaattggaaaggaggcaagtgaggcctatctggttggcctttttgaagacaccaacctgtgtgctatccatgccaaacgtgta

SEQ ID NO: 700648 - DNA, 80 bp, Homo sapiens
ccggcgcgatgcccttcaggaaagcaccagatactgctacaccatctcatcggcatggacctatatgtggcagcaagtcc

SEQ ID NO: 700649 - DNA, 50 bp, Homo sapiens
cctattatcaggccgcggcagcaggaggattctctatgggaggatgcatg

SEQ ID NO: 700650 - DNA, 90 bp, Homo sapiens
cgccatcgctgcctcggaccccgccaccaaggtagcagaaggtcaagaaatttgtgtgattgaagccatgaaaatgcagaatagtatgac

SEQ ID NO: 700651 - DNA, 80 bp, Homo sapiens
cattacacagtgttaacaatgcatccacagaggttttgggatttgagattgacgcggtgaactctgtccagttttcaaac

SEQ ID NO: 700652 - DNA, 74 bp, Homo sapiens
gcccatgctgcagcgggaaagagaacagagagtcctggggacaggtgctgggtaggccaggtttcagcatcgca

SEQ ID NO: 700653 - DNA, 95 bp, Homo sapiens
tacgtgtgctttttcaagggagctgataaagaacttcttcccaaaatggactctgttacggcatggtgcaaatccagatctgagagatgaagatg

SEQ ID NO: 700654 - DNA, 74 bp, Homo sapiens
ggtgttacaccagcctgtccggacccgctgtggccacgtgtcaaaatgcagatcttcgtgaaaacccttaccgg

SEQ ID NO: 700655 - DNA, 74 bp, Homo sapiens
gtgtagcgtcgccgttactccgaggagataccagtcggtagagggttcattttccagacactgaaagagcagaa

SEQ ID NO: 700656 - DNA, 73 bp, Homo sapiens
aacagattacggatgctgcattgtggaacttggaaaaacaaggtcatagaaggttatgaaatagcctgcagaa

SEQ ID NO: 700657 - DNA, 99 bp, Homo sapiens
tgcggcagtaccgagtgggcaccgaccgcacgggcttcaccttcaaatacagcctcctgctcttcatggatgaagcagacgccttccttcggaagcgag

SEQ ID NO: 700658 - DNA, 100 bp, Homo sapiens
gaaggacactgcacagatcatgttcatggcagggctcccgataggctctctcatcttcaggctcataactgacaagtaaaggttgttgctgttgatgcag

SEQ ID NO: 700659 - DNA, 100 bp, Homo sapiens
gccattcatgaacaggaaggagaggacgggctttgaataaaaaacaggtcctgggaactccaacaagggagcaaatcagagaaatgaacccaaactacac

SEQ ID NO: 700660 - DNA, 113 bp, Homo sapiens
ttctctcaaggactactgcaccagaatgaaggagaaccagaaacatatctattatatcacaggtgctggagaatctggtaaaagcaccattgtgaagcagatgaggatcctgc

SEQ ID NO: 700661 - DNA, 98 bp, Homo sapiens
aaaactcgtggaaagacttcatgcagagaacgcccatataaatgtgaactttgtccttactcaagttctcagaagactcatctaactagacatatgcg

SEQ ID NO: 700662 - DNA, 82 bp, Homo sapiens
tcagacccatttccagtcatgagttaatgttcgtgaagaaattgaagagttttttccaagaatgtggaagataaatcaagat

SEQ ID NO: 700663 - DNA, 82 bp, Homo sapiens
cgcggcggcagcagcagtgagagttaccggtattgtaagaacaagccgtacccaaagtctcgcttctgccgaggtgtccctg

SEQ ID NO: 700664 - DNA, 75 bp, Homo sapiens
gagggaacctacccagtccattgctgcctgctacaagatctctgacatctacattagtggagaatcaggggatat

SEQ ID NO: 700665 - DNA, 98 bp, Homo sapiens
gatcatccaagtggaggttcctacagagattcatatgagagttatgcaaaccagtccagctacgggggcccagccagccagcagctgagtgggggtta

SEQ ID NO: 700666 - DNA, 100 bp, Homo sapiens
cctggacgacgcccggcgccagcacatcgcaggtctgagaaggatggggcagccactggagtggatgccatctgcacccaccaccttaaccctcaaagcc

SEQ ID NO: 700667 - DNA, 80 bp, Homo sapiens
atgggtgatgtcaaagagaactatcttgaaacatttatttccagtccaaagtaaaaatgcatttgcaaagggagaaaatg

SEQ ID NO: 700668 - DNA, 83 bp, Homo sapiens
agaaggcaaagatgtcggagcgaaaagtattaaacgacttctgcacggacctggccgtctccagtgccaacttcattcccacg

SEQ ID NO: 700669 - DNA, 80 bp, Homo sapiens
agatatggcgcaactgcggcgcgatccagcattcggaggcaaacatgaagctccatcctctccaatttcggggcaaccat

SEQ ID NO: 700670 - DNA, 82 bp, Homo sapiens
ctgtttcactgaggccatctatccgatttcaaggaagccaagggatgaggacggggacttggttgccttttccagtgacgag

SEQ ID NO: 700671 - DNA, 78 bp, Homo sapiens
ggaattccactgagtggtaatggatgatgcagttcaaataactaagtgcaaggatgatgctgaaaggaataacaaggc

SEQ ID NO: 700672 - DNA, 100 bp, Homo sapiens
ggagcactcggtcatgtacccggtggactcggtgaaggcagaggtggaggagacactgaagcgactgcagagccagaagggagtgcagggaatcatcgtc

SEQ ID NO: 700673 - DNA, 74 bp, Homo sapiens
gcagcgcgagctgggaccagcgtctcggaggcgccgcaggtgtcttcaaaaacaaacatatttaaaagatttta

SEQ ID NO: 700674 - DNA, 75 bp, Homo sapiens
tgatcctttcatctcagcctcctcagtagctgagactacagcctgtggatgtggacaaagattcatccctagtga

SEQ ID NO: 700675 - DNA, 75 bp, Homo sapiens
ccggtcgttcccgttcaggagcagctcctgtcttcgttcctggctagaacaagacacctcctgtccaacatgcag

SEQ ID NO: 700676 - DNA, 81 bp, Homo sapiens
attcccgacggcccgcccctcaaggacaacctcggcctgagacaccggaggaccggatgaaggatttgggggcagagcact

SEQ ID NO: 700677 - DNA, 98 bp, Homo sapiens
atggatgtgtctggtgtgggtttcccaagcaaggttccttggaagaagatgtctgcagaggtgaagcctgatggcacatacgtgaaaccgctgagtaa

SEQ ID NO: 700678 - DNA, 83 bp, Homo sapiens
cccgtctgcttcgggcctctggaatttagcgctcgcccagctagccgcagaaatcttcccaaggctgcagacaccgacggatt

SEQ ID NO: 700679 - DNA, 88 bp, Homo sapiens
aagcagttcagaagagccaaggaataaacatgcaatgaacccaaaagggcccacggtggcagtgggaacttcagctggtcttcgtcaa

SEQ ID NO: 700680 - DNA, 76 bp, Homo sapiens
gtatgacctcagctcatggctctgcttcagatctgaaatagctcaactcagtcaagaaaaaaggtatacatatgat

SEQ ID NO: 700681 - DNA, 98 bp, Homo sapiens
cgcctgggggcaccgctgccgttccgaggtgctggagaatctggtaaaagcaccattgtgaagcagatgaggatcctgcatgttaatgggtttaatgg

SEQ ID NO: 700682 - DNA, 75 bp, Homo sapiens
ctgcagtgggggcgtaaaggctggcagcctccccgggtgcctccgcgcctttctgagaaaagtctacagcattct

SEQ ID NO: 700683 - DNA, 95 bp, Homo sapiens
gagcacagcaatggaggaaacagctatatgggaacaacatacagtgacgcttcacaggattttgtggaagtataatactttgtcattatgagatg

SEQ ID NO: 700684 - DNA, 83 bp, Homo sapiens
agggaaccctggtcaccgtctcctcagatctgccgacaccccaggccatcgagccccaggccatcgtgcagcaggtcccagcc

SEQ ID NO: 700685 - DNA, 89 bp, Homo sapiens
tttccatgcttcaagtccatcatgttcaggagggtatacaaggaaaggttaggacttcctccaaagatagtgattggttatcagtccca

SEQ ID NO: 700686 - DNA, 82 bp, Homo sapiens
cattgaagtttcttgcaaaccacactaacatattactggcatcttcaatctggaaacagtggagggagtcgctatattgcag

SEQ ID NO: 700687 - DNA, 85 bp, Homo sapiens
ggccgccgctggagaccgcgggacctggcgctgcagcgagggccggtgggaaagtcagcaggatgtatcccaaaccacagtttcc

SEQ ID NO: 700688 - DNA, 50 bp, Homo sapiens
atggacaaggactctttttctgcagtgtttggccagcgcttggatgagac

SEQ ID NO: 700689 - DNA, 80 bp, Homo sapiens
attaaagagggtgtacgggagtttcttggtaaatccagaatcaggaaatactcctttacaccttgctgtgatgttaggaa

SEQ ID NO: 700690 - DNA, 75 bp, Homo sapiens
ttgggaaacagtcttcaggagagcctagatgagctcatacaggcatctccttggaaacaatgccatctttgaatg

SEQ ID NO: 700691 - DNA, 100 bp, Homo sapiens
ctttgctaaagtcagtgatgtgaaaagacttgaaatggccaatggagatcttcgtggatgatgagacgaagttgacgctgcatgggttgcagcagtacta

SEQ ID NO: 700692 - DNA, 75 bp, Homo sapiens
cgccgattcctcctccttggtcgccgcgtccttggctggcgtggtgctttcttctgcgacctggtactcatctac

SEQ ID NO: 700693 - DNA, 75 bp, Homo sapiens
caaataccacgttctaatttgtgcatgggagctaaaatagcagaggttgaaaagataattgcagttgcctgggac

SEQ ID NO: 700694 - DNA, 101 bp, Homo sapiens
ggcggcggcggcggtgccggagcgcgagcagagcggagacccccaggtcctgcgggcgcgagagcatcagtgatgtcacgtttggagcaggggtcagttac

SEQ ID NO: 700695 - DNA, 99 bp, Homo sapiens
ggatcatgaggtcaggagatcgagaccatcctggctaacaagcgggtccatatggaatatttgctggtagggatgcctccagaggactggccacatttt

SEQ ID NO: 700696 - DNA, 96 bp, Homo sapiens
gtgaagaggaagccagaagatgggagagacatttttgaagtctccagaaatgctttgggttcatctttcattgctgcaaggaacttccatgcctct

SEQ ID NO: 700697 - DNA, 48 bp, Homo sapiens
tcgaccattccaaaaaaatcggttgcatcataaatacaaaggactgaa

SEQ ID NO: 700698 - DNA, 100 bp, Homo sapiens
cctgtgtctgcctccttcttgaatagcccagtgaattcatctaaacagaggcggggtttcaccatgttgcccagactggtcttgaactcctgagcttaag

SEQ ID NO: 700699 - DNA, 82 bp, Homo sapiens
tcccgctccctcacacaccggcctcagcccgcaccgggggatatgagactttctactcggaatatcctgagtgttgcgtgga

SEQ ID NO: 700700 - DNA, 100 bp, Homo sapiens
caagtggtggactggactagagctgcatgaaagcggttacgatgctggcaaagccctgcagcgcctggtgaagaagcctgtgcccaagctcatcgagaag

SEQ ID NO: 700701 - DNA, 74 bp, Homo sapiens
aaaaacaatagctcaaggaaacctttccaacacagatgtccaagctgccaattccgatgaagttaaattccgtc

SEQ ID NO: 700702 - DNA, 75 bp, Homo sapiens
caagcactgcctcagctgtgcgcaggctatgctccagggagccaatgaagagattgctcaggttcgaacaaaagc

SEQ ID NO: 700703 - DNA, 124 bp, Homo sapiens
gctggcacgccgagagctgctacgagaagtcttcatttctgtgtaaaagaactgctgtatgtttccaggaaacttctaggacagaggctattcaacaagctcatgaagatgaccttctatgggc

SEQ ID NO: 700704 - DNA, 83 bp, Homo sapiens
ctgcaaggactggttccacggcaggagcatcagatccatgctgctgctgactcggagccccacagcttggcacaggctctctc

SEQ ID NO: 700705 - DNA, 100 bp, Homo sapiens
ttggtaatgctattgatggaaagggtccagcgccacccgttcgagaggatcgccaccccattccaggtgtacagctggacagccccccaggcggagcatg

SEQ ID NO: 700706 - DNA, 99 bp, Homo sapiens
actcaacaccaacatcgatgggcggcggaaaatagcctttgccatcactgccattaaggtgtgggcccatcgctggatggatctgtcagaacacggctt

SEQ ID NO: 700707 - DNA, 100 bp, Homo sapiens
ggacaaccaacggctcaagaatttcaagaacaaaggccgcgacttggagaccgtgattgcagcaggtgtatcctacggctgtgactttaaaaacaggttt

SEQ ID NO: 700708 - DNA, 99 bp, Homo sapiens
ctccgggcggcgcgaagcgctggtggcgggcccgggctgcggcgtgtgcgcgcccgccagctgctccggagatacgatgccatggacaatattaccagg

SEQ ID NO: 700709 - DNA, 90 bp, Homo sapiens
atcagaaggacgtgttgcttcagctgccactgcagagccccgccatggaagacacgccgttggtgatatcgaagcagaagacggaggtgg

SEQ ID NO: 700710 - DNA, 100 bp, Homo sapiens
gcctctttctctcaggctttcctacaactcatgcccagcagcagcaagcagtgattcgcctttgccagtctcatctcgtgtctgctttgttaagttccat

SEQ ID NO: 700711 - DNA, 90 bp, Homo sapiens
gccttttccgttgccggtgccggcctagcgtcctggaattacttcaatcaagcacaatgacaataagaccttcctggtgtgggtcaacga

SEQ ID NO: 700712 - DNA, 50 bp, Homo sapiens
tttgtggatgtcatggaatttcgggatgaatctcctccgaaacaacagct

SEQ ID NO: 700713 - DNA, 75 bp, Homo sapiens
cgcggtctccgccccgctccggctgcaggcggaggagctggggccaggaaggaatactgggagaatcttcggata

SEQ ID NO: 700714 - DNA, 73 bp, Homo sapiens
gtagagggtgagcgagagccggacccaccggatgaccgggatgcctcagtgcacgatctgattttctggagag

SEQ ID NO: 700715 - DNA, 100 bp, Homo sapiens
tcttctcccgactatttggcaagaagcagatgcgcattttgatggatgaatgaaccaaatgcctatggaaatacacctcttcatgtagcctgctataatg

SEQ ID NO: 700716 - DNA, 75 bp, Homo sapiens
ggagcgccggccgcaccaccgccctctggccgttgcctcaccggggaagatcagttttcctgccatccaggctgc

SEQ ID NO: 700717 - DNA, 100 bp, Homo sapiens
atgcaccgctcactaaactgccggtgaggccgcagcgtttgatgacgagtggcggcgggagacctcccgattccggcagcagcgtcccctggagtttcgg

SEQ ID NO: 700718 - DNA, 100 bp, Homo sapiens
caactatggcagcagcgtggcctccgccaccgtgcacatccgaatggggtgcttttcaggaaacaatgatcattttttggcaattaatcagaagaagagt

SEQ ID NO: 700719 - DNA, 100 bp, Homo sapiens
ctgcactgggctcttcagcaggaactgctcgcagaaagaagaaggtggttcatagaacagccacagcagatgacaaaaaacttcagttctccttaaagaa

SEQ ID NO: 700720 - DNA, 75 bp, Homo sapiens
cgcagagagaaagatgatgatgttgtaagccttagcagccttgatctgaagaaaagaatttctgcttggacactg

SEQ ID NO: 700721 - DNA, 94 bp, Homo sapiens
cccagggcagggctcctaaggaaggacccgcctttagacaatgcagatcttcgtgaagactctgactggtaagaccatcaccctcgaggttgag

SEQ ID NO: 700722 - DNA, 80 bp, Homo sapiens
cccgcttcgatcgcctcgcgccggctgctctttccgggtgaatgactggcaggaggactgggtcgtgttctatgcccggc

SEQ ID NO: 700723 - DNA, 74 bp, Homo sapiens
agttgtgcgttgcggccagtcgccactgctgcagtggagctactgctgtggttcaggcagccctatgcaaaccc

SEQ ID NO: 700724 - DNA, 100 bp, Homo sapiens
tcaggaatttgaagagatgctggaacatgcagagtctgcacaaatttctcgaatgctggcagccaaaaccgttttggctatccgttatgatgcttttggt

SEQ ID NO: 700725 - DNA, 88 bp, Homo sapiens
tgctgggtccgctgagcggggcgacccgaggccagaaatgtacacacaggagagctggctgcagtaaaaatcattaaattggagcctg

SEQ ID NO: 700726 - DNA, 100 bp, Homo sapiens
cagcggtcccccctcctcacccgaacatcagggccctccagactcaggcgccccaacaatggcctcacctactgctattccatcgacctctcagagcgag

SEQ ID NO: 700727 - DNA, 100 bp, Homo sapiens
tgaagtcccagggatattctgtgctgctccaattgattggtaacagaagatgaagacaacagcataactaaattattttaaaaactaaaaagccatctga

SEQ ID NO: 700728 - DNA, 100 bp, Homo sapiens
agcgcccagcgaaagcgaggctgatggagcgaagccaggaagaggatgcggagacgcggggctcatttgcaggggggagccaaaagggtcatcatctctg

SEQ ID NO: 700729 - DNA, 100 bp, Homo sapiens
tggaagctggagaactccacagcgccaatcagtcttcccttggaccagacgcttcctcgccagggtcctggccaatccctgtccttcccagaaaactacc

SEQ ID NO: 700730 - DNA, 90 bp, Homo sapiens
gccatgcaggagaaatatccaactgaggggatctctcacgtcacttcaccgagattttaaacaatttgaacctaatgacttttatttgaa

SEQ ID NO: 700731 - DNA, 75 bp, Homo sapiens
gcggtgaccggatattcagttgcacatccccacatcaatgcactgccaatggaggaagaggaagaggaggaatta

SEQ ID NO: 700732 - DNA, 75 bp, Homo sapiens
tggtataccatcgtcaccatgacaacactagggtaaagaggatgaatatccaaagaagcccttggggcagcttcc

SEQ ID NO: 700733 - DNA, 90 bp, Homo sapiens
accccgggccagctctggggaagtgctcctccctgatgctgatcgaaagcaccagagactccctgtgcttcactgtcacccactacaagc

SEQ ID NO: 700734 - DNA, 144 bp, Homo sapiens
aggctgccggctggagggaggttcggagcgcggccgggcgcgcggcgccgccacaagttgcgctgctcgcgacgaggtcccgcaggctcccgatggcgagattacggcgccctggccatcatcatggcaggcattgcatttggc

SEQ ID NO: 700735 - DNA, 100 bp, Homo sapiens
gcttcttattaatgtttgacctcaccagtcaacagagcttcttaaatgtcagaaactggatgaacagttgatattcataaagagaaagttgcaagaagag

SEQ ID NO: 700736 - DNA, 100 bp, Homo sapiens
accagatcccggagatcgcccgccatggctttacttactgcggccgcccggctcttgggaaccaaggaccctgatgctcccataagacagaaaatgcccc

SEQ ID NO: 700737 - DNA, 100 bp, Homo sapiens
gacggcggctgcgggaagacgtcgctgctgatggtcttcgccgatggggccttccccgagtgggctcgggatgagtttgaaggcctcttcaagcagccag

SEQ ID NO: 700738 - DNA, 100 bp, Homo sapiens
gggcagacggattcatttagagctgcggaacaggacgccctctgatgaaaactacatctcagacccaactatcttatggagggcttatccccataacctg

SEQ ID NO: 700739 - DNA, 75 bp, Homo sapiens
ggcccttgattacaaaaagaagaaacacgtattcaagctaaggtgggggcttcacttctaaaagaggaacttttg

SEQ ID NO: 700740 - DNA, 100 bp, Homo sapiens
gtgctgacggacgaccaggatgtggagctggcggccctccaggcactgaagcgtaagaagaggtatgagaagcagctggcgcagatcgacggcacattat

SEQ ID NO: 700741 - DNA, 82 bp, Homo sapiens
cccgggcacgacctctcggacacggtgcaggcagagacgtctcccacaacctgctccgggcgctggacgttgggctcctggc

SEQ ID NO: 700742 - DNA, 100 bp, Homo sapiens
cgggatttgggtcgcagttcttgtttgtggatcgctgtgatcgtcacttggtgaatcatccatgataatggaaatagaactccagagccaggtgctggat

SEQ ID NO: 700743 - DNA, 75 bp, Homo sapiens
ccccagatagcaatgatgatgtgaaaacagaagctgtggctgattatatgcgtcaggcaggagaagtgacttatg

SEQ ID NO: 700744 - DNA, 100 bp, Homo sapiens
gagaaggagcgggagaaggagaaggggaagcccaagccccgctccccgcagccgccaagacctccgcgctctggcagctcctcttccgtgtgctctcgcc

SEQ ID NO: 700745 - DNA, 100 bp, Homo sapiens
tcaacttcccggatccctactccaaatcctcctccgcctcctcctctctgcatgcgcgtcagagcccgtgccaagaacaagcagcagtcctgaactcgag

SEQ ID NO: 700746 - DNA, 89 bp, Homo sapiens
gcggcgcgagcgccccgccatcgtcccgaattcctagaggacctgtgcaacaacctcttgaggatcgaatcttcactcccgctgtctca

SEQ ID NO: 700747 - DNA, 117 bp, Homo sapiens
gcaaaagaagagaagcagaattatacctagaagtctactaatggacagttagtcacccacctacatgttgaggtgtctgatgatttgtgagcctcaagtgactactctgtggaatca

SEQ ID NO: 700748 - DNA, 82 bp, Homo sapiens
cgtcatggaggagatccggcggcagggcaagctgtgcgacgtgaccctcaaggtgacaccggaaactggtactcaagtgatg

SEQ ID NO: 700749 - DNA, 80 bp, Homo sapiens
tttcctattcggttcctgaaggaccctggtggaggaagaaagggggatatgagactttctactcggaatatcctgagtgt

SEQ ID NO: 700750 - DNA, 75 bp, Homo sapiens
ccgggtgctgaaagtccacggatgctatccctggtcaaatcagagggttccaagcttgaactacccttgtggctg

SEQ ID NO: 700751 - DNA, 87 bp, Homo sapiens
taagcactggaagaggaggggggaaacaacaactcgtttttgctctttgtcagagacccttcagcacttccatagagccatcccact

SEQ ID NO: 700752 - DNA, 74 bp, Homo sapiens
caaactccaccagccccgtgtccttcattgccacgtacaggaagacaccatggaggagtctgggtggaagttgg

SEQ ID NO: 700753 - DNA, 107 bp, Homo sapiens
gtcctagtccgaggtgccaccgtggaaggacagaatgccctggtacctgacagtgtaaagaaggagctcctacaaagaataagaacattccttgctcagcatgccag

SEQ ID NO: 700754 - DNA, 82 bp, Homo sapiens
tcgtggccggagcggcccgcgcctgggctgccggcacttcgcggcagtgcagggctcgcggcctggcaagaatgtacagctg

SEQ ID NO: 700755 - DNA, 100 bp, Homo sapiens
gttcaaaggagacaagtgtcacagcctggttggaaaacccaagatatttatcattcagcccgtggaacacagagcattcctaatgacagtcctgcccggg

SEQ ID NO: 700756 - DNA, 82 bp, Homo sapiens
ggctgtgccgttggtcctgtgcggtcacttagccaaggacctggcaatgcccagacatctgtgtccccctcaaaagtcatcc

SEQ ID NO: 700757 - DNA, 87 bp, Homo sapiens
gggaagagaagatcatcgagcatttcaaacgacgcaaacatgcagatctttgtgaagaccctcactggcaaaaccatcacccttgag

SEQ ID NO: 700758 - DNA, 101 bp, Homo sapiens
catcaacaaccgaaacgtgccggagattgctgtgtaccctgcctttgaagcacctcctcagtacagcatacagggcagatgtcagagattatgatcacagg

SEQ ID NO: 700759 - DNA, 100 bp, Homo sapiens
gggccgtcggtcgccgccatgacagcgagcgaggcggagaaaacatcggttgtgaagagaaagccaaaaagaatgccaacaagcctttgctggatgagat

SEQ ID NO: 700760 - DNA, 97 bp, Homo sapiens
gtcggcggctgatttagaaggaggttcaggctacggtgcgtggagatgctgatcaaggagcagatgaggaaatacaaagtgaagatggaggagatca

SEQ ID NO: 700761 - DNA, 75 bp, Homo sapiens
ctccgacaccatggtggcccagctcgtgcagcggctccagaggcaaaaactgattattccaagtggaagttgccc

SEQ ID NO: 700762 - DNA, 117 bp, Homo sapiens
cctttttcgacgcctccgccgccgcctgaggaggcgagctagccgggagttacaccgccaccgccagggatttcctgtaaggaatgtccggcctgtacaaaatgcaatgaatcaggt

SEQ ID NO: 700763 - DNA, 75 bp, Homo sapiens
cgagggcgaggatccggagtgtctgggagaagtgagacggtttaagcggaagcatcttactgccattgactgcca

SEQ ID NO: 700764 - DNA, 75 bp, Homo sapiens
gtccgcatcgcaaccaccgccctggccatctaccatgtgccatccagtccaatggatcagatgggcaagatgaga

SEQ ID NO: 700765 - DNA, 95 bp, Homo sapiens
gaacggaggggctgacaactgcgtgtccagtccttcagaaggcatcaggaaggaagtaacagctagcagtcgccactatgttgacaggctatttg

SEQ ID NO: 700766 - DNA, 100 bp, Homo sapiens
ggggcactgccatcccctccgcatcatggggtctgtggaccaaggtcttgagtcaccacgtccgaatataattcttgggttagtaatctgccaaaaaatc

SEQ ID NO: 700767 - DNA, 101 bp, Homo sapiens
ccagacctactgcagccacgcgggcgagcggctgtgtggatgtcggcgaagccgcgggcgagatcagtgtgcgtgtgaccaccatggatgcagagctggag

SEQ ID NO: 700768 - DNA, 90 bp, Homo sapiens
acgggatcgactacaacccctgcaaggtgtccctgccttcactgtgctccaacctgaaggtcccctggcagtgctgagggaccgagccca

SEQ ID NO: 700769 - DNA, 100 bp, Homo sapiens
aacgtgatgacatcgacatgttgaaagacaagttggatggcttgaggactggtactaaaaggaaacgtgactgggaggccattgccagcagaatggagga

SEQ ID NO: 700770 - DNA, 87 bp, Homo sapiens
aaggtgcaggtatgagcaggtctgaagactaacattttgtgaagttgtaaaacagttactaaaagatgtaactgaactgcagatcct

SEQ ID NO: 700771 - DNA, 97 bp, Homo sapiens
atcgaggccctgctgcacgacctcagctcccagaggatcaccagcgtggctgcataataaatgtgcttctcatctaaaacctgaatgtgactgtgga

SEQ ID NO: 700772 - DNA, 73 bp, Homo sapiens
ttcagtagcggcatcagtgtcttcactgcagccagggtgctttcttctgcgacctggtactcatctacctcat

SEQ ID NO: 700773 - DNA, 75 bp, Homo sapiens
attggaaactctttgggaaagccactcgaaaagcgcatggatttaggagaatgtaccaaaatccacgacttggcc

SEQ ID NO: 700774 - DNA, 100 bp, Homo sapiens
aacttcagcttagctgttttatcaatcaggaagtcaagtatctttttacaggacttaaattggtgtgatccctcacatccacaaatctctgattggaaag

SEQ ID NO: 700775 - DNA, 75 bp, Homo sapiens
ctctgcagctttcagcaggggccaaggacaggaagcaggaacaggcctttgagagcagccagaagtacaaagagg

SEQ ID NO: 700776 - DNA, 82 bp, Homo sapiens
cagaatttatatagagatgtgatgttggagaactacagaaacctcgtctccctgggtctcctaaaaacccagaacagaagat

SEQ ID NO: 700777 - DNA, 100 bp, Homo sapiens
gcgccttacacagtaccatggaggatccttaccaaatgtgagccagctgcggagcagtgcgtcagagtttcaggagtcattgcagttttcagtagaggtg

SEQ ID NO: 700778 - DNA, 75 bp, Homo sapiens
tcctgagctacatggccccctggtttagggagggtggcccacaaactctttaacaacttgaaataaatgtgtgga

SEQ ID NO: 700779 - DNA, 107 bp, Homo sapiens
cccagccgaccttgagctccaggagttcgtctcttacgtctgcggaagtgcagctgcctcagttcttagcgcaggaggccactgtctgcagctcccgtgaagatgtc

SEQ ID NO: 700780 - DNA, 100 bp, Homo sapiens
cctggagaaggccgactcctggcagaggcccttcagcacctggatgcaggagattcagaccaggatgtagcactcaaacttgcccaggagcgagctgaaa

SEQ ID NO: 700781 - DNA, 96 bp, Homo sapiens
gaaaatcagaccatactggaagaattattttgaaaataccgatattctttgaattgccagtttcctatctggaaccgaagctccaagacactatca

SEQ ID NO: 700782 - DNA, 75 bp, Homo sapiens
ggtgaccctgttcctgaacggcagccccaagaacggaaagacaatgcagatcttcgtgaagactctgactggtaa

SEQ ID NO: 700783 - DNA, 96 bp, Homo sapiens
ttgcggaacctgaaaaattcaagaagttgaaaaacgcttttcacgtcacctggagagatgcacaggtgcagcggaactgctgcctgacgctctgca

SEQ ID NO: 700784 - DNA, 98 bp, Homo sapiens
cttgaatgttgaagatgtccttaccagctttgacaatacaggaaatgtttctgcagaaccttggcctgaaaatgctacattatatcagcaattgaaag

SEQ ID NO: 700785 - DNA, 82 bp, Homo sapiens
actgtcgctctgcctttgacaggagaggctgcttcttgtagagcctaagttcgaggcccaggcgcctccatcagcgccgcct

SEQ ID NO: 700786 - DNA, 74 bp, Homo sapiens
agactcaatatgaagaacatatttatcgttgtgaagatgaacgctttgaggtggttgtgtcaaaccgattggtg

SEQ ID NO: 700787 - DNA, 75 bp, Homo sapiens
ttgagacactcctttactcacagcagcagagagacaagagagacacctccaacttcgacaaagagttcaccagac

SEQ ID NO: 700788 - DNA, 50 bp, Homo sapiens
acaacaggagctacgaggagttggggggcaacaacgccggccacacggtg

SEQ ID NO: 700789 - DNA, 83 bp, Homo sapiens
cgccaaggaggtcacccgcgtgctaatggtggaaacccacaacgtgtctccagaacgctatagctatggcacctccagctctt

SEQ ID NO: 700790 - DNA, 100 bp, Homo sapiens
caaaatgtttgtaaattctccttttaccaagtttaattggttggggtcagataagaagaggagtgacaatcaagccaacagtagatgatgactgaagaat

SEQ ID NO: 700791 - DNA, 96 bp, Homo sapiens
acagtgctgagtcagtgtgacagtccatatgtaaccaaatattatggatcctatctgaagttgctgatcatctgggctgtgatccacaaacccggt

SEQ ID NO: 700792 - DNA, 82 bp, Homo sapiens
acctctacaaggccaagttcatctcctccgtcaccagccacatctaccagaacagcgactgggaaactgccactagaaaaag

SEQ ID NO: 700793 - DNA, 78 bp, Homo sapiens
aggtgacccatgcattggttaatatcaggcttaactggcatgggctgagccccttgggctggccatcatgccgtagca

SEQ ID NO: 700794 - DNA, 83 bp, Homo sapiens
ttgcatctcagtggttgaatcataggcaagtggtgtgtggcacaaaatgcaacacggtgaaatgacaatggatgctctgttgg

SEQ ID NO: 700795 - DNA, 95 bp, Homo sapiens
gtatcttgttgacaagatttgcctctgcacagtttcccaatggtcttgatgcagaactttattatgtgagaaatgaccttattagtcactacgct

SEQ ID NO: 700796 - DNA, 100 bp, Homo sapiens
cccacaaccaagccatggtgcactggtcgggacacaacagcagctttccagtgttgaatttgaatgagacgcaacttccctgccctgaagatgttagaaa

SEQ ID NO: 700797 - DNA, 100 bp, Homo sapiens
aaggtgcaaggggtgtttttccgtaagcatactcaggtgtggcagaaaaaacacagcttctgaaattgaatgtacctgctacctttatgcttgtgtcttt

SEQ ID NO: 700798 - DNA, 103 bp, Homo sapiens
ctggtccaggaggaacgagtccgagaactggctgaagccgatgaacagcgccgggatccaggcggctgagccagaggccaactgcagaggaactggaacagag

SEQ ID NO: 700799 - DNA, 50 bp, Homo sapiens
cttagaattttaagatacttcagcaatgtacaggaaagggaagcacagtt

SEQ ID NO: 700800 - DNA, 90 bp, Homo sapiens
cacgtaggtactgtgtgaggcccaacagcggaatcatcgatgcaggggcctcaattaatgtatctggaatctatcttctggatttaatct

SEQ ID NO: 700801 - DNA, 82 bp, Homo sapiens
agattcagaaggagcaggattaccaaaggactctttttgatcagaacaatgctgcaaaaaaagaagagtcagaaactgccaa

SEQ ID NO: 700802 - DNA, 82 bp, Homo sapiens
tctgcgctggccgggggcgcgggcggcggcgccggcaggaaggactcgctcagcagcagcctgaaaacttgctacaagtatc

SEQ ID NO: 700803 - DNA, 99 bp, Homo sapiens
ctgaggaggtcaccaccaccaccacaatgaatatagcagcagtgaaactactggtgaaaagccagagcagaacgatgatgacaccataaaatctcagga

SEQ ID NO: 700804 - DNA, 98 bp, Homo sapiens
cagaaggccacctcaagaggaacatcgtggtgaagaccgtggagatgcgggatggagaggaagagagaagggcacagttacctaagtatcaacgtaat

SEQ ID NO: 700805 - DNA, 83 bp, Homo sapiens
ccgcaccatgccgctcctaagcctgcacagccgcggcggcagcagcagtgagagctcctgtccaaatatgacccccagaagga

SEQ ID NO: 700806 - DNA, 100 bp, Homo sapiens
agatggcagccagtcagtggtggaggtttacacagtaaacaatgtgaatgtgatcaccaaaatacgcacagaacatctgaccgaggaggaaaaaaagaga

SEQ ID NO: 700807 - DNA, 100 bp, Homo sapiens
ccagagcctggagtctgcgaaggccgggacccggttccccggcccacagtgggggtgtgcaaacccgagagaactgggatggatagaatgacagaagatg

SEQ ID NO: 700808 - DNA, 49 bp, Homo sapiens
gccagaagcgggcggcgcgggggagatgctctttcagtctcacatggca

SEQ ID NO: 700809 - DNA, 75 bp, Homo sapiens
cagccactgccccgacagggggtcaagagaacctactctgaggtggatcctgagacccattgtcatgcagaaagg

SEQ ID NO: 700810 - DNA, 90 bp, Homo sapiens
gtggaggattactagagaacatccccagagtcctccctgagaaacttggggtagatttaggtgccactgattaatgaacttgaatcagca

SEQ ID NO: 700811 - DNA, 75 bp, Homo sapiens
tcagcctcccaagcagttgggaccacagctctggatggacaaggaaaaagaggaaagcatgaaagaaaccctgcg

SEQ ID NO: 700812 - DNA, 100 bp, Homo sapiens
ctcaaaagagaaagttcatctagaaatctcaaagccatgtctcaggtatctactgagcgtttcagtcaacaatacagctcgtgttcgacaatattccttg

SEQ ID NO: 700813 - DNA, 75 bp, Homo sapiens
aggagatggttcgggcctagcggagccgggactggaggaacttaaaaggagtctagaaaatccagcagaaaggaa

SEQ ID NO: 700814 - DNA, 50 bp, Homo sapiens
agcagcaagagacccacctgaagcaacagacaaatttacatgtattggag

SEQ ID NO: 700815 - DNA, 99 bp, Homo sapiens
ttcgaagactggcaagcacggccacgccaagggatgtctcagatgcagcttgcacaccatggccctcatggcttaggacatccccacgctggaccccca

SEQ ID NO: 700816 - DNA, 82 bp, Homo sapiens
agacttggacaacatgtcccaacattacatcccatgtacatatgaagattgaagaaaagataacattaacctgtggacgaga

SEQ ID NO: 700817 - DNA, 75 bp, Homo sapiens
ggcgagcgcgagcggcgcgagaaagggagcttttggaagagtcccagatggaagcgaccaggctccggcagaagg

SEQ ID NO: 700818 - DNA, 83 bp, Homo sapiens
cttagttgatgatttagttgattctctgaaggaactgtggctgcaccatctgtcttcatcttcccgccatctgatgagcagtt

SEQ ID NO: 700819 - DNA, 100 bp, Homo sapiens
ccggcgcgtcccccaggagccatcctgcccgcggggatcccgtcagccgaagttgggatatctaaagcagaagccttagaaactctgcaaattatcagaa

SEQ ID NO: 700820 - DNA, 116 bp, Homo sapiens
gctgggagctgtagaccggagctgttcctgttcggccatcttggctcctccctgccagatagctcttattttgagttttctggatatgccgcagaaggatccgtgccagaagcaag

SEQ ID NO: 700821 - DNA, 100 bp, Homo sapiens
cacacattagtgaccgtcatgatgaaggtgggacacctctcggagccactaatgaaccgcctggaagacaagattgaggacctgtcccagcaagtgcaca

SEQ ID NO: 700822 - DNA, 75 bp, Homo sapiens
tgcatgctctcactaagcagttggaggctgtgtctggaggtgaaacagcagaaatgcctgacatgtatccccctg

SEQ ID NO: 700823 - DNA, 100 bp, Homo sapiens
cttttgctggaggttgactgtgctgtctggtctttcactaccattcctacagtgattggcaagataccgtttctacctcactctccatgtaccatgccag

SEQ ID NO: 700824 - DNA, 82 bp, Homo sapiens
atggaggggattttgtcagcttgtcgtcaaggaacgcggcaggcaaagatggcaaagagcgcttgggcggctcagtgctggg

SEQ ID NO: 700825 - DNA, 98 bp, Homo sapiens
aggatgcccggtccccatcaccggcacacattgtcttcagacttggttccttcaacctagagaaagttgaaaacccagctgaagtcattagagaactt

SEQ ID NO: 700826 - DNA, 50 bp, Homo sapiens
gttcgggccggctgtcctggcgcgctatatcgagaagtttactgactttc

SEQ ID NO: 700827 - DNA, 51 bp, Homo sapiens
cgtgtcgtcactatgtggcccatgtgaagaaaacctcggatcaattctcag

SEQ ID NO: 700828 - DNA, 82 bp, Homo sapiens
acagcgagagcggcccggacgacaaggccaagtcctgtatctgccatgtctgtggcgtccacctcaacaggctgcattcctg

SEQ ID NO: 700829 - DNA, 82 bp, Homo sapiens
agatggcggcagccgaggccgcgaactgcatcatggaggctggcctgccactcctcctgctatgatgcctgggcagatcccg

SEQ ID NO: 700830 - DNA, 82 bp, Homo sapiens
ccgagcagtctggctgcggcggcagagctgaagtgagcggagccaccaggagcaggccgggctctcgccatgggtcactgtc

SEQ ID NO: 700831 - DNA, 51 bp, Homo sapiens
tccatactccaagaagaggcagagacagcctggaagactcaaaccttcctc

SEQ ID NO: 700832 - DNA, 50 bp, Homo sapiens
ggaatacacttatttatgaaggtgtcttttatgaataatcaaaagcagca

SEQ ID NO: 700833 - DNA, 100 bp, Homo sapiens
atcgacgtcatcggggtgaccaagggcaaaggctacaaaggtgattatcctgaaccatccaggccaaataagcgccggctatgcccctgtattggattgc

SEQ ID NO: 700834 - DNA, 82 bp, Homo sapiens
aaaggaaaatatcccaaggactaatctgatcgggtcttccttcatgcagtatttggcagtcgtattcagagataaacccctg

SEQ ID NO: 700835 - DNA, 100 bp, Homo sapiens
ctggaactgggatctctcctggcaaagactggacaagctgcaggatggagatgaagatgaggaagctgagtcagctacgggcaagcgggcagctgaagat

SEQ ID NO: 700836 - DNA, 100 bp, Homo sapiens
ggctaaacaggcaacagttgtcctcaattgcgtaggaccagcttttgatattatgagagtgacacatggcagagaacacagcctgattgaagatttgatt

SEQ ID NO: 700837 - DNA, 100 bp, Homo sapiens
gaagaagaaccggaagaaactgtccgagaagcccaaagtggctcccggctgcctctgctgcagttcagagcaacttcaggagcttcccagccgagagctt

SEQ ID NO: 700838 - DNA, 90 bp, Homo sapiens
cctatgtttccaaaccagtcagctgggctgatgaaacggatgacctggaaggagatgtgcgtgctgttcaccggctcctggagcaccgcc

SEQ ID NO: 700839 - DNA, 98 bp, Homo sapiens
tggatttccaagagatgttgcccaggctctatcttttgaggaccaagtgaaaatggcattacggacatcaggacatctcttactgggagtagttcgaa

SEQ ID NO: 700840 - DNA, 100 bp, Homo sapiens
gctaaccaacgacaaagcccgcgtcgaggtggagcgcgacaacctggccgaggacatcatgcgcctccgggagaagaagcgccgcggagccatcaacagc

SEQ ID NO: 700841 - DNA, 98 bp, Homo sapiens
agcgcagtcgctccgagcggccgcgagcagagccgcccagccctgccagctgcgccgggacgattgtaaaccatggctgtgtggatacaagctcagca

SEQ ID NO: 700842 - DNA, 88 bp, Homo sapiens
cccagggaccgatgttgcgcgaggaaaatgcgggacgcccagatttcagaagaaagtggtagcttcctttccaagaacagttctgagc

SEQ ID NO: 700843 - DNA, 100 bp, Homo sapiens
cggggctgaccgctctggcccagggtggtgtcatggagaaactccagctgggcccagagattctgcagcgggaaaatccaaggcttatttatgccaggct

SEQ ID NO: 700844 - DNA, 100 bp, Homo sapiens
tgtccatcgtgtgcctgatgatcacgcagctggctggcttcagtggaccagctcgagaattacaagctcgggtactaaaacgtgttcagatggaacagcc

SEQ ID NO: 700845 - DNA, 100 bp, Homo sapiens
aaaggacagtgtggacgagatactggtgccatgaaccaaggtgggaaaggagtaagtccatgagtgatgtcagcgcagaagatgttcaaaacttgcgtca

SEQ ID NO: 700846 - DNA, 75 bp, Homo sapiens
atttaacattccaacacataaaaattatttatccaacagctcctcccagttacatcatgctgatgacagcttcct

SEQ ID NO: 700847 - DNA, 87 bp, Homo sapiens
agagacatgcgatggtagatcaacccccaggtagtgggcagcagtcagtgacaggtgtaacctctgtggatgacagcaacagttact

SEQ ID NO: 700848 - DNA, 83 bp, Homo sapiens
gcccgcccgaccccgtcccgaccctggccgccccgagcggagcctggagacaaatttacatgtattggagaccagaccagaag

SEQ ID NO: 700849 - DNA, 98 bp, Homo sapiens
ggcatcggctgcgagctcctcaagaatctcgtgctcaccggtttctcccacatcgacctggcgacatctagactaagagaaagaggctgtgatggttg

SEQ ID NO: 700850 - DNA, 150 bp, Homo sapiens
ggcttccggaactggttccactattgtttcagataagccctttgctccagaactcaatttgggggcacattttagactggtggagcagtacagagaacagagctggatgactatggccaatttggagaaagagctccaggagatggaggc

SEQ ID NO: 700851 - DNA, 100 bp, Homo sapiens
tgaaacagaaattctggaacacctatatgataacgaaggaggcccaacttcattcaataaggagcctgacggatttatcccagacggtagaacaaaagga

SEQ ID NO: 700852 - DNA, 100 bp, Homo sapiens
gaatagacttcaagatcaaaacagttgaattacaaggaaagaagatcaagctacagatatgactgtggatattcataaggagaaagtggcacgaagagag

SEQ ID NO: 700853 - DNA, 88 bp, Homo sapiens
gcgaccggtggtcccacgtccagccgggctcagtgagaactgaagcgctgcggcatggcgcgcgcctgcctccaggccgtcaagtacc

SEQ ID NO: 700854 - DNA, 82 bp, Homo sapiens
tgccacgtccaagcaaaccgggaaaggagaggatcccggagccgtttttcagaagaagtgaagtcaagatgaagaaccattt

SEQ ID NO: 700855 - DNA, 100 bp, Homo sapiens
ttttgtttgtcagcagccaaggtgtttccaggaagttcagagagaacaggtggtccattatggctgacatgcaaaatctggtagaaagattggagagggc

SEQ ID NO: 700856 - DNA, 82 bp, Homo sapiens
gagactcagaatcgaatctcttctccctccccttcttggaggctactcacagtcgaactacaactccccggggtccggccag

SEQ ID NO: 700857 - DNA, 100 bp, Homo sapiens
cggacgccgcagagcgccgaggaggctttcctgctggtggcaaccgcctacgagacactcaaggagagccagtgtaactccttcaagactggagtgacac

SEQ ID NO: 700858 - DNA, 115 bp, Homo sapiens
tcctctttctttttccctgtggctcagcccgttcgctggactgcaaaccgagctcccgtctgccttgcagtgccggtggtggtgtgcacattgagccccggtatagacagttccc

SEQ ID NO: 700859 - DNA, 101 bp, Homo sapiens
ggccagccagcagaaacagtgggctgtacaacatcaccttcaaatatgacagtgtcctcatgacttctcttgtggaccatgtccgtgatcttttttgcctg

SEQ ID NO: 700860 - DNA, 90 bp, Homo sapiens
gaggagttccccttcgagaggaggcagattcccctctacatagacgacaccctgacggattactacagcatcccatttcccacacccact

SEQ ID NO: 700861 - DNA, 100 bp, Homo sapiens
aattttgttactgtgagattaccaagtgatatgtgaccttcggaaatgattttctttactcagcataatgccctcagagatggggtttcgccatgttgcc

SEQ ID NO: 700862 - DNA, 82 bp, Homo sapiens
aggccatgaagcagtacaacggcgtccctctggatgcacatggattaattgatgtatgttgagtttatggagctgccttttg

SEQ ID NO: 700863 - DNA, 100 bp, Homo sapiens
ggggcaccgaccccgcaacgactgcccgggctgcgggaggggaggagagcagagaacgtccccagaacaaaatccagtctcatagcagaggagaatataa

SEQ ID NO: 700864 - DNA, 83 bp, Homo sapiens
cgaactaaacaaattcatcccagaaatctaagaggccaatggtggcagagtctacatagaactatgcttcgtggtgttctggg

SEQ ID NO: 700865 - DNA, 83 bp, Homo sapiens
ctcaaagacactgacagagcacctgaagattttctctgtgggcagttctttttgttttgggaagacttctgactttaattctt

SEQ ID NO: 700866 - DNA, 96 bp, Homo sapiens
caccgggtgagctcaccgcccagcccaaaccaggagattgcgagggagcgatgcggtgcagcgcggggatgaccgctttggaagacgtgttgtcac

SEQ ID NO: 700867 - DNA, 75 bp, Homo sapiens
ataagacctctgagctgttcctcccagctacgagctgccccaggattcactccttctccagttgcacagccacac

SEQ ID NO: 700868 - DNA, 50 bp, Homo sapiens
tctctctctgcatccaggcgcaggacacagagtctgggatctaataattc

SEQ ID NO: 700869 - DNA, 89 bp, Homo sapiens
agctgatagacatggctgtgctggaggaaattcaacaggagctgatcaaccaaggtttgggttggtaccattgggtcaggccccaaggg

SEQ ID NO: 700870 - DNA, 90 bp, Homo sapiens
gccttctcctttttctccatcttcacctgggttgttaccccttctacaaaactgacccgttcatcttcccagagtgcccgcatgtctact

SEQ ID NO: 700871 - DNA, 75 bp, Homo sapiens
tctccttcgacttggagtctttgtccaggacgctccataatgggagaagtaaagaacaaagacttaaggaacagc

SEQ ID NO: 700872 - DNA, 96 bp, Homo sapiens
tggttctggggctgggattggaactgtgtttgggagcctcatcattggttatgccagctatcatggtgaacttacttcagattgtgcgggaccact

SEQ ID NO: 700873 - DNA, 100 bp, Homo sapiens
ccagttacccgctggccctggtccggacccgcatgcaggcacaagatggccgccctgctcccccaatgaaaggccagcttcgaagaaaagctgaaaggga

SEQ ID NO: 700874 - DNA, 50 bp, Homo sapiens
tctgcggctccagcgtgcagaagctgaagacttacagtgagaaactggac

SEQ ID NO: 700875 - DNA, 100 bp, Homo sapiens
tgttaacatctttaaggcaggagctgatgaagagagagcagagacagctcgtctgcatccatgagtatgttttctgatttcctgcagtcttttctgaagc

SEQ ID NO: 700876 - DNA, 98 bp, Homo sapiens
ccgagaccgcggccgggaccgagggctggcctgccactcctcctgctatgatgcctgggcagatcccggacccttcggtgaccacaggctccctgcca

SEQ ID NO: 700877 - DNA, 78 bp, Homo sapiens
aattttagggtcctttatatagaagggagagtaggaagttattccaacttttgacatggctgtcaatgaaatcttctt

SEQ ID NO: 700878 - DNA, 99 bp, Homo sapiens
ctcagccaatcagtgacatcattggcaattaagttggaatatgcaaggttggttaagttggcccaagaagacaccccaccagaaaccgattatcgttta

SEQ ID NO: 700879 - DNA, 75 bp, Homo sapiens
acctgctggtgttcgcccacgaccatgtgggatggagtaggacctcttccagactgtgctgaaccaccaaaaggg

SEQ ID NO: 700880 - DNA, 75 bp, Homo sapiens
ggacaagtacttcgacgaacactacgagtaccggtcaaacgatcaaggagcaaaggcgggctggccggccccgac

SEQ ID NO: 700881 - DNA, 100 bp, Homo sapiens
ggaagattcttacctctttgatctcgacaataagatcctcgttcctagctgcctgccagcgtcctcggcccggccctgaggatggacccaggagatcccg

SEQ ID NO: 700882 - DNA, 95 bp, Homo sapiens
tgacgtgttctccaaataccagctcgacaaagatggggttgtcctctttaagaaggcttttatcttgagaacatggtgtctggagttaaaggtat

SEQ ID NO: 700883 - DNA, 100 bp, Homo sapiens
ggcccaggaggagcaggggggctccgctgtgcgcaggatcgcccaggaagtgcagcgctttgcccaggagaactgagccctggagggcagatggaggagg

SEQ ID NO: 700884 - DNA, 73 bp, Homo sapiens
tgaaacctgtcccgctcattggtccaaaattgaagagaagctactgtgtgaagacattcacaggacacagaga

SEQ ID NO: 700885 - DNA, 89 bp, Homo sapiens
ttttcctgcatggattgggagatactggttaattccagaattctatggtgatgatgtgagctttctagtcaatagcctgaagttggatt

SEQ ID NO: 700886 - DNA, 82 bp, Homo sapiens
aacagcaggggtcagctgggccgcaggggcgcgcagcgcggggagctgccaggttttttggggaaaacaaacaaaaaacagc

SEQ ID NO: 700887 - DNA, 83 bp, Homo sapiens
cgaaccccttcatgcccaaatcccggaaactccagcgtgtctccagccgtgatcatccagacttgaaacatatcgacccagtg

SEQ ID NO: 700888 - DNA, 82 bp, Homo sapiens
aaggtcacctggaaattgccttattggaaaaacatttcttacgctttatcctgtggataaacgcagagtgaacgagtttggg

SEQ ID NO: 700889 - DNA, 74 bp, Homo sapiens
ttatatggccaaggagaactcccccagtgtttctgcaggtttagaaacatcaactggaatcaatttgcatttga

SEQ ID NO: 700890 - DNA, 100 bp, Homo sapiens
ccacccaaacctctgatgcccccactcagattggtctccactgtgccaaaaaacatggagtcaatctatgagacttttcctcctccatgaactttggaag

SEQ ID NO: 700891 - DNA, 98 bp, Homo sapiens
ggacttctggctttggccactttacttcctgccagtgagttctctggtgatgttgatagcctggaactgggggacatggtcgagtatagcttgtccaa

SEQ ID NO: 700892 - DNA, 82 bp, Homo sapiens
ggagcagagggacacaggttcccacgctggcgcccggcgaccgggtggggctgcggccttctggcggccgcccctggtttct

SEQ ID NO: 700893 - DNA, 75 bp, Homo sapiens
cccatgagccggttgcgccacccgaggacaaggctgtgggtgagcgtggaggatgctcagatgcacaccgtcacc

SEQ ID NO: 700894 - DNA, 98 bp, Homo sapiens
actgtgcgtatgactcagtgcagctctcaaaggtctatggccctgtgttcactctgtattttggcctgaaacccatagtggtgctgcatggatatgaa

SEQ ID NO: 700895 - DNA, 48 bp, Homo sapiens
tgcagaagctgttcccaccatgaagctacaagagactgtgaaaaggaa

SEQ ID NO: 700896 - DNA, 100 bp, Homo sapiens
cattctcgctaacaactgcccagctttgaggaaatccaggagctgcaggctcagattcaggaacagcatgtccaaatcgatgtggatgtttccaagcctg

SEQ ID NO: 700897 - DNA, 101 bp, Homo sapiens
aagggccacgcgtcccccagtaggagaatgactccgattcgtgaccctcagcgccggtgcatgtcgatgagtctaccatggctcaagaatctcccaaaaat

SEQ ID NO: 700898 - DNA, 96 bp, Homo sapiens
caattgttgtagcaggtctaaaagttcaggtccagggaagaaccccacagacgaatacctggagggcatgatgagcgaggccccggggcccatcaa

SEQ ID NO: 700899 - DNA, 100 bp, Homo sapiens
gatgagaatgctggcggaggacgagctccgggatgctgtactccttgtctttgcaaacaaacagacattgcctaagatactgagccatatcgccccagca

SEQ ID NO: 700900 - DNA, 82 bp, Homo sapiens
tcctcacctcgctactcgcttgcctacccgccggcccgcgggtctacttcctcaaagacctcctgccccccgaggtctgcag

SEQ ID NO: 700901 - DNA, 95 bp, Homo sapiens
attgagaccaaaggccgggcggcattgccagggttggatgtggctcgaatacggatggtcctcgcctatctgtttgctcagttgagcctctggtc

SEQ ID NO: 700902 - DNA, 100 bp, Homo sapiens
gatcggaggggtgatagatatgatgactaccgagactatgacagtccagagctccttgaggagaatgaccagctgatccgctgtattgtggagtatcaga

SEQ ID NO: 700903 - DNA, 75 bp, Homo sapiens
attcattggaggacactggaagatgggaagaaagaagcagctgccagcttcttggacacttaatgattgttggca

SEQ ID NO: 700904 - DNA, 89 bp, Homo sapiens
gcagatgcccctcctccaccagaggactgggaggagcatgtcaacagacctgtcatttactccatcctttatagtgatgctacaggacg

SEQ ID NO: 700905 - DNA, 83 bp, Homo sapiens
gtgcggactcgcctccgtgaagagctggaagtcgagtgtgctactcaactcaggagatttggagacaaactgaacttccggca

SEQ ID NO: 700906 - DNA, 100 bp, Homo sapiens
ttgaattggtggctcggatcctagccctcgtgcctccatggactcgagtgtaccgagtacagaggtaccagctggaggatgagtctgcgcatttggatga

SEQ ID NO: 700907 - DNA, 98 bp, Homo sapiens
ggcggcgccggcctccggggagaaacggactgctaggcggtttgcttatctttttgtgaatatcaatgtgacctctgagcctcacgaagtgtctgccc

SEQ ID NO: 700908 - DNA, 50 bp, Homo sapiens
aaaacacatctttacacactaagtattttgatcacaactatagcctccaa

SEQ ID NO: 700909 - DNA, 73 bp, Homo sapiens
cttctcgatctctggaggcacctgttgcaagtgacagtgctcagagcatgaaaattttctgctgtctttggaa

SEQ ID NO: 700910 - DNA, 96 bp, Homo sapiens
ctgccctggccctgggggaggagggtgtgccgctgagtcactgcctgggcatctgggcctggaacctcgggaggatttgttggtattgaggaaaac

SEQ ID NO: 700911 - DNA, 100 bp, Homo sapiens
ggcttttccgcaggccaagtccagcttatagacccaatcaaaaaagaaactagcaaactttttaatgaggaagtactccaaagattcaggtttactcacg

SEQ ID NO: 700912 - DNA, 96 bp, Homo sapiens
ccctcggctgtggaccgggcggcacgcacgcggtgcagggtaacatggcggatgcggaagcgcctggccacttatggcatcactgttgctgaactg

SEQ ID NO: 700913 - DNA, 101 bp, Homo sapiens
gagtcgctgggtgcgtggggctgcctcgccgcgtctcgccacgccctggcttgaaaaacagtccaattgatgaaagtgaggtgcaaacagcaactgatagt

SEQ ID NO: 700914 - DNA, 100 bp, Homo sapiens
tgtggcaaatgtgactgccatggagtgaagggacaaaagttaatagaagatgaaattgcaaccattcttaaatctacattgaaaggactagaatatttgc

SEQ ID NO: 700915 - DNA, 100 bp, Homo sapiens
gtgtagcgaaatagtggagtggatagtcttccggagacccgtccccatctcttaccatcagaaacccgggatggacgtggccgacgcctacgtgactttc

SEQ ID NO: 700916 - DNA, 80 bp, Homo sapiens
tggaggaatttgtggctggctggatctctggtatcgtgatttccgatacccacctggacacccccaggagtataaacaca

SEQ ID NO: 700917 - DNA, 83 bp, Homo sapiens
agagtcaacagcagtggcaacaggccaccccagcagacatgtttgccaaggcctttcgggtcaagtccaacacggccatcaag

SEQ ID NO: 700918 - DNA, 75 bp, Homo sapiens
tgaaagtccacggatgctatccctggtcaaatcagaggttttaaaatcaaagatgggaaaatcggagaaaattgc

SEQ ID NO: 700919 - DNA, 76 bp, Homo sapiens
cagagaagcattgggggaaccagtgggccccacgtgggtaaaaagtttgtgaaagagacagacaatgaagtaagaa

SEQ ID NO: 700920 - DNA, 98 bp, Homo sapiens
ggattgactctctgcaggcctttttccctggactgcagttccatgccattgcagtgtcaactaggcctcagttacttttcagtttgcccaaattgagc

SEQ ID NO: 700921 - DNA, 50 bp, Homo sapiens
gtagacacaatgattgttcaggcaatttagtccagcctctgatgaagcag

SEQ ID NO: 700922 - DNA, 51 bp, Homo sapiens
ctcagcctcccgagtggctgggattacaggaaatcacattctgcctgatga

SEQ ID NO: 700923 - DNA, 100 bp, Homo sapiens
agccgacccatcttgtacagcaactggctgtcaaaggtagacccacaacttgtggatggacacctttcatattttcttggagctataggtatgcctggtt

SEQ ID NO: 700924 - DNA, 82 bp, Homo sapiens
cctcgggagcggcccgcatccgtggggagacgctgggcctcattggctttggcacagaccccacaggctcctcggacactgg

SEQ ID NO: 700925 - DNA, 82 bp, Homo sapiens
tgttcgaaaagctgtgcgggccattggacggtgtgccatcaaggtggagggacatcatacattatgatccaacgaagcaaga

SEQ ID NO: 700926 - DNA, 75 bp, Homo sapiens
aacaagcctttgctgaattggagagctggaggccagatgctccagtgcctgatggcgaaagtgagaaaactgtag

SEQ ID NO: 700927 - DNA, 96 bp, Homo sapiens
ctcaactggatagagtactgctcttcccgaagagcaaagatatctttagaggacattcaagcttttgaaaagacatacaaaggttcggaagaagag

SEQ ID NO: 700928 - DNA, 100 bp, Homo sapiens
ggggaacaagtaccgcctgggacggaagatcgggagcgggtccttcggagatatctacctgggtgtgcggagatgatcatcagcatggacagcagccaga

SEQ ID NO: 700929 - DNA, 95 bp, Homo sapiens
ttgagaggcccccagcctcttaagcacagttgcagccccaacctgtttgtccagaatgtcttcgtggatacccatgatcttcgcttcccctgggt

SEQ ID NO: 700930 - DNA, 96 bp, Homo sapiens
cgccgctgctacctgcagcgccgtgtggcacgacacaaaaatcagaaagatcatacggtggtgaaacttcgacaagatcacagcccatcacgttca

SEQ ID NO: 700931 - DNA, 100 bp, Homo sapiens
cgcgcatcgtccgcagacgccgccaccgccatgggctcctgaggagcgggacggtatgcgggccatcctggggtcctacgacagcgagctgaccccggcc

SEQ ID NO: 700932 - DNA, 101 bp, Homo sapiens
gtgcttgccaggcctggctccaagtgtgaacatggctacgcctcttcattcccgtccatgccgagcccccgactgcagcattcaaagcccccacggaggtt

SEQ ID NO: 700933 - DNA, 50 bp, Homo sapiens
ctgccgtcttttgaagcaccctaatattgaaacagaccagtggtatggag

SEQ ID NO: 700934 - DNA, 83 bp, Homo sapiens
cacagttcctgggaaggtggagccaccagcctctccctgggcgccctgcgtccggcagaggaggcgagcatcccgctcaggtg

SEQ ID NO: 700935 - DNA, 80 bp, Homo sapiens
gaaagtggtggagattgtccgctcgagcctgaaggaccctgagaaagccgcttacaaacacgcagatggcaagaagattg

SEQ ID NO: 700936 - DNA, 82 bp, Homo sapiens
ctttacagtaaaaatgacccatctatggctgcttaatgatctcaaagatttcatgagacaagctggggaagtaacgtttgcg

SEQ ID NO: 700937 - DNA, 100 bp, Homo sapiens
cgatccgggacggccggtcaggctcgccgccgagctgttcatggcctcccacgggaacgacgccgcgagagccaggtttgagtccaaagtaccctccttc

SEQ ID NO: 700938 - DNA, 98 bp, Homo sapiens
cgcgagtgcccgggcccagcccggcctagttcaggtatgatcctgatattctgctaggatatgagattcagatgcattcctggggttacctcttacaa

SEQ ID NO: 700939 - DNA, 83 bp, Homo sapiens
ttttactaaagactttcattacattgtatttggagccccgggtacttataactggaaagaaatgggcaagttcatgaaacctg

SEQ ID NO: 700940 - DNA, 90 bp, Homo sapiens
gaataaacatgcaatgaacccaaaagggtggaatctccaactgataaatcaggaaacttcttctgctcacaccactgggaaggggacagt

SEQ ID NO: 700941 - DNA, 100 bp, Homo sapiens
gtttgtttctccaaggtttgaaaagcagctggcctgcaagtgccggtggtggtgtgcacattgagccccggtatagacagttcccccagctgaccagatc

SEQ ID NO: 700942 - DNA, 97 bp, Homo sapiens
ccgggagtttgaggaggttgtgctctggccaggctgccgcacctctacaggaactttgccgcggagcagtatgccagtgtgttcgccatctccctgc

SEQ ID NO: 700943 - DNA, 82 bp, Homo sapiens
ctcaaggaagatggtgtcctctgctgccaggcacctgaactcctggggggaccgtcagtcttcctcttccccccaaaaccca

SEQ ID NO: 700944 - DNA, 97 bp, Homo sapiens
ctcagaaacttgttaaagacattattggttccacaaatcaacaagacttttcttcagggaaaagtgaagatttgggaacagttcaggagaagtccac

SEQ ID NO: 700945 - DNA, 124 bp, Homo sapiens
atttgacttggaagcaatgtttgaacaaactcgaagaacagctgtggaaagaagttgcaaaacactggggattgtcaatgaggcagatcagattccgatttgacgggcaaccaatcaatgaaac

SEQ ID NO: 700946 - DNA, 90 bp, Homo sapiens
ggggccttccacaccccctccgtgggtgtgtgaggccacaagaggaagctgaatgaagaggacgccgccagcgagtccagcagggagtcc

SEQ ID NO: 700947 - DNA, 100 bp, Homo sapiens
aattacctaaatgcactctttcgaaagaaaggagtcaatcttaagatgtgatactttcctgtgaaacctgaaacaaggtgatctggggaaccaaagactc

SEQ ID NO: 700948 - DNA, 98 bp, Homo sapiens
gaaaaataataattacatctgcaaagaccttatttccagcgcggagacccacatcaagggcttcacactgaacgatgctgccaacagccgcctcatca

SEQ ID NO: 700949 - DNA, 82 bp, Homo sapiens
gtcccgaccctggccgccccgagcggagcctggagtgaagatagtgatccggggagacaggaacacgggcaagacagcgctg

SEQ ID NO: 700950 - DNA, 83 bp, Homo sapiens
cagatcgaagcggatttccgattgaatgttcaaaaggtgatgacctatcaacagccattctcaaacagaagaaccgtcccaat

SEQ ID NO: 700951 - DNA, 50 bp, Homo sapiens
tccatcaaacaattcctggacttcgctaccaagtcaggattgttaccccc

SEQ ID NO: 700952 - DNA, 83 bp, Homo sapiens
tacagaccaaaacctggaaacaagaggcccctttctgcactttacaggttcactactgtgatagacaaagtggcaaagagtgt

SEQ ID NO: 700953 - DNA, 100 bp, Homo sapiens
ctcagcagcgagggcagggagagaagtcagccacgccctcacggaagattctggaccctaacactgggctcggcttattccaggggtgtgtttcgtcgag

SEQ ID NO: 700954 - DNA, 83 bp, Homo sapiens
cgcgcggactgaaggagactgaagggcgtgatggtgggcatgggtcagaaggattcctatgtgggcgacgaggcccagagcaa

SEQ ID NO: 700955 - DNA, 100 bp, Homo sapiens
tggagaattactagcaacaggagataaaggtggtagagttgtcatctttcaacaggagcaggaggtgaagagcgattatatgttagagatagctgatcaa

SEQ ID NO: 700956 - DNA, 100 bp, Homo sapiens
caaatttgaagtactcagagaaaatgttgtgaacttcattgactgtctagtgaggttcgacgaggtgctttataaatcatctcaggactttcaacccagg

SEQ ID NO: 700957 - DNA, 100 bp, Homo sapiens
cctgaacaaagacaaggtcatttcactgcctgagctgaagggctgcctgggtgttagcaaagaagctgtgaaagttgtgtagatttactgtttgtgagag

SEQ ID NO: 700958 - DNA, 90 bp, Homo sapiens
caggctcgcctcgactccaaatggttgaaaacagatatacagatcaatgaggaaatctccgtgaagcaccttccgtctacagagcctgac

SEQ ID NO: 700959 - DNA, 75 bp, Homo sapiens
tcaggctctaaacaaaattctgcagatataatttctacagtagaatttaatcattctggagaattactagcaaca

SEQ ID NO: 700960 - DNA, 50 bp, Homo sapiens
atctctatggtgacaacagagtccatgatgtctctttctgcacattcctg

SEQ ID NO: 700961 - DNA, 82 bp, Homo sapiens
cctgtgtcccacttgttcgcggcctatagttaccggtattgtaagaacaagccgtacccaaagtctcgcttctgccgaggtg

SEQ ID NO: 700962 - DNA, 89 bp, Homo sapiens
cgccgcacggatcatggccgcagccgctctggggcagggacacggccaacacggtgaaggaaaagttcgggaggaagctttatgaatcc

SEQ ID NO: 700963 - DNA, 75 bp, Homo sapiens
ggctctggaaaatccgcaagaccatcatgcaggccgctgatgccgcccgcggcgaggtggcccggaccgcagtgc

SEQ ID NO: 700964 - DNA, 95 bp, Homo sapiens
aaggactggcatgacaaggaggccatccggagggacgctcagcgcgtagggctcgaccacttactggatgagaacagagtgccggacctcgcaca

SEQ ID NO: 700965 - DNA, 75 bp, Homo sapiens
gagtacaggacctcgagagccttgtcaggttgcctccaggggagtaggttgcatctttgttgaaatgatccaagg

SEQ ID NO: 700966 - DNA, 75 bp, Homo sapiens
ccgcccaggaccgccggccgggggacgagctcggagcagcagccagactgattcttgctattccaaatcctcttc

SEQ ID NO: 700967 - DNA, 100 bp, Homo sapiens
cggaaagcttgtcctggtataaagatgatgagctgtcaccactgactaaagaagagaaaactgcggcagagcaattcaaatttcacatgccagatttatg

SEQ ID NO: 700968 - DNA, 101 bp, Homo sapiens
tgggcgacgagctgaccctgggagacatcgacgaacccagcgggtgccgcttctccacccgaggcttccacctccaacgagccatgttccaggctgcagga

SEQ ID NO: 700969 - DNA, 100 bp, Homo sapiens
gtcaagcgacctgtagagcgaagatttggccctgtggtaggaggctggtacaaggttttggatcggttcatccctggcaccaccaaagtggatgcactga

SEQ ID NO: 700970 - DNA, 83 bp, Homo sapiens
aacttgtccacgacaccggctacttctcagctttaccatccctggaggagacctggcagcagcctgactggctcatggagaaa

SEQ ID NO: 700971 - DNA, 75 bp, Homo sapiens
cgcgcctcgctcagctccaacatggttgaaatcacaaagattagacacctttttagataggtgttcttcagcacc

SEQ ID NO: 700972 - DNA, 100 bp, Homo sapiens
gtttggaattgatgatcaagatttccaggaggcaggtggaagtcatcataaagtttctgtttcacccgtcgtccatgttcgaggactctgtgaatctgtg

SEQ ID NO: 700973 - DNA, 51 bp, Homo sapiens
cgggaacccagcatgattttcaggcttaacagagcgttccaaaaagaggac

SEQ ID NO: 700974 - DNA, 75 bp, Homo sapiens
acagagaacctaagtctgtttgcaaagcacctgaactgatttccatggtgtcagtgattcatattcctgatagga

SEQ ID NO: 700975 - DNA, 100 bp, Homo sapiens
cggacgtggtgcttggcttcgccgagttggaagctacagattctcgttgacactggaagcagtaactttgccgtggcaggaaccccgcactcctacatag

SEQ ID NO: 700976 - DNA, 75 bp, Homo sapiens
tgtggccaacgagctcaacgccaggcgccgctcctttacagggcgaactttctgaccaagtatacaactacccag

SEQ ID NO: 700977 - DNA, 91 bp, Homo sapiens
ggaaaaactggagagcttcatcaaaaatagtgatagctttgataagactctgcacttgtccaagagaagaatccagagaaatcagagcagg

SEQ ID NO: 700978 - DNA, 98 bp, Homo sapiens
gcacagccatgatcaaggcgatcctaatcttcaacaaccacgggaagccgcggctctccaagttctaccagccctactgtaacgaaacctcattcttt

SEQ ID NO: 700979 - DNA, 101 bp, Homo sapiens
ccacatttcataaagagttctgattctaagaggcaatctgaatatggcggtgtagtgtttggtggttgggcgcgaatggcccagcccattgtggctttcac

SEQ ID NO: 700980 - DNA, 100 bp, Homo sapiens
ggagttcttacaacatggcagacattgacaaccttggaatggatggctttggccaaccagttggcattcttggacgccctgccacagcatatggattccg

SEQ ID NO: 700981 - DNA, 107 bp, Homo sapiens
ctgcgtttaagttggatttccttccagaaatgatggtggatcattgctctttgaattccagtcccgtgttcgaagtcaacaataccattcttcacccagagatcgtt

SEQ ID NO: 700982 - DNA, 75 bp, Homo sapiens
agcggctgctggaaacgcaagacggtgccgagaagcagctgcgagattcagaatggacagtttagaagaacctca

SEQ ID NO: 700983 - DNA, 75 bp, Homo sapiens
cggcgagggcgcgcggctggtgtccgccccgcccgaaagggcgccctgcgtccggcagaggaggcgagcatcccg

SEQ ID NO: 700984 - DNA, 88 bp, Homo sapiens
tcgccagcagccgtccggagccagccaacgagcggtggttgtgtcaaaccgattggtgacatctccatgctgtattgtcacaagcaca

SEQ ID NO: 700985 - DNA, 75 bp, Homo sapiens
ttgttgagaaatgtgtggaatttattgaagatacagaagtctggacagctgatcacctgaaagagaggagccaag

SEQ ID NO: 700986 - DNA, 100 bp, Homo sapiens
actggtcatccgaaatcaacttggaaagtcaaattacgtgtggcatatggactcctgacgaccaacagattgtagaaggcatgaaacaaaaaatgtggag

SEQ ID NO: 700987 - DNA, 98 bp, Homo sapiens
caggaacacaaaactgcggcccttgtctgcaaacagtggtatcgacttatcaaagttgtggtcagaaatgagaagacatgaaatgttgagggaggagc

SEQ ID NO: 700988 - DNA, 82 bp, Homo sapiens
accctgaccggatcccataaacactgtcggtgattgctggcttcaaccgccttcggcaggaacagcgaggcctggcatccaa

SEQ ID NO: 700989 - DNA, 98 bp, Homo sapiens
ctttttcaccacttaagagaaactgttttatccccaaaaggcctattcctaccatcaaggttatttcacagttgaggattttgggcagatccataaca

SEQ ID NO: 700990 - DNA, 101 bp, Homo sapiens
acgctgaatggcttctacatccccaagaaatgctgtgtcttcgtaaaccagtggcaggtcaaccatgacccgtggagtcttgctctgtcgcccaggctgga

SEQ ID NO: 700991 - DNA, 100 bp, Homo sapiens
ctttccctctcccaacatggcggcctcaggtgtcatggagaaactccagctgggcccagagattctgcagcgggaaaatccaaggcttatttatgccagg

SEQ ID NO: 700992 - DNA, 100 bp, Homo sapiens
cttttctctctcgtcctcgctgctgtacttcgtctatgtggcgcccggcataggtgtcatggagaaactccagctgggcccagagattctgcagcgggaa

SEQ ID NO: 700993 - DNA, 103 bp, Homo sapiens
ccacaccagctctttctccaagtttgatggctgatcttgaaggtttacacttgtcaacttcctcttcagtcatcagtatttgcatctgctggtgatgatggaa

SEQ ID NO: 700994 - DNA, 90 bp, Homo sapiens
gggcctgcagggcgtcccgggtgttcctggcatcacggggaagccgggagttccgggtctgttcctggtttcccagatgcataaaggaag

SEQ ID NO: 700995 - DNA, 75 bp, Homo sapiens
tcgctccatgaatggcaagatattaatttggtaggagtcaatcccaccagcattgactcagtcgtaattgggaag

SEQ ID NO: 700996 - DNA, 100 bp, Homo sapiens
gaaaagaaaaaactgaagaaaaaacttgtcaggtctgaagaaaacatctcagtacggattttcaaatatgcgctatatttcttcgctaattagtggtgtt

SEQ ID NO: 700997 - DNA, 90 bp, Homo sapiens
gcagattattttggtgatgctttcaaacagtgtcaatacaaagatactctccccaaggaaacatcagaaccactattttctagccctctg

SEQ ID NO: 700998 - DNA, 98 bp, Homo sapiens
cgttgcttcaagcgccacggtgcagaagtcattgatacacctgtatttgaactaaagcatttggccaagagacgaatgtccctttgaacaacttcagt

SEQ ID NO: 700999 - DNA, 96 bp, Homo sapiens
ggcagcgtccagcaactccagcctgtccggctcgtcggtgtcctccggtagtatcttccccagcagatgttgctgaaaaagctgacagaattatta

SEQ ID NO: 701000 - DNA, 74 bp, Homo sapiens
gtgcagctgcctcagttcttagcgcaggtcaaaggccctttcagaagcaactccatttcattggataacttaaa

SEQ ID NO: 701001 - DNA, 73 bp, Homo sapiens
gcagtcagagcggagccaagatgcgaatggggaagatgagaatgtgcctactgctcctgatcctccaagtcaa

SEQ ID NO: 701002 - DNA, 75 bp, Homo sapiens
ctaaggaattcccggcccctcagggccacggctttagcggtgtcttttgcgaaatgtggtttggttttgagctgg

SEQ ID NO: 701003 - DNA, 90 bp, Homo sapiens
agccctgctactgctggattagcgccaggatgaggagaacaatccccttgagacagaatatggcctttctgtctacaaggatcaccagac

SEQ ID NO: 701004 - DNA, 82 bp, Homo sapiens
tgcagaaggtctctggagacatcttcagcaggggacggcaaaacagaacagaaaggcggagataaaaagaggggtgttaaaa

SEQ ID NO: 701005 - DNA, 50 bp, Homo sapiens
cactgcgggccggcgaaagctgactgattcttgctattccaaatcctctt

SEQ ID NO: 701006 - DNA, 73 bp, Homo sapiens
agctgcaagagcaacatctttcctcaccccaagattatctccctccaaactctaaagaaggaatataaatcct

SEQ ID NO: 701007 - DNA, 90 bp, Homo sapiens
ggacggacttgagaactgtccttacgtgacctaaagctggagtattttgagattggagaattaagggaacaatggcaaaagcctttgatg

SEQ ID NO: 701008 - DNA, 75 bp, Homo sapiens
gatgttctctactatgttacacgtgatgacttaaaatgcttgagactaagttcacagcaacccaatggacatgcc

SEQ ID NO: 701009 - DNA, 75 bp, Homo sapiens
gttttttcagtcagccatgagcatagctccactttgaggctctgatgaacattccagtgctggtgttggatgtca

SEQ ID NO: 701010 - DNA, 82 bp, Homo sapiens
aaatggatgcaagtttaggaaatctatttgaacgctgtaaatgtaagcctattagagctacacagaagacctatttccggaa

SEQ ID NO: 701011 - DNA, 89 bp, Homo sapiens
cagtctttgaagggcttgccttcaacttttcatgcaacacccaacacttataagcggaagaacacagaaacagctctagacaacaaacc

SEQ ID NO: 701012 - DNA, 100 bp, Homo sapiens
tccgagatcaaggagctgcatctggttttgctgatctttgcaaaggaagatagtcagagcgatggcttctggtgggcctgcgacagagctggttatagat

SEQ ID NO: 701013 - DNA, 100 bp, Homo sapiens
atagtagtgtacaccggtaaagaagggaaaagctctcatgggtgtccaattgctaagtggaaaaccatgataaattctggacaaaatacagaaaacccac

SEQ ID NO: 701014 - DNA, 82 bp, Homo sapiens
agctgctgccgccccttgggctaaaaggtagctacagcaagctgggtagcaggcagatccaaaggatatcatgaagtttcca

SEQ ID NO: 701015 - DNA, 82 bp, Homo sapiens
gtgcaacgggaaagacacctaccggctccggcgccgggcaacgcggaggcgagatacaactcgtcaacgaatcaaattcagt

SEQ ID NO: 701016 - DNA, 82 bp, Homo sapiens
aggaacctgggcgagcagcggcgggggcccgagggaggccacaagaggaagctgaatgaagaggacgccgccagcgagtcca

SEQ ID NO: 701017 - DNA, 75 bp, Homo sapiens
catttcacaactgtcatatgggtattacaggttgctccttgagggcaggacagttcttatggctttatccgttgc

SEQ ID NO: 701018 - DNA, 109 bp, Homo sapiens
cctgtctggtacctggtacccggcacactgtgagttcctggacatcaagggctgccggtctgtgtgatattagtgaagggactgttgttccagaggatcgctgcaaatc

SEQ ID NO: 701019 - DNA, 95 bp, Homo sapiens
ttgtggcacctatctatggtgcagatattaatgggagcatatatgatgaggtgagcgaagcaggtgttcacagaccccatgttggtggaattcat

SEQ ID NO: 701020 - DNA, 96 bp, Homo sapiens
gttagaactctgtaacctgatcacagacaaagagatgcatgtgcagtctttgccaacaaaaaaaattaccaagaaacctattccagatgagcacct

SEQ ID NO: 701021 - DNA, 101 bp, Homo sapiens
atgggaaaagattgcccacgaattgggtcgatctgtgacagataatttgcaccatcctgggattgtaaacctggaatgtatgtttgaaaccccagaacgag

SEQ ID NO: 701022 - DNA, 89 bp, Homo sapiens
tgaggaagatgttgcagagttgtcaatttctccttcagacaatgcagtggtcttaacaagcacagaaaactgaatctgtagataacgag

SEQ ID NO: 701023 - DNA, 83 bp, Homo sapiens
cccatcgaagctctagaaatgaatgtttccatctcttcagagatgaaccaggaaagcggagggaaaggccacttccaccactg

SEQ ID NO: 701024 - DNA, 129 bp, Homo sapiens
tcccaagaagcactcagtgcccttactgctcgtctcagcaaggaggagactgtgctggcgatccagtttgtgtgttctctgtgcaaataccggaccttctatgaggacgagatggccagccatcttgac

SEQ ID NO: 701025 - DNA, 100 bp, Homo sapiens
cgggcggagacgtgggcgccctccccgccaaggcccgtgcgaggtactaggttttgacaagcttgcatcatgcgtgagtataagctagtcgttcttggct

SEQ ID NO: 701026 - DNA, 90 bp, Homo sapiens
cagaaatctgtctccaatttgcagaaaccgacacagtcaatcagtcaggaggcggccctgcgcgggggacggcgcgctcctggacaccgc

SEQ ID NO: 701027 - DNA, 100 bp, Homo sapiens
tgctccacttcagcttctttgtcaccataggagacatggacgaagccttcaaatccatcaagctcatcaaaagagccccagtttgagggacagcgggata

SEQ ID NO: 701028 - DNA, 98 bp, Homo sapiens
caaaaagaaagaggtgcatcgtatcaactcggcgcacggatcggataaatcgaaagatactatactggcaattgctggagaagattttgcaattgttg

SEQ ID NO: 701029 - DNA, 100 bp, Homo sapiens
gtcgctgattccagagagctaaagccgatgtactgctttaaggagaatgaaaacgttacagttgataaagcctgttttctgatctctaacatcactattg

SEQ ID NO: 701030 - DNA, 90 bp, Homo sapiens
gccgaaggcccgagcgcccgaggcgtctgggatggtgtgggaccgggtatcattgcccagtgcctaagatcttttatgttcagctcactg

SEQ ID NO: 701031 - DNA, 99 bp, Homo sapiens
tcagacagaacaatcagtgatgaagatgaatcggtttcacagatggcagtgttacattgaacaaaggagacatcacccgggaccggcatagcaagaccc

SEQ ID NO: 701032 - DNA, 100 bp, Homo sapiens
tgtttccctctcctaaagcctggaatttcagagggggagaagatgtcaaccggacactagaaggtggaaggaaacctcttcattatgcagcagattgtgg

SEQ ID NO: 701033 - DNA, 97 bp, Homo sapiens
gccgcgcgccacccgctaggatgccggtggccccagcgccctcagccgacggagactactgtcagaggatgtaggaatggacatcccctttgaagag

SEQ ID NO: 701034 - DNA, 83 bp, Homo sapiens
caaaccgggaaaggagaggatcccggagccgacaagaagctccgccacgcccgcagtggggcccccgctggagggcccagagc

SEQ ID NO: 701035 - DNA, 96 bp, Homo sapiens
gcggccacggaggcaccatgaagaagtcttactcagtgtgtgttttaatagaaaagttgtcactttccaaaatgccctttagaggtgacaccgtaa

SEQ ID NO: 701036 - DNA, 80 bp, Homo sapiens
atccagccttagcaaaccagagaaaacctcggatcaattctcagctggtggcacaacaagtggcacaacagtatgccacc

SEQ ID NO: 701037 - DNA, 75 bp, Homo sapiens
tgtaaacccaaaaggagcatgaaacgagacgacaccaagattttcagctgaactctcatctctcaacactggcaa

SEQ ID NO: 701038 - DNA, 75 bp, Homo sapiens
cagcctgaagttctggcctacgtctgtgtcaaagttaaacacagtgggaatatcacttttgatgagattgtcaac

SEQ ID NO: 701039 - DNA, 122 bp, Homo sapiens
ctttctactcctaaatctacgaaatcctccagttcctctccaactagtccaggaagtttcagaggattaaaggacactgtaatttatgatcgactggcagagacgtcaaaatacaaagaaat

SEQ ID NO: 701040 - DNA, 76 bp, Homo sapiens
ggaagcgtcgggattaggtgaaagtgaccattgtgaggtagatattttgttctaattttccagatgaggaagctga

SEQ ID NO: 701041 - DNA, 83 bp, Homo sapiens
ccgacagcgccatggcccagattctgccaattcgttttcaggagcatctccagtgcctccggagccagcgtggtggccataga

SEQ ID NO: 701042 - DNA, 60 bp, Homo sapiens
gtccgtcagtccctaggtatccgcactgctcaggggcataagatgcacatttttctgctc

SEQ ID NO: 701043 - DNA, 87 bp, Homo sapiens
agccaagatggtgaagcagatcgagagcaagcaacacagtcactcctggcggcaaaccaaacaaaaccagagtcatctggggaaaag

SEQ ID NO: 701044 - DNA, 75 bp, Homo sapiens
ccccggcccacagtgggggtgtgcaaacccgagagaactggtcgcaatgtatctgctgagcaaaaagatgaaaac

SEQ ID NO: 701045 - DNA, 82 bp, Homo sapiens
gactttatgggctcagcctttctggatctgacacaattggagttaaacagagaattcagcctcagcccccagatgaagatgg

SEQ ID NO: 701046 - DNA, 82 bp, Homo sapiens
cttgagatcggcgctttgagaactgagcgcatgtggagttcggaggaaaagggctcagtaatgtgtgtggctggtattggac

SEQ ID NO: 701047 - DNA, 75 bp, Homo sapiens
ccgagaccacagccaccactattctagcatccgtgaaggagcaggcaattgctggctactttgatatatattttg

SEQ ID NO: 701048 - DNA, 100 bp, Homo sapiens
gagaggaggccccgggagggcagccactccccgctggacagcgccgacgtccgggtgcacgtgccacgcacgaatacgctgccatcaactccatgctgga

SEQ ID NO: 701049 - DNA, 51 bp, Homo sapiens
tacagcttacatcttgcatcctcaagcgatgttttctggcaaaggccttcc

SEQ ID NO: 701050 - DNA, 100 bp, Homo sapiens
cctgggcagcctgctggaccctgccaagaagtcgcccatcgcagcagctcggttccaaggagcaggggcctcgacaaaggaagggagcagccccagcaga

SEQ ID NO: 701051 - DNA, 90 bp, Homo sapiens
gagctgctaggcttacagcaggctgaggagagactgaagagagactgcattgacaggctaaaaaggcctgagttctaccaagtatgccac

SEQ ID NO: 701052 - DNA, 130 bp, Homo sapiens
gttccacgtgaagctcaccgacagtgccctgagggccttcgagagctaccgcgccagacaggccctgatccttcaccagctaggccgctacagtctggcggagaagatcctccgggacgcggtgcaggtg

SEQ ID NO: 701053 - DNA, 75 bp, Homo sapiens
gaaaaagctgccctgagacggtgtcccgccgaaaggttaacacagaaatctgcctcctgggccatgccgcttcta

SEQ ID NO: 701054 - DNA, 75 bp, Homo sapiens
aaccattcccgcggagaatcaactctgaacggaaagctggcagctgtcagcaagatggagtttcactcttgtctc

SEQ ID NO: 701055 - DNA, 51 bp, Homo sapiens
tcctgttttgctccaagggtgcctgatagctgccaatggctctaatgaaga

SEQ ID NO: 701056 - DNA, 98 bp, Homo sapiens
agtgtccttcatcaacatcaagacactcaatgagtgggattccaggggtctcgctctgttactcaggctggagtgcagtggcacactgcagcctcaac

SEQ ID NO: 701057 - DNA, 100 bp, Homo sapiens
aagagcaaacagattcagtggcctgcattggcgcatattaaatttcctattgactacccctattcaccacctaccttcagattcttgaccaaaatgtggc

SEQ ID NO: 701058 - DNA, 75 bp, Homo sapiens
tttcccaaaattcagaaatcaaccaagttcatgaacccattaaaagagccagtaaatcctgtggaaaatggcctt

SEQ ID NO: 701059 - DNA, 100 bp, Homo sapiens
gccaaacagtgtcactcccaccacccaccagggcccctggtcggagctcttaggcctgctgaaaacctacaactgctaccatgagggcaagagcttccag

SEQ ID NO: 701060 - DNA, 123 bp, Homo sapiens
tacaatggcaccatttttgcttatggacagacatcctcagggaaaacacataccatggagaaatctcccaagcctaagaagaagaagcacaggaaggagaaggaggagcggaccaaaggcaag

SEQ ID NO: 701061 - DNA, 90 bp, Homo sapiens
accacttaagcaaacttaatataccagacactgcaactgataccccatgtttccccatcactcgaggagtctgggcagagactggactac

SEQ ID NO: 701062 - DNA, 100 bp, Homo sapiens
tagggctcagggagcaggagcttcaggttgtccgagcatctgggaagccctagactggagctggttacagacggaagaagaagagcacagctgcctggag

SEQ ID NO: 701063 - DNA, 82 bp, Homo sapiens
tggaggcctgggaagccaacgaccacacgcacctgtcaggattggagctgctttccgagcacctggaccccaaactcctgtg

SEQ ID NO: 701064 - DNA, 90 bp, Homo sapiens
cagcctactggtgactcggctgcagatttggagcaagaggtggtggtggccttcccccgaagaaatttggtaatcctggggagcgtttgc

SEQ ID NO: 701065 - DNA, 74 bp, Homo sapiens
cgggacctggcacccgaatccggcctgccgggctgtgctgcaggcgctggggtccgtggtggcagtggaggagc

SEQ ID NO: 701066 - DNA, 100 bp, Homo sapiens
accagttctccgctggaaaaagggacaaaagattgcccaaaagaatcagtcaggtgacacacagtcttttgcacagaagctccagctccgggtgccctcc

SEQ ID NO: 701067 - DNA, 100 bp, Homo sapiens
agacaacaccgagtatgagaagtcacatgtgccaatttaacgaacggtggaaagtcagaacttctgaaatcaggaagcagcaaatccacactaaagcaca

SEQ ID NO: 701068 - DNA, 100 bp, Homo sapiens
cgaactgggtggcgaacggggcgagcctggaggattgtcactccaacctcttttcgctgacacgatgaggcgagtggtacgacagagcaagtttcggcat

SEQ ID NO: 701069 - DNA, 83 bp, Homo sapiens
atcctgtgaatttcagatgttgaaaatcttcggaaaagccctgaaagatgaacagctggacagtgccacatcgcttatccagg

SEQ ID NO: 701070 - DNA, 82 bp, Homo sapiens
gactccttcggcagtccacccaccgccgccgcctcccagcatacagtgaagttgttctctgaagttcctcatctgccttaag

SEQ ID NO: 701071 - DNA, 98 bp, Homo sapiens
caaaccaaactggagctggtgcagcaggaattgggatcgtgtcgctgcgacacaggtttatttcaacactgggaaggctccattcctacttaaaccca

SEQ ID NO: 701072 - DNA, 100 bp, Homo sapiens
cttctccctgcttaacgagaaccatagataacgaaggaggcccaacttcattcaataaggagcctgacggatttatcccagacggtagaacaaaaggaag

SEQ ID NO: 701073 - DNA, 75 bp, Homo sapiens
ccatgttggtgctgtttgaaacgtctgtgggttacgccatctttaagcacaacataactgttgtccacatgcctg

SEQ ID NO: 701074 - DNA, 90 bp, Homo sapiens
gaaatccttcgcaatgtcaccatcctacgagaagcagcgctatgcaaacaagcactgaagaggaatcggagtagaatgcgtcagttggac

SEQ ID NO: 701075 - DNA, 75 bp, Homo sapiens
tggccctggagtatcttcagaggtaccacatcatccacagtgttatagttttgccgctggactcttccctccctt

SEQ ID NO: 701076 - DNA, 83 bp, Homo sapiens
cgcgcctgggctgccggcacttcgcggcaggtatcatgatattagctggtttgacatcaagtcatttgtgagtcatcagatct

SEQ ID NO: 701077 - DNA, 101 bp, Homo sapiens
gagcatttgagcttcagatttctaacagcagccagacccggtccgtttggaatgcctgggatggtgccgccgcatgttcctcctcagatgctcaacattcc

SEQ ID NO: 701078 - DNA, 75 bp, Homo sapiens
ctaattaaaggagtcgagagacttatctccggacaacaagtacgaattggagcaatgttggcttatacacctctg

SEQ ID NO: 701079 - DNA, 82 bp, Homo sapiens
tgccctgtctcctcgcagatgagggccgggactgtcacttggtgatacagctctgcagaacctggagcagctgctagacggg

SEQ ID NO: 701080 - DNA, 82 bp, Homo sapiens
cgccgggcgctctcgcttcagtcagtcgggccgcgccgcgcctcagctctgggggatatgagactttctactcggaatatcc

SEQ ID NO: 701081 - DNA, 75 bp, Homo sapiens
agaataagaaggagtatgtacacctggtatgccagatgagaatgacaggttctgacaaagagattgatgtgattg

SEQ ID NO: 701082 - DNA, 100 bp, Homo sapiens
taaatacattgtccagtaaagcatcgttggcttcacagtatgactgatgatcctccaacaacaaaaccacttactgctcgtaaattcatttggacgaacc

SEQ ID NO: 701083 - DNA, 75 bp, Homo sapiens
aaggattccaagtaactcttatttgatggagaacatcattgcaacagtaagagattccaacctcaagctgaccct

SEQ ID NO: 701084 - DNA, 50 bp, Homo sapiens
tgtttgtgttgcgggggccggacttcaagattgatcgtgtcctgtgctga

SEQ ID NO: 701085 - DNA, 98 bp, Homo sapiens
ggatttaccaacatggtggaaaggaccacgcccggcagcaaagatctctccaggatgtttggatctggccgagaacataactttacacgacccaatga

SEQ ID NO: 701086 - DNA, 75 bp, Homo sapiens
aacagctatggtgatgattagagacatactaatgtacatgatgtctgctccaatgaggatctccctgaagttgag

SEQ ID NO: 701087 - DNA, 95 bp, Homo sapiens
aagagagatggctctgatgtcatttatcctgccaggatcagcctccgggaggagacaagataccagcttcttcagttgcgccccacacagcgtgc

SEQ ID NO: 701088 - DNA, 80 bp, Homo sapiens
cgcctccgtcgccgccgtcagagccgccctatcagcacaacaccatggagtctctgttagagcgaggtgagaagctagat

SEQ ID NO: 701089 - DNA, 134 bp, Homo sapiens
aggaagatagtcttgggacccttgcatggtgtttcaaagggtggtgaagaactaagggaacaacctatcttcagcactcgagctcatgtcttccaaattgacccaaacacaaagaagaactgggtacccaccag

SEQ ID NO: 701090 - DNA, 82 bp, Homo sapiens
tttgatatgttttttggaggaggaggaaggatgcagagagaaaggagaggaggaggtgcgccagtctgtaactcctgccgag

SEQ ID NO: 701091 - DNA, 100 bp, Homo sapiens
gaaaaaggagagcctctgagctcaacggaggattgtgcctgagaagaacccacagagattctgtttctggcgtctgcatacgcaagtccccaactcgctg

SEQ ID NO: 701092 - DNA, 75 bp, Homo sapiens
ccgcaacaataagaaactcctgggccgcgtgaaggccttcgatagcatccgcacttccactaatagccaagtaga

SEQ ID NO: 701093 - DNA, 83 bp, Homo sapiens
aggctgctgaggggtccagaaacccgagacaagctgcccagcacagtgcctccggagccagcgtggtggccatagacaacaag

SEQ ID NO: 701094 - DNA, 51 bp, Homo sapiens
gtaatcaattgtgctgacaacacagatggagtcccctgtttccacaccagc

SEQ ID NO: 701095 - DNA, 102 bp, Homo sapiens
agaatagatgttcatatgttggctgtggtgaatcacaagtagatcacagcaccatacattctcagttacagctcttttgaggaagcttaagcagcaatccag

SEQ ID NO: 701096 - DNA, 116 bp, Homo sapiens
agctgcagggaacagctgcggtgctctgccatattgtgtcttccccggccggtccctcgcctcccggccgagctgacggtactccaaagattcaggtttactcacgtcatccagca

SEQ ID NO: 701097 - DNA, 75 bp, Homo sapiens
agcgcggagttaccccagacccctcagcgtctggcatctctagaacaacagaggcagcagttgcttactgaacgc

SEQ ID NO: 701098 - DNA, 82 bp, Homo sapiens
ggcctggtttgatactgacctgtaaatcatcctttagggggtccactggacggggcctgagctacaacttcacccacctgga

SEQ ID NO: 701099 - DNA, 99 bp, Homo sapiens
cgcttgggcgcacttgccgggtcaccttgtcccggagtgggagagcccatcaactgtgaggcctgggagtggcttcacagggtggtgggggacagcagg

SEQ ID NO: 701100 - DNA, 98 bp, Homo sapiens
tttgctgacgtgtcatttctaagtactttctcctactccataaagacttcaagttgaaaggattgtagacaagaggaagaacaagaaaggaaaatggg

SEQ ID NO: 701101 - DNA, 83 bp, Homo sapiens
gcccctgttgcgatggcgcagaaaccccgttgacaaggcactgctttttcatgacggatttttagactctgaggagcagttgg

SEQ ID NO: 701102 - DNA, 100 bp, Homo sapiens
gttccaagtattccctatctaggtgaccaagaatatggcccaggtgaccaaagccctggacaaggccctgagcaccatggacctgcagaaggtctcctca

SEQ ID NO: 701103 - DNA, 95 bp, Homo sapiens
aaaagtagtatgcttttatagacgacgtgatatttccaacacacttataatgctcgcagataagcatgctacgtcgagggcgaggcccccagcag

SEQ ID NO: 701104 - DNA, 78 bp, Homo sapiens
agaaacaaaatgtcaacaaattgatggaaatcatgagtggaggatctcaagtccacattttttggggtgctccaattg

SEQ ID NO: 701105 - DNA, 95 bp, Homo sapiens
gttcccttgggaaccgcctgggaactccgccatgtcatccacttcgcccaacctccaggattcttactacagatttaatgaccttaactacagat

SEQ ID NO: 701106 - DNA, 82 bp, Homo sapiens
gatccagcctgcggagcctgtggggcagacgagccaaactcaggctgtaccttgagcagctcaagcaactggtgcccctggg

SEQ ID NO: 701107 - DNA, 75 bp, Homo sapiens
taagggttcagcctttcaatgtgacacaaggaaagtattctacagtctatccttcactggagtctgatgatgatg

SEQ ID NO: 701108 - DNA, 71 bp, Homo sapiens
ggaggaattctgatttataagaacagggtacgaatgaatacctttccatgtgttcacaataatgtttcgac

SEQ ID NO: 701109 - DNA, 75 bp, Homo sapiens
atagacaactctgggctattttcaggtaacacgtacacagacctctcggccggaatctccagggatgaccagccc

SEQ ID NO: 701110 - DNA, 82 bp, Homo sapiens
cggaccaaaaattcactcactttgcaatggaaggaatacggttggacagaatgaactgaagattacaagtgatcaagtgata

SEQ ID NO: 701111 - DNA, 73 bp, Homo sapiens
aagacacgcttcttctggaagaccagccaacaggtcttgccccagaagctgcgggcacatccacgcctgaaat

SEQ ID NO: 701112 - DNA, 102 bp, Homo sapiens
tgtcaagagtttttctaatatgggcagtaacacatagcgtcaaagagggaaaagcttcactctgaccatcactgtcttcacaaacccaccgcaagtcgccac

SEQ ID NO: 701113 - DNA, 100 bp, Homo sapiens
caaaagttgattcaggaaagactgtaaaactcaactctccactggaaaagataaactccttttcgccacagaaaatgcagagtttgcggggtggtacaga

SEQ ID NO: 701114 - DNA, 100 bp, Homo sapiens
gagccggcgcggtcgcagtctccacggcgcaggcccacggtagcgcagccgctctgagagtcccctttacttggtaaatcacggcgagagtggaccagtc

SEQ ID NO: 701115 - DNA, 75 bp, Homo sapiens
atgatgaagaagatgcagttgccagaactgcccaaggacatcagggagaatgaagttgaagaggtaaaagaggag

SEQ ID NO: 701116 - DNA, 75 bp, Homo sapiens
caaagttcacattcaaccagttattacagatttggaaatctgaaatagagtactatgctatgttggctaaaactg

SEQ ID NO: 701117 - DNA, 100 bp, Homo sapiens
cttgaacttaatacagcaagaaagaccatcaagtttaccaaccctggaagctgtcctgaatttcaaatactctggaggcccgggccacactgaaggatat

SEQ ID NO: 701118 - DNA, 144 bp, Homo sapiens
tcctctggtgcgaaattccggatttccttgggtcttccggtaggagctgtaatcaattgtgctgacaacacagatatgccctgcaaggactctgccctgcagatggggagcatcaaggagaaaatgaaagctggctcacgaaca

SEQ ID NO: 701119 - DNA, 98 bp, Homo sapiens
tacatgcgaaatatgataaagcatgccgaaatggagaggacatctgtcttagagaaacaaaccttaacagtggaagtagaggttgtgatcatctcgaa

SEQ ID NO: 701120 - DNA, 90 bp, Homo sapiens
ggattggagtgaaccggagaccccgaaaacggaagcgcagggagaaggaagaggtgtttgaaaagcttggagaacagccatctctggaag

SEQ ID NO: 701121 - DNA, 97 bp, Homo sapiens
tcgggccagacccaggactctgcgactttacggcggcaccttcctacttctgcccagccacagccctcccctcacagttgagcacctgtttgcctga

SEQ ID NO: 701122 - DNA, 100 bp, Homo sapiens
aaggatggaagaagagacgaagagacagctggatgaatgtctttggtgcaacactaacaaggcttgtctggactacccagttacaagcgtcttgccaccg

SEQ ID NO: 701123 - DNA, 95 bp, Homo sapiens
acacctcagcccggggctgcactgccaccctgggcaacttcggtctcggcgcggaagatggccggcggcgtggacggccccatcgggatcccgtt

SEQ ID NO: 701124 - DNA, 75 bp, Homo sapiens
ttgacccggaggaagatgaaccaacgttagaagcagcctggcctcatctacaggctgaaggggatgctaagggag

SEQ ID NO: 701125 - DNA, 101 bp, Homo sapiens
aacatctctttctcagctttaacaatatatctagtgattcgcctttgccagtctcatctcgtgtctgctttgttaagttccatgatccagactcagcagtt

SEQ ID NO: 701126 - DNA, 83 bp, Homo sapiens
cttggccatcctgctctttgtatatgaacagaagattccatgcaagcatgttttttgctatgactgtgctattttacatgaaa

SEQ ID NO: 701127 - DNA, 75 bp, Homo sapiens
tgcagctcattaccagtctgaaggagcaaggaatgggtaccacagaccatgtcatcgtcctggcgtccacgaacc

SEQ ID NO: 701128 - DNA, 75 bp, Homo sapiens
ggtttgtgtatgacgccgagggacctcacatcaacttctaccagctgtagagacggggtttcactatgttggcca

SEQ ID NO: 701129 - DNA, 100 bp, Homo sapiens
aagacagtccctggatcaccgacagcacagacagaatccctgctaccagcgggcgctaatattgacacctgctcagaagaccagaggaccccgttgatgg

SEQ ID NO: 701130 - DNA, 83 bp, Homo sapiens
gatcccgagtctgccatgctagatacgctggatagaacaggctcctggaatcccagctgcagtcacagaagaggagccatgag

SEQ ID NO: 701131 - DNA, 82 bp, Homo sapiens
cttggttccccctccctcagcttccgccccaaaagtggaaatcatgacctatgtaacatggaaactgagtacatttcctgca

SEQ ID NO: 701132 - DNA, 100 bp, Homo sapiens
cctgctgctactgtgtccagcgcagattgtccccttggggcggaaagaagccaaggccaaggagctggtgcggcagctgcagctggaggccgaggagcag

SEQ ID NO: 701133 - DNA, 83 bp, Homo sapiens
ggatctctgaagtcctcccaactaggcagagaaatcggcaggtaaagtgaggaaacatgcaactgaacaggaaaaaactgaag

SEQ ID NO: 701134 - DNA, 97 bp, Homo sapiens
cctggagccagaaacattaccgtcatattccacccattactaaggactacaggaatatgtggaagctgtctcttttcaacacttcatcaaaacacga

SEQ ID NO: 701135 - DNA, 88 bp, Homo sapiens
gcacctgcgcgaagctggccaaagcctgcccagacggctcacctgtgcgggatggaacaaaagatagaatgagtccatttaagtccca

SEQ ID NO: 701136 - DNA, 82 bp, Homo sapiens
gccgctgccgctgccgcacctccgtagctgactcgctgcctgtggaggaaccgattgtgtccacagatgaggtcatcttccc

SEQ ID NO: 701137 - DNA, 75 bp, Homo sapiens
cgacgaaccttggagagaggagaacgaacatcttctggacctttgtccagattcctagaggggagtgcctgcgag

SEQ ID NO: 701138 - DNA, 83 bp, Homo sapiens
cttgttgcagatcctgattgtaggtggtgtccagctccagactgtggaacatccagtcatggataaaaatgagctggttcaga

SEQ ID NO: 701139 - DNA, 75 bp, Homo sapiens
atacgctttgttggtggactactctcagcctactatctgtctggagaagaggtggatcggatcattttctgtgtc

SEQ ID NO: 701140 - DNA, 75 bp, Homo sapiens
gcggcccgagcgcgccccaagcccgggcgccaccgctgccacctccgcgagggtcctgaggacaccgtgagccag

SEQ ID NO: 701141 - DNA, 103 bp, Homo sapiens
actgcagccacgcgggcgagcggctgtgtggatgtcggcgaagccgcgggcgaggttttaaaatcaaagatgggaaaatcggagaaaattgcccttccccatg

SEQ ID NO: 701142 - DNA, 100 bp, Homo sapiens
tgtggaacaaaagaaaagacagttggaggaatctgtcgatgccctcagtgaagaactagtccagcttcgagcacaaggtctcattcaggaacgtcgcctg

SEQ ID NO: 701143 - DNA, 74 bp, Homo sapiens
cagtcggctttaccctatcgacgcagcgtccccactccataaccagcagaccacagcattcaggcatcctgtga

SEQ ID NO: 701144 - DNA, 82 bp, Homo sapiens
aggtgagactttcacaataagagcagaggatggaacacttcagtgcattcaaggtcaaaatgcagatcttcgtgaaaaccct

SEQ ID NO: 701145 - DNA, 76 bp, Homo sapiens
gctccctagcaccttctccagtcgacactctcgcgcccggaggttgcagtccatgagctgggaaaggaggcagtgc

SEQ ID NO: 701146 - DNA, 51 bp, Homo sapiens
ccgatatgatgctgtgaagagtaaagtctttgatttgcgtcagtgtcatcg

SEQ ID NO: 701147 - DNA, 100 bp, Homo sapiens
aatgctctgctaaagacaattttgtgctcagaactaagctaaagacacacagcctcagcagtcgcaagagccacctccatagacatcgaagaagccaata

SEQ ID NO: 701148 - DNA, 76 bp, Homo sapiens
gtctacggctggggccgtcccagttcgcaatgagaaagtcttcagatcctgacctgaggcgatccttagataagca

SEQ ID NO: 701149 - DNA, 100 bp, Homo sapiens
tcagatatggcccagactaaggagtccatagttaattcttggtcctttagtgagtaaagtgaaagaataccaagtagagacaattgtagataccctctgc

SEQ ID NO: 701150 - DNA, 100 bp, Homo sapiens
gaacacaccatccaggacattgcacccaactatgctggagtgcagtggcatgatctcgactcactgcaacctcagtcctccgggttcaagtgattcttct

SEQ ID NO: 701151 - DNA, 50 bp, Homo sapiens
tacactcaactaattggcatcatcacagtggcccatgtgagcaagtttag

SEQ ID NO: 701152 - DNA, 100 bp, Homo sapiens
gtgtaaacccaaaaggagcatgaaacgagacgacaccaaggtcctggacatctgtgtctcgctgttgatgggagagcagtttctcgtcagctggtgttag

SEQ ID NO: 701153 - DNA, 102 bp, Homo sapiens
gaacttcgttgcttgcttgcctgtgcgcgcgtgcgcggacatggcctcaaacgggcagctggtggaatttttgaagaaaatggaatctcgaggccccctttc

SEQ ID NO: 701154 - DNA, 100 bp, Homo sapiens
cctgccggagccgtggtggcagccccgggaggagcactggcgtctgtttccttcgggacttaagtcacaacagattatctttcatcaaggcaagttccat

SEQ ID NO: 701155 - DNA, 82 bp, Homo sapiens
tcaccggatgtaaaagaactctggctagagaccctccaaggacctagaggatcaagacataatgggagcatttttagacaag

SEQ ID NO: 701156 - DNA, 100 bp, Homo sapiens
ctgctggcgctgcagctgcacttgctccgggcgctggcgcaagcccagctgcagctccagcaggtggcgctgcagcagcagcagcaacagcagcagttcc

SEQ ID NO: 701157 - DNA, 74 bp, Homo sapiens
ttttgatggatatatcttccttgacagcaaagtaatccagtccctcatagcactggtgaatgacccccagcctg

SEQ ID NO: 701158 - DNA, 82 bp, Homo sapiens
taatacttcccggatcccaggagaggagacagggagcatcgagtacagctgtccggcctccaacgagtgtgagatcaccaag

SEQ ID NO: 701159 - DNA, 96 bp, Homo sapiens
taaagacagggatatgagtgaagaaaacacagagccaccctggaaagggaatgggtactgttcaaaaaggaatgccccacaagtgttaccatggca

SEQ ID NO: 701160 - DNA, 100 bp, Homo sapiens
cagaactcggttggggagatcacagtccatgccaagcttactgtcctccgagatgatgaccactggatcgtcgacacagactacgacacgtatgccgtgc

SEQ ID NO: 701161 - DNA, 90 bp, Homo sapiens
tttgggaataacatttcttggaattggactgtgggcatggaatgaaaaagatcgcaacaatgcaaggcaaattcatgaaggtgcaagttt

SEQ ID NO: 701162 - DNA, 82 bp, Homo sapiens
gtctgcgtgagaatagagaccaccgaggagcatcagatccatgctgctgctgactcggagccccacagcttggcacaggctc

SEQ ID NO: 701163 - DNA, 100 bp, Homo sapiens
gcgactccccggctcgaagcctggatgaaatagatctctcggctctgagggtggctttaaccaagagagcagatccagctgagcttagaacaatattttt

SEQ ID NO: 701164 - DNA, 109 bp, Homo sapiens
gaattttatggaaagaatgatcttacattaggaatatttttagagagatactgtttcagacatatctgaagagatggattaagaatgctttggattaaggattgtggag

SEQ ID NO: 701165 - DNA, 100 bp, Homo sapiens
cactgatcccttatccactcatcactaaggagcgcattaactgcctggaagggacccacgagttttttgaggccattgggttccagaaggtgttgcttcc

SEQ ID NO: 701166 - DNA, 100 bp, Homo sapiens
ccattttctactgtccctgcgcgagcactactgggttggggtctccacgaccgagctggtctcatcaagtggcgtccaacaaggggctcaaacccgggtt

SEQ ID NO: 701167 - DNA, 96 bp, Homo sapiens
gcgacatgtcgacctgacgctctacacgagtgcgcccccacccctgtgtccaagtggccgcactccagacctgaaggctctactcaacgtggtgga

SEQ ID NO: 701168 - DNA, 100 bp, Homo sapiens
gcctgcctggcatctctctctcccggtgagtctcccaggtgacatataagggccactgacaagatgaccaagtcccgcccagaactcaccttaggtgtct

SEQ ID NO: 701169 - DNA, 82 bp, Homo sapiens
tgaccaccaccctcgtgtctgccaccatcttcgacttgagcgaagttttatgcaaggggttgtgtccactgtggtccccgac

SEQ ID NO: 701170 - DNA, 97 bp, Homo sapiens
tgaaggtgttcattccatctctcttcctttctcatgttttggctttggggctagggatccggagtgttggaacagcagctgttaatatgtgccttgt

SEQ ID NO: 701171 - DNA, 100 bp, Homo sapiens
gtaactgaagtatctgcccctgtcaaatcattccagttccaggagtagattttagcataactcaattcgtaaggaatcttggacttgagcacctaatgga

SEQ ID NO: 701172 - DNA, 51 bp, Homo sapiens
tgacaaagatggtgatggagaaaagccctaatttgtttagaactgtaatat

SEQ ID NO: 701173 - DNA, 75 bp, Homo sapiens
tgtcctgaaggagttccaccaggccgggaagcccatcggagcctggaaacctggccggcgtcaggcacatcatcc

SEQ ID NO: 701174 - DNA, 100 bp, Homo sapiens
ttggcctgatgctgaactctcgaggaataactgaagtgaagtgatggactccgatttggagagtagtaagacgtgaaaggaatacacttgtgtttaagca

SEQ ID NO: 701175 - DNA, 75 bp, Homo sapiens
cccggctcgcggggcccggcgaagggcaggaggagaacatttgcctgcactgggcggcgttctccggctgcgtgg

SEQ ID NO: 701176 - DNA, 76 bp, Homo sapiens
cactgaactaaaggctgactttccagacaacgtttaccaaagatgcaggtcattaggaactattctggaacaccac

SEQ ID NO: 701177 - DNA, 90 bp, Homo sapiens
aacaaaatgattttatgcaatcgatacttcacactatggagagggaagcagatggctcaaaactgaaggagatctttgacaagatccaca

SEQ ID NO: 701178 - DNA, 83 bp, Homo sapiens
acgaagtaggccgtctcgctctgggtctccaggcccgcgaccgtccgccagtcgtcccgagtctgcgctcctcagaccaccgg

SEQ ID NO: 701179 - DNA, 90 bp, Homo sapiens
cgccctcatggggaaaatctccccggtgactttcagggtggtgaaggaggagatctttgatgacaatgccaagcttccctgcttcaacgg

SEQ ID NO: 701180 - DNA, 75 bp, Homo sapiens
ctaactaactggttcaccttcctcttgtataagttcctcaaggccctgaagtactctttccagacccacgaccgc

SEQ ID NO: 701181 - DNA, 83 bp, Homo sapiens
caggcactcacactcctgggagccggctccagagctcgtccgcatggtgctgaatggctgaggaccttcccagtctccccaga

SEQ ID NO: 701182 - DNA, 82 bp, Homo sapiens
ccagatatcttgaaaagctgccagaaagaactcccccactggaaaggattctgaaagaaatgaagtcagccctcagaaatga

SEQ ID NO: 701183 - DNA, 100 bp, Homo sapiens
catggtagacaccgtgacatggcacaagatgcgagatgaaatccacgatgggatgaacctggagctttattatcaatagatgagaatcctcatcttcctg

SEQ ID NO: 701184 - DNA, 50 bp, Homo sapiens
catggcggagcagacctactcgtggagagaagaccaagaggtcggagaag

SEQ ID NO: 701185 - DNA, 96 bp, Homo sapiens
tttggatgtagcaaggaagaaattgttcagttcttctcagggctttttggtggtgctggagttggcaagactgtactgatcatggagttaatcaac

SEQ ID NO: 701186 - DNA, 99 bp, Homo sapiens
caaaatgctattgccctgtcttcatcaacatttaatcagcagcagaagatgtcgttttcattggacctgacacacatgctattcaagccatgggcgaca

SEQ ID NO: 701187 - DNA, 75 bp, Homo sapiens
tttgcgacggaaatgtgtcatcgaaagccagtatggcacccgggccctgcactgtgtcctcaccaccatcctgag

SEQ ID NO: 701188 - DNA, 75 bp, Homo sapiens
tcctgttacagacattgaggaaattatccgtttctggaaacattctacaaatacagattctgttcatcttgctct

SEQ ID NO: 701189 - DNA, 100 bp, Homo sapiens
tgttcaccgagtatcaggccagtgcgtttgggaatgtcaagctggtggtccacgactgtcccgtctggagctccactggttcaacagcctctcctccagt

SEQ ID NO: 701190 - DNA, 99 bp, Homo sapiens
gcaatcacagaagccgacaaggcgttcaagcgaaaacatgaccgctgagcccatgaggtgaggggaatgacgtgtgcctcctgcgtacataaaatagag

SEQ ID NO: 701191 - DNA, 75 bp, Homo sapiens
aaaattaccattttatgatttactggatgaactgataaaacccaccagtctagttattttaccaagaaaatggtt

SEQ ID NO: 701192 - DNA, 100 bp, Homo sapiens
gttatgaccgctactcaggaggaaattacagagacaattatgacaactgaaatgagacatgcacataatatagcttatcttaatggccatgcagaaaccc

SEQ ID NO: 701193 - DNA, 74 bp, Homo sapiens
gtatatgaacttctcaacaccattgatgcctgccagtgccattttgatatcgtgacaagtcagcagcaggagat

SEQ ID NO: 701194 - DNA, 100 bp, Homo sapiens
cgacattcagagttgtttcctccatttgctaaaggaatagtgtttgagccctatgagtttgtctctctggaatggctgcaaaagtggttggatgaatcaa

SEQ ID NO: 701195 - DNA, 100 bp, Homo sapiens
ccccggcccacagtgggggtgtgcaaacccgagagaactgggctgcgtcatcaccatctcgggacgcatgaccttcacgagcaataagtccatggagatc

SEQ ID NO: 701196 - DNA, 75 bp, Homo sapiens
ctcaagcctgggtgcatgtgccaggaggagaaggcagagcccccccaggctatgaatgccctgatgcggttgaac

SEQ ID NO: 701197 - DNA, 100 bp, Homo sapiens
gatcgtcaggctctaaacaaaattctgagagttaattgttaaatccagtatggccacaggaggaggtccctttgaagatggcatgaatgatcaggattta

SEQ ID NO: 701198 - DNA, 98 bp, Homo sapiens
tgagccacgtgcatgaaccaaacccacttcgttcaagacaggtgtttaagcgtgaccaagaatatggcccaggtgaccaaagccctggacaaggccct

SEQ ID NO: 701199 - DNA, 100 bp, Homo sapiens
gacaatgataaagggctctgaaagctagaagaaaaggtgtacttgcaagaaacctcaggacttgagtaacagcaacatgagtcttttgcactgggaggag

SEQ ID NO: 701200 - DNA, 83 bp, Homo sapiens
cacagctgctcccttcgccttcgccctttccacctcgcggcagttcgatgccatggacaatattaccaggcagaaccaattct

SEQ ID NO: 701201 - DNA, 74 bp, Homo sapiens
ttgctccttgggacaggcaatgaagcagggaaaagcttcactctgaccatcactgtcttcacaaacccaccgca

SEQ ID NO: 701202 - DNA, 100 bp, Homo sapiens
gatgtctcgctccgtggccttagctgtgctcgcgctactctctctttctggcctggaggctatccagccaccagcagaaccaaaatcgtgtgtggtggca

SEQ ID NO: 701203 - DNA, 100 bp, Homo sapiens
cggggactcggagctgagaggagctgctgctcggaccagcgcggttttaccaattcttgagattctgtatcatgttgaagaaaggaattcacaccatgtg

SEQ ID NO: 701204 - DNA, 82 bp, Homo sapiens
cggtgctgcaagagaaggcactcaagtttatgaataccgtagcagtaggcaggacagttccaattcaacaaaaacctcttta

SEQ ID NO: 701205 - DNA, 85 bp, Homo sapiens
ctagaaggggataaggagtccctcatattgcagatggagtttcactcttgtctcccaggctggagtacaatggcatgatctcagc

SEQ ID NO: 701206 - DNA, 90 bp, Homo sapiens
ggagtttggagctcgtatggtcaacattgatggaaaacaaatcaaactgcaaatctgggatacggcttacctagaaatggaatttaaaga

SEQ ID NO: 701207 - DNA, 100 bp, Homo sapiens
gctccacaagcggcgccgcgccctcggcctgcacgggattggtccaaaggaagattttttccattgtttgaaatgtaacttatgcctagctatgaatctt

SEQ ID NO: 701208 - DNA, 100 bp, Homo sapiens
tcccctccagcggctcgctcgtggccacccacgactactaccggccggaggcctcagcaacctgctcttccgctgctcgctcccggaccacctgcccagc

SEQ ID NO: 701209 - DNA, 101 bp, Homo sapiens
gcgcctaccccaaactcatggaaattgatcaggctcatgcacaattagttcgagaagttgatgtggagaaggtgtctgcttttgagaatccatatgtagat

SEQ ID NO: 701210 - DNA, 100 bp, Homo sapiens
taaaaagcagaatgtgcagagtcttttctttgccaagcaaaacagtttccaccacctacaaggctttggcccaccaagtgtgtaccatgctgctattgtc

SEQ ID NO: 701211 - DNA, 83 bp, Homo sapiens
cggaggaaggtgaagtaggaccgaattcctgtgccgaagaggcctgcagtgggagagcaggcccgtggaccgggagcccgtgg

SEQ ID NO: 701212 - DNA, 73 bp, Homo sapiens
ggagatatggcgcaactgcggcgcgatggcttctgtctccaaggatggtacatggaaactgtgggacacagat

SEQ ID NO: 701213 - DNA, 101 bp, Homo sapiens
gctttccttttccatcaacaggggcaaatcgaagtagagagcgaaaccatcttcaagttagcagcgtttattttacagtgtacttccctttgctgtaaaca

SEQ ID NO: 701214 - DNA, 75 bp, Homo sapiens
agttccccaacggctccccgtcgtcctggtgctgcagcgtctgaaggaattcctgcccaaagaatatatcaagca

SEQ ID NO: 701215 - DNA, 75 bp, Homo sapiens
ctggaatatgaagagacacagtatggtagccacacccccagataagccaatggacacgtcagtgttatctgaaga

SEQ ID NO: 701216 - DNA, 75 bp, Homo sapiens
cgtagctccagaggtttaaccataggatagagaaaccaggagttgtcacagcagaaatgtttagacatatgcaga

SEQ ID NO: 701217 - DNA, 101 bp, Homo sapiens
cgaagtggttgagaagcctgtacctgttttatacttgcttttgcttcagcgttctgtggttgtcaacagagaaagcttcttgctatctacctccaccatga

SEQ ID NO: 701218 - DNA, 74 bp, Homo sapiens
cctcttttccagtataagtatttggctcttaatatgcattatgtagccttatttagtgtctctgacaaaaccgg

SEQ ID NO: 701219 - DNA, 83 bp, Homo sapiens
gttcgttgtgccagcgactaaaaagagataacgaaggaggcccaacttcattcaataaggagcctgacggatttatcccagac

SEQ ID NO: 701220 - DNA, 75 bp, Homo sapiens
gtacccggagggcgtcaagcagcatgtgaaggagaccaagccagagactgctgctactttgaaacgtacgataga

SEQ ID NO: 701221 - DNA, 100 bp, Homo sapiens
atggcacagtgggattgtggagacggtgtatcaccatacccaaaaacatgcattggtatagcccaccagaaaggacagaataactgaagtgaagtgatgg

SEQ ID NO: 701222 - DNA, 100 bp, Homo sapiens
tgtactcggggggcggctctgcgctggccgggggcgcgggcggcggcgccggcaggaagcctcaaggcacttctaggacctgcctcttctcaccaagatg

SEQ ID NO: 701223 - DNA, 90 bp, Homo sapiens
taaaactgaccatagccagagaacagccctccatcttgcagcccagaagattacagtagaatgcacattccttgactatataatgggagg

SEQ ID NO: 701224 - DNA, 51 bp, Homo sapiens
gggatctgcaagctgccaggaagactccacatttatgcagtgtgtgattct

SEQ ID NO: 701225 - DNA, 100 bp, Homo sapiens
ctggaggaggagccgccgccgccaggacctacaagaacagtgaggagcttcggtctcgtattgtgtctggaatcatcacacctatccatgagcagtggga

SEQ ID NO: 701226 - DNA, 90 bp, Homo sapiens
gcagttccgacaaaggtcgcctttgctactaccgcgactggctgctgcggcgcgaggtgatctttgcagagctgtttcaacttccagcac

SEQ ID NO: 701227 - DNA, 100 bp, Homo sapiens
ggggaccacagccagagcagccttggtcttgacctatttggctgttgcttctgctgcctctgagggagaatgtctggagaatgccagagtgccgtgagca

SEQ ID NO: 701228 - DNA, 100 bp, Homo sapiens
ctgacaatctgttgatgttaaatggcttaagcaggtaaagcagtcactgtgaagaaaataacattttaagaaacttttctgtcacaattgatagaggaaa

SEQ ID NO: 701229 - DNA, 100 bp, Homo sapiens
cagaaatgaaaactgaagatggcaaagtagaaaaacactatctcttctatgacggagaatccgtttcaggaaagctgcttcctgtctgtgacacctggga

SEQ ID NO: 701230 - DNA, 75 bp, Homo sapiens
gtaagaagtgggcactgcatattgtagctcggctctttgaacgattggtggcatccaacaactacaaccactgca

SEQ ID NO: 701231 - DNA, 90 bp, Homo sapiens
gtggggaatgaggcgggggtcggcccggggctcggagaatgggcagttggctggggaacagaccagggaattggtggatttggagaagag

SEQ ID NO: 701232 - DNA, 80 bp, Homo sapiens
caagcccaaagaggagaaagatgcttctaagggcgccatgtcagaaccggctggggatgtccgtcagaacccatgcggca

SEQ ID NO: 701233 - DNA, 85 bp, Homo sapiens
tgaagacacgtgggtcgaatgtgaagatcccaatgctgtgacgcctgagcagctgactaccagcaggcccagcaaggaggcagac

SEQ ID NO: 701234 - DNA, 95 bp, Homo sapiens
agctccagggcaaggcgctcaaggaaagaccacagcaagattctttcattcgtctcctcctagcctgggggaccaggctcgaactgaccctggac

SEQ ID NO: 701235 - DNA, 90 bp, Homo sapiens
tgggagtgggaccatgcagagcagcccctcccctgctcaccctcagctcccagtcctacagacacaggattaatgcagtatcgaatggac

SEQ ID NO: 701236 - DNA, 74 bp, Homo sapiens
gggagctggaggagaaggctatggaagagctcaaggagatcatacagggggcaatggcggcttcctgtgttcta

SEQ ID NO: 701237 - DNA, 87 bp, Homo sapiens
catgatgattttttcagtacaacacctttacagcatcaaagaatactggtcccgcggcagtgctggtggccatggttcccgtagcca

SEQ ID NO: 701238 - DNA, 50 bp, Homo sapiens
gggcactcctaccgcgtgctgtacctggtctccttccgctaccactgcca

SEQ ID NO: 701239 - DNA, 82 bp, Homo sapiens
tcctctctggacagggacagtgggcagtgctcccggaacacaagctgtgaaacactaggtgctgggtcttcagctctaaaga

SEQ ID NO: 701240 - DNA, 100 bp, Homo sapiens
gagctggacaaggacgacgagagcctgcgaaagtacaaggaggccctgctgggccgcgtggccgtttccgcagagagcgcctgctcgctgtgcccccggg

SEQ ID NO: 701241 - DNA, 75 bp, Homo sapiens
cgcgctctccgccgcctggaccaaccacgtcttcctgggctgcaggtgttggagagcacaatggctgaacaagtc

SEQ ID NO: 701242 - DNA, 96 bp, Homo sapiens
tcataaggccccagttcagatgggacttccccgcgtgacagcacagagataacggccagccctgggcgaagcgagcttgacatgatttccacaagg

SEQ ID NO: 701243 - DNA, 98 bp, Homo sapiens
ataaagttgcagcgaggagaagcgcagcgacggcgtcgggagagcgcgcctagccggctcgcgaggctggttgatatgtgaagagccaacctgtcgca

SEQ ID NO: 701244 - DNA, 83 bp, Homo sapiens
ctaactcgcctgccagagagtgtggaaagactcacaggcgtgagcatctcccaggtgccaaatgtgacatccagatgacccag

SEQ ID NO: 701245 - DNA, 75 bp, Homo sapiens
caagaacgtgagcaagcccaggcacagccgacgccgcgggctgatccaccttgagatcaagccggccatccggaa

SEQ ID NO: 701246 - DNA, 90 bp, Homo sapiens
aagtaaatcagtgagatcagtcaaatggttatgagccttagagtttctgaactccaagtactgttgggctacgccgggagaaacaagcac

SEQ ID NO: 701247 - DNA, 90 bp, Homo sapiens
agaggaccaggagcagaagaggaagaggcaagtgtcgtggacttcgtactgctaggaagctccgtagtcaccgacgagaccagaagtggc

SEQ ID NO: 701248 - DNA, 96 bp, Homo sapiens
atcttcaggagcgaagagctgcttctgtatcttaaggattgatttccagagacttatgttacttgaggaagacaccaagaaggcaaagaaaaggag

SEQ ID NO: 701249 - DNA, 83 bp, Homo sapiens
ggacggaattcgggaccgactgacggccggccggcttcccggaactggaagccatcactggtgcaagctatatttaacggaga

SEQ ID NO: 701250 - DNA, 75 bp, Homo sapiens
gaggtaaacagctgagggggaggagacggttggctcaaaaacagaagttgctgagtgcaaggagaaattcgccgc

SEQ ID NO: 701251 - DNA, 75 bp, Homo sapiens
ctggcctcaagtacagggtcatcaagggcaagcggcggctggagcgagcactggctgaggggcagcagcggggag

SEQ ID NO: 701252 - DNA, 75 bp, Homo sapiens
ctggaacacctcgccaaagcagagaaatagtgactgtggggatcatgttgttataatgaacacaagacacattgc

SEQ ID NO: 701253 - DNA, 50 bp, Homo sapiens
caagatcaagaccggcgtggtgaagcgttaccggtattgtaagaacaagc

SEQ ID NO: 701254 - DNA, 100 bp, Homo sapiens
ccgaaactttcaccgcgagcgggaaaagaaagctgcattggaaaaggagcgagaagaacggatagctgaagctgaaattgaaaacttaacaggagccaga

SEQ ID NO: 701255 - DNA, 98 bp, Homo sapiens
tgctctcccggcaaggaaacttcgcaggctggcacttcaggtggcaagacagctccttcttcagcagcaacagcagcagcaagttagtggattaaaat

SEQ ID NO: 701256 - DNA, 100 bp, Homo sapiens
ctctgtgagcgcccctgagcgccggcagcggccgcggtgggttcttcagacgccttcctgagtcctggatctttcttccttctggaaatctttgactgtg

SEQ ID NO: 701257 - DNA, 100 bp, Homo sapiens
actcgactcagacgtggataaagataatcccggttatccagaaaatcagtgctgtggataaagatgagccatccaatggacaccagttttacttcagctt

SEQ ID NO: 701258 - DNA, 75 bp, Homo sapiens
cagatgcgcgcgatgctggaccagttgatgggcacctcccgggacgagctctcgatgttctgaagtatgaggaag

SEQ ID NO: 701259 - DNA, 48 bp, Homo sapiens
gaagcaggccactccttacatcgctgttgtttctacacctgtgctatg

SEQ ID NO: 701260 - DNA, 100 bp, Homo sapiens
cgtggcttcggaggcaagtttggtgtccagatggacagagttgatcaggccttcctggatgctctgcagaaccaggctgaggccagcagcaagatcatcg

SEQ ID NO: 701261 - DNA, 90 bp, Homo sapiens
tggatttgtttctcattctcatatttcaccaataaagatcaacctctccacttctcctacacctgcacagttaataagccgttcccaggc

SEQ ID NO: 701262 - DNA, 97 bp, Homo sapiens
tgataatgaagaattattttgcaccactggatgttgtttactgtgcttttttaggaccaaaggatatatttccttactcagaaaataaggaaaagta

SEQ ID NO: 701263 - DNA, 75 bp, Homo sapiens
cgagttacaccaaccaggacagaaatcattatcttagccaccagaatgtcatacccaggctatcccccaacaggc

SEQ ID NO: 701264 - DNA, 98 bp, Homo sapiens
gccagtgactacccctaacgcacaataatatggctccgatgggctcaaaggccattcagcgagggaccatcaagtgcaactttgcgggggttgccttg

SEQ ID NO: 701265 - DNA, 75 bp, Homo sapiens
cgcaggcgcagacccacccgccatgaagccccccgcagcggttggattgcagccctgtctacactggataatcat

SEQ ID NO: 701266 - DNA, 74 bp, Homo sapiens
gctaatgaccgtggttcccactgagctgtgagtaccagagtgcccactggttccaacagttcttctcagaccac

SEQ ID NO: 701267 - DNA, 100 bp, Homo sapiens
aaaagggttcgaggaacgcgcctgctcccctcgtcgcagtttccagcccgacgagcttgttttgtcccggactcgtcttccgtgtgtgctaagatcgtgc

SEQ ID NO: 701268 - DNA, 98 bp, Homo sapiens
ccgggcctgcggccgcttcttccagaagggccaagggacttgcttttatttcggtcaggctgccatccgggggcttgtggccgaagggcatcgtctgg

SEQ ID NO: 701269 - DNA, 82 bp, Homo sapiens
ggagaatcaaatgataaactgcgaggacagagccactggctcaatctgaaattgaagtgtctgtctctgcaaggaatatcag

SEQ ID NO: 701270 - DNA, 51 bp, Homo sapiens
ctcacccatcgacccgagcgagcctccagggtcgtatagacctccccctcc

SEQ ID NO: 701271 - DNA, 100 bp, Homo sapiens
aagcagcagaggagcacgaggatcgtgggagctaagaactagagaccgttggatggcagcttaaccttcagatggctcactctgctcaagcaaaactaaa

SEQ ID NO: 701272 - DNA, 100 bp, Homo sapiens
aaaaaaccttcaggcggcccatggttacagaatgtctgaaggggacagtgtgggagaatccgtccatgggaaaccttcggtggtgtacagatttttcaca

SEQ ID NO: 701273 - DNA, 98 bp, Homo sapiens
cttcgtgcaactctccgggcggccgcacctgccagggaaacagaagtacctgtgcgccagcagaaatgattgcactattgataaattccgaaggaaaa

SEQ ID NO: 701274 - DNA, 101 bp, Homo sapiens
ctggtgtgggtttcccaagcaaggttccttggaagaagatgtctgcagaggcgaacagctgcttggagaactacaagtgaagaaaagaaagcattagatca

SEQ ID NO: 701275 - DNA, 71 bp, Homo sapiens
tgcacaactgcaggaacaccgtcacgctgctggaggagatattggtatcaacttgactgaccctatgttca

SEQ ID NO: 701276 - DNA, 100 bp, Homo sapiens
ggaaactggcggctgctggtagttccatgctgtctgttcagacttcagcttggtgccggtctaattgaagccaacggagaactcaaggtcttcatagacc

SEQ ID NO: 701277 - DNA, 82 bp, Homo sapiens
gcaatgctgatgtttgataaaactaccaacaggcacagagtggatatgctgctgatgaaatcactcactgcatacggcctca

SEQ ID NO: 701278 - DNA, 100 bp, Homo sapiens
cacatgaccagcagggaccttgggtcacatgacaatctctctccaccttttgtcaattccagaatacaaagagtgcctgtgaagaaaacggggtattgcc

SEQ ID NO: 701279 - DNA, 100 bp, Homo sapiens
agcgcgggcgcggccggagaccgtggggcccccggttgccgccccctcggagctcctccaagttccccctgatgacgctgcagctgctggacttctgcct

SEQ ID NO: 701280 - DNA, 83 bp, Homo sapiens
accccaagctgtacttgtcacctcgaattgagcagaacatgcttgccaactcagccagcgtgaggatcctcatcaagggaggc

SEQ ID NO: 701281 - DNA, 110 bp, Homo sapiens
cttgatgatgactatcctgaaggcccagaggaattttctctaacaattacaaaggtggaactccagggaagatgatgataattccgaagaaggcttccacactattcatt

SEQ ID NO: 701282 - DNA, 75 bp, Homo sapiens
ggccgccgctgcaccttcaccgcgtacccgggacccgcccgcccgcgggagggacaataattttgactatttgga

SEQ ID NO: 701283 - DNA, 51 bp, Homo sapiens
agctcccagaggatcaccagcgtgggctccttcgagagcagtggatccggg

SEQ ID NO: 701284 - DNA, 95 bp, Homo sapiens
cccctttccttactggatcctcaaaccagaagaaaacctgaatctctgaggttggtgttcgaggaagagacattgttgttcttggtgtggagaag

SEQ ID NO: 701285 - DNA, 100 bp, Homo sapiens
atatgttaaaagcgtgttgaaaggaaaataaggaaggatgataaagactatgctttaaaacaaatagaaggaactgggatctctatgtcggcatgtagag

SEQ ID NO: 701286 - DNA, 96 bp, Homo sapiens
ctgcactgaggacccggtgccggaggccgtgggcggcgacatgcagcagctgaaccagctgggcgcgcaggtcaatgagtggtcattgaagataag

SEQ ID NO: 701287 - DNA, 98 bp, Homo sapiens
ccgcctctccgcacgatgttcccctcgcggaggaaagcggcgcagctgccctgggaggacggcaggcaaacctgtcttcattaaagtccctgaggacc

SEQ ID NO: 701288 - DNA, 75 bp, Homo sapiens
aacgacttactggggagagaaagaaaaggaacgggagctgagagatgatacagttaactggtattccagtagtga

SEQ ID NO: 701289 - DNA, 73 bp, Homo sapiens
agggattgcccagtcagcaaaggttcagccctccaaggctaaagaacgtgccaatggaatggagcttgatggg

SEQ ID NO: 701290 - DNA, 82 bp, Homo sapiens
cgcggccatagtggacgaaaagatcttctgctgccacggaggttggctgatcaagatgacactgagtaacccttcagaacta

SEQ ID NO: 701291 - DNA, 83 bp, Homo sapiens
ctggccctggccctgatcatcctgctgggcttcgtccagatcgggaaggctcttggagtttgacaaggagttgtctgtcttta

SEQ ID NO: 701292 - DNA, 82 bp, Homo sapiens
gcggggccatggcggggaccgcgctcaagaggctgatggccgagtacaaacgttctggctccttggcagcaatggctgtatt

SEQ ID NO: 701293 - DNA, 83 bp, Homo sapiens
gtctgagtctcacagcttgtaaaggtcagcccaaggccaaccccactgtcactctgttcccgccctcctctgaggagctccaa

SEQ ID NO: 701294 - DNA, 83 bp, Homo sapiens
gtactactataatgggaaagcgaaatatccgcgcaagatgttgacgttgcagacttggctagtgcaagccttgtttattttcc

SEQ ID NO: 701295 - DNA, 82 bp, Homo sapiens
caggaggccaggggtgtcgccatgacacccccaaaggatggatttgtaatcgctgacgttcaactagttacaagcaattctc

SEQ ID NO: 701296 - DNA, 98 bp, Homo sapiens
atcgactggaccaagatcgagcccagcgtcaacttcctcaagtcgcccaaagaaatgagccgtcagactgctacagcattacctaccggtacctcgaa

SEQ ID NO: 701297 - DNA, 100 bp, Homo sapiens
agagaaatgaaaagccaacgcagagtgtatcatctcctgaagcaacatctggttctacaggtatggaacccttcagatcaaagcttaccaataaattcag

SEQ ID NO: 701298 - DNA, 90 bp, Homo sapiens
gcttgggccgccgagctggacccggaccggttttggacaggggcaagtgtccgagtggtgaatcagctacttacagagatggatggtctg

SEQ ID NO: 701299 - DNA, 100 bp, Homo sapiens
ctatgcttttgatcacttccccaagaagctcactcccaaaaaagatttctcgggcaaccttcgcccagaagaggcacttcaggctctcaccatatatgag

SEQ ID NO: 701300 - DNA, 87 bp, Homo sapiens
acactactaactttttcagctttgaaaagattgtcactgctgttccaagggcacacgcagagggatttggaattcctggagagttgc

SEQ ID NO: 701301 - DNA, 50 bp, Homo sapiens
ggcctacccgggatacggaggaggggctggagtgcaatggcgcgatctcg

SEQ ID NO: 701302 - DNA, 85 bp, Homo sapiens
tggggttggtgtgattagcttcgcagtctggaaagctttaggagttcacagtttcctggtccagaactttacacagaaaaggtgc

SEQ ID NO: 701303 - DNA, 98 bp, Homo sapiens
agagcgagctgagtggttgtgtggtcgcgtctcggaaaccggtagcgcttgcagcatggttctgatctacaatggccaactggacatcatcgtggcag

SEQ ID NO: 701304 - DNA, 100 bp, Homo sapiens
aaagcagatccgtggttccctgcagactggcaggagcagattccaaaggcacaggaagaagcttgcagtgggaccctgaagatgtgaacctcgaaggcag

SEQ ID NO: 701305 - DNA, 82 bp, Homo sapiens
ttgtggagaagaccccggcgctggtgaacggtattagaaaactactcggatgctccaatgacaccaaaacagattctgcagg

SEQ ID NO: 701306 - DNA, 75 bp, Homo sapiens
tatcaagtaatggtgcaaagcctgaaatgcgtctgttactagagtggagagtctaccttcgtctcacatgtgcca

SEQ ID NO: 701307 - DNA, 96 bp, Homo sapiens
ccctgtgggcctggcgctggaggcagcggtgcacgtgcagcatgaagaatcacgagaagtcaaagaagcatcgggaaatggtggccttgctaaaac

SEQ ID NO: 701308 - DNA, 100 bp, Homo sapiens
atgtccttcatcaatgctgtcctcaatgctggagctggagagtgtgagatcaaggtggcccagcccaaagaagtctatcagcagcagcagtatggctctg

SEQ ID NO: 701309 - DNA, 83 bp, Homo sapiens
gaggacatggacctgtacagcatcaactacctgcactttggggagcctaagtcctgcgtgaagcctctgcgggccttcttttc

SEQ ID NO: 701310 - DNA, 100 bp, Homo sapiens
gactctgcctcgtgccgctgagcctggcgcagatcgttgctgatcatctgggctgtgatccacaaacccggttctttgtccctcctaatatcaaacagtg

SEQ ID NO: 701311 - DNA, 82 bp, Homo sapiens
tgtccttctacattttcgatagagacgttttccggagggattccatcataggtgcatctgcagacgcagcaggaggtgaagc

SEQ ID NO: 701312 - DNA, 89 bp, Homo sapiens
cgcagcaggaggagggctggttccggctgcagcccgaccagtccaagagccggcagcatgacgaacacacaaactcgggccacttctaa

SEQ ID NO: 701313 - DNA, 80 bp, Homo sapiens
aaacaaatgacattgttcgatacagggtgtatgagatccccgtcgaggtcaagatcaagatccaggtctatttcacgacc

SEQ ID NO: 701314 - DNA, 100 bp, Homo sapiens
agatccagaagtgaaacgccaggctctctggaggccaggagatggctcatatctggtgttagtcggccagatgaggtgctcgagtgtattgaaagaggag

SEQ ID NO: 701315 - DNA, 100 bp, Homo sapiens
ccaactacctggtggtggctgccatgatgatttccattgtgggcagttccgccgagcatcctggggcctccaagcctccgataagctcctccagtatgac

SEQ ID NO: 701316 - DNA, 74 bp, Homo sapiens
agaccgtgaccgagagcgtgaccgagagcgcgaatatcgtcatcgttagaaggagagctgatagtattcattcc

SEQ ID NO: 701317 - DNA, 128 bp, Homo sapiens
caaccctgagctgactgatggccagattcaagccatgttaaggcgctggtttgtggaagtggaaggaacagtgaaggacagaactgtaccgctctctttttggccagctccaccctcccgacgaaggc

SEQ ID NO: 701318 - DNA, 75 bp, Homo sapiens
cagaaaggattgtgacatatcgttggacccagaattgaggcaaggggagagccagttgcgcagagccctgcaacc

SEQ ID NO: 701319 - DNA, 100 bp, Homo sapiens
cggacataagttgtcatttctcttgagtaaatacctaaaagtgggcttgctggggatatgtcctcagcaccaactactcctccatcagtggataaagtag

SEQ ID NO: 701320 - DNA, 74 bp, Homo sapiens
gttgttgagtcccctgtgtcctcttctgggatcttcaagatgaagttcaaagggagaatactaatctgcaaaaa

SEQ ID NO: 701321 - DNA, 96 bp, Homo sapiens
gaagcacgctactacctggtgcagggcctgattgaggactgccagctggcgctgcagaatgattacggacctgaagccaaagaacaagatgcgcta

SEQ ID NO: 701322 - DNA, 89 bp, Homo sapiens
cagagccaccagccaatgatcttttcaatgctgcgaaagctgccaaaagtgacatgcagctcagagtcaagatctccactgaagttggc

SEQ ID NO: 701323 - DNA, 100 bp, Homo sapiens
ctccgaccggactcacccggcacattgccgggccgcggcgtggagccgggcaggagccgcgagccagctgcgcgaagtttgcagagcagtctctgatgaa

SEQ ID NO: 701324 - DNA, 90 bp, Homo sapiens
ccacctacggtctggagagcagctgcattgcaggcacagggcccgatgagccagagaagcttgattctggacaatcaggaagtccaagcc

SEQ ID NO: 701325 - DNA, 100 bp, Homo sapiens
gagaggccgcaggagtcatttcaagatgcaagtggaccaggaggaaccacatgttgaagagcaacagcagcagacaccagcagaaaataaggcagagtct

SEQ ID NO: 701326 - DNA, 82 bp, Homo sapiens
attggatttaaaagacagtcctcgtcagcactgactttcagctatggaatcgggatcatagacggtatttctatgtaaacga

SEQ ID NO: 701327 - DNA, 100 bp, Homo sapiens
tgtgacctgcatgtactgggggattcgcagggaggatgtcgggacaccccggaagctgggaaatgagaaagagatgacttgatgtctgcactagtttccg

SEQ ID NO: 701328 - DNA, 75 bp, Homo sapiens
attccacctctgagtcctcaactgctgaccccggggtcagttcgatcctttggtacagaagacagaccgacagat

SEQ ID NO: 701329 - DNA, 97 bp, Homo sapiens
tcatgtacagaacatgatcaagggtgttacactgggcatgagccagaaggagagctctaagtctgccatgatgtatattcaggagttgaggtcaggc

SEQ ID NO: 701330 - DNA, 97 bp, Homo sapiens
atgtccctgccatgtacgtcgccattcaagctgtgctctccctctatgcctctggccgcacgacaggtggtggaagatggatatgaattttttgcta

SEQ ID NO: 701331 - DNA, 75 bp, Homo sapiens
ggccgcggccagcggagccctgggctggggcaggagccgaacatcatcaagaaggtgatcgggcagaagtttgtg

SEQ ID NO: 701332 - DNA, 75 bp, Homo sapiens
cgggtcttccagagcgtgaagatcaagatcgagaatggatcttggagaatgtctgaaagtccatgacctggcttt

SEQ ID NO: 701333 - DNA, 124 bp, Homo sapiens
gttgaagtctcgaggtgtgaagctgatgcccagcaaagacaacagccagaagacgtctgtgtgctgtgagaagacatttatcacagtgagtgccctgttttcccataaccgagcccacttcagg

SEQ ID NO: 701334 - DNA, 100 bp, Homo sapiens
cagtaccaggcggtggtgcccgacttcgaccccggtctcaagattctgccctccaagaaagtcttgccatgattggataggacccccagataaatattca

SEQ ID NO: 701335 - DNA, 112 bp, Homo sapiens
cagtagttaggattcaggccaaactggtaaatgacgaaggggcttcttccagagccaaggaggaagggttgtccggggcagcgaggtcacaggccccacctttgctgatggc

SEQ ID NO: 701336 - DNA, 117 bp, Homo sapiens
ccgctcgctgggagagaggtacctctccttttccctctccctttccctaagatgaggacggggacttggttgccttttccagtgacgaggaattgacaatggccatgtcctacgtga

SEQ ID NO: 701337 - DNA, 100 bp, Homo sapiens
aataaggataaaaacctggttcctgaagatgaggcaaatataggggcatcaggatttggtgctatggagaaatttttggtagaatataagagtgcagtgg

SEQ ID NO: 701338 - DNA, 97 bp, Homo sapiens
agggagtagtgcgatcctgcgcgcgggggaactagctggagggcaaggcgggaacacgagatacaactcgtcaacgaatcaaattcagtgatgacag

SEQ ID NO: 701339 - DNA, 98 bp, Homo sapiens
gaggttggaacacctggcgagtcctcggtgtcggtggccggcagtcatctcgcggccgttcaggtgtttactacaatctggaggcaagatctttcctc

SEQ ID NO: 701340 - DNA, 100 bp, Homo sapiens
ccacccaccccatacctgctgcctgtggcatttattactttgaagtgaagattgtcagcaaaggaagagatgggacccttcaaaaaatgatacatgcaaa

SEQ ID NO: 701341 - DNA, 82 bp, Homo sapiens
agggcagctactcagcaccgacgctgacagggatggtgcctggtcaaaatgcagatcttcgtgaaaacccttaccggcaaga

SEQ ID NO: 701342 - DNA, 80 bp, Homo sapiens
ctgtctgcttgcagtgttgatggtggtggtgctggtcatcaatgttactcaggtagaggcatcacgttgggtggtttcca

SEQ ID NO: 701343 - DNA, 100 bp, Homo sapiens
gaaaaattcaagaagttgaaaaacgcttttcacgtcacctggagagatgcacagaggtcagcgctgcttttggggtgaaagaagaccatcagcaaacctc

SEQ ID NO: 701344 - DNA, 101 bp, Homo sapiens
aaactttctgagcttcatgacaatcaggacggtcttgtggacatttgtgaagatatttctgatcatgttgagcaaatccatgccctccttgaaacagagtt

SEQ ID NO: 701345 - DNA, 90 bp, Homo sapiens
gcggccgccgccgctgccgcttccaccacaggtctggctcccagccatgaaggctaaggggctggagatctcaggcaccttcacccgcca

SEQ ID NO: 701346 - DNA, 75 bp, Homo sapiens
attgacatttaattttagggtcctttatatagaagggagagtaggactggaagcaaccccaaaattagacgcaac

SEQ ID NO: 701347 - DNA, 118 bp, Homo sapiens
ggaggctggagtgggcgcggaggcgaccgccatggcgttcctcaaactccgtgaccaggatttttagactctgaggagcagttggagctaatccacattatggaaatggaaaccaccg

SEQ ID NO: 701348 - DNA, 50 bp, Homo sapiens
tatctctggtgctgcagctctctctctatcaatatcagctcacatcattg

SEQ ID NO: 701349 - DNA, 82 bp, Homo sapiens
caggaaacggggtctctgggggatccagtgacgtgcccaaccacagagaccagctcccggagccctgcctgttccctgtcca

SEQ ID NO: 701350 - DNA, 100 bp, Homo sapiens
gacagacagaatttacccctcctggttgcatttctttgcttaatattacagaaccagttctgggtgagctacatggaaatttactgtgaaagagtacgag

SEQ ID NO: 701351 - DNA, 50 bp, Homo sapiens
ggatgtcaacaattttttggagagcttactcacatagcatattggtatat

SEQ ID NO: 701352 - DNA, 100 bp, Homo sapiens
aggacgtcgtgcttcagcctcaccaactgcgggcacgtgtactgcgacgcctgcctcggcaaagccactgtagtctgcagatcaaagctctggcgaaaat

SEQ ID NO: 701353 - DNA, 74 bp, Homo sapiens
tcacgaatctatccttcataagtgcatcaaaacagagagccaaattgaaagccgacagatactgcaagtgactg

SEQ ID NO: 701354 - DNA, 100 bp, Homo sapiens
cgcttctgcatctgtgggccgaggcttctgggaacttggcagacgcagcttagagagactcaccagcgagcgtcattgttgtctttctgggaactcattc

SEQ ID NO: 701355 - DNA, 100 bp, Homo sapiens
aacagaaaaagaggatacctctgcgatcccgggtcatctccagatgctagggttatgggactgggaaaaatgtgagaaaggaatagcagattccctggag

SEQ ID NO: 701356 - DNA, 82 bp, Homo sapiens
ttcacgagggcatatatgaagaaggcatttctattttagaaagcagttcgtgtgcaggatgacagaattcgagtcgaaagga

SEQ ID NO: 701357 - DNA, 80 bp, Homo sapiens
ccgagcgagcaaattcctactgtccggctgcgcggctaccgtggccgagctagggttgagttccagaataaattctacag

SEQ ID NO: 701358 - DNA, 101 bp, Homo sapiens
gtggagatggcgttagaaggcgctgagtttccagatgtcttggaatgcactgtatctcatgcagtagaaaagataaatcctgatgaaagagaagaaatgaa

SEQ ID NO: 701359 - DNA, 75 bp, Homo sapiens
gcggagcagacacagactatgcagatgggaggaagaaggtagataatgactataatgcccttcgagaaagactca

SEQ ID NO: 701360 - DNA, 96 bp, Homo sapiens
tgctgtcgccatcccactggctgcaggcctcctgctgctcctgtttgtgggttgaaccatgattccggtgacagagctccgctactttgcggacac

SEQ ID NO: 701361 - DNA, 105 bp, Homo sapiens
cgcgaggccatcctccagcacgcctggttcttcttccagctcatgataccccagaatcttccatgctccgtcacactgcagccaggcccagaggatacaggaaag

SEQ ID NO: 701362 - DNA, 51 bp, Homo sapiens
caaaatgtcaacaaattgatggatctacggaatccagaggcagcattgtct

SEQ ID NO: 701363 - DNA, 100 bp, Homo sapiens
gaagatgacagcccgcagagagttaacttctgtttacatggaactcagacatctgcaaatcatgtggaaggagcctgggagaggccaggcctccccggac

SEQ ID NO: 701364 - DNA, 80 bp, Homo sapiens
ccatgaccctgagcactggccaagcccggagaccttcaaccctgaaagctggatctaccatgaaagacttgtgaatccag

SEQ ID NO: 701365 - DNA, 100 bp, Homo sapiens
cttgcccgccatagcaagcgagtccgcattgcccccaagggcagcaggatgggtgtggaagcagtgatggcacttttggaggggaccccagataccccag

SEQ ID NO: 701366 - DNA, 83 bp, Homo sapiens
gccagaagaaaccttccctaacactgaaaccaatggtgaatttgttcaaaagaatgctgaaccgggagctgacacacctctca

SEQ ID NO: 701367 - DNA, 100 bp, Homo sapiens
aaaatgccaacgccgtgtctgaagttttagagacaaggtctgactgtgttgcccaggctggacttcaactcctcagtacaagtgatcctcctgcctgagc

SEQ ID NO: 701368 - DNA, 75 bp, Homo sapiens
aagctgctgctgggcatcgccttgctggcctacgtcgcctgccggagcctcaacagaaagctcctttagttcctc

SEQ ID NO: 701369 - DNA, 75 bp, Homo sapiens
tttttgacagcttccgccgggactgcctggccgacgtggacaccaagatctgtgccatcattggcgggaccttca

SEQ ID NO: 701370 - DNA, 100 bp, Homo sapiens
cctaagggctggatgcaggcaaggtcaccagtgaaaagttgtgcagagcccaacatgagcttcatttccaagctgccacctatctctgcctcctgcgtag

SEQ ID NO: 701371 - DNA, 90 bp, Homo sapiens
tgatgatgctcagtttgatgcgtcacactacgacagtgagaaaggaggtgttggagcgggccggagagaagtagagtgggctgcgaggag

SEQ ID NO: 701372 - DNA, 96 bp, Homo sapiens
tcagtgacctgacatcccagctccacatcaccccagggacagcatatcagagctttgaacagccaatggagatcttcgtggatgatgagacgaagt

SEQ ID NO: 701373 - DNA, 75 bp, Homo sapiens
gagatactttaagcttcgagggcgaacgctttactatgccaaaacggcaaaggagctcgaggccatgagcagata

SEQ ID NO: 701374 - DNA, 50 bp, Homo sapiens
cggaggcagagcggctgccatgaatagcctaacatggcagaccagagaca

SEQ ID NO: 701375 - DNA, 82 bp, Homo sapiens
ggacttcggcggcggcgcctcaggcacctcggcccggaataagaccacagcttgccaaagagaagattgaaggatgccatat

SEQ ID NO: 701376 - DNA, 46 bp, Homo sapiens
tatccattttcgagacattctgtttgggaaatgggaagtaatgaca

SEQ ID NO: 701377 - DNA, 90 bp, Homo sapiens
cccaggaccctgcggccgtgtctctgcccacgtcgagcgtgcccgagacccgaggttcagcagactgtacaggatctttttggcagagcc

SEQ ID NO: 701378 - DNA, 100 bp, Homo sapiens
caagggtcctaaaacaggatcagtaaagaaggaaaaagcagtaaagccagaggaagaatagcctaacatggcagaccagagacagcgctcactgtctacc

SEQ ID NO: 701379 - DNA, 100 bp, Homo sapiens
ctggtaggccttggagaggcgggttaggaagggagttctgggaaatcgttcattcatttacagatgaacagaaaagactcttcttgcagtttacaacggg

SEQ ID NO: 701380 - DNA, 90 bp, Homo sapiens
ctaaacatcgttgtccacgtccagcattatgagaacatggacacgagaacccccataaataatcttctgctccagctgaggctgcaacaa

SEQ ID NO: 701381 - DNA, 156 bp, Homo sapiens
ggttggctgggtgaagaataccagcaaaggcaccgtgacaggccaagtgcaggggccagaagacaaagtcaattccatggggaaatttgcagtggtgagaaaatgtataaagaaagattctgggaaagaatttgctgcaaagttcatgagaaaaag

SEQ ID NO: 701382 - DNA, 105 bp, Homo sapiens
ggcctattcacagcagctctctgccctcagtggtcaggcgtgcaattttggctacttagagtatgatcacccagaaattgctgtcactgtgaaaacaaaggaaga

SEQ ID NO: 701383 - DNA, 104 bp, Homo sapiens
gatgtattgagcgcgtcgtatgcggccagcactaagattttatcatgtgggcaacctgctgcaactggttctgcctggatggacagcctgaggaggtcccacca

SEQ ID NO: 701384 - DNA, 90 bp, Homo sapiens
cgcccgtgtcggagaccccgcgccggaccctgaggcagcgaccttgatgacttacaagccctcaaggggaagcattttctcctggactcc

SEQ ID NO: 701385 - DNA, 75 bp, Homo sapiens
tggcaccgtgcccagaggaagctgggactcgcaagaagctgcgcctgtaccagttcctgctggggctactgacgc

SEQ ID NO: 701386 - DNA, 51 bp, Homo sapiens
aaatcatttccatcaataccggttgtggaagctgatcgaggaagcctaagc

SEQ ID NO: 701387 - DNA, 100 bp, Homo sapiens
caccaacatttgatggtgaggaggaaccctcgcaagggcagaaggttgaagaacaggaggatgttgacaatgcgtctctggcacgtcttgaccttgaacg

SEQ ID NO: 701388 - DNA, 87 bp, Homo sapiens
acctgctcagcccggccgccagagcacccgtgcacagcagcatgttccgcttcctggtgaggactcttgtgaagatatgagttgtgg

SEQ ID NO: 701389 - DNA, 99 bp, Homo sapiens
gacgtgctagcggaggagtttgggaacctgactccggagcagctggcggcgccgatcccgactgtagagtgtttgagaacaaagataagattgtgatca

SEQ ID NO: 701390 - DNA, 90 bp, Homo sapiens
tagaaccgcagcagggacgtcggtttgctatcgggactcggcgaggacgggacacagcaggtcaggagagattcaacagcattacctcag

SEQ ID NO: 701391 - DNA, 100 bp, Homo sapiens
agcatgaaagcagtaatcagatgtttgccatgaaagaaataaggcttcccaagctatccgtggtcctgaaccagttatgtgtgttgcatgagaaaacgcc

SEQ ID NO: 701392 - DNA, 100 bp, Homo sapiens
gcccaaagcgtggagaccagcactgctctctccccagtgacaggccctgggaggagcggggacactgaggacctctctccaaattggcctctcaactcac

SEQ ID NO: 701393 - DNA, 74 bp, Homo sapiens
tttcctgctaatttgcagcttcctccaggttatgaagacagtatggagtttccagaccatagtagacatttgct

SEQ ID NO: 701394 - DNA, 100 bp, Homo sapiens
gggcaagagaagaattcagaagaaacaaaagtgccaccgaagaggagccagtggggtgggtcgcagccacattaagaatgccctgctcagccagaatccg

SEQ ID NO: 701395 - DNA, 49 bp, Homo sapiens
agctgcctcagttcttagcgcagattgtcactgctgttccaagggcaca

SEQ ID NO: 701396 - DNA, 74 bp, Homo sapiens
cccaagtgcattgcctttggaaacgagatttctcgaatgctggcagccaaaaccgttttggctatccgttatga

SEQ ID NO: 701397 - DNA, 98 bp, Homo sapiens
atgaagtgcagaggtttttttctggatgaagccaacgcacacgatggtcaactgctggttctgcaaccaggatacgctggtgccctatgggaaccgca

SEQ ID NO: 701398 - DNA, 100 bp, Homo sapiens
ggctacgaagcgaggaacgagcgggcggcgggcacgagtcaggatggctaaaggtgaccccaagaaaccaaagggcaagatgtccgcttatgccttcttt

SEQ ID NO: 701399 - DNA, 146 bp, Homo sapiens
ggccaagggacgtcttctccacgccgctccgactccaggggagccgtggcctcctctccgccctagcgctgagatgtccagctcgccgctgtccaagaaacgtcgcgtgtccgggcctgatccaaagccgggttctaactgctccc

SEQ ID NO: 701400 - DNA, 50 bp, Homo sapiens
gcggccctgggttggagcacagagctgcaagctttcttcctggtggcaga

SEQ ID NO: 701401 - DNA, 100 bp, Homo sapiens
aagacgatctgcacttcgcattttggcattgacatttaattttagggtcctttatatagaagggagaatgatgttgaatttgaagtatcatcggaccgac

SEQ ID NO: 701402 - DNA, 90 bp, Homo sapiens
cggtactggagccggcggctgcggccggcagccggcagctttgcagcggacaacatctggggaagatgtacgagacttcacaaaggtact

SEQ ID NO: 701403 - DNA, 83 bp, Homo sapiens
ccaagaaccaaccctgccagcacctggaccttggacattcagacttcagaatgccacgaaggaagacaggaggtccgaggaga

SEQ ID NO: 701404 - DNA, 97 bp, Homo sapiens
atcgacagcatcgaccgttctgtaactccttaaatttaagagctgcaggttgcagagaacacatcttagaagatgaaaaacctgaatctatcagtga

SEQ ID NO: 701405 - DNA, 100 bp, Homo sapiens
cgctctgcctatgacagcaccatggagaccatgaactatgcccagatccagacaggcggtcagtttccaccatgaatctttcgaaatatgttgatcccgt

SEQ ID NO: 701406 - DNA, 58 bp, Homo sapiens
caagctcgagttaaagttggatgtgctggaacagccgagctattgaccagtgcagaga

SEQ ID NO: 701407 - DNA, 122 bp, Homo sapiens
taattcaaaaacactatcccagggagtgcaagcttagagcgtctggccaagaatcagaggaagtggagaagaagttcgtgccccaattcctcaaaagcaggaaatactggtggaaccagaac

SEQ ID NO: 701408 - DNA, 96 bp, Homo sapiens
gtcaccttgtcccgctgcagccgagatgccgggggagcggggccttccacaccccctccgtgggtgtgtggtgatcagcgagtttgaggcctctcc

SEQ ID NO: 701409 - DNA, 96 bp, Homo sapiens
cttttttcatttccatttctaccttgtatgcctcaatttgctggatttaagcactgctgcactttatgaggttaaaaataagaagttggttgagct

SEQ ID NO: 701410 - DNA, 102 bp, Homo sapiens
ctcaaagatatcccttcgacagaagtggaagtgctgaaaaatgctcatctctcacacagacttttgatggacaggagactgaacctccattgaatactccag

SEQ ID NO: 701411 - DNA, 100 bp, Homo sapiens
gaccatcaaagtcatcgacggcacctcgggggccacactgcaggcctccgcgctcagtggttcagccgtctgtatatctccccagatacctgaaactgac

SEQ ID NO: 701412 - DNA, 100 bp, Homo sapiens
gctcgaattccagaatgatgaaattgtgtgcctgagatcatcagctccatccgtcaggcggggaagatcgcccggcaggaggagctgcactgcccgtccg

SEQ ID NO: 701413 - DNA, 101 bp, Homo sapiens
gccaagcagccaaccatgctcaacttcggtgcctctctccagcagactgcggtgagaagccctaccactgcaactgggacggctgcggctggaagtttgcg

SEQ ID NO: 701414 - DNA, 100 bp, Homo sapiens
tcagatctgagaggcttctgaggggccgatgcagtgacttctctgctgcagtcatgcaggagtcagtcgaagtgtggccataataactgcttttctcatg

SEQ ID NO: 701415 - DNA, 74 bp, Homo sapiens
cccttgtggcgaatggggctcacgtcgagaaggatgataaagactatgctttaaaacaaatagaaggaactggg

SEQ ID NO: 701416 - DNA, 83 bp, Homo sapiens
ggatgatgcaatcaaagctcgacttctcaatcccaagtggccaaaggtcctgggaactccaacaagggagcaaatcagagaaa

SEQ ID NO: 701417 - DNA, 100 bp, Homo sapiens
actaagccgagtaagaagacatacaaaagcctcttctgaaggaaaagacagtgtagtcctgcaaaacattttgagatatgtggtagatggtggctttgtg

SEQ ID NO: 701418 - DNA, 100 bp, Homo sapiens
actgacctgtaaatcatcctttaggaactgtggctgcaccatctgtcttcatcttcccgccatctgatgagcagttgaaatctggaactgcctctgttgt

SEQ ID NO: 701419 - DNA, 50 bp, Homo sapiens
aaaaagtggaatttttcttcagcaaaattcaattcgtcataatctgtccc

SEQ ID NO: 701420 - DNA, 73 bp, Homo sapiens
gaccgtggccgaccggcagctggtctccgtgaggccgggtgacgctccagaatgggagacaagccaatttggg

SEQ ID NO: 701421 - DNA, 101 bp, Homo sapiens
caagcagaaagtggtagcgctgctgcggaggttcaaagtgtccgacgaggccaggagtggtggctcacacctgtaatcccagctctgggaggccaaggcca

SEQ ID NO: 701422 - DNA, 101 bp, Homo sapiens
ctgagccagtatgacaacgagaagaagtgggagctcatctgtgatcagccaaggccacctttgatgccatttctaagacctacagctacctgacccccgac

SEQ ID NO: 701423 - DNA, 100 bp, Homo sapiens
agccgccagggctctatcaaggggctggtgtactccagcaacttccagatcttactgtgccgagatcgctcacaatgtttcctccaagaaccgcaaagcc

SEQ ID NO: 701424 - DNA, 132 bp, Homo sapiens
tggaagacatggccactccagtcggtgttgagcacggcgagcagtctcaggcctttagtgatgatgaggcaccaaataatgtcatctgaaatgttgccagcatttattgaaacttctaatgttgacaaaaag

SEQ ID NO: 701425 - DNA, 83 bp, Homo sapiens
tttttctcatggatgttcttcttcgagtatttgtagaaggcacaacaccccgatcccccaaggaggcagaggagccatccagt

SEQ ID NO: 701426 - DNA, 100 bp, Homo sapiens
ccccgggggcccgtactgcacatcgtggtggtcggatttcaccacaagaagggctgccagtgagggccccaaggctgttgcagctcctcgacctgatcgg

SEQ ID NO: 701427 - DNA, 83 bp, Homo sapiens
tggagtaggaagttttatgcagtcacaggcagctggtaaatgtctgctctaagaagcagacaaccggacatgcgcattcatag

SEQ ID NO: 701428 - DNA, 75 bp, Homo sapiens
ttccagaaaacagaaatcgaaacagatacagagatgtaagcccatcgagtaaccagctcataaatcacatcgaac

SEQ ID NO: 701429 - DNA, 75 bp, Homo sapiens
ccggcaaatgctgcaggaactggtgaacgcaggatgcgaccaggaattggcagcaatgaaacagattctcgttaa

SEQ ID NO: 701430 - DNA, 95 bp, Homo sapiens
tggttagaaaacatggcttatgaacaccactacaagggtagcagtcgtggacgttctaagaggctgttcgctgctatgaatctctaatcttaaaa

SEQ ID NO: 701431 - DNA, 100 bp, Homo sapiens
cctccacctactatagaagagaaagttgctaaaaagtcaggaggagctactatagaagaactaactgaggatgctttggagtctgcaatgaagaatggcc

SEQ ID NO: 701432 - DNA, 86 bp, Homo sapiens
cctcttcgagcgccgcggacgcgtcatcgagtgtgacgtggtgaaagcggagctggagtttgttcagatcatcatcatcgtggtgg

SEQ ID NO: 701433 - DNA, 74 bp, Homo sapiens
cgcggagcccggctcccgcaccatggaggaggacgacagctacgggccagatattcgaagcttacaacatggca

SEQ ID NO: 701434 - DNA, 50 bp, Homo sapiens
cggcggaggcggcgggactggtccctggaggaagagttcatcgattggtg

SEQ ID NO: 701435 - DNA, 100 bp, Homo sapiens
aaggaagtgactcaaactgtgagaacttcaggttgtggcagcactgcctgaaggtatgagaccagattctaatctttatggttttccatgggaattggtg

SEQ ID NO: 701436 - DNA, 100 bp, Homo sapiens
atctgagcgtttgtaagagatggaggcaggagtggtgagcaatcccacagagtattgatgaggaaactgaagtttggagcgatcacatcattttcccaag

SEQ ID NO: 701437 - DNA, 99 bp, Homo sapiens
gaagggggtccccctgtaccgccacatcgcagatctcgctgggaaccctgacctcatactcccagtgccatgtgatgagaatagcacgtttaataacca

SEQ ID NO: 701438 - DNA, 83 bp, Homo sapiens
ctgtccccaaagagacggtggactctttcctcgacctggccagatcttagcaaagcaatgtctcaagatggtgcttctcagtt

SEQ ID NO: 701439 - DNA, 75 bp, Homo sapiens
cctccttccacctggccaggaatcagaggctgataaaataccagtaatgcgtggacagtggtttattgacggcac

SEQ ID NO: 701440 - DNA, 101 bp, Homo sapiens
ggcggcggcgccgggcccgggggtggtgacagcaggtctgagtatgactatgaatatgatgaaaatggtgacagagtcgttttaggaaaaggcacttatgg

SEQ ID NO: 701441 - DNA, 75 bp, Homo sapiens
cttattccgacattcagagttgtttcctccatttgctaaaggaatagtgtttggaagaaaggcgaaggttgaaaa

SEQ ID NO: 701442 - DNA, 100 bp, Homo sapiens
gaggagggtgccaacaagacggtggagccgagagctgattgagtttgtgacgggcaccaaaaaaggcaccacgaccaacgccacgtccaccaccactacc

SEQ ID NO: 701443 - DNA, 90 bp, Homo sapiens
tcgaacaaagtcagctttctccaatctttctacatcccagaattacacagatgaatcttgcactttcaagatatcattgcgaaatttccg

SEQ ID NO: 701444 - DNA, 100 bp, Homo sapiens
caacttggagaatggaaaagaaccattgaagcttgagagaaaagcccccaaaagcagctattcaggagtgttcagcctgggtgttcctgtagatgctctc

SEQ ID NO: 701445 - DNA, 58 bp, Homo sapiens
agcaccttttggcccaatgaatatcagtgtaaagaaagaatgaggcctgttaaagcag

SEQ ID NO: 701446 - DNA, 83 bp, Homo sapiens
ggctggtggtgcttccaactgcgggacaggaagtggccgtagcggcttgttggataaggttccctctcccagcctgtgctgac

SEQ ID NO: 701447 - DNA, 89 bp, Homo sapiens
cagagagagcgatcaacacgctgaacggcttgaggctccagtcaaaaaccattaagtttgatgaaggccggaacaactttgaaggggag

SEQ ID NO: 701448 - DNA, 100 bp, Homo sapiens
cattcttctgagtcaaggagaggtggaaaagctaatcaagtgcgacgaaattcaggagtccaatgtgctgattgctgctaacagtcagggtacaattaag

SEQ ID NO: 701449 - DNA, 96 bp, Homo sapiens
ctaactttcaacaaccccacagaggactttaggagaaagttgctgaaggcaggaggggttgaatgcctttgagaacttgatgcataaaatttgcat

SEQ ID NO: 701450 - DNA, 90 bp, Homo sapiens
cccaggtgtaagcgcagaaagcaggcgaacccgcggcgcaataacggcgcccacggcctgcgagaggagcccgagtttgtgacggcaaga

SEQ ID NO: 701451 - DNA, 87 bp, Homo sapiens
taccgagagtttgaaagtgcgattgtggaagctgctcgggtaccacaagagccaggccatctatctggagtcaaaggacaaccagaa

SEQ ID NO: 701452 - DNA, 100 bp, Homo sapiens
gaccgaaaatcagaagacaaacttgccaaagctacaagagacaggtgtgatgaatgcagactctgctaccattttggctgtttggatcctcctttgaaaa

SEQ ID NO: 701453 - DNA, 88 bp, Homo sapiens
ctctgatgacctactgaagaagcttctcaaagaccctttaaagagatcatccttcatcatttatgatataatgaatgaattaatggga

SEQ ID NO: 701454 - DNA, 100 bp, Homo sapiens
ctgccaaggtcaccagcaccccagatgggtgagagatgtgatcactggtttcgtggcctgaccaaggacctccaaggctggagcattggatttgctaaag

SEQ ID NO: 701455 - DNA, 75 bp, Homo sapiens
ttccccgcgctgcggcctggcggcttccaggcgcactaccgcgggcgaccattgacgaggtggagacggacgtgg

SEQ ID NO: 701456 - DNA, 100 bp, Homo sapiens
agccgctgcggcccgacgagctggagcgcctgtcaggctgggaggaggaggaggagagctgttttgattacgaagatgcaggctaccagactgcagaact

SEQ ID NO: 701457 - DNA, 75 bp, Homo sapiens
gtgcttcgtggtgactgaaaaagtgttcggtgaccagtgacttggattttccaacacaagtcatcccattaaaga

SEQ ID NO: 701458 - DNA, 141 bp, Homo sapiens
ggagaggtggaccgcgtggactatgacagacagtccgggagtgcagtcatcacgtttgtggagattggaggcatcagttttgaatgtcaaggaatccaaagctcctgaaagaacggttgtagttgctggtcttccagttga

SEQ ID NO: 701459 - DNA, 76 bp, Homo sapiens
gtcgcatctgctcaacgacgaggacctgacgcaggaatcttacatcctttctgcagaacttggagaaaagtgtgaa

SEQ ID NO: 701460 - DNA, 113 bp, Homo sapiens
tgcagtgggaccgcaagctgagcgagctgtcagagcccggggacggcgaggccctcatgtaccacacgcatgcagcagattggaataaatatgatgaccgattgatgaaagca

SEQ ID NO: 701461 - DNA, 100 bp, Homo sapiens
agggccatcatggcccacatgactgtggagttaagtgggcagaccaacatccacctcagcaaaaacttcttcctgacgaatcgcgccagggagcgctcag

SEQ ID NO: 701462 - DNA, 100 bp, Homo sapiens
tgaaacgatctgcagcggagatgtacgggtcagtaacagaacacccttctccgtcccctctactcagaattcagagagatttctctataccagtgctgac

SEQ ID NO: 701463 - DNA, 80 bp, Homo sapiens
gtttgtggatcgctgtgatcgtcacttgggagcatcgagtacagctgtccggcctccaacgagtgtgagatcaccaagcg

SEQ ID NO: 701464 - DNA, 100 bp, Homo sapiens
cctaaaggtttttaagagatgggacatgggacattgctccgctcttatcaagttggtagctggcagtgttgtgatggcttttgaagaagtatgcccggac

SEQ ID NO: 701465 - DNA, 100 bp, Homo sapiens
gtaggagcgatgcccagtgccgagatcggaaatggtgttcacactggccctgaatcaagggaacaccagttttcacatgctggcagaagcaatggccggg

SEQ ID NO: 701466 - DNA, 100 bp, Homo sapiens
caagcactatttatcaacaaaggtgccagatgcaattaaaaagtgtcagagggctggaattactgtgcggatggtcactggtgataatattaatactgct

SEQ ID NO: 701467 - DNA, 75 bp, Homo sapiens
gagctggacgagctgatggcttcgctgtcggatttcaagacaatgcagatcttcgtgaagactctgactggtaag

SEQ ID NO: 701468 - DNA, 100 bp, Homo sapiens
catttggaattttcgtatacgtggattctagaggggtgacagcgaaacattgacgcgtcatgccttacgtgggaaggacaacagttccaggggaaagctg

SEQ ID NO: 701469 - DNA, 51 bp, Homo sapiens
cggaaaccatccacgaccctatagcagaccccacgttagctgaaatgggaa

SEQ ID NO: 701470 - DNA, 112 bp, Homo sapiens
tgaagccggcgctgctctgtggggctctggccgcgcctggcctggccgggaccatgccctgggcgctgcctatggcacagccaagagcggtaccggcattgcggccatgtct

SEQ ID NO: 701471 - DNA, 74 bp, Homo sapiens
gaaatgcaatttgctgttggctggagtggttccttaaatgtcgaagaagggaagtgagctcacaatgactcaag

SEQ ID NO: 701472 - DNA, 98 bp, Homo sapiens
aaaaatggcagtaaccctgagacaaccacttctggtggttgccactcacctgaggatcacttctaccctagccgggcccagcccccgagcagtgcagc

SEQ ID NO: 701473 - DNA, 101 bp, Homo sapiens
gtggcctccgaacccgggaaaagaggaactaaggcggaggaactgagacgtttcgaattccaggaggtggtgagaaagcccgagcacttcacatatcaaga

SEQ ID NO: 701474 - DNA, 83 bp, Homo sapiens
gagatgggataatcacagagaacccagacactcacaaacataacaatggtcagcccatttggtttaccctgggcatcctggag

SEQ ID NO: 701475 - DNA, 74 bp, Homo sapiens
aagagggaagacacgcggaaacaggaaagttgcagacgttggcagtgctgttgcggcagctcaaggcagagggc

SEQ ID NO: 701476 - DNA, 74 bp, Homo sapiens
gggtgctggacgagggcgcctgtgtggatgtgaagttcatttccaatccgccctccatggtggcagcggggagc

SEQ ID NO: 701477 - DNA, 83 bp, Homo sapiens
tactacctggtgcagggcctgattgaggactgccagctggcgctgcagctctttgaggagttgcaggagctgctgacccatga

SEQ ID NO: 701478 - DNA, 74 bp, Homo sapiens
taaaggagatgggttagatgttcaaacggggattcagcgtccgatcctttggaacagggactcacgtgaagctt

SEQ ID NO: 701479 - DNA, 101 bp, Homo sapiens
gtatatttttgtggaatgaaaaggaagtattagaaatgagctgaagaccattcacagaaggtgggtgcggctgctatttggacgagagttccccctgcagg

SEQ ID NO: 701480 - DNA, 100 bp, Homo sapiens
ccagctgtatgtgcggcgccgaaagaagctacccagtgtcctggtgtattccgaacttaagtaccacccagagatgagattcttccactggttcagcaag

SEQ ID NO: 701481 - DNA, 83 bp, Homo sapiens
caaggatcgcggcagcaacacgatcggcgcccgcctgaaccgagtagaagacaagacgagccaaactcaggctgtaccttgag

SEQ ID NO: 701482 - DNA, 82 bp, Homo sapiens
tgaggactcagaccggtctctgcaagaaggccatgtggaagtgttacatcaccttttgcttggaaagatttactaagaagtc

SEQ ID NO: 701483 - DNA, 96 bp, Homo sapiens
cagtaacagtgtgtggagatatccatggacagctttctaaaaccaatttttccaacaacaacgatttccgtgctcttctgcagtctttgtatgcta

SEQ ID NO: 701484 - DNA, 87 bp, Homo sapiens
gcgccgcgccgcacgagcaccagcctagagccagcaagatgagtatcatatggttcatctagtatgtacttctcggactcctcccag

SEQ ID NO: 701485 - DNA, 78 bp, Homo sapiens
cctggtcgtgaccaagtataagatggggggcgacatcgccaacaatttccctcgatgatgtgcttctgagtgctctgc

SEQ ID NO: 701486 - DNA, 97 bp, Homo sapiens
aaacaaggagagcctactgagcagcctgagtggtggttctcaccattcaggaagcccttcagctcactgttcaaaaagtagtgggtctctggattca

SEQ ID NO: 701487 - DNA, 50 bp, Homo sapiens
aatattacacttctctccttgtttggacatatttgactcttttcccccca

SEQ ID NO: 701488 - DNA, 75 bp, Homo sapiens
ctccgactactttctccttcaagctaatttgggcataggaatccctctcctggccagcaattttatcagcccaaa

SEQ ID NO: 701489 - DNA, 88 bp, Homo sapiens
tatctttaaactacacaaaagtggaacagctttgttcaggagtacaagcgcaagctagccagagtttccctggtgcgcaaagaactca

SEQ ID NO: 701490 - DNA, 50 bp, Homo sapiens
agccaatgcattcagaagccaaaatgagggaaaccaaagggcagtttctc

SEQ ID NO: 701491 - DNA, 51 bp, Homo sapiens
ctgccttccattgtgaagtctgttgaaatcacaaagattagacaccttttt

SEQ ID NO: 701492 - DNA, 75 bp, Homo sapiens
cttccacgtgtgagtgagaacatcacaggtcgggaaagaggttaaagaagacacgcaagtatgatatcatcacca

SEQ ID NO: 701493 - DNA, 88 bp, Homo sapiens
ataatgcattggaacatgacatgagattaaggttcaaaccttgtactactcagctgatcacaagctgcttgatgggaacctactagat

SEQ ID NO: 701494 - DNA, 75 bp, Homo sapiens
caaagggccacagtttatctgttcagcgcctcacgaaatccaaagttaagggaagaaagtcggaggctggctttg

SEQ ID NO: 701495 - DNA, 101 bp, Homo sapiens
acttcacttttgagtgcaactgccttccagcatggggtaaccttggaaatgttctgaagagtcagagcaaaatttctgaagctgaaagcgcctatagaaat

SEQ ID NO: 701496 - DNA, 100 bp, Homo sapiens
ctcctgaccaggccaggggagggtggcactggctctcctggtccagctctcaggacaagaacaaagtgtgctgggtgccaaggactcacccgtacgtcgg

SEQ ID NO: 701497 - DNA, 98 bp, Homo sapiens
ctaccatgtcagccttcccagtagctgggaccacaggtaagaaggtgttttaccctgtggtgttcagtctttacaatcctgccattgtttatgccaac

SEQ ID NO: 701498 - DNA, 120 bp, Homo sapiens
gaaaataaaccttcaaggcaaactgtgttcattgagaccctgattgaagagagaggcagtcgatgatgtgaagaaaggttacatcaaagcagaagaaaagtcctatcaattacagaagct

SEQ ID NO: 701499 - DNA, 73 bp, Homo sapiens
tcagaatttattggatgctgacaaaaatgaagcaccttctaagtgagcaacacagaaactttgcacagagtaa

SEQ ID NO: 701500 - DNA, 98 bp, Homo sapiens
atgtgagatacaaggctacacagagacagatcaaagcagctcaacattagcagtgttgtggctgcattttccgaccttcttcacgtccgaatccctaa

SEQ ID NO: 701501 - DNA, 99 bp, Homo sapiens
gacgcggggccatgtgcaggaccctaacgacaggcgcctccggcccatttacggtggccagcatcgaaatgttcagccttttagtgatgaagatgcatc

SEQ ID NO: 701502 - DNA, 83 bp, Homo sapiens
acagcatcaactacctgcactttggggagcctaagtcctggccctgtttgtgctcttcgtcctggcctacatccacatcgtct

SEQ ID NO: 701503 - DNA, 101 bp, Homo sapiens
ctgcaggacctagaagatgccattcatcaccaccagggaatatatgaacatatcactcttgcttattctgagaatggcagttcggaaaaccctcattcctc

SEQ ID NO: 701504 - DNA, 75 bp, Homo sapiens
aagtgccgaaagagcactggactccggaagactgcgtggagtgcatggcgtgttcagacaacacagttcgtgctg

SEQ ID NO: 701505 - DNA, 51 bp, Homo sapiens
ctcatgaacaggctatcttgcggactccagggattagagctcgatctgcaa

SEQ ID NO: 701506 - DNA, 74 bp, Homo sapiens
ccaaggctggcttggtggatgactttgagaagaagggtggtgacttcacacgccataatggcactggtggcaag

SEQ ID NO: 701507 - DNA, 82 bp, Homo sapiens
cggtgggcgccgacatcatccagctgcctcaaatcgtcgtagtgggaacgcagatgcctgaggaaacccagacccaagacca

SEQ ID NO: 701508 - DNA, 82 bp, Homo sapiens
tgtatttgactgagagaaacccactgaagacgtctgcgtgagaatagagaccaccgagcattgtcccagatatagccgttgg

SEQ ID NO: 701509 - DNA, 82 bp, Homo sapiens
cggtgtgcctcggcagccttgcgctgctctaatggtccggacttccgtgtgctttatcctgtggataaacgcagagtgaacg

SEQ ID NO: 701510 - DNA, 100 bp, Homo sapiens
tgagcaatagcacgaggcctgttgtctaccaagtgcagtttaaatagtgacagtatgttgactgctgtctctgtggccagagattgtggaatgattctac

SEQ ID NO: 701511 - DNA, 97 bp, Homo sapiens
ctggggccttaaagccccttcgtctccccagcacccactctctgggggcaggtgggcccggtgacaggtatgacgctgggcgggatggcttcatcga

SEQ ID NO: 701512 - DNA, 100 bp, Homo sapiens
catacaccgagagagtgaggagccagacgacaagcacacactatggcgctgaaacggattaataaggcactcagaatggtccagcgtttgacataccgac

SEQ ID NO: 701513 - DNA, 75 bp, Homo sapiens
ctaagacttggcgaagcgctgcgctcgcgcccggatccctcaggttacgggcaggacttgagtggcttcggacag

SEQ ID NO: 701514 - DNA, 102 bp, Homo sapiens
tggaaccggatttctcttcccagaaacttcaacatctggaacatgtgatggaaaattatactcagtggctgcaaaaaaatcctgatgtccatccaacagaag

SEQ ID NO: 701515 - DNA, 100 bp, Homo sapiens
gccacagttcctaccttatgagctcggttttcttatgcttataagagtggaacagacgcaaacatgcagatctttgtgaagaccctcactggcaaaacca

SEQ ID NO: 701516 - DNA, 78 bp, Homo sapiens
tattggatatgaaactggaagacatcctggtttcccaggcagctgcagacttgaaacagttctgtctgcagaatgctc

SEQ ID NO: 701517 - DNA, 75 bp, Homo sapiens
ctgggcgaaatgctctacaccaagcgatttgggcattttgtcagtgatgctgatctttgccttcttccaggaact

SEQ ID NO: 701518 - DNA, 82 bp, Homo sapiens
ctgggattcgcgctgctgggcacccacggagcctccggggctgagatcacacagcgggcgcctacgatcggcttaatcatca

SEQ ID NO: 701519 - DNA, 100 bp, Homo sapiens
cgggctggtcctgctgcgagccggcggcccggagtggggcggcgggcattttgttcccaacatcacctttggtcaccctgtggtagaaagccttcgaaag

SEQ ID NO: 701520 - DNA, 100 bp, Homo sapiens
cctgcaggatccaattgtgtccattgatctctcagagtggctgaggataatagttaaaaattcaagatgtccatttacgctttgaagatggtgtcaccaa

SEQ ID NO: 701521 - DNA, 75 bp, Homo sapiens
cgggcttcggcccccaccagagactcggcctccccatggccacccatggaccagtcggcattcacttcctccctt

SEQ ID NO: 701522 - DNA, 100 bp, Homo sapiens
agccgtctaccagatcaacgtcctccgggaccggagtcagaaccctccgcagagtaaagctactggggataaaggaaggagaaataagtcaactaaaatt

SEQ ID NO: 701523 - DNA, 100 bp, Homo sapiens
ccgtggcggtgaagcgtgaggccggcatcgtctttccgtcctctgaggcgacggccgcggctgcacagaacaactctgctcatggtgattacatgcaaaa

SEQ ID NO: 701524 - DNA, 75 bp, Homo sapiens
gacgatgaggtactgatttacagtattcccacgagcattctgctgagatgaacaatcagatgacctcgtgtgaga

SEQ ID NO: 701525 - DNA, 73 bp, Homo sapiens
gccgagtgcagcccgaggagctgagggtttaccccgtgaggtgtggtggctggaggtggccgaattgacaaac

SEQ ID NO: 701526 - DNA, 100 bp, Homo sapiens
tccgcggccgagagtgcagcgatgggaagccgtgtccgccttttaagattgtgattctggatgaagcagattctatgacctcagctgctcaggcagcttt

SEQ ID NO: 701527 - DNA, 88 bp, Homo sapiens
tgttgccatgtccgcaccgggacgatcatcctggggacctggtacatgaaatcaatgtggactgaacataaatcacctgatggaagga

SEQ ID NO: 701528 - DNA, 100 bp, Homo sapiens
gcagctacgacaagggcctcgcttggtaccggttaaacccatccagagtaatggctgcggccttacccaggaccctgggggagttgcagctgtatagaat

SEQ ID NO: 701529 - DNA, 100 bp, Homo sapiens
agcaatgtcaagtttgtccaggatacatccaagttctggtacaagccacacctgtcccgtgaccaagcctgggccgagccagtggcccccagaggatgag

SEQ ID NO: 701530 - DNA, 90 bp, Homo sapiens
gagagcaaaatctacaagatgatgcagggaggaggtgctgggcgtcctcttctttgccatagcctgcttcttatacaagcccctgtcgga

SEQ ID NO: 701531 - DNA, 80 bp, Homo sapiens
ggaacatcagcaatgcttctgatgctgcacttaaaaggatgcttgttttgatgtcctgctcattgttttccctatgaagt

SEQ ID NO: 701532 - DNA, 100 bp, Homo sapiens
gaccgagctggagagcgtggacaagagcgcggggcaagtggctcggaacacaggacagattgattcactttggagctgtaagtactgatgtattagggtg

SEQ ID NO: 701533 - DNA, 75 bp, Homo sapiens
ttttgctggtgttgtccctcccgtggcagttttctgaatttccagatcccatgtggggttcagattatgtgcagt

SEQ ID NO: 701534 - DNA, 98 bp, Homo sapiens
ggacagacctcgtcccgggctgaattctctctccactcttcgagattggcacacccagcctcctgacaaggtgatccgggcgggccccgcaggaattt

SEQ ID NO: 701535 - DNA, 100 bp, Homo sapiens
ctggtcagccttcagggaccctgagcaccgcctggtctctttcctgtggccagcccagcggaaggagagttttacatggaagtggcttacagaaacttgg

SEQ ID NO: 701536 - DNA, 97 bp, Homo sapiens
acaatccaagttccacaatatattgactactgccacaattccgaatttcttcaggttgaattacctagaagtttgtcactgacttgtgttcctgaac

SEQ ID NO: 701537 - DNA, 75 bp, Homo sapiens
ctcgacctgctaacagaactggaccttttcgatccctttaagatgtaccatgatgatgacctggcagatttggtc

SEQ ID NO: 701538 - DNA, 100 bp, Homo sapiens
ctttttggagggaaagaaagagccctggactgtgaagagtgaggagaccatagctgcacagccagatgcgacctaaagtcatgtggcacctccttcgaag

SEQ ID NO: 701539 - DNA, 50 bp, Homo sapiens
ggggaatcctgacttcatcgaagtgaagacaatgcagatcttcgtgaaga

SEQ ID NO: 701540 - DNA, 82 bp, Homo sapiens
gagcccaagaccgagacctacgtggaggcaaacatggggctgaaccccagctcggccctgtttgtgctcttcgtcctggcct

SEQ ID NO: 701541 - DNA, 75 bp, Homo sapiens
tgtactttgccaagcaccaccaagatgcctacatccggtgctgcaggtggagaaattttcagcctgtgtttacct

SEQ ID NO: 701542 - DNA, 124 bp, Homo sapiens
gcagaggaaaatgcaagaagactgatggagcaggcttgcaatattaaaaaacgtgttcagttgatcatcaaatacttaaaggaccttgaaagcttgtctggctctaattaaagcacagctactt

SEQ ID NO: 701543 - DNA, 97 bp, Homo sapiens
gaattcgaaaagcagttcaacgagaatgaagccatccaatggatgcaggaaaactgggccacccgttcatcgtgcagttcaatgatggaaatgccgc

SEQ ID NO: 701544 - DNA, 100 bp, Homo sapiens
attttactcatattagtagccaatgcaattgtgggtgtatggcagcttctagaattcctctccagagctactctcaagttatatccaggggacaggcccc

SEQ ID NO: 701545 - DNA, 75 bp, Homo sapiens
ccaagttcaaccaagccattttatgagttgcagaaacgaattgctgaaatggaaactcaaaaggaaaaaattcat

SEQ ID NO: 701546 - DNA, 100 bp, Homo sapiens
gcagacatctacaaccttcgatctcctgacgaagtattgggaaagggtcgttgtggtgcatagacccagagtatagacaaaatctaattcaggctttgaa

SEQ ID NO: 701547 - DNA, 75 bp, Homo sapiens
aatttggggaaagagttgtcaaacgaaacccatgtttctaatgaccagcagattgctcgctgtaagcagctcatc

SEQ ID NO: 701548 - DNA, 82 bp, Homo sapiens
gcgatgcgtcaagtacactgaaattcatcctgagatgaggagggtgtgaagacagagaatgaccacatcaacctgaaggtgg

SEQ ID NO: 701549 - DNA, 100 bp, Homo sapiens
aagaaaatgaggtgtgagtgggatggtggaagggaaacacacttggagacaaacttcactttaaaatctgaatggcagcataattcgttgtatgaggcgc

SEQ ID NO: 701550 - DNA, 75 bp, Homo sapiens
gtagaggttctagagaacactaatagctttgggacccccgcccctggcttctcctccatgctgtatggaatgaag

SEQ ID NO: 701551 - DNA, 50 bp, Homo sapiens
gccgagcaccctccaagcagaggttaatttggagtggcccctggagtcag

SEQ ID NO: 701552 - DNA, 76 bp, Homo sapiens
aggctacatcgcggcatgagatgaagctgtgacagtaccggataccagtttatttactattcacctgaaaacacag

SEQ ID NO: 701553 - DNA, 139 bp, Homo sapiens
agccatcacctggatgcctacgtgggaagggacctcgaatgtgggaccccagcccctctccagctcgaaatcgagccctgggctcccccagtgttgcctgggtctgactttgcctcagtgaaaactgcctcgaattctt

SEQ ID NO: 701554 - DNA, 75 bp, Homo sapiens
ggaggtcggcggccccaaaatcttgctgggtacttcatgcatttagttctttgaagttccataatgagctcaatc

SEQ ID NO: 701555 - DNA, 83 bp, Homo sapiens
gcgagcacagagcctcgcctttgccgatccgccgcccgtccacacccgccgccagcttctaagtgccagatgatggaggagcg

SEQ ID NO: 701556 - DNA, 73 bp, Homo sapiens
ttcagctgttagcatggaactttcagaacctattgggaactgctcgcagaaagaagaaggtggttcatagaac

SEQ ID NO: 701557 - DNA, 88 bp, Homo sapiens
attggtcattctcgctaacaactgcccagctttgaggaaatgctgaatgttcatgatcattatcagaacatgaaacatgtaatttcag

SEQ ID NO: 701558 - DNA, 75 bp, Homo sapiens
gaagacaggtgatttctgcatttccgactgagattctttggatgggaagagaccttgaaaggacctctagtttat

SEQ ID NO: 701559 - DNA, 100 bp, Homo sapiens
caccctgctgatgttttgttgcttaggatatgaatggctgagcggaggctgtaaaacctggcactctgcttgggtggtggcctttatgaagtctccagtg

SEQ ID NO: 701560 - DNA, 75 bp, Homo sapiens
ctacagcatggtggagtcgcctctgatctgcaaagaaggagaaagcgtgcagagccaacacagatctatagattt

SEQ ID NO: 701561 - DNA, 74 bp, Homo sapiens
acagctgaagcgtgttggggaaggagctgtaaagagactgctggccaacgcagtcatcttcctgtgtgggaacc

SEQ ID NO: 701562 - DNA, 100 bp, Homo sapiens
tcgaaatcctggatactgcagggacaatatacctgtgtttcccacaatcacagccactgtgacttttcaggagtttcgatacgatgaatttgatggctcc

SEQ ID NO: 701563 - DNA, 80 bp, Homo sapiens
tgcagcgcctctcccacacgctgcggtgcccacccatatcccgcagagtctgccaggtcacgcatgaagggagcaccgtg

SEQ ID NO: 701564 - DNA, 107 bp, Homo sapiens
tccccagaacgcagatcagaggtagtcggacctttcccgctggcgcgcagcctcagctagaatcaaccttgtcctatgttaggcagctggaggcaagagtaagacag

SEQ ID NO: 701565 - DNA, 100 bp, Homo sapiens
tatgaacccagaggtcgtggaggtggccgtggaggcagaggtggcatggggtatgaagaggagatcaacaaacgcacagcagccgagaatgactttgtgg

SEQ ID NO: 701566 - DNA, 95 bp, Homo sapiens
aaagatgccttggttctgtatgagcctcccccgctgagcgctcatgaccagctgaagcttgacaatctccagcttgtacctcatatcagatgact

SEQ ID NO: 701567 - DNA, 97 bp, Homo sapiens
ttcccttaaaaagacggacagcccatcgtgtgaactatagagtttgtggacagatttatattggcagtttctatggagctttcgcctacccggagag

SEQ ID NO: 701568 - DNA, 83 bp, Homo sapiens
cgagaagcagcgggggggcaggcgatcgaagtccacaggtcctggctaccctgggaagagacaagaagtaaatgaagaaagag

SEQ ID NO: 701569 - DNA, 100 bp, Homo sapiens
cgcagcaaacaactccgcaaacgaaaaagaacgacatgatgcaatcttcaggaaagtaagagggtgaaaggtgtagcagtcactcggcctacacccacag

SEQ ID NO: 701570 - DNA, 100 bp, Homo sapiens
gaccaggcctggctcgcgcctctcccaggacccgcctggctgcgagatatgccggatcacctcaacagtcacgtcagacaagtgcactcaacagaacggc

SEQ ID NO: 701571 - DNA, 75 bp, Homo sapiens
aactatcttggtgaagcagtgagtcgaaatgcgtctctggaagtggcatgtagaagaacggtcaaggctcaaccg

SEQ ID NO: 701572 - DNA, 104 bp, Homo sapiens
cctcctgctctgggaccggaggagacatcggcctctgcaggcttgccgaagaagggagtaagactttgaccccgacgcaggcttcagtgattgccgcggatcag

SEQ ID NO: 701573 - DNA, 82 bp, Homo sapiens
gacctgggctgggaacccgcggtggagcgggacacgaacgtggtctcctctgagcctccggcctccataagacccaaaacag

SEQ ID NO: 701574 - DNA, 100 bp, Homo sapiens
tgggtccgcgctgcttccacccaacttcctgttagctgcgctgagcacagacccaagtgtgctggggaagtaccgagccggcttcagcgagtgcatgaac

SEQ ID NO: 701575 - DNA, 98 bp, Homo sapiens
ggtatataacttatcccaaaatgtccaggaggatgatcttcagcacctccagggaacagcacaggagaaggaggagagcgatgttgacctaacagcca

SEQ ID NO: 701576 - DNA, 75 bp, Homo sapiens
actgacttcaagaatgaagccgcggaccctcgcggtgcttgtgaatgacttcttcttggtggcttgtcttgagga

SEQ ID NO: 701577 - DNA, 100 bp, Homo sapiens
tggaagcaataccaaacagtggcatggaccacacccagcggaaagtcacaatggcttcagcctttcgcctttctttgaaaccaaaggtcagtgacaacat

SEQ ID NO: 701578 - DNA, 98 bp, Homo sapiens
ctggatccagatgatgtcttggcagatgttgttgaagataaagacaagatgatgtgcgaggtgatgccgaccatcagcgaagcagaaggcccccctgg

SEQ ID NO: 701579 - DNA, 100 bp, Homo sapiens
gagccaacaaaaattgttttttctacctgttgacgtgtcaagcactaactcaaatggttattgaaaatgcacgagaaaaaatactaagcaacaaatctct

SEQ ID NO: 701580 - DNA, 90 bp, Homo sapiens
gccttcactcccatggccacctgtgctccagggcctgcctgacccctgtccagcggccctgaagtaagggttgactttgataaagattgt

SEQ ID NO: 701581 - DNA, 100 bp, Homo sapiens
gtttctgcttaagttggcaagacactccaagtttggcatgaaaggtgtcagcatttgcaggtatacaggaacagtcctagtgatgcactatttaatcaaa

SEQ ID NO: 701582 - DNA, 90 bp, Homo sapiens
cttctcgacagccttttactgtgaacagatgagcctgaagtcttgacagaacctccaagtgccacaaccactactaccataggtatatct

SEQ ID NO: 701583 - DNA, 71 bp, Homo sapiens
agatgagcaggtgttcctaatgaagcaacaggcaaagcagagagcagaggttcttcagtccacgcaacggt

SEQ ID NO: 701584 - DNA, 116 bp, Homo sapiens
ggagagttcagaaggtgaagctgctcagcaagaaccagagcatggggaagacactattgctaaagtcaaagaccagagaggtgcgccatatttctcatctgaatttcactgcctgg

SEQ ID NO: 701585 - DNA, 71 bp, Homo sapiens
tgtggcttattcaggcccctgcagactttgccccagaatggttcgatacaagaggctgttttcctagcgtg

SEQ ID NO: 701586 - DNA, 50 bp, Homo sapiens
agctcggggactcccccaaagacaagagcactgcagtttcctcctgaagg

SEQ ID NO: 701587 - DNA, 100 bp, Homo sapiens
cgcccctcggggctccagtggagagttcttacgaacgtatgaaggtcaactccctgtgctggccatcacagatcccgacgtgatcagaacagtgctagtg

SEQ ID NO: 701588 - DNA, 100 bp, Homo sapiens
atccgcatcaacaagatgttgtcctgtgctggggctgacaggtacagcgaggttaatgccatcagcaccgcctgctccaacggagttccagagtgtgagg

SEQ ID NO: 701589 - DNA, 76 bp, Homo sapiens
ctaactcaagccattggcacacagagagaagaagaaggaggttcctgctgtgccagaaacccttaagaaaaagcga

SEQ ID NO: 701590 - DNA, 90 bp, Homo sapiens
accgagagcgtgaccgagagcgcgaatatcgtcatcgttagaaggttatgatgtgattgctcaagcccaatctgggactgggaaaacggc

SEQ ID NO: 701591 - DNA, 100 bp, Homo sapiens
cagccttccaagctctactgtgacttcagagacactgccaagcagccttagccctagtgtagagatcctcagtttgtggtctgccagctaaaggtgaaga

SEQ ID NO: 701592 - DNA, 75 bp, Homo sapiens
ggaggaccctgaaaaatacgaggaacttcttcagagggaccacagagcaccagcctgcatggaacttccttcctc

SEQ ID NO: 701593 - DNA, 100 bp, Homo sapiens
cagggcctggactacttctacgacctgctctagagcttggggcttccttggtcgcacccaccacctgcctgcccactggtcagccttcagggaccctgag

SEQ ID NO: 701594 - DNA, 88 bp, Homo sapiens
cagtttgagccaggacccctgttcaacatctgtgccaacagcagcctccacgactacgccaagatcttccccatgaacaacgccaccg

SEQ ID NO: 701595 - DNA, 83 bp, Homo sapiens
gggagcacacggagcactgcaggcgccggcctagtgtgttaattgtaacctacaaggagcctgcaaaatcatctactcagttt

SEQ ID NO: 701596 - DNA, 100 bp, Homo sapiens
aaaagttataaccaccgtactgaagttccctgatgatcagactcagaaaattttggaaagagaagatgctcggctgatgactttgctaccaggacttgct

SEQ ID NO: 701597 - DNA, 104 bp, Homo sapiens
acacactcggtcccgacatgatggcgagcatgcgagtggtgaagcgggctgacgcacgaggcacacaggaaggaggtggagcaggtgtatctgcgctgtgcggc

SEQ ID NO: 701598 - DNA, 82 bp, Homo sapiens
cgactacaagacgaccaccatcctgctggacgggcggcgggtgaagctgcagctctggtggagattctggacgcaaagacaa

SEQ ID NO: 701599 - DNA, 82 bp, Homo sapiens
taatggaggtctccagtttcgatcttgatgtggaagaaatggaggactcagaaccaaggatttccaagtgatttcttccaaa

SEQ ID NO: 701600 - DNA, 75 bp, Homo sapiens
tcgggggttggtgcggagctcggctcagtgagagcagttggattggatgctgctggcaagacaaccattctgtat

SEQ ID NO: 701601 - DNA, 82 bp, Homo sapiens
agcgcccctggtaactgacaaggaggccaggaagaaggttctcaaacaaggtcaaaatgcagatcttcgtgaaaacccttac

SEQ ID NO: 701602 - DNA, 107 bp, Homo sapiens
aggtgcaatccttcggttacaagcggtttgaataatccagaatggctactctgatctatgttgataaggaaaatggagaaccaggcacccgtgtggttgctaaggat

SEQ ID NO: 701603 - DNA, 100 bp, Homo sapiens
aagaagcaggccggggctgcctacgtgccagaactcacccaacagttccctctgaagcaatggtacagcagttccatgaaagtcatttgcgtgtggttga

SEQ ID NO: 701604 - DNA, 96 bp, Homo sapiens
ctgcaggcacagcccgagaaaccgcagcactacacgccaacatagccgaggtagaggtctccatccctgccaagctgcacaactccctcattggca

SEQ ID NO: 701605 - DNA, 73 bp, Homo sapiens
actccgctttcattggcatgttctggtggacgtcaggaggacttcacaacgggataaagtgaagtagcttcgg

SEQ ID NO: 701606 - DNA, 100 bp, Homo sapiens
agaccctggagcctcagttggaagcagccgatccagcctgcggagcctgtggggcaggatgaccgttcattaataaatttgcatctcatgcacaccagtt

SEQ ID NO: 701607 - DNA, 83 bp, Homo sapiens
cttggtgcctgagttctctcctagaaccgagtccccaagttctcagcaacatcatgcagtgcttcagcgcctttactggggac

SEQ ID NO: 701608 - DNA, 90 bp, Homo sapiens
ggcattgaggactttccttacctgtttttccagctcacccactgccagcagagcttctcacctggggcgggtgggttctgcaccaccctc

SEQ ID NO: 701609 - DNA, 75 bp, Homo sapiens
ttgggaggactcgaactggcgccaggttcttgatagtccacaatgggtgaaccacagcaagtgagtgcacttcca

SEQ ID NO: 701610 - DNA, 100 bp, Homo sapiens
tgaaattttgggggcaggttctcttgctaggctactgcagcactggggtgtcagttgttggtccgacccagaacgcttcagttctgctctgcaaggatat

SEQ ID NO: 701611 - DNA, 102 bp, Homo sapiens
tcagaactatgacatggtcagtgggatctactcatgagcaattctgcaagagagcttcagcaaaattccaaaacaatcgcatcgagagtcggcacaacgcag

SEQ ID NO: 701612 - DNA, 112 bp, Homo sapiens
caaagatgccagatgtgggagacacgccaaagctcccaagattactacaagggaagacataaattcaaagcaggttgctacagtgaaagcagacctggagtctgaatctttt

SEQ ID NO: 701613 - DNA, 101 bp, Homo sapiens
ccatggcgaggggtgcacggcggccacctgagtggcgcggcggtgtcaggcctccccatggccacccatggaccagtcggcattcacttcctcccttctgc

SEQ ID NO: 701614 - DNA, 120 bp, Homo sapiens
tcctggaaaaacaacatacggtggggcagcagctgctgtaagacagtctaaactacgaaatacaccttatcagttccgagagaaatatggggacgtcttcacggtacacctgggaccgag

SEQ ID NO: 701615 - DNA, 89 bp, Homo sapiens
cggcggtggcgagaggtgcggcgaaggaggcagaggcacttatgcttgtcaggtctatccaggaaaatggtgaactaaaaattgaaagc

SEQ ID NO: 701616 - DNA, 100 bp, Homo sapiens
tctgttcccgcaaattcagcctcaagacggtgctgctcttggccgaccagatgatgaggaaaatgaagctcgggctggttaactgacttgctcagcgtcc

SEQ ID NO: 701617 - DNA, 74 bp, Homo sapiens
tcctgcgggacatagaacaggtgccacaggttcatagccttctatgaagagtgtggaagaatcacaacaatgaa

SEQ ID NO: 701618 - DNA, 99 bp, Homo sapiens
atgatactttgatatctttcttgcctctcgcccatatgtttgagagagttgtagagctgaaggaagaggatcaccttccaagacaaaacagtcttcatg

SEQ ID NO: 701619 - DNA, 88 bp, Homo sapiens
gctgcacgggcggctgctggcggttcgagaacttgtcttggacaattgcaaatcaaatgatggaaaaattgagggcttaacagctgaa

SEQ ID NO: 701620 - DNA, 76 bp, Homo sapiens
gggcagacggattcatttagagctgcggaacaggacgccctctgatgttattcagcttctcaaggctggaaaagcg

SEQ ID NO: 701621 - DNA, 113 bp, Homo sapiens
caatgaagtccgagtcatacccccaggagtaagagcccatagcagtctgccagacaatagagcatatgggcatctccttggaaacaatgccatctttgaatgtgagagataaa

SEQ ID NO: 701622 - DNA, 50 bp, Homo sapiens
cctggtgcgtggcccagcctcagagctattcccaacagaagagcttgaac

SEQ ID NO: 701623 - DNA, 99 bp, Homo sapiens
gcgcccttcaatggaggaaattgtgaaaataatgactcacttgatgcggaacactcgtgaaactgctcaggccatcaagggtatgcatatacgaaaagc

SEQ ID NO: 701624 - DNA, 100 bp, Homo sapiens
caaaaggtgatctggacaaaggaacaggtatctcaggtgtatactcttgatgtaccagatgcattctattactgttatagtccagaccctggtaatgcaa

SEQ ID NO: 701625 - DNA, 82 bp, Homo sapiens
tcttgataaaaagagatgtggggggattctcgacctgctaacagaactggaccttttcggctgtgggtgagcgtggaggatg

SEQ ID NO: 701626 - DNA, 100 bp, Homo sapiens
ccgtggacagggacacctgcggccccgcggagctgcccggaggtggtgtgtgccaggtgctccgactaccgggccgaactgaaatacgacgacaacaggc

SEQ ID NO: 701627 - DNA, 78 bp, Homo sapiens
gatgctgaggatcgaggaacgttgtctgcatttaaatcaaacggtattgagatggattgggttatgaaacataatggt

SEQ ID NO: 701628 - DNA, 98 bp, Homo sapiens
cgggatgccttttcatttggaacattggtggaaagtttgctcacaatcttaaatgaacaggaaaatgtgccagaggaacttcaagaaccattttacac

SEQ ID NO: 701629 - DNA, 131 bp, Homo sapiens
ctgagatgaagacggaggacgagctgcgggtgcggcacctggaggaggagaaccgagggcagcagaagaagcctttgtaaatgacattgacgagtcgtccccaggcactgagtgggaacgggtggcccggc

SEQ ID NO: 701630 - DNA, 100 bp, Homo sapiens
cttcctgcaagaaaacaagcagcttctgcacgacgcactggcccaggacctgcacaagatgcgctgcctgaccacgcctatgctgctgcgggccctggcc

SEQ ID NO: 701631 - DNA, 75 bp, Homo sapiens
tcttcccgcgtccgccgattcctcctccttggtcgccgcgtccttggctggcgtctattgacctgaaaagtggtt

SEQ ID NO: 701632 - DNA, 75 bp, Homo sapiens
cttctgaagactgtggtcattgtgcttgagtttgccagatccggcccggtgcctgggttccaggaggacacgctg

SEQ ID NO: 701633 - DNA, 100 bp, Homo sapiens
ccgggctaagcgtcggcaagttctgtagagaaactcgggcaacctttgggacagcatggacagtgtcaagcagagtgcggccctgtgcctccttcgactg

SEQ ID NO: 701634 - DNA, 97 bp, Homo sapiens
ggccccagcagcccccgaaggccctatcaggacatggagtatgaaagacgcataagctgtggccatgactactgaagtaggctctgtgtctgaagtg

SEQ ID NO: 701635 - DNA, 82 bp, Homo sapiens
tcgaggacggtcggactcccgcggcgggaggagcctgttcccctgaggatgatcggctgaatgtaacagaggaactaacgtc

SEQ ID NO: 701636 - DNA, 89 bp, Homo sapiens
ctaccaccagaagctgcagggcaagccacagagccatgagctggaaatgattgaagccatccgcgaagcggtggtctacctggcacaca

SEQ ID NO: 701637 - DNA, 83 bp, Homo sapiens
gcgcatcttcggcggtgtggaggacgggcctgaagcagaggcagcaggttttaaaatcaaagatgggaaaatcggagaaaatt

SEQ ID NO: 701638 - DNA, 90 bp, Homo sapiens
ctggaccgcagcgagcttgagcgcagccacctgatgctgtggtctgagctcggcctatgggggcctcacaagccccggcctcagctacag

SEQ ID NO: 701639 - DNA, 74 bp, Homo sapiens
tcagatttgaaaatgaaagtggtaaaggagctggaagtgcgaaaattgatgcatgtgagaggagatggaccctg

SEQ ID NO: 701640 - DNA, 82 bp, Homo sapiens
tgatgtgaaaaataccacgacaaaaccaccctagcctccagcacaaaggggcgcatggtgatgtctcgaggtggggagctag

SEQ ID NO: 701641 - DNA, 82 bp, Homo sapiens
gctgcaccccaccttgatccagcggacttacgggtgcagaggccaagaccgttttgcccaagaaggagaaaatgaagctgag

SEQ ID NO: 701642 - DNA, 74 bp, Homo sapiens
cttgaattttctaaggtgtcattagagaagcagctagagctgctggatttaatgttttgcgattaattcacgaa

SEQ ID NO: 701643 - DNA, 100 bp, Homo sapiens
caggctcagtctgcggccaagactccgtcctgcaaggggtgagtcaggtgctgggaagacagaaaatacaaagaaagttattcagtaccttgcccatgtt

SEQ ID NO: 701644 - DNA, 76 bp, Homo sapiens
attttcttttttggaactcatgagaccaccagtatgcatgagcgggtgaaccgaacagaaagacagtttcgatcac

SEQ ID NO: 701645 - DNA, 100 bp, Homo sapiens
aggaggtctgtccattggtcaggctggagaatttgattactcaggatctcaagctgtaaaagccatgaaggtaatcaaatgcaaagcagctgtgctatgg

SEQ ID NO: 701646 - DNA, 144 bp, Homo sapiens
tggagatcagaatttatttacctctgtttatccaacgctctctcagcagcttccaagagaaccaatggaatggagaagggtaattgggatacttctggcagcgaactgagtgaaggggaattggaaaagcgcagaagaaccctt

SEQ ID NO: 701647 - DNA, 93 bp, Homo sapiens
ttttggatcggcatctagtctttccgcttcttgaatttctctctgtaaaggagtccacaagaatcggaatgtcagttaatgctattcgcaagc

SEQ ID NO: 701648 - DNA, 75 bp, Homo sapiens
catccacctgctgcagatggggcaggtgtggagaaaagaggcacagttagatgaagaaggacagtttcttgtcag

SEQ ID NO: 701649 - DNA, 75 bp, Homo sapiens
cacatcgacagggacgtcctcattgtcctcggttatgaagacagtatggagtttccagaccatagtagacatttg

SEQ ID NO: 701650 - DNA, 100 bp, Homo sapiens
gggttatcgcacttaagcctcggaacaactttaccaggcttgttgattggtgctggctgtgccctctaccccttgggctgggacagtgaggaagtccggc

SEQ ID NO: 701651 - DNA, 100 bp, Homo sapiens
ctgagccgggtggccgccctgttccccgcgctgcggcctggcggcttccaggcgcactaccgcgattatccctggcgctggagccgggccgtccccatga

SEQ ID NO: 701652 - DNA, 80 bp, Homo sapiens
ccacgcggaccccgaagtccgcaacccggggatgggcccgcggctgcgagggcaccatgccggtggaaaggatgcgcatg

SEQ ID NO: 701653 - DNA, 100 bp, Homo sapiens
atttaagcctgatctaacccctagaaacagagctaaagttgcagacaagatccagctcatcaataatatgctggacaaagtcaatgagatgattattggt

SEQ ID NO: 701654 - DNA, 100 bp, Homo sapiens
ttggagatggggaccgccctggacatcaagattaaaagagcgaataaagtttatcacgccgggtcatgatgctatggactcctactacgactacatatgg

SEQ ID NO: 701655 - DNA, 90 bp, Homo sapiens
caagattcggaggtaacagtgaagggattcaggatatacggtgcaccttgggttctctataaaggtgtcttaaaaaggttgattttgtta

SEQ ID NO: 701656 - DNA, 142 bp, Homo sapiens
cctgattataaaacaaccagatgagttgctggacagcatgtcagattggtgtaaggagcatcacgggaagctcctgggcaacgtgctggtctgtgtgctggcccatcactttggcaaagaattcaccccaccagtgcaggct

SEQ ID NO: 701657 - DNA, 82 bp, Homo sapiens
tggagcctcagttggaagcagccgatccagcctgcggagcctgtggggcagacggcgggcgctaacaccaccgacaaggagc

SEQ ID NO: 701658 - DNA, 75 bp, Homo sapiens
cagcacctggacgaactcaaggcattcttcgcagagactacacttgctgctttgaaggatgaagttgtatctgtt

SEQ ID NO: 701659 - DNA, 100 bp, Homo sapiens
tgcctattttatgaagtagaagtcaataacagccaaactgagacacataatgttttctacgatttgcatgaagatgtcgaagaagctggtgcactgcaga

SEQ ID NO: 701660 - DNA, 83 bp, Homo sapiens
aaattgttgaaccatacaataagatagttgcccggactgcacaactagcaagacttcaggcttttgacctttatgaacaaaga

SEQ ID NO: 701661 - DNA, 98 bp, Homo sapiens
tgacattgtggacaagctgcagtactctcggattctggatgaaattgaagaacataacatcaaaatctatcacttacctgatgcagaatcagatgaag

SEQ ID NO: 701662 - DNA, 100 bp, Homo sapiens
gggagaggagtcggcctattgcctccattctagaggaagtgaagaagctttctgagcaggtgcataaggcaaatccaatacgcaagtaccagggtctgga

SEQ ID NO: 701663 - DNA, 74 bp, Homo sapiens
ttcgtgcccgaaacgccgaatataatcccaagtacgctggggaggaggaggaggaagggagcggcagcagtgaa

SEQ ID NO: 701664 - DNA, 50 bp, Homo sapiens
ttgtggaagaagcatccattaagggtgtctgatgccatcaagtgttgcag

SEQ ID NO: 701665 - DNA, 89 bp, Homo sapiens
aggcgaccgtcttgcatctgaagaagttcatcgccaaaaaactcaacctttcatcctttaacgaggatgacatggaagcttaccggacc

SEQ ID NO: 701666 - DNA, 87 bp, Homo sapiens
ggtgtcggcgcgggagcagcacttccacagccaagtgcgggagtccacggttatcaccaatctagtgaaaatgttgaagtccagaga

SEQ ID NO: 701667 - DNA, 101 bp, Homo sapiens
ggcttgaccatctcacaactgctcgcgtgacgaccgcattcgtggcagtgcagggagactgaccctagacaaagctcttgacatgacttactacctccaac

SEQ ID NO: 701668 - DNA, 83 bp, Homo sapiens
caactcttttctctcgggcttcatctcttgtgtggggagtttcatcctagcggggggatatgagactttctactcggaatatc

SEQ ID NO: 701669 - DNA, 96 bp, Homo sapiens
ccaccgcaggtcgaggacggtcggactcccgcggcgggaggagcctgttcccctgaggtccaaggatcttataaaggaagctatccttgacaatga

SEQ ID NO: 701670 - DNA, 83 bp, Homo sapiens
tactttgactactggggccagggaaccctggtcaccgtctcctcagagttgtctgctggttctcagcttgaagaagattctgc

SEQ ID NO: 701671 - DNA, 82 bp, Homo sapiens
cgcgccgcgagggctccttccctcagggggatatgagactttctactcggaatatcctgagtgttgcgtggatgtaaaaccc

SEQ ID NO: 701672 - DNA, 99 bp, Homo sapiens
gccatcaccgacctcatcagtgagctgtccctgctggaggagcgctttcggacgcagggacagagctcatcgggaaatcaaggatattttctataaggc

SEQ ID NO: 701673 - DNA, 80 bp, Homo sapiens
tggatcctcaggatggaggagagtgtgtcttaatcaaaacccacaggaaactacaagatccccggatcatgaccactctc

SEQ ID NO: 701674 - DNA, 96 bp, Homo sapiens
gaaaaaacaaaacaaatatgaactatgataagctgagcagagccctgcgatactattatgacaaggacttgagagagacaagtttgataataaaac

SEQ ID NO: 701675 - DNA, 100 bp, Homo sapiens
aaggacaaaagccaagaggaggacagttcgctacacagcaatgcatcgagggcaaggggacgcgagataaggtcctgatcagaatcatggtctcccgcag

SEQ ID NO: 701676 - DNA, 98 bp, Homo sapiens
tgtcaggatgaattggcagagcttgacccaggcactagtgcatgcctacatcatcagctacctgaagaaggagatgccaagtgtatttggaaaggaaa

SEQ ID NO: 701677 - DNA, 90 bp, Homo sapiens
ctgctttatgctgtacatggaaatcatgtgaaatgtgtaaagatgctcttagttaagtgggcagaccaacatccacctcagcaaaaactt

SEQ ID NO: 701678 - DNA, 74 bp, Homo sapiens
ctaagtacccacttctgttggataatattgccaaatacacagattcgccatgaagtcagcgtaaataatgtaac

SEQ ID NO: 701679 - DNA, 135 bp, Homo sapiens
cgaacagtgctgagtggcggcagcctctacatcgagatcccgggcggcgcgctgcccgaggggagcaaggacaggcttcattgaggaccctgagaggaagtatcactttgagtgcagcagcgaggagcagtgtca

SEQ ID NO: 701680 - DNA, 92 bp, Homo sapiens
tcgggatatcactatggagtctggtcgtgtgaaggatgtaaggccttttttaaaagaagcattcaagagtctcgctctgtcatccaggctgg

SEQ ID NO: 701681 - DNA, 50 bp, Homo sapiens
ggaccgctctcttctctcgccgacaggttaaacccatccagagtaatggc

SEQ ID NO: 701682 - DNA, 98 bp, Homo sapiens
aggaagaagaggagctcttgaggaaagccattgctgaaagcctgaattgttccaagagctgccagggtggctttcgggtccgggaagtgcggtgtctg

SEQ ID NO: 701683 - DNA, 75 bp, Homo sapiens
aggatttgaaataggaattgagatccatccttttacaatccctgctattattcgtccattcagcgtattgaacta

SEQ ID NO: 701684 - DNA, 75 bp, Homo sapiens
ggggcggaggcggaggcagaggtggaggcgctttgaaagtacctggagtagaacagaaaaattattatgtctgtg

SEQ ID NO: 701685 - DNA, 80 bp, Homo sapiens
ccagcacagaccctcgggcctcatcatggccaggaagtaagactttgaccccgacgcaggcttcagtgattgccgcggat

SEQ ID NO: 701686 - DNA, 100 bp, Homo sapiens
gcgtctccggggaaagccgtggccccgagggcggatccgaggtggcgcctggactctcgccctcagagggaggcccgtcccacggtctgtggctacggat

SEQ ID NO: 701687 - DNA, 75 bp, Homo sapiens
gggcaggaagagctgcagtctttgtgggacaaggttgcacgatgggaacacaagacccgcaagctgagcagggcc

SEQ ID NO: 701688 - DNA, 98 bp, Homo sapiens
aaatcggaagtgaattcggattgtttgctgagttggagaggaaatgaaccagaagagtggatccctcggacataccaagatttagacggtctaccttg

SEQ ID NO: 701689 - DNA, 82 bp, Homo sapiens
gatcctgaaccgcgcggccgaaccctccgcgggctgacgcacgaggcacacaggaaggaggtggagcaggtgtatctgcgct

SEQ ID NO: 701690 - DNA, 100 bp, Homo sapiens
aaaatgaggaaattctgtatgttcttcgccattatattcaggttcatgtgaaaatggcggatgaggctgtctgtgttggcccagctcccaccagtaaaag

SEQ ID NO: 701691 - DNA, 99 bp, Homo sapiens
ggacaacatcgaggaagccctcctgctcctcctcatcagcgaatccatgtgtggcaaaggagcagagaactttgacaagttcttcacacgaggacagcc

SEQ ID NO: 701692 - DNA, 82 bp, Homo sapiens
gttcggccaagggaccaaggtggaaatcaaacattagcctgaggcctgctcagtcgttcctaatgaataaaaatcaagtgcc

SEQ ID NO: 701693 - DNA, 121 bp, Homo sapiens
agtgccaacaactggcaaagaataacctgttggccctgccgcgaccatcggctttaggtgtcatggagaaactccagctgggcccagagattctgcagcgggaaaatccaaggcttattta

SEQ ID NO: 701694 - DNA, 147 bp, Homo sapiens
cctgcctccttttcttcctcagcgggtccgcggcccgctactctccgggaggggcgcttcccgacgccaaggccgagacgcatccagagctttcgtgaccggggactgttctgaagcaggcctcgtggatgacgtatccgacctgtc

SEQ ID NO: 701695 - DNA, 75 bp, Homo sapiens
taagctactcaagaaagagtgcccaattccaaatgtacaggttatcttgacgaatcagattacaacccatctgag

SEQ ID NO: 701696 - DNA, 100 bp, Homo sapiens
gtggaatcaaattggaactttgtagaagaactgctgaaaaagtccatcagtgttcaggcctacagctgtgaattctttgatttcaaaatatggatttcag

SEQ ID NO: 701697 - DNA, 149 bp, Homo sapiens
tgtggaggagcctgacagcttggaggtgttggtgaagaccttggactctcaaactcgtacctttattgtgggggcccagaaaaaggcattgctggctctgaagaagcaaagtagcagcagcacaaccagccaaggtggtgtcaaacgct

SEQ ID NO: 701698 - DNA, 100 bp, Homo sapiens
gaaactaatcctgatattaagccatcaaatgtggaacctatggaaaaggaaatgaaacacgatttccaaaatgaacttaatctttcatgagaaactgagg

SEQ ID NO: 701699 - DNA, 50 bp, Homo sapiens
cgcgactcggcggcggcgtcttttgcaagaggaggaacgacgtagaagag

SEQ ID NO: 701700 - DNA, 90 bp, Homo sapiens
ggacgagaagcaccgtggctgagtctgtgagccagcaggtgatctcaggcaatgaggaccctgagggagtggtgctgaaggaccttgggc

SEQ ID NO: 701701 - DNA, 100 bp, Homo sapiens
agttgcttgactcgtttggatcacaaccgagctaaagctcaacctgaagcaggacattctaaatgaaaagactgaattggaagcaacacttaaggaagcg

SEQ ID NO: 701702 - DNA, 75 bp, Homo sapiens
aatatggtgaactcattgtcttagggaaagcttgtggctcttgcagttattgatgagaaaaatacatcagttgaa

SEQ ID NO: 701703 - DNA, 98 bp, Homo sapiens
aaatgcaaaggacatggccggccggaagtcttctcccctgcacttcgctgcagctgtcccctttcctccaacccaacggcttactttcaaggaagtat

SEQ ID NO: 701704 - DNA, 101 bp, Homo sapiens
atgcctgtgtttccgcagcgagagcgaggaggagactgccaggaactcctgccaccgccaccggctcccatggcccacatacccagtgggggtgccccagc

SEQ ID NO: 701705 - DNA, 90 bp, Homo sapiens
gaagggaggagttggcaagaatttggctcacccattccccctgcaagcctccagcgtcgcgaatatgtctgtgctggagaatcatcactg

SEQ ID NO: 701706 - DNA, 98 bp, Homo sapiens
gatcgaattggtggaaaggttgaagttcaagagctcagaccctaaaatgtctaatacaggaaattggatgcatattcgttatcaatctaaactgcagg

SEQ ID NO: 701707 - DNA, 100 bp, Homo sapiens
ctcttgtgtggggagtttcatcctagcggttttcggctttgtgagaaaccttaccatcaaacacgatggccagcaacgttaccaacaagacagatcctcg

SEQ ID NO: 701708 - DNA, 90 bp, Homo sapiens
cttttatctgatattttaggccaaggagctactgcaaatgtctttcgtggaagacataagatacgaccatatgtgggatgtttggtacaa

SEQ ID NO: 701709 - DNA, 90 bp, Homo sapiens
gtaagtgcagatggaacacaacagtatgaagtgtaacagaacagactttaccacctgaaactgctgcttcaagttcagatcaggcaagga

SEQ ID NO: 701710 - DNA, 100 bp, Homo sapiens
tttcaccaatgtaagtctgccttatgttcctccagccaattgcaaaggtaatctcaaaagtcctgctagtgatcaacaactaatggaagacaaaaccagc

SEQ ID NO: 701711 - DNA, 100 bp, Homo sapiens
ccagacaaggacagcggtggcaagatcgacgtcagtctgaacatcagtttacccaatctgcactgcgagtgacagagaacaccccaatgattgctggcct

SEQ ID NO: 701712 - DNA, 98 bp, Homo sapiens
gcaagatgggtcctgactcaaaacccagtgaggttggattagcttttcaaaacagaaattcttggaaagaattaaatgacattgcatcgaagccctcc

SEQ ID NO: 701713 - DNA, 74 bp, Homo sapiens
cttttttgctgcaatcacaaagaaactcgaactatctaccagtttcattacaagaattggccagaccatgatgt

SEQ ID NO: 701714 - DNA, 123 bp, Homo sapiens
agggatgcctgtaccatgatgtgatgctggagaccttgacacttatatcctccctgggtgctggagaatctggtaaaagcaccattgtgaagcagatgaggatcctgcatgttaatgggttta

SEQ ID NO: 701715 - DNA, 51 bp, Homo sapiens
cacggttagcggcaccctcataggcaaagcctttggttgtgttggagggta

SEQ ID NO: 701716 - DNA, 100 bp, Homo sapiens
cacccgcgtacccggcgcagccagagccaccagcgcagcgctgccatggagcccagcagcaagaccatgaaatggaggctcagggggtgaagggactgat

SEQ ID NO: 701717 - DNA, 100 bp, Homo sapiens
agatgatgagatgcgcaggctcaacatacccgtactacaggatgatggctttctcttcctctgggtcacaggcaggacaagtacatggcggacatggacg

SEQ ID NO: 701718 - DNA, 101 bp, Homo sapiens
ccttagctgtgctcgcgctactctctctttctggcctggaggctatccagcatataattggtgattacaactttcctctataaattaactcttgacactcc

SEQ ID NO: 701719 - DNA, 75 bp, Homo sapiens
tggcggcggcgtctgtctctgcggcttctggttctcacttgtcggatcaacactctgtggtaggccagaacacag

SEQ ID NO: 701720 - DNA, 100 bp, Homo sapiens
ctaggcatgaacaccaattaatgctaatgaggcaagtgagatggaagattttcgaggtatagcagaagaatcatttccaagctttctcaccaattcatta

SEQ ID NO: 701721 - DNA, 126 bp, Homo sapiens
actcatgggccctggcggtggacgagcaggaagctgcggctgagtcgactcctgtggaagaggtccctgctgctattgccccattccaggggagggtgttgattggtgtggggaagctgttgcgtg

SEQ ID NO: 701722 - DNA, 75 bp, Homo sapiens
caaggacaaagaaggcaaacccctgctgaaggctgaggacaatgtgtgtgtcaagaaaataagaaccagaagtca

SEQ ID NO: 701723 - DNA, 75 bp, Homo sapiens
gggaacaggctccgtgcagagctgggccgacccgaaacttcggaaccaaaaagaagcttcccagagccggggcca

SEQ ID NO: 701724 - DNA, 82 bp, Homo sapiens
ctgggcgccaagccgcggagcctccagacggggggaaatttgcagtggtgagaaaatgtataaagaaagattctgggaaaga

SEQ ID NO: 701725 - DNA, 74 bp, Homo sapiens
cttacccgtgacaaaatgtgttccatggtcaaaaaatggcagatctgcaaagcccctgagcccaaaacagtctc

SEQ ID NO: 701726 - DNA, 97 bp, Homo sapiens
gtaactttagctaaaggggacttaaaatttcccctgaagatatttcagcattccaaaccagatgatggcttaaattccttggtccttgatttagatt

SEQ ID NO: 701727 - DNA, 83 bp, Homo sapiens
cccagaccctggagcctcagttggaagcagccgatccagcctgcggagcctgtggggcagaatcagatgggtgactcaaatat

SEQ ID NO: 701728 - DNA, 99 bp, Homo sapiens
cggcgcagtaatgtcaacatataccatgtttgtgtggaagtgccccgtgtttgctatgccgatgctgtcctagtggaaacaactccactgtaactagat

SEQ ID NO: 701729 - DNA, 82 bp, Homo sapiens
cgagtgcatcgaggacctgtctgaaggtgtcgtgaaaactacccctaaaagccaaaatgggaaaggaaaagactcatatcaa

SEQ ID NO: 701730 - DNA, 82 bp, Homo sapiens
tgagggtctcggggcgggcgccgcgggacctctccgggccatggcagcagccgctcttctaaaacattcaaaccaaagaaga

SEQ ID NO: 701731 - DNA, 75 bp, Homo sapiens
cagcaccatgaccaccccacaggtcctgaagctgctgctcaacaaatttaagaacactcgtgaaactgctcaggc

SEQ ID NO: 701732 - DNA, 100 bp, Homo sapiens
tccgtcgcggagccggagggcgggaggaacatgacatcgcggaggatctccgtctgtgatgaggacaaatttggccacaatgaatttattggtgagacca

SEQ ID NO: 701733 - DNA, 75 bp, Homo sapiens
ccatggtgcactggtcgggacacaacagcagcctgtgtgagccacacgccagccctgcggctctggatatcagcc

SEQ ID NO: 701734 - DNA, 98 bp, Homo sapiens
gctcctgccggcagctccaaccatgggaggccgcgtctttctcgaattaaacaaccaccatgtcgagcaaaaaggcaaagaccaagaccaccaagaag

SEQ ID NO: 701735 - DNA, 83 bp, Homo sapiens
ggcagaacacagcagggcggaggaaagtgcaggtggaatgcaagctttaggacttcacctgacagatccaagtcaacgtcttg

SEQ ID NO: 701736 - DNA, 75 bp, Homo sapiens
ggcatctataagacttcagggattacataaacctgtgtaccatgcactgagtgctggagaatctggtaaaagcac

SEQ ID NO: 701737 - DNA, 101 bp, Homo sapiens
aggtgtacttgcaagaaacctcaggacttgagtaacagcaacatggtgtctgacttccagcaactgctggcctgtgccagggtgcaagctgagcactggag

SEQ ID NO: 701738 - DNA, 82 bp, Homo sapiens
gcaggcggcccactggcagttcgaggtggctattatcatggaaaactaatttttcccagagaatttcctttcaaacctccca

SEQ ID NO: 701739 - DNA, 95 bp, Homo sapiens
gatgcctgtcactgggggcaccattaacatgatggagtacctgttgcagggacaataacggtgtgattggactgttggagcccatgaagaagagc

SEQ ID NO: 701740 - DNA, 90 bp, Homo sapiens
ctcacatggtgtggtgaattcaacacttccagtgagcagtaggtcatccagtcccagtgtcagaatgattactacctcaggaccaacctc

SEQ ID NO: 701741 - DNA, 100 bp, Homo sapiens
ccacaggctctctccgctcgattttgtcaccgttatgtgggaagcgaatccatgaggaaattaaagttcagccaagtcagttcagagaatctgtagaagc

SEQ ID NO: 701742 - DNA, 80 bp, Homo sapiens
tgtggccagtcatttaccaccaatgggaacatgcacagctcttaaagatggtgtgtccggagtttcttccttcagatgtg

SEQ ID NO: 701743 - DNA, 90 bp, Homo sapiens
ggcagaaggaggcattggccaagcctttgtgcctgctccacctgtggcacctgtcccagctccagccccaatgccccctgtgcatccccc

SEQ ID NO: 701744 - DNA, 98 bp, Homo sapiens
tgaaccaggcccttttggatcttcatgccctgggttctgcccgcacggacccccatgatggttttgcaagaataagacttgaccaagaccgactgcca

SEQ ID NO: 701745 - DNA, 100 bp, Homo sapiens
cgcctgaagcagctgctgtcccgggcctaccccctggactccctggagaagcagatggaaaaggtggaaggtccatccgagtatatcatggagacagtgg

SEQ ID NO: 701746 - DNA, 97 bp, Homo sapiens
gcttccggaggtcaagtcttcatcatcagtgtggagactcatgctgtagagttcgtaagaaggcaacaagttcttctcctctacagaaggattttgc

SEQ ID NO: 701747 - DNA, 76 bp, Homo sapiens
ctgtggtcgcggctggggacgtgcgcccgcgccaccatcttcggctgaaggctttgaagacaagattcccaaaagg

SEQ ID NO: 701748 - DNA, 75 bp, Homo sapiens
ctgccgtccttctccactttcgccagcccgtgccgcgagcgcggcctgcaggagatctggtggctggacccagag

SEQ ID NO: 701749 - DNA, 75 bp, Homo sapiens
ttggctcagccacccgctgggaatcgtgcagggattcttcgatatgaagagcattttaagaggtgcagcctctgg

SEQ ID NO: 701750 - DNA, 83 bp, Homo sapiens
ggccctggaggcggcgggagggccgccggaggaaacgctgtcactgtggaaacgccgcggcgagtcctttgcacatgttggca

SEQ ID NO: 701751 - DNA, 90 bp, Homo sapiens
ggaagaggcactgctgagggggcgcgaggggaacggaggccagagctgcggacagagcgggatgccaccagcttgtccaaagggaagttc

SEQ ID NO: 701752 - DNA, 51 bp, Homo sapiens
gaacagagccaaatcaaaggctaaacctgtggatttttgtatctaagttta

SEQ ID NO: 701753 - DNA, 90 bp, Homo sapiens
ctcccaagtagttgggactacaggggttggccggagacctacgacatgaatacctcggagcccaagacggagcaggaaagcatcactcct

SEQ ID NO: 701754 - DNA, 104 bp, Homo sapiens
agtgtatgtgatcatcgatctctcagggtcgtcgggtgaaggtgaatgaaaactttgccattgatttgatagcagagcagcccgtgagcgaggtggagactcgg

SEQ ID NO: 701755 - DNA, 100 bp, Homo sapiens
caggccgatccgctccgctcacgaattatatccagatcgagagacagaagattctgaaagggttcaatgaaatgagagtcatcttggacaatgaggagca

SEQ ID NO: 701756 - DNA, 98 bp, Homo sapiens
ctcaagactggtccacggagtgtatgaccacaaacagccatcaaggagttgaactgaatgaccgactcttgggcagccaacttttggcctgtaccctc

SEQ ID NO: 701757 - DNA, 88 bp, Homo sapiens
tcatttaccctttggtcggaacgattgcagcaattctccggaaacggaaattagactattatttacacaaactactccctgagatcct

SEQ ID NO: 701758 - DNA, 75 bp, Homo sapiens
ccaggacgaaggccctactgggcaagctatgaaacccacgtagtcgaacaccgtgatgcttctcctgcagggcgt

SEQ ID NO: 701759 - DNA, 83 bp, Homo sapiens
ctggaacaccttctcgctgccgccataccctgccttctccagcgacagccggtgagaagccctaccactgcaactgggacggc

SEQ ID NO: 701760 - DNA, 100 bp, Homo sapiens
cgcggccttcccatcaccatcacagagagcgatgttggaagcgaagtggaagcactgaacctccaggtgacatctctgtttaaggagcttcaagaggctc

SEQ ID NO: 701761 - DNA, 82 bp, Homo sapiens
gaggacgacggcgagttctacatgatcggctccgagaatggcgccattttgcggtacggaagctacacagcaacacgtatag

SEQ ID NO: 701762 - DNA, 78 bp, Homo sapiens
gctgactttgtaggctccgccaagaggcgccgcaggaggctaagtgctatttatggaggtacctatatgctgaataaa

SEQ ID NO: 701763 - DNA, 100 bp, Homo sapiens
cagaagtcgcgtgtctaggtgagtcgcggtgggtcctcgcttgcagttcagcgaccacggactgatcctttgaaatactccagccatgactaaaagagaa

SEQ ID NO: 701764 - DNA, 75 bp, Homo sapiens
ctcgccgggcagccgccacacaacctgatgcaaaggatacccctgatgaggatcgaatcatcaatttagttgttg

SEQ ID NO: 701765 - DNA, 75 bp, Homo sapiens
tccagactcggtgctgtacccgccggtgtgctgatctgcaaaccctggacacaatgcagccaattgagaggaaaa

SEQ ID NO: 701766 - DNA, 122 bp, Homo sapiens
tgggaggccggccggtgccagcacctttcggcttctgagacggcggcagcagcggcattcagacaatgcagatcttcgtgaagactctgactggtaagaccatcaccctcgaggttgagccc

SEQ ID NO: 701767 - DNA, 83 bp, Homo sapiens
aaagattatgcaactttcagaaagtttttcagaagaagtgaagtcaagatgaagaaccatttgcttttctggggagtcctggc

SEQ ID NO: 701768 - DNA, 51 bp, Homo sapiens
caagtttgaggatgaggaagctcaggcactgaacatctccttcccagccac

SEQ ID NO: 701769 - DNA, 89 bp, Homo sapiens
agaagccgcatcgggcatctggccgacgccctcgttcctgtggctgacgaatcagagatcattgatttcttcctgggggcctctctcaa

SEQ ID NO: 701770 - DNA, 100 bp, Homo sapiens
tggccaatgcccccagtcctccggaatcttctagtttatgtgcttccaaatcagacgaaggtctcccagatggtctaagaagtttcaggcacctgcaaga

SEQ ID NO: 701771 - DNA, 90 bp, Homo sapiens
tggttattcgcctaaaagaaggtctggatatatctcatcttcaaggacaagaataactgaagtgaagtgatggactccgatttggagagt

SEQ ID NO: 701772 - DNA, 75 bp, Homo sapiens
aaaaacattgtttgaggattcctttcaacagcattttgaaagcgaagcagaagccgtagaatcagcggcgagcct

SEQ ID NO: 701773 - DNA, 96 bp, Homo sapiens
gcctagctggagaatggctgacatcaacggccaataccaacatgtcatcctcatagaatttttaccaaagacaccgatttttcgaccagattagca

SEQ ID NO: 701774 - DNA, 75 bp, Homo sapiens
tcgcgcagtgcctggggtactacggctacagcaaggtgtggatgaggtcaccattgtcaacattttgaccaaccg

SEQ ID NO: 701775 - DNA, 83 bp, Homo sapiens
agaagtccttcttcgccaaatacgctcttgtcaggatggtgaagctgttcatcggaaacctgccccgggaggctacagagcag

SEQ ID NO: 701776 - DNA, 100 bp, Homo sapiens
gaaggtagacgtgtggtaatggcggctgatgtttcaaggaacagtttacaagcacatgataatttcttcatcagtctccgagagttgaagaccatcttgc

SEQ ID NO: 701777 - DNA, 100 bp, Homo sapiens
tcagtgggaagcatgtcgtctttatcgctcaggcatcattcacgctagaggactggttcgggagtgcttggcagaaacggaacggaatgccagatcctag

SEQ ID NO: 701778 - DNA, 100 bp, Homo sapiens
tagcaaactttttaatgaggaagagcccttctctggaagattgaacagaaatctaaccgggcttttgcttgtgggaaagtcaccatcaaggggaagcggc

SEQ ID NO: 701779 - DNA, 90 bp, Homo sapiens
ggagcaagagcaagatcaccgtgacatccgaggtgcctttctccaaaagtttttcctactccacaaacgtaacagtaaggaaaaaatcac

SEQ ID NO: 701780 - DNA, 100 bp, Homo sapiens
acccaacagcttatgcattagctgaacatctttcagagttgtatccgcaactcaaagttatgttgacgaatgtcctatggacggatttaggacgaaaatt

SEQ ID NO: 701781 - DNA, 50 bp, Homo sapiens
cgcgtacgccctgctgcttctcctggaatggctacaagtttctgtactgc

SEQ ID NO: 701782 - DNA, 96 bp, Homo sapiens
cccgccctgtgggagaagcacagtccacagttaagtgggcagaccaacatccacctcagcaaaaacttcttcctgacgaatcgcgccagggagcgc

SEQ ID NO: 701783 - DNA, 82 bp, Homo sapiens
ccagactagctgctaccccaagcccgggagcttctcagatggagatgggtgtcgtgagctggtggtgggctacacagaccgt

SEQ ID NO: 701784 - DNA, 89 bp, Homo sapiens
cagcaaagcagcagaattctttgatgggccttgatacaaagcatgcttgaaaaatgcgatcggtttctctggtcccagcaggcctagtg

SEQ ID NO: 701785 - DNA, 50 bp, Homo sapiens
tccctaagacttcaccatgagtcctggatgcctcatcccttagtttcaac

SEQ ID NO: 701786 - DNA, 83 bp, Homo sapiens
gctgtgctcgcgctactctctctttctggcctggaggctatccagctgttcatcatttgccacttaagctacttgcagtcacg

SEQ ID NO: 701787 - DNA, 75 bp, Homo sapiens
tacaactatagaagatcgtatagtcctagaaaggatcatagacggtatttctatgtaaacgaacagtcgggcgag

SEQ ID NO: 701788 - DNA, 80 bp, Homo sapiens
gcccttgttcccccaaatgtctgactctgactctcggactgagaaacgcaaggagggccctcctggacccgggagcggac

SEQ ID NO: 701789 - DNA, 99 bp, Homo sapiens
cggaatcagacggtgccccatagatggccagctttcccccgagggtcaacgagaaagagatcggtgtcgtgaaaactacccctaaaagccaaaatggga

SEQ ID NO: 701790 - DNA, 100 bp, Homo sapiens
agaaattcggtggactgagagatggctattatatccaagattggaggtggacacaaaggaagaggcagccagacagctacttcagcgtcctcaacgcatt

SEQ ID NO: 701791 - DNA, 82 bp, Homo sapiens
aaaccttgcttctaggagataaaaaggtgtcgtgaaaactacccctaaaagccaaaatgggaaaggaaaagactcatatcaa

SEQ ID NO: 701792 - DNA, 138 bp, Homo sapiens
aaaattgtgctagttttgctgttgtactccacattgcagaagttacaatcacagtgcacaatgatggaccatttggattgtgcaacaaatgaagaaaaccctgtgatatctggtgaacagattgtccagcaataatat

SEQ ID NO: 701793 - DNA, 100 bp, Homo sapiens
agaggttaaagagacccgttcagagtcctacagtggcagttgaaaacgaggcccactgcgactttgtgaagctgcgggagatgctgattcgggtcaacat

SEQ ID NO: 701794 - DNA, 102 bp, Homo sapiens
cgacttgactactcgcatcgcgcactttttggatcggcatctagtctttccgcttcttgaatttctctctgtaaaggagcggcaacctttggcactgcatcc

SEQ ID NO: 701795 - DNA, 143 bp, Homo sapiens
caccatgacgtccatccatttcgtggttcacccgctgccgggcaccgaggaccagctcaatgacagatgcagacagacatgctgaactatctggaagtccactgaaaagcaaaagcactaggaagcctttggcatgtatcatt

SEQ ID NO: 701796 - DNA, 100 bp, Homo sapiens
ccaagccaggaaagctgtggagcagctaaagatggaagcctgtatggacagggtcaaggtattaccaccttgctcttgactggaaatgcaactgtggtta

SEQ ID NO: 701797 - DNA, 74 bp, Homo sapiens
actcagaatcgaatctcttctccctccccttcttggtatcttgcaatatattcagaactctccctcctagtgac

SEQ ID NO: 701798 - DNA, 75 bp, Homo sapiens
gtctgcctgttctcccctcgtcggtggctaaggatcaggagaaggtctggggaaaataatccagagatttccaca

SEQ ID NO: 701799 - DNA, 101 bp, Homo sapiens
ccggaagccgaggccttgagcccagagcaggctgctcattacctaaggtgtctgtggaagaattagaacatagtattagcattaaaatagctaaagaagct

SEQ ID NO: 701800 - DNA, 100 bp, Homo sapiens
gctgtgccttatgtgtttcaagatgatccttaccttatgccagcatcatctttggaatctaatggcccccgtgcttccaagtgtcctgaagctgccagtc

SEQ ID NO: 701801 - DNA, 51 bp, Homo sapiens
ggccactcagagtcgcccgagaagaaaatgtttcaacgtgcgcaagagttg

SEQ ID NO: 701802 - DNA, 127 bp, Homo sapiens
tggggtcagccaatggagtcacatcagcattttctgttgactgtaaaggtgctggtaagatttcttctggatctgtggttgtggttccggagaatctggttgtgctgtgtgtggatgttgcaaggcc

SEQ ID NO: 701803 - DNA, 101 bp, Homo sapiens
tccatcatctttagacctaactcaaaggaaagtatgtgatggtgatgggagtggttcaggcctgcagccctgagccctgcctgcaggctgtgaagatgaca

SEQ ID NO: 701804 - DNA, 100 bp, Homo sapiens
ggtgtacagaactgttgctggcctgaatacacctgcatgaggtggctgaagactccagttggttcaggaagatttgactgaagagaaaaaaagggaactg

SEQ ID NO: 701805 - DNA, 74 bp, Homo sapiens
accagttcaaagcttgttgtctttgatactacattacaagtgtcatggagaaactccagctgggcccagagatt

SEQ ID NO: 701806 - DNA, 90 bp, Homo sapiens
agtccccgcgcgtggtcatccaggactggcattgcggactgacctccagggagaggcccagatctgatctgcagagatctcccttccggc

SEQ ID NO: 701807 - DNA, 145 bp, Homo sapiens
caaggaggttggcttcttcatcatccgggccagccagagctccccaggggacttctccatctctgtcaggtccaactggcccaccttcaacactccctctaagcacccagacctctagtggcagctccaccctatccaagaagag

SEQ ID NO: 701808 - DNA, 82 bp, Homo sapiens
tcgcgagacttggcgaaggccttcctttttcgtctgggctgccaacatgtgtactatgaggggctgcaggacaagctggcac

SEQ ID NO: 701809 - DNA, 75 bp, Homo sapiens
actacagtgttctttggatgctcatgaaatttgtctgcaagatatccaggattacaaggcagaggaagacccagc

SEQ ID NO: 701810 - DNA, 51 bp, Homo sapiens
gctacatgatgtcagagtctgtgggactgtggaggaggtgctggcgagttt

SEQ ID NO: 701811 - DNA, 50 bp, Homo sapiens
gcgctgtgacctcttccagaagaaagactacatacggacctgcatcatga

SEQ ID NO: 701812 - DNA, 100 bp, Homo sapiens
cagaagtagctctggctgtgatggggatcttactgggcctgctactcctggggcacctaacagtggacacttatgaatttatccagttggcgaaggactt

SEQ ID NO: 701813 - DNA, 75 bp, Homo sapiens
cggcccgacatggcgccggagctgaccccggaggaggagcaggccttctggcggccgcccctggtttctcctggg

SEQ ID NO: 701814 - DNA, 103 bp, Homo sapiens
tcagatgtctctgggcaagctgtgtgtggaggaacgtggctatgaggtctatccagatggcattcggcacatacgagcagacaagagagtcaatgagtggaag

SEQ ID NO: 701815 - DNA, 75 bp, Homo sapiens
cccccacggctggtgatgagcatccgggatgggatccacggacccctgctgacgcaaagtaccacatgcagcgct

SEQ ID NO: 701816 - DNA, 99 bp, Homo sapiens
gcagcgccccgcagggcgatggacggccgaaccccgcgcccgcaggacgccccagccagaccactttacctgcattgtgaaggtactttttaccctact

SEQ ID NO: 701817 - DNA, 88 bp, Homo sapiens
tctgagggagggtccgagccagccgctgttttgccggaggagcccctcaggccagtcgcctcaagaaaggccgggctctcggcgcagc

SEQ ID NO: 701818 - DNA, 98 bp, Homo sapiens
atcagtctgttcggcctgccatgtggaaaatgatgcttaatatcgatgatgccggtggccgtgggtccctacggacagtcccagccaagctgcttcga

SEQ ID NO: 701819 - DNA, 78 bp, Homo sapiens
gcgccgcggacgcgtcatcgagtgtgacgtggtgaaaggtgatcaatgttgatgggacgaagaggcggaccctcctgg

SEQ ID NO: 701820 - DNA, 74 bp, Homo sapiens
tcagaaagaattcatcacactgttgtgactgtgaaatactatggaaaagcatctcattctgcttcttatccctg

SEQ ID NO: 701821 - DNA, 98 bp, Homo sapiens
tgctcactggaaggatcataggtggcactcatgtctcactgccccactcagagctacagagacttctgaagtggagagtctgcgacctcctcggttct

SEQ ID NO: 701822 - DNA, 100 bp, Homo sapiens
ccggacttgtccttctacctcaccacctttggtgctgactgggttacttttttaaacactaggaatggtaatttctactcttctggacttcaaactaaga

SEQ ID NO: 701823 - DNA, 88 bp, Homo sapiens
acggagttgcgtcccggggacttggggccgcagggagatttggtgcttccagatgtgagttatcaggtggaatccagtgaggaggatc

SEQ ID NO: 701824 - DNA, 51 bp, Homo sapiens
cactacatcaaggactgcccccagccacctaatgatccccatggtatccag

SEQ ID NO: 701825 - DNA, 82 bp, Homo sapiens
ggcggcagccgattcctggccacctccatagcaagcagtgaactttgaggcgctgatcatcaccatgtcggtagtcggggga

SEQ ID NO: 701826 - DNA, 97 bp, Homo sapiens
atttcagggacccctccatccactcggtgaatgttttccagggacacacggagaacgagatcttgagctggaaatgggagatgattatattttggat

SEQ ID NO: 701827 - DNA, 87 bp, Homo sapiens
cgatgcactaggcctcgctcagggcggctgccccgggacccgcaggtaagaatgattgatgttggctgatattggagtgctcattca

SEQ ID NO: 701828 - DNA, 100 bp, Homo sapiens
cacaggtgcatttcacagcactctgggcgaaaattggatgtgaaaatgaagccagaccgagggtgatctggaccctctggcatctctcaaatcgctgact

SEQ ID NO: 701829 - DNA, 74 bp, Homo sapiens
agagacagcttgctttctgtcgtggcaatgttttgaaactggcaaaatcagactgaaactgttgaggagcccat

SEQ ID NO: 701830 - DNA, 101 bp, Homo sapiens
agaactggaaaattggcagaggctaaaaataaaggagaagtatttccaacaactgaagatttattgctaaacatgggtgcatttttggataaacccaaaac

SEQ ID NO: 701831 - DNA, 100 bp, Homo sapiens
tactacccaggccactacccacccaacattgactgcacatggaacattgagtcccaagaggaattacaagagtactgcagacatcatgaaatcacctatg

SEQ ID NO: 701832 - DNA, 90 bp, Homo sapiens
gcagtcctcggggagagcgcgccaagaccgctgcagccgctggctgaggaatttgaagtactgccttgtaattcttaatcagcctttgga

SEQ ID NO: 701833 - DNA, 100 bp, Homo sapiens
attcagcgagagaatttacagaaagccatggaactggtgacaatcaactattcctctgacctgaagaatctgattttcttcctgcctgacacagctcact

SEQ ID NO: 701834 - DNA, 74 bp, Homo sapiens
gctggacctcttagattctacagagctggatattgaggcacttacacatctatcatttcattctatcctcgtgt

SEQ ID NO: 701835 - DNA, 82 bp, Homo sapiens
tcgggatctcggtgctgcagacggcgagacctcctgcacaggtctcaccaacggctttgggggtgcgaggagcgagcaggag

SEQ ID NO: 701836 - DNA, 75 bp, Homo sapiens
cgtggccggagcggcccgcgcctgggctgccggcacttcgcggcagtagcctctagttcgttagtcaaaacgtga

SEQ ID NO: 701837 - DNA, 74 bp, Homo sapiens
cggcctggagctcccagggccgagcggaagccatcacctggatgcctacgtgggaagggacctcgaatgtggga

SEQ ID NO: 701838 - DNA, 104 bp, Homo sapiens
cttaaaggcaagaagatgaggaagaaggaagcggagcaggtgctgcagaagtttgttcaaaacaagtggctgattgagatggaggtttgctcttgttgcccagg

SEQ ID NO: 701839 - DNA, 90 bp, Homo sapiens
cctcacttccccggggtgtaataatgttaactgaggaacattttagtggacaaaccaaatgaccaatcttcaagatggtcttcagagagc

SEQ ID NO: 701840 - DNA, 83 bp, Homo sapiens
tcttgggggactatgtggtggacttggacacgtcccagctctctctgggcatctggaaagcgtttagtcacatcaagaaatag

SEQ ID NO: 701841 - DNA, 133 bp, Homo sapiens
ctgggggtgcatgttacgcagcggccagatgatgctggcacagggccttctgctgcatttcctgcccagaggacgaaaatgaccttcaaagaccttgggatggatgacttgggtatttactcttgcgatgtaa

SEQ ID NO: 701842 - DNA, 75 bp, Homo sapiens
gtttgctgcggcaaggacgagccggggcgctgaagtgaagtaagaactctgctagagaggaaatggctgcttcat

SEQ ID NO: 701843 - DNA, 50 bp, Homo sapiens
ctggctcggagcagcagcctctgagagtcatcctttttgaacttccatga

SEQ ID NO: 701844 - DNA, 75 bp, Homo sapiens
caggaggccaaggacggcgttctggatctcaaagcgcctcccgcgacgatgcccctcaacgttagcttcaccaac

SEQ ID NO: 701845 - DNA, 90 bp, Homo sapiens
cgtggagttgtgaacgccgcggactccggagccgcacaaaccagggctcgccatgaagccagtgcaagaagaaacacacgctgctgtgcc

SEQ ID NO: 701846 - DNA, 85 bp, Homo sapiens
actgcagcgaggacggcgaggcgctcaacggcgagccagagctggacctcaccagcaagtatgagcccagaggacctggtcggcc

SEQ ID NO: 701847 - DNA, 82 bp, Homo sapiens
gtgatatcgctagtgccaccatcagaaagaaacgtctggaccctcctgctcaggcagcctgcttctgcaaagtggtacgatc

SEQ ID NO: 701848 - DNA, 99 bp, Homo sapiens
tcctgagacgcattgctaagtgcaatgggaaatacctctcatcaaattactcagaggaggagatgttaaagtaacccatcttgcaggacgacattgaag

SEQ ID NO: 701849 - DNA, 82 bp, Homo sapiens
gccgcggcggcagcagcagtgagagtttttggtgttgagccagacttgaccagggaaggcggcagtattcccgtgaccttga

SEQ ID NO: 701850 - DNA, 100 bp, Homo sapiens
cagattcgcagtggtcgcttcttctccttgaagacccttttgaggacttctttgggaatcgaaggggtccccgaggaagcagaagccgagggacggggtc

SEQ ID NO: 701851 - DNA, 75 bp, Homo sapiens
tgcggtttcgacccggtcacacaaagcttcagcatgtcatgtgatggatggtgacagttctacaacagatgcttc

SEQ ID NO: 701852 - DNA, 115 bp, Homo sapiens
ggaaagttgactgaaaatggggcggaagaaaatacaaatcacacgcataatggatgaaaggaaccgacagatttaggtcgatctcgagaactacagtatgtatacgtggataaca

SEQ ID NO: 701853 - DNA, 100 bp, Homo sapiens
gagtatacacggcttgcagtggagacagcccagggccttgatgggcacagccatcttgtcatgtacctgggaaccagttcaagcactgtcttcctgttgg

SEQ ID NO: 701854 - DNA, 74 bp, Homo sapiens
tgttgaaaatgagcagctgtcctcatgtctctccagcaggcgacattgactacagcaccgtgctcctcggcatg

SEQ ID NO: 701855 - DNA, 74 bp, Homo sapiens
gtacaccatgcacaaggtcttccagtttctgaacctaggtctcctctgagcctccggcctccataagacccaaa

SEQ ID NO: 701856 - DNA, 100 bp, Homo sapiens
aaacatctgctaaaacacgagctaatgttgacaagattgaacccacagaattatctgagaactgtttctggttaagagtcaaagaagacaagtttgagaa

SEQ ID NO: 701857 - DNA, 51 bp, Homo sapiens
tggatttgttcccttagcagaaattatgaggcctggcatctttcttgtgag

SEQ ID NO: 701858 - DNA, 50 bp, Homo sapiens
ggatgatgccaaagttttattagatgttgaaagtgtgatgaacagtgtgg

SEQ ID NO: 701859 - DNA, 75 bp, Homo sapiens
ctacctcctcggtcctggacaccatctgcactctgtcagccaggaatactcccccagttgcaagaggcgcaggac

SEQ ID NO: 701860 - DNA, 50 bp, Homo sapiens
caccatcgtcacagcagtagccatcacaaatggagaaggatgaaactgtg

SEQ ID NO: 701861 - DNA, 75 bp, Homo sapiens
acaaccacatcctcctcctcctacacccaaaggctcccatggagagctcaggtgattgaaatctctgaatatcga

SEQ ID NO: 701862 - DNA, 50 bp, Homo sapiens
cgcagctgcccgccgagacgctgcaccagaaactggcgatggaatatgag

SEQ ID NO: 701863 - DNA, 75 bp, Homo sapiens
ggacatcctgaagccaatcctgggtcatcaagactcctgagatagcaaacttggccttgcttggctttggagata

SEQ ID NO: 701864 - DNA, 120 bp, Homo sapiens
ggaaaaagaagtccaagaagcaaaaaagggactgctaagaagataccaccagaagcctaaagaaactgttccaactcttgctccaaaaactctttcagtagcagcagcttttaatgaaga

SEQ ID NO: 701865 - DNA, 99 bp, Homo sapiens
gtgaccatggtggtggcgctgctcatcgtttgcgacgttccctcagcctctgcccaaagaaagaaggagggtgaaggttgccgaactgtccccctggct

SEQ ID NO: 701866 - DNA, 74 bp, Homo sapiens
ctctaacagattgtacacatatgagcctcgggatttacccctatgttacttacaaagctccagttccaacaggg

SEQ ID NO: 701867 - DNA, 82 bp, Homo sapiens
caaagctgtggaagactccaagccctactgggaggcacggagggtggcgaggcagtgttgttacagatcttataacagtcgg

SEQ ID NO: 701868 - DNA, 100 bp, Homo sapiens
ttcattgcaaaaccaagggaacaacttgactggctccttttaactggatatacccctttgctgatgcaagtaagggtgatgacctgcttcctgctggcac

SEQ ID NO: 701869 - DNA, 75 bp, Homo sapiens
cttccccgcaggcggcgtgggcatgggcatgtacaacaccgacgagcacacaccagggcgcctcgggtcttccct

SEQ ID NO: 701870 - DNA, 100 bp, Homo sapiens
tctatgatgctgatggtgatggagattttgatgtggatgatgccaaagttttattagggtacaggcatccttcacctgctattgttgcaagaacagtcag

SEQ ID NO: 701871 - DNA, 100 bp, Homo sapiens
gtgtgggcggaagccaccagggcaggaatatgagcgtgaagccgtgcagaagaagaccttcaccaagtgggtcaattcccaccttgcccgtgtgtcctgc

SEQ ID NO: 701872 - DNA, 100 bp, Homo sapiens
agcggaagcttcgaggcatgatggtcgactacaagaagagggcggagcggagacgggagtattatgaaaagatcggattgtcaatgaggcagatcagatt

SEQ ID NO: 701873 - DNA, 100 bp, Homo sapiens
ccctccgcatcatcgtccggattggcagtggttttgacaacatcgacatcaagtcggccggggatttaggcttgggcactgtttaaaggaaagttccgag

SEQ ID NO: 701874 - DNA, 51 bp, Homo sapiens
cagaggaccatgtgatgcacctgctccagatcagtgctaacatcttccgta

SEQ ID NO: 701875 - DNA, 74 bp, Homo sapiens
gatgatgctcagtttgatgcgtcacactacgacagtgagaaaggagacttcctgggaatgaaaatggttggtga

SEQ ID NO: 701876 - DNA, 82 bp, Homo sapiens
cgacaagccgctggcagccgcggatctcaccgccgctcaggttactccacaggatccgctgaacataggatgttgccacaaa

SEQ ID NO: 701877 - DNA, 100 bp, Homo sapiens
ctgtgtgggcagctggagccttcagcaaccgcctccacgtttgataaactttcagaatcacagccccaaacccaatggaccagttcttcctcctcatcct

SEQ ID NO: 701878 - DNA, 100 bp, Homo sapiens
gttccatcgagccattactacaggcctaagatctggcaaacttggtgaacagtgtgaagcagttgttcgctttcccagactttttcagaagtatccattc

SEQ ID NO: 701879 - DNA, 95 bp, Homo sapiens
ttataaagttgtatcacctgcattaagggcagttggtaatattgtgactggtgatgatattcaaacacagatgctgcagttggagaagaaacttg

SEQ ID NO: 701880 - DNA, 75 bp, Homo sapiens
gcaagcttagagcgtctggccaagaatcagaggaagtggggcaagtgtccagagaatggctgggatgaaagtaca

SEQ ID NO: 701881 - DNA, 95 bp, Homo sapiens
tgatgccgtcagtatcactgtggagctcgaggccatgagcagatataccagcccagtgaacccagctgtcttcccccatctgaccgtggtgcttt

SEQ ID NO: 701882 - DNA, 100 bp, Homo sapiens
gccaggttgctgtgttgcagtgcattgtgttgcaggattgggaagcaagcagatctgatatcattaggaaaagttgtgttggctttggcttgcaactctt

SEQ ID NO: 701883 - DNA, 50 bp, Homo sapiens
tttcctggagctggtgccggcctgtcccctgcctgtgcccttcaccaatg

SEQ ID NO: 701884 - DNA, 90 bp, Homo sapiens
aggacaacgtgaacctcgcctggagcatctctccctacctagccgtgcagctgcctgccagctcgagagtcaggatgtctcagatttaac

SEQ ID NO: 701885 - DNA, 50 bp, Homo sapiens
gctggcggagcaggaggatgggcggaaatcaatgtgttgacagttgcatt

SEQ ID NO: 701886 - DNA, 100 bp, Homo sapiens
tactcttggaatcaaagataaatccaaatactgcatatcagaaacaacaggtttgatctgtggatgaaatgaatcatgattttcaagctcttgcattaga

SEQ ID NO: 701887 - DNA, 101 bp, Homo sapiens
cccgggcctggtgggggacgcgcttcttcccacactgtgagcctcagcagctccagccagcggacccgacggctgagagctcccattttctccagcaatta

SEQ ID NO: 701888 - DNA, 100 bp, Homo sapiens
ggatgccctgcagtacctgcagaaggtctctggagacatcttcagcaggtaatggagagtgaagagttcatgttgcttccagccaatcaactcattgata

SEQ ID NO: 701889 - DNA, 100 bp, Homo sapiens
ccggactgaggagctgtcgccggcggagggtgcatgtttgcgaggaagccgccgggcgccgcgcctttgggaagtgtttggattgtgagctatttcagaa

SEQ ID NO: 701890 - DNA, 100 bp, Homo sapiens
aaagcccccgacaaaagaacccattagccagcaaccatttccaaaaaagtttcctttctctgaatttgtgccaaaagtttacaaccaaattaaagaattt

SEQ ID NO: 701891 - DNA, 100 bp, Homo sapiens
gtgctctacgtcacggagaaggaaatgaaccgaaggcagacatatgaacaagcaaataagatctatgacaaagccatgaaactggagcaggaatttggag

SEQ ID NO: 701892 - DNA, 51 bp, Homo sapiens
cctgtgtcccaaccggcctgagtcaatagagatgcggtttcactatgttgc

SEQ ID NO: 701893 - DNA, 75 bp, Homo sapiens
taaaaataaactgcttgaacatcctttgactggttagccaggtttttagaacttcagccataaaaatgggcagaa

SEQ ID NO: 701894 - DNA, 100 bp, Homo sapiens
accgcctcaccgttctgcccccagaactagggcctactgcagtgcatgaaggtggtatggactcagaactctgaagtctgaggagacaaatacatgccca

SEQ ID NO: 701895 - DNA, 90 bp, Homo sapiens
aagagcttcaagaacaagggccgcgatgtggaatgaggaggccatagatacagaatccaggctcaatgataatgtttttgccactcccag

SEQ ID NO: 701896 - DNA, 90 bp, Homo sapiens
ccgggaggggctgctcgccatcttcaagtcgggtggcatccctgctctggtccgcatgctcagatggagctggaggagacagaaccgccc

SEQ ID NO: 701897 - DNA, 100 bp, Homo sapiens
acaagctgtccttggatgagctgggccgcaaataccaagtggacctgtccaaggatgtgggctctcttgatgagaagatgaagagcttggatgtgaatca

SEQ ID NO: 701898 - DNA, 75 bp, Homo sapiens
ctcaactgatcctcaccccatcaaaatcactcagggattcgggttcgtaactttcgagaatagtgctgatgcaga

SEQ ID NO: 701899 - DNA, 108 bp, Homo sapiens
accaagcatgtggctcctggtcagtgtaattctaatctcacggatatcctctgttgggggagaagagaaaccctgtggttttcctcatgtggaaaatggaagaattgc

SEQ ID NO: 701900 - DNA, 100 bp, Homo sapiens
caagatgccgcagtccaagtcccggaagatcgcgatcctgggctaccggtctgtgggagaactgcgacacatcaccaagctgaagccctggagcctcttt

SEQ ID NO: 701901 - DNA, 104 bp, Homo sapiens
gtttttcttgcaaaccttgctttggattttatgtgctacagtctgcggaacggagcagtatttcaatgtggagttaaaacagagccaatgagcagcagtgaaac

SEQ ID NO: 701902 - DNA, 96 bp, Homo sapiens
gtagcctttgcatacaagaatgtgaaatttgttctcaagcacaatggtatgttcaagccacttgtgcaacacaaggaactggtctgtatgaaggac

SEQ ID NO: 701903 - DNA, 99 bp, Homo sapiens
gttatccaccccaagaatcctcatgctcctactatccatttcaactacagatactttgaagtagaagaagctgatgagggctggtttttaagtttggcc

SEQ ID NO: 701904 - DNA, 50 bp, Homo sapiens
gcgcggggaccgctgtgctctcgtctggcttcagccttgtcatgaaccac

SEQ ID NO: 701905 - DNA, 98 bp, Homo sapiens
gcggcgccggcagcggacagctcggacagcgcccagggccggagcccgagcccttggagaatgccgaactggggaggaggcaagaaatgtggggtgtg

SEQ ID NO: 701906 - DNA, 83 bp, Homo sapiens
ggctggaagcgcggggcggccgggagggggcagtcctcgccggcgagttcagcgcgtccgagctgggccacagcctgaacgag

SEQ ID NO: 701907 - DNA, 75 bp, Homo sapiens
tggatgacataggcgagctgcaagtggagcatggcggacaccgacctgttcatggaatgtgaggaggaggagttg

SEQ ID NO: 701908 - DNA, 96 bp, Homo sapiens
cagccgtgtggctagaactacctctgatcatctttggtgtgagtgtggcaacgtgcatggccatcctccatgtgggtagtgcccagcaagtgcgga

SEQ ID NO: 701909 - DNA, 106 bp, Homo sapiens
ggtgtgggcgcgtcaggccgcgacgagggcgctgagaatctatctaccgccggggagccagaagatggaggaagctgtaccgtgccaacggccacctcttccaagc

SEQ ID NO: 701910 - DNA, 98 bp, Homo sapiens
tgacaccgtagtgttttcaaaactggatatggccaggatgctatagcattgtcagtaaaagcagcatctgttatagcaaaatacccacacaaaataaa

SEQ ID NO: 701911 - DNA, 75 bp, Homo sapiens
ggaatgaatccttctagagacgtccacggtggaagttaaacgagctgagcctcgggacagcaagagccaagcgcc

SEQ ID NO: 701912 - DNA, 100 bp, Homo sapiens
actacaatttctagctttgtaggagcatggcttggagcacttcctattccactggattgggaaagaccatggcaggagtcccgacctctacatgttgtgc

SEQ ID NO: 701913 - DNA, 75 bp, Homo sapiens
tctttttggcttggggagctgcagcgttcgatctaattatcatggacctgcgacagtttcttatgtgcctgtccc

SEQ ID NO: 701914 - DNA, 97 bp, Homo sapiens
ccccgatccaagttggaattagcatcctctcgggggctgaagccgacgtagcttctctgaacagacgcatccagctggttgaggaagagttggatcg

SEQ ID NO: 701915 - DNA, 50 bp, Homo sapiens
ctgttttgccggaggagcccctcaggccatccccctcctccagatggatc

SEQ ID NO: 701916 - DNA, 82 bp, Homo sapiens
tgctccaagtacaacgaagccaccggcgtgtgccccgacggcgacgagctctgtgtgctccgggatggagcaggtgtgcaga

SEQ ID NO: 701917 - DNA, 100 bp, Homo sapiens
ataaaatcatctccatattctcaggcacagagaaagctgatggtgagaccattctaaaaggcctccagtccattttccaggagcaggggatggcggagtc

SEQ ID NO: 701918 - DNA, 82 bp, Homo sapiens
atctggtgaagtggaaaggatggcccccaaagcagcctgcttctgcaaagtggtacgatcgaagggactatgtcttcattga

SEQ ID NO: 701919 - DNA, 100 bp, Homo sapiens
actctgctgcaagttccccagatcttgagctgcagcagaaggccgtggctagtgagatcttcaagggcaagaaggataattaccctcagagtgtacccag

SEQ ID NO: 701920 - DNA, 75 bp, Homo sapiens
cttcagtacttggcaagatttgatgctcttgtgctcagtgacatcattcaggcattgaacctggccacatcccag

SEQ ID NO: 701921 - DNA, 75 bp, Homo sapiens
gctgtgctgcgcggcccccgcgcatggtggggcaagtccgtgggcatcatgttgaccgagctggagaaagccttg

SEQ ID NO: 701922 - DNA, 98 bp, Homo sapiens
gcagacctgcatcaacctgatcaccagccaggagtacgccgtcaaggtatggcccgggtccactgccttccccgacttcaccaaccccacagccctgg

SEQ ID NO: 701923 - DNA, 83 bp, Homo sapiens
gccggtacaggtgccctgcggacacgtgaatcccagtcagaagttccagcctgccactgttctctgatgccatgccagcacca

SEQ ID NO: 701924 - DNA, 92 bp, Homo sapiens
cagattcgcagtggtcgcttcttctccttggtatctcgggggagctttgtgccttgatggatcaagttcatcatatgcagcactcaaaatgg

SEQ ID NO: 701925 - DNA, 50 bp, Homo sapiens
ctgataaaccggagaaggaccagatcattcccagtgaccccttctgggtg

SEQ ID NO: 701926 - DNA, 96 bp, Homo sapiens
gaggtgcaaaggctctacgtgcaagtcaacaagtttgccctggatcgctacggttcctactgatccgagctctgtgactcaggcttacgatggtga

SEQ ID NO: 701927 - DNA, 82 bp, Homo sapiens
cgcgcctcttccgcgccctctcaggtgctggagaatctggtaaaagcaccattgtgaagcagatgaggatcctgcatgttaa

SEQ ID NO: 701928 - DNA, 100 bp, Homo sapiens
ggccgggccacttcgccggcatggtactcatttcgcctctggttcttgccaatcctgaatctgcaacaactttcaaggccccaatcttcatctccttctt

SEQ ID NO: 701929 - DNA, 75 bp, Homo sapiens
caacgcctacttaaatgctgtgcgctggcaccctcagaacatttgcagctcaccttgtgaagatgaaatatccaa

SEQ ID NO: 701930 - DNA, 100 bp, Homo sapiens
tgaggacctctatctcgcttttcccctggccttctgtatcttcatggtgcggctcatcttcgagagcaacatggccaacgccctggccagcgccacttgc

SEQ ID NO: 701931 - DNA, 83 bp, Homo sapiens
ctgagctgcgaggaaaatggcggcgggaggtttttagaacttcagccataaaaatgggcagaattttccttgatcatatcggt

SEQ ID NO: 701932 - DNA, 83 bp, Homo sapiens
ggtggaagaaatccaggaacaactgtgtcagcagctagcccttttcctcaagacattgttgaatagtcagttagaaatggaaa

SEQ ID NO: 701933 - DNA, 75 bp, Homo sapiens
cctgaatcttctgggagctgaggaaccagatatcttgaaaagctgccagaaaggatccaaggattctgtagctac

SEQ ID NO: 701934 - DNA, 74 bp, Homo sapiens
caaccttgcgctgcatccgctcgacctcgtgaagatccgcttcgccggatgttaaagtctttagtgaagatggg

SEQ ID NO: 701935 - DNA, 97 bp, Homo sapiens
ctttgagccctaccttactggacagtcaaatcagaaagtttcctacactactgaggtttaggggcactgtgaagcaaaagccacgcctcagaatccc

SEQ ID NO: 701936 - DNA, 87 bp, Homo sapiens
cggtttcagcctcaacccagaggaatcgttactctttcagaagagccacgtggtgctttgctggttaagttggctggagtagaactc

SEQ ID NO: 701937 - DNA, 75 bp, Homo sapiens
ttggttggaagagaatctgagtacaaacaggaacctggcttctgtatttaccatgtacctggagcattggtttgg

SEQ ID NO: 701938 - DNA, 83 bp, Homo sapiens
ggtcaaggagcctcggaagtcaagagactcagagtcccataggagagctcaaaggatggctactgacatgcagaggaagagaa

SEQ ID NO: 701939 - DNA, 98 bp, Homo sapiens
aaaaatttgttactcaacaacaatatagagatcacctttttgataaggactttgcctcccgggccaaactggcagttcaaaaactagtacagaaagtt

SEQ ID NO: 701940 - DNA, 75 bp, Homo sapiens
ggaggtggaggcgaaagccaacggcgaggactgcctcaaccagggggatatgagactttctactcggaatatcct

SEQ ID NO: 701941 - DNA, 101 bp, Homo sapiens
ctgaagtctcacatcagaggtgtcaaggttaaccttgattttcacacaaaagaagtcattacaaacagcatcactcaacctaccctccacagttttgatgc

SEQ ID NO: 701942 - DNA, 100 bp, Homo sapiens
ttaaggactatcgggagaaagtggagtccgagctgagatccatctgcaccacggtgctgggccagatattcgaagcttacaacatggcagctttgtggaa

SEQ ID NO: 701943 - DNA, 100 bp, Homo sapiens
gcaatgcctccatgaacaatctcacccaattactctgctcagaaatcacctgcccaccaccccctgttatctacaatggggcacacaccgggagttcctt

SEQ ID NO: 701944 - DNA, 100 bp, Homo sapiens
aggagctgacattgcggagttctctgttggggtcacaaacaaacagaggcgagaacagcagtggatggagaagaagaagcggcaggaggagaggcaccgc

SEQ ID NO: 701945 - DNA, 87 bp, Homo sapiens
agtgccgtgcgccgcagcccgggcccaggccccggcagcgcctgggacaagatatgtcttgtcgttcaagacttgcaacactaaacg

SEQ ID NO: 701946 - DNA, 80 bp, Homo sapiens
cgtcggggaggcaagatgatccaccagcggttccatcctacacttggcttaaagcttttcaagccaggccaagaagctgt

SEQ ID NO: 701947 - DNA, 87 bp, Homo sapiens
catggtgatgggtattacagatgtagatgataaaatcatcaaaagagccaatgaggtacaccagaggatcgcttcctggcagaattt

SEQ ID NO: 701948 - DNA, 75 bp, Homo sapiens
aattaaacaactacctgctgaaattgataatgtacaacggccagccaattaccaaaatggcctgtggggctgaat

SEQ ID NO: 701949 - DNA, 80 bp, Homo sapiens
gtacgcggggacccggctgcggtggctgcgggactgacgagaagagagaagggcacagttacctaagtatcaacgtaatc

SEQ ID NO: 701950 - DNA, 98 bp, Homo sapiens
ccagagcctgtgggaagtctccatggtgaagtataggctgaggctacctgtgaacagtacgcagtgaatgttaatgttgtaccatctttgggtaggca

SEQ ID NO: 701951 - DNA, 82 bp, Homo sapiens
aactagatcagcagtacaaagagaggatacggaatgcaggacagagcgggatgccaccagcttgtccaaagggaagttccag

SEQ ID NO: 701952 - DNA, 75 bp, Homo sapiens
gcctggtgaaatacatgcactcagggccggtagttgccatggtctgggaagggtacaatgtcgtccgcgcctcga

SEQ ID NO: 701953 - DNA, 50 bp, Homo sapiens
cgatcccgggctgaaagaggcgtcaggtgatcgcagacatgcgggagaag

SEQ ID NO: 701954 - DNA, 75 bp, Homo sapiens
gtcacaagagccttggggaagacagttggaagctcagacatggtgattgtctgacaagcagaggcatgagctggg

SEQ ID NO: 701955 - DNA, 95 bp, Homo sapiens
ttgagggggactggcctggcgtgcactccgcacctcggggacattattgcgcgtggaacggctgcttttggaagaaagatcaactgaaatcggca

SEQ ID NO: 701956 - DNA, 99 bp, Homo sapiens
agttcatgctgtgtgctggacgctggacagggggcaaaagcacctgctcgagttctaaatgtcgcacagtgcttgcttcgccccagaagattgaaggtt

SEQ ID NO: 701957 - DNA, 90 bp, Homo sapiens
agaagcacggcaccaaaaacaagcgcggtgggcaccatgtccttgaagcttcaggcaagcaatgtaaccaacaagaatgaccccaagtcc

SEQ ID NO: 701958 - DNA, 100 bp, Homo sapiens
agatagtcttgggacccttgcatggtgtttcaaagggtggtgaagaactaagattttactctgcagaaatcagtctagcattaaattatcttcatgagcg

SEQ ID NO: 701959 - DNA, 114 bp, Homo sapiens
gaactcccaacctggaaaacaagaaggaccaaaaagacctgcaggctctgcgaacatcaatagatgcttatgacaactttgacaatatctcgcttgctcagcgtttggaaaaac

SEQ ID NO: 701960 - DNA, 75 bp, Homo sapiens
ccgcgcccttcctcggcgggccggactggtgaaaggaagcatgtttacaccaatgccaaaaagcagatgctaatt

SEQ ID NO: 701961 - DNA, 95 bp, Homo sapiens
caggaactgcgcagcctcttcgagcgccgcggacgcgtcatcgagtgtgacgtggtgaaaggtgtgggcaagagcagtttactgttgcgttttgc

SEQ ID NO: 701962 - DNA, 100 bp, Homo sapiens
cagcccagctcgcgcttcagcgtcccggcgccgtcgcgccactcctccgaccggcctcagaaagtgtgtttgtgtccatttctcccagcgcaccctctgc

SEQ ID NO: 701963 - DNA, 50 bp, Homo sapiens
cgaatccggagatcctgaggagatcatcgagaaacaagcagggcacagtc

SEQ ID NO: 701964 - DNA, 75 bp, Homo sapiens
ctctcgcttcagtcagtcgggccgcgccgcgcctcagctctgaatcagcatgattcttcagaggctcttcaggtt

SEQ ID NO: 701965 - DNA, 83 bp, Homo sapiens
ctggtggctccgcggattataacagattactgtggcatgatcctccaccattcacactctaccctggactctgggaagggaca

SEQ ID NO: 701966 - DNA, 100 bp, Homo sapiens
ccagaatgcactgcacaatattaaaactttacctggggaacatcatcttcagcgggctatttcagcacagcaggtgtatggcgagaagagggataatatg

SEQ ID NO: 701967 - DNA, 83 bp, Homo sapiens
aaaacaaaggcggccggcctggtgcgcaaggccccgaacaacaggcctgacctctcgggacacacccagccctgtggacccag

SEQ ID NO: 701968 - DNA, 98 bp, Homo sapiens
cggtttttagtccattgactatgcagcctaatgccaaaagaatgcaatggtgtaaagattccagttgatgccagtaaacctaatccaaatgatgtgga

SEQ ID NO: 701969 - DNA, 82 bp, Homo sapiens
aagctcctggccctggccctgatcatcctgctgggcttcgtccagatcgggaaggattttgcaagaacgaggctcaaggatg

SEQ ID NO: 701970 - DNA, 76 bp, Homo sapiens
tcaacctggagctctacgcctcctacgtttacctgtccatggattgatcggaagatgtcaagtactcacaccagct

SEQ ID NO: 701971 - DNA, 74 bp, Homo sapiens
cctactacaggactgcggacaagggctggcagttgatattcactgatggactccaaagaatcattaactcctgg

SEQ ID NO: 701972 - DNA, 51 bp, Homo sapiens
gggaagcggggaggactgaaaaatgcatggagtcatctcccacatttctct

SEQ ID NO: 701973 - DNA, 100 bp, Homo sapiens
aaaaccatgatttccctgtccattggggcgtgaggtcccaggaagtggccaaaagctagacagatccccgttcctgacatcacagcagcctccaacacaa

SEQ ID NO: 701974 - DNA, 96 bp, Homo sapiens
tctgtgtgattatcctcttgtttatcctggctgtcatcaatttaataaaaatatttacaccagcagctccagttcataccaataaagaagatcctg

SEQ ID NO: 701975 - DNA, 99 bp, Homo sapiens
tcttcggacctacgacatcgcggcttctctggcgttggccagtcagccacagggcaccaggggccagggaggcccaatctcagagcgctgcgggctctg

SEQ ID NO: 701976 - DNA, 100 bp, Homo sapiens
ccgcggcactcccacgcggaccccgaagtccgcaacccggggatgggcccgcggctgcgagattaataaagaactcttcagaattcctggtgtttcatca

SEQ ID NO: 701977 - DNA, 90 bp, Homo sapiens
cgcgtcgcggaggcacgtgtggagccccggcagcaggagcgtcgcaggctcagccgtgctgctcttcctggccatgccaatgctcaccat

SEQ ID NO: 701978 - DNA, 95 bp, Homo sapiens
aataaagccaagagagaccttggagtaattcgtcgacagagtattggaacagttgtgctgctgccagcgatccgtgggagctgtgtacagattca

SEQ ID NO: 701979 - DNA, 76 bp, Homo sapiens
ccaatggaacatcagcaatgcttctggaggaggaagccaagaatctggtgagcgaagccatcgcagctggcatctt

SEQ ID NO: 701980 - DNA, 100 bp, Homo sapiens
atcggcatagtaatcctgaggaggaagaatggctgacagctgagcgaatggcaaagggcgctatatacctcctcacttaaggaacagagaagcatctaaa

SEQ ID NO: 701981 - DNA, 82 bp, Homo sapiens
gccgctaatggaactgaagacagctgggcctaacaagtgcccaggtgactcaggtgtccctggccagtgtccttccacctgt

SEQ ID NO: 701982 - DNA, 75 bp, Homo sapiens
tggggcatcgacgatctccatatttcattgcaagtcatgcggaggaatccctttggtgtggacatctgctgccgg

SEQ ID NO: 701983 - DNA, 100 bp, Homo sapiens
ctggctatggcccgactgctcaggtctgcaacctgggagctgttcccctggaggggctactgctcccagaaggcaaagagatgtggtatggtgtattcct

SEQ ID NO: 701984 - DNA, 82 bp, Homo sapiens
cagatgtgagccacttcgcccagcccaccgttttatttttctctcgtggcattatccttcagtggggctattggactgactt

SEQ ID NO: 701985 - DNA, 100 bp, Homo sapiens
gccagagcctggagtctgcgaaggccgggacccggttccccggcccacagtgggggtgtgcaaacccgagagaactgggctggaatgagctgctcatcgc

SEQ ID NO: 701986 - DNA, 101 bp, Homo sapiens
ctcctcccggaggcgacatggggcacccggtgtaccgcggcgagaagccccagctgcactacgcgattaccccacattcctaagcatgttcatatctcaag

SEQ ID NO: 701987 - DNA, 75 bp, Homo sapiens
tcttcgttatggacagcatccaaacattatcactctaaaggatggacactttgtgagaaatttaggtgatgttgg

SEQ ID NO: 701988 - DNA, 93 bp, Homo sapiens
ctccagcgccggcctcctcagtgcgaagaagctgcagccgcacctggccaaggacgctggtatccagaagaatatgaatttgcaccaaagaag

SEQ ID NO: 701989 - DNA, 101 bp, Homo sapiens
ccagcaccccctgcttgtcggcctcctcgacacctttgagacccccaccagctacatcctggtcttagaaatgcatggacccatgctggcattctcttaaa

SEQ ID NO: 701990 - DNA, 100 bp, Homo sapiens
aacacctacagcgacctgggcatacctcaggatatcattgtgtttgtaattggaggagccacctatgaagaggctctaacagtttataacctgaaccgca

SEQ ID NO: 701991 - DNA, 100 bp, Homo sapiens
ccaggctcaagcaatcctaccatgtcagccttcccagtagctggaactacagggtccaggtgcggaagtatggagagcagaagacgttgtttatctttcc

SEQ ID NO: 701992 - DNA, 100 bp, Homo sapiens
tgctatggtgttgctgtcattggcagccattctacaaaagtggaagctgtggtcagaactctgatgaaaatacagcttagagatccaggggccaaagcac

SEQ ID NO: 701993 - DNA, 88 bp, Homo sapiens
accccttcgcggacccagtggatgtaaaccccttccagggcaggtgacattacggagttaaaaattctggagataccaggacctggag

SEQ ID NO: 701994 - DNA, 50 bp, Homo sapiens
gtgacatatcactggtccctgcacccaggctggagtgcggtggcaccatc

SEQ ID NO: 701995 - DNA, 50 bp, Homo sapiens
tttttttaatgtggttggaacaactgagagaggaacgaagggcatcctac

SEQ ID NO: 701996 - DNA, 80 bp, Homo sapiens
ctgcggaacaggacgccctctgattcccaggggcagccactggcctcccagcccccggtcgtcgacccctacgacatgcc

SEQ ID NO: 701997 - DNA, 100 bp, Homo sapiens
agagagtcagcctctggttcagactgcagtaaccagtgataactaccccgtacagttcattccatcaacaatggcagctgctgctgcttctggactcagc

SEQ ID NO: 701998 - DNA, 90 bp, Homo sapiens
cgtttgtcaagttttctactcttacaaaggaactgtccacactgctgaaaaatctggtggtcttcaagctgacagagaagctgacggaac

SEQ ID NO: 701999 - DNA, 75 bp, Homo sapiens
gtctaccagtttttgtctccagagacccagatttctctcaaaagtcccatctgccgtctattgtggtggaatcca

SEQ ID NO: 702000 - DNA, 50 bp, Homo sapiens
tgcagcagtcccctcaaccggtgaccagcttcagaatggcagaagatgat

SEQ ID NO: 702001 - DNA, 82 bp, Homo sapiens
cccagggaagaagacgccaccgctgggcagagctcgcctatgccgacactggctctgagaccccgactgcccgacggctcta

SEQ ID NO: 702002 - DNA, 90 bp, Homo sapiens
ccaatctctctgtctttaaaagatgaggtgacttggtgattttcctggaaaattataggacagacgttgaaagataccacgtccagttct

SEQ ID NO: 702003 - DNA, 90 bp, Homo sapiens
ctctcctgagcaacatctctgactgtgatgaaacattcaactactgggagccagtacctggtgacctttagccccctgatggacacgcag

SEQ ID NO: 702004 - DNA, 100 bp, Homo sapiens
atcctgacttgccagctttctactttgaccctttgatcaacccaatctcccataggcactcagtcaagatcccacttccagccgggcccctcatgtatcc

SEQ ID NO: 702005 - DNA, 75 bp, Homo sapiens
cggcaagtgggtgcagtgtggaaaggccgagggcagcatgccagagctagagccggtgcaggccacgcagaacaa

SEQ ID NO: 702006 - DNA, 99 bp, Homo sapiens
cggcgtcacctccttctgccccaccctggtcacttccccaccggaggtttatcacaaggtttatcagtaaagagatcctgaccatccgggaggccgtat

SEQ ID NO: 702007 - DNA, 83 bp, Homo sapiens
gacctgtcaccccgactcaacgtgagacgcaccgcccggactcaccatggatcacctgctgttaccagctaccacccataaca

SEQ ID NO: 702008 - DNA, 83 bp, Homo sapiens
tgggaatctgcgtcagaagtcactcgcagtcccgtcagcccaggctcttgtcaggatggtgaagctgttcatcggaaacctgc

SEQ ID NO: 702009 - DNA, 75 bp, Homo sapiens
cgcagagtccgcggcgccaccgctcgccctccaggacatggatttgattgacatactttggaggcaagatataga

SEQ ID NO: 702010 - DNA, 90 bp, Homo sapiens
tgcgttaactggagccaggctgagcgtcggcgccggggttcggtggcctctagtgagatctggagataacgaaggaggcccaacttcatt

SEQ ID NO: 702011 - DNA, 82 bp, Homo sapiens
ctacctcaatctgcaagggagtgtcagaaaggccccgcattcgccaagccactcaatgatgaggcacggcggctcattgctg

SEQ ID NO: 702012 - DNA, 73 bp, Homo sapiens
caaaccatacttgctaaaaattctgtgagatggaagattttcgaggtatagcagaagaatcatttccaagctt

SEQ ID NO: 702013 - DNA, 80 bp, Homo sapiens
agcaagaggaagctgcagcccacccgggcagccctcaccctgttgtgaatgggagagttcacatccgcgactggcgagag

SEQ ID NO: 702014 - DNA, 100 bp, Homo sapiens
aaaacttccagaagaattagattttctgctttaactgccgcctcacctgtggagctctgggtacaggtgctggagaatctggtaaaagcaccattgtgaa

SEQ ID NO: 702015 - DNA, 82 bp, Homo sapiens
agcttccagcagctgctcaatgctcggacacagtgttctaagaacggaagcatctgggctggatggaatttagcatcaagca

SEQ ID NO: 702016 - DNA, 74 bp, Homo sapiens
tcagcagtcctccgctacgcacaggttgtctgcattcaaaagagcattctattaaagctaccttaatttggcgc

SEQ ID NO: 702017 - DNA, 75 bp, Homo sapiens
acatgtggacctccctgaagattttctaaggagcaaagatccacgagagcgtgtgaaagaagatgacttagatgt

SEQ ID NO: 702018 - DNA, 82 bp, Homo sapiens
cagcgggagctggacggcgagcgcgagcggcgcgagaaactgtggcggggccttcgtgggcccgcgatgccaggaccccaac

SEQ ID NO: 702019 - DNA, 100 bp, Homo sapiens
caaaactgtcattttgggactgctgtgcctcctcctcctgtggtggaggagaaggaaagataacaatgaagatggtgccaaaactgctttctcctttggt

SEQ ID NO: 702020 - DNA, 90 bp, Homo sapiens
gtccaaggatgaatcccagtccctgttacggaagcagcattaagaggtcttctgggagccttaacaagtaccccatattctcccacccag

SEQ ID NO: 702021 - DNA, 90 bp, Homo sapiens
tgtttatgaaactagcgacctacctgaggatgatcaagcggagttcgatgcgggattaggcaaagaggagtcccaaaatgagaaacagac

SEQ ID NO: 702022 - DNA, 100 bp, Homo sapiens
tgtcctctctgctagtgatcgtgtttattatcatagttttgtacatgttaaggtatattgagatcttcagaagtagcaggagtgaaatcaaaggatttta

SEQ ID NO: 702023 - DNA, 98 bp, Homo sapiens
attattcctctcagctttggaatcttttacttctcacttggacaagaactcaagagcagaatctccggttgaaatcacaaagattagacaccttttta

SEQ ID NO: 702024 - DNA, 100 bp, Homo sapiens
caccttcaggaaaactcgtgtccatcaaaatccagatgctggatgacacccaggaggcatttgaagttccagaccccaggagcaagcacaagttcaaaat

SEQ ID NO: 702025 - DNA, 100 bp, Homo sapiens
cctgaggataaaagcaaaattgtagcagaaatccgaggcaatgtacttgtattgagtcagcacaaatttgcaagccaagccctataccaagtcctgtttt

SEQ ID NO: 702026 - DNA, 90 bp, Homo sapiens
aacctgaagtagcaaaggcaagaaggcaacgacgttccatctgtggaaggacctaccaaccagttctggagagtcttggcttctgggagg

SEQ ID NO: 702027 - DNA, 78 bp, Homo sapiens
tgggattcgcgctgctgggcacccacggagcctccggggctgccgggtcccaatgataagaagtcagaactgctgcca

SEQ ID NO: 702028 - DNA, 117 bp, Homo sapiens
attacaagcagcagtggggacgagctttgaaagaacttgccagacttaaacagggtggttctcttcccaaagtggaagccaaattcatcaattatgtgaagaattgcttccggatga

SEQ ID NO: 702029 - DNA, 83 bp, Homo sapiens
cgatggcggagggagataatcgcagcaccaacctgctggcaaacgagatgctgctcagtggacggaagctgacagcgcaggag

SEQ ID NO: 702030 - DNA, 101 bp, Homo sapiens
cactgtgggccctgcctctgcctgttcttctggaatgtcttgggggttttgatcctgtcactgtgaaactggcagacctttcacttcgtatccaacaaatt

SEQ ID NO: 702031 - DNA, 75 bp, Homo sapiens
ggatgcccagcggaaggaggcaattaaggcaaagggatttggacatttggtgccatcttcagaagatccaggagt

SEQ ID NO: 702032 - DNA, 146 bp, Homo sapiens
tcagctccaaggagaagagcaaatacaagttccctcctgctgctttgccccaggaattcagcgccttcttccaagatgttccaggtcatccagccagagcgtgcgctgtacatccaggccaacaactgcgtggaggccaaggactg

SEQ ID NO: 702033 - DNA, 100 bp, Homo sapiens
gcttggccatggtcagcgtgaacgcgcccctcggggctccagtggagagttcttacggacactcatgaggaccatgatacttccactgagaatacagacg

SEQ ID NO: 702034 - DNA, 75 bp, Homo sapiens
gtcgcgaccagagccattggagggcgcggggactgcaaccctaatcaggatcacctgcttcgggagaaagctcag

SEQ ID NO: 702035 - DNA, 75 bp, Homo sapiens
gatcacccggaccaaggaggaggccctggagctgatcaacggaggatacgaagcgttttcggcttcctgcccgga

SEQ ID NO: 702036 - DNA, 89 bp, Homo sapiens
ttacacatcccctgataaactaaagggtgcagaagctgccaatgtgactggcccggatggagttcctgtggaagggagtcgttacgctg

SEQ ID NO: 702037 - DNA, 87 bp, Homo sapiens
tcctgattcaagtgttggcggatggaagggaggagactcctgaccctcagaatgctttgcccgaagtttttacatacaaattctact

SEQ ID NO: 702038 - DNA, 100 bp, Homo sapiens
tttgtctacgaagcctgtgttccagcccttttcaggacagggtcacagactaggaaggtgatttgatgaaggctgctgcaggagagttcgcagatgatcc

SEQ ID NO: 702039 - DNA, 90 bp, Homo sapiens
ccaggttctgcaagtatgggaactaccatggccggagttgatccatttacaggcaagacatctgtatagattctgcttcatccgtgagag

SEQ ID NO: 702040 - DNA, 83 bp, Homo sapiens
cgacctgctaacagaactggaccttttcgacaggggcaagtgtccgagtggtgaatcagctacttacagagatggatggtctg

SEQ ID NO: 702041 - DNA, 82 bp, Homo sapiens
cggttccttggtgtcatccagccttagcaaaccagaggggcctttacaacaactaaacggacaggcattccagccccacggg

SEQ ID NO: 702042 - DNA, 100 bp, Homo sapiens
ccgcggtcatcggtcaccggtcgctctcaggaacagcagcactgctccgtgtggagatggcgccctctttgacaagtcctgcagcgaccgtgctatggaa

SEQ ID NO: 702043 - DNA, 100 bp, Homo sapiens
gtgacccgtccccggcaggggacaatgagattgagggttcggcaaaagcagaacaaatatccgatactatttttaactcaaggaaaatctgagatttatc

SEQ ID NO: 702044 - DNA, 71 bp, Homo sapiens
taaggattccaagtaactcttatttggcgcggggcgaaggagctgctagaacaatgctgaggcgggtgagg

SEQ ID NO: 702045 - DNA, 100 bp, Homo sapiens
gccgcggggatgggggcctcgggcgccccgcagccccccaacatcctgctcctgctcatggacgacgttatcagtgagctgaatggaaaaaacattgaag

SEQ ID NO: 702046 - DNA, 85 bp, Homo sapiens
agctattactaagagaaaattttctcctggtagacctcggtccaaacagttaatgaaggagttcccccttctgagtatgttcaat

SEQ ID NO: 702047 - DNA, 59 bp, Homo sapiens
gcgaatatcgtcatcgttagaagagaatgaagacctttcgaatccgtcaaaacctatac

SEQ ID NO: 702048 - DNA, 100 bp, Homo sapiens
atgggtcaggtcacagagaagctgcagctgacttacatggaggagacgtgtcgtcactatgtggcccatgtgaagattgcaggcctaagtctacctcttc

SEQ ID NO: 702049 - DNA, 100 bp, Homo sapiens
agaagctggaacattattatccagcaagaatgttcgtgtcaactgtttggacgagtatcagcagcgtcgccagcaggagaatatgcagcgccagagccga

SEQ ID NO: 702050 - DNA, 100 bp, Homo sapiens
tcacctggatttacctgttttctgggagcttcgaagttctaatacccgatttacaattacattgaactacaaggatcccctcactggagatgaagagacc

SEQ ID NO: 702051 - DNA, 75 bp, Homo sapiens
gtctcttctaagctgaataaagctgttttggaactgtcaggtacctcaaagcgatttaagaggggtgcagatccc

SEQ ID NO: 702052 - DNA, 75 bp, Homo sapiens
gggcctagggtgcagcgggcgcgtctgcggctggtgttggcgcatctctaggacctcagcagccatgtcgaagcc

SEQ ID NO: 702053 - DNA, 75 bp, Homo sapiens
agtgttgctgcaacatagagctgacattaactgtcagggctccgctgatcctctaaatagtgctttccatttgac

SEQ ID NO: 702054 - DNA, 100 bp, Homo sapiens
ctgcaccactggcatggatggcggcatgagtatctgggatgtgaagcaaatacttccctggacaagaaagccagatgaaactgatctaccagggccgcct

SEQ ID NO: 702055 - DNA, 100 bp, Homo sapiens
ggaccatcagaagaaggagacagttgtgaaagaggatgaaggaaggagagagagtattatcaccaggagactaaagtccatcaaaaacatccagaaaatt

SEQ ID NO: 702056 - DNA, 89 bp, Homo sapiens
gtacaacaatgagccttcaaacatatttgagagagaactcgatgccaccgcaacggtattggcgaaccggcaggatgaaagtgagcagt

SEQ ID NO: 702057 - DNA, 82 bp, Homo sapiens
ttccgccctaatggaggtctccagtttcgattccttttggttccaagtccaatatggcaactctaaaggatcagctgattta

SEQ ID NO: 702058 - DNA, 97 bp, Homo sapiens
cccacccgacagtcgcgggcacccctacgtcgtgtggaaatccgagctgccactgggcccaagagatgggtgctctcctaggcgccccttcccctgg

SEQ ID NO: 702059 - DNA, 89 bp, Homo sapiens
gcaaaacgttaaatatgaccacaagtcctgaagagaaaagaaaaatcattggggatacttttgttaagccaggtgactttatacacact

SEQ ID NO: 702060 - DNA, 100 bp, Homo sapiens
gtctggagcttagccattggcaacgagttaaatatcacccacgatggagtttcactcttgtctcccaggctggagtacaatggcatgatctcagcttact

SEQ ID NO: 702061 - DNA, 50 bp, Homo sapiens
ctcatcacccggctgctggagggaagggaaaaggccgaggcatcagcgtg

SEQ ID NO: 702062 - DNA, 83 bp, Homo sapiens
cgcatgcccgctgcgcaccatcaagagagtccagttcggagtcctgagtccggatgaactgaaactcccacgttaacccacga

SEQ ID NO: 702063 - DNA, 83 bp, Homo sapiens
acctgcttcccaatcccactgatgaggatcagcccatgtgatgatgatgatgattttgatgatgaggaagctgaagaaaaagc

SEQ ID NO: 702064 - DNA, 99 bp, Homo sapiens
ggtgaaggtccggggcttgccctggtcttgctcggccgatgaagtgcagaggtttttttctggactccattattacagtctttgattggtctttttgag

SEQ ID NO: 702065 - DNA, 116 bp, Homo sapiens
gctcccaccttctttcttcagccgaggccgccgccgcctctccttgctgcagccatggagagccttcacgtaaatgggtccagtcatgcctcccagtaagaagccagaaagctcag

SEQ ID NO: 702066 - DNA, 100 bp, Homo sapiens
agtaaccctcactggagaatccagagatctgtttacccgaggtattgatatacaagctgtgaatgtggtaataaactttgatttcccaaagctggcagag

SEQ ID NO: 702067 - DNA, 100 bp, Homo sapiens
ttcatttagagctgcggaacaggacgccctctgatcaagagtgagccatggagctacgtgtggggaacaagtaccgcctgggacggaagatcgggagcgg

SEQ ID NO: 702068 - DNA, 100 bp, Homo sapiens
cagacagtaggttgcatgcctccgcctgtgtcttctgcagtgattttaaccaaggcagttggtggaaatgagaccattcctcaagaattttgtatccaag

SEQ ID NO: 702069 - DNA, 100 bp, Homo sapiens
gagccctgagcccatggcagctccagcctctgcctcccagaaactcagggtgtccgcaatgttgccagtgtctgtctgcagattggctacccaactgttg

SEQ ID NO: 702070 - DNA, 100 bp, Homo sapiens
ggaatcccctggcccccgctgtgcaggagaccatgctcgacagctgaccaaggccatgatgcgaaaggccacggccagccgcctggtcacgcagcgcgat

SEQ ID NO: 702071 - DNA, 75 bp, Homo sapiens
cttccatcaatcatatctcacaggtgttgactttaaggtgaaaacaatttcagtggatggaaataaggctaaact

SEQ ID NO: 702072 - DNA, 83 bp, Homo sapiens
aaaaacacagctcgacagtacgcctacttctataaagtcatccaggtttgcctgcaatgagatttcattctctacatttaaag

SEQ ID NO: 702073 - DNA, 100 bp, Homo sapiens
ccatctccgacgacgactcaggctgtgcatcggaggagtatgcctgggtgcccccaggccttaagccggagcagggtggtgttgatgatgaggtctcctt

SEQ ID NO: 702074 - DNA, 100 bp, Homo sapiens
tgcagcaccttcggcatctgcccctgccatgaccactgtggagaacaaatccaagattagcacaggcccggaggctgtttgatgtcctgcacgagccctt

SEQ ID NO: 702075 - DNA, 97 bp, Homo sapiens
aagaagtagagtatttcaaccataaagacatcttaattgggcacgaaagaggaaagaccacagcaagattctttcattcgtctcctcctagcctggg

SEQ ID NO: 702076 - DNA, 90 bp, Homo sapiens
agcagctgggggccttggctgtaaggacccctaaggaccgagacatgggtgcccggcaccgcgcccgagcccactccattcagatcatga

SEQ ID NO: 702077 - DNA, 75 bp, Homo sapiens
cacttaggaaatacgggaagaagttcctgatgtcgggctggctgagcacctatacctggcgctgtgaccctgtgg

SEQ ID NO: 702078 - DNA, 144 bp, Homo sapiens
gggcggacgcgcggcggggcagaccgctggggactgcgggcggcgctgtgtccgtcgccatgacaggcctcattgctacgatttcagagtaccctggtaatagctgagcatgcaaatgattccctagcacccattactttaaat

SEQ ID NO: 702079 - DNA, 88 bp, Homo sapiens
gcagggagaaggaagaggtgtttgaaaagacctgatggccaaaagaaaggaagaaaatttttcctctcctaaaaatgccaaaaggcca

SEQ ID NO: 702080 - DNA, 107 bp, Homo sapiens
tggtccccccggccctgctggctttgctggcccccctggtgctgctggtcctcctgggccacctggtgctgctggtactcctggtctgcaaggaatgcctggagaaa

SEQ ID NO: 702081 - DNA, 75 bp, Homo sapiens
aagaagtgaagctgctgctactcggtacaccaggggttggaaaaaccacactaggcaaagaacttgcgtcaaaat

SEQ ID NO: 702082 - DNA, 98 bp, Homo sapiens
cgactcccaccgggactcctaccagcagcaacctcatcattgtggccgaggcagagctgtactctctctggaggcaaacatcatggtcctgttgaagc

SEQ ID NO: 702083 - DNA, 100 bp, Homo sapiens
ctctatgtagaaaatgcaagttttgtctgagtccactcacaaatttgtgtgggaaaatcagagtcactcaagggaaaggattaatgccagatggtaccag

SEQ ID NO: 702084 - DNA, 74 bp, Homo sapiens
acctgtattggcctgccaggacagagtgctcagagttttacaggagctttttaatagatacgagagagcaattt

SEQ ID NO: 702085 - DNA, 98 bp, Homo sapiens
tttgatacaaaaatttgctgagtcaaaaggcactgggaaggaaagacctggttgcaacaaggacagtgtcagagcaggctgtaaaaaatgtggctacc

SEQ ID NO: 702086 - DNA, 83 bp, Homo sapiens
cgcctggctgattttcctggctaactggggaggtgccagggctgaaccagttgtcgagatgtccacagaaggaggatttggtg

SEQ ID NO: 702087 - DNA, 50 bp, Homo sapiens
cccggaccgggccgcgcacgccgcctcagttgatattcactgatggactc

SEQ ID NO: 702088 - DNA, 100 bp, Homo sapiens
cccttctcctgctgcgtgccagatcctgcggatttgatcaaagatctgaaatctgaactgtcaggaaactttgagaagacaatcttggctctgatgaaga

SEQ ID NO: 702089 - DNA, 75 bp, Homo sapiens
gctaacctactatgagggtcgagcagagaaatacggccagcctattcaaatgaagtacatggagcatgaagagag

SEQ ID NO: 702090 - DNA, 100 bp, Homo sapiens
ccctccagcagcccaatggactcctacccaggcctctgccagtccccgttcctggattctagccacacccactcgcccgggtctatggccacggtcggag

SEQ ID NO: 702091 - DNA, 83 bp, Homo sapiens
gtgaagtgggatgagaatgtgaccggttttgaaattatccaaagcatcactgacagcactacaaacaccactggtttcccgaa

SEQ ID NO: 702092 - DNA, 80 bp, Homo sapiens
ggcagcacaagcacatcacttacagctcattcttggaatcccagaacaggccttaagtcttctccacatggccatcgagc

SEQ ID NO: 702093 - DNA, 100 bp, Homo sapiens
ctgtattctttacctgcttcccaatcccactgatgaggatcagcccatgagccatttcctgcttttaagtcttggcaggaggactctgagtctggagaag

SEQ ID NO: 702094 - DNA, 95 bp, Homo sapiens
gaagatgttttcggtggctatgatgatggttggctatgggaatttcttagccataggctcacatgacaactgcatctatatatatggcgttagtg

SEQ ID NO: 702095 - DNA, 101 bp, Homo sapiens
ctatgttgccctgagttacataaatagattttaggtgatgggcaagtcagaaagtcagatggatataactgatatcaacactccaaagccaaagaagaaac

SEQ ID NO: 702096 - DNA, 100 bp, Homo sapiens
gcaaggtgctgctggacgacacggtgccgctgacagcagccatcgaggcgagccagagcctgcagtcccacacggttgtggcagcactgcctgaaggtat

SEQ ID NO: 702097 - DNA, 96 bp, Homo sapiens
aaagtcatgttacccaacaccggttgaccacgttgttcctgagcctgggacaagcctgctcgctgcctttgaccagtggagggaatgggccgacag

SEQ ID NO: 702098 - DNA, 75 bp, Homo sapiens
taaagtctctgcagacggatcccaggagcccacacatgacatcctgcaggtgcgcttcccttcccacttcagctc

SEQ ID NO: 702099 - DNA, 76 bp, Homo sapiens
ttcagctattggaaagtttttttaatgtggttggaacaactgagatgggtctaggaaagacaatccaggcaattgg

SEQ ID NO: 702100 - DNA, 75 bp, Homo sapiens
tctgacaagtaaaattaaaagtcgtcttggagacaaggaagcagttctcaacagtaggtggcaagtgggagaaac

SEQ ID NO: 702101 - DNA, 134 bp, Homo sapiens
cttgaaccagatagtcgaaaaagagctatgagtggtttggaagggccactcacaaagaaaccttggctgggaaacaagggcaagtattttgtaaccttcccatatccatatatgaatggacgccttcatttggg

SEQ ID NO: 702102 - DNA, 120 bp, Homo sapiens
ctcgccggctgccaggcggcctgggctggggacctgccctcctcctccagccgcccgcttcctccttgccaggaggatcgaatcatcaatttagttgttggcagcttaacatccttattg

SEQ ID NO: 702103 - DNA, 150 bp, Homo sapiens
ccaccgcatccgcgacggcgacttcgtggtgctgaaacgtgaagatgtgtttaaagcagtacaagtccagcggagaaatatttgttcccgtgaatgacagcgtctatgctgtggtcatgaaaaccttggacgagaacagtgactcagcgg

SEQ ID NO: 702104 - DNA, 87 bp, Homo sapiens
ccgcctgccctgaggagtccccgctgcttggaatccctgggccactggagtcaaggcttgaagatttctatgcaggaccccaaaatg

SEQ ID NO: 702105 - DNA, 75 bp, Homo sapiens
gcagagcgtcatgcaggtcttctggccagagccccagtggatcagtacaagggaaagcgggatttggagtcactg

SEQ ID NO: 702106 - DNA, 75 bp, Homo sapiens
gaactacaggaacctgctttctctcgatgaggataacatccctccagaagatgcacttttccagccattaactcc

SEQ ID NO: 702107 - DNA, 90 bp, Homo sapiens
gtcaaggttgtaacgatgagtacaaactggttttgatggcgacgactttgatgatgtggaggaggatgaagggctagatgacttggagaa

SEQ ID NO: 702108 - DNA, 98 bp, Homo sapiens
cggacggaagaaaaggtctggccgtgttgacctaaccaatgaagaaacaactgattccaccacttctaaaatcagcccatctgaagatactcagcaag

SEQ ID NO: 702109 - DNA, 83 bp, Homo sapiens
ccggcctgcagcacgccctcgtcctgcacttcctcctcggaatctgcaaggttttgagcaaaattttggactgtgaagcaagg

SEQ ID NO: 702110 - DNA, 75 bp, Homo sapiens
atttacctgtgagatgtttcatcccaacaatttgttcccgacaaggagttttctggttcagaccgtagacagaga

SEQ ID NO: 702111 - DNA, 100 bp, Homo sapiens
tccaactgtgggaactctttccagcttgtgtctgatactgaaacaagaatggcccaaacattggccaacttttatcagtgatattgttggagcaagtagg

SEQ ID NO: 702112 - DNA, 50 bp, Homo sapiens
cagaaacaaaatgtcaacaaattgatggactcagcccgcctgcacccagg

SEQ ID NO: 702113 - DNA, 76 bp, Homo sapiens
cggcgctctcctggctcccttctgccccagctccgtctcggcggcggcggacaaatttacatgtattggagaccag

SEQ ID NO: 702114 - DNA, 88 bp, Homo sapiens
gcctaccatcgtttcttcctgcctttgggccgtcaggcagttggttgggacccgctccaaccctcgacgatcctgaagatcctcgtct

SEQ ID NO: 702115 - DNA, 75 bp, Homo sapiens
ggagaagcaaaagaaacccatgaagacttcctagagaattcacatcttcaagtgaatggtagtgtctagaaaggg

SEQ ID NO: 702116 - DNA, 52 bp, Homo sapiens
ggagttcacgactctgagtgctgagtgctccaagctcccgaagccgaagtct

SEQ ID NO: 702117 - DNA, 50 bp, Homo sapiens
tttgccaccgtgtgcaaatttacagggttacattccgaaaagcaaatggg

SEQ ID NO: 702118 - DNA, 75 bp, Homo sapiens
gaggaggcagctgcggtggcagctgctgagttctcggtgaaggcggcggcggcggcgcccgggagccggagcctt

SEQ ID NO: 702119 - DNA, 100 bp, Homo sapiens
gccccgggcccaggcccggccccagccgccgctgcggagcccgccgggaccccccggagcgcggccacggcgcagtaagactttgaccccgacgcaggct

SEQ ID NO: 702120 - DNA, 51 bp, Homo sapiens
aagggacactcaaactaccagagacaaatttacatgtattggagaccagac

SEQ ID NO: 702121 - DNA, 51 bp, Homo sapiens
tcctgaaccgcgcggccgaaccctccgaaccaggagaggaagcacaggacg

SEQ ID NO: 702122 - DNA, 100 bp, Homo sapiens
cagagaggttccagaaatggctgcaggccaagcgcctcacgccggacctggtgcaggtgttgaaaagtctcctctagagctttggaaggctgaatgcact

SEQ ID NO: 702123 - DNA, 90 bp, Homo sapiens
tccaatctttgcctgaagataaatgcaaaacttggaggaattaacaatgtgcttgtgcctcatcaaaggctggagtgcggtggcgtgatc

SEQ ID NO: 702124 - DNA, 75 bp, Homo sapiens
gccagctttcccccgagggtcaacgagaaagagatcggatgctttggagtctgcaatgaagaatggcctgtgggg

SEQ ID NO: 702125 - DNA, 101 bp, Homo sapiens
tagaaagcgagtttcttgaagagtcatctgctaaactccactagagtcatctctacagtctcctctgagcctccggcctccataagacccaaaacagatga

SEQ ID NO: 702126 - DNA, 98 bp, Homo sapiens
aagaaacccacgggcctcttctacctgctggacgaggagagcaagctccagcaaaccttcaccaatttacatcagttcctattcctcaccagcaagag

SEQ ID NO: 702127 - DNA, 74 bp, Homo sapiens
cggacggcgcacgacgagtactggcatgcgcacgtggacaaggacttcgtcttctatgctccccggctgcggat

SEQ ID NO: 702128 - DNA, 76 bp, Homo sapiens
tcccaacaagccctttgaccaaggacagaatgacttggaagataacggagcttcgaagcttctagcagaatatgaa

SEQ ID NO: 702129 - DNA, 100 bp, Homo sapiens
cgcggctctggatgccttctacaacgcggataagtatgctgtgcgcttcatccctcgggagaatggcgtttacctgattgacgtcaagttcaacggcacc

SEQ ID NO: 702130 - DNA, 75 bp, Homo sapiens
ctttctgaagctcatgaagactgtgtaaataatatcagcatgggtggtaaagtaccacctgctactcagaaagct

SEQ ID NO: 702131 - DNA, 75 bp, Homo sapiens
acgccatgtcgggttattcgagtgaccgagaccgcggccgggaccgagggcctttccacagaagaaaacctgtct

SEQ ID NO: 702132 - DNA, 50 bp, Homo sapiens
gaagtctgtttggacaaaaatgccaaagtgtttcctgaggttataggcgg

SEQ ID NO: 702133 - DNA, 73 bp, Homo sapiens
aacagtggaagaaactgcggagggaaagctgggaacgagaggttgatctttgctgggaaacagctggaagatg

SEQ ID NO: 702134 - DNA, 98 bp, Homo sapiens
gcaagcgaaattaagggaaaatggatgtagaaaatgagcagatactgaatgtaaaccctgcagggaagtgttcgccagttactacatgaaaagataag

SEQ ID NO: 702135 - DNA, 100 bp, Homo sapiens
tgggccccacaatgagcagaagcacaaggctggcttccttgagtcttgggcgtctttggtactggcttttttaggggtctgcctggggattacccttgct

SEQ ID NO: 702136 - DNA, 75 bp, Homo sapiens
agcctcagttggaagcagccgatccagcctgcggagcctgtggggcaggtaactaggatttctacctcaaccgcg

SEQ ID NO: 702137 - DNA, 100 bp, Homo sapiens
ctcagaagagttcttctccagcacctgcagacatagctcagacagtacaggaagacttgaggttgcagaatccaaggacccattttgttctttctccgca

SEQ ID NO: 702138 - DNA, 82 bp, Homo sapiens
ggggtgccggccgggattcgcggcccggagctcgggaccggtgacttaagagattaaaattaatttggttgctgttggttct

SEQ ID NO: 702139 - DNA, 75 bp, Homo sapiens
gcagtgttttatacctttggtaatatcgcatcaattgggaggctaaaggttggtcttcaggttgtggcagtcaag

SEQ ID NO: 702140 - DNA, 100 bp, Homo sapiens
agatgaccttaaccctcaagccgaagccttcagtgggactcccccagcagatacattctcaatagctttccaatgattagacgaattgattctttctgtg

SEQ ID NO: 702141 - DNA, 51 bp, Homo sapiens
ccgaagagaccatgaccacaactgcttcctcagcaccttcaagcccccagc

SEQ ID NO: 702142 - DNA, 124 bp, Homo sapiens
ggtcccgttgatgtaacagagcagaggaccagcagatgaatggacaccttgaagcagaggagcagcaggaccagccgtcaagggattctgggccacccgcccttccttctccaccttctacttc

SEQ ID NO: 702143 - DNA, 100 bp, Homo sapiens
cagaatcctatttggaaggcagacatgtggcccatctctgtagccatcactgagaaatctggattttcaagtgtgtggacctgagctgtaatgagctaag

SEQ ID NO: 702144 - DNA, 50 bp, Homo sapiens
gaagacgttccttgaggaggtttgaaaaaatggccatgactaccctcgag

SEQ ID NO: 702145 - DNA, 136 bp, Homo sapiens
gtctcatctccgttaaaaccaaatccactggatctgccacagcttcagcatcgagctgctgttatcccaccaatgtgcaagcatctcttggcagtttacctgagtcaggttatgaggacctgtcagcagctaagtg

SEQ ID NO: 702146 - DNA, 83 bp, Homo sapiens
gttctgcatcaaaaatatcaacgatgaaagagtatttgtgaatattacttcagtgtagaaaatttggaacgagacttctttct

SEQ ID NO: 702147 - DNA, 90 bp, Homo sapiens
tggatgttagtaaactctctgctgaaaaaggtgaccaagaatatggcccaggtgaccaaagccctggacaaggccctgagcaccatggac

SEQ ID NO: 702148 - DNA, 75 bp, Homo sapiens
catgagacaaatgcgctcagcttcaattgccagactgttgatctcctcatgcaagagtcaggatgtcgtttagaa

SEQ ID NO: 702149 - DNA, 100 bp, Homo sapiens
gaccacctgcatttcacaagacacaagagctttatcggagaaatccctgcaaagatcagcaaagatcctccaggtcctattgacaatactaagattgcag

SEQ ID NO: 702150 - DNA, 97 bp, Homo sapiens
caaggaaggaggcctgcaaattcatgacaggattattgagatccctgcatgtcactgagtccaccatgctttacagaagaagacagatttagtctgg

SEQ ID NO: 702151 - DNA, 99 bp, Homo sapiens
ctagtgttcccagaggcagaaaacagaaagtggacaatcatgatcactggggtgatcctgctggctgttggagtctggggcaaacttactctgggcacc

SEQ ID NO: 702152 - DNA, 80 bp, Homo sapiens
ggacggcgagcgcgagcggcgcgagaaaattgctcatttagaaagtggatgtgtgggataacatgtccaatgtgtccgag

SEQ ID NO: 702153 - DNA, 82 bp, Homo sapiens
cccaggacacagagctcagtgcaggcactggcaacttctatttggcgccatgtcagaaccggctggggatgtccgtcagaac

SEQ ID NO: 702154 - DNA, 75 bp, Homo sapiens
gaaaaacttgatggtggaatagaaccatatcgacttccagaggttcccgatgagcacttctccaccctgctggcc

SEQ ID NO: 702155 - DNA, 100 bp, Homo sapiens
acctcgacctctggttctacttcacactgcagaactgggttctggactttgggcgtcccattgccatgatgttggtgcatgtagacaatgaagcatcaat

SEQ ID NO: 702156 - DNA, 75 bp, Homo sapiens
ttctaagctgaataaagctgttttggaactgtcaggtacctcaaagcctcttcagtaggttacctgcaacatcca

SEQ ID NO: 702157 - DNA, 78 bp, Homo sapiens
acttacagtcagctctcatttgtctggaattcattaatcttacaggtcttctgagtgagcatttgtcctgtgctttca

SEQ ID NO: 702158 - DNA, 73 bp, Homo sapiens
ttacccaagtacatatcctgtaagaccagaattgcaaggccaggcccgatgagagaaagggaaagttaaggat

SEQ ID NO: 702159 - DNA, 90 bp, Homo sapiens
tggagacatgacacaaaagctgataccagagctatacagctgctattaggcagggtctcctatggacagaagtgcgggcaaggagctttg

SEQ ID NO: 702160 - DNA, 80 bp, Homo sapiens
taacagcagcgccgtcccgtccgacagccaggcccgggagaaatgtacggagcgcaagaggacggcagcgtcggcgaagg

SEQ ID NO: 702161 - DNA, 50 bp, Homo sapiens
ggaacacccagccccagaaacagttatccccaagctaaactgcgtgttca

SEQ ID NO: 702162 - DNA, 101 bp, Homo sapiens
ctggagccaggctgagcgtcggcgccggggttcggtggcctctagtgagatctggaggccgaatacatcaagcaatggtaacatctttaaatgaagataat

SEQ ID NO: 702163 - DNA, 71 bp, Homo sapiens
ggcctcgtggtcccccaccgccccctggagatgagaacagagaggtggtgttcccactgatgaagagcagg

SEQ ID NO: 702164 - DNA, 83 bp, Homo sapiens
cttgcctgtgtcccacttgttcgcggcctatagctcaggaatcttgcttttaagaaaattccccagaaatcctcccatgctgt

SEQ ID NO: 702165 - DNA, 49 bp, Homo sapiens
atatattggaaatctaacatgggttcaaaccttgtactactcagctgat

SEQ ID NO: 702166 - DNA, 75 bp, Homo sapiens
gatgctggatgaagctgttttccaagtgttcaagtgcctaagaatcctggtgacaaaaagcctgtcaaatccgag

SEQ ID NO: 702167 - DNA, 98 bp, Homo sapiens
gacagtttatcatgaccgtgttcaggcaggaaaacgtggatgattactacgacaccggcgaggaacttggcagggattacctgcaagtcgtgtgaggt

SEQ ID NO: 702168 - DNA, 75 bp, Homo sapiens
cagaatggtggccacctggatgctggaggacctgaaggagaagaaggagaaggtggaggagaaggcaagccggaa

SEQ ID NO: 702169 - DNA, 75 bp, Homo sapiens
gcctcggcccgcacgccaagcacgtggtgggctatggccaccttggtgcaatggatgagcttcatagtctggatc

SEQ ID NO: 702170 - DNA, 75 bp, Homo sapiens
gcttccagagcgcagctatcggtgctttgcagatttcaggtatgctgctgaaagtgggaatcctctacattggtg

SEQ ID NO: 702171 - DNA, 98 bp, Homo sapiens
ttgtggatgacaccaacgtctacagagtgactattcacaagctgcaagctttcttcctggtggcagatgacatcatggattcatcccttacccgccgg

SEQ ID NO: 702172 - DNA, 90 bp, Homo sapiens
gtttcccagaaaaaatgcccagcgcggcgcggggctgcggagtcgtccggagccgctgcgcgatcagaccccaacaccaacaagattctt

SEQ ID NO: 702173 - DNA, 119 bp, Homo sapiens
gcgggattgttagatggaacacggctccatcatcacccaggcgcggagggaagacgccctggtgctcaccaagcaagatccatatgtcaaacttctgcttgatgctatgaaacactcag

SEQ ID NO: 702174 - DNA, 75 bp, Homo sapiens
aagagaaaccgaagtcctcaccactcaacagtcaaagtgaagcaggaaaatgtttataggaggccttagctggga

SEQ ID NO: 702175 - DNA, 83 bp, Homo sapiens
gcgcggcgctctggctctggctgtgcgcgctggcgctgagcctgcagccggccctgccgcggagctggagtttgttcagatca

SEQ ID NO: 702176 - DNA, 90 bp, Homo sapiens
gcacaatatcacagagccgcccatgcacttcggtcacgaaaactggacaaagtgctgcggtgtgtcgcggggtgcccaggcctggaggaa

SEQ ID NO: 702177 - DNA, 83 bp, Homo sapiens
ctgggctgggatccggagcaagcgggcgagggcagcgccctaagcaggttcaaggtgtttgcagactatgaagcctacatgca

SEQ ID NO: 702178 - DNA, 90 bp, Homo sapiens
cttagaggtggaagaggaggaagtggaggaaccaggggacctccctcacggggaggacacatgggtttctacgataaagacagttcaggg

SEQ ID NO: 702179 - DNA, 90 bp, Homo sapiens
ccaggccgccacctgcaaccacactgtggtggccaatggcatcgaggtctacagtaccaaaatcaactccaaggtgacctcccgttttgc

SEQ ID NO: 702180 - DNA, 100 bp, Homo sapiens
tgcaggactcggtggacttctcgctggccgacgccatcaacaccgagttcaagaacacccgcaccaacgagaaggtggtctggacttggctattgagggc

SEQ ID NO: 702181 - DNA, 122 bp, Homo sapiens
ataggctgggtgtgcagggaccgatgcctccaacacagctatgcagatgtggacgagtgctcactagcagaaaaaacctgtgtgaggaaaaacgaaaactgctacaatactccagggagcta

SEQ ID NO: 702182 - DNA, 97 bp, Homo sapiens
gcggagctggagctggagctctcggaggatctgcattaccgttggaaaacagcagcctcagaaccacagtagccatgaagaccatcagccttcaacc

SEQ ID NO: 702183 - DNA, 74 bp, Homo sapiens
tatggtgggcaaactaagccgattttccggaaaaagattttacagctgtaacttgtgtggatacaatgcaagaa

SEQ ID NO: 702184 - DNA, 100 bp, Homo sapiens
ctcggcaggaagtgggaccggtgtctggcggatgcggtcgtgaagataggtgtaattgaaaagtgatcctctcttcagagatgtcaaaaacaaacaaatc

SEQ ID NO: 702185 - DNA, 100 bp, Homo sapiens
atcgattttaacaaagagaatattcactaccagaggaattttatgatttgctcccattcatgctgaggctccagagttcatggaaatgagtgttgagcag

SEQ ID NO: 702186 - DNA, 100 bp, Homo sapiens
agcaactccagcctgtccggctcgtcggtgtcctccggaaatttatcagtggtgtggttcctcgtgcaacaaatatgaacgtctgaaggcaaaccaggta

SEQ ID NO: 702187 - DNA, 104 bp, Homo sapiens
gtggccttagctgtgctcgcgctactctctctttctggcctggaggctatccagcgaatactcccccagttgcaagaggcgcaggaccgtggaagacttcaaca

SEQ ID NO: 702188 - DNA, 105 bp, Homo sapiens
ccggcgctctcctggctcccttctgccccagctccgtctcggcggcggcgggccactttggagttgtctaccacggagaatacatagaccaggcccagaatcgaa

SEQ ID NO: 702189 - DNA, 100 bp, Homo sapiens
ttattctgtcttcacaaatcgaagggccataggaaaaggatacagagtagagtttcatgaacctgaaacttggtggaaatttgatcctgaagaattagaa

SEQ ID NO: 702190 - DNA, 100 bp, Homo sapiens
atgtctggctaatggcatttacaggagtgtaaaattctggaacaacgattagaacaaggaatggtattcacagaatatgaaagaattcttaagaaacggc

SEQ ID NO: 702191 - DNA, 100 bp, Homo sapiens
gtagtgatattcctcttgaagacccagatagacaacataacgatgcacggatgaaccttgccattgctctgactgctgccaggtatggggctgccacagc

SEQ ID NO: 702192 - DNA, 100 bp, Homo sapiens
aggctctggagtcctccacggctacgaatgatttgagagaacgcttcagtgcagccagcagtgcttccaaaattttgcaggaacgaattgaagaaatgag

SEQ ID NO: 702193 - DNA, 100 bp, Homo sapiens
ctgcacaacatggtgaaattattaaacatatggccaaactcctggacagtatcactggttctccaaaaaatgtggaatcctttgcatctatgctgagaca

SEQ ID NO: 702194 - DNA, 51 bp, Homo sapiens
atttgaagctggcagtctggttccaggtaaaaagcgcagactcaccattat

SEQ ID NO: 702195 - DNA, 100 bp, Homo sapiens
ccgacagtctgtctgttcgcgatcctgccggagccccgccgccgccggcttggtaattcatttgcacacctgttagcaagaaacagaagttgaaggactg

SEQ ID NO: 702196 - DNA, 75 bp, Homo sapiens
gagctctcctccagcaccgagagtattgataattcattcagttcctggtgctggacatgcagtcccactcactag

SEQ ID NO: 702197 - DNA, 102 bp, Homo sapiens
tgggagttgcttttggaatgaatttggaatcttcccttgaagaggccctggccaacgtcaacattgggagcctcatctgcaatgtaggggccggtggacctg

SEQ ID NO: 702198 - DNA, 100 bp, Homo sapiens
gatctcaatgaatggattgctgtgaacagaagaaggtagataatgactataatgcccttcgagaaagactcagcaccttgcctgataaattgtcttataa

SEQ ID NO: 702199 - DNA, 73 bp, Homo sapiens
atcacaagctgcaccagcttctaaccgagaatcctatccatcttcttcaccgatatggtttgtggattctgaa

SEQ ID NO: 702200 - DNA, 82 bp, Homo sapiens
tttgcagaaaggcttcactacccttatcccggagagctgacaatgatgaatctcaataacgaaggaggcccaacttcattca

SEQ ID NO: 702201 - DNA, 100 bp, Homo sapiens
ggtttctttcttaaaggactgatttttagaactccacatttgagctcagcgacatgtcctcacctacatggaggatgcagtgtgccagctgctagaaaac

SEQ ID NO: 702202 - DNA, 90 bp, Homo sapiens
attcattgaagtggagaatttttaaagaaggatccagatgaagaaatggccaaaatcgacaggacggcgagggaccagtgtgggagccag

SEQ ID NO: 702203 - DNA, 98 bp, Homo sapiens
gccgggttgctgtgcgactattctccgggagccgtccgtgtcaccgccggaacctggcgcagacctgtcatttactccatcctttatagtgatgctac

SEQ ID NO: 702204 - DNA, 135 bp, Homo sapiens
agtataaacaggctattggcattgctctggagacacgaagactggacgtctttgaaaagaccatactggagtcggtcgtcatacctcagaagaaaggcaagaaggctgctgcaacctcagcaaagaaggtggtcg

SEQ ID NO: 702205 - DNA, 80 bp, Homo sapiens
ctcagcctcccgagtggctggaactacagcgaatgacaacagagctgctcaaggcgggaactctgagctaagcagtggag

SEQ ID NO: 702206 - DNA, 100 bp, Homo sapiens
gctctatcaaagaaagcaagagatggaaaattgttgcctgaagaataccaaggaggatcttttagttttcataccttggtcctgaccctgtccataagct

SEQ ID NO: 702207 - DNA, 100 bp, Homo sapiens
gaggcccgggagcgccgagcgtcgccgccgccgccgccatgaacaactcgggcgccgacgagatcgggccccttcccagctgcctgcctgccctagccag

SEQ ID NO: 702208 - DNA, 82 bp, Homo sapiens
ttcgaaatatgcagaatgcagaaatcatcagaaaaatgactgaagaatttgatgagtgtttcctgaggttataggcgggtgt

SEQ ID NO: 702209 - DNA, 100 bp, Homo sapiens
tgtcagtagcagaagctactctccagaaaggagcaaatcatactctttccatcagtctcaacatagaactgaagtcctgagcgaggagcccattttgaag

SEQ ID NO: 702210 - DNA, 83 bp, Homo sapiens
cagccgctccgactccagggctcctgtctacgaccaggcatgtcgggccccaggcctgtggtgctgagcgggccttcgggagc

SEQ ID NO: 702211 - DNA, 83 bp, Homo sapiens
agcaggagcagcccaagcgccttccctcactacaaaatggttcgttacatcagaaggatacagttcatgacaatgactttgag

SEQ ID NO: 702212 - DNA, 123 bp, Homo sapiens
gttcatacaacattggagtgtgtgaaaaaaaatatgcccgtggaagcaaattgaaccatctttgtatcctaagttgtttcagaaaaatctggatccagatgtattcaaccagatcgttaaaat

SEQ ID NO: 702213 - DNA, 137 bp, Homo sapiens
cccgagggcactacaccattggcaaggagatcattgacctcgtgttggaccgaattcgcaagctggctaaatttattgtgaagaaatcagaagatgaagaagacgccgctaaagatacttatattattgaatgccaa

SEQ ID NO: 702214 - DNA, 100 bp, Homo sapiens
ctatctttctcccggaagtcaccattggagctcatcagactgaccgtgtcttacatcagttcagagaggcaggtgacagcagggacatgtctcgggagat

SEQ ID NO: 702215 - DNA, 89 bp, Homo sapiens
cttccccagccacgtggaactctttgcttgtcaggcccttggggaaggagcacaccgtgtcccgattgctgcgggttatgcagtgtctg

SEQ ID NO: 702216 - DNA, 100 bp, Homo sapiens
tcagtgaccaaaagctacaagagatattcagccgagaaaccagggtggttatgaccgctactcaggaggaaattacagagacaattatgacaactgaaat

SEQ ID NO: 702217 - DNA, 74 bp, Homo sapiens
tcggcttctccggagagaagagatcagtgctcaggcttcttctcatatcggtaattccactcaggccactgtga

SEQ ID NO: 702218 - DNA, 100 bp, Homo sapiens
agaagctggaaaaagcccttaagaaaaacgtcaagaactttatattgctgttggaatatctggagccatccaacatttagctgggatgaaagacagcaag

SEQ ID NO: 702219 - DNA, 51 bp, Homo sapiens
gaagagggaagacacgcggaaacagctaacaacctgagagaagattacaaa

SEQ ID NO: 702220 - DNA, 50 bp, Homo sapiens
gaagcttacaaagctgcctcgagctgtccgtacctggcggtgaaaatcac

SEQ ID NO: 702221 - DNA, 100 bp, Homo sapiens
cattgaaggagacttggaacgcacagaggaacgagctgagctggcagagtcggaccgtgccccctttgtcttcacctcggacatggcgtatgtcatcaac

SEQ ID NO: 702222 - DNA, 50 bp, Homo sapiens
ctatggacttcagacatgcagggtgacgaatcgagtgaattggaacctga

SEQ ID NO: 702223 - DNA, 99 bp, Homo sapiens
cggagatcctgatgaagttcgagcactaatatttaagaaagaagatgttaactttcagatcaagacactgcagctcaggggttcagctatttacatgag

SEQ ID NO: 702224 - DNA, 96 bp, Homo sapiens
ggcgggaggcttgccaccttcagcccccccgcgaacgcccaaggttgccgaggagcccaagtagaagaaatatggagtttagagcctgagaatttt

SEQ ID NO: 702225 - DNA, 100 bp, Homo sapiens
tgaggacctctatctcgcttttcccctggccttctgtatcttcatggtgcggctcatcttcgagaggagtggctgtaaggtgaagaagcatgaaactcag

SEQ ID NO: 702226 - DNA, 100 bp, Homo sapiens
ggagccctctgccggctgctcctgctgaccctcgcgactgtgccctgtccacggtgcctcctgcatgtcctgctgccctgagctgtcccgagctaggtga

SEQ ID NO: 702227 - DNA, 82 bp, Homo sapiens
ggagcatgtcgaccccggcccggaggaggctcatgcgggatttcaagcggggcctcatccacatgctcacccacttggccga

SEQ ID NO: 702228 - DNA, 100 bp, Homo sapiens
cagaggcgctggagctgggtcagtccgccgctcaccccgcggccgcaccttcccgccttctcaggaacttgctactaccagcaccatgccctaccaatat

SEQ ID NO: 702229 - DNA, 83 bp, Homo sapiens
agaggatgatttttggatcctgagaattgatctatgttggatcaaaaatgtggtgacctggaagaagaactcaagaatgttac

SEQ ID NO: 702230 - DNA, 100 bp, Homo sapiens
tgcggcagtaccaatgaagccagagagggcttggtggatgacaaggaggcctgagtagaccgcagtccgtgcactggagaaggcgaggtcaagtgcccaa

SEQ ID NO: 702231 - DNA, 82 bp, Homo sapiens
gatgacaatattcgaactgttgtaagaggtcagacgaacgtggggcaggatggacggcaaccgatctgcacaatgcaaccaa

SEQ ID NO: 702232 - DNA, 90 bp, Homo sapiens
caaagactgaagggaagccatggtgaatgcacagcaacttctgtgatcccaaaacgaaccaacagaccaggcatcagcacaacagaccgg

SEQ ID NO: 702233 - DNA, 100 bp, Homo sapiens
ctttggcccaccagaacacacgggagtgccagggacctacaagaacagtgaggagcttcggtctcgtattgtgtctggaatcatcacacctatccatgag

SEQ ID NO: 702234 - DNA, 75 bp, Homo sapiens
atcatgggcgacttcaggaacagccataggggagctcatattgatgtacgtaacaagaaggggaacactccattg

SEQ ID NO: 702235 - DNA, 75 bp, Homo sapiens
tgaatgcatatgtagcctacaaagttacaacacagaattatatccagatcgagagacagaagattctgaaagggt

SEQ ID NO: 702236 - DNA, 92 bp, Homo sapiens
ggcatatctgggcgccaagccgcggagcctccagacggactagacgcttgaagcaaagctgccatcccagaagacgacatgctctcagcaac

SEQ ID NO: 702237 - DNA, 75 bp, Homo sapiens
cccgggaggggggagcggcgttggaggccaccgtttccagtggtgcttcatgccccacctccaaccaagatcaaa

SEQ ID NO: 702238 - DNA, 51 bp, Homo sapiens
ccagagctgaggactgcctgtttgcagatctaagctggaaccagaaccaaa

SEQ ID NO: 702239 - DNA, 98 bp, Homo sapiens
ctttctcaagcactgtgatcttcaaatgattttttatcaagcagaaatgcatcgaacaacgagaatcaagatcactgagctaaatccccacctgatgt

SEQ ID NO: 702240 - DNA, 90 bp, Homo sapiens
ttcgctccaccactataaataccacaccttcctgcgctgccgggaccagatggctctcggtgtcatggccttcgatggcggcgctgccgg

SEQ ID NO: 702241 - DNA, 50 bp, Homo sapiens
tccccttctattgttctgtggcccaggatgctctgcacacgttcccacag

SEQ ID NO: 702242 - DNA, 98 bp, Homo sapiens
gactatgaatctctgttccaaatgctttgctgataccagatgacaattttagcatcccagaaggtgaagaagatctggcaaaagcaattcagatggcc

SEQ ID NO: 702243 - DNA, 75 bp, Homo sapiens
gacgcgcccgggacgcgcggcggcaccgggaggccgggccgagcggtaagttctcttctacgctgtatgagactg

SEQ ID NO: 702244 - DNA, 83 bp, Homo sapiens
ttacagtccatatgatcacaaggcaccatgactcctgtgaggatgcagcactccctggcaggtcagacctatgccgtgcccct

SEQ ID NO: 702245 - DNA, 75 bp, Homo sapiens
agctgtcctggaactccggaaaaagaacgggcccttggaagtagctggaggctggcttagcaggagctccagccc

SEQ ID NO: 702246 - DNA, 90 bp, Homo sapiens
gagaaaaaggaagaaaaggagaaaagcacagctttgacgtggctctccaaagatgtttgcttcagtgtccccaacagttcctgaattctt

SEQ ID NO: 702247 - DNA, 74 bp, Homo sapiens
ccgctcctaagcctgcacagccgcggcggcagcagcagtgagagcctcgtggtggaacatcggacccattcaag

SEQ ID NO: 702248 - DNA, 75 bp, Homo sapiens
cgccgcggcggcgtgtgcgcccctcagtttgccagggtttggatacctgatccagaggaagtctggaagtcagca

SEQ ID NO: 702249 - DNA, 50 bp, Homo sapiens
gtcccgctgctgctggggtacctggatggcagttccggtcaccacaggag

SEQ ID NO: 702250 - DNA, 89 bp, Homo sapiens
gtggagagggtcttccaggacggctcctgggtagaactgcacttcagcaataatgggaacgggggcagcgttccagcctcggtttctat

SEQ ID NO: 702251 - DNA, 100 bp, Homo sapiens
ccgggaacagacggatcggcagggcggggcggaacgaatatgatgctgtggctgagaaagctggtaaagtagaagctgaggttaaacgcttacacaatac

SEQ ID NO: 702252 - DNA, 82 bp, Homo sapiens
gaaggatggaactatcttatgcacgcacaagaatagccgcccagtgactgccaagtgagtgaaccagcctgcttggagcctg

SEQ ID NO: 702253 - DNA, 75 bp, Homo sapiens
ttcagaaatacgaaaaggagaaatttgaagagatgattcaacaaggcttcgtgggacacatatgcaacatgccta

SEQ ID NO: 702254 - DNA, 101 bp, Homo sapiens
gggtgacatcaagctctgtgagggtttcaatgaggtgctgaaacagtgccgacttgcaaacgatatgagggaaggcaccattggagatatggctatcctgg

SEQ ID NO: 702255 - DNA, 100 bp, Homo sapiens
acctgcctgtcgtcgtggtggccaacaagcaggaagaggagatcccagaactggagattgacgtggatgagctcctggacatggagagtgacgatgcccg

SEQ ID NO: 702256 - DNA, 100 bp, Homo sapiens
caagaaagacctcattaaagctcttgtggagaatatagatatggacacaagcctcattttggaatattgcagtagccggatcgagctgggagatgtgaca

SEQ ID NO: 702257 - DNA, 89 bp, Homo sapiens
acacacagactccaactgtacaagaggagagtgaagaggaagaggtgcatttcctgatgcccagcttccttctaagaggatcattggcc

SEQ ID NO: 702258 - DNA, 90 bp, Homo sapiens
ctctgacaagaccaagtactaccttcaagtgtctgcagtaaaacccactgttgccccaccactagctgagccaggagctggcaaaggtct

SEQ ID NO: 702259 - DNA, 83 bp, Homo sapiens
cgcgctactctctctttctggcctggaggctatccagcggcctgccgggctggtctgtggggaccagcggatccaagtagcca

SEQ ID NO: 702260 - DNA, 80 bp, Homo sapiens
tcccattctcccagacatggggaacagggtcacagctctcacccagctagaacgagtaaatctgtctgcagcccagacac

SEQ ID NO: 702261 - DNA, 100 bp, Homo sapiens
acctccctcacctggtcaatgcagacggacagtacctcttctgcaggtactggaaacccacaggcacacccaaatgctccagccagtgagaacaccaagg

SEQ ID NO: 702262 - DNA, 98 bp, Homo sapiens
ccagctaaagcagacggctcgcactgcgacccgaaggcagatcgggagcggtgccgagaaaaatttccttactagatgacatttcatcgcaatgtccg

SEQ ID NO: 702263 - DNA, 90 bp, Homo sapiens
acagggccccgacacccctgtgtctgctggtgagggagattctgggccgctgcacctgccctgaccagtttcccatgatcaaggtctcag

SEQ ID NO: 702264 - DNA, 75 bp, Homo sapiens
gatgctatagtctggtatcaaaagaagggatcatggcccaagttgcaatgtccaccctccccgttgaagatgagg

SEQ ID NO: 702265 - DNA, 83 bp, Homo sapiens
gcgggtgggaaatggcggagtatctggcctccatcttcggcaccgagaaagacaagtagagcagagccggagccaggtgcagg

SEQ ID NO: 702266 - DNA, 50 bp, Homo sapiens
caaaagatgaagacattctccaagtggaattgaaagatgttggccatcgt

SEQ ID NO: 702267 - DNA, 101 bp, Homo sapiens
cctctgtctctatccccgaaaaccagtctaccatggttactgctgacatggaatacggcaggagaatgatatggttgattcagcgcctcagtgggaagctg

SEQ ID NO: 702268 - DNA, 89 bp, Homo sapiens
ccggatcaatccagatggcagccagtcagtggtggaggatatgtgccaggccctctcctgccacacagacccgctggaccaaagcagct

SEQ ID NO: 702269 - DNA, 88 bp, Homo sapiens
gggatctgcgacaaaagggaccgaggtcctcatcaccgggggcatcgtggccacagctgggcgcttcacccagtggtactttggtgcc

SEQ ID NO: 702270 - DNA, 100 bp, Homo sapiens
aatgtgctgctggctgccggctcctgtgacttcaagtgtcgatcgccacatcacagaatcgtatctatctcacagctgacaaccttgtgctgaacctaca

SEQ ID NO: 702271 - DNA, 97 bp, Homo sapiens
aaaagaagattgtctatcatgaaggaggttatgaagacagtatggagtttccagaccatagtagacatttgctacagtgtctgagcgagcagagaca

SEQ ID NO: 702272 - DNA, 100 bp, Homo sapiens
ccaagacagagcgctactcctggcagtgcgtcaatcagagcgtcctgtgcggagcagcagccaagctggacagatgacctgcctctctgccacctctctg

SEQ ID NO: 702273 - DNA, 100 bp, Homo sapiens
agagactgaaaaacctgaggctgatgacccaaaggcaactcgagatgtggtgctgagccgggtgccggagcaggaggaggaccggacagtgagcttgcag

SEQ ID NO: 702274 - DNA, 88 bp, Homo sapiens
gtggctgcccaggcatctgcatctggaatgtttcctggacaaagaaggtgcagcttcaagcttaggaccacccaccatgcctatccag

SEQ ID NO: 702275 - DNA, 100 bp, Homo sapiens
cgggggttcgctggctgcggccccggctccggcccccgcaggagcagctcaccttgcagagcgccaagtcccgagtggccttctttgaagagctctagca

SEQ ID NO: 702276 - DNA, 50 bp, Homo sapiens
tggtgtcatccagccttagcaaaccagagaagagatcacaaaatggctct

SEQ ID NO: 702277 - DNA, 100 bp, Homo sapiens
cgacctcacagccatcatatcagacctgcgcagccggattatgtttgagaccttcaacaccccggccatgtacgtggccatccaggccgtgctgtccctc

SEQ ID NO: 702278 - DNA, 98 bp, Homo sapiens
tccggcacaccgaggctcggccgccccgccgcgagccaccacaagggcccgggccaccaggaagagcctgctgcatgtcccctatggagacggcgaag

SEQ ID NO: 702279 - DNA, 97 bp, Homo sapiens
agatgctctctctggaccgatcccactagatgggggtcttactgtgttgcccaggctggtcttgaacccctggcttcaagcgatcctcttgtctcgg

SEQ ID NO: 702280 - DNA, 75 bp, Homo sapiens
agactgtggcagaatgtcgtgtgctgcagaagctgggagcagacgctgttggattcttacagaagcagagattga

SEQ ID NO: 702281 - DNA, 98 bp, Homo sapiens
cggtgcgcagtgggtggctccacctcgactgcgaattactgtttatgagcttcggaaccaaaaagaagcttcccagagccggggccaggagccccaag

SEQ ID NO: 702282 - DNA, 100 bp, Homo sapiens
cggcctccccgttctgggacctttcgctctggattaatcgaattacagctgctagccaggaacatggactgaagtatccagcgctcattgggaatttagt

SEQ ID NO: 702283 - DNA, 75 bp, Homo sapiens
gtcgggcgctgctgtctgtgaattctttttgaaagctgcctgcggcaaagatcatcagtaacgtgccagcagaca

SEQ ID NO: 702284 - DNA, 80 bp, Homo sapiens
ggagttcaagcacgatgacaaactcagtgaagacagtggagccttaatccagggtctccctctgttgtccaaggctggag

SEQ ID NO: 702285 - DNA, 75 bp, Homo sapiens
tgtgacccggcggcccgccagtcaccaaacgttgctgcatctacctttatccctgactgccttgaagttgaaggc

SEQ ID NO: 702286 - DNA, 103 bp, Homo sapiens
taaatggcgccgaagcaggacccgaagcctaaattccaggaggaatgttcgcatcttaccacatacagttctttacatggctgattcagaaactttcattagt

SEQ ID NO: 702287 - DNA, 100 bp, Homo sapiens
atgagcaagaaaagcctctgggagcagaagggaggctccaagacctcatcaacaattaaggttcgagaacttgtcttggacaattgcaaatcaaatgatg

SEQ ID NO: 702288 - DNA, 83 bp, Homo sapiens
acagaatattccacctgccttgacatgtggtgtggtggctcacgtctgtaatcccagcactttgacaggctgagcgagggagt

SEQ ID NO: 702289 - DNA, 74 bp, Homo sapiens
ccaaaggccctgcaaggacaaggttactgaagctaaaggagatgtttaactccaagtttggatctattcccaag

SEQ ID NO: 702290 - DNA, 82 bp, Homo sapiens
tcacacacatctctctggaggagccccttggggccagcacccaggttgtcccaccagtgagagccacgagccaaggtgggca

SEQ ID NO: 702291 - DNA, 100 bp, Homo sapiens
ccaagaaccaaccctgccagcacctggaccttggacattcagacttcagaatgcgggacctggacttcaccatcgacctggacttcaagggccagctgtg

SEQ ID NO: 702292 - DNA, 100 bp, Homo sapiens
cccgtccccggcacacgcgcagccccggcctctcggcctctgccggagaaacagcttgccagcaaagcacggacagagaaggaggagaagctgagccagg

SEQ ID NO: 702293 - DNA, 85 bp, Homo sapiens
acaaaccaaatgaccaatcttcaagatggtcttcagagagcaactatcctccccagatagctgatcagcttccttgggttttgct

SEQ ID NO: 702294 - DNA, 49 bp, Homo sapiens
tttgaagattctacagataaatcagattttgcaggactgtccagaagag

SEQ ID NO: 702295 - DNA, 140 bp, Homo sapiens
cttcttcaggcagctccaggcgctcctagaccttccagcagtactttggtggacgagttggagtcatctttcgaggattgatttccagagacttatgttacttgaggaagacaccaagaaggcaaagaaaaggagccagg

SEQ ID NO: 702296 - DNA, 55 bp, Homo sapiens
actgccaggacactgagatttggagaggtacatgatgatgagggactgttggcat

SEQ ID NO: 702297 - DNA, 99 bp, Homo sapiens
gggccccagcgccgacggcgacgtcggggccgagctaacccggcctctggacaagaagagaacgaggtgctcaaagtccaactgaagaaatatgtagga

SEQ ID NO: 702298 - DNA, 122 bp, Homo sapiens
acggtgaacctggaccaggaggaggttttcaggaccaaaattgtggaaaagtcactctgcttagaccatgctcagcctccaagcagccttgtcatcgacaaagaatctgaagtttacaagat

SEQ ID NO: 702299 - DNA, 101 bp, Homo sapiens
cagaatggccttcagaccacagagggaccttgctgcaagaaactgcctggtaggtgaaaataatgttctgaaaatcagtgactttggaatgtctcgtcaag

SEQ ID NO: 702300 - DNA, 100 bp, Homo sapiens
ccgacatggaacagggactcactggggtaagactttgaccccgacgcaggcttcagtgattgccgcggatcagaagcctgagcactttggctcgagacaa

SEQ ID NO: 702301 - DNA, 75 bp, Homo sapiens
agacctcaggggaagaagctggacttcagccgtccaaggcctggcatgcgtgggcagtgatgaacttcgaagctg

SEQ ID NO: 702302 - DNA, 98 bp, Homo sapiens
tcacacggctcaagtcaccaccgtgaacaaggtgccctgcaggagtcattaaatcaaaacttcatgctgatcatcacccaccgagaagtccagcggga

SEQ ID NO: 702303 - DNA, 100 bp, Homo sapiens
ccctgcggttggcggcctcctcgtggagcggagcaaggagcatgtctgttcgatcctggcttccctcctgcggaacctgagagggcagcagcggacccgg

SEQ ID NO: 702304 - DNA, 133 bp, Homo sapiens
cccaactacgcttctttccaggataaaatactctaagtgacaaatgttgagtacattatcagaatgaaaaatctactactcccgtctcaaagtccaatacccctactccacgaactgatgcgcccaccccagg

SEQ ID NO: 702305 - DNA, 80 bp, Homo sapiens
caggcggtgacagagtggagccatggctagagggaagaaggagaaagggccaacccctgaagaagcaatacagaaactga

SEQ ID NO: 702306 - DNA, 74 bp, Homo sapiens
caagatccagtccccacaggagtgggaggcgatccaggccttgacgaatttacatagtacatgacgaagttaag

SEQ ID NO: 702307 - DNA, 95 bp, Homo sapiens
accattcttccctgggctggtgaagtacatgaactcagggccggttgtggccatggaatgtagtaagccacaagaagcatttggctttgaacaag

SEQ ID NO: 702308 - DNA, 74 bp, Homo sapiens
ttgtgaaagcagtccttgttcctatggcctaatgaacaacttccagctttatttgaaggtagacgcatcgaatt

SEQ ID NO: 702309 - DNA, 98 bp, Homo sapiens
ctcgggccctggaggcaaccacagaacacatacggcaggagctggcggacttatcaaactggtttcaaagcacagagctcaagtaatttacaccagaa

SEQ ID NO: 702310 - DNA, 100 bp, Homo sapiens
caagaccaacaaattcatcaaggagctcatcaaggacgggaagtcactcataagcgcgctcaagaaaacgcttcgttaagggactcaggcagtacgggaa

SEQ ID NO: 702311 - DNA, 50 bp, Homo sapiens
ttttaattcccactctagattctgttgcctcttgaagtggatttaactaa

SEQ ID NO: 702312 - DNA, 101 bp, Homo sapiens
gaagaagtgaagaaattattggtacctgcaatacctatatcatggcaatactaatccagaattggcttttgaaagtgccaagatcctctgttgtatctctt

SEQ ID NO: 702313 - DNA, 100 bp, Homo sapiens
gcaactcttcagtgttggctgataaaattgccctgaaactggttggtgaagaaggatttgtagtttttgaaatcatgaatcctgtttatagtcctggatc

SEQ ID NO: 702314 - DNA, 90 bp, Homo sapiens
gccagttggaatttgaagagagcttgataactgtgttctatgtggatccagcattacaactgataaggcgggcaaaactgttccgatttg

SEQ ID NO: 702315 - DNA, 100 bp, Homo sapiens
cctgggctcaagtgatcctcctgcctcagcctcccgagtacctgagattagcccaggtgaccaagaatatggcccaggtgaccaaagccctggacaaggc

SEQ ID NO: 702316 - DNA, 101 bp, Homo sapiens
cagaatcaacccagaacggatagctccctcctggaaaaggtgggcttatctaaatcagatcccaaatagtatttaaaaagcctctaccaaaagaagaggag

SEQ ID NO: 702317 - DNA, 50 bp, Homo sapiens
caatcagaagatccgagatggatggcaggcaatctgaaagcaaatcctgt

SEQ ID NO: 702318 - DNA, 75 bp, Homo sapiens
catcagtcaaggaagacccactggagagaccaaactcttacccaggatctactggagcagctgttggagcccatg

SEQ ID NO: 702319 - DNA, 75 bp, Homo sapiens
gaggtgggtccggggagcccgactcggaccgcggagacagttgcatctataaaaaggtttgcccctttaatggtg

SEQ ID NO: 702320 - DNA, 74 bp, Homo sapiens
ctttcatgaaggcgttagagctgaaaagaatggtttgtcattcattgaaacttcggccctagactctacaaatg

SEQ ID NO: 702321 - DNA, 100 bp, Homo sapiens
gaaaaatatgcacttttcaaaaacccacaggagacattgacatttagggatgtggccatagaattctctctggaggagtgggaatgcctgaaccctgctc

SEQ ID NO: 702322 - DNA, 101 bp, Homo sapiens
gagaaaggagatgaggtcagagaagtcgaaggggtgctggcgagacgggggtgatgcccacccgggcgagaaaggtcatcagactagtgctgagtcttggg

SEQ ID NO: 702323 - DNA, 50 bp, Homo sapiens
cagtgacggaggagcttgtaccaccgagaatgtccaagcacacagatgca

SEQ ID NO: 702324 - DNA, 75 bp, Homo sapiens
ctgcctgggtgacaatgccttggtttcaacactatcggaatgactggtcaagcccagcattccagcagctctcag

SEQ ID NO: 702325 - DNA, 75 bp, Homo sapiens
tggaagctgagcagcagcttgccgctctagaaggtactactgagcgagtgtgcttgatccagggaacggttgaag

SEQ ID NO: 702326 - DNA, 98 bp, Homo sapiens
acgaccacgtctccaaaatgagtcgcatcttcaacccccatctgcatgggtagcaagaaactaaaacgagtgggtttatcacaagagctgtgtgaccg

SEQ ID NO: 702327 - DNA, 100 bp, Homo sapiens
ctgagatgaaaaccaacatgagcctcggcttgatcctcaccaggaacatgggaactggaggttttctccattcctgggagatggtcgggaagaagaaggg

SEQ ID NO: 702328 - DNA, 99 bp, Homo sapiens
gccgtacgtgccagatggtgttacctggagcttaaaaagctgcacgcaagtgttaaacttctggattgccaaggatccaagatttgaacgattaccatg

SEQ ID NO: 702329 - DNA, 90 bp, Homo sapiens
ccgcaggacctgcagcatcccagaggttgaactcccaccacctgatcttggaccaagttctgcactaaatcagacactcatgttgctgcg

SEQ ID NO: 702330 - DNA, 75 bp, Homo sapiens
acatgtgaacactcaagtgaagcaaaagccttccatgattactggatggcattcccaatgacagtagtgatagtg

SEQ ID NO: 702331 - DNA, 101 bp, Homo sapiens
accgcagtcgccgtgaagatggcgtctaccagccgggcaccatgccggtggaaaggatgcgcatgcgcccgtggctggaggagcagataaactccaacacg

SEQ ID NO: 702332 - DNA, 75 bp, Homo sapiens
gggcttctattccagcacgtgcccaggggctggggagaacaccaaaacaaacctggagagcatcctctcttaccc

SEQ ID NO: 702333 - DNA, 82 bp, Homo sapiens
aggcgctgttgagttctgcagttgatcatgggtgtgagttcttgatacgaatgaaaggccaagagtttgttgatgagattca

SEQ ID NO: 702334 - DNA, 82 bp, Homo sapiens
atctggctggagccctgcattcgcggcgtgtgcaggaactctaatgaatcattgattgaccagcactattttaccagttgga

SEQ ID NO: 702335 - DNA, 83 bp, Homo sapiens
aagaagatcatcattaaggacggaggcacgctccttccgcttccagccgttcgagtcctatgactccaggccctgcctgccgg

SEQ ID NO: 702336 - DNA, 75 bp, Homo sapiens
gcgacctgggcaccagcaggacccgaggccaggagccaggggcccagaagatgaagactggcccatttgcagagc

SEQ ID NO: 702337 - DNA, 100 bp, Homo sapiens
ggaaggcgtgggcgacccggtgtgtggcgcgcccagagccccgcgtttcagccctagggaaggaccccgcagggatctttgaattggtggaacttgttgg

SEQ ID NO: 702338 - DNA, 51 bp, Homo sapiens
atgcaccgtggtgttcttgttaggtgccacttctccacttttaagcagtgc

SEQ ID NO: 702339 - DNA, 50 bp, Homo sapiens
tgaaagtggaggctgcgaaaatagggaacagattctccgtgtgaaggctg

SEQ ID NO: 702340 - DNA, 75 bp, Homo sapiens
gtacagtcaaggaggcggcaaaaaaaaagtctgctactactacgacgatcaatgcaatgtcccggaatggcttcc

SEQ ID NO: 702341 - DNA, 100 bp, Homo sapiens
ggacttttcgtgtcccgctgtaaggaaacaagatggtccttaaaaccgaagaggaggacgggatatctgtgtttgccttacatggcattgcagcagcatc

SEQ ID NO: 702342 - DNA, 100 bp, Homo sapiens
tcgagcgcatcgaggatttggcgctgcagaaccagatccgggagcacgtcatctccatcgaggggtcagatgacttgtctgcaaagctgtgggatgtgag

SEQ ID NO: 702343 - DNA, 75 bp, Homo sapiens
gggcggcggctgccgcgcggcacacaatgtgaccattgtgaggtagatattttgttctaattttccagatgagga

SEQ ID NO: 702344 - DNA, 74 bp, Homo sapiens
cgacattgccgtcgacggcgagcccttgggccgcgtctcctttgaggtcagtttaggggctggtgcaaaggatg

SEQ ID NO: 702345 - DNA, 98 bp, Homo sapiens
catgacatcagtgacgagagggagagcaagaccatcatgctgcgcggccttcccatcaccatcacagagagcgatgactcagaattcatgattgaaga

SEQ ID NO: 702346 - DNA, 100 bp, Homo sapiens
cattatgctttccagacagaaaccaaacttcatctcattttagatgacatggcagagcttctcctcggggagtcgaagctggagcagtacctgaaggaac

SEQ ID NO: 702347 - DNA, 101 bp, Homo sapiens
ggtgttcacagtgttggtgtggagtcacagcttgacttttggaatgggtaccacagaccatgtcatcgtcctggcgtccacgaaccgagctgacattttgg

SEQ ID NO: 702348 - DNA, 100 bp, Homo sapiens
gcaggggcatgtggatactggctctctccttgttccagagcttcgcgaatggtacccactgatggtaatgctggcctgctggctgaaccccagattgcca

SEQ ID NO: 702349 - DNA, 100 bp, Homo sapiens
cggccatcgccctgccggaccgcgcctcaggctcccccaggccaagactaaggggctgcagagcggggtggacattggcgtcaagtactcggagaagcag

SEQ ID NO: 702350 - DNA, 83 bp, Homo sapiens
ggacagtatgaggcaagcgcagggggacggggaccagcagctgtcgccgccgctctcaggtttctctggaaacccccctggta

SEQ ID NO: 702351 - DNA, 100 bp, Homo sapiens
tttcaaggagtttgggaaaaaccgcgaagtcatggggctctgtcgggaagctccaaagacaacaggccctccctctgccctcccgtctgtgagctccctg

SEQ ID NO: 702352 - DNA, 98 bp, Homo sapiens
gaagatgccttctcagtcagttgagggcggcgactggcggcgcgatggacctgaccgggctcctgctggacgaagaaggcaccttctccctcgccggc

SEQ ID NO: 702353 - DNA, 82 bp, Homo sapiens
ccgagcatctgggccgagaccattccgtatggagagccggatttgaggcttaagcaacttcttccggggaagagtgccagtg

SEQ ID NO: 702354 - DNA, 100 bp, Homo sapiens
ggatgctgcggcgcccgctggccgggctggctgcggccgccctgggccgggccccaccggacgggtgaggtggctttgaccccgggttgcccggccagca

SEQ ID NO: 702355 - DNA, 75 bp, Homo sapiens
tgcagatcatctacgacgagaaccgggtgctcctggagctgttggtgggaatatacccctcaggggttattggac

SEQ ID NO: 702356 - DNA, 75 bp, Homo sapiens
ttcaagtcctattcccagtcctatgcaacaatacatcatattgccaaaatgctttggagtttttaactgaatcta

SEQ ID NO: 702357 - DNA, 110 bp, Homo sapiens
ccaagagcagcggaaaatgatccagtcacagtattctaccttgtaaatactgttatttgtatatactgtaaatgatgacatcggtgggcactaaccgagcccggggaaac

SEQ ID NO: 702358 - DNA, 100 bp, Homo sapiens
gaaggcgtcagcagaggggccactgctgggccctgaggctgcaccaagtggcgaaggagccggctccaaggttattcagcttctcaaggctggaaaagcg

SEQ ID NO: 702359 - DNA, 74 bp, Homo sapiens
gcaagaattacatcagcgcctgggagctccagcggaaggttgatgctatgaaactgggagtaaaggaaatgaag

SEQ ID NO: 702360 - DNA, 75 bp, Homo sapiens
cacaaaactagcatcctcctggaggagctcgggtattagaactgatatgtactcgtgagtcaggagcagtctttg

SEQ ID NO: 702361 - DNA, 100 bp, Homo sapiens
agaaggatctctccttaacgcctttcaccattaagaggaaagcgatggaggagctgagcgctgatgagagctccttaataagcatttatagtcagttttt

SEQ ID NO: 702362 - DNA, 100 bp, Homo sapiens
atacatctgattccatgctttgagctgttctggcaaccctgatgtcttcagcctgtgcaaggcacattttctgtgacaagtttccaaacctagcagtcgg

SEQ ID NO: 702363 - DNA, 74 bp, Homo sapiens
gcatccctccgcgggctaccaaccgtggctacaggtacatgtactggacagactggggtgagacgccccggatt

SEQ ID NO: 702364 - DNA, 99 bp, Homo sapiens
ctcgctgggagagaggtacctctccttttccctctccctttccctaagaaagcataacccctactgtagaactaaatgcactgtgcatgaaacttggaa

SEQ ID NO: 702365 - DNA, 74 bp, Homo sapiens
aagcagtgaaggagtgcagaggcatcacctgaaagaacctagaagtcggaatccggaagaagatcgaacatgac

SEQ ID NO: 702366 - DNA, 78 bp, Homo sapiens
gtgctgatatcaacacggtcaacgtggacggcttgacagccctgcaccaggcccttgatgagcctccctatttgacag

SEQ ID NO: 702367 - DNA, 98 bp, Homo sapiens
ctctgttcacggctccatcgctgttagtagacagattggaagtcgtcaacaagcgttttgttcgagtgacctttacaccaggaaaaactcctgttgat

SEQ ID NO: 702368 - DNA, 100 bp, Homo sapiens
gttctgacatcagaaggtcccttatgtttctgtcctgaaggctcagtgcttgagagagatgggaaaacatgtagcgatgtcctgtgaagtcaacgagtgc

SEQ ID NO: 702369 - DNA, 100 bp, Homo sapiens
caccagcgtgccaaaagagcagtctcacatgaagaccaatttttacgtctagatttccatgcccatggaagacctgtcatttactccatcctttatagtg

SEQ ID NO: 702370 - DNA, 98 bp, Homo sapiens
tgctggcgctctggctgtgctgcgcgacccccgcgcatgagtgtgaacatggctacgcctcttcattcccgtccatgccgagcccccgactgcagcat

SEQ ID NO: 702371 - DNA, 97 bp, Homo sapiens
tgattatatttcttggagttgtgttggtaatgaagaaaagcattcaggtagaactggaagccgaggcggaaaagatgcgggtgtcccagcaagaatt

SEQ ID NO: 702372 - DNA, 89 bp, Homo sapiens
gacccggacgacccccattgctgagccagcggagctgcttgacttaattcagtgcacaaatgagatgaatgtgaacatcccacagttgg

SEQ ID NO: 702373 - DNA, 95 bp, Homo sapiens
aaaaccagttattgaatatcaagaggaggagttgttgagctcacaatgtctctctgcaccaagctccatgactcaggatttgcctggagttcctg

SEQ ID NO: 702374 - DNA, 100 bp, Homo sapiens
gcggccggagtcagcgatggtgcccggcgaggagaaccaactggtcccgaaagagtgtctcatagttgggggaggaccctgtggcttgcgcactgccatt

SEQ ID NO: 702375 - DNA, 82 bp, Homo sapiens
gtggccggcgcctcctcggagtccttggggacggagcagcgcgtcgtggggcgagcggcagcttcggaaccaaaaagaagct

SEQ ID NO: 702376 - DNA, 90 bp, Homo sapiens
ctcggtgccgatcagcggaagaccaaagaggatgagaaggacgacaagcccatccgaggtaagaatgattgatgttggctgatattggag

SEQ ID NO: 702377 - DNA, 116 bp, Homo sapiens
tcagaagagacatcacactcgattattttgtgctgataggacagaaagggtggtgtctgtgaacaggcctaggggtttctgacccttctggtttctgtgccatggccacgctgagc

SEQ ID NO: 702378 - DNA, 100 bp, Homo sapiens
gcaagaactttatccccaggatctaaaccagtgctggacaatagatgctcaaagtgcctagctgccactccatttatatgaggcaagaaggcttcctggc

SEQ ID NO: 702379 - DNA, 75 bp, Homo sapiens
catgctgctgaaagagtaccggatctgcatgccgctcaccgtagacgagacctgggaccagtgtgaaaagaaaat

SEQ ID NO: 702380 - DNA, 144 bp, Homo sapiens
cttggaggagctggtcttcggcgacgtcgagaacgacgaggacgcgttgctgcggcgtctgcgaggcccgagggcctctgaagaacacctgaagcagcactacattgacctgaaagaccgaccattcttccctgggctggtgaa

SEQ ID NO: 702381 - DNA, 80 bp, Homo sapiens
gctgaccctgggagacatcgacgaaatcttcccaaggctgcagacaccgacggatttgctttgggagccagagtagctgc

SEQ ID NO: 702382 - DNA, 100 bp, Homo sapiens
ctacctgacgggcctgcgagggttgaagattgtgaagcaatagcctaagaataatatgtggattcgagaccatgaggatagtgggtctgtacatttgggg

SEQ ID NO: 702383 - DNA, 100 bp, Homo sapiens
atgcaaaccatgcaacgtctgacaaatttaagacttcaaaacatgaaaagtgatacttttcaagagggtcagtatagaccttctgatttgctgtgccctg

SEQ ID NO: 702384 - DNA, 90 bp, Homo sapiens
tgaggttactgaggggactgtgacacagatacaggaaactcgaaggaaggaaggcattgtaaagctgaaacctcatgaggaacctcttcg

SEQ ID NO: 702385 - DNA, 100 bp, Homo sapiens
tggggctgctcccatcattgatgtggtgcgatcgctggccttgggtgcggcactcgtgaatgtacagatccccctgctcctgggccagctggtagaggtc

SEQ ID NO: 702386 - DNA, 90 bp, Homo sapiens
cgaggaatcgccgtggcgtcttggtgttctccacgctggttcgcagatatgcaagaactgtacaggttgctttgatcgacacatcccatg

SEQ ID NO: 702387 - DNA, 60 bp, Homo sapiens
cgggaagccatagctctgcatggtgatgatgaacagtctacacagatggctgcaagttgg

SEQ ID NO: 702388 - DNA, 75 bp, Homo sapiens
ctttatcctttccgtgtaaactcgaaccaaaaacttttgctagaaaatcagcttttacgagagaaaactcatggc

SEQ ID NO: 702389 - DNA, 100 bp, Homo sapiens
ccatagttcacatacagctaagtgccagcgagatttcagattcctgtaaacctctaaagaaaaggagtcgcgcctcaactgatgtagaaatgactagttc

SEQ ID NO: 702390 - DNA, 100 bp, Homo sapiens
aagatggccgcttggggaaggaggcgtcttggcccgggcagcagtggcggcagcgcccgagagaggagacaaagcttttgttgatttcctgagtgatgaa

SEQ ID NO: 702391 - DNA, 100 bp, Homo sapiens
tctcgatgaggataacatccctccagaagatgggaccattgacatttatggatgtggccatagaattctctgtggaggagtggcaatgcctggacactgc

SEQ ID NO: 702392 - DNA, 98 bp, Homo sapiens
cactctggtcacgcccgagctctgatgcaagcgaagaaccttttccctaatacgtacctcattgtgggagacaatgcagatcttcgtgaagactctga

SEQ ID NO: 702393 - DNA, 90 bp, Homo sapiens
gctcaacgtgaagatgatgaggatgaagacctttatgatgatccacttctacttattaaatagacagtcattttgtttactcattcagcc

SEQ ID NO: 702394 - DNA, 83 bp, Homo sapiens
caccacctcatcacccaattttggtgaaaaacctccagggtcgtatagacctccccctcctatgggcaaaccaccaggttcaa

SEQ ID NO: 702395 - DNA, 100 bp, Homo sapiens
ggggtaaaacctacgtgtccaagaaactaacacgctacctcaactggattggagtccccaccaaagattgagtcatatgtctgccggatgtgttctcgag

SEQ ID NO: 702396 - DNA, 50 bp, Homo sapiens
tgatgattccacagataacccactcaactgagaagtcatttccttggaga

SEQ ID NO: 702397 - DNA, 96 bp, Homo sapiens
cccaccaatggaagcagctggcttcactgctcaggtcatcatcctgaaccacccggggcagattagcgccggctactccccggtcatcgactgcca

SEQ ID NO: 702398 - DNA, 100 bp, Homo sapiens
cgaaggccctatcaggacatggagtatgaaagacgggcagctgcaatgactctccgcacggtattattgtcattgcaagcactattggcagctgcagagc

SEQ ID NO: 702399 - DNA, 50 bp, Homo sapiens
cccattgtgtcttctcaagaaggtactccaaagattcaggtttactcacg

SEQ ID NO: 702400 - DNA, 76 bp, Homo sapiens
tgctgggcctgccacggaggagccaggtccctgtctgagccaaggagaggagacgccgtgagcgggacgaccagat

SEQ ID NO: 702401 - DNA, 99 bp, Homo sapiens
gtgctcattaatgttgacccttgcgctaaaggctggattgactgggcagcttccaaagcataaaggcatcacaagtggtcgggctcagctactctggtt

SEQ ID NO: 702402 - DNA, 50 bp, Homo sapiens
tttggctggggacacccgacgttttcatactctgcacaccatcctcgggg

SEQ ID NO: 702403 - DNA, 98 bp, Homo sapiens
ctgacagctgtcccgccctacaggctgcgggtgatcgcagaagcctacgctaccaaaggtatattactcgaggggtttttaaatattgtcaggaaaaa

SEQ ID NO: 702404 - DNA, 100 bp, Homo sapiens
cccttttccagatgggatcctggatgtcattctccttgtctttgtgctctcttctattcatcctgacaggatgcagaaggctatcaacaggctgagcagg

SEQ ID NO: 702405 - DNA, 100 bp, Homo sapiens
gcggagctcgcggaggcaaggccgaggataaggaggtgaatcagtggctaacctggttagaaactgctgaagaagaagaatcagaggaagaagctgacta

SEQ ID NO: 702406 - DNA, 96 bp, Homo sapiens
gatgttcttcttcgagtatttgtagaagggctgtcatggaagttcagactttgagaccatcttactggaagttccttttaagactcaccaagggca

SEQ ID NO: 702407 - DNA, 100 bp, Homo sapiens
tcagctcggcaacatcgtcttcaagaaggagcggaacactgaccaggcgtccatgcccgacaacacaggtgtcagcggtgcccactgtgctggccatgaa

SEQ ID NO: 702408 - DNA, 90 bp, Homo sapiens
cttaaggtcatggagaaagcccacatcaacctggtgaggtgtggacactgccagcggctgcagccgacttggaatgacctgggagacaaa

SEQ ID NO: 702409 - DNA, 75 bp, Homo sapiens
ggagctggaatgactggcaacccaggcagggaacgtggtgacaggagaaatggtagaagagcttattctttccgg

SEQ ID NO: 702410 - DNA, 49 bp, Homo sapiens
cgtgggcagccagggtcggtgaaggcccggtacaagcagagccttgacc

SEQ ID NO: 702411 - DNA, 100 bp, Homo sapiens
gatcacccttgaggctgtcttgaacactacctgcaagaagtgtggctgtaaagatgagaagcatgaggctgagagaggaggagtcacccggacccagcca

SEQ ID NO: 702412 - DNA, 87 bp, Homo sapiens
gtcatggagatggaaaaggagttcgagcagatcgacaagtccgggagctgggcggccatttaccagatccctgcatgtcactgagtc

SEQ ID NO: 702413 - DNA, 74 bp, Homo sapiens
ctgactttcagctatggaatcgggaagcagagactttcaaggaacaaggaaatgcatactatgccaagaaagat

SEQ ID NO: 702414 - DNA, 82 bp, Homo sapiens
ggacttacgaggagcagtttaagcagcaggttacgggcaggacttgagtggcttcggacagggcttctcagaccccagccag

SEQ ID NO: 702415 - DNA, 51 bp, Homo sapiens
atcgcaactgggcccgcgcgcagaaatcatgttgttgatgtcagtgttgcg

SEQ ID NO: 702416 - DNA, 100 bp, Homo sapiens
agcctcaaactcccaggctcaagcaatcctaccatgtcagccttcccagtagctggaactacaggagcagaacccttccagtgtccctgtgcaagcccag

SEQ ID NO: 702417 - DNA, 100 bp, Homo sapiens
cacctcgccctgctcccagctctactccaggccccgtccgcccgggggcgccgcccaccgcgcctcgctcgatctgactgcagccatgagcagcaatgag

SEQ ID NO: 702418 - DNA, 90 bp, Homo sapiens
aatgatccaaatagtaacccaaagatcgtgcagctcttggcaggagtagctgatcaaaccaaggatgggagccggtgaaacctgaagaag

SEQ ID NO: 702419 - DNA, 75 bp, Homo sapiens
agtggcgtcctggagccctcctcagcggtttccaacctagatgaggaaagccgatggacagtccactacactgcc

SEQ ID NO: 702420 - DNA, 75 bp, Homo sapiens
cctctagagcactgtgtgtctccccggacgcgagcccgctcccctgagctgcctgctgtttcccggggagatcat

SEQ ID NO: 702421 - DNA, 100 bp, Homo sapiens
ctgccaccattgctgaacggagaggtagccatgatgccccacttggtgaatggagatgcagctcagcaggttttgagcaaaattttggactgtgaagcaa

SEQ ID NO: 702422 - DNA, 87 bp, Homo sapiens
ctggttgccttggtaggcaataaaagtgctggagaatctggtaaaagcaccattgtgaagcagatgaggatcctgcatgttaatggg

SEQ ID NO: 702423 - DNA, 82 bp, Homo sapiens
ctcccgctgccgctgccgctccaggagacagacggagtttcgctcttgatgcccagcaggctggagtgcaatggcgcgattt

SEQ ID NO: 702424 - DNA, 100 bp, Homo sapiens
ggggctttgccattgtgtattacctcattcaaagtaacctggatggagaggaccatgccgcagagcgaacggtggaggatgttttccttcgcaagttcat

SEQ ID NO: 702425 - DNA, 74 bp, Homo sapiens
cagcccccggggcaagagcaggagcccggcaccccccgccgacaaggaggggtgtccgcaatgttgccagtgtc

SEQ ID NO: 702426 - DNA, 74 bp, Homo sapiens
catgggacaaaaagagatgatggccaagcaaggatgaaacaagtgaagatgctaactgtcttgctttgagtgga

SEQ ID NO: 702427 - DNA, 101 bp, Homo sapiens
ccgggagagaatacacagagccagttgcaaaagcttctcatttcagagagatgccaggatcctaagtgcctgccaaacttaccaattctaaggaataagtg

SEQ ID NO: 702428 - DNA, 83 bp, Homo sapiens
gtaacagcagcgccgtcccgtccgacagccaggcccgggagaacaattctgtggtgttcttggtcacacatttatggagtttc

SEQ ID NO: 702429 - DNA, 82 bp, Homo sapiens
ctggccacttgcttgggatcctttatcctggtcatcttctatttccaaatatgccaccacgggctgttccctgaccctgcac

SEQ ID NO: 702430 - DNA, 98 bp, Homo sapiens
caggaagcgagggatggaggttgtgcaggaagacaactgttagttttgtggcttactgctgctccacccagtgtctgcagacttttgacctgctgagt

SEQ ID NO: 702431 - DNA, 50 bp, Homo sapiens
ctctgcacctcgcgccccagcagagatgtggtcttgctatgttgcccaag

SEQ ID NO: 702432 - DNA, 100 bp, Homo sapiens
aggctggaaaagctgaagctggagttggagagccgccacagcctggaggagcgcctgcagcagatccgagagctcctggtaacgtttttatccatggatg

SEQ ID NO: 702433 - DNA, 100 bp, Homo sapiens
ggctttgtacggcttagaggacttccctttggatgtagcaaggaagaaattgttcagttcttctcaggtggaggtggaggaagcgtccctgggatcgaga

SEQ ID NO: 702434 - DNA, 82 bp, Homo sapiens
cttcttccagggactcagcacctggcaggttgcccccaagtttcctggcagtgtgtgatactgaggaggtgagcttgtttct

SEQ ID NO: 702435 - DNA, 100 bp, Homo sapiens
gggataaatttacggagaaatggcagcacacgttgaattctgcttggtcagaatcgtgatggcattgtgttcagcactgatgactattttcaccatcaag

SEQ ID NO: 702436 - DNA, 99 bp, Homo sapiens
aagactttgtagccatcaacccgagtgcagtttcgatggaaaatgaagaaatacaggtatcaggatgaagatacacctcctcaagagcatatttcccca

SEQ ID NO: 702437 - DNA, 100 bp, Homo sapiens
atgtaaacagattaaaacgagaaattgagaaaaggagaggagcacagattcaggcagcaactgtggatttcttcaatcagatcaacatgctttatggaac

SEQ ID NO: 702438 - DNA, 75 bp, Homo sapiens
ctgtgcagggcggtggtgggaatacatgccaagtgctcttccaccaaagccacctaagccaatgacttcagcagt

SEQ ID NO: 702439 - DNA, 100 bp, Homo sapiens
tgaggcatggccttgttctccagctgagaggacgatcgtccttataggagaggccgagtctccgagggcaatttcagagttggaggtccccctccccact

SEQ ID NO: 702440 - DNA, 75 bp, Homo sapiens
atccaggagaaccacgacgagacctacggcgtgccctccctggaggagctggagacggggtttcgccatgttggc

SEQ ID NO: 702441 - DNA, 97 bp, Homo sapiens
tttaccaacccttggggagctgatctatcttgtagccacccaggaaccctgcctacgccatgaggacaggcccaggctagccttcggatgatgagag

SEQ ID NO: 702442 - DNA, 74 bp, Homo sapiens
ccccgggagcgggcgcccagaggtttgaggaactactggccaacctactaaatgaacaacatcagatagcgaag

SEQ ID NO: 702443 - DNA, 75 bp, Homo sapiens
aatactcttcagcaggcctcccaagcccaggtggacaaggtgtattccgaacttaagtaccacccagagatgaga

SEQ ID NO: 702444 - DNA, 100 bp, Homo sapiens
aaagacatcaccatgaacactagcatcaagtccatcatctccagaaccagctagtcttcctgcagaagatattagtgcaaactccaatggcccaaaaccc

SEQ ID NO: 702445 - DNA, 100 bp, Homo sapiens
caacaagtttagggagtccatggccagaaaacttttggggtgcaatggatgagcttcatagtctggatccaagaaggcaagagttattggaagctagatt

SEQ ID NO: 702446 - DNA, 50 bp, Homo sapiens
ctcctccacaggggagacagagcttccagggaaaaagacaactaaacttt

SEQ ID NO: 702447 - DNA, 75 bp, Homo sapiens
tcgcagttggaagcccatggggcaggtctgtccagggttttggtggctggcgaagctgagggcgtgtcagcaggc

SEQ ID NO: 702448 - DNA, 75 bp, Homo sapiens
cgagtttgaagagttccctgccgaagattgttgtgtccactgtatcctggcttgcttgttctgcgaattcctgac

SEQ ID NO: 702449 - DNA, 100 bp, Homo sapiens
ccatcctccagctttgccgccgcgctgcgcaagctcgccaaacaggcggaggagcccagaggtctccacctctgggcaggagagttgccgaccacctcgg

SEQ ID NO: 702450 - DNA, 83 bp, Homo sapiens
gtatctggtgaagtggaaaggatggcccccaaagctaccggctctctgaccagttccacgacatcctcattcgaaagtttgac

SEQ ID NO: 702451 - DNA, 98 bp, Homo sapiens
tgcccgaccaggagctcttcagcctcaacgagggcgtccgaaaaatggctacaaacttcctagcacatgagaagatctggttcgacaagttcaaatat

SEQ ID NO: 702452 - DNA, 75 bp, Homo sapiens
ttccttccacggtagcagtaacctctgaacttcgatatgacctgccagcatcatacaagtttcacaaaaagaaat

SEQ ID NO: 702453 - DNA, 98 bp, Homo sapiens
tgagatcattaccatcagcctgccagcacaggccagccagaagatgacactgagactacaggtttggaaggcggcgttgccatgccaggtgccgaaga

SEQ ID NO: 702454 - DNA, 90 bp, Homo sapiens
caataacaggcggagggtcggcgtagcatgcaatgatgctacctgttctgacccatcatatccgctaccaccaatgcctaatgcatttgg

SEQ ID NO: 702455 - DNA, 83 bp, Homo sapiens
ggactcacagctgatgacctgctgctcgtgctgatctcaggagtacaaaccaccaggaacccgtaaacttcataacattcttg

SEQ ID NO: 702456 - DNA, 90 bp, Homo sapiens
cggaacccgtgggcctgtggactgcagcctcggcggtcagcaggtggaggaactgcaatgtctggtggagaacagaaaccagagaggtac

SEQ ID NO: 702457 - DNA, 75 bp, Homo sapiens
ggagagtctggccttagcacatgcagatgagaagtccttagtgagtgactacagccagagtacctcagatactat

SEQ ID NO: 702458 - DNA, 75 bp, Homo sapiens
ccccctgccccggaggcgacccctccgccggcctcggccgcggggaagtctcctaaagagcccgaacagctgagg

SEQ ID NO: 702459 - DNA, 50 bp, Homo sapiens
ctcgtgcactttacacacatgagtactacgagatgtcctacggcttgaac

SEQ ID NO: 702460 - DNA, 95 bp, Homo sapiens
gacaatattcgcacccggctgaagtccttcagtgaatctacagacctattttctcaggagctcagcctggccttacttcagtgataaaaggagga

SEQ ID NO: 702461 - DNA, 75 bp, Homo sapiens
gccggaactggagccgaggcgcaggtggcgctggatctaaccatgagctaccctggctatcccccgcccccaggt

SEQ ID NO: 702462 - DNA, 100 bp, Homo sapiens
cgcacactcaccttcgaagacttcaccaccatgcagaagcagcaagatattcaagattaaagcagtgcaattggctgagaaactccttcctgcctttaac

SEQ ID NO: 702463 - DNA, 83 bp, Homo sapiens
gtggatgtcggcgaagccgcgggcgagtttccccctttctagggtgaggatggttctacacagccacccggagttccttagtt

SEQ ID NO: 702464 - DNA, 100 bp, Homo sapiens
gtactcctgaaacaggataataccacacaattggtacaagatgaccaagtaaagggtcctttaagactctttcagaggactaatgcactaacagttcaac

SEQ ID NO: 702465 - DNA, 80 bp, Homo sapiens
ccagaagattgatcatcatatgggttgagcatcgtgcatcaagtcaccagggtggtccattcaagctgcagatttgtttg

SEQ ID NO: 702466 - DNA, 100 bp, Homo sapiens
catgcgctctttgaaagcgccccggaatgacctgtcgcctgccagctctgttttgcacaaagatccaagacaggtgtatctttgtcttcttgaaattggt

SEQ ID NO: 702467 - DNA, 82 bp, Homo sapiens
cagccggctgctcagggtcgccatctggatgcgggagtcatcctgggcagaaggactgagccgccaccggcacggccaggcc

SEQ ID NO: 702468 - DNA, 87 bp, Homo sapiens
cgccctgtcgtctgtgttgtgactgctttggacgtgggagtcacctgaaagccaggaaatgagacaagaggagcagcagcggcaccg

SEQ ID NO: 702469 - DNA, 100 bp, Homo sapiens
aaatcaagcttggaatgatcatcaaacagctatggtgatgattagagacatactaatgtacatggttttgcactgattgcaaaaataaagtcctccgagc

SEQ ID NO: 702470 - DNA, 100 bp, Homo sapiens
cctgagtgtgagcagagctctgccaggcagaaggcctctctcctgatacagcaggcgctcaccatgttccctggagattgggtttgtgctgttcccacct

SEQ ID NO: 702471 - DNA, 100 bp, Homo sapiens
agaagtttggcaaattggctaagttcctacagctagaatgttacgttcataacttactaaggattagtgtatattttccaaccttgaggcatgaaattct

SEQ ID NO: 702472 - DNA, 101 bp, Homo sapiens
aggcgcttcaaggagttcctgcggcagtaccgagtgggcaccgaccgcacgggcttcaccttcaaatacaggcctgtggactttctcctcgagacattacc

SEQ ID NO: 702473 - DNA, 75 bp, Homo sapiens
cccgggccactgtctgtgaagcagccgccctggagaaacagatcgccatccagtccaatggatcagatgggcaag

SEQ ID NO: 702474 - DNA, 100 bp, Homo sapiens
ttcactgtgtcttcagaaagatccttccaaaaggatgaccagtgtcccagtgaaggaacgagtgaaggtgtctcagaactggagactggggcgctgccga

SEQ ID NO: 702475 - DNA, 71 bp, Homo sapiens
gtaaccagacagggcagatgacagctggatttcttgactggccacagcttcgcctcaacagcatcaagaag

SEQ ID NO: 702476 - DNA, 90 bp, Homo sapiens
gagatggtggatgaacccacagtggatatcaaagtattgcagagtgccttagcagccatccgacatgcccgctggttcgaggaaaatgct

SEQ ID NO: 702477 - DNA, 87 bp, Homo sapiens
ccaggaactgtcggaacagaaccaaaggctattggatcagctcagcaggccaatggagatcttcgtggatgatgagacgaagttgac

SEQ ID NO: 702478 - DNA, 97 bp, Homo sapiens
tgctcagatcaaatggatttcagaggcctaggaaggattttcaaagatggccgccaagaacgagtcatgtttgacaaaattacatctcgaatccaga

SEQ ID NO: 702479 - DNA, 80 bp, Homo sapiens
cgccgccatgctgcagatcaaccagtacctcaccgtgctggcctccttggggtgcggccgggtgtgtggcaacattactt

SEQ ID NO: 702480 - DNA, 101 bp, Homo sapiens
gtaactatggccggcctgcggaacgaaagtgaacaggagccgctcttaggcgacacacctggaagcaggcgttgacccggacgacacctataatgagaccc

SEQ ID NO: 702481 - DNA, 75 bp, Homo sapiens
tgtttaatgactttggtgccctcaacatctctcagagacgaaagagttatggtgaatggttgcatggatttgaaa

SEQ ID NO: 702482 - DNA, 96 bp, Homo sapiens
ctctaccatcgatcctatgtggaatgtccgccaccttggcatgacccacgaagacatcgttcaggagtctaagaagtactggcagcagatggaggc

SEQ ID NO: 702483 - DNA, 80 bp, Homo sapiens
caacttgctgggacagctgaacaatgcagatcttcgtgaagactctgactggtaagaccatcaccctcgaggttgagccc

SEQ ID NO: 702484 - DNA, 101 bp, Homo sapiens
cttgtacagagatgtgatgttggagaactatagcaatctggttttcttggggagcccagtggaggcgccctcccgaagcgccactgcccatgctgaccacc

SEQ ID NO: 702485 - DNA, 100 bp, Homo sapiens
ctcgctccgtggccttagctgtgctcgcgctactctctctttctggcctggaggctatccagctcaccacgttctgcgcttttccgagtcggacatatga

SEQ ID NO: 702486 - DNA, 100 bp, Homo sapiens
tttggaacgtcattcattctcgatgtcgtgctaaatcagtgtgtcaaggatgccacaatgccatcgacccagaagtgcagcgggtgacctataacaattt

SEQ ID NO: 702487 - DNA, 50 bp, Homo sapiens
cttctctgtcgacggctatgacagttctgatttggtgttgtactgcgagg

SEQ ID NO: 702488 - DNA, 50 bp, Homo sapiens
ctcagcttggagcaggaggtccaggtgctgggcctcgtgcgggtcccgct

SEQ ID NO: 702489 - DNA, 80 bp, Homo sapiens
tgcctgcaagtcgctgcagacccgtcagcacctgtgattacagaggaaaccacccttcaactggaagatatcattaaaca

SEQ ID NO: 702490 - DNA, 75 bp, Homo sapiens
cacagtgccaatctgccctgtagataaagaggtcatcaaatctcaggaggagggtgcatctgcccggaagactca

SEQ ID NO: 702491 - DNA, 83 bp, Homo sapiens
acatacgagaatggcttgtgaaatcatgcctctgcaaagtgagttggactatggatcaggtactgtgctcagcatcagaaaat

SEQ ID NO: 702492 - DNA, 100 bp, Homo sapiens
gtgggacccgtgagcaagcagcgacgccagcggcggagaaccgacgaaagggagaaggctgagcagaccatctggaaccgtttacatcagcttaaagcct

SEQ ID NO: 702493 - DNA, 100 bp, Homo sapiens
cagtacatgaccctgagactggaaaattgaccacagcacagtacagagtatctaagagtacagtgctgtggataccaatccactttctctgtatgtcatg

SEQ ID NO: 702494 - DNA, 75 bp, Homo sapiens
gtcccaggactgtgcaggggactctgtcacacaaagtgtgggatgctgtctcaggagatgaattgatgaccctgg

SEQ ID NO: 702495 - DNA, 101 bp, Homo sapiens
cagcctcctgagtagccgggattacagaacagaggaagagttcctagatcaagtgaagaggaagctggctcagaccagccctgagaaagacctgttgacca

SEQ ID NO: 702496 - DNA, 98 bp, Homo sapiens
caagcctggaagatgacgtggtgggggacacttcagggtactaccagcggatgttggtggttctccttcaggctggacgactgtggcctcacggaagc

SEQ ID NO: 702497 - DNA, 93 bp, Homo sapiens
ccgaccccgtcccgaccctggccgccccgagcggagcctggaggccagaagcggactcctagaagaggggagcagcaaggatggaatgacagc

SEQ ID NO: 702498 - DNA, 90 bp, Homo sapiens
gcctgttggacttcttacccgagggggtgaacaaagagaagatcacaccactcacgctcaagatggccctgctgtggcaccagtgaccaa

SEQ ID NO: 702499 - DNA, 83 bp, Homo sapiens
caagatggcgtctgctagtagggtcgttcaggtacaatgactcttcttgcttttcacctaagttgaataagcaccctgtgcac

SEQ ID NO: 702500 - DNA, 96 bp, Homo sapiens
ttaggctttggaagtggtcatttcagatgtgattcatctacagcctcagctcataccagccatccaatgcaaggaaggacaacaccaagcccagag

SEQ ID NO: 702501 - DNA, 51 bp, Homo sapiens
ggcggcgaccggcggcgtccgaggaggcctccggtgtggctgtctctgatg

SEQ ID NO: 702502 - DNA, 98 bp, Homo sapiens
cagcgtccatttttggctcagccaaagattttttatcaagcagaaatgcatcgaacaacgagaatcaagatcactgagctaaatccccacctgatgtg

SEQ ID NO: 702503 - DNA, 78 bp, Homo sapiens
gtgtctaattctgctaacctgaaagtaatgcccaaggagggtcacgcagcacaatgccagctctgcccctggaccaac

SEQ ID NO: 702504 - DNA, 75 bp, Homo sapiens
cccaaactggtcacccctcatgacaggaactgtggctgcaccatctgtcttcatcttcccgccatctgatgagca

SEQ ID NO: 702505 - DNA, 100 bp, Homo sapiens
cgggatagtagtcaagatggataaaaagtcctttgaaatggtgctggatgaaattagaaagaggagttggtgccatggaaatagttgctatggatatgaa

SEQ ID NO: 702506 - DNA, 83 bp, Homo sapiens
cccgcgcagcccccggccgcagcgcaggcagcccagcagcagcccctgtcaaagggaacaggaagcagtccacggagggtgac

SEQ ID NO: 702507 - DNA, 106 bp, Homo sapiens
gagctgttcctcccagctacgagctgccccagttgcaagaatgtagtaactctgatcagctacaaggaaaggaggaaagagtaaatgaagaaagtcatctaactga

SEQ ID NO: 702508 - DNA, 90 bp, Homo sapiens
ctggaatcgagagaagactcctcaacaagttgctgcaatgtctgtgtctaatctatcatgaacaaatgccctgaggtagaggagttggtc

SEQ ID NO: 702509 - DNA, 102 bp, Homo sapiens
gctgtttccacgtgcggtgctcgtcgggagtgatcacctaccctacaggagcgattggttacatgggaacaagtgcctttgtccgaaaaatctatactaatg

SEQ ID NO: 702510 - DNA, 90 bp, Homo sapiens
acagagtggggtcatcaccaccccagggatcatcgactctcacccttggcccctagctcaggtgccttgcacaccaagaggcctcaagtg

SEQ ID NO: 702511 - DNA, 100 bp, Homo sapiens
cggcggctgcggcccaatataggtcagtcttccacctccactaccggtgccaaaaaaagggctgccccaaaaggaactaaaagggatccagctttgaatt

SEQ ID NO: 702512 - DNA, 98 bp, Homo sapiens
aaagtttgcagaaaagaatatgagaagctgaaacacactgagagtgacaagcttcaagtccagatccaggcttacctggacaatgtttttgatgtagg

SEQ ID NO: 702513 - DNA, 85 bp, Homo sapiens
agaccctgaagtaaactggatcccctgtaataatcgtaacaggtgtcatggagaaactccagctgggcccagagattctgcagcg

SEQ ID NO: 702514 - DNA, 82 bp, Homo sapiens
tcaccccgcggccgcaccttcccgccttctcaggtttttagaacttcagccataaaaatgggcagaattttccttgatcata

SEQ ID NO: 702515 - DNA, 76 bp, Homo sapiens
gtatgtactgacgggaaaaggaggataagcaagtcgaatttttgtcttacggtgtccccagcgcagccaatcggct

SEQ ID NO: 702516 - DNA, 127 bp, Homo sapiens
taaagtcaggcagagatggcagtgggggctcccgtggcaaaagagaaggaagtgctagcggtggctgcaaggtgtgactgttgtaaatctcaaggaactcttaaagagcgagttcagtggcgtgggg

SEQ ID NO: 702517 - DNA, 74 bp, Homo sapiens
aaggaggagcctgttccagaactgctggaagctgaggaatactcccccagttgcaagaggcgcaggaccgtgga

SEQ ID NO: 702518 - DNA, 98 bp, Homo sapiens
agaatcactgttataatgtacagcagaactgcatgatcaggcagaagaagagttcaacatagagaaaggtcggcttgtgcaaacccaaagactaaaga

SEQ ID NO: 702519 - DNA, 100 bp, Homo sapiens
cagaatctagaagagccatccagatatcctctaaagagagcaatcactacacttatggctgggattttgcgcttagtagttcaatggcccccaggcagac

SEQ ID NO: 702520 - DNA, 74 bp, Homo sapiens
cccgcaagcccagacaatgccggtggaggaatttgtggctggctggatctctgagacgggatttcaccatgttg

SEQ ID NO: 702521 - DNA, 135 bp, Homo sapiens
aaaacatcatcgttttgaagagttctgcgttttgccagtcacctctcaactgtgtgccaaaggtagcacaggcggagtgcagcggaggcccctgccgctgccgtcatgccgttcccgtttgggaagtctcacaaa

SEQ ID NO: 702522 - DNA, 100 bp, Homo sapiens
ctgccctcgtcgatgagcttcaggaatgccaggagcaggatctgcagaagacgcagggctcaagttggattgaatgaacaaatgaaggctgttcgaaaga

SEQ ID NO: 702523 - DNA, 100 bp, Homo sapiens
gacttcctgaagccccctgagaggattttccacaagatttacatccagaggcacgacaatgtgagggttttaggaacaaagccttcctggattgacacat

SEQ ID NO: 702524 - DNA, 51 bp, Homo sapiens
ctgccaacgccccggtggagaagctgagatgacgtccggttgtttgccttc

SEQ ID NO: 702525 - DNA, 98 bp, Homo sapiens
tcagagcagagcaccgaaagtggccactaccagcatgaagagcccaacaattcaaactggtaagaatgattgatgttggctgatattggagtgctcat

SEQ ID NO: 702526 - DNA, 75 bp, Homo sapiens
ggggagcggaaaaggaagtcaccaccgtggcctgcgacgaatcgggaccagtattcacatctgctaagtgatcat

SEQ ID NO: 702527 - DNA, 105 bp, Homo sapiens
cgctactggaggcggcccgcttcctggaatggcaagcgcagcaacaacagagagcacgtggtcaaaatgcagatcttcgtgaaaacccttaccggcaagaccatc

SEQ ID NO: 702528 - DNA, 75 bp, Homo sapiens
ggactgccagctggcgctgcaggctatgtggttgatgttgcagaatgatgagccggaggacttcgttatagctac

SEQ ID NO: 702529 - DNA, 97 bp, Homo sapiens
tccgaggctcgcgggcggcgggcccggaatatgacagatacctagcatctagcaaaataatggcagctgcttaccttgaccccaacttgaatcacac

SEQ ID NO: 702530 - DNA, 76 bp, Homo sapiens
caattctacaaacagaggatcagtagctgctaagaaatttaagtgggtcttcaaacaactctatgataaaggcctt

SEQ ID NO: 702531 - DNA, 50 bp, Homo sapiens
ctccaaagtagctgggaccacaggagcatttcatactactgaagctgaag

SEQ ID NO: 702532 - DNA, 101 bp, Homo sapiens
agctgcagcacgtggacgctgactcggaagtgcaggccgccagatcccacccttggacccccatgaaaatggaaacaatggaacaatcaaagttgagaagc

SEQ ID NO: 702533 - DNA, 100 bp, Homo sapiens
ctgcattttcagaagattgtgattcagcctctactaaagttgtcatccgtggagcaggaaaccagtctccaaaaaaagttggtgatgacattgccaaggc

SEQ ID NO: 702534 - DNA, 82 bp, Homo sapiens
cggcagaagccgagttcaacatcctcctggccaccgactcctacaagttggaatcgaagcctcttaaaatggcagatgactt

SEQ ID NO: 702535 - DNA, 113 bp, Homo sapiens
ccatctggccgggcagtaccttcttcaagagaaatggagcccttctccaaggtatattactcgaggggtttttaaatattgtcaggaaaaagaaggaagctcaacgatatcgg

SEQ ID NO: 702536 - DNA, 166 bp, Homo sapiens
tcaaatctacattatcttctttttactattctagaagattcactttataaaatgtgcatcttaaggagacatactgatatttctcaggagactgcattgcttattgatccaaaaaattcctgttcttcatcccgccagtgggttgctctggttgtgggacatgaac

SEQ ID NO: 702537 - DNA, 75 bp, Homo sapiens
gagctacatgtttgagtacccggagtatcaggttggcttatttggacgtctaggcagttttccagttagagggac

SEQ ID NO: 702538 - DNA, 100 bp, Homo sapiens
gaccaccatcaccgaggacgagatctccaagctccgcaagctggaggcctcgggcaaggggccagacggaatgttgctcttgttgccgaggctggagtgc

SEQ ID NO: 702539 - DNA, 100 bp, Homo sapiens
gaagcaaaagatcagcgaggagcagcagcagctccagcaggcgctggctcctgctcaggtgtttggatttatagcaagttttatgttcctacttgacttt

SEQ ID NO: 702540 - DNA, 75 bp, Homo sapiens
cgccggcctcctcagtgcgaagaagctgcagccgcacctggccaaggaggctggctatgtggctacccccatagc

SEQ ID NO: 702541 - DNA, 82 bp, Homo sapiens
ctcccagctacagagggtaccgggatgcctgcaccattactggtatcattaatgggattggaaattttaagtgcctttgtgg

SEQ ID NO: 702542 - DNA, 75 bp, Homo sapiens
ctgacctcatactcccagtgccagtggataagattgtggaccagctgcagcagttaatgcaggtgtatgacttgg

SEQ ID NO: 702543 - DNA, 75 bp, Homo sapiens
gccgagcctatgccctggcttttgcagaaagaggagcgttagttgttgctagagaccgttggatggcagcttaac

SEQ ID NO: 702544 - DNA, 90 bp, Homo sapiens
gtggatgcaggacaagccactcctccaggtgtgcaactgaggaacatggctcaagaaactaatcacagccaagtgcctatgctttgttcc

SEQ ID NO: 702545 - DNA, 100 bp, Homo sapiens
cagtccgactccgaggacggggaggaggaggaggcggcgcccgcggacgcaggggcgttcaatgttgtcgagatgtccacagaaggaggatttggtggta

SEQ ID NO: 702546 - DNA, 82 bp, Homo sapiens
gcctactacaagtcctcgcacctaaagtcgcacctgcggacgcacacaggtgcgcgcggagccatggttatcatgtcggagt

SEQ ID NO: 702547 - DNA, 98 bp, Homo sapiens
gcaggaatgtatcagggacagtggcggatgtgcactgctacaggactctactatggagtgattctacaaatcaacaatccgtgggtaaaatggaaaaa

SEQ ID NO: 702548 - DNA, 100 bp, Homo sapiens
ggtgtgctgacgacctgctacaacagaaggtaacaagatgctcaactatagtgctcccagtgcagggggttgcctgctggacagaaaggcagtgggcacc

SEQ ID NO: 702549 - DNA, 50 bp, Homo sapiens
catccacattgcacataaagttggggttggccggagacctacgacatgaa

SEQ ID NO: 702550 - DNA, 90 bp, Homo sapiens
gcggcctcggctgaagaaagaaggtgggagcggagagcgcaggcgtgatcaacaggcggtccttcgggtcggagtggacatcggatggtg

SEQ ID NO: 702551 - DNA, 74 bp, Homo sapiens
gtccatgcggaagatcgtcgccacctggatgctggagcttgctgagcgagagcgagaagcggcccttcgtggag

SEQ ID NO: 702552 - DNA, 50 bp, Homo sapiens
taagtgcatctgatgaccatttccgccatggagtcatagttgcagctgac

SEQ ID NO: 702553 - DNA, 100 bp, Homo sapiens
tggaactgctctggcagtcatcgtgcctgaaggagtacatgccctttatgaagatattcttgaggctttggaggaattttttacatcacttgtgaagcaa

SEQ ID NO: 702554 - DNA, 51 bp, Homo sapiens
ctacaatcacctaatgcccacaagaggaagctggcgcgtatggcagccgag

SEQ ID NO: 702555 - DNA, 74 bp, Homo sapiens
tttgacactgttcgtcgtagaatgatgatgcagtccggccggaaaggggttgtggacatcggatacccaaggag

SEQ ID NO: 702556 - DNA, 76 bp, Homo sapiens
ccgggagatgatcctggcggattttcaggtataacccggaaaaatcccagaacacctctttctgatctccagggca

SEQ ID NO: 702557 - DNA, 88 bp, Homo sapiens
aaaacattgtaatggccatcgctggaaacaagtgcgacctctcagatattaggactaatttattattgtgcaactgccagtcctgcgc

SEQ ID NO: 702558 - DNA, 50 bp, Homo sapiens
cccccttccccgcagacgtggcctggaggcacaggtctctctgacagccg

SEQ ID NO: 702559 - DNA, 110 bp, Homo sapiens
aaaccgatctgcccgttgtgtttgtgaaacagagaaagataggcggccatggtccaaccttgaaggcattgattcttgtcaacaataaaattagcaaagttagtcctgga

SEQ ID NO: 702560 - DNA, 74 bp, Homo sapiens
gtttattaaccccacaaccatcacatccaccatgaaagctaagctgctgaaggagtctcgctctcagtcaaaat

SEQ ID NO: 702561 - DNA, 87 bp, Homo sapiens
ctcatggcaccgtgcacgtggtcgtcaacaaccagaatggtcagtctgtagacgttgaagagacattgccatctgaaccagaaaatg

SEQ ID NO: 702562 - DNA, 101 bp, Homo sapiens
ttggacatcaggtaccaactgcactcgttttggcattgcagctaaatatcagttggatcccactgcttccatttctgcccaacagcgccctggaatcctgc

SEQ ID NO: 702563 - DNA, 70 bp, Homo sapiens
ctgtccgcagagggacctgctgtgccatcaacaaggcgtgtgcgtgcagacggagacagtgctgcggcag

SEQ ID NO: 702564 - DNA, 90 bp, Homo sapiens
agcagcagccaataggacatgatccaggaagagcagtaagggactgagctgctgagattgagatggacgtgctggtgtaatcctttcttc

SEQ ID NO: 702565 - DNA, 100 bp, Homo sapiens
caggggtaagcccacctcccctacctggagccggaacacagcatcatcccagtaagctccaaccaggggattcccatcgaaacgtcatcatgtggctgga

SEQ ID NO: 702566 - DNA, 102 bp, Homo sapiens
ggaggagccttctcaagaacagaggtgaaagaacttgtcctggacaacagtcggtcgaatgaaggcaaactcgaaggcctcacagatgaatttgaagaactg

SEQ ID NO: 702567 - DNA, 101 bp, Homo sapiens
ccatgccagaccgtggaagatttaacgaatggggttgtgatggcccaggttcttcaaaagatgagttgatccctgaattttattatctccctgagatgttt

SEQ ID NO: 702568 - DNA, 100 bp, Homo sapiens
tcctatccttacccgacctcagatgctcccttctgctcctgtttcaccagtgatcattaaagaatgggcagcttacaaaggaaagtctcctcaaaccccg

SEQ ID NO: 702569 - DNA, 100 bp, Homo sapiens
gattggtgtgcgcaacatccgggagtttgaggaagaaaaggtgaaacggcagaatgaaatcgccaagaagcgctcctacagaagaagggaaaaaagagct

SEQ ID NO: 702570 - DNA, 100 bp, Homo sapiens
agcaacgccaaatggagatgttttgatccgagaccttaattttgaagacttgcaattgtgaccaaatatattacaaagggctggaaagaagttcatgaat

SEQ ID NO: 702571 - DNA, 100 bp, Homo sapiens
ctggagggcaaggcgggaacactgttggaaaaccttggacagacaattgtccccgatttgggatcactggaaagtcagcatgattttcgaaccccggagt

SEQ ID NO: 702572 - DNA, 75 bp, Homo sapiens
accgagagggaagccccttggatattccagtcgatgtatttgtacaccaagtgaatgaaaactttgccattgatt

SEQ ID NO: 702573 - DNA, 75 bp, Homo sapiens
acggggaccagcagctgtcgccgccgctctcagagaaagcatgggattatggcaaccacagaatctcagtagtac

SEQ ID NO: 702574 - DNA, 87 bp, Homo sapiens
aaccaccgcatcaagagcttcaagaacaagggccgcgatgtggaagatctcattttgcccaacggtggtactccagcaggtacttca

SEQ ID NO: 702575 - DNA, 100 bp, Homo sapiens
cggcttgggagctggctgtgctgcaggaagaggtgaaaaacttcatcacccgagagaacctggaggcacgggtggaagcagcattggactcccggaagaa

SEQ ID NO: 702576 - DNA, 90 bp, Homo sapiens
ctgatggagggcacggaggaagtggaagattctctaaccatggcacaggtagagaaacgtggaggtttgctccggaaatcttcagcctcc

SEQ ID NO: 702577 - DNA, 75 bp, Homo sapiens
gagcagaactacggcgagcggagttgctggagaatgtaaccctaatccataaaccagtgtcgttgcaaccccgtg

SEQ ID NO: 702578 - DNA, 97 bp, Homo sapiens
ggctttacttttgtggtagaccgtctaagagaaggtgatcgtgttgccatcgagcctggtgctccccgagaaaatgatgaattctgcaagatgggcc

SEQ ID NO: 702579 - DNA, 100 bp, Homo sapiens
gctgaggccgagaagcagtacgaagactcctgccgcgtataccaggcatccagccccgatgaggtgcttgtactatttggcagagcggtaaacattttcc

SEQ ID NO: 702580 - DNA, 98 bp, Homo sapiens
ctacacccttctcgttattcagagactgtatacaatttgagagaagagaatagacaactaaggaaagcacaccaagacatacatacacagcttcaaga

SEQ ID NO: 702581 - DNA, 50 bp, Homo sapiens
ggaaaagaactctgtagtgaaaggagttttgagagcaaaatgacaacacc

SEQ ID NO: 702582 - DNA, 75 bp, Homo sapiens
cgagcagatcgacaagtccgggagctgggcggccatttaccagccaaaagcgtttgaacaatacttgaatctgga

SEQ ID NO: 702583 - DNA, 51 bp, Homo sapiens
gagatggacggtcactcagcctatggaggtgtacgaagccatcgacagcag

SEQ ID NO: 702584 - DNA, 75 bp, Homo sapiens
cctgccttgaccaggacttgggactttgcgaaaggatcgcggggcccggagagatgagcaggatgtcctcttggt

SEQ ID NO: 702585 - DNA, 100 bp, Homo sapiens
caaccgcacccctgaatttctccgcaaatttcctgccggcaaggtcccaagcttcagactgctgtgcttagtaagcaagtgagaagcctggggtttggag

SEQ ID NO: 702586 - DNA, 98 bp, Homo sapiens
agagttcaaggaggccttccagctgtttgaccgaacaggctccatggtccccttctcgatgcgcatcttgcacgcggagcttcagcagtacctgggga

SEQ ID NO: 702587 - DNA, 98 bp, Homo sapiens
cagaactaaagaagcagctaaacctcctttctcaagacaaaggggaagctgcagtaaaggaagatgaagaagaagtttcagataagggcagtgattct

SEQ ID NO: 702588 - DNA, 100 bp, Homo sapiens
gagtgatcactctcaatcccgggactcgtcccaagggaattcggtgtatcagatcgccatggtgcattacatcaaacagaagtacccccacctccaggtg

SEQ ID NO: 702589 - DNA, 74 bp, Homo sapiens
gcagccggacatttagccgctcatcttcggtgctggacgtcattgctcctccttatacctctgacttcgtgcaa

SEQ ID NO: 702590 - DNA, 89 bp, Homo sapiens
aacaagggatccattgtctggcaggaggtttttgatgataaagcaaaggttgtaagttctacaaatggagagttaaacacagatgaccc

SEQ ID NO: 702591 - DNA, 101 bp, Homo sapiens
ttttcccgttgaaggtgctaccgctgacgacacccctggtggatggcgaggatgagagcggttggctttgtgagtgaagacgaatacttggaaattcaggg

SEQ ID NO: 702592 - DNA, 82 bp, Homo sapiens
ggatcatgtctgcgagccaggattcccggtgaaaggaaagcaagccaggatggatatttacgacactcaaaccttgggggtt

SEQ ID NO: 702593 - DNA, 74 bp, Homo sapiens
gccgccgtccgcaccgggaccggagaggaagcggagctgtgttggggtggaagaggaggaggcgcccgacatcg

SEQ ID NO: 702594 - DNA, 75 bp, Homo sapiens
ggatgctgagtccggagcgcctagccctaccggactacgagtatctggttttcggctttgtgagaaaccttacca

SEQ ID NO: 702595 - DNA, 100 bp, Homo sapiens
cgagccggggctatttctggcgctggcgcggctccaagaaggcggatcctgtacgacacgtacccactctcggaggagacctggcacacacaccagttca

SEQ ID NO: 702596 - DNA, 75 bp, Homo sapiens
ggcctcccaaagtgctggaattacagttcctgttggctgagtgttggctctagggctggcaccaggcactggaat

SEQ ID NO: 702597 - DNA, 82 bp, Homo sapiens
gccagtcctgacaatgggcagaacgaattcagtgatatcattaagtccagatctgctgcgcaaaccatgcaggatgatttac

SEQ ID NO: 702598 - DNA, 75 bp, Homo sapiens
ggccctgagctcccggcggcgcagcttccaattgaagacttgtgcagtttaacatcccagtcactgcccattgaa

SEQ ID NO: 702599 - DNA, 100 bp, Homo sapiens
tgagcagggcccttgcggagttccgcgtccgaggtgtgaaggcagctgacacacaagagttcaggaccaaactgcacaaagtatttcgtgagatcaccca

SEQ ID NO: 702600 - DNA, 83 bp, Homo sapiens
ctccagatgaaaaactgggagagaaagggaaggaaattatgaccaagtacctcaccccaaagtggatgaggatcgcagtacgg

SEQ ID NO: 702601 - DNA, 83 bp, Homo sapiens
gggccaccacctgcagcacatcagcgaccgcgagatgcccgaaggagcggaaagaatgtcggagcgggccgcggatgacgtca

SEQ ID NO: 702602 - DNA, 75 bp, Homo sapiens
atgaaccgcgccgtgcaactgctcatcctggcctacgtcatcggggagttctgggaaatcgttcattcatttaca

SEQ ID NO: 702603 - DNA, 80 bp, Homo sapiens
cagcctcaggcgtgcgcggacggtgtgcggggtcagttaaatgaaagcatggaccatgggggagttggaccatatgaact

SEQ ID NO: 702604 - DNA, 98 bp, Homo sapiens
gctccctgctcagctcctggggctgctaatgctctgggtctctggtcttgtagatgatactctccaagctgtaaggaagaagtcaaggattaaggaga

SEQ ID NO: 702605 - DNA, 100 bp, Homo sapiens
ccccactataggaaattcctggaataactcttgtgacagaagacattgcattgcctcttatgaagggcttatttcaaaacctttgtccctcagttccagg

SEQ ID NO: 702606 - DNA, 74 bp, Homo sapiens
tgacgtccacgtctaccgcatccctccgcgggctaccaaccgtggctacagacccgggaaaaggagaagatgaa

SEQ ID NO: 702607 - DNA, 73 bp, Homo sapiens
gaaagctggtcacgaagccctcagcattattgtggatgaatataaggattcctacaggaagcaagtagtaatt

SEQ ID NO: 702608 - DNA, 51 bp, Homo sapiens
tgtggctgaagagttccttaagaatgttttgggatttgagattgacgcggt

SEQ ID NO: 702609 - DNA, 99 bp, Homo sapiens
gttctccattgtctgtttcaccagatgtcctcaaaacaaacagacagaagaaggaagtggctaatggtgtctgcttttggggcagagttttcatcggag

SEQ ID NO: 702610 - DNA, 75 bp, Homo sapiens
aaaacatgaccgctgagcccatgagatccagacatttaatgtggatgcaccatgccagaccgtggaagatttaac

SEQ ID NO: 702611 - DNA, 80 bp, Homo sapiens
cgctctccgcaccgcggcttaaatgatgtattttgtgatcgcagcgatgaaaggttctgcggggagtgtctccagccctg

SEQ ID NO: 702612 - DNA, 50 bp, Homo sapiens
gcaactttcagaagtggtcccagatgatgtctcatgctgaaggacaacaa

SEQ ID NO: 702613 - DNA, 90 bp, Homo sapiens
caaatggagaactggtcaaaagtaagcaatggcatcaaccattctcctcctaccctgaatggtgccccatcaccgccacagagattcagc

SEQ ID NO: 702614 - DNA, 100 bp, Homo sapiens
gtccagagcattcagctgtctcaaatgcagtttgggcttcctgtagacacccttttcctgcgcaacagagctgggcctccctttctctaatttccccctt

SEQ ID NO: 702615 - DNA, 90 bp, Homo sapiens
atcaattggataaatgtcgtaatgaaatgatgaccatgactgaggtcatagtaatgggagctaccaatcgtcctcaggaccttgactcgg

SEQ ID NO: 702616 - DNA, 96 bp, Homo sapiens
taaaccattcctgtcttcagctccagagcaaatgcagccctgaggatttggctactgcatataacaacagggggcaaatcaagtacttcagggttg

SEQ ID NO: 702617 - DNA, 75 bp, Homo sapiens
ttacgccctctgccatgatgacgtcagacgcagcaaaggccttcagtcacgctgctggagggcagtggcatgatc

SEQ ID NO: 702618 - DNA, 75 bp, Homo sapiens
ggagaaggtcctgagagggggagagtcaaaatagtcaccttaaccagaaaacccagtttgaaaatccagtggagg

SEQ ID NO: 702619 - DNA, 75 bp, Homo sapiens
cttgcagaaataggaattgctgtgggaaataatgatgtaaagtaagcactatcctttgtactccctcaacgtggc

SEQ ID NO: 702620 - DNA, 75 bp, Homo sapiens
gaagatgtctctcagaaacaaagatcgatgctatagaagacaaacaagggaaggttttttttccttttgcatcat

SEQ ID NO: 702621 - DNA, 51 bp, Homo sapiens
tacttcacaggaattgccattttctgatcatcggatatcatggagtctggc

SEQ ID NO: 702622 - DNA, 96 bp, Homo sapiens
gcggcgcatcccgcgtgcgccatcgcagcacatcttttgcagacctgacagacgctgctgcccgcaacgcggagctgctccgccaggccaagcacg

SEQ ID NO: 702623 - DNA, 82 bp, Homo sapiens
cgagtcaacaaccgcttcgagctgtgtcaacagcatctccaccctggagcctgtgagccggtgccagcgcctgagtgagctg

SEQ ID NO: 702624 - DNA, 75 bp, Homo sapiens
ctggaggaagcacaccctgtcctatgtggacgttggcactgggaagttgaaaacaccacacactgtgagtttgcc

SEQ ID NO: 702625 - DNA, 89 bp, Homo sapiens
cctgggcctcggcctcctgctgctggtcatcatctgtgtggttggattccaaatttctctcagaggagaagctgcactatcgtagtgcc

SEQ ID NO: 702626 - DNA, 73 bp, Homo sapiens
accgggcgggatccgaatgacgtgaggctacggaaacaggccgagaagaacgtggagaagaaaattgacaaat

SEQ ID NO: 702627 - DNA, 83 bp, Homo sapiens
ccgcggcgtcctcggcgctgaaggggttaattcaacagttcaccaccattaccggtttggtgcacctcgatttggaggaagta

SEQ ID NO: 702628 - DNA, 74 bp, Homo sapiens
ggatggagaagcagctgggggccttggctgtaaggacccctaaggatgaaaacacaccatgtcatatcaagcag

SEQ ID NO: 702629 - DNA, 82 bp, Homo sapiens
gctgctcgcggacccagcgctcccggccggacgtcaccccccagtggtgctggggaaatcctcattgacgattcaatttgtt

SEQ ID NO: 702630 - DNA, 75 bp, Homo sapiens
ctttggtagatgagactaacatgtatgaaggtgtaggaagaatttggctgattgcaattctggcccaactcaacc

SEQ ID NO: 702631 - DNA, 51 bp, Homo sapiens
tggcagctgctgagttctcggtgaagcccgcggcgccatggctcacgtcgg

SEQ ID NO: 702632 - DNA, 75 bp, Homo sapiens
tgcctctctccagcagactgcggccgccatggcatcagatgaaggcaaactttttgttggagggctgagttttga

SEQ ID NO: 702633 - DNA, 71 bp, Homo sapiens
ctacatgaaaaaggagttcttctggaaattgaggacctgcaagtgaatcatgggaatttcagattggacct

SEQ ID NO: 702634 - DNA, 100 bp, Homo sapiens
cagacccgtctgcgttaacacaagcggttgctgcctaccaaggctgtcattttataggcatgcctgaatgtgagcccgagggtctcagcggctcctcccg

SEQ ID NO: 702635 - DNA, 125 bp, Homo sapiens
gtgagatgcagagccccagctcctgtctggtctgtgagatgtcctcactgtttcaggagatcatggaagggaagtggttgctgtgtatgttactggtgcttggaactgctattgttgaggctcat

SEQ ID NO: 702636 - DNA, 75 bp, Homo sapiens
tatgagactttctccaagctgatcaagtctctgctggatgaaccgaatcctaacagtccagccaatagccaggca

SEQ ID NO: 702637 - DNA, 75 bp, Homo sapiens
gtgcgcacagcgcttctcttagttctgaactcttaacattcagggatgtggccatagaattctctccagaagagt

SEQ ID NO: 702638 - DNA, 75 bp, Homo sapiens
gatttacctcaggagtttgaaaggttagtggatgacagatgtgtggtgcacccagaggccggggaccttgccaac

SEQ ID NO: 702639 - DNA, 75 bp, Homo sapiens
agtttccaccacctctgtagtgaagacgacaggtaagaatgattgatgttggctgatattggagtgctcattcac

SEQ ID NO: 702640 - DNA, 82 bp, Homo sapiens
agctgcggttgctcctgcctcgagtgcgggctgataggtgttgagttgctgagtgttttgcaccgccttctattgacctgga

SEQ ID NO: 702641 - DNA, 74 bp, Homo sapiens
tccaaaggggtgcctgtgattagtgtaaaaacgtccgggtccaaagagagaatcccaccaaatattttggttgt

SEQ ID NO: 702642 - DNA, 83 bp, Homo sapiens
ctccagcgctgcctggaggagaatcaagagctccgagataccatggcctgggagaccatcctgatggatacactggaggacaa

SEQ ID NO: 702643 - DNA, 100 bp, Homo sapiens
cctcaatgcctccaacctcatctaccccatctttgtcacggaggcatgcatctccccatgtgctatgatgctggctctggtgtacattgaacggctccgg

SEQ ID NO: 702644 - DNA, 90 bp, Homo sapiens
ggcggcggctgtagcggcgtgacaggtgagggtcccgatgtcctggtgtacagcttggactttggtgggcatctgcggatgataaagcga

SEQ ID NO: 702645 - DNA, 92 bp, Homo sapiens
gcccgtctgcttcgggcctctggaatttagcgctcgcccagctagccgcagtatggtttgaagtggtgaacatggatttttctcggcttcac

SEQ ID NO: 702646 - DNA, 75 bp, Homo sapiens
gccggagccgtgtggaccaggaggagcgctatagaagatggtgagatttttgcaagtattaaccagaaggacggt

SEQ ID NO: 702647 - DNA, 75 bp, Homo sapiens
gagcgacagcggcgagcagaactacggcgagcgggttgaagcccctgcccacggtcctcccatccatccaccagc

SEQ ID NO: 702648 - DNA, 75 bp, Homo sapiens
cgctgctcagcgtcctcatgtggggggtaaaccactcgggatgtttcagcagcccctgagaaggaagaggaggaa

SEQ ID NO: 702649 - DNA, 83 bp, Homo sapiens
ggccatgagaaggcagtgggggtctgccatgagggcggccgagcaggcgggctgcatgagacacctatggctgccgatgaagg

SEQ ID NO: 702650 - DNA, 100 bp, Homo sapiens
gcacacgggtgccctcggacagcgccatcacataccgcggctccatcacccactgtactaatggtcacttgatgtgcgctggctgttttatccacctact

SEQ ID NO: 702651 - DNA, 83 bp, Homo sapiens
aaactcccgttgattatgcaaggtagttgatgtcacttggcgatattcctgcaaacatgaagaggtgattgccagaagaacta

SEQ ID NO: 702652 - DNA, 51 bp, Homo sapiens
aaatcatcaatgaagcaagtaagtctctggaaagtacgaggagaatcctgg

SEQ ID NO: 702653 - DNA, 75 bp, Homo sapiens
cattctccttatctcatctgcacaggaagcaggtctaagagccccccaagatgaacccagtggtggagccactgt

SEQ ID NO: 702654 - DNA, 75 bp, Homo sapiens
tcgcggcccgagcggccggaccttgtcttcgtgagaagccctaccactgcaactgggacggctgcggctggaagt

SEQ ID NO: 702655 - DNA, 80 bp, Homo sapiens
cacttgtcttagcagttctcgctgaccgcgctagctggatgctgaaaacgccattcaacagatgggtggccagtggcttg

SEQ ID NO: 702656 - DNA, 75 bp, Homo sapiens
tgaggcggcgcggcagcggagggacggcagtctcgcgcgcactgcctcctaaaccaccaaaacctactactgtag

SEQ ID NO: 702657 - DNA, 83 bp, Homo sapiens
cagcagagatgataacatgtttcaggagcttgaagaaatccgcaaatgtgggatgaaaaacttccgtaacatccaggttgatg

SEQ ID NO: 702658 - DNA, 100 bp, Homo sapiens
gtttaatcccgaggctggtgccaactgccttgtcaaatacagggctcaagtttatatttgataatgggctgcattaaaagtaaagaaaacaaaagtccag

SEQ ID NO: 702659 - DNA, 100 bp, Homo sapiens
gtccccgtacgcctacagtaacggtattagaaaactactcggatgctccaatgacaccaaaacagattctgcaggtcatagaggcagaaggactaaagga

SEQ ID NO: 702660 - DNA, 75 bp, Homo sapiens
taaaagcattcggcagcgtcgtcgcttcactgtggctcatacatggccctagatggtcagaatatttataatgcc

SEQ ID NO: 702661 - DNA, 75 bp, Homo sapiens
tctcgggctcggaacgagactgcacggggtgagcccctccagactccgaataggagatcaagagtttgattcatt

SEQ ID NO: 702662 - DNA, 100 bp, Homo sapiens
gcggatgcgagtggccggagaccagggcccaacataaacaagctttggagacaaacaaccttatgacctgttggccccagactcccggctgaaccctcat

SEQ ID NO: 702663 - DNA, 73 bp, Homo sapiens
gcaaatgcagaggaagaatttttctatgagggtcttgctgtgtcgcccagactggaattcagtggcctgatca

SEQ ID NO: 702664 - DNA, 51 bp, Homo sapiens
gcggactcttcttcgccttcgaaataatcatgggccagactgggaagaaat

SEQ ID NO: 702665 - DNA, 80 bp, Homo sapiens
cagaagaaaagacttgaacaagataaatcccaggaattgaatgatctggcacgggaccctccagcacagtgttcagcagg

SEQ ID NO: 702666 - DNA, 100 bp, Homo sapiens
ctgaagacatcaagaagatcttcgagttcaaagagaccctcggaacggtgagcttgtcggccacagactgctacattgtgcatgagatctacaatgggga

SEQ ID NO: 702667 - DNA, 90 bp, Homo sapiens
cttctgaattgtgctgccttggccaaaagagtgccccaggtgctaaagagctgtgcagaatttgtggaggagtatggagtggtggatggg

SEQ ID NO: 702668 - DNA, 88 bp, Homo sapiens
cgggagtaggagactcagaatcgaatctcttctccctccccttcttgggtctacacggacgtgcagcaggtggccagcagcctcaccc

SEQ ID NO: 702669 - DNA, 51 bp, Homo sapiens
caaggactcatcccaaagcctgatgatgattattctccaccgtctaagaga

SEQ ID NO: 702670 - DNA, 144 bp, Homo sapiens
taaatttgcacatccttcgaaaagctgccaagttgaaaatggacgagtaatcgcctgctttgattcattgaaagtttcgtttataatgtcagcccttatatggagtatcatcctggtggagaagatgaactaatgagagcagca

SEQ ID NO: 702671 - DNA, 83 bp, Homo sapiens
tcccctctcaggacaacccagatgtgcaacaaagtgcgatggtgtccctggccagtgtccttccacctgtccacaagcatggg

SEQ ID NO: 702672 - DNA, 51 bp, Homo sapiens
agtttgtcatgcaggaggagttctcggaagtgttcgccagttactacatga

SEQ ID NO: 702673 - DNA, 100 bp, Homo sapiens
gccggtcggtgcgcctagcggatcggagctgcgcgcggaaccgtgctgccccgccccgctccacccgtgagggctcagggtttggagcggccaccaaggc

SEQ ID NO: 702674 - DNA, 100 bp, Homo sapiens
ccgcgccctgctccctctcagcacctgggcggacgactactgtcagaggatgtaggaatggacatcccctttgaagagggcgtgctgagtcccagtgctg

SEQ ID NO: 702675 - DNA, 100 bp, Homo sapiens
ggttcgggctggttgttccgttgcgagctgcagctgcgatctctgtggtaggcccagggcagctgcaatgactctccgcacggtattattgtcattgcaa

SEQ ID NO: 702676 - DNA, 75 bp, Homo sapiens
tttagggcaaggtatcatctggtggataaagatcatgacaggggctatctgatgggttagagtgcctttgagaag

SEQ ID NO: 702677 - DNA, 82 bp, Homo sapiens
ccggcagcttcgccgttctatggaaaacattgagctcgggctgagtgaggcccagaaaacaaccctttttgctgcacatgta

SEQ ID NO: 702678 - DNA, 80 bp, Homo sapiens
actcgggacgctgcacctcccgcgccgcacggtggacgagagcactgcagcctgtggtgttgaggctcacagcgatgcca

SEQ ID NO: 702679 - DNA, 75 bp, Homo sapiens
gaatcatccacgcacctgcagctctgctgagagagtgcaagccgtgggaagagtcaagtaccattggccaggatc

SEQ ID NO: 702680 - DNA, 116 bp, Homo sapiens
cctgcatctctgcaaactcaacttgctgggccggtgcaactattcgcagtccgagcgagaatggatcttggagaatgtctgaaagtccatgacctggctttaagagcggattatga

SEQ ID NO: 702681 - DNA, 75 bp, Homo sapiens
tggaaactctttgggaaagccactcgaaaagagccgacagttagaatcagaaactgggaccacagaggagcacag

SEQ ID NO: 702682 - DNA, 98 bp, Homo sapiens
ccgcgtcccgctcgctgggagagaggtacctctccttttccctctccctttccctaaggaggatcagctgatttattcggaggatttgctgactttgg

SEQ ID NO: 702683 - DNA, 75 bp, Homo sapiens
ctctccttttccctctccctttccctaaggttgattccaaagatagttctcataactccacaaactctgaatttg

SEQ ID NO: 702684 - DNA, 100 bp, Homo sapiens
cgagaggatgcggagcccgcagaacctccacagtcaagaggacgacattgggtttgcctatcacagatgaacaaatccaggagatgaaatcaaacctgga

SEQ ID NO: 702685 - DNA, 50 bp, Homo sapiens
ccagaatctttaggtaaatgagattttgaagccagcttcataaggctatt

SEQ ID NO: 702686 - DNA, 75 bp, Homo sapiens
cctggcccaatagacaactctgggctattttcaggccaggctaccaacgtctttgtgaacatggaggaggacttc

SEQ ID NO: 702687 - DNA, 100 bp, Homo sapiens
tgaacatcagcgacagctttgagatgacctatagataacgtacctttcaagaacaagtttccgacacagaaaataacctgaaccaaggacccagcttgat

SEQ ID NO: 702688 - DNA, 75 bp, Homo sapiens
aacggggagagtgtcagactactatccaagggcagagcggcttgggtaaatccaccttaatcaacaccctcttca

SEQ ID NO: 702689 - DNA, 75 bp, Homo sapiens
gtcaaggtggcctaccaggaggccaggggtgtcgccatgaacccttaggagaaatcttgagagtggacagcaatt

SEQ ID NO: 702690 - DNA, 82 bp, Homo sapiens
ctggcctggaggctatccagctgtgaacgagctctatgtcgatgacccagacaaggacagcggtggcaagatcgacgtcagt

SEQ ID NO: 702691 - DNA, 100 bp, Homo sapiens
cgcgtcctcagacgcagcgtctagtccctggccatagctccgccgctgcccgagcaaatttttcagaacataaaacaagaatatagtcgttatcagaggt

SEQ ID NO: 702692 - DNA, 75 bp, Homo sapiens
tgcaacagcaatcaaggtggaagccccagcagatctggaaggtagaaaagggaccagatggaaaagccatcgtgg

SEQ ID NO: 702693 - DNA, 73 bp, Homo sapiens
gagaatacaccatcaacattcacaagcgcatccatggagtatccccgtcgaggtcaagatcaagatccaggtc

SEQ ID NO: 702694 - DNA, 88 bp, Homo sapiens
ggaaggaatatatcctgactgattgagctcttgtccctggcaaagcgaaagcgcagtgactctgaggagaaggagccgcctgtgagtc

SEQ ID NO: 702695 - DNA, 75 bp, Homo sapiens
gccggaggagtcagctgtgtgtccagaacgtgccatggagacgcttaacggtggtatcacggaaaacttgacaga

SEQ ID NO: 702696 - DNA, 88 bp, Homo sapiens
aacttccggctggattccaagtccgtcgtggagccagatatagctgagaagtacctgtcggcttcagagtatgggagctccgtggatg

SEQ ID NO: 702697 - DNA, 74 bp, Homo sapiens
gttttgctacaaatggaggaggaggaggacgacgacgatggggatatcgatatttggagttcttacaacatggc

SEQ ID NO: 702698 - DNA, 75 bp, Homo sapiens
ggactgatggtgccattttcttttagtatatttccacagattggacaggtcctaggcctacttacaagcctccag

SEQ ID NO: 702699 - DNA, 83 bp, Homo sapiens
gcaaccgcaacatcgaccagaccatgctctccatcctgctcttcttccacaggttacaagatgttcacctaagattgagacct

SEQ ID NO: 702700 - DNA, 75 bp, Homo sapiens
tcgaaatctcctgacagtgttaatggaagtgaaccaagcattcctcagagctggggtggaaaggagaatggcttt

SEQ ID NO: 702701 - DNA, 50 bp, Homo sapiens
gatcaatcttaccagagggccctcagggtctagacagtttcaaagtgaaa

SEQ ID NO: 702702 - DNA, 96 bp, Homo sapiens
ggcacctgcgcgaagctggccaaagcctgcccagacggctcacctgtgcgggatggaacaaaagtgctctggaactgaacccgcagtatcttccaa

SEQ ID NO: 702703 - DNA, 101 bp, Homo sapiens
cgaggtgagaaccagagccttgcgtttcgggacggagtgcacccttggctacttggacctcctggagcacgtcttggtggctgaagccgacgtagcttctc

SEQ ID NO: 702704 - DNA, 100 bp, Homo sapiens
ccggggcttcctccccggccggcagggtggacggtgggctcgtcaaaatgcagatcttcgtgaaaacccttaccggcaagaccatcacccttgaggtgga

SEQ ID NO: 702705 - DNA, 75 bp, Homo sapiens
gcagaatacagagatatggaatcaggttgcctggcagagcagtggtccggcaagaagggagacacagctgccctg

SEQ ID NO: 702706 - DNA, 90 bp, Homo sapiens
aagaaatccagtatctgagtaatttgcagtactttgctgtgaccaacaacaatgatgactcactggttgtgtggaaggaagtcgatttga

SEQ ID NO: 702707 - DNA, 109 bp, Homo sapiens
cttcatagggacagccgcccctggtgcacacaccctcgtattctcctgcccttccccagaacactctgctccagccaaggtggtgagggcagctgttcctaaacagcgc

SEQ ID NO: 702708 - DNA, 100 bp, Homo sapiens
ctttgatagtcgtaccatatgcagaaggtaaatacggcatcatctgcatggaggatttgattcatgagatctatactgttggaaaacgcttcaaagaggc

SEQ ID NO: 702709 - DNA, 101 bp, Homo sapiens
tttcacaataagagcagaggatggaacacttcagtgcattcaagggttgcaatattatctcatatctttggggctgcttagatttcttttttcaatgcttc

SEQ ID NO: 702710 - DNA, 75 bp, Homo sapiens
ttactgtaccgttagaagtttttgagttagtggatgacagatgtgtggtgcacccagaggccggggaccttgcca

SEQ ID NO: 702711 - DNA, 82 bp, Homo sapiens
gggtcgggccgggcaatgcctcgcgggcgcaatgaatccgcggcagttttatgtgctgaaagagttggccagatgactaaga

SEQ ID NO: 702712 - DNA, 100 bp, Homo sapiens
aatgctggtcccttggataagattcttcatggaagtgttggctatctcacaccaaggagtgggggtacaggtttgcagattccgccagcagcacagcaag

SEQ ID NO: 702713 - DNA, 75 bp, Homo sapiens
gagagacgcacagctaagatgtcaggacatcctggaagctgggaaagggcggaattctccacgagttttgagcag

SEQ ID NO: 702714 - DNA, 98 bp, Homo sapiens
gcctcatcagaaatgttacacacggagtatcaaactctgctgccaagaaaccaccatcatgggttcgggtcccatagaccccaaagaacttctcaagg

SEQ ID NO: 702715 - DNA, 100 bp, Homo sapiens
ctcagacagttggcaagaaaaccccgaggagccctgttccaaagcctcctggaccgtccaagaacaggttcaggagaagtggcacctggtggaggacctg

SEQ ID NO: 702716 - DNA, 100 bp, Homo sapiens
tcccacaccatcgtgcttagcgtctgcctgtctgcaacaccgggaggcaaggagcacctggtctggcagcatcctggtggggaagaagttttaagggaac

SEQ ID NO: 702717 - DNA, 95 bp, Homo sapiens
aagtaaaacttgctgctgatgaagatgatgacgatgatgatgaagaggatgatgatgaagatataggcagatctctccctcatataacggatgtt

SEQ ID NO: 702718 - DNA, 50 bp, Homo sapiens
atgtgaggaaaggcacctccaccaggtacatgtcccagagcaagcacacg

SEQ ID NO: 702719 - DNA, 75 bp, Homo sapiens
gagagagtcaagctgggcagaatctctcgccaagagttcaggattgacttggcctctacttcttgttaaggaaat

SEQ ID NO: 702720 - DNA, 75 bp, Homo sapiens
aggaggctgtgcgggccccgctccgcttcgaatggaccagcatctcagacatgtcgaaaaagatgttttgatccc

SEQ ID NO: 702721 - DNA, 100 bp, Homo sapiens
tgcagagcatgccaagcagggaactggcatccatgaaccttgatatagttgacctgcttaaaaaggccaaggactgtgaattggagaatcaagaggcaca

SEQ ID NO: 702722 - DNA, 51 bp, Homo sapiens
aacaaacctcacagccagagccagaggaacttcaagagcagctgaagatca

SEQ ID NO: 702723 - DNA, 75 bp, Homo sapiens
atcctctcatcttgtcctacctgaagtatgccattagttcccagggcgaggagaccatcctgcagttcagctcag

SEQ ID NO: 702724 - DNA, 82 bp, Homo sapiens
aggaatcagctcttctgttcattccagtccacagcccctcaacagaggtgaaatgacaatggatgctctgttggctcgattg

SEQ ID NO: 702725 - DNA, 94 bp, Homo sapiens
gcccgttcagtttacagttcattttttgcttggtttggaaaaatttcattagagtttcttgcagaacataaattattaggaaacattaaaaatg

SEQ ID NO: 702726 - DNA, 74 bp, Homo sapiens
cccaaactggctcctagtttctctgatgcacagacctgttcctaaacccaaaggaaagaaaaccaaagatatga

SEQ ID NO: 702727 - DNA, 90 bp, Homo sapiens
cgcccgcctcctgcaggtgcccagcagtgcgttcgctgacgtggaaacttcagtgaagatttcatacattggcctcatgacccagagctc

SEQ ID NO: 702728 - DNA, 98 bp, Homo sapiens
gggattgttgcggtgcgctggagccgttgctgatcatctgggctgtgatccacaaacccggttctttgtccctcctaatatcaaacagtggattgcct

SEQ ID NO: 702729 - DNA, 100 bp, Homo sapiens
cagtgtggaaaaccagtggtaaatgtcagctacaggccagcttatgaccagggaattagcttcagtgaagaccagcaaaaggaaaaggatcagcttggca

SEQ ID NO: 702730 - DNA, 100 bp, Homo sapiens
tcgctgcctcctccacccccacacccatccgaaagcagtccaagcggcgctccaacatcttcacggagtggctgagcagtttgccatcgcggaagccaag

SEQ ID NO: 702731 - DNA, 90 bp, Homo sapiens
cgcagccccgggcacggcggaggcagcggagccctgggccatcggtcagtttaggggctggtgcaaaggatgagttgcacattgttgaag

SEQ ID NO: 702732 - DNA, 100 bp, Homo sapiens
gaagggaattattttcatgcagacagcttgtcaagctgtgcagcatcaaagaggcaggagctataatggatttccagttcttaggaacaatttatttgaa

SEQ ID NO: 702733 - DNA, 100 bp, Homo sapiens
tggacctgtgggaagccgcacttacctatgaggccagcaagcggaggtgctgggagcgagttggctggcggctgagtgacagcccatcaatgaaaaagga

SEQ ID NO: 702734 - DNA, 101 bp, Homo sapiens
ctctgggcgactgtgctggcgctgggggcgctggcgggcgttggcgtaggaggtgtctgacttccagcaactgctggcctgtgccagggtgcaagctgagc

SEQ ID NO: 702735 - DNA, 90 bp, Homo sapiens
cggaggatgagcctgcagagcgcgcagtacctccggattaacacagattcctcagatccagaagactgaaatttcctttcgtcctaatga

SEQ ID NO: 702736 - DNA, 97 bp, Homo sapiens
ggagacagatcgcgagcggctgcggaccatttataaccgcgacttcaagatcagccgggaagatttccagaggattccagaacttgccatcaaccca

SEQ ID NO: 702737 - DNA, 75 bp, Homo sapiens
ttctccagcgccctggcctccctcaccttggacacctcgcttgggctgatcagctgaccgaagaacagattgctg

SEQ ID NO: 702738 - DNA, 74 bp, Homo sapiens
tggggaccataactgatgatgtgcgggttcaggaggtacccaaactgaagactgatgggaagaagagttactat

SEQ ID NO: 702739 - DNA, 74 bp, Homo sapiens
gtggaggtggcgaaacgaggaggagataacgcggccttgggctctgagttgagtccacgctccatgagaatgct

SEQ ID NO: 702740 - DNA, 71 bp, Homo sapiens
cgggacacgccctcccccgacggcggcgctaacctctcggtgctggagaatctggtaaaagcaccattgtg

SEQ ID NO: 702741 - DNA, 75 bp, Homo sapiens
gtggttttacgatatccaaataaactgctgcatcttcctcccgtgaggctggccgagctccacgctgatctgaag

SEQ ID NO: 702742 - DNA, 75 bp, Homo sapiens
tgaaatccatcttcatcctaccgctccgcccaaacagtatctcacctccctaaactggttaatagtggcatggaa

SEQ ID NO: 702743 - DNA, 82 bp, Homo sapiens
gacgcggcctcggaccagccatttcggtgtagaagtggcagcacggcaggtcggtcctctcagggtgcgccatcattgtccg

SEQ ID NO: 702744 - DNA, 98 bp, Homo sapiens
tccaacatttttgttattggcaagaactgagcccactcgcaagttggagccatcagtgggatacgccacattttggaagccccagcatcgtgtactta

SEQ ID NO: 702745 - DNA, 75 bp, Homo sapiens
ctcaaggcaagcctattgagttaacacctctgccgctgctaaaagtgtggaaaagccactggcagtgattcaagt

SEQ ID NO: 702746 - DNA, 74 bp, Homo sapiens
tggaatctatgggattttcagctcgatacaatttcacacctgaacaactctgctcatggtgattacatgcaaaa

SEQ ID NO: 702747 - DNA, 50 bp, Homo sapiens
tagatgcttctaaatctgttgatgaacttttctgggagaagaggctacaa

SEQ ID NO: 702748 - DNA, 80 bp, Homo sapiens
ggaaccggaggagaacatcctggaccccaggctgctgatcgccttccagaacagaggccacaagaggaagctgaatgaag

SEQ ID NO: 702749 - DNA, 149 bp, Homo sapiens
gaaccggatttctcttcccagaaacttcaacatctggaacatgtgatggaaaattatactcagtggctgcaaaaaagagacaagagagacacctccaacttcgacaaagagttcaccagacagcctgtggaactgacccccactgataa

SEQ ID NO: 702750 - DNA, 100 bp, Homo sapiens
cacggcccgcgagcgcgccaagctgcagatcgagctgggcaagtgcaaggcggaacacgaccagctgctcctcaagttgtctttgaagcttggtgatgct

SEQ ID NO: 702751 - DNA, 82 bp, Homo sapiens
ggagagctgacaatgatgaatctcagttgctgaataaccatcatgatgatgcctctaaattcatctgtcttctagcaaagcc

SEQ ID NO: 702752 - DNA, 82 bp, Homo sapiens
gttttgcctccggttggggctgctgtttctcttcgccgacggaactgtggctgcaccatctgtcttcatcttcccgccatct

SEQ ID NO: 702753 - DNA, 75 bp, Homo sapiens
ctcctgagtagctggcactacagggacccagcctccaacactgccccgctccagccagagcagctccaagtgttt

SEQ ID NO: 702754 - DNA, 80 bp, Homo sapiens
ctccgaccggctgaggcggcgcggcagcggagggacggcagtctcgcgcgatccacctccgacccttaagccagagactc

SEQ ID NO: 702755 - DNA, 90 bp, Homo sapiens
cttcctcactcgtggctttccgaaggctgctggaacaccagtgtattcagtagcgtggggccctgattcagaaaaggttctttatacagc

SEQ ID NO: 702756 - DNA, 76 bp, Homo sapiens
tcagattggagcatttgtgttgatgaagatgaaagagactgcagtgcctttcttcctgacgtggagtgtggtgaac

SEQ ID NO: 702757 - DNA, 75 bp, Homo sapiens
ggaagacctccagtctataagcccaggaagccgtcttcgaactcaggagaaggcacctgtgttgtgatagttcac

SEQ ID NO: 702758 - DNA, 100 bp, Homo sapiens
aatgcatcttccccagagaaagccaagggtagacatactgtgccttgtatgccacctgcaaaagcagcccgacggccatggaggctgaagagacgatgga

SEQ ID NO: 702759 - DNA, 98 bp, Homo sapiens
cccatttgatgtgactcgtcggcgaatgcaattaggaactgttctgccggaatttgaaaagtgcctcagcacagtcagcagcctccattcaagagttg

SEQ ID NO: 702760 - DNA, 100 bp, Homo sapiens
cctctaccagcagcatgtcaagtttggcaaggtctcggcgcggaagatggccggcggcgtggacggccccatcgggatcccgttccccgaccacagcagc

SEQ ID NO: 702761 - DNA, 100 bp, Homo sapiens
cggtgcctgactttcaggagactagacctcgtaattacattctctcggccagcgcctccgcgctgttccctggacggccgccagtcaagaagctgttgga

SEQ ID NO: 702762 - DNA, 50 bp, Homo sapiens
aacttcaacagaatgtggcaaccagaattataatctgaaggttactctgc

SEQ ID NO: 702763 - DNA, 98 bp, Homo sapiens
ttgactggggggaaaagcgcaatactattgcttccattgctgctggtgtactatattctaccttgtaaatactgttatttgtatatactgtaaatgat

SEQ ID NO: 702764 - DNA, 75 bp, Homo sapiens
cagttggatcttgctcagtctctgtcagaggaagatcccttgattcagaatggacagtttagaagaacctcagaa

SEQ ID NO: 702765 - DNA, 75 bp, Homo sapiens
cctttgggaagcatgtcaccaacccggccttcaccaaactccctcctactcatgaaggttacttctcttgtttgg

SEQ ID NO: 702766 - DNA, 98 bp, Homo sapiens
atgaagttgatggaattacactgtgatacgactgactggaactctaatgatccaggacaaagaagttaccctggagtatgtatcaagcctggattttt

SEQ ID NO: 702767 - DNA, 76 bp, Homo sapiens
gtttcaactgctgtattgcagaacagcctcagcctcctaactctggtgaactggatcctttgtatgtagtagaagt

SEQ ID NO: 702768 - DNA, 110 bp, Homo sapiens
ggacagccttcaggtgcagatccagggaaaccaggtccaccacctcggctggctattgcttgtcaaaaggaccatacctcctgaactgcaggagcagctgaagaccgtaa

SEQ ID NO: 702769 - DNA, 100 bp, Homo sapiens
gattcataacctgctccatgcttgaaaacatggggattggaattcgatgtattgctgtccttgaatattagcccatttgaaaacgcctgggaagttcagc

SEQ ID NO: 702770 - DNA, 98 bp, Homo sapiens
ctgtcagatggagaaataaaagtggccattagtactgtgagcatgaaccttgagccagatgaattatactttgaggaaggtgatattatctacattac

SEQ ID NO: 702771 - DNA, 82 bp, Homo sapiens
cctgagcctactgatcggcgtagtcaagaaacgcttcgttaagggactcaggcagtacgggaagaacttcttcagaattaga

SEQ ID NO: 702772 - DNA, 100 bp, Homo sapiens
gatgaagaagttattcaagatggtttgacagatgaaaaagtgaaggcatatctttctcttcacccccaggtattagatgaatttgtatctgaaagtgtta

SEQ ID NO: 702773 - DNA, 100 bp, Homo sapiens
gtctgggggcgctggcggcctgcgcagccacctcaaggtaaatgaattggtggatgccagagatgtcggccttggtgcttggtttgaagcacacatacat

SEQ ID NO: 702774 - DNA, 96 bp, Homo sapiens
cgtagaccatatgaaaagggtcgcctaatcatcgaatttaagcagagacagggtttcaccgtgttagccaggacggtctcgatcttctgacctcgt

SEQ ID NO: 702775 - DNA, 73 bp, Homo sapiens
cagaagcgggcggcgcgggggagatgggaacttatagaaatgctggcaatttcaagaaaccaaaagttgttac

SEQ ID NO: 702776 - DNA, 82 bp, Homo sapiens
aacccaccaagatccagattgaagctattcctttggccttacaaggagtccttcaataatgttaaacagtggctgcaggaaa

SEQ ID NO: 702777 - DNA, 50 bp, Homo sapiens
tttgggaaagccactcgaaaagccccaagagactgcaaagaatgatgctc

SEQ ID NO: 702778 - DNA, 75 bp, Homo sapiens
ggagaaggggaaggagacgctgcttcacctggtccctcaacaccttacactaagtcaaagcgtggccacagagaa

SEQ ID NO: 702779 - DNA, 50 bp, Homo sapiens
ctaggccttttagaaaacatggaagtggagagactgattttggacctcag

SEQ ID NO: 702780 - DNA, 75 bp, Homo sapiens
cagggcagagcaggaggccccccgagtgccggtggtggtgtgcacattgagccccggtatagacagttcccccag

SEQ ID NO: 702781 - DNA, 100 bp, Homo sapiens
cgaaggggaaggcgcctgaagaggacgaagcagatgcgtagcatttgctgcatgggttaattgagaatagaaatttgcccctggcaaatgcacacacctc

SEQ ID NO: 702782 - DNA, 100 bp, Homo sapiens
tggtggtggctgcagcggcagcagcagcggtagctgcccaaggagggtcagtttgaaaaggaggatcgagctcactgtggagtatccatggagatgtgga

SEQ ID NO: 702783 - DNA, 101 bp, Homo sapiens
agaaaatcaaatggcatccggggatttctgctcacctggagaagggatggaaatacttcaacaagttccaagatgagatgggattctccaacatggaagat

SEQ ID NO: 702784 - DNA, 100 bp, Homo sapiens
ttacgaactgaagaaggccgcctatgacatcgaggtcaacacccgccgagcacaggctgacctggcctatcagcttcagcccccggtccctgagaagcgg

SEQ ID NO: 702785 - DNA, 73 bp, Homo sapiens
ctgagcttcctggagaagaggaagatcctcccaagaaggtgaccacagtgattcaaaaccccatgccgattcg

SEQ ID NO: 702786 - DNA, 74 bp, Homo sapiens
tctccagtcccctgcccctcacaggaatcatttccagcaatggaaagagatggaaggagatccggcgtttctcc

SEQ ID NO: 702787 - DNA, 97 bp, Homo sapiens
ctcatccttttccaccagctaaagatacaaggcagatccaaccatccccaccgtggtcctacgatcagtcctaccaatacctgggatccattgcctc

SEQ ID NO: 702788 - DNA, 104 bp, Homo sapiens
ggaatgtctttcctaccatctaaaatacgaaggtttctggctgggttaatttggagtggcccctggagtcagtttcctacaccatccgaggccccacccagcac

SEQ ID NO: 702789 - DNA, 95 bp, Homo sapiens
aaaatgttctttactactaagcaccgttggtatcctcatggacgcatcatcttctgtgaggctgtggccatctacggcatcatcatggcaattgt

SEQ ID NO: 702790 - DNA, 83 bp, Homo sapiens
tccaggcaggggctggatggcccgccccccacaggttccagcaacagatagaaatgctttaagttcactctggggaaagctgg

SEQ ID NO: 702791 - DNA, 73 bp, Homo sapiens
cttttacgaatgcttttcaagcgaaatcctgcaaacagattaggggacccccggagaccctacccaactgatt

SEQ ID NO: 702792 - DNA, 90 bp, Homo sapiens
gccggggctatttctggcgctggcgcggctccaagaagtacaaaatggttcgttacatcagaaggatacagttcatgacaatgactttga

SEQ ID NO: 702793 - DNA, 100 bp, Homo sapiens
cttcttccacatgaaaaggataaggagctgtgactgatgagaattaaaggccatggatgaagatgggcttgaattacaacaagagccaaactcatttttt

SEQ ID NO: 702794 - DNA, 90 bp, Homo sapiens
gtgactatgtccacctgtttgtggccacattgcactttccacatgcttcaaacatcaccttgtacaagctggtggagctgtctaaggctc

SEQ ID NO: 702795 - DNA, 97 bp, Homo sapiens
atcagaacccgaggctggggacagcgacaccgagggggaggacattttcaccggcgccgcggtggtcgttacaagatgttcacctaagattgagacc

SEQ ID NO: 702796 - DNA, 82 bp, Homo sapiens
ggacctgccggcacgcgactccccccgggcccaaagtctgcgaggaacagaagtgcgaggaggaggtcttcccgctggccat

SEQ ID NO: 702797 - DNA, 121 bp, Homo sapiens
gaaatcctgctttcttttcctcagaactactatattcagtggctaaatggctccctgattcatgggaaatcctcattgacgattcaatttgttgaaggccaatttgtggactcctacgatc

SEQ ID NO: 702798 - DNA, 76 bp, Homo sapiens
ctgcagtaacactccaccatatagacccggctttaccttatatcagccttatacaggatgctgtgttctttgctcc

SEQ ID NO: 702799 - DNA, 100 bp, Homo sapiens
ccgcaggagaagcccccagaaccaggcccccaactcagccatctgcggaggtcaaggaaattccattcttcttctgacagccagacggttagagcttctc

SEQ ID NO: 702800 - DNA, 97 bp, Homo sapiens
cagggctcgacagcctcagcaagctgtgtcatggagaaactccagctgggcccagagattctgcagcgggaaaatccaaggcttatttatgccaggc

SEQ ID NO: 702801 - DNA, 90 bp, Homo sapiens
cgacggcaaaggtgtcgtggtggtcattaagcggagatccggagacccccttcccacagaaagccgactcatgaacagctgtctccaggc

SEQ ID NO: 702802 - DNA, 100 bp, Homo sapiens
ggcctccgtggaggccagattgaagtgagaaagatcagtctaaagaaaaggagaagaaagtgaaaaaaacaattccttcctgggctaccctttctgccag

SEQ ID NO: 702803 - DNA, 90 bp, Homo sapiens
gctgcagaagtgaaccggcaaatgctgcaggaactggtgaacgcaggatgcgaccagccactgccaaaaaatatggtgtctcgtctttgt

SEQ ID NO: 702804 - DNA, 50 bp, Homo sapiens
gtgctttcccgaatctcagaatgccggtattttaagcctggaatattgtg

SEQ ID NO: 702805 - DNA, 101 bp, Homo sapiens
tggatctgagcacggacatgacccagccactgagtgcctacttcatcaactcctcgcataacacctatctcactgtcctggtatctgggatagcaaaggtc

SEQ ID NO: 702806 - DNA, 100 bp, Homo sapiens
tgcgggccctgctggaccagctcatgggcacggctcgggacgtgtcttgggacaaggtgcgcattcctggtgtgctgcagcgattgggagtgacatactt

SEQ ID NO: 702807 - DNA, 74 bp, Homo sapiens
tgcctttttggaattactaaaatgtatgcaggtgggtcatgataactgggtacgtggagttctgttccattctg

SEQ ID NO: 702808 - DNA, 100 bp, Homo sapiens
aatagcagctcagcagtcagaaactgctcgcctcaccacagacgcagcacgtcaaatctgtgagatggcagcctatttcacccactcaaacctgcagcct

SEQ ID NO: 702809 - DNA, 88 bp, Homo sapiens
tcctctcgggagaagcagcgcctgttcccggggcagatccaggttcagctgcagatctgggacacggccggccaggagcggttccgca

SEQ ID NO: 702810 - DNA, 96 bp, Homo sapiens
gaacatcattctcaccaccagtctcttctctgggtgtccgcaatgttgccagtgtctgtctgcagattggctacccaactgttgcatcagtacccc

SEQ ID NO: 702811 - DNA, 50 bp, Homo sapiens
cgaggaccggcccctcatcgtgcagtggaccccgaaggatgactgggctg

SEQ ID NO: 702812 - DNA, 75 bp, Homo sapiens
cgcggtaatgctggtggtctgcatcaccaccggatcaacttcgacaaatagacctggaggaacttgctttgtacc

SEQ ID NO: 702813 - DNA, 100 bp, Homo sapiens
accgcatgtaccagaaaggacaggagacgtccaccaatcccattggagcttgtacctccaggcccatacatccttccaaagctcccaactaccctacaga

SEQ ID NO: 702814 - DNA, 90 bp, Homo sapiens
ctttccgcttcttgaatttctctctgtaaaggagtacttcctcgcgtattgctaaaggaggagttgaccacaccaaaatgagtctacatg

SEQ ID NO: 702815 - DNA, 100 bp, Homo sapiens
gcggagcggcggatctggacacccagcggtctgacatcgcgacgctgctcaaaacctcgctccggaaaggggacacctgttttgtttggctatgccacca

SEQ ID NO: 702816 - DNA, 100 bp, Homo sapiens
tttggaacaacgttcttcaactttgacagagctccttaataagcatttatagtcagtttttggcagcaatagaatcactaaaggcattctgggatgttat

SEQ ID NO: 702817 - DNA, 98 bp, Homo sapiens
tcaaatgcaagtccaagaggaggaggaggcggaggtccaagcggaaaggttcttgatagtccacaatgggtgaaccacagcaagtgagtgcacttcca

SEQ ID NO: 702818 - DNA, 100 bp, Homo sapiens
ccgagaggccgtgcgggacgcgggcgccaggaccggccgaacgcagaggagctgacatggacccaaatcctcgggccgccctggagcgccagcagctccg

SEQ ID NO: 702819 - DNA, 83 bp, Homo sapiens
ccggtactcagacgctggcgggcgcagtttctcacgacgggccgagcctgccactagagcgcctgctcgctgtgcccccgggt

SEQ ID NO: 702820 - DNA, 74 bp, Homo sapiens
aggagattttccttcgggagttgatctctaatgcttctgatgccttggtcctagcacccactcgagaattggct

SEQ ID NO: 702821 - DNA, 101 bp, Homo sapiens
aacaatgagtacaactaccgctgctggaccacaaaccgctgccagaaaaagccacccctgagtgacgacctgcagccttcctcagctgtgtccagccccac

SEQ ID NO: 702822 - DNA, 101 bp, Homo sapiens
gtgacatgctggacccagggctggtgatgactggaaccaagtgtggctacaaccatagtccagaaaaccttctagacaatgatccctcatttttctgtagg

SEQ ID NO: 702823 - DNA, 75 bp, Homo sapiens
cgatccgccgcccgtccacacccgccgccaggaggcaacgcacgggccacaggcatgttcctgcagtatacagtg

SEQ ID NO: 702824 - DNA, 97 bp, Homo sapiens
gcgaatatcgtcatcgttagaagtattctaccttgtaaatactgttatttgtatatactgtaaatgatgacatcggtgggcactaaccgagcccggg

SEQ ID NO: 702825 - DNA, 87 bp, Homo sapiens
gaaattcttcagtgcatcttccagggtcggatcaaagaagggtaagaatgattgatgttggctgatattggagtgctcattcacatg

SEQ ID NO: 702826 - DNA, 50 bp, Homo sapiens
aactcattcaaggttacccagttgcggacaaggcaaaatctcagcaagtt

SEQ ID NO: 702827 - DNA, 75 bp, Homo sapiens
caagtattggtcttaaaacagtaattggagaacttcctccagcttccagtggattccggagtttgaatccacctt

SEQ ID NO: 702828 - DNA, 75 bp, Homo sapiens
ccctgaggccccagaactatcttttcgtgtctgcactgcttggggaggaagatgaagaggcactgcattatttga

SEQ ID NO: 702829 - DNA, 98 bp, Homo sapiens
cggcaccaaggcccccaagccctccttcgtgtcgtacgtacgccctgagacccaacatgagtgaagtttcctgcaagaaacgggacgactatttggaa

SEQ ID NO: 702830 - DNA, 118 bp, Homo sapiens
aggactttcccgcgcaagggggacaggctggactgaaagaggacacgggaagaacaaagacttagactcgagcccccctccatgcgcctgaaggcccgacccagcagccctggctttt

SEQ ID NO: 702831 - DNA, 85 bp, Homo sapiens
cgaaattagccagctccgcctgatcacaaggtttacatctggcacaaacgtagtgaactgccaattgcggagctgacagggcaca

SEQ ID NO: 702832 - DNA, 79 bp, Homo sapiens
gttggtgcacaaaaagacacttatactatgaaagagagattgggtctctccacattgccccggctgctctccaacccct

SEQ ID NO: 702833 - DNA, 100 bp, Homo sapiens
tgcacgtgaataattttccctttagaaggcattcctggatatgcaggcagcataagaggccgagggcgaggtgcagctggcaacagagccccagggccta

SEQ ID NO: 702834 - DNA, 100 bp, Homo sapiens
ctcgtttctggctttgggctacgctgctgattcctgcggccgcggtctacgaagaccaagtgggcaagtttgattgctaccagagattcactgactgcta

SEQ ID NO: 702835 - DNA, 75 bp, Homo sapiens
cgtcgctttgttttcccacgctaggagctaccacaacaggtggcgggacaggcttcattgggacagccctaaccc

SEQ ID NO: 702836 - DNA, 83 bp, Homo sapiens
cgcagttggaagcccatggggcaggtgacttaagagattaaaattaatttggttgctgttggttctgaacaaataatgagttc

SEQ ID NO: 702837 - DNA, 74 bp, Homo sapiens
tgtcgctcgtctacttcctcagcagcaccttcaagcaggacccccgcagcaaacacaagtttaagatccacacg

SEQ ID NO: 702838 - DNA, 101 bp, Homo sapiens
gcggctgaggacatcaccccccggttcaggctgaggcccgcaggtctaagaccaaggaagcacgcaagcgccgtgaagagcgcctccaggccaagaaggag

SEQ ID NO: 702839 - DNA, 75 bp, Homo sapiens
caaaagtccattatgaaactgaatggtagataacgcagatcatctctggaaaggatattgatccgcctcatgtaa

SEQ ID NO: 702840 - DNA, 83 bp, Homo sapiens
ccgagttcaacatcctcctggccaccgactcctacaagtaatctatgccagcaattatgacaatgttagcagaccatgcagct

SEQ ID NO: 702841 - DNA, 100 bp, Homo sapiens
gaacccagatgcgtcatacaatcttggagtcctgcatttggatggcatcttccctggagttcctggaaggaatcaatcattgaaattatgagactatcat

SEQ ID NO: 702842 - DNA, 100 bp, Homo sapiens
tgtcaatggagctggaaaacatcgtggccaacacggtcttgctgaaagccagggaagcaccagaaagtttgatgcaggcattggaagacttagattatct

SEQ ID NO: 702843 - DNA, 100 bp, Homo sapiens
actgaatgagtttcttactcgggagctggctgaagatggctactctggagttgagcctgcctgctccgcttcagcggactctcgctggtctacctgctct

SEQ ID NO: 702844 - DNA, 98 bp, Homo sapiens
tgtgtggcaactttaacatctttgctgaagatgactttatgacccaagaaggctaagcttctatcaccatcagagaaagaaatacccgagcaaaataa

SEQ ID NO: 702845 - DNA, 98 bp, Homo sapiens
tcaagaagggtgaggacattccgttaatggctcctctcgaagatcctgagcgagtgtgaggacgccgacgagatcgagtacctggtggacggctcgtg

SEQ ID NO: 702846 - DNA, 100 bp, Homo sapiens
gggagaagacactgcgtcaagcaggtgccccgaataacacaatgcagatcttcgtgaagactctgactggtaagaccatcaccctcgaggttgagcccag

SEQ ID NO: 702847 - DNA, 100 bp, Homo sapiens
ggcagggaggagaccggcacccagacaggtggcgaaggcagaggagaggagatgaccgccgggttctgctatggcacatggaacaagccatccactccag

SEQ ID NO: 702848 - DNA, 98 bp, Homo sapiens
gggacaactagacttcaagtgatctttcatcccagcatttaaatcaaacggtattgagatggattgggttatgaaacataatggtccaaatgacgcta

SEQ ID NO: 702849 - DNA, 100 bp, Homo sapiens
gctgggccgcctcgtcaacaggaacttagctgtccaagacaagctgctgctatctgcgtgccacttactggtctcactggccaccaccgtgcggcccgtc

SEQ ID NO: 702850 - DNA, 75 bp, Homo sapiens
ctgaaattgaaaaacttagcccatgggacatggaaccaattcctgataatgatttctcgaatgctggcagccaaa

SEQ ID NO: 702851 - DNA, 100 bp, Homo sapiens
ggcataatagtggatccttgaatgttgaagatgtccttaccagctttgacaatacaggaaatgtttagttacatccatatgggagaatagtctccagatc

SEQ ID NO: 702852 - DNA, 101 bp, Homo sapiens
tcggtgtgcctttcaacatcgccagctacgccctgctcacgtacatgattgcgcacatcacgggcctgaagctgttctctggtccaccaagggctatgagg

SEQ ID NO: 702853 - DNA, 51 bp, Homo sapiens
agaagatcaagctacagatatggtgattgtaagtcaggagactttccttcg

SEQ ID NO: 702854 - DNA, 125 bp, Homo sapiens
tgctggaggacgagggccagctgacggagatggtgcagaagatggaggagggacagtatgatttggtgaaatgcctggctcctattcgagaccccaagaccgagcaggatggacatgatattgag

SEQ ID NO: 702855 - DNA, 83 bp, Homo sapiens
aaagaaactagtgaaggcgtttaagaaagaattacatgaacgacagccttcgcaccgacgtcttcgtgcggttccagccagag

SEQ ID NO: 702856 - DNA, 100 bp, Homo sapiens
ttaatatcattaagattctgcttaatgctggggcagaaattaattcaagcagaaaaagtcctacctggagcgaagcgttaaggaagctgaggacaacatc

SEQ ID NO: 702857 - DNA, 100 bp, Homo sapiens
gctgctggagaatatgcagagcgacttgcgcgccttgtcactggagtgcaagaagaaattcccacctgtcaaagagctgtgtcagcgtgttatgatgccg

SEQ ID NO: 702858 - DNA, 131 bp, Homo sapiens
gccaatcgatatgtgggactaagcccaagagacccatccttcctacatcagcaacaggatgaatccttaaagcaattgcaggtagttcatcaaccatggatcttgccaagtgacacagaaagtgaaggagt

SEQ ID NO: 702859 - DNA, 50 bp, Homo sapiens
aagcgactgagtccgcgatggagtgtctccagaacgctatagctatggca

SEQ ID NO: 702860 - DNA, 51 bp, Homo sapiens
ttgtcagtggagagagtggtgctggaaagatcaatgagctgagcaatgttc

SEQ ID NO: 702861 - DNA, 119 bp, Homo sapiens
gccgctctccgagctcgatccgctgctcgcacgggagccagctgggtgccgccgccgcgccgccgtcgctctccaacgccagcgccgcctctcgctcgccgagctccagccgaaggaga

SEQ ID NO: 702862 - DNA, 75 bp, Homo sapiens
gtcctttatatagaagggagagtaggtgggggagtggtactaaggatcaagtatactgttaaaagaaaacaaaaa

SEQ ID NO: 702863 - DNA, 100 bp, Homo sapiens
gtacctcactgcagaggtgctggagctggcagggatgcccgggtagttaaagacatggcaactggaaaatccaaaggctatggttttgtatctttttata

SEQ ID NO: 702864 - DNA, 100 bp, Homo sapiens
taccttggccatgtagaagttgatgaatcaagaggaatgcacatctgtgaagatgctgtaaaaagattgaaagctactgctgcagtaagaatgtcttttc

SEQ ID NO: 702865 - DNA, 97 bp, Homo sapiens
ggcagatactgtgagggctacaagcttctaaataagcacaaagttaagtatgagagagaagctagtaaatactgggacacattttacaagattcata

SEQ ID NO: 702866 - DNA, 99 bp, Homo sapiens
cggaggagctctttgacttcttgcatgcgagggaccattgcccgtcctgggccgccggacacccccgctggggccgatgcccaacagtgacatcgactt

SEQ ID NO: 702867 - DNA, 113 bp, Homo sapiens
gcggcggcggcggcggcggtgccggagcgcgagcagagcggagacccccaggtcctgcgggcgcgccggcagcaaaagtggaccaagaaaccttgacagaaatggtgaaaccc

SEQ ID NO: 702868 - DNA, 100 bp, Homo sapiens
tttatcaaagacaaccaaaagttacaacagttcagagtagtcacagatgtgacattgatgtgtccactgaagccatgtatgctgcaaccagacgagaagg

SEQ ID NO: 702869 - DNA, 80 bp, Homo sapiens
cgctacaaggatggggtggtgaccatcggctgtgtgggccggaaggtggtggtcgtacgctgtgaaggcatcaacatttc

SEQ ID NO: 702870 - DNA, 94 bp, Homo sapiens
tgctggaaaaaatgacatccagcgacaaggactttagattggcggcagtaagcacacaatgaatgatcacctgcatgtcggcagccacgctcac

SEQ ID NO: 702871 - DNA, 50 bp, Homo sapiens
cagtggctggcggtgcctggacgtacaaatgtcaagaccaggaagtggag

SEQ ID NO: 702872 - DNA, 75 bp, Homo sapiens
gtgatgttggagaactacaggaacctggtcttcctgggaagggaaaaggccgaggcatcagcgtgtgaagaccgc

SEQ ID NO: 702873 - DNA, 96 bp, Homo sapiens
ctgtgaggcctacagctctgccggggaggaggaggaggaggaagaggaggagaagatcctgataacttaagtgactctctcttttccggtgatgaa

SEQ ID NO: 702874 - DNA, 74 bp, Homo sapiens
gtttttcaccctcacgctgatgaacttgtacttcacgcagggaacaagggagccgtgggggtgtcgttcatgtt

SEQ ID NO: 702875 - DNA, 96 bp, Homo sapiens
aagctgcgttgccaacgtcacatcccaaaataggtgtgtcggcccagtccttcctccactgtttcacgatggccagcaccgccttcaacctgcagg

SEQ ID NO: 702876 - DNA, 97 bp, Homo sapiens
actcagccgcagctcacagaaggatcacatttcatgtgtgtgtagtcttagaagaagtcttccgggctgcagggctccctcaggcagaggctatgac

SEQ ID NO: 702877 - DNA, 97 bp, Homo sapiens
gattgctactgcacggtgaacctggaccaggaggaggttttcaggaccaaaattgtggaaaagtcactctggtgtttcagtcacctccagtaacacg

SEQ ID NO: 702878 - DNA, 80 bp, Homo sapiens
ctcttctgcctcttgatctccgccaccgtcttcaggccaggctgtctgtccccagaccccagagcacgtccggcaccacc

SEQ ID NO: 702879 - DNA, 142 bp, Homo sapiens
gcagcatcgaccgcatgttcgacaagaatctgcaggacttggtccgcggcatccgtaaccacaaggaggacgagcgggcgatgatgagatctcatttgaccctgatgacatcatcaccaacatcgagatgattgacgacggc

SEQ ID NO: 702880 - DNA, 100 bp, Homo sapiens
gccgcacgagcaccagcctagagccaggaaaaccagtagattcccagacatcgcgaagtgaatctgaaattgtgccaaaagttgctaaaatgactgtatc

SEQ ID NO: 702881 - DNA, 90 bp, Homo sapiens
gtcaaacgcagaaggactgcctcactgagcaaccaagagtatggtggatattgcccgacagacggttgaatttctctacgaagagaatgg

SEQ ID NO: 702882 - DNA, 73 bp, Homo sapiens
gatattccaagtgatgaatgtattaagcacttttctgtagaaggtcagttggaattcagggcattgctattta

SEQ ID NO: 702883 - DNA, 80 bp, Homo sapiens
catcactaaaaattatccctactacaggactgcggacaagggctggcagtacctcctgctgaggaaaagttaggttccag

SEQ ID NO: 702884 - DNA, 114 bp, Homo sapiens
gatgcctgaagtgtagactgctgctagctgaataccatctgggagcataaaggtgacctgaagtgacttttttgaacgaaccattctgtgcaacagccttgtgtggagttgtgc

SEQ ID NO: 702885 - DNA, 98 bp, Homo sapiens
tcaccgacatgttcaagatactgacgtattcctgctgttcccagaagcgaagtggagagcgccagagtaatgggcataatcaccagcaacacccggga

SEQ ID NO: 702886 - DNA, 75 bp, Homo sapiens
tcttgaccatcttcaagcgcctccgctcggtgcccactaacaagggtttccaggcctgaggtgcccgccctggcc

SEQ ID NO: 702887 - DNA, 100 bp, Homo sapiens
ggctataataatagcaaacatcgatggcctactggggataacattcatgcagaacatcagatgttttcaaactgcagtaaacaatcaatctataagacca

SEQ ID NO: 702888 - DNA, 75 bp, Homo sapiens
gctgcttggccatatttgtcactgtgatctccctcttggtgtacaagagccctctggcacaaatggaagaagaaa

SEQ ID NO: 702889 - DNA, 98 bp, Homo sapiens
agcatacaccgagagagtgaggagccagacgacaagcacacactatggcgctgaaacggattaataaggcttgtctggagcgggaaagactactgtga

SEQ ID NO: 702890 - DNA, 51 bp, Homo sapiens
cacgacggggccgacgagacctcaggtattgttgcagcatctggcagtgag

SEQ ID NO: 702891 - DNA, 75 bp, Homo sapiens
ggctctggaacttctgcccagctctccttgatccattacaagattttggcttttctgttgaaaagtgttccaagc

SEQ ID NO: 702892 - DNA, 100 bp, Homo sapiens
ctatctcttctgctggctgggctcaatgccgcggccacagacccctttgcttctgtttttgggaatgaatcatttggaggtggatttgctgacttcagca

SEQ ID NO: 702893 - DNA, 83 bp, Homo sapiens
gcggagcctggcgggcgtgggaacccaggccccgccgaggcggccagctgtttgcagacaaggtcccaaagacagcaggttgg

SEQ ID NO: 702894 - DNA, 75 bp, Homo sapiens
tggactgtcagctgctgtctgggcaaaggttttcttggagcagaagaaaatgttaaaaagtggccttaacatagc

SEQ ID NO: 702895 - DNA, 100 bp, Homo sapiens
cagtcccaacttcgaagaaaagaagaagttcctgaccatcttcaacctgacccacatcagcgctgagaagaggaaaggtccgctgccagccccaagcccc

SEQ ID NO: 702896 - DNA, 100 bp, Homo sapiens
aggcttttaagaaaaaagcaaccaacctgaagaggacctggcagcaataagtttttggtgaaataacaaagaggtaggaactatatccaagcatctggac

SEQ ID NO: 702897 - DNA, 97 bp, Homo sapiens
aggaagtgggggttatggtgggaggagccgatactgagcttcttcctatttgccatggatattaataaggcagcggaaagaagaaatatgaatacgg

SEQ ID NO: 702898 - DNA, 75 bp, Homo sapiens
aacatcatggcgctgcggggaggatgctctggagttttggctgcaagctggcgtggatgggttccaggttcggga

SEQ ID NO: 702899 - DNA, 75 bp, Homo sapiens
ctccaggacacccctgaagccgagaaatggaggccagcaagcgcatctccagccacatccctttgatcatccagt

SEQ ID NO: 702900 - DNA, 82 bp, Homo sapiens
gcaacttatgctccaaacagctaaaccaacttttggccatctgacagatgcttcctttctgtctgaccagcctgagccttac

SEQ ID NO: 702901 - DNA, 88 bp, Homo sapiens
gaaagtttttccaaatattcatctgtacaggattgttaaaatgagtcttcggaagcaaacccctagtgacttcttaaagcaaatcatc

SEQ ID NO: 702902 - DNA, 101 bp, Homo sapiens
tactcgaccaggggcgacggcgtactttgggcttcatcatggaggactacctgcagggttgtcgagctgctctgcagatgctgggctcttgcactgtttgg

SEQ ID NO: 702903 - DNA, 75 bp, Homo sapiens
tggctgcaggcatcattgcgctggccctggaagccaatggatgaggatcgcagtacggaacctgaccgattgcag

SEQ ID NO: 702904 - DNA, 100 bp, Homo sapiens
tttactggagtaggtgttagtaagagttacactgttagaccttatgatagccaagataacgagtgatgagccactcaccaaggatgacatccctgtgttt

SEQ ID NO: 702905 - DNA, 50 bp, Homo sapiens
ccggaaccgcgattcggcgtgtcagcttgacaaaagtaagctgaagccag

SEQ ID NO: 702906 - DNA, 90 bp, Homo sapiens
aaggacgattctgcctggctcttctttgacagcatggccgatcgggatgggcgccaatgcttcggcattagagaaagagattggtccaga

SEQ ID NO: 702907 - DNA, 100 bp, Homo sapiens
gcatgctggagaagctggagttcgaggacgaagggctgtcttcatcggtggaatacaacataatggagttggaacaagaacttgaaaatgtaaagactct

SEQ ID NO: 702908 - DNA, 75 bp, Homo sapiens
agaagttcttcaagaggaaacccaaagtccttggggctcttgatggaaatgtgtatgatcatctcaaggattatt

SEQ ID NO: 702909 - DNA, 100 bp, Homo sapiens
atgaacctattggtgtatgtggccaaatcattcctgtctcataacaacaaactgcagtctacagcttcttaaagttcagcgtgttaacctaacataaaac

SEQ ID NO: 702910 - DNA, 97 bp, Homo sapiens
tggttctcaaatataggcattctgatgggaacttgtgtgttaaagtaacagatgatttagttacagtgatctgacacaaacacagctgaagcaaaca

SEQ ID NO: 702911 - DNA, 100 bp, Homo sapiens
acttccatgaagtagaggacttgataaaggtggtgatctttgtgaagtctgtgcagcggtgcattgccttggcccagctactagtggagcagaacttccc

SEQ ID NO: 702912 - DNA, 80 bp, Homo sapiens
gactcgcggaccggcgtccccggcgcgaagaggctggactcggattcgttgcctgaggccatgtagggcaggaccgggtg

SEQ ID NO: 702913 - DNA, 49 bp, Homo sapiens
gagcttggcctcggcgtcctcgggccctggccaacgtcaacattgggag

SEQ ID NO: 702914 - DNA, 118 bp, Homo sapiens
cgaagctgctggataattttatcccagggtggctgaatcacggaatggcggagtacgtccagcttgttactgaacttcgaatgacaagagccattcagcctcagatcaatgctttttt

SEQ ID NO: 702915 - DNA, 99 bp, Homo sapiens
attcctttccgcttccgggaccctgacctccggcagatgtttggggccatttgtgtaggaccagaaaacatgcagataatgtatccagctatatttgac

SEQ ID NO: 702916 - DNA, 97 bp, Homo sapiens
gcccagtcggcaccggcgaggccgtgctggaacccgggcctcagccgcagccgcagcggggccgacagtaagaacaagagagttggaaagcagttag

SEQ ID NO: 702917 - DNA, 101 bp, Homo sapiens
ggaaattgtattctccgagtcagattggagcatttgtgttgatgaagatgaaagagactgcagctcagatttcttttatccaagatattggaaggctccct

SEQ ID NO: 702918 - DNA, 75 bp, Homo sapiens
gcctaattcaaatgggagcagcggtggaagcgaaggctgctttgctggctctgcaagaaaatggactagacgcaa

SEQ ID NO: 702919 - DNA, 75 bp, Homo sapiens
gaggcgcggcggcaggacgggaaccacgcgagctgcagccagagctgacctgtcctggacgcagcataactaacg

SEQ ID NO: 702920 - DNA, 75 bp, Homo sapiens
gaatgtcatctacgaagaaaactgttttaataattgaaggcctgaaacgcccatgtgccactgactaggaggctt

SEQ ID NO: 702921 - DNA, 75 bp, Homo sapiens
ctgtgacctcgggactcaacacctcggtgtgatcctggtgcacgcctcgttgcgcctgcgcaaccttaagaacaa

SEQ ID NO: 702922 - DNA, 100 bp, Homo sapiens
agcaagatggcgcagacgcagggcacccggaggaaagtctgttactactacgacggaagctattttgccagccacttcattatgggaggagagaagtttg

SEQ ID NO: 702923 - DNA, 75 bp, Homo sapiens
gctatggtgaaacaccactgaagcattgccaagggagccatggacaactgtttggcggccgcagcgctgaatggg

SEQ ID NO: 702924 - DNA, 100 bp, Homo sapiens
ctgctattgaaagagagtatgcacaggtcaacggcagagacttatccagagcaactcatgaccaggctgtggaagctttcaagacagccaaggagcccat

SEQ ID NO: 702925 - DNA, 90 bp, Homo sapiens
ccgagaacatcccctgtgggaccaccggcaccacctgctccaaggccatcaagctcttcgtggagctctggcaggctgccctgagcacgc

SEQ ID NO: 702926 - DNA, 100 bp, Homo sapiens
gatcgcagcctctctaggagcagattacaggttgaatataagctgggattccaagtggacaatgttttggcaatggatatgccccaggtcaacatttctg

SEQ ID NO: 702927 - DNA, 82 bp, Homo sapiens
agccacccgcttaacatcctacctccagtcccagttaaaaagttacagaatgtctgaaggggacagtgtgggagaatccgtc

SEQ ID NO: 702928 - DNA, 82 bp, Homo sapiens
atctcggtgctgcagacggcgagacctcctgcacagcaaaagctggcaggctgacagaggcggcctcaggacggaccttctg

SEQ ID NO: 702929 - DNA, 90 bp, Homo sapiens
gaaatgatttttgttggaagagatgactgtgagctcatgttgcaggagaagctaaaacttacttatgaggaaaagtgtgaaattgaggaa

SEQ ID NO: 702930 - DNA, 74 bp, Homo sapiens
ccggtctctgttccgcaggatgatccatttgaaccacagcgacgtctccccgcgaagaaaagtcgacaacaact

SEQ ID NO: 702931 - DNA, 75 bp, Homo sapiens
aattattccatttgcaacttatccccaacaggtggataatattaatgcagctgtgatggatttgaaaaaaaagaa

SEQ ID NO: 702932 - DNA, 73 bp, Homo sapiens
tggtcaggcgtcaggctagtccgacgaagagtggggtgaagactgtctccttctgttgaagtctttgcctcct

SEQ ID NO: 702933 - DNA, 75 bp, Homo sapiens
ccagctgtgcatggtgcaagcaactgtctattatcctcccagtccacaacgctgaaccgtggctggacgaatgtt

SEQ ID NO: 702934 - DNA, 100 bp, Homo sapiens
ttcccgagctgacgtggcttgaattgggaggggggcagctggagcctcaggcggcagcgcttctaggaagtgctctctggcgtggtggtcatatcgagta

SEQ ID NO: 702935 - DNA, 50 bp, Homo sapiens
atcatgcaagtgtggcaaatgcctcccctggtgaagacacaaactgtcac

SEQ ID NO: 702936 - DNA, 82 bp, Homo sapiens
agaggttatgcgtttgtcactttttgtacaaaagaagcagctcaggaggctgttaaactgtcttcccaagggattgttgaag

SEQ ID NO: 702937 - DNA, 100 bp, Homo sapiens
ttggtgcacaaaaagacacttatactatgaaagaggaggcagcccaatatggcaagaaggtgatggtcctggactttgtcactcccacccctcttggaac

SEQ ID NO: 702938 - DNA, 90 bp, Homo sapiens
gcgggagccgtcacggtgctcaagcgggacgaccctgggacagtctccactggggcagatccagctgaccatccggcacagctcgcagag

SEQ ID NO: 702939 - DNA, 50 bp, Homo sapiens
tcccgagtagctgggactagaggtgcacaccaccacgcccagctaatttt

SEQ ID NO: 702940 - DNA, 80 bp, Homo sapiens
gccgactgaacatcacggtggtacagacaatgcagatcttcgtgaagactctgactggtaagaccatcaccctcgaggtt

SEQ ID NO: 702941 - DNA, 145 bp, Homo sapiens
cagccctggacttcgggaccacagaggtgctgagtgctgcccgattctggatcccactctgcttagctcaggagtggctatgaatctgcatgtaaagactttgtccctcatgacttggaggtccagattcctggaagagtctttt

SEQ ID NO: 702942 - DNA, 100 bp, Homo sapiens
gagaagggcagtggctgtagctgccctttccgtttccagggttccgaccaggagtcttttagtcctgctatacagctgcaccttgtacatcaagctccat

SEQ ID NO: 702943 - DNA, 96 bp, Homo sapiens
cttcggtggactccttcggcagtccacccaccgccgccgcctcccagatggcatgatcaacattgacatgactggagagaagaggtcgttggatct

SEQ ID NO: 702944 - DNA, 101 bp, Homo sapiens
accaagtaccaagtgaagactttgaacgcactcctcagagtccgactctcccacctgctaaggttagtggttacttggatgattgtacctgtgatgttgaa

SEQ ID NO: 702945 - DNA, 122 bp, Homo sapiens
ctggactttcatgttttaaagatggagttcgacagattcctatagaaagcattcctggaattagttatgatgtgattgctcaagcccaatctgggactgggaaaacggccacatttgccata

SEQ ID NO: 702946 - DNA, 96 bp, Homo sapiens
ctctgctcactggtctctttgccgtctcccgcaaacggggattcagcgtccgatcctttggaacagggactcacgtgaagcttccaggaccagctc

SEQ ID NO: 702947 - DNA, 97 bp, Homo sapiens
gagagacgcaataaaccaagcactctagatgccctcaactatgctctccgctgtgtccacagcgttcaagaagcccctgaatgtgacagtgatccgc

SEQ ID NO: 702948 - DNA, 101 bp, Homo sapiens
cgagaggatgcggagcccgcagaacctccacagtcaagaggacggtcaaaatgcagatcttcgtgaaaacccttaccggcaagaccatcacccttgaggtg

SEQ ID NO: 702949 - DNA, 98 bp, Homo sapiens
ggaccttccccttcaactcttttctctcgggcttcatctcttgtgtggggagtttcatcctagcggccggaaatcactgtggaaaatcttcccagtta

SEQ ID NO: 702950 - DNA, 100 bp, Homo sapiens
gccctacggcttctccgccatgcaaggctggcgcgtctccatggaggtcatgccctgaccacagctgcccttcaggaggctggcacggagccacctgggg

SEQ ID NO: 702951 - DNA, 101 bp, Homo sapiens
cacagatgtacctgaaaagtcgtcactctttcaccaaggtgatgagacaaaccatgcttctgccacatcaacacaggactttctggatcaagtgacttctc

SEQ ID NO: 702952 - DNA, 100 bp, Homo sapiens
agacgccaggatttcctggaagcagagaaatgggatcagtgtccttcagtgatgtggctgtgggcttcacccaggaggagtggcagcatctggactctgc

SEQ ID NO: 702953 - DNA, 98 bp, Homo sapiens
aagaccctaaagttcgtcgtcgtcatcgtcgcggtcctgctgccatgcaccgtccaggtgaggttagagctggggcatcgcgcccaactgcgcaagaa

SEQ ID NO: 702954 - DNA, 52 bp, Homo sapiens
gggcccaactggaattccacttacgggtggtcttcaagctgacagagaagct

SEQ ID NO: 702955 - DNA, 75 bp, Homo sapiens
agaggactgggaggagcatgtcaacagtgatcaagggaggacccctggaacacaactaccgattgaagcagttcc

SEQ ID NO: 702956 - DNA, 82 bp, Homo sapiens
tccgcatggtcagtgccatttcgcctttatcgtggtggagtccaccctggctgtggtattgcagaatgtacatcaatgattg

SEQ ID NO: 702957 - DNA, 74 bp, Homo sapiens
atgacctagcaaaagttgatgatcttccccctggctggactctgtgaagctgagcaggagcagatgcggaagat

SEQ ID NO: 702958 - DNA, 83 bp, Homo sapiens
tctcaatatctgtcttcggtggactccttcggcagtccacccaccgccgccgcctcccagcattactctactgactggcagag

SEQ ID NO: 702959 - DNA, 96 bp, Homo sapiens
caatagaaaagcagaaagccgcctcttggtttgcgtcctgcactgaaaggaaatgacggattttgaaacttccattttagaagaatacagtatcaa

SEQ ID NO: 702960 - DNA, 100 bp, Homo sapiens
gctggccggatggaaatcctaatgacagtctccaaattcgcctccatctgtaccatgctcctctggtgcaagtgtggtagctattgacaacaaaatcgag

SEQ ID NO: 702961 - DNA, 75 bp, Homo sapiens
taagaaaaaagctgctgcctatatgaagtctttgagaaaggatgataaggatgccttctatgtggcagacctggg

SEQ ID NO: 702962 - DNA, 83 bp, Homo sapiens
ggacaactacaccatcgtgcctgctatcgccgagttctacaacacgtgtgccgtgcaggtgaagctggagctggggcaccgcg

SEQ ID NO: 702963 - DNA, 98 bp, Homo sapiens
ccctcccttgcatgatggaaacaccatggctgcggcggcccagctctctctgacacaggcttattgtgtaacagaacctggagcaggctctgatgtag

SEQ ID NO: 702964 - DNA, 73 bp, Homo sapiens
aagggaagtcatttctactggacttcatgcttagatacatgtataacaaggaccccaactggtacaaagccaa

SEQ ID NO: 702965 - DNA, 75 bp, Homo sapiens
gatacagagacgatggtcggaatcagatttgaaaatgaaagtatcctgtttgaccaaactcagagatcaattaag

SEQ ID NO: 702966 - DNA, 100 bp, Homo sapiens
gataatctctctattcaagagtttcaaagaaatgaaaatattgatgtcgagatggatggtgacagttctacaacagatgcttctcaactaggaatctctg

SEQ ID NO: 702967 - DNA, 75 bp, Homo sapiens
actttacatcaatgaacatgatttggttgccacaaaggaaacagacagtgcaagatctcgaagtgctccaatgtc

SEQ ID NO: 702968 - DNA, 100 bp, Homo sapiens
tatagcgggagttcattcctttgaaaccacgtcagtaggaagactgaatgtttcaatcttgcctggcatgggagggcaggattgtggtggtgggatttgc

SEQ ID NO: 702969 - DNA, 100 bp, Homo sapiens
aagctgcggcgagtcctgagcggccaggacgacgaggagcagggcctgactgcgcaggcacagttggtggatctgaaatctgaactgacagaaacccaag

SEQ ID NO: 702970 - DNA, 83 bp, Homo sapiens
atgaagagacatgagatggtagctaaacatttagcgttgacagaaggctacgttggggccctgcacgagaatagacacggcag

SEQ ID NO: 702971 - DNA, 101 bp, Homo sapiens
tctgttagacagtgaatgtggaaaggagattgacagtcacaattttgtaataagaaatactcggagatcaattaaactagatggaaaaggagaacccaaag

SEQ ID NO: 702972 - DNA, 75 bp, Homo sapiens
tatacattgtaagaggtgacaacgtcatgtgcaatgaattctcacagatatttcaactgtgtcagtttgtaatgg

SEQ ID NO: 702973 - DNA, 100 bp, Homo sapiens
atcctgcacaggcagacgcgggccagcctcagcaccgacagccgacgcgcagatagcagagccatccttgggatggagtttgacgagaaggacttacgac

SEQ ID NO: 702974 - DNA, 52 bp, Homo sapiens
caagagggatccttcacccgtgtctggccaagactaaggggctgcagagcgg

SEQ ID NO: 702975 - DNA, 90 bp, Homo sapiens
accacctccaggatcaggatgcagagaccgagacatgggtgcccggcaccgcgcccgagcccactccattcagatcatgaaggtggagga

SEQ ID NO: 702976 - DNA, 71 bp, Homo sapiens
agcaacactcaatcctcctcctactgaaccggtttcatgtggacaggtttgcagtaagcattggctactgg

SEQ ID NO: 702977 - DNA, 75 bp, Homo sapiens
gatgacccagaagctgcttatacaacaagagaaaggaaacagattcattgtctgtctgaggatgagttaagttct

SEQ ID NO: 702978 - DNA, 89 bp, Homo sapiens
gagaatccagagaaagatctctgaccactaaatctgtgtgcagactgtgccctgtccacggtgcctcctgcatgtcctgctgccctgag

SEQ ID NO: 702979 - DNA, 95 bp, Homo sapiens
gcggaccctggccaggccaggcccggagcctgccccagccacaggtgctggagaatctggtaaaagcaccattgtgaagcagatgaggatcctgc

SEQ ID NO: 702980 - DNA, 100 bp, Homo sapiens
gtcttcccgcgtccgccgattcctcctccttggtcgccgcgtccttggctggcgtgttcgtgctggccgtgggcagcgccgtctttgatgccatgttcaa

SEQ ID NO: 702981 - DNA, 100 bp, Homo sapiens
catttcaagctttgtgctgcctcttgatctacctctttgtccaggtcagaagacatgtcttcatctacatggcatctttccttacctctatgtgccatac

SEQ ID NO: 702982 - DNA, 89 bp, Homo sapiens
gggccggaaggaacagacccctgtagcggcaataccaagtttccaggcccgaagagcatcccagactattgggactcctctgccctgcc

SEQ ID NO: 702983 - DNA, 100 bp, Homo sapiens
gtccagcctaggttccacccttttctgggaacgtgagtatcaaccaagggactttctccctcgagggtcgggcattgtaacaagacgacctcttgtgctg

SEQ ID NO: 702984 - DNA, 90 bp, Homo sapiens
aggcgaagctggccgagcaggctgagcgatacgacggacctcagcaatggagaatatccccatcatcacaactgtcatcactctgccgca

SEQ ID NO: 702985 - DNA, 100 bp, Homo sapiens
gaaaacaacttcgagggcagagcactgccgccctgcactgtagcagatgcctaaataaagtgtggagcctgaagcagaagttttgggagatgcttgcctt

SEQ ID NO: 702986 - DNA, 75 bp, Homo sapiens
tgcacacaacatacagacccacagagacagcttggatttgctgtgttcaagaaggaagtgtatcttcatacatca

SEQ ID NO: 702987 - DNA, 82 bp, Homo sapiens
gaacttataatcgtcactggatttagcctctagttcgttagtcaaaacgtgaaaaaaaagacctgctttgccctgggaaata

SEQ ID NO: 702988 - DNA, 100 bp, Homo sapiens
gacctaaagggagtcaaaggaacagatttgaccagttttgggccatcaatcggaaactcatggaatatcctgcagaagaaaatggatttcgttatatccc

SEQ ID NO: 702989 - DNA, 75 bp, Homo sapiens
cgcgagcccggccgcggcctgctggtttcaggacctttattgggcttgaggtcacttcagggcatgcccagttcc

SEQ ID NO: 702990 - DNA, 100 bp, Homo sapiens
ggtaaaagttttgaaaacatcagcaaatggcttagaaacatagatgagtacagtgctgtggataccaatccactttctctgtatgtcatgcatccattct

SEQ ID NO: 702991 - DNA, 80 bp, Homo sapiens
accaccgccctggccatctaccatgtgacttcccaagtaagaagcggaagaggagccgctggaaccaagacacaatggaa

SEQ ID NO: 702992 - DNA, 92 bp, Homo sapiens
cccagaccaaggaaaaatccaagtgatggagcagcattttcagaatgatatggaacctagcaaagctgttccactgaatgcatctaagcaag

SEQ ID NO: 702993 - DNA, 51 bp, Homo sapiens
cttattcctgacctgctatgcagactgaacctccattgaatactccagaaa

SEQ ID NO: 702994 - DNA, 100 bp, Homo sapiens
agaagaaatgctgtggcatctgttgtcgcaggtatattgatgggcgcagttcttcatccacccactaatgatcagagatgcaattgaccgtgaagttgaa

SEQ ID NO: 702995 - DNA, 90 bp, Homo sapiens
cagagttgcgacgctcggcggcatagggggcggctccaccgacactacgcggacgcctcctgccgcagtgtctttggtgcaacactaaca

SEQ ID NO: 702996 - DNA, 98 bp, Homo sapiens
gaagctggccaaagcctgcccagacggctcacctgtgcgggatggaacaaaaggtcccgcacagtcgggcatcctggtggaccgcgaggtggtcagcc

SEQ ID NO: 702997 - DNA, 75 bp, Homo sapiens
gcagtggtcgcttcttctccttgagctcaaatgatacttttcccacagcaatgcacattgctgctgcaatagaag

SEQ ID NO: 702998 - DNA, 98 bp, Homo sapiens
ctacaaccttcgatctcctgacgagtgagaagccctacaaatgctcagtgtgcgagtctgcgttcaaccgcaaggacaaactgaagagacacatgttg

SEQ ID NO: 702999 - DNA, 75 bp, Homo sapiens
tctacgtcctggcaggagttgcagaaagcatccacctgtgggaggatcatccagcagctcgtcaacggcatcatc

SEQ ID NO: 703000 - DNA, 75 bp, Homo sapiens
ccaggacaagtcctgcgcttggggatcctctgtacgcccgttcactgagtcgacttcaatgttcctatgaagaac

SEQ ID NO: 703001 - DNA, 100 bp, Homo sapiens
ggaagcctctggaagttctgtcacagctgaggaagccaaaaagggcctattccactagaagcaagatggctgaactcaatactcatgtgaatgtcaagga

SEQ ID NO: 703002 - DNA, 88 bp, Homo sapiens
caaccatcgcagttggaagcccatggggcaggctaccaagcagtttctcgaagagattaacaagtggacagttcagtacaatgtttcc

SEQ ID NO: 703003 - DNA, 75 bp, Homo sapiens
gaccttgcaagaagtactaactatggagtatcggctaagtcaagcttgtatgcgggctacattgagagacctcag

SEQ ID NO: 703004 - DNA, 99 bp, Homo sapiens
aaggaaaatgtcactgtcccattggccatattttaggtgatactgtgcttgtccaccgagttcacagttatttagagcgtcatggtcttatcaacttcg

SEQ ID NO: 703005 - DNA, 50 bp, Homo sapiens
caagagtctcttcattaaccatatggatcctgagcttgaaaaaaaactga

SEQ ID NO: 703006 - DNA, 96 bp, Homo sapiens
tcgggccgccgcagcccgccgaaggcgcggccttcaaagctggagtctgtcctcctaagaaatctgcccagtgccttagatacaagaaacctgagt

SEQ ID NO: 703007 - DNA, 83 bp, Homo sapiens
gtgctggatccggaagaggggaggtgcctcccgcttcaggttttaaaatcaaagatgggaaaatcggagaaaattgcccttcc

SEQ ID NO: 703008 - DNA, 50 bp, Homo sapiens
gctgcggcgcggggaccgctgtgctctcgctcaccatggatgatgatatc

SEQ ID NO: 703009 - DNA, 75 bp, Homo sapiens
ctgaccctgggagacatcgacgcaatggctgccatccggaagaaactggtgattgttggtgatggagcctgtgga

SEQ ID NO: 703010 - DNA, 100 bp, Homo sapiens
tcatccacagcaaggactgtttcctcaaaggcagaatggctaatgcggatctggtgaagtatggtttggctgatgtggtagaaaatcctggtatcatcac

SEQ ID NO: 703011 - DNA, 100 bp, Homo sapiens
tctcgatgaggataacatccctccagaagatgaaacagaagcctatcagttgctgaagaaggccacccttcaggataatacaaatcaaactgaaaacagg

SEQ ID NO: 703012 - DNA, 83 bp, Homo sapiens
ctcgggccgccgggcgcggggctgcggccgcgtcccggaggcgccgccagcacagccaggtgtcgtgaaaactacccctaaaa

SEQ ID NO: 703013 - DNA, 100 bp, Homo sapiens
tgctgctcctgcaagatactgagagattgaagcatgctctggaaatgttcccagaacattgcacgatgcctcctggtactccaaagattcaggtttactc

SEQ ID NO: 703014 - DNA, 82 bp, Homo sapiens
ccgaggcgctcctcttgtcatcccactcagcgccatgtcctggatgttcaagaggaaattcgaaatgagtcccatgactatc

SEQ ID NO: 703015 - DNA, 82 bp, Homo sapiens
aaaacatacaggccggagcttatcaaagaccatagcccagtggcgtaaagctggctaccaggacatgcccgagtatgaaaac

SEQ ID NO: 703016 - DNA, 75 bp, Homo sapiens
ccaggcagaccttgcagtcaaactttactgtctttcacaagcgccttttatatcctgtcaatcatctgtgtcggg

SEQ ID NO: 703017 - DNA, 96 bp, Homo sapiens
taaacctgtgaccacccctgaagaaattgcacagatgagacgtgcaggtaccatcaggaagcagcgggataagctgataaaggaaggaaagtacac

SEQ ID NO: 703018 - DNA, 76 bp, Homo sapiens
tcagcttcagagaatggcagccatttatttgtcccgtgagctgccaaacggaggcccgaagaaaaagaacctgaaa

SEQ ID NO: 703019 - DNA, 98 bp, Homo sapiens
ccagaggatccccagtatgcatctcaagatgtggtgccctacgagacgctgaacaaacgctttcgcgccgctcagaagaacattgaccgggagaccag

SEQ ID NO: 703020 - DNA, 141 bp, Homo sapiens
caacagtaatgtgtttgttcgtctgctgagactcggctccaaggtcacagctcgtaacactggtactaggttttgacaagcttgcatcatgcgtgagtataagctagtcgttcttggctcaggaggcgttggaaagtctgc

SEQ ID NO: 703021 - DNA, 82 bp, Homo sapiens
caggggcaggcctagtttgactctgacagtcctcccactaagtgtcaacagcatctccaccctggagcctgtgagccggtgc

SEQ ID NO: 703022 - DNA, 83 bp, Homo sapiens
gccggggaccaggacagtcgcgaggttcgagtgttgcagagcctgcggggcaagatcttgttatagttttgccgctggactct

SEQ ID NO: 703023 - DNA, 139 bp, Homo sapiens
ggcagctgctgaggaggagccgaagcccaaaaagctgaaggtggaggcgccgcaagcgctgaggcaagagtttgtcgatgcttatgtggattacatattcaataaatcagtggcttccttatttgatgcttttcatgcg

SEQ ID NO: 703024 - DNA, 97 bp, Homo sapiens
ggcagcatggcgtccgtgacgctgagcgaggcggagaaggtgtacatcgtgcatggcgtccaggtgtcctcatgacttctcttgtggaccatgtccg

SEQ ID NO: 703025 - DNA, 82 bp, Homo sapiens
tccccggccccggggtgcaccccgcaagcggagctggagtttgttcagatcatcatcatcgtggtggtgatgatggtgatgg

SEQ ID NO: 703026 - DNA, 83 bp, Homo sapiens
ttttaagaaagtggacaaagagaggagtcagcacaaccagtgtctctgaagaagatgtctcaagtagatattctcgaacagat

SEQ ID NO: 703027 - DNA, 82 bp, Homo sapiens
cccggtacatctgaaagccgggaaatgacctgcctagagctggaacgttacctccagagcgagccctgctatgtttcagcct

SEQ ID NO: 703028 - DNA, 90 bp, Homo sapiens
ggagaatggcgcatgcgcatattcagggcggaaggcgcgctaagagcagaaaacctcggatcaattctcagctggtggcacaacaagtgg

SEQ ID NO: 703029 - DNA, 51 bp, Homo sapiens
acggaaacaaagttattttgctcggaaaaccagtagattcccagacatcgc

SEQ ID NO: 703030 - DNA, 101 bp, Homo sapiens
gaaccgagcgccacctcatgcacctggaattggacatctcggactccaaaatcaggtggtttgtgatgaaaatggttccaagggctatggatttgtacact

SEQ ID NO: 703031 - DNA, 103 bp, Homo sapiens
gtcatgcagggtgtgagcagggctgagatgggcaccgcggatctggggccgtcctcagtgctgcttttgacacaaaaacggggttacgtgtggcagtgaagaa

SEQ ID NO: 703032 - DNA, 74 bp, Homo sapiens
acattaggctttcttccctggcacatcagattgactgagattgtgcattcccatcaagagcaccatggacaacc

SEQ ID NO: 703033 - DNA, 75 bp, Homo sapiens
tcctcatcctggatgaagccaccagcgctttggatgccgagagcgagtatctgtcctgacacagctctccctgag

SEQ ID NO: 703034 - DNA, 100 bp, Homo sapiens
gggaccttcagccgtgaactgatctttaatctcatgaagtacgacagctacagccgcttcttaaagtctgacttgtttttaaaacacaagcgaaccgagg

SEQ ID NO: 703035 - DNA, 100 bp, Homo sapiens
atgtgtctaccctcgcatcggaaggaagttatggagagaaaggtgtggagtccttcacgcagatttccaaagaggcagataaaagcttcgatgatgaaga

SEQ ID NO: 703036 - DNA, 142 bp, Homo sapiens
gcagcgcctagatggctttggtcacggtccagcggtcacctacccccagcaccacctccagcccctgcgcctcgttaacagccaggtccttgcctgctgtgcagtctgatgaaagacttcagcctctgctcaatcacctcag

SEQ ID NO: 703037 - DNA, 98 bp, Homo sapiens
attttccttgacctttaggtgcttttatattcatctcaaaaacaaaattctgaactcaggacttggcaagttgcagatattttattccaaactgccca

SEQ ID NO: 703038 - DNA, 83 bp, Homo sapiens
gccctgcagtacctgcagaaggtctctggagacatcttcagcaggtcccactctatgaccagtgggaggatgtgatgaaaggg

SEQ ID NO: 703039 - DNA, 75 bp, Homo sapiens
gtccaccttcagcgatgcctggatgacttaaaagaaaggcagctgaaaaagttggatgaagatagtttaaccaaa

SEQ ID NO: 703040 - DNA, 83 bp, Homo sapiens
ctacagaccaggcactccgtcagtgagatggcctccaacaagattgctagtgcaactactgctccatcgatcccttcacattt

SEQ ID NO: 703041 - DNA, 75 bp, Homo sapiens
caaatgtaaaaaaccccaccagcaggcaacgccggacggacttcattcacctctcagccacccatccctgcagtc

SEQ ID NO: 703042 - DNA, 98 bp, Homo sapiens
actcctcacatctataaccacaggagctgcactgtgcgatgggagaataagaccatgtactgcatcgtcagtgccttcggactgtctatttgacctgc

SEQ ID NO: 703043 - DNA, 75 bp, Homo sapiens
gttgggtccggccgctctgcgggactctgaggaaaagctcgcaccagacagcacccaagaaaacctcatttggct

SEQ ID NO: 703044 - DNA, 95 bp, Homo sapiens
cagcctggcatggcttctggggacctttacgaggtacggacattgctgcaggagaagaggttgccatcaagcttgaatgtgtcaaaaccaaacac

SEQ ID NO: 703045 - DNA, 100 bp, Homo sapiens
aacaggaggaaaccattcagagggaaatgaataagcgtctaacagaagaacaagccagaaaaacatttgagagagccatgaaactggaacaggagtttac

SEQ ID NO: 703046 - DNA, 75 bp, Homo sapiens
ctccacttttctcattgtgccgccatgggagctgctctgttgatgcttatcggtgctatgacaagcgtctgtggc

SEQ ID NO: 703047 - DNA, 95 bp, Homo sapiens
cggtatgggcccgcctgaccctgggcgccgcgccgcacgagcaccagcctagagccagtgagaaggcaaccaaagtgcaggacatcaaaaacaac

SEQ ID NO: 703048 - DNA, 46 bp, Homo sapiens
gtcatccagcttgtgctcttcataaattgataaagaaggtgtgatt

SEQ ID NO: 703049 - DNA, 100 bp, Homo sapiens
agtggtctgctccggatggctccgcaagtcccccccggagaaaaagttgaagcgttatgtgtggcccacagagcttttgaaaatgatgttgatgccttgt

SEQ ID NO: 703050 - DNA, 157 bp, Homo sapiens
agaaggaggacttgcagaagtaccacaacagggacacctggttccagctgcagcacgtggacgctgactcggaagtgcagatcgcccaggaccacaccgcagcgtaactgcaggcctctcagcgaaaaagggggaaagcaaagacccgggtgtgcat

SEQ ID NO: 703051 - DNA, 98 bp, Homo sapiens
cgcccgaccccgtcccgaccctggccgccccgagcggagcctggaggtttggtgcacctcgatttggaggaagtagggcagggcccttatctggaaag

SEQ ID NO: 703052 - DNA, 100 bp, Homo sapiens
gcttactggtgaaggaatgggacaagacccatctttatgcaaagccagcgttacagtaatgttccagtgccggatggagtgctgtgatgtgccagccgag

SEQ ID NO: 703053 - DNA, 83 bp, Homo sapiens
gtcacttacaacattaatcagatactgcatttaaggaactgtggctgcaccatctgtcttcatcttcccgccatctgatgagc

SEQ ID NO: 703054 - DNA, 75 bp, Homo sapiens
acatgaattgctcagccttgccagcagatgtgtgttaaaagagctagaaacattgggaaaggacttatatggggc

SEQ ID NO: 703055 - DNA, 101 bp, Homo sapiens
atcacgccgagagcacgtacggcctctaccgggtgcccctgagccgaggaacgcaggcggtggtcgtggggaagggaagaggagccccgggagacgacagc

SEQ ID NO: 703056 - DNA, 100 bp, Homo sapiens
tctcctcgcccccctctgcaacgggctcatcaactcctacgaggacaaaagcaacgacttcgtatgggcccagtcatatatgcacagttagaccactccg

SEQ ID NO: 703057 - DNA, 96 bp, Homo sapiens
gatgaggcctgggcctttgtcaggaaatctgcaagcccggaagtttcagaagggtgaaatagtggtgaaaaataacccaaatgaatctgtaactgc

SEQ ID NO: 703058 - DNA, 50 bp, Homo sapiens
cagagtccgactcagacagcgacggagctcagtctgaatattcttggaga

SEQ ID NO: 703059 - DNA, 90 bp, Homo sapiens
aaggcgtgtcccccaaaggctgtccttgcagtagctggaagccaggtggcaattttggaggtagccccggttatggaggaggaagaggag

SEQ ID NO: 703060 - DNA, 50 bp, Homo sapiens
agtaatggtgcaaagcctgaagatgaagtttccaaatgtgtatgtcgctg

SEQ ID NO: 703061 - DNA, 108 bp, Homo sapiens
gctatgtcgagatcccctgtgtggccaagaagctggtgtgcggagatgaaggtcagcccaaggccaaccccactgtcactctgttcccgccctcctctgaggagctcc

SEQ ID NO: 703062 - DNA, 76 bp, Homo sapiens
cccaaggtctcctcggatcgcctggagaggcactcggacctggacccaagtttcttcaccatggggatgtggtcca

SEQ ID NO: 703063 - DNA, 90 bp, Homo sapiens
cctggctccggctgcaccagctgcacacgcctgccacggctgctgatgagaggctgaggggatctggcggtggagcgctaggatcagacg

SEQ ID NO: 703064 - DNA, 101 bp, Homo sapiens
gttttccctgggttggacaacaggatggcatcctgagaaagtcaatgaagatgatgataattccgaagaaggcttccacactattcattcaggaaggcatg

SEQ ID NO: 703065 - DNA, 96 bp, Homo sapiens
caactctgcagtggaccacagcattcctgaaatacatccaggaaagacatggagattctcttaaaaaggtggcagaactggtgaagccattgtaga

SEQ ID NO: 703066 - DNA, 75 bp, Homo sapiens
cggaggtccagagatcctgagagcccgagcgcccagcgccgcgccgggaggatcaaaatacttgctggatggtgg

SEQ ID NO: 703067 - DNA, 90 bp, Homo sapiens
cgtcggcgcaccacgcagatcatcaacatcaccatgaccaagaacctagaagtcggaatccggaagaagatcgaacatgacgtggtgatg

SEQ ID NO: 703068 - DNA, 97 bp, Homo sapiens
ggctttgagaaattttgagtcctcgagtgaatgggcggatctcatatcttcacttggcaaactcaacaagattccatgcaatggaaaagcagctgat

SEQ ID NO: 703069 - DNA, 100 bp, Homo sapiens
tgaaacccaaacaacatctcctgctattccttgggctgcctttcctgcaggagaccaagacacattccaccccagtggggggtcccataccactcatgga

SEQ ID NO: 703070 - DNA, 90 bp, Homo sapiens
cattggcatttttgtcacctccaacaacatccgcgagatcgagttaaatcgtcgatctgaaattgttgctaatagctctggtgaattcat

SEQ ID NO: 703071 - DNA, 82 bp, Homo sapiens
ggagatgaagaagaagattaacctggagttaaggaacagatccccggaggagaacaccttccaccatgaccacctcagcaag

SEQ ID NO: 703072 - DNA, 50 bp, Homo sapiens
ccggagcacccgacccctgagttccgaggtgcaccgattatacccgtggc

SEQ ID NO: 703073 - DNA, 101 bp, Homo sapiens
tggcaagaagttcagcctcaagcatcagctggagacgcactatagggtgcacacaggaaattcagttcatgaagataagaagtttcttgacaaatacatgc

SEQ ID NO: 703074 - DNA, 100 bp, Homo sapiens
tcgccttgtatctcaacaccctgagtgcggatttctgctatgatgacagacaatgcagatcttcgtgaagactctgactggtaagaccatcaccctcgag

SEQ ID NO: 703075 - DNA, 90 bp, Homo sapiens
gctcggccgatgaagtgcagaggtttttttctggctcaagtggtcctgtcgaagtatttatcactgagactccgagtcagcccaactccc

SEQ ID NO: 703076 - DNA, 87 bp, Homo sapiens
ggcatcggagagtgccacattaatggacatatggcatccaggagaaagatgtcttgccccttctccagataatggaaaactttgtga

SEQ ID NO: 703077 - DNA, 90 bp, Homo sapiens
ggactgatattcaaccctcgagccaagccccacaccagtgagaagcatcagcaccgtgaacttgtctgagaatagcagtgttgtcatccc

SEQ ID NO: 703078 - DNA, 139 bp, Homo sapiens
ctactgccccgtctgtcaggaggtgctcaaaacgcccgtgcggaccacggcctgtcagcacgtacatatctcacctcaactctacacaaatccagctaacaccagcccctagtgttcaagacctctgctcaaaaaccac

SEQ ID NO: 703079 - DNA, 90 bp, Homo sapiens
caagtccttggtcaaatgatgcaaccctgcagcatgttttaatgagtgactggaacagcatatgccatatatgagctggctgtggcttca

SEQ ID NO: 703080 - DNA, 100 bp, Homo sapiens
atctccagcgccggcctcctcagtgcgaagaagctgcagccgcacctggccaagggtccacccagagcaggagaagcctgagccgacacccttagtggag

SEQ ID NO: 703081 - DNA, 90 bp, Homo sapiens
ctctcagctgccacctgcctttgacctttttgaagcctttgcaaaaccgagcccaggaagtgcgtcccctccgtggtcgtgggcgtcgtg

SEQ ID NO: 703082 - DNA, 51 bp, Homo sapiens
cctgctccctctcagcacctgggcggacgattttaccaaatgttgcaagaa

SEQ ID NO: 703083 - DNA, 88 bp, Homo sapiens
gcaggtgtgagtgcctgtataaaatattctatgtttaccttcaacttcttgttctggcggaagtgaccgtggtggcttcaataaattt

SEQ ID NO: 703084 - DNA, 100 bp, Homo sapiens
tgggcgagctgggcgacggcgccttcggcaaggtttacaagactggtcgaattgacaaatcttaccctacagtatgtggccacacaggaccagtgctgga

SEQ ID NO: 703085 - DNA, 82 bp, Homo sapiens
gagcatgccctcagcgccatcgaaggaaggggagttcaccctgcacggccgggccatcctggagatggagcaatacatccgg

SEQ ID NO: 703086 - DNA, 80 bp, Homo sapiens
gcttgtcctggctcttgccctcatcctggttctggaatcctcagttcaagaaatccgaagtgccaccagattatgacaaa

SEQ ID NO: 703087 - DNA, 50 bp, Homo sapiens
ctgaacgagagggacacggagcagaacatgttcttcaagtatacatggaa

SEQ ID NO: 703088 - DNA, 50 bp, Homo sapiens
ccggaccaagcgggcccagaagcggttttgatggcgacgactttgatgat

SEQ ID NO: 703089 - DNA, 75 bp, Homo sapiens
aagccggtacaggtgccctgcggacacgtgtgaatggaagagaatccgaagaagaaaatctcaataaatctgaaa

SEQ ID NO: 703090 - DNA, 99 bp, Homo sapiens
gggtgagcttgtttgtgtccctgtgggtggacgtggttggtgattggcaggatcctggtatccgctaacaggttttgacaacttcgagcagctgctctc

SEQ ID NO: 703091 - DNA, 87 bp, Homo sapiens
agcgcaaccacgagacggccttccaaggttatgaagacagtatggagtttccagaccatagtagacatttgctacagtgtctgagcg

SEQ ID NO: 703092 - DNA, 98 bp, Homo sapiens
tcgagcacataacggggttcgggtgtctcgtgtgtgaacatcacagaaccacatttgaatttgggagattccattaggagggattatgaagacctgtg

SEQ ID NO: 703093 - DNA, 83 bp, Homo sapiens
ccaggctgtcatataactcctgagaatagtggttcttaactctggctctctttacctatgaaggcaacagcaatgacatccgc

SEQ ID NO: 703094 - DNA, 50 bp, Homo sapiens
tactgatgttagtgtggacttgccagttgatgaaaaaaccgtaggagaac

SEQ ID NO: 703095 - DNA, 80 bp, Homo sapiens
gagaactctaccctggaggagattctggggcagtatcaacggagtctccgggtgttttccaagcagtgaagcacttgccg

SEQ ID NO: 703096 - DNA, 100 bp, Homo sapiens
cttgggtcctccgagagcagcagcggagtgaaagctggacattgaagaagccaaaatctgtttccaagaaactaaagagtgtattccgagtaccagatct

SEQ ID NO: 703097 - DNA, 73 bp, Homo sapiens
tggctttgagagttatgaggcgcttccccagcacaaactgacctgcttcagagcactgcagtttcctcctgaa

SEQ ID NO: 703098 - DNA, 75 bp, Homo sapiens
gatcatgcagagtattacctttacaagaagctgaaaccccacgtagtgttcttgaagaaattggactgacataac

SEQ ID NO: 703099 - DNA, 82 bp, Homo sapiens
ggcggatgccctgcagtacctgcagaaggtctctggagacatcttcagcaggctcaggccacagggtcaccacatacatcgc

SEQ ID NO: 703100 - DNA, 100 bp, Homo sapiens
cgagcgcgagcggcgcgagaaaagttttgcggcctccaggtggtggatccaatttttcattaggttttgatgaaccaacagaacaacctgtgaggaagaa

SEQ ID NO: 703101 - DNA, 100 bp, Homo sapiens
acggcgttgatatcggtggtaacgacggcctcagcaggcggggaagatgaaagggtgctggagaatctggtaaaagcaccattgtgaagcagatgaggat

SEQ ID NO: 703102 - DNA, 100 bp, Homo sapiens
ctgccccatctgtcgagatcacaagttgcatgttgactttagggaatttgctgacacaatatcttccgcctggtgctgggcatatcctaagaacttacaa

SEQ ID NO: 703103 - DNA, 100 bp, Homo sapiens
tggaggttcgcggctctaacggggctttctacaaggcgttcccacagctgtgcagaacttagcgccacgcgctgctgttgctgctgctgctccccgggct

SEQ ID NO: 703104 - DNA, 82 bp, Homo sapiens
ggaacgaggcaaggagctaaagcagcgtgcgttcagccctgggctggtaggtgagtgctgtcctcggctcactttcctcaag

SEQ ID NO: 703105 - DNA, 75 bp, Homo sapiens
gggatccacataatggagacattctgatggaatttggttacatggacacagaacagtatgaagaagcagtacgag

SEQ ID NO: 703106 - DNA, 100 bp, Homo sapiens
gggagacctcccgaaaataaacggagcaggaagccggctcacccagtgaaaagggagatcaatgaggagatgaagctttctgaaaaggatatgagcatgc

SEQ ID NO: 703107 - DNA, 90 bp, Homo sapiens
tcgcatcctatggctcaaagaaagatgattatggagcagatagcagggacttacagatgaaccaggccctgcgatttttggaaaatgagc

SEQ ID NO: 703108 - DNA, 100 bp, Homo sapiens
ctgaccccagagatagaggctgaccgcagtggcggcagaacagatgctgaaaggacaatacaagcgttccaatccacatgctgcctatcccaaccctgga

SEQ ID NO: 703109 - DNA, 75 bp, Homo sapiens
gtgccgcgagtgcaacagctacgtctacttccagggtgctgagtgtgaagagaccggccagaatttagcttcact

SEQ ID NO: 703110 - DNA, 90 bp, Homo sapiens
ccccatattttgcagcaatctcagctctcaaagtgggtggctgtgctggctctggctgtggcaaatgtgactgccatggagtgaagggac

SEQ ID NO: 703111 - DNA, 74 bp, Homo sapiens
cgcagccgcagccccctgctccggaggctggtgcaggtggttcccctctctcagcgaagtggtgttcttgaatg

SEQ ID NO: 703112 - DNA, 82 bp, Homo sapiens
tctgcatagaggcagacctccagaactacctgtaaattatgtgaaacctccaaatgtgggagataccctcttggccatccgg

SEQ ID NO: 703113 - DNA, 100 bp, Homo sapiens
ggaatttgattaactcattcaaggttacccagttgactcaagaatgaacaatccgtcagaaaccagtaaaccatctatggagagtggagatggcaacaca

SEQ ID NO: 703114 - DNA, 96 bp, Homo sapiens
ccggagcgtgccctcgccgctgagaaatcaacttttcagtaattggtcagtatgtggattatcttgtgaaagaacagggagtgaagaacatttttg

SEQ ID NO: 703115 - DNA, 100 bp, Homo sapiens
aaacaagtcttcttcctcctcctcctcttcctcctcatcctcctcatcttcttcatcctcctcctcctcaggatttctctctgatcaaacggacagttca

SEQ ID NO: 703116 - DNA, 80 bp, Homo sapiens
tggtggtgcaggcgctgcgccgcaacgccgagcgcaccgacatctgcctgctcaaagacgttggacctctcgaacaacca

SEQ ID NO: 703117 - DNA, 108 bp, Homo sapiens
tcaaccaggagaaacaagagaaacagcacaagttagacacagcaaagctgtggggatgccttcccctgtttctccaaagctgtcaccaggcaattcaggaaattattc

SEQ ID NO: 703118 - DNA, 75 bp, Homo sapiens
ggcccggcggctgctgctgctgctgacgctgctgctgcccggcctcgggactgattcttgctattccaaatcctc

SEQ ID NO: 703119 - DNA, 100 bp, Homo sapiens
cacacgacaagacctcaactttggccaaggatacaatgtctctttgctatatgaccttgaaaatcttccggcatccaaggattccattgtgcatcaagct

SEQ ID NO: 703120 - DNA, 105 bp, Homo sapiens
gagaggcaccgggatcgtgaccgagaccgtgaccgagagcgtgaccgagagcgcgaatatcgtcatcgttagaagcacaacctccaagagggaaaacatttctcc

SEQ ID NO: 703121 - DNA, 90 bp, Homo sapiens
tagccacataggctgttgattgcttgaaatgtgactagtctgaattgagaaatacttcatccctttcaagccctgatatcttcgactccc

SEQ ID NO: 703122 - DNA, 90 bp, Homo sapiens
gccagaacggacaggggccgcgccgctgccgctgctgctggtgttagcgctcagtcaagctagtggcggttggcaggaacctgaaaatcc

SEQ ID NO: 703123 - DNA, 83 bp, Homo sapiens
aggacctatctctgaccctcatagcctctcctccttcctcacccagttcctcagggcttcctgtatgatctggacaaggtgag

SEQ ID NO: 703124 - DNA, 82 bp, Homo sapiens
acgcccggctcctccgcaccccctcccccgggggtcccgcggcctctcaccatggatgatgatatcgccgcgctcgtcgtcg

SEQ ID NO: 703125 - DNA, 100 bp, Homo sapiens
agagggagtcaccactggacctccaaggaagccacgtgcagacatctacaaccttcgatctcctgacgatcagcttacccgctggccgcctcctgacaag

SEQ ID NO: 703126 - DNA, 75 bp, Homo sapiens
taccgcgagctgcgctggttcaccccgtggtcgaggagtcggcctccaagactgcagagaatgccaccagtgggg

SEQ ID NO: 703127 - DNA, 100 bp, Homo sapiens
ggaccctgatgaccacactgtgtgccacctgctctttgccaaccagatcctggctgcagctctgaccgaatgtcaccggaaatccagtgcccaaggcaag

SEQ ID NO: 703128 - DNA, 83 bp, Homo sapiens
aggtactgacagatccgtagggaggacaccgtgacttcccggacgctgggaaatggtgattatagagcagtttgttgaatctc

SEQ ID NO: 703129 - DNA, 76 bp, Homo sapiens
aatgccatcttgaatgtaaaagaacttggaggttgcaacaaggacagtgtcagagcaggctgtaaaaaatgtggct

SEQ ID NO: 703130 - DNA, 111 bp, Homo sapiens
ctgagcggccaggccgtgcgccggcctttggtcgcctccgtgggcctcaatgattcgaattgctgcagaaggaatcaatgggacagttggtggaagcaaattggctaccag

SEQ ID NO: 703131 - DNA, 83 bp, Homo sapiens
gcaaatactactgaaagtgcaatatttgagtatcactgcgagtgggttgaccacacaggtgcagcctcacagaagaaggcttt

SEQ ID NO: 703132 - DNA, 80 bp, Homo sapiens
gctgactcaagcggaggcgcgcggaacagtcgccgaggcgattcccgcccagggattatcttgaacacataacctccatt

SEQ ID NO: 703133 - DNA, 100 bp, Homo sapiens
gagattggggccatgccaaggactatgtggagaaactgttttggctgggcctacttcacctataccttctctgggaaatgtgagtgaaactgcatctgga

SEQ ID NO: 703134 - DNA, 50 bp, Homo sapiens
taatgtggtctcccatgtctcatagttttagtgggaaaaaatgtttgaag

SEQ ID NO: 703135 - DNA, 100 bp, Homo sapiens
tcatgcttttttcctgccccttctccccaaatcatcaacaatagaagaagaagaaaacatgtcaggacacaaatgggtcttgctctgtcacccaggctgg

SEQ ID NO: 703136 - DNA, 100 bp, Homo sapiens
gtaaattatgagaaagaagaagaattcctcactaatgagctctccagaaaattgatgcagcgccaaatcttaaaggcagaccacgcaaaaagaaaccatg

SEQ ID NO: 703137 - DNA, 83 bp, Homo sapiens
tgccattggcaaagcagcaaccaattatcagtttacaacctgcacccactaaagaggactacactgaaacattcaaatgtgtg

SEQ ID NO: 703138 - DNA, 74 bp, Homo sapiens
cacctttccctttatttccggagagcataatggcagcgtctgaggttgctggtgttgtggccaatgcccccagt

SEQ ID NO: 703139 - DNA, 75 bp, Homo sapiens
aaaagttgtgcccaagacagtggaaaattttgttgctctagcaacaggagagtgggaggcgaaagtgcaacaagg

SEQ ID NO: 703140 - DNA, 100 bp, Homo sapiens
atcaaacacagaggaatgaccaccatggcagatggcaacagaggatgtcaacaattttttggagagcacaaagttatcattgttgggctggataatgcag

SEQ ID NO: 703141 - DNA, 90 bp, Homo sapiens
ctggagcaggccggctgccaccttctgggctcctggggccctgcccaccacaatacgtagagaaatcgacactcttaatgaacgtttagc

SEQ ID NO: 703142 - DNA, 90 bp, Homo sapiens
cagaaaaatggcaaagaaagagtgcccatcctctggcatttcctgcagaagaaaggaattcagtgtttcctggtagtggttgcactactg

SEQ ID NO: 703143 - DNA, 90 bp, Homo sapiens
aagaaaagttagcaatgatggaaagtggggtgagagactatagcaagcaggccaaggcagaggcttcctcaggagaccatcccactgaca

SEQ ID NO: 703144 - DNA, 100 bp, Homo sapiens
tcagatcgagaaaatgaccgcaatctctgccagcaccttgggaagagaaagaaaatgccgaaggcactcagacagacatgcgtcgggatgtccaggaaat

SEQ ID NO: 703145 - DNA, 75 bp, Homo sapiens
aggggaggttacgcagcaaaccatccagaagagagaactcgatgccaccgcaacggtattggcgaaccggcagga

SEQ ID NO: 703146 - DNA, 105 bp, Homo sapiens
cgtgcgtgcggctaagagagtgggcgctctcgcggccgctgacgccccaaggaggcccgcctgacgactgaccagttgccatggcatcctactacgagatcctag

SEQ ID NO: 703147 - DNA, 75 bp, Homo sapiens
tggtgtcctctacaccatctgtggtcatgtcaacagtagcacaagctaagatatcaacatggactagggactcca

SEQ ID NO: 703148 - DNA, 74 bp, Homo sapiens
gagcggagcatgtcggagacgggcactgctgctgcccctgggggcggaaagccaggacctccggcatgtcatca

SEQ ID NO: 703149 - DNA, 78 bp, Homo sapiens
tctttcagggacaaagggcagcaatgacctgtgtttcttggtcaccgggatgagcttgagggaacatacaagatttac

SEQ ID NO: 703150 - DNA, 95 bp, Homo sapiens
tcaggagctgctgtcacctggaaaacacgtggcatgatcacacaacagacaggtaatgtgaatggcatgaagaggaaagaatgggaaaacaaatc

SEQ ID NO: 703151 - DNA, 75 bp, Homo sapiens
gagcttcatcaacgatatatgtcagatctaaagtctttcccagggaactccgatgaagtgttccaacaaaatgag

SEQ ID NO: 703152 - DNA, 99 bp, Homo sapiens
tattccactcttcggcgaagctttacgttcatgtaaacagcatgacgtgaggccgtggatgcaggcattaaggaatcacatgcagcccaactacagatt

SEQ ID NO: 703153 - DNA, 153 bp, Homo sapiens
aaaacccattcaaaatggaggtgatggtagatgcctggacagattaccagatcatcattactcagcctcagaaccaggtctgtgaactagatatcatctttaattttgagaaggcttattttattttggatgagtttcttttgggaggggaag

SEQ ID NO: 703154 - DNA, 104 bp, Homo sapiens
gcgctcctgagaccctccagcgctgcctggaggagaatcaagagctccgagacttcccaagtaagaagcggaagaggagccgctggaaccaagacacaatggaa

SEQ ID NO: 703155 - DNA, 90 bp, Homo sapiens
gcttgacattacagccaagatggtgctgtcccagagacaacgagatgaactaccccatgccacagctggatgtgactgaggccaacaagg

SEQ ID NO: 703156 - DNA, 50 bp, Homo sapiens
gcaagatactgaaatgtgatgaacatcaaaatcgtgtggtgggagctatg

SEQ ID NO: 703157 - DNA, 90 bp, Homo sapiens
tgtcaggcggagagacccgccgccaggtccctggatggccggttgcaggtgtcccatcggaaggggctccctcatgtcatctactgccgc

SEQ ID NO: 703158 - DNA, 100 bp, Homo sapiens
cccagtaggagaatgactccgattcgtgaccctcagcgccggtgcatgtcgatgctgaagccgacgtagcttctctgaacagacgcatccagctggttga

SEQ ID NO: 703159 - DNA, 82 bp, Homo sapiens
agaaaaacaaccagtgctgcgacccttggaactaaaaacttttctcaaagttggttttaaaatcaaagatgggaaaatcgga

SEQ ID NO: 703160 - DNA, 78 bp, Homo sapiens
cgggaccctcgcgcgcgaccgccgaatcgctcctgcagcagaggcaaatgttctgaaaaagactctgcatgggaatgg

SEQ ID NO: 703161 - DNA, 98 bp, Homo sapiens
tgattgtgaaaacaatgaagacttatgttgaaaaggtggctaatgaggagatgttaaagtaacccatcttgcaggacgacattgaagattggtcttct

SEQ ID NO: 703162 - DNA, 50 bp, Homo sapiens
aagtgccatcctctttacagggtttgtcctggttgtggtcaagactggat

SEQ ID NO: 703163 - DNA, 75 bp, Homo sapiens
ctcctccgggggacccgcggtccccaccgtgcagcggggcatcatcaagatgggaaatcctcattgacgattcaa

SEQ ID NO: 703164 - DNA, 74 bp, Homo sapiens
cctttgctatgatcattgacaaactggaagaggcagcctgcttctgcaaagtggtacgatcgaagggactatgt

SEQ ID NO: 703165 - DNA, 98 bp, Homo sapiens
gctgtccatgtatttcttcgtgctgggaatcctggccctgtcccacaccatcagacttgaatttgagaggcaacagcgtgaagaacttgaaaaattag

SEQ ID NO: 703166 - DNA, 101 bp, Homo sapiens
gttgaagcagttttctcagctgcctgctaacatagctgtttgcagttctaagaattcaaagaagctttttcactatttgacaaagatggtgatggaactat

SEQ ID NO: 703167 - DNA, 48 bp, Homo sapiens
attggaaaggccttcactgcacagggccgagatggacgaaaaaatgtg

SEQ ID NO: 703168 - DNA, 101 bp, Homo sapiens
cgtctgcggctctccgccgtccccagccctgcctctccctgggctctggccccttcacagatgtagtcactacaaatcttaaattgcgaaatccatcggat

SEQ ID NO: 703169 - DNA, 97 bp, Homo sapiens
aatatcttcaggaaaatgggttccatgagaagtgacatcctcctcgaatcaaaaggtcatgtaatgtttgcagaaataaaaatggagaatggaaagt

SEQ ID NO: 703170 - DNA, 83 bp, Homo sapiens
gttcgcgtctctctgctgcggcgcggggaccgctgtgctctcgggttcattccatgatctgctccgtagagaaccaatgctgc

SEQ ID NO: 703171 - DNA, 83 bp, Homo sapiens
gtggaagacagccacacggctgacattagctcccactttcaagaagcaatagacttcattgcaccgaacaagatttgtgatga

SEQ ID NO: 703172 - DNA, 82 bp, Homo sapiens
agcagtagctatggcagtggcagaagattttaattaggttcttcacacacccccattcggcgtagtacccagagagctcaag

SEQ ID NO: 703173 - DNA, 82 bp, Homo sapiens
acgacgatgaggtgacagtcacgacccctgaatggttggacagtgattcctgccaaaagtgtgatcagcctttcttctggaa

SEQ ID NO: 703174 - DNA, 104 bp, Homo sapiens
aattcagaaggagctggcggacatcactttagaccctccacctaattgcagtgatatcagtatcaagataaaagtttggaatgggagaaaaattctcaaagcct

SEQ ID NO: 703175 - DNA, 87 bp, Homo sapiens
ctactggaggcggcccgcttcctggaatggcaagcgcagcaacaacagagagcacgtggtcgcgtggggcaggcagtggcgctgcgg

SEQ ID NO: 703176 - DNA, 50 bp, Homo sapiens
ctttaaaacagtattacttgcggggacatcacccagaagggctatgaaaa

SEQ ID NO: 703177 - DNA, 75 bp, Homo sapiens
caccatctacctattcttcaaatggtatttctgggaaaagccagcttctgtttgcactggtcttcacaactcgtt

SEQ ID NO: 703178 - DNA, 90 bp, Homo sapiens
gttatcatgaaaaccctgaatagtaatgatccagctccaggtcccacaggggctcttcttccccacgaaaaagatcttattcaagttcat

SEQ ID NO: 703179 - DNA, 100 bp, Homo sapiens
ttggcgcctccagggaaacgcggagtgtcctggagcttgacgcgctggagcttgagagagttgggctacacagagcagctgttccagttcctgcaggcca

SEQ ID NO: 703180 - DNA, 74 bp, Homo sapiens
gatccgcagctcaagtcaggattctgaagttagcaccgtggacccaactgcgagatcaacctggatgactgtgc

SEQ ID NO: 703181 - DNA, 80 bp, Homo sapiens
gaagaagccaaaaacattctggtccagaatgacagggtccagaaactggcgagccacgagggacatgtgtaggtatcggc

SEQ ID NO: 703182 - DNA, 90 bp, Homo sapiens
gccggcgccggcgccgcggcctcttcggctgcggaccctgccattccggaggagcggacaaggcaaaatctcagcaagttcggacctcta

SEQ ID NO: 703183 - DNA, 90 bp, Homo sapiens
gggcgccggctccatggcgaccgggctcggggagccggtctatggactttccgaagacgagtggtatgtgtgcaacagagagaaattatg

SEQ ID NO: 703184 - DNA, 80 bp, Homo sapiens
aggaggatgggggctaaccagttagtggtgctcaacgtgtacgacatgcttgatcctctcccagaaaaggttttacagca

SEQ ID NO: 703185 - DNA, 100 bp, Homo sapiens
gcccggcctggcgcccgtcaacttctgcgacgaagaaaaaaagagcgacgagtgcaagatgtccggtctgtgctacgacagcaaaatgttccaggtgcat

SEQ ID NO: 703186 - DNA, 100 bp, Homo sapiens
agagctgctccggccgcggccctgggagctggaggaaccgcggaggaggaagccaagaatctggtgagcgaagccatcgcagctggcatcttcaacgacc

SEQ ID NO: 703187 - DNA, 75 bp, Homo sapiens
gcaattttgccaacttcagtgctccaacaaatggaattttcttgagcatgtttctaatcgttttgccattggaat

SEQ ID NO: 703188 - DNA, 75 bp, Homo sapiens
gaccttaaactcactcctggagaaagatctgcaagtgcgcagcaaacggggattcagcgtccgatcctttggaac

SEQ ID NO: 703189 - DNA, 100 bp, Homo sapiens
attggattccattttatttctacttaataacgtgcacctttctcatcctgtttatgtccgacgtgcagctgatggagagcaatacatcatcatctttgga

SEQ ID NO: 703190 - DNA, 90 bp, Homo sapiens
tggtcacgcgggactgaacaccgcacaggcaggaggcatggccaagaggactaccccaatggcacctggctgggcgacgagaacaacccc

SEQ ID NO: 703191 - DNA, 49 bp, Homo sapiens
cagaaacctcagcgctcacaagctctggtagctgaagaacatctcacag

SEQ ID NO: 703192 - DNA, 75 bp, Homo sapiens
gtcatctgcacagcagtcatcgtggtggtcgcgttgactagaaaggtacaccagaggatcgcttcctggcagaat

SEQ ID NO: 703193 - DNA, 83 bp, Homo sapiens
cttcgtcttcatgtttctcttcgggggcgtccttatgaccgcactgggggccacagtgctgatctcagcagctccattttttg

SEQ ID NO: 703194 - DNA, 74 bp, Homo sapiens
ttaacctccagctttttaagcaggcagccgggattgcttaccacctgcagcgtgctttcggaggcggcggctgg

SEQ ID NO: 703195 - DNA, 75 bp, Homo sapiens
ggaagatgcctatcatgaacatcaggcaaatcttttgcgccaaggtaatagcctgcagctggtgttttgagaagc

SEQ ID NO: 703196 - DNA, 96 bp, Homo sapiens
ttaacccctagaccggtttttagtccattgactatgcagcctaatggcaagcaccggaagcaccccggcggccgcggtaatgctggtggtctgcat

SEQ ID NO: 703197 - DNA, 80 bp, Homo sapiens
ccggacatgatcctctccgcctctcgaggtacggactaaggtccctgagtgccagaggtggtggtgttgcttatcttctg

SEQ ID NO: 703198 - DNA, 100 bp, Homo sapiens
accgagaccgtgaccgagagcgtgaccgagagcgcgaatatcgtcatcgttagaagatcctgtcttcagctgggtcagagaaaacttcttgactaaaact

SEQ ID NO: 703199 - DNA, 100 bp, Homo sapiens
cacacgggcctccgaagagctgccgcgacgcccggcccgcagggcagggcggcgactggcggcgcgatggacctgaccgggctcctgctggacgaagaag

SEQ ID NO: 703200 - DNA, 100 bp, Homo sapiens
cgcggcccgggcagctcggtgtgcgcccccgcgagagccggggccccaggcccgccggacaccatgaaccacctggtgaaaggtgtagcagtcactcggc

SEQ ID NO: 703201 - DNA, 96 bp, Homo sapiens
cggcggcggtggccgctagctccaaggaagagcatgcttgagaagggaggataaaaactttcagaatgagcaaaacaccatcaacgttaattccag

SEQ ID NO: 703202 - DNA, 82 bp, Homo sapiens
ggggctttcgcccgggtcctcctagaaattccccccgaagaagactcccccacatctgggtcgcgtggggcaggcagtggcg

SEQ ID NO: 703203 - DNA, 100 bp, Homo sapiens
tccaccagatcatccatgtgagtgaccatgcagcaaaagaaggagggtcctctcagtgattaaggtggtgatgatgtccagcaactctgtgaagcaggag

SEQ ID NO: 703204 - DNA, 50 bp, Homo sapiens
tgcaccttcccctgccttggaaagagtgcctggaagagctgggatgtctg

SEQ ID NO: 703205 - DNA, 101 bp, Homo sapiens
cggaggctccagaaacgggtcctgctgctcaccaagctcagtgtggaggctgctggccctgccatctgtaagaagatgtcatacggatccatcgcccgtgg

SEQ ID NO: 703206 - DNA, 98 bp, Homo sapiens
aaggggccagggcagagggcacctgagcggctggagagcctgttggagaaacacaaagagaatgaatctgagctttttggacgtacaattcgtgtcaa

SEQ ID NO: 703207 - DNA, 101 bp, Homo sapiens
ccagatattacactgtcaaaactttacaagttaattgaagagtcttgtccacagctggcaaattcagtgcagatcaggtcaagagcaatctgaatccaaat

SEQ ID NO: 703208 - DNA, 74 bp, Homo sapiens
cagatgttaccacttctgtggctgctaccccactcctgggccgtccctgaaggactccctccccagctcggtca

SEQ ID NO: 703209 - DNA, 82 bp, Homo sapiens
ggaaaaggagatattacggcggcagatccgcctactgcaggaattcagaaggagctggcggacatcactttagaccctccac

SEQ ID NO: 703210 - DNA, 121 bp, Homo sapiens
cctccccccacctccccttcttggccttcgccagtgtgggagcctcgtctcactggagagtccgttcaggttgaaatcacaaagattagacacctttttagataggtgttcttcagcacca

SEQ ID NO: 703211 - DNA, 100 bp, Homo sapiens
ctagagcagactcagaatgagctcaccagggagctgaaactcaatgaatggtagtgtctagaaagggtatgtcccttcaagagagaggtgccaatgtcca

SEQ ID NO: 703212 - DNA, 90 bp, Homo sapiens
cagcgacatcaccaagctggaggtggacgccatcgtcaacgccgaatttatccagttggcgaaggactttgaggatttccgtaaaaagtg

SEQ ID NO: 703213 - DNA, 74 bp, Homo sapiens
gcagatgtggacttgaaagaagctgcagcggaggaaggcgaggttgcagagcctgaggcctgtgatcagatgta

SEQ ID NO: 703214 - DNA, 88 bp, Homo sapiens
cgccgcgtgtacccggttgtcctcaggcgctgtcagatggcagttgaattcctgcatgaactgaatgttccatttttcaaagttggat

SEQ ID NO: 703215 - DNA, 83 bp, Homo sapiens
gctacgcaacggtggtggcgtgggcgacattctccgcaagccctccaaagatgctctcactgacctatgaacgactctttggt

SEQ ID NO: 703216 - DNA, 99 bp, Homo sapiens
cctcatgcaaatagcgggaagaacaaaggaaggggagcccgggacccccgggggcgcaggagcgagaacccgagcagcgccatgagcaacactaccgtc

SEQ ID NO: 703217 - DNA, 73 bp, Homo sapiens
tattttgaaaaaaagtggacagatactttcaaatactggagagacccagaagtgttccatcctgagcgatttc

SEQ ID NO: 703218 - DNA, 50 bp, Homo sapiens
cgccaggtggtggtgcgctcagtgaggatgaggatgatgaccttcagtat

SEQ ID NO: 703219 - DNA, 100 bp, Homo sapiens
atgtcgaaagaagataattacaagcggacacgggaatatatccgaagcctgaagatggttccaagtattccctatctagagctccttaataagcatttat

SEQ ID NO: 703220 - DNA, 83 bp, Homo sapiens
cgcgctgcccgcactcctggtcctgctcggggctctgttcccaggaaataatgcaaaaggtgtcccaaggctcctgaccagtg

SEQ ID NO: 703221 - DNA, 83 bp, Homo sapiens
gattcattaaaaaatttgttctctgtcctgaatgtgagaatcctgaaacagatttgagtccctgtgaagcaggaagagtgagg

SEQ ID NO: 703222 - DNA, 100 bp, Homo sapiens
gctggactgctggagcgtgtgaaggagctacaggccgagcaggaggaccggttctgggaggtgatcagtgatgaacatggcatcgaccccaccggcacct

SEQ ID NO: 703223 - DNA, 101 bp, Homo sapiens
cccgagccgattcaagaaggacaaagagatcatagccgagtatgaaagtcaagtcaaaggtctggacaaagtgccaaaggatcttccccctgacacaactc

SEQ ID NO: 703224 - DNA, 98 bp, Homo sapiens
aatgaaggaaaccgcactctcacactggccttgatttggcagctaatgagaaggtattgacctgatggacatggcttcggacatcctgcagcccaaag

SEQ ID NO: 703225 - DNA, 88 bp, Homo sapiens
cgtctgcggaagtgcagctgcctcagttcttagcgcagaagaccgtgatgataatcgtagcaatcagccccaaatacaaacaggacgt

SEQ ID NO: 703226 - DNA, 100 bp, Homo sapiens
ggctctgctggctcaggacatctgtaggaccagttccagctccagtgggcaccgccagcacgcccaggtgtgctgggcatcaaggtgaagatcatgctgc

SEQ ID NO: 703227 - DNA, 83 bp, Homo sapiens
ccccggcccgcgctgcccgcactcctggtcctgctcggggctctgttcccaggacatggatttgattgacatactttggaggc

SEQ ID NO: 703228 - DNA, 75 bp, Homo sapiens
cagggagctcttaacccagtttgaaacgtaactggttccctgaccagtgaacttcgaccacttccagatccttcg

SEQ ID NO: 703229 - DNA, 96 bp, Homo sapiens
ccctctgaaggcacagggaacagtccagcttgaagttgtgggaaggcccaccaacgctggccggcctccaagcacccgggcctctgctcatgtaca

SEQ ID NO: 703230 - DNA, 85 bp, Homo sapiens
tcttttctggagctgctgggagggaagaatggagtctgtcagtacaggtgccgatatggggccacctacagatgctcctgcagtg

SEQ ID NO: 703231 - DNA, 83 bp, Homo sapiens
gtgaaaaataccacgacaaaaccaccctagaatctacggcggatccggaagtgtcaacgtggtcgagagcagcaggaaaagga

SEQ ID NO: 703232 - DNA, 98 bp, Homo sapiens
aggtaatgagaatcttcgccttgcggtgcagaccatgaattacgtggggcagttagccggccaggtgtttgtcaccgtgaaggagctctacaaggggc

SEQ ID NO: 703233 - DNA, 101 bp, Homo sapiens
tcgaaagaaacttcgggattttgaagacaactttttcagacagaatggaagggatttgcttcctaaggagaagaacttggaaactctgttgaccttggctt

SEQ ID NO: 703234 - DNA, 100 bp, Homo sapiens
atctcagacttctttcccagatgtttataatgagggcacacaggagagacagcgtctggagaccatcctcagtctctgtgctgaatacacaaagcctgac

SEQ ID NO: 703235 - DNA, 108 bp, Homo sapiens
aggaccactggattttgaggaaactttggtcttgtgaggcaggcgactaatcagattgtgatgaattgtgctgatattgatattattacagcttcatatgcaccagaa

SEQ ID NO: 703236 - DNA, 90 bp, Homo sapiens
agaagaagtgtcttccaaaggagaaattcatggcggaagtaatgggatctataaaggtttttcttcccccagtccctcagctgctgctgc

SEQ ID NO: 703237 - DNA, 90 bp, Homo sapiens
gtgcggcagggctgtgaggcccgccgctcgcatgagcacctcatacggctgcttctggagaagatgcaccagcaaggaatactgaagacc

SEQ ID NO: 703238 - DNA, 88 bp, Homo sapiens
aagaattttccaaatgaatttgcaaaacttactgtagcatcacttaggagctgctactccagaaaatccagaaatagagctgcttcgc

SEQ ID NO: 703239 - DNA, 98 bp, Homo sapiens
tggaaccgggaaggtacacccaggcatgacaatagcttctctcctcacagaaatttaactgaattaaacaaccaccatgtcgagcaaaaaggcaaaga

SEQ ID NO: 703240 - DNA, 90 bp, Homo sapiens
caagaccagtccatttggggaaatccttcggatggtgaactcattagaacaattctgtggtgttcttggtcacacatttatggagtttct

SEQ ID NO: 703241 - DNA, 83 bp, Homo sapiens
cccagtctgtctgtccgtggtggatctaagctctgggttcccttcattatcctgtggaagtagcggtagcagttcatccaaca

SEQ ID NO: 703242 - DNA, 90 bp, Homo sapiens
cgctaattcgggtacccattccccatgtcactgcaaagataaaagccattgaagcaaaactgaaaatgatggcggaaaatcctgatgcag

SEQ ID NO: 703243 - DNA, 90 bp, Homo sapiens
aggaaagggaactgaacgcggttctgggagcagcaagcccacgggtagcagccgaggccccagaatgtcggcagaaccaattgaaagacc

SEQ ID NO: 703244 - DNA, 100 bp, Homo sapiens
ggccctcaggccttgcccaaacctgcaagccccaagaagccaccccctggcgagcggagctgcaccaccaccgcctgtgctgatgcaccatggagagtcc

SEQ ID NO: 703245 - DNA, 100 bp, Homo sapiens
aggatgttcgaaaacgtcggcaggttctaaaagatctagttaaagttattcaacaggagaaatggcatgattcacgacgctggcagctctctgtggccac

SEQ ID NO: 703246 - DNA, 100 bp, Homo sapiens
cccctgcaccatgagctggggcaccgagctctggggaaatcctcattgacgattcaatttgttgaaggccaatttgtggactcctacgatccaaccatag

SEQ ID NO: 703247 - DNA, 75 bp, Homo sapiens
ggagtacaagggctatctggtatctgtagatggctacatgaacatgcagattagtgatgatgaaccaggttatga

SEQ ID NO: 703248 - DNA, 51 bp, Homo sapiens
ccaattctgcgcttctcagtaactacgagccacagagctcctgatcctggc

SEQ ID NO: 703249 - DNA, 80 bp, Homo sapiens
ctgtcacggaaaccattgcacccaaaattgcaagacctttcatagagtgtaaacaggaacatcgataagtagtgtaaaaa

SEQ ID NO: 703250 - DNA, 50 bp, Homo sapiens
gtaataagccggctattgtagaagctgatgcaggacaagtactccaaaag

SEQ ID NO: 703251 - DNA, 80 bp, Homo sapiens
gattacgccccctatcctatccgcaaacaagcaattgtatgatggctatgatgaagagtatgactgtcccattttagatg

SEQ ID NO: 703252 - DNA, 51 bp, Homo sapiens
ggaccgagcgcctcgacctcggtctgagatacactctggaaatgattaaac

SEQ ID NO: 703253 - DNA, 82 bp, Homo sapiens
accctccaactttgcgacggaaatgtgtcatcgaaagccagattctctcgggcctagccgtccttggaacccgatattcggg

SEQ ID NO: 703254 - DNA, 89 bp, Homo sapiens
tggcaccatgcaaggggggcactacacaggaatagccaggccagaagaaggaaggcctgtggtgagtgggacaggaaatgacatcacca

SEQ ID NO: 703255 - DNA, 75 bp, Homo sapiens
ggtcacacaatgtcggggatggacctccagatttccttactgggaaatcctcattgacgattcaatttgttgaag

SEQ ID NO: 703256 - DNA, 100 bp, Homo sapiens
cggcaagcgcgcagtgtcgactccccggtctatgccaggcgcatctcagctcttgaatgtcgtctctcaactagccaaacggaatctgcgactgctggtc

SEQ ID NO: 703257 - DNA, 83 bp, Homo sapiens
ccccccgcgcctgcacttagccccgcgcccgaggtatcacctcttctgggctcaagatggacaacaagaagcgcctggcctac

SEQ ID NO: 703258 - DNA, 82 bp, Homo sapiens
cggcagaagccgagttcaacatcctcctggccaccgactcctacaagatgaaggatttgggggcagagcacttggcaggtca

SEQ ID NO: 703259 - DNA, 100 bp, Homo sapiens
cggaggacctgggacaccgcggaagtcgggaaatggcccggctggacattttgaagattcattctcggaagatgaacctgacccgggggatcaacctgag

SEQ ID NO: 703260 - DNA, 100 bp, Homo sapiens
taggagactcagaatcgaatctcttctccctccccttcttggaacatcatttacagcgagcaatttcagcacagcaagtgtttagagaaaaaaaagagag

SEQ ID NO: 703261 - DNA, 76 bp, Homo sapiens
gggtcccataagaccctgaagctggtcgtcaaaaggtactggaggcgcaaagaaggcatcagaaggagaaatctgg

SEQ ID NO: 703262 - DNA, 100 bp, Homo sapiens
tggtatgataacaacgattgctgtgaaagtcaacccggagcgtgaggacagtgagactcgaacagtcccagctagtccacagggaccagcagtgccatgg

SEQ ID NO: 703263 - DNA, 89 bp, Homo sapiens
ggaaattaaggaatgcaattctgccaccatgatggaaggaataagacgagttggaagaagacctgatcaacaacttcagggtgaaggga

SEQ ID NO: 703264 - DNA, 100 bp, Homo sapiens
aggcccctttggaacctaaggagccctgccgaggagctgaaggccttcagagtccttggggtgattgacaaggaaagcagatggtggagctgaatatgcc

SEQ ID NO: 703265 - DNA, 98 bp, Homo sapiens
agggcaggtgagccctgcatctggaataagcagcctcgtcttacagcgtgactgcaaagaaaaagacttttgttttgcaaaagaaaagcagctcggtg

SEQ ID NO: 703266 - DNA, 98 bp, Homo sapiens
cagcttcaagcttaggaccacccaccatgcctatccagcaattaccagctctggctgggtcgccacaacttgtttgacgacgaaaacacagcccagtt

SEQ ID NO: 703267 - DNA, 151 bp, Homo sapiens
gatttccaaaaactcctgttacatgaggaagacaccaagaagagcaaagaaaaggagccagggtggctcttcctcaggatttccaaagactcatgttacgtgaggaagccaccaagaagagcaaagaaaaggagccagggatggctcttcc

SEQ ID NO: 703268 - DNA, 54 bp, Homo sapiens
agcctcctgagtagctggaactataggtgatccacccacctcggcctcccaaag

SEQ ID NO: 703269 - DNA, 75 bp, Homo sapiens
acagaggaatcttttattccactgacaaaaagatgtgtcatggcaatgctgagaaggaggatcagggatgagaag

SEQ ID NO: 703270 - DNA, 97 bp, Homo sapiens
ctcacaccagacctacggagggagctggaaattcctgacgttcattgatctggtgtatagtgttgattggagccaaaccagaggtgaacagcttgtg

SEQ ID NO: 703271 - DNA, 100 bp, Homo sapiens
agaggaccctcctccacttcccccttgatgaggttactcgcatcttaccatgtttgcttgatggtgattgctttatcaggtctaattctgcatctccaga

SEQ ID NO: 703272 - DNA, 88 bp, Homo sapiens
gctatttttgcacttcagttcacatactatttatgggatgctcgtcagaagttccgctctgttctggttgaagcaacggtgaaactgg

SEQ ID NO: 703273 - DNA, 100 bp, Homo sapiens
caatgtttccaaggagtataatgaatttgctgaagtatttctgaaggcatttgctgttggtgtccagcaagtgcccctgggcgctgggattgctctagcc

SEQ ID NO: 703274 - DNA, 76 bp, Homo sapiens
gggggccgctctgggatcccggccaccagcaattgtccgatccaaaaagttggcagctcttgcagaagccttaaag

SEQ ID NO: 703275 - DNA, 101 bp, Homo sapiens
tctcagccttgtcaaagatgccagatgtgggagacacgccaaagctcccaaggtgtggaatatcaaacaaatgattaagttgacacaggaacatatagagg

SEQ ID NO: 703276 - DNA, 75 bp, Homo sapiens
tgacgacggccaatgcgcccccagttcctctgtgacgagggtgcaggtatctctggggactacatcgatcgcgtg

SEQ ID NO: 703277 - DNA, 82 bp, Homo sapiens
cggacgggccatacccaataaccaggtgcttggcaaaatcgagcgggccattgcttcctgggtctgcaggtccagccggctg

SEQ ID NO: 703278 - DNA, 100 bp, Homo sapiens
gctctgaggaggattcactcaggagagagaactcgatgccaccgcaacggtattggcgaaccggcaggatgaaagtgagcagtccagaaagcggcttatc

SEQ ID NO: 703279 - DNA, 75 bp, Homo sapiens
gattctgagcctgttcagaaagtccttagcaacaggatatgaagagcattttaagaggtgcagcctctggaagtg

SEQ ID NO: 703280 - DNA, 100 bp, Homo sapiens
tgacggtggctataccagggactctgttctgattaggggcagttatcatgggacacccgccatatgctggcaaggaagatggtcagttcttctgagccac

SEQ ID NO: 703281 - DNA, 75 bp, Homo sapiens
atggggttgtgatggcccaggttcttcaaaagatccatcactggtgcaagctatatttaacggagatcctgatga

SEQ ID NO: 703282 - DNA, 100 bp, Homo sapiens
cagcttgacaaaatccagtccagccacaacttccagctggagagcgtcaacaagctgtaccaggacgaaaagacaaggtctttactaggtgtatttgaag

SEQ ID NO: 703283 - DNA, 101 bp, Homo sapiens
tttgatttgattcagcagtcctgtcaagtataaatcattaaagggcagtatttaaagtcagttggcaagcagtggaataagatttttgtaaagaaaccttg

SEQ ID NO: 703284 - DNA, 75 bp, Homo sapiens
ggcggacgcggcgccatcgcagtcagacgaagttatacggaagcgtctcctcattgatggagatggtgctggaga

SEQ ID NO: 703285 - DNA, 75 bp, Homo sapiens
gaaaatcgtcttatagttgagaatttatcctcaagagtcagctggcagaaattcctcgaacataccaggagtatg

SEQ ID NO: 703286 - DNA, 82 bp, Homo sapiens
ccgcgggacctctccgggccatggggatgtttcagcagcccctgagaaggaagaggaggaagctgagggcccgctgagggcg

SEQ ID NO: 703287 - DNA, 73 bp, Homo sapiens
cacgtggcatcagtccccactgcggtccacggccaggtgaacaatgtgcactggtgattgctgcggtgtttga

SEQ ID NO: 703288 - DNA, 75 bp, Homo sapiens
gaaacagttacactgcttgtagctcttaaggtcttaattacagagcacggtgacctgggtaatagcagattttta

SEQ ID NO: 703289 - DNA, 100 bp, Homo sapiens
caggaagcatggcactctggcgggcataccagcgggccctggccgctcacccgtggaaagtacaggtcctgacagctggagactacacagacttctattc

SEQ ID NO: 703290 - DNA, 90 bp, Homo sapiens
gcagtctccacggcgcaggcccacggtagcgcagccgctctgagggccgttgctccagggagaactgcaaatatcttcatccacccccac

SEQ ID NO: 703291 - DNA, 77 bp, Homo sapiens
atcctcggtgctgtggtgcagagctagttcctctccagctcagccgcgtgatctgtgaaaatggttcgctattcact

SEQ ID NO: 703292 - DNA, 100 bp, Homo sapiens
gttttctcactgtacttctgggtaaactggagaagagcttcaactctgttcacctgcttgcagggccgttgctccagggagaactgcaaatatcttcatc

SEQ ID NO: 703293 - DNA, 98 bp, Homo sapiens
aagactatgtatgaggttttccaaagaggactcgctgtgtctgggatgatgcagtgtgtgattgcagtcgcggacaaagtattcgatgccttcctgaa

SEQ ID NO: 703294 - DNA, 88 bp, Homo sapiens
gaggatcgcccaatccacatgcttttccaggtctgctcaccaggtggccagataccgcccacgtgcccccatcattgctgtgacccgg

SEQ ID NO: 703295 - DNA, 123 bp, Homo sapiens
aggccatgggcgacccagcccccgcccgcagcctggacgacatcgacctgtccgccctgcgggtttttcgttggaatatacgttgcacatttatggcgattctgagtgtgagggcagacttct

SEQ ID NO: 703296 - DNA, 100 bp, Homo sapiens
cagaaaatggatcgtccaaatggtctttatccaaattatttgaaccccagaacagggcgctggggtcagtatcctactatgttgacagacatgatgaaag

SEQ ID NO: 703297 - DNA, 100 bp, Homo sapiens
catagggctgtgtatgatttcccacagttcagcacatcagtgcagccgtggctgagtccagaactactgagacaggttgaaactgatttctcaactccaa

SEQ ID NO: 703298 - DNA, 100 bp, Homo sapiens
acgggaattcagtactctgtaacacccagctaccagctttgaaactcagaggaatggactggtgtttatctatgacatgtgtggttctaattatgccaac

SEQ ID NO: 703299 - DNA, 50 bp, Homo sapiens
gctgatcgccccagggatcaggagaatgccaggcccctcctaacatcctc

SEQ ID NO: 703300 - DNA, 75 bp, Homo sapiens
gcactgctacaggactctactatggagtccacctggaaggccgctgtggtggaaggatgtttgactgcagagatg

SEQ ID NO: 703301 - DNA, 100 bp, Homo sapiens
atgctaaagccaagataagaaggcttaggcaggaatttttgggagcctctggtggagcaagtaattgggattcctacagtgaccatttcaccattgaaac

SEQ ID NO: 703302 - DNA, 130 bp, Homo sapiens
aaagattccagcatcttggaagcaagtgctccactggaaaataaaagccacgtgggagtaccctgacttctaccggaagctctacggcctcttggacccctctgtctttcacgtcaagtaccgcgcccgc

SEQ ID NO: 703303 - DNA, 97 bp, Homo sapiens
agcgggtgaaatctggcatattagcgctagccctgcagacagaggtgtgctgacgacctgctacaacagaagactttgaagaatatcctgaacatag

SEQ ID NO: 703304 - DNA, 76 bp, Homo sapiens
attacaagcgtgagccactgcgtggcctgagggcacgaccataataacatccctgacttctgtgctgcacaatgac

SEQ ID NO: 703305 - DNA, 90 bp, Homo sapiens
ttatacctagaagtctactaatggacagttagtcacccacctacatgttgagggggattcccgaagtcttccgttttctgagaatgtgag

SEQ ID NO: 703306 - DNA, 100 bp, Homo sapiens
cgggctgcagacggctgcgaggcgctgggcacaggagataggaacaggtggcacatgtcagtggaagatatgtggacttagtcccactacaaccttagcc

SEQ ID NO: 703307 - DNA, 50 bp, Homo sapiens
tattattttggcacaacaggaaggaggaaactccaggaactcctaaaaag

SEQ ID NO: 703308 - DNA, 87 bp, Homo sapiens
tcagcaaatggcttagaaacatagatgagatgtgttcagagcaacattgttttgttgacacaagcatttagaagaaagtttgtgatt

SEQ ID NO: 703309 - DNA, 82 bp, Homo sapiens
atcgcaaacccaaagatccccgttcctggagattctgattgaggcccatcttgacgattccaagaccacccccttgagcaag

SEQ ID NO: 703310 - DNA, 51 bp, Homo sapiens
cgcttagcctgatgctggaaggacgaagacaaagatcattccactcagcct

SEQ ID NO: 703311 - DNA, 82 bp, Homo sapiens
aaaatgtggaactggaacattctaccaaggttctttcagaaaatgtagataatggggttccaagaccaaagattaaattaag

SEQ ID NO: 703312 - DNA, 51 bp, Homo sapiens
tttgctctgcgaaacatcatccagaagacaggtgcagttcaggagcagatg

SEQ ID NO: 703313 - DNA, 100 bp, Homo sapiens
cggagacctacctgcggcgtcggcagctgctgctccgagacgcaaacatgcagatctttgtgaagaccctcactggcaaaaccatcacccttgaggtcga

SEQ ID NO: 703314 - DNA, 113 bp, Homo sapiens
ttcagaggattgtttgtggagtcactgaagtcacaacttgccaggaggttgtcatagccttagctcaagcaatagatccattgtcatgacttctgagctgtttgaaagagaat

SEQ ID NO: 703315 - DNA, 100 bp, Homo sapiens
gtgacgggctctcgctatgttgcccaggagctgaaaatcctggtggactacgacgagaaaggctacctcctgcagatcttcaccaaaccggtgcaggacc

SEQ ID NO: 703316 - DNA, 96 bp, Homo sapiens
gaacgaagttatggcagagttagctaaagaactccctcaagtttcatttgtgaagtgtaatgttcaagctcagaaatgccttatgtggatcgtcag

SEQ ID NO: 703317 - DNA, 100 bp, Homo sapiens
agagagttatgcattggctggggagacccatctggactaccaaggagaagctatagactacttctactccaccaggaagtttgaccttgtctgtgtcaat

SEQ ID NO: 703318 - DNA, 98 bp, Homo sapiens
gggacacctggttccagctgcagcacgtggacgctgactcggaagtgcagactgtgagctgcttgtccccatcctgcggccgtcctggggacacagag

SEQ ID NO: 703319 - DNA, 50 bp, Homo sapiens
agaaggggaaaagctacttcaagttggtgtaatacggtgcccagtatgcc

SEQ ID NO: 703320 - DNA, 100 bp, Homo sapiens
tttcagcagttggcacacatggttaaggaacaggaggaaaccattcagaggctgggcttggagcccacaggaccctagaagtcctttaagaacatttaac

SEQ ID NO: 703321 - DNA, 82 bp, Homo sapiens
cgggcaccgcggtgctgctggtcacggccaacgtgggctcgctcttcgacgacgagccttcacgtaaatgggtccagtcatg

SEQ ID NO: 703322 - DNA, 98 bp, Homo sapiens
aagatccaggagcttgcccacgagctggccgctgccaagtcttccagacctggtccttggactggagaccttcacccttcctattttgtggctttctc

SEQ ID NO: 703323 - DNA, 100 bp, Homo sapiens
aggataacaccaccaactatggacctcccagctaactggaacctgtgtccacagaatgctgtccagtttcaacgagtggttttggcaggacaggttctgg

SEQ ID NO: 703324 - DNA, 75 bp, Homo sapiens
cgtcgacggcgagcccttgggccgcgtctcctttgaggcagcagcccagacgcggcacagagagggcctgggagc

SEQ ID NO: 703325 - DNA, 90 bp, Homo sapiens
cgcgaacgagcgacggcggaacccgtgggcctgtggactgcagcctcggcggtcagcagtttaagctatgaagaaggacatccctcacac

SEQ ID NO: 703326 - DNA, 74 bp, Homo sapiens
ctggcttcatcatgcccatcgaggtgcacttcaaaaacaagggggcagtacccaaaggaaacgctacgaaagaa

SEQ ID NO: 703327 - DNA, 75 bp, Homo sapiens
cgatctgaactttctggggaacagaccagttgtgtgaatggtagtgtctagaaagggtatgtcccttcaagagag

SEQ ID NO: 703328 - DNA, 82 bp, Homo sapiens
cgggtgccgaggagcgggaagagttgctggggcggacctggtgaatgacctggggaacaaaggctacctggtatttggcctc

SEQ ID NO: 703329 - DNA, 100 bp, Homo sapiens
ctgcggttggggcgggaagagccggggccgtggctgacatggagcagagctgcagagagacaaggcggcggcggctgctgtgctgggtgcagtgaggaag

SEQ ID NO: 703330 - DNA, 127 bp, Homo sapiens
agggcggagccgccgccgcgcctgcgcagaaggccggggccggccagaagcgggcggcgcgggggagatggtgctggagaatctggtaaaagcaccattgtgaagcagatgaggatcctgcatgtta

SEQ ID NO: 703331 - DNA, 100 bp, Homo sapiens
tggtcctaaagtccagagacagagcactaattagatacttccaggctttggtgaataatatgtcctttgtaagatataaagaagtgtatgccgctgcagc

SEQ ID NO: 703332 - DNA, 100 bp, Homo sapiens
gaatttatgatgaggcaataagcagcttctttagaaatgtggacaccagagaaactggtagtctgggtagattcaaagcatctttaagagaaaatgtctt

SEQ ID NO: 703333 - DNA, 100 bp, Homo sapiens
gggagcggccgagccatcccaattaaacagctattgacctgaaaagtggttctggaaaagtgtaccaaggccctgcaaaaggtgctgctgatacaacaat

SEQ ID NO: 703334 - DNA, 110 bp, Homo sapiens
tgctgggcgacctgcaggcagcaccggaggcccaggtctccgtgcagcccaacttccagcaggacaaggagctggtgactgccctcatgtgtgatttgcggcggccagcg

SEQ ID NO: 703335 - DNA, 100 bp, Homo sapiens
cttcaggtgtaccatgggctgctgagcttcacggtgcatcccaagcccaagggcctggccccagctgagatctctgcagtgtgtgaaaaagggaatttca

SEQ ID NO: 703336 - DNA, 100 bp, Homo sapiens
aagtgaccaattcccttggtcaaagaagtgaccaaaaagtcatctacatttcaggctggctacagcaaacatcattcaagatgtccagcaaagggagcag

SEQ ID NO: 703337 - DNA, 74 bp, Homo sapiens
aggaatgtcgaagcaaatgccatggacatggggagaacgaagtgaaactcctggtagaacggatgatggctctg

SEQ ID NO: 703338 - DNA, 83 bp, Homo sapiens
gtcgtcacctgcttcttggccgtgcctgttattaaaaaggtgtttttggggaaaaaaatcacaatctggacgtgagaaaggac

SEQ ID NO: 703339 - DNA, 75 bp, Homo sapiens
aaggaagcaacaacataatgcccagagttggagccaattaaaccaggaatgggacgcgagagataaagattctat

SEQ ID NO: 703340 - DNA, 101 bp, Homo sapiens
aatggctgccgaaaacaagccggaaggtgtgaccatgaagctcatggatgaggtcgccgggatcgtggctgcacgccactgcaagaccaacatcgtcacag

SEQ ID NO: 703341 - DNA, 83 bp, Homo sapiens
gccccgctgagcgatcccaccgaagcagcgtgtcctccgtgggagcccgagggaaatcctcattgacgattcaatttgttgaa

SEQ ID NO: 703342 - DNA, 98 bp, Homo sapiens
acgagactttcaaagatggaatcacaaacggcgcacattggtatgatgtggaaggttttcgtcttgttaacacaaagtgcatggtgttggtcgacatg

SEQ ID NO: 703343 - DNA, 82 bp, Homo sapiens
tgatggaggagatggagtggtgtctcaagtcaaaatttcagataaagagaggcctgtccagtctttgaaaacatcaagagat

SEQ ID NO: 703344 - DNA, 100 bp, Homo sapiens
atctgtcttagcaaggctgtcatcacaatacagtttatgtaacttgatggaagaaaatggaattactccaaaaagacaagtgctcaagcagcaaaatcct

SEQ ID NO: 703345 - DNA, 73 bp, Homo sapiens
ccgccaccatgcccaagagaaagttgtgacttctcaccaggagatttggtttgggccaagatggagggttacc

SEQ ID NO: 703346 - DNA, 75 bp, Homo sapiens
gctgccaagaggaacgacttctgtaaggacctcaccacggaatgtgctactgcaaacaaccccacagccatcacg

SEQ ID NO: 703347 - DNA, 96 bp, Homo sapiens
ccctcctgctcggctggtcctactacgcctacgccatccagctgtgcatagcagatataatttctacagtagaatttaatcattctggagaattac

SEQ ID NO: 703348 - DNA, 75 bp, Homo sapiens
cccatttgtgttcggacagcccctttccttccagcagcctcagcttcagagtagcctttccagtaaatatatgac

SEQ ID NO: 703349 - DNA, 97 bp, Homo sapiens
gccggcgaggatcaaaatcttcgaaggaggggtgtatgtacaaagacttttgaagaggtgtgggagcacacatgatttaaaggaaaacaaagaccag

SEQ ID NO: 703350 - DNA, 100 bp, Homo sapiens
cctggagaggatggagccaaagggagcgtgcgaaaccttgaaagccatttgatgtcccctgctgagattccaggccagcctgtccctaagaacatcctgc

SEQ ID NO: 703351 - DNA, 100 bp, Homo sapiens
agcggcgtcgagaggaccatcctgggtgctggccctgtgctggaggtgatccgggagccgaagccacgttcagcccgctggctcagcacctctatccccg

SEQ ID NO: 703352 - DNA, 50 bp, Homo sapiens
gacagttacacttagaggccttgctggagtgcagtggcgtgatctcggct

SEQ ID NO: 703353 - DNA, 75 bp, Homo sapiens
agccagcctggcatactttgaagatcgtcatggggctgaccggttccctgatgtgttacctgcttctgctactga

SEQ ID NO: 703354 - DNA, 99 bp, Homo sapiens
tgaatgcaaggccacacaaggtggatggaagagttgtggaaccaaagagagctgtctccagagaagatgtgggctctcttgatgagaagatgaagagct

SEQ ID NO: 703355 - DNA, 50 bp, Homo sapiens
atgcccatacgattaaacctgcgaagcgagcagctgcaaagcatctaata

SEQ ID NO: 703356 - DNA, 100 bp, Homo sapiens
cccagtccaagtgtatttgggactcgcagtagggaggaacaattcagagagagtgactgtgaagtgctgaccacactcaccccagacactggccgtatcc

SEQ ID NO: 703357 - DNA, 75 bp, Homo sapiens
ggccaaagtattagaaagaaacgaagagccactggagattgggaagttcagccatgaatatacaaatgcttttgg

SEQ ID NO: 703358 - DNA, 100 bp, Homo sapiens
tgtaaagatttcagaattgtcagatttcgctttgatgaatcaggtcccgaaagtgctaaaaagcgccaaatcttaaaggcagaccacgcaaaaagaaacc

SEQ ID NO: 703359 - DNA, 82 bp, Homo sapiens
ccgaatgccagcgcctcttctaccggggcaagcaggtgtcgtgaaaactacccctaaaagccaaaatgggaaaggaaaagac

SEQ ID NO: 703360 - DNA, 101 bp, Homo sapiens
agggaaagtgaggcagctgcaaggagggcggcgggactgcactcgagtgtccagacctgctcgatgatattttatgacctggtcagacagataaataggaa

SEQ ID NO: 703361 - DNA, 75 bp, Homo sapiens
tgctgtggaaacagttactgtgatgaatacaagccatctatgatgcatttgaccgcttcctccataaatacgcta

SEQ ID NO: 703362 - DNA, 75 bp, Homo sapiens
gacctttaaattttccactcaggatctcattcgtcggttcggatccaagccagttctgtggtcagcaaggctccc

SEQ ID NO: 703363 - DNA, 133 bp, Homo sapiens
ctctctctgcaacacctttggaggaggggtgtttctggccacgtgcttcaacgctctgctgcccgctgtgagggaaaagcatccccagtgcctgacctatagtaggtgctacgtatctgcttttggaatacat

SEQ ID NO: 703364 - DNA, 100 bp, Homo sapiens
ggaggagccaagtgtggcagcagttcgtgaagtctgtgaggaggtattttgaaggtggcgtctcatctgtctacctctgggatctggatcatggctttgc

SEQ ID NO: 703365 - DNA, 119 bp, Homo sapiens
ggccgaatgtgcaggatcaccgaggggaaagtgagcttgacaggctgctctttggcgtaaattgcaatcgattagggatcgtttctcagaatcaagttagaagtgagagttcagataag

SEQ ID NO: 703366 - DNA, 83 bp, Homo sapiens
ccgcagcctccgcggccgagagtgcagcgaatcctgaggaggatgaaggggctggccctggaggccgagagtgagctggagag

SEQ ID NO: 703367 - DNA, 80 bp, Homo sapiens
cttcccgcttgcgtcagggacctgcccgactcagtgacggggaaatcctttacatttatgcaaagagcgattcaagaaga

SEQ ID NO: 703368 - DNA, 82 bp, Homo sapiens
ctgcagcgggagctggacggcgagcgcgagcggcgcgagaaaacctattcaacgaattgcttgaaaactgaacaggcttttc

SEQ ID NO: 703369 - DNA, 96 bp, Homo sapiens
gccgcggtgtggcagcaagtcttagcagtggacgcgagggatcaagcatgaattgcaagcaaactgctacgaggaggtcaaggaccgctgcaccct

SEQ ID NO: 703370 - DNA, 98 bp, Homo sapiens
cggcccgtagtgtggaagcagcttcaggatctaccgctaccagtctcatgactatgccttcagtagtgtcgaaaaattacttcatgctctaggaggag

SEQ ID NO: 703371 - DNA, 75 bp, Homo sapiens
tcgggatcgaggggtgagggcgctatggcacccggctgcaaaaatccaacttagaaataatgtttcattcaagat

SEQ ID NO: 703372 - DNA, 76 bp, Homo sapiens
agaaagtggacaaagagaggagtcaggctcgggttatgtatgattttgctgctgaacctggaaataatgaactgac

SEQ ID NO: 703373 - DNA, 73 bp, Homo sapiens
gtaagcattgctgtgagcacagatgaagattatggaagagattcgggccctcccactaagaaaattcgatcat

SEQ ID NO: 703374 - DNA, 83 bp, Homo sapiens
ggaccacggtcaccgtctcctcagacctgcctagagctggaacgttacctccagagcgagccctgctatgtttcagcctcaga

SEQ ID NO: 703375 - DNA, 98 bp, Homo sapiens
gtgtacgctgtcgccacaatcccaaccaccagctgcctagagagagagaacactaaactctacatctcccttcccgagcaaggagctggctgaagcca

SEQ ID NO: 703376 - DNA, 82 bp, Homo sapiens
ccgcgggtctgctctgtgtgccatggacggctcctggccactctgaatccacttcctggctctggattggcttgtcctggat

SEQ ID NO: 703377 - DNA, 98 bp, Homo sapiens
gtccgcggagatctctctcatctcgctcggctgcgggaaatcgggctgaagcgactgagtccgcgatggagtactatggactacaaattttggaaaat

SEQ ID NO: 703378 - DNA, 75 bp, Homo sapiens
ccactcagtgtatttcagacggcaaggagttgcaggagaacccctgccagtggatagtgaaaaagacatctttga

SEQ ID NO: 703379 - DNA, 75 bp, Homo sapiens
tgttggttgtcgcccatgatctgatccggaagatgtcacctgtaactataactacccaatattgcagccatggag

SEQ ID NO: 703380 - DNA, 51 bp, Homo sapiens
gggcaacgtggccgacagcacaggtcttgatgcagaactttattatgtgag

SEQ ID NO: 703381 - DNA, 100 bp, Homo sapiens
gggcagagtactactgcgccaaatttggtgcctggagtaggagatttatcatagaatccccgactcagacccatcttctagcaaaacaaggcagatcatc

SEQ ID NO: 703382 - DNA, 75 bp, Homo sapiens
ttacttgaaacaaaaggagaccctaatcttcagcaaagcgagctgaattccttcttgtggaccattaagcgagac

SEQ ID NO: 703383 - DNA, 100 bp, Homo sapiens
agtgaggggtaacaagatggcgaccgagacggtggagctccataagctaaaggtacctagtcgatagtcgctggttcaaacagtggaaaaaatatgttgg

SEQ ID NO: 703384 - DNA, 100 bp, Homo sapiens
tttagttgctcttttggttgaacagtctcgatcagaaagtttccaaaatttgggtattcgatgtgtgaagaaaaaagaagtaaaagaagctattattaca

SEQ ID NO: 703385 - DNA, 82 bp, Homo sapiens
gtccttgtggaggaagagattgctctgtttgccactgtgttcctgaaaaggggtctcggtcgagcaaaagatgtgataatac

SEQ ID NO: 703386 - DNA, 75 bp, Homo sapiens
tccccggggtgtaataatgttaactgagatccgatcacataggacagtatgcaccttaagatcctgaagaaacgg

SEQ ID NO: 703387 - DNA, 100 bp, Homo sapiens
tggcgtcctacgtagataacagcttccgccaggcggtgatgaagaatccccccgaaaggaccccccagtatcttacagacagcaagttgaacattgtggg

SEQ ID NO: 703388 - DNA, 82 bp, Homo sapiens
aacaagctcgtgtccaaagacggcatcacggacaagaagctgaaggagcgggcagggattattgtgcaacaaagtggtccat

SEQ ID NO: 703389 - DNA, 100 bp, Homo sapiens
ataaaagagacctctacttagctcagcaattcttaccttattagtgatgatgaaccaggttatgaccttgatttattttgcatacctaatcattatgctg

SEQ ID NO: 703390 - DNA, 75 bp, Homo sapiens
agaagcgcctcaagatggccgaggaagaccggaaggccatgggcccagtcatatatgcacagttagaccactccg

SEQ ID NO: 703391 - DNA, 100 bp, Homo sapiens
ccgcggccgtagcagccgggctggtcctgctgcgagccggcggcccggagtggggcggcggatacgacgacatattccacagagcgatccgagcacttca

SEQ ID NO: 703392 - DNA, 100 bp, Homo sapiens
ccctgtggggcaaggtgaacgtggatgaagttggtggggtgacagtccaaagattgacttggccggcagttcgctatctggcatcctggacaaagatctc

SEQ ID NO: 703393 - DNA, 50 bp, Homo sapiens
tcaacttgactggctgtcactggacgaggcatttcatccttcatgaagcc

SEQ ID NO: 703394 - DNA, 98 bp, Homo sapiens
ggacaaaggaacaggtatctcaggagagtagttatcttgatggaattagaagttttgaagtcagctgaagcagttggagtgaagattggcaatccagt

SEQ ID NO: 703395 - DNA, 74 bp, Homo sapiens
actgccagggaagcgccttcatcgtgggcctgctcctcatgcaggacgccgtggaggaccggctggacaggaac

SEQ ID NO: 703396 - DNA, 92 bp, Homo sapiens
ttcacgcacgggatccagagcgccgcgcacttcgtcatgttcttcgcgccctgagataattgacgaccttgccaacctagtggagaacacag

SEQ ID NO: 703397 - DNA, 87 bp, Homo sapiens
ggttttttattaatcaagcggtcaggataccggggttccagaccatcaggatatagcttttggggccttgcagcagggaactaactg

SEQ ID NO: 703398 - DNA, 49 bp, Homo sapiens
caaggacagcttttttcctgcaagataacttttaagtggtgaagagtat

SEQ ID NO: 703399 - DNA, 83 bp, Homo sapiens
ttcacaggtgtttctgcggcagatgccgacaaaaggatcaaggtggcgaagcccgtggtggagatggatggtgatgagatgac

SEQ ID NO: 703400 - DNA, 74 bp, Homo sapiens
tcctgagtatcctggacgcccagacatggctgtcccaggtttgacaactattcagccaatgtgatggtggacag

SEQ ID NO: 703401 - DNA, 75 bp, Homo sapiens
cctggggtcggcgccgagtgggaggatggcggaacatgatgccttcttctgtagagtgggcgctttgcagaatac

SEQ ID NO: 703402 - DNA, 75 bp, Homo sapiens
ccttcaccgcgggcgccaatggggagcagaaggactcggacacaggacctgaaggagaagaaggagaaggtggag

SEQ ID NO: 703403 - DNA, 51 bp, Homo sapiens
tcatgttaaccaggccaaacaaatatcctccgaatcctaaatctagagctc

SEQ ID NO: 703404 - DNA, 82 bp, Homo sapiens
ccccgcctgcccgcccgggagctgtcggccccggcccgactctatcacaagaaggttcgatacaagaggctgttttcctagc

SEQ ID NO: 703405 - DNA, 90 bp, Homo sapiens
gggcggaagattccttcttacatcacagacctgccctctgaagttctctccacggaactctaatgatccaggacaaagaagttaccctgg

SEQ ID NO: 703406 - DNA, 100 bp, Homo sapiens
ggacaccaaggtacccaatgcctgtttattcaccatcaacaaagaagaccacacactgggaaacatcattaaatcgagccagaggttagtgaattaaaaa

SEQ ID NO: 703407 - DNA, 97 bp, Homo sapiens
agtttgtgtgctcggatggctcgggccaggccaccggacaggctgaagccgacgtagcttctctgaacagacgcatccagctggttgaggaagagtt

SEQ ID NO: 703408 - DNA, 100 bp, Homo sapiens
gcccaacttccagcaggacaagattctcacggctctggaccgagatgcctcttgtcggaagcataagttgcggcagaaactggaacagatcatcagcctc

SEQ ID NO: 703409 - DNA, 88 bp, Homo sapiens
ggcctgctatccctccagtatttgtcatttctactctccccatattccacaaaaatgtcttccactacttgatggcgtttttgcgaga

SEQ ID NO: 703410 - DNA, 75 bp, Homo sapiens
cttctgggacctggcactaagggagcacgccgcggtcaaccagaaaaagtgtgagcgctactgggctgagccagg

SEQ ID NO: 703411 - DNA, 83 bp, Homo sapiens
gatttaaccgctctctgcctcccagaacatccagtcatggataaaaatgagctggttcagaaggccaaactggccgagcaggc

SEQ ID NO: 703412 - DNA, 88 bp, Homo sapiens
gtccgctgagcggggcgacccgaggaagaggaggaagagccggaaggaaaaccaagtgatgcagaaagttcggagagttcagatgatg

SEQ ID NO: 703413 - DNA, 82 bp, Homo sapiens
gatgccgggggagcggggccttccacaccccctccgtgggtgtgtgaattaaatgtgagggagtctgacgtaagagtttgtg

SEQ ID NO: 703414 - DNA, 83 bp, Homo sapiens
gcggccaccgactactgtcagcagctgtgccaggatggagatattctagcatccaacttctctgttgacacacaagtcgcgta

SEQ ID NO: 703415 - DNA, 100 bp, Homo sapiens
gggaaattcgtgcctgtgaaatctaacaagagcccagcacaagattgacgtgcacctccacgatgccctgggccggccacatcagtgtgggacaattcag

SEQ ID NO: 703416 - DNA, 100 bp, Homo sapiens
gcaggaggctaaagatatttgcgaggagcaggtcaactctctagtgatccctgaaaagttccagcatattttgcgagtactcaacaccaacatcgatggg

SEQ ID NO: 703417 - DNA, 83 bp, Homo sapiens
cacgtctctaccgagcacaaactccacgaagccaacgcccagccatcactggtgcaagctatatttaacggagatcctgatga

SEQ ID NO: 703418 - DNA, 74 bp, Homo sapiens
actaccatttggttgcagcaaagaggaaatagttcagttctttcaagtgagggtcgctgtctgcccattgatag

SEQ ID NO: 703419 - DNA, 80 bp, Homo sapiens
tgaggtcaatgggcatttcttcaaaaaagcaatgttgatcccagggatgatgtatttggatatcctcaacaatttgaaga

SEQ ID NO: 703420 - DNA, 100 bp, Homo sapiens
gcccggagcccggcgctttccccgcaagatggacggtttcgccggcagtctcggttgcactgctgtgatccatcctcatctcctaaagatgcatcctgac

SEQ ID NO: 703421 - DNA, 75 bp, Homo sapiens
gcagccttcagcttttggcagcatgaaagttagcagacctgctgaagttcccatgatgtcacccaatggatccat

SEQ ID NO: 703422 - DNA, 112 bp, Homo sapiens
cggaatgctgcccgatggccctgggtcctcgctgtggggcaatccgggcttgcagacgaggttgcccgaagctcagcagagagtcggaggctgctttttaaacctgatgcca

SEQ ID NO: 703423 - DNA, 100 bp, Homo sapiens
gagtgcgactgtccccgcggaaggggctgtcaaggggctcccggagatgctaggtgtgccgatgcaacagatcctgaaggagctagacgagtgctacgag

SEQ ID NO: 703424 - DNA, 96 bp, Homo sapiens
caagctgtggtgtgcaggtgaacaagctgtggtacaagcccgtggaacaattcatcttaccagagacaagctgtaacccttcacgtgccttacctt

SEQ ID NO: 703425 - DNA, 100 bp, Homo sapiens
aaagtgtcaacatagacttgacatatgatatacagtcatttactgatacaggctgagaatcaggctgaaagccgggcagcagtggaggggacagtggagg

SEQ ID NO: 703426 - DNA, 100 bp, Homo sapiens
ttctcctgcctcagcctcctgaggagggatataagaccttcttcaacacactctaccataacaacattccccttttcatcttttctgcgggcattggtga

SEQ ID NO: 703427 - DNA, 100 bp, Homo sapiens
gcaggagaagcccccagaaccaggcccccaactcagccatctgcggaggtcaagatgagattgtggggaacctgggtgaaggcacctttggcaaggtggt

SEQ ID NO: 703428 - DNA, 75 bp, Homo sapiens
ttattggtctacaaagacagcaagcagacaaaaggatcggcaaaaggaaatggacaattttctggctcagatgga

SEQ ID NO: 703429 - DNA, 100 bp, Homo sapiens
gcagatgcagtgtggctctggatagcaccttatggacagatcgtctggggaatatttttcatcttagttgcattgctgtttgtaatttctctcttcttgt

SEQ ID NO: 703430 - DNA, 83 bp, Homo sapiens
caagtcctccttgccaggccttcaaccactatctcagtgcaatgggtgcctggaatacttattaagaaacgatgcaaatccag

SEQ ID NO: 703431 - DNA, 100 bp, Homo sapiens
gggacctcatgtccctgtgggacacaatgcccccaaggtcggggtatgataggtcggggaagagggggctttggaggccgaggccgaggccgtggacgag

SEQ ID NO: 703432 - DNA, 82 bp, Homo sapiens
tgaggagtttaaggagctgaaagcgcggactgcccacagtggtgaaactggtagacagaaacaccttattaaaagagagaga

SEQ ID NO: 703433 - DNA, 101 bp, Homo sapiens
ccttcctcctggtccacctccagatgacttcagccgtgtgagattagtctccatgaatgaagaggaaggtgcagactacatcaatgccaactatattcctg

SEQ ID NO: 703434 - DNA, 75 bp, Homo sapiens
ttggagttggaatttgtgcaatgtttagccaacccaaattaccttaattaaggagggacgtgtgaagtgatagca

SEQ ID NO: 703435 - DNA, 100 bp, Homo sapiens
gcagttaggcagcagcagccgcggagcagtagccgccgtgggagggagccatgaagcattacgaggccttctccacagtaggcactcctgactacattgc

SEQ ID NO: 703436 - DNA, 76 bp, Homo sapiens
agacagaagtggggagaagcggaggtatcgagaaccttccctgcgaacttcagaggaacttccagctgatgcgaga

SEQ ID NO: 703437 - DNA, 82 bp, Homo sapiens
actcaagtatactttgggatttgttgtgatttgtgcactgcttcttttagttgggccattccccgatttaaccagaaaggag

SEQ ID NO: 703438 - DNA, 111 bp, Homo sapiens
tccgcgttcccagcccgggtccccgcgttcacagccccagcgcaggtactccaaagattcaggtttactcacgtcatccagcagagaatggaaagtcaaatttcctgaatt

SEQ ID NO: 703439 - DNA, 82 bp, Homo sapiens
ctgatatgcaatgtcacttacaacattaatcagatactgcatttaaggttttaaaatcaaagatgggaaaatcggagaaaat

SEQ ID NO: 703440 - DNA, 100 bp, Homo sapiens
cttatggttctccattgtgatgaaagcacatggtacagggctccgccatgtcacagatgaccagaagacatacaaaaatcccagcctgcgggctcaagga

SEQ ID NO: 703441 - DNA, 103 bp, Homo sapiens
ccgtcggcagcaagaacagagagagaggtggacagatctgagagatactgagggagtgcatccgccccaacccttttccccctcgtctcctgtgagaattccc

SEQ ID NO: 703442 - DNA, 51 bp, Homo sapiens
gtcgcggggacaaactacttcatcaaggtcaatatccaacacagccaacct

SEQ ID NO: 703443 - DNA, 100 bp, Homo sapiens
gcattcttgagctattccaaagagatcacagaggccaccaccaaagagaagactaagaatctaccatagtttgccccgtgagacggtttaagcggaagca

SEQ ID NO: 703444 - DNA, 100 bp, Homo sapiens
tcgatgtgctctgcgtgttgctgggagtatgctgctgctgttccgctttgcgtcctcgctacaaacgcctggtggacaacatattccctgaagatccaaa

SEQ ID NO: 703445 - DNA, 96 bp, Homo sapiens
cgcttatgacccttctttgtcttcgcacgtaacacaagtggcaagacagccgggaacccctaccccatccccttattcagcacatgaaataaacaa

SEQ ID NO: 703446 - DNA, 88 bp, Homo sapiens
gacacactctgcgtcctcgcctcaccagattctgacatcaaagtacttgaagatcagtttgatgaaatcatagtagatatagccacaa

SEQ ID NO: 703447 - DNA, 100 bp, Homo sapiens
ccatgtcagacgcagccgtagacaccagctccgaaatcaccaccaaggcacgccagccccacgggcctgctcctgacggtgctggtggccctcacctaca

SEQ ID NO: 703448 - DNA, 49 bp, Homo sapiens
tccccgtcgtcctggtgctgcagcgatgtggtgaagctgtagagaaaaa

SEQ ID NO: 703449 - DNA, 104 bp, Homo sapiens
ggcaccgacgtcatcatgctgaccaccaatcagatccgtaaggcccagctgagagccagcctggaggttacccagcagcaggccacccaggccgaaggccagct

SEQ ID NO: 703450 - DNA, 74 bp, Homo sapiens
ggctgaggctggacagagcacagatcatgatgctgcgattaatagatatagccgtttatcaaaaaaaagagaaa

SEQ ID NO: 703451 - DNA, 90 bp, Homo sapiens
ccgggcggcgcggcggctccgcagggttgaagctttgagagaagcagcaactgctgttgagcaagagaaagaaatccttctggaaatgat

SEQ ID NO: 703452 - DNA, 82 bp, Homo sapiens
tggcaacatcaggtgactgtcccagaagtgaatcgcagaaaagctcacagatcaggtgatgcagaatcctcgagttctggca

SEQ ID NO: 703453 - DNA, 90 bp, Homo sapiens
gtcacagtgaagcatctcgaagagattgtagagaagctaaaaggagaacttgaaagttcggaccagatgtgtcgtggaggccgaatgttt

SEQ ID NO: 703454 - DNA, 89 bp, Homo sapiens
ggagagaactcagcgaggattctgagcagatataatttctacagtagaatttaatcattctggagaattactagcaacaggagataaag

SEQ ID NO: 703455 - DNA, 96 bp, Homo sapiens
aaggagctcttacagatggacctgtacgcgctgctaggcattgaggagaaggcagcggacaaagagctcagattccaaatgaaaatgtttgagagc

SEQ ID NO: 703456 - DNA, 100 bp, Homo sapiens
agcatggcggccgccggggctgcggctacacacctaggccatccacggcttccgagagacagagaagtcgcgctggtcagaagccagccgggccatcctg

SEQ ID NO: 703457 - DNA, 100 bp, Homo sapiens
cagccatgtggccatcgcagctactaattttcatgatgctcttagctccaataattcatggtggaagtgctgcatcagtaaatgctaattttgctcattt

SEQ ID NO: 703458 - DNA, 75 bp, Homo sapiens
gtacatggacaagcaccctggggggctgcatccagataatgtgaagaaataagcgggttttgaaaacaaaaaaaa

SEQ ID NO: 703459 - DNA, 100 bp, Homo sapiens
tgagaagaccaccatcaacaatgagtacaactaccgctgctggaccacaaaccgctgccagaaaagataccgcccaccaccattttcagaaaagttcttt

SEQ ID NO: 703460 - DNA, 90 bp, Homo sapiens
caaagtccttcagcttcgactattcctactggtctcatacctcaccttatgattctgcagatgactggtctgagcatattagctcttctg

SEQ ID NO: 703461 - DNA, 101 bp, Homo sapiens
ttcatgagagaagaaatacaggatgcctctcagctgccacctgcctttgacctttttgaagcctttgcaaaagtggagataagtaattaacatttcgaaac

SEQ ID NO: 703462 - DNA, 83 bp, Homo sapiens
gcggatcgaccggagcagagagctggcgagcaaggctaaccttgccgcgggccgagccctgcctcgccatggaccaggactat

SEQ ID NO: 703463 - DNA, 75 bp, Homo sapiens
gaacaacaacccattagttccccttgggatgtagtttttggaacatcagaactgataaatttcaaacggaagaga

SEQ ID NO: 703464 - DNA, 50 bp, Homo sapiens
tttgactctgacagtcctcccactaagaaaaagcttgtggtgaagggggg

SEQ ID NO: 703465 - DNA, 100 bp, Homo sapiens
aatagaggacttgaagcagaaagcaagtgaatacgagtcagaagatgctggtttttcagcagcagacagagaagccagtctggagcttattaaactggac

SEQ ID NO: 703466 - DNA, 100 bp, Homo sapiens
tccgcgagcccatccgtctcaagactgtgaaaccaggtacctcaataataatgagttgacagcggtaccatccctgggcgctgcttcatcacatgtcgtc

SEQ ID NO: 703467 - DNA, 99 bp, Homo sapiens
ttaacaccgacgagcaggcactggaagaccacttcagcagtttcggacctatctctgaggatgtgtcttgctgaatcagggctctcttatccctgccat

SEQ ID NO: 703468 - DNA, 80 bp, Homo sapiens
caggtgtaagcgcagaaagcaggcgaacccgcggcgcaataacgatggatggagtggaaccctggcttccccttgagcat

SEQ ID NO: 703469 - DNA, 98 bp, Homo sapiens
cttatacctggtggtctttctgatggtcagttttattcccctcctgaatccgaagcagatgtcatcacaatggatcccaaagacaattggtcaaaaga

SEQ ID NO: 703470 - DNA, 99 bp, Homo sapiens
aaacagtttctggtgaaagtattgatccctttacacactgtcaggagcttatcactcttccatgcacaggtaacctatgcatgtggcacaaaattcaaa

SEQ ID NO: 703471 - DNA, 100 bp, Homo sapiens
ttaaggattccaagtaactcttatttgttgatttatgaagactctatggatctaatcgcaaagctaccttgtgttgcagcaaagatctaccgaaatctct

SEQ ID NO: 703472 - DNA, 100 bp, Homo sapiens
cgccttcacccgcttcaccaaccagacccagggccgggaccgactcttcagataaaccgagaaaactggtgtacaatagagccatgccctgatgcagcat

SEQ ID NO: 703473 - DNA, 88 bp, Homo sapiens
cttggaagcaatgtttgaacaaactcgaagaacagctgtggaaagaagttgcaaaacactggtcaggatggctaaaggtgaccccaag

SEQ ID NO: 703474 - DNA, 51 bp, Homo sapiens
cagtacaaaaaaagcacagcctggctctgggtggctttgtccactatggtg

SEQ ID NO: 703475 - DNA, 100 bp, Homo sapiens
gaagaattgcagagacgattacagtttgaagagaaaaagaaacagcgtgaaattgaggtggggtgaccgctctctgttgggacccagtccagcgggtgtt

SEQ ID NO: 703476 - DNA, 124 bp, Homo sapiens
ggaggaagccctttctcctcggcactgtattctttacctgcttcccaatcccactgatgaggatcagcccatgaattacggatccagatcaggagatttgaggagctgctgccccaagtgtgtt

SEQ ID NO: 703477 - DNA, 98 bp, Homo sapiens
agagcctggagtctgcgaaggccgggacccggttccccggcccacagtgggggtgtgcaaacccgagagaactgggtgctggaccagggactgagcgt

SEQ ID NO: 703478 - DNA, 76 bp, Homo sapiens
ctcaggggaagaagctggacttcagccgtccaagtgacctcttccatcccagtatttgacctccaggatggtggac

SEQ ID NO: 703479 - DNA, 100 bp, Homo sapiens
accagcatggacgctcgccgcgtgccggtgtaccaacagtaccgttattgccaccacaagtaaaccagtccctcacttctgtgccaccaatgaatccagc

SEQ ID NO: 703480 - DNA, 75 bp, Homo sapiens
gaaaaatgaccctgaactggaccagcaggcccagctgagagccagcctggaggttacccagcagcaggccaccca

SEQ ID NO: 703481 - DNA, 90 bp, Homo sapiens
tttgaaccaaattatgctgcaaatgatgattcaaagccgccttactcctacgcgcagctgatagttcaggcgattacgatggctcccgac

SEQ ID NO: 703482 - DNA, 100 bp, Homo sapiens
aaaagactcgctatgacagtggacaggacctagatgaggagggcatgaatatgggtgagacctacagagttgaaacagtgaaacctggaaagattgtctg

SEQ ID NO: 703483 - DNA, 100 bp, Homo sapiens
ctgggccagccggacgaggtccgcgggggaggcggcggcgccaagcaagtgctctacgtgcctgtcaagaccacgcagcaagatgaagagcgacgtcggc

SEQ ID NO: 703484 - DNA, 100 bp, Homo sapiens
aaatatgacatcttggcctcagaggatgtagaagttgttgacctcctgtactggagagacattaagaagactggagtggtgtttggtgccagcctattcc

SEQ ID NO: 703485 - DNA, 100 bp, Homo sapiens
cgcagatcagaggtagtcggacctttcccgctggcgcgcagcctcagctagactgtgccctgtccacggtgcctcctgcatgtcctgctgccctgagctg

SEQ ID NO: 703486 - DNA, 97 bp, Homo sapiens
tatatcatgcagagaaaagagatggaaacttacttgaagaaggtctatgttaacaatgaatgggcaaccagtgttggggaaggagggagctttggag

SEQ ID NO: 703487 - DNA, 100 bp, Homo sapiens
ctgcccgccggctccctcccccgcgtccctgcgaccgccgcggcgaagatggataacaaagctgatgtaattttaaagtacaatgcagatgaagctagaa

SEQ ID NO: 703488 - DNA, 96 bp, Homo sapiens
ttctggttagacatcagtcctttgtactggttggtgagactgggtctggtaaaacaacacaggagatttcttctatcttacaggaactgaaaagag

SEQ ID NO: 703489 - DNA, 100 bp, Homo sapiens
ccccaagtaacgccgccgccccggagccgcctagccggatcgagctgggagatgtgacaccacacaatattaaacagttgaaaagattgaatcaggtcat

SEQ ID NO: 703490 - DNA, 101 bp, Homo sapiens
caggaggaaaattccttttcagaaaatcagccatttccttctcttaagatgggtttcaaagacaacctccacgctgtgttctgcttggctgagaactcggt

SEQ ID NO: 703491 - DNA, 100 bp, Homo sapiens
agagggatgggttacatgcccaagaggggacttgatgttaacaaatgtgagattgccaggatgctgacagacagcaccaagaagtaattgcaatttatcg

SEQ ID NO: 703492 - DNA, 100 bp, Homo sapiens
agctccccagaaatgaacctgcccacggtgtccgcgctcaggctgcaagctttcttcctggtggcagatgacatcatggattcatcccttacccgccggg

SEQ ID NO: 703493 - DNA, 75 bp, Homo sapiens
tgcttttgtaacttttgatgatcatgatacagttgataaaattgttgttcctacaacagcagccagtacccctga

SEQ ID NO: 703494 - DNA, 99 bp, Homo sapiens
cacgcacgcggtgcagggtaacatggcggatgcggaagctagacttcgggctccttgaggatattcagttttgtatgtttgaatatcctctcaccatgt

SEQ ID NO: 703495 - DNA, 100 bp, Homo sapiens
cttcagagcgtcacggcgtacgccctcatggggaaaatctccccggtgactttcaggatggtgccatgacaatggtgtgaactacaagattggagagaag

SEQ ID NO: 703496 - DNA, 75 bp, Homo sapiens
tgacatccgagcgaaagagaaagaggttgcagtgagagcagatgctggcaagaagcacttaccagacaagcagga

SEQ ID NO: 703497 - DNA, 100 bp, Homo sapiens
ttctactgctcctagacccagcctggagcctaccagagctgcccctttgtttaattggttggggtcagataagaagaggagtgacaatcaagccaacagt

SEQ ID NO: 703498 - DNA, 75 bp, Homo sapiens
gtctgacatggaggatgatttcatgtgcgatgatgaggaggactacgacctggcctgtatccggtgtccgaggcg

SEQ ID NO: 703499 - DNA, 97 bp, Homo sapiens
cgctggccgcgggctccatcagcatggctgaggtgcagtggaggcttgcctcttgcatcagctgagacgccgtgccgctggcttcctgcgcagtgac

SEQ ID NO: 703500 - DNA, 100 bp, Homo sapiens
gacaagttattgatgctgaacgtcaagcagaaaaagcttttcaacagaacatacatatgatagttgagaaagacacatattctgatcatgaagaaataaa

SEQ ID NO: 703501 - DNA, 80 bp, Homo sapiens
cagaagctgcgtcccaacatccccaactggtggcagagttatgaggtgtcgtgaaaactacccctaaaagccaaaatggg

SEQ ID NO: 703502 - DNA, 101 bp, Homo sapiens
gagacgctgcagaccatgggccccctccacggcaccatcaccgttctgctccaccctgaatgaagtcaacacctcctcaaccatctcctgtgacagccccc

SEQ ID NO: 703503 - DNA, 100 bp, Homo sapiens
caagaagaccattcagatgggatctttccggatcaatccagatggcagccagtcagtggtggagaatttttccctagattggtgtaaacagccagacgtg

SEQ ID NO: 703504 - DNA, 75 bp, Homo sapiens
aaagtcctgtgccggcagctgtggccaacagcaacagagagagtccaggtacaggtttgcagattccgccagcag

SEQ ID NO: 703505 - DNA, 75 bp, Homo sapiens
cttccactctctaaaaatgcagatcatttactgcacctaaagacaaaggaatgatgagaagacagcagctgatta

SEQ ID NO: 703506 - DNA, 50 bp, Homo sapiens
taaccagggagtgggctactgccaggactgcctccgggcctgccaggagc

SEQ ID NO: 703507 - DNA, 75 bp, Homo sapiens
cagcagtggtggtggaggtggaggtggaggtggagacctgcgaccgcatcaagcagtccgccagcggaaccaagc

SEQ ID NO: 703508 - DNA, 97 bp, Homo sapiens
gcggagccagcacgaacgagcccagcaccggccggatggagcgtccgcaacccgacagggaagctgatggcattctgaaacctcttcccaagaaaag

SEQ ID NO: 703509 - DNA, 100 bp, Homo sapiens
cttcacttgaaataccggatgattttggagacatatgaagatccatgagaaggaccctaacagtgccacagccacagcccctccatctcctctgaaacgt

SEQ ID NO: 703510 - DNA, 75 bp, Homo sapiens
cagccgcggcggcagcagcagtgagagggtttggaaatcccttgtctccaggttgctgggattgacttcttgctc

SEQ ID NO: 703511 - DNA, 100 bp, Homo sapiens
cgccgcgtagcttccatccgccagctgccatgagcgagcgcctccgtcccagggccaattcctgtccccccagcagcatggcatcgtgtgctgaaccctc

SEQ ID NO: 703512 - DNA, 100 bp, Homo sapiens
gcgctcttcgtggggctgagagacggcgtcctgcgggtcccactggagaggtgcgccgcctaccgcagccagggacacttacatattcaggggaaatttg

SEQ ID NO: 703513 - DNA, 100 bp, Homo sapiens
aaatgaagttgatggatttagatgttgaacaacttggaattccaggagaattcaaacagacctcgtcattcctggtgtgagcctggtcggctcaccgcct

SEQ ID NO: 703514 - DNA, 100 bp, Homo sapiens
tgcagccgcagcctgtggctgtgcagggccccgagccggcccgggtcgaggtgctccagctgctgctcctgcccctgcctcagtcccacagatatcccag

SEQ ID NO: 703515 - DNA, 100 bp, Homo sapiens
gcgcctttcgccgtggacgccgaccgtccgggacgaggtggatccataaagaacccagccaacccgcagagggaggggaggggctgagctgtgaggagag

SEQ ID NO: 703516 - DNA, 82 bp, Homo sapiens
cgagacccgccggcctacatcgaggaggaggatagcaaacaagctcaatttttagccttggcagtagtatactttatctctg

SEQ ID NO: 703517 - DNA, 98 bp, Homo sapiens
ggaaggcttcaaaggctgtcgcaaggaggaaggtgattgcatactcggaacatcgttaccgtatctttggggaaaccatcgatattgcagtgggtaat

SEQ ID NO: 703518 - DNA, 50 bp, Homo sapiens
agtacaccttggccagcactggaccccctggaacagctgtccctccacct

SEQ ID NO: 703519 - DNA, 98 bp, Homo sapiens
cgcccaccagttcgcccgtccccctgccccgttcacaatgagctgaagaagaagctgttcaaacgccggcgggtgttgaatcgggagcggcgtctgag

SEQ ID NO: 703520 - DNA, 100 bp, Homo sapiens
cacgcaccgactatgtcgcctgccaccgagccgggcccacctccccaccaaggaaggcccctggccccaacatggcccgtcgctctcagagctcctcgca

SEQ ID NO: 703521 - DNA, 98 bp, Homo sapiens
ctgcccacacctcttcccggcccctgaagttggcactgcagcagacagctccctgggcaccaggcagctaacagacaaaacctgctacaaccccctct

SEQ ID NO: 703522 - DNA, 83 bp, Homo sapiens
ctctgactctcggactgagaaacgcaaggttggaagtactccatgacacacactcggagaaagtcccttcccatgctgagttc

SEQ ID NO: 703523 - DNA, 51 bp, Homo sapiens
acacatctatgtcctcgccttggttggagggcagagcggcttgggtaaatc

SEQ ID NO: 703524 - DNA, 100 bp, Homo sapiens
gcagtgaagctcaagttgctactcgggacgctgcacctcccgcgccgcacggtggacgagcccattgcagatgcaaaggctcctgagaagcgggcctcac

SEQ ID NO: 703525 - DNA, 96 bp, Homo sapiens
tagatatctgtgtgaagtacttgtcaggtctccttgaggcccaggatgttttggtgcaggagatggaagtggttaaacaaggaatgagccatggag

SEQ ID NO: 703526 - DNA, 51 bp, Homo sapiens
ggagctgcactcaaggagaatgtctgtcagacaatgcctgtggaagacaag

SEQ ID NO: 703527 - DNA, 98 bp, Homo sapiens
gcgccgttacagacgtggctactatggaaggcgccgtggccctccccggaatgactgactgcattgcacagatgatggatatttacgtatgtttgaaa

SEQ ID NO: 703528 - DNA, 80 bp, Homo sapiens
agacttcaccaggggagatggcacaggaggaccaggagctgcattatctattctagacaaatttcttgaagaatcctcca

SEQ ID NO: 703529 - DNA, 87 bp, Homo sapiens
gccactgatcccccgaagagcttctgtcgccgctctaggctccccagttaaagatctcagatgaccggctgactgtggttggagaga

SEQ ID NO: 703530 - DNA, 75 bp, Homo sapiens
agaaagtggacaaagagaggagtcagcctgtgggccaaagctgaccaactcccccaccgtcatcgtcatggtggg

SEQ ID NO: 703531 - DNA, 75 bp, Homo sapiens
agctgggcttcccgtacatgacgccggtgcagacgagagattaaacagttattgtctgagttggatgaagagaag

SEQ ID NO: 703532 - DNA, 100 bp, Homo sapiens
tcgccgaccgctacgctgtctactggaacagcagcaaccccaggtggttgaccagattgacaccctgacctctgacctacagctggaggatgagatgact

SEQ ID NO: 703533 - DNA, 97 bp, Homo sapiens
aaagttgatgggaaaaactaccaagactcgaggaccaaaggttcatgcatgggagatctcagaccagttgttacagatccggcaggatgtggagtca

SEQ ID NO: 703534 - DNA, 100 bp, Homo sapiens
attttggaagagggagtcaccactggacctccaaggaagccacgtgcagacatctacaaccttcgatctcctgacgagtgtttggagaagagggattgac

SEQ ID NO: 703535 - DNA, 101 bp, Homo sapiens
gcagacgagtggccaggcttctggggctgactcaactgcaccaatgttgttatgaattattcagagatcgagtctaaggttcgagaggcaacgaacgatga

SEQ ID NO: 703536 - DNA, 100 bp, Homo sapiens
aggccacagcagaagagatatgtttgagatcctcacgagatacgcgtttcccctggctcacagtctggatgtatatacaaagacgatatctttatggtcg

SEQ ID NO: 703537 - DNA, 89 bp, Homo sapiens
gaatgaacattgtattgagaacaatatagatttgcaggcacgtggaggagttcagccccagagctgtctacaccagtggtaaagcgtcc

SEQ ID NO: 703538 - DNA, 83 bp, Homo sapiens
aaggagctggaagtgctgctgatgtgcaacaacgtcgagggcgaggcccccagcagtgagactggcacatccctggacagccc

SEQ ID NO: 703539 - DNA, 74 bp, Homo sapiens
gatttttggcctaccctccaaagaaaagctgagatctgtatctgtggacctgaatgttgatccctcgcttcaga

SEQ ID NO: 703540 - DNA, 82 bp, Homo sapiens
ggctggtggtgcttccaactgcgggacaggaagtggccgtagcggcttgttggataaggaacgaatgatcacacactttgaa

SEQ ID NO: 703541 - DNA, 83 bp, Homo sapiens
atgatcagcgtagtcaagtaccttctagatcttggagttgatgctccaggttatggagatgttaggttgtctttggaggcaat

SEQ ID NO: 703542 - DNA, 82 bp, Homo sapiens
agtcggcgagcccccgcggcgacaggtccggcctctttggcctacccccgttggctccgctgccccaggtcgatgagtcccc

SEQ ID NO: 703543 - DNA, 74 bp, Homo sapiens
agaggttccctccgagccccttcctgagaagatcccagacgaacaggaggcattgaactcaatcatgaacgatc

SEQ ID NO: 703544 - DNA, 83 bp, Homo sapiens
ctgggatcccggccaccagcaattgtccggtgttgacagctcttctaccacaagcagtgcttctccaatgcccaacagttatg

SEQ ID NO: 703545 - DNA, 90 bp, Homo sapiens
ctcagtcagtctcttggtttggtctctaaaagtaaaggcagccccgggctcagctcctggttcccagtatggcacaatgaccaggcagat

SEQ ID NO: 703546 - DNA, 100 bp, Homo sapiens
tgtacccggtggactcggtgaagagaccatttgtttgtgactatgaagggtgtggcaaggccttcatcagggactaccatctgagccgccacattctgac

SEQ ID NO: 703547 - DNA, 100 bp, Homo sapiens
gttagtgctgtgtgctggagggcactaccagatgggatgagctttgatccaaaccttctccacaacaatggacataatgggtaccctaatggtacttcag

SEQ ID NO: 703548 - DNA, 83 bp, Homo sapiens
catccaagagaatccctcaacatgctggatatcactactttaactggagttccagaagagcatataaaaactagaaaagtcag

SEQ ID NO: 703549 - DNA, 75 bp, Homo sapiens
caacatttgccagttgagatttaattctgatgccgaggagtcttgtaaatgtaatggctggaaaaaccctaaccc

SEQ ID NO: 703550 - DNA, 50 bp, Homo sapiens
gccagtttggctgaaaataaaaggtttggaattcacccagttgcaggccg

SEQ ID NO: 703551 - DNA, 100 bp, Homo sapiens
aagcagttctacaaggcgagccaggttatgatgtgattgctcaagcccaatctgggactgggaaaacggccacatttgccatatcgattctgcagcagat

SEQ ID NO: 703552 - DNA, 98 bp, Homo sapiens
tcgctcagaagcagaggctgcaaagaatgctttgaatatgagtgaccgaggaggtggcgttcctttgaggaaaattgacagacttttcaactacatgt

SEQ ID NO: 703553 - DNA, 101 bp, Homo sapiens
cccgctccgcccagagtccgatggcggcggcactgagggccccgacccagacggagtctcacactgtcactaggctggagtgtcgtggcatgatctcggct

SEQ ID NO: 703554 - DNA, 83 bp, Homo sapiens
gcagcgggctttgccagcaaaaccgaaacagaacctgtggcatattccttggagtatctccaggttgagaattcatgatccgc

SEQ ID NO: 703555 - DNA, 50 bp, Homo sapiens
cgtgactcctgtgaaggatcagagttacttgttattggtaaatagccact

SEQ ID NO: 703556 - DNA, 83 bp, Homo sapiens
cctccctggatgccctgaagatcagcatccgccagctcaagtggaaggaggttcctagaaggtgagcgcggacggtatgcaaa

SEQ ID NO: 703557 - DNA, 98 bp, Homo sapiens
caaaatgtcaacaaattgatggaaagatcaactgaaatcggcaaacttctgagttcctacttgcaaaagaaaagtgacgtggaggatcactcggtgca

SEQ ID NO: 703558 - DNA, 90 bp, Homo sapiens
ctcaagcaatcctaccatgtcagccttcccagtagctggaactacagcgttttgctgctgacatcatctccgttttggccatgaccatga

SEQ ID NO: 703559 - DNA, 100 bp, Homo sapiens
agtggaaggagcagaacgtgagggtgtaacttacaaaaaggatgccggctccaggagcagcagtggaggtcgggaacgcctcattgtggagcccccgctc

SEQ ID NO: 703560 - DNA, 82 bp, Homo sapiens
gacaccatgaagcaactgccagtcttggaacctggagacaagcccaggaaagcaacatgagactgggtttcaccatgttggc

SEQ ID NO: 703561 - DNA, 75 bp, Homo sapiens
accttcactgggatgatgcgctgcagccagctggcccccagggccctgcaggtgtacgtgaacggagagtgggtg

SEQ ID NO: 703562 - DNA, 97 bp, Homo sapiens
caagactaaaaactaaaggcctgggcctgagaactgaatcaggaattgaatgatctggcacgggaccctccagcacagtgttcagcaggtcctgttg

SEQ ID NO: 703563 - DNA, 90 bp, Homo sapiens
cttctgggagctgaggaaccagatatcttgaaaagctgccagaaagtgtggacaacagtgagtatatgcggaatggagacttcttaccca

SEQ ID NO: 703564 - DNA, 75 bp, Homo sapiens
ctggcctgggcgctccggtggcggcggaggtctcctccgggctggggctgagcaagccctcggagtgaccgtggg

SEQ ID NO: 703565 - DNA, 96 bp, Homo sapiens
caaggagggaacgagtggaagattgcgtcacgacgcacataaagacgtacgaagccgtcgccaagttggacgtgataagtatgagcctgcagctgt

SEQ ID NO: 703566 - DNA, 100 bp, Homo sapiens
gaggggcgcgcggagatggcagcgtccagcaactccagcctgtccggctcgtcggtgtcctccggttgtttcacgaagaaatccagaggatgtccaggag

SEQ ID NO: 703567 - DNA, 89 bp, Homo sapiens
ctaactaagccagagaaccaggatattgactggactctattagaaggagctggagtcagatggcagcactatggaggactattcacagg

SEQ ID NO: 703568 - DNA, 82 bp, Homo sapiens
ggaggcagaagatttctggccagtggagagaggaattcctcaagacaccattccagggccggtcactccgcgcaagtttggg

SEQ ID NO: 703569 - DNA, 100 bp, Homo sapiens
agacatctttgatcaccagattcatgtatgacagttttgacaacacctatcagggaacatttacggatgagaagtcaaaagcttcccaccacatttaccc

SEQ ID NO: 703570 - DNA, 100 bp, Homo sapiens
acgctcactgtcagcgcctggaaacttgctcacgacagtcattttgtttactcattcagccctgttgcaggtcccaataaactcttcataaggttgacag

SEQ ID NO: 703571 - DNA, 100 bp, Homo sapiens
gcctgagccgctcttcccttacagtttctttgagcagtttgtggaagcgatcattgatgcggatgaaattaaaaggctaggaaagagatttaagaagctt

SEQ ID NO: 703572 - DNA, 97 bp, Homo sapiens
cgtgggaggcggtcccgggatttcaggggtctaccggctctcttatggcgaatgcaacccgaagagagagtgagaagagaagctgaatttggacgac

SEQ ID NO: 703573 - DNA, 89 bp, Homo sapiens
cagatcgcagagctcaagatgcagctggccaagaaggaggaggagctgcaggcggccctggccagcaaatggacaatgccgtgtatacg

SEQ ID NO: 703574 - DNA, 75 bp, Homo sapiens
tcatcatcagcctgagcctactgatcggcgtagtcaaggcctcaggcccaggcccaaggccaagtgagagagccc

SEQ ID NO: 703575 - DNA, 101 bp, Homo sapiens
caagatgatagaatgattttaaagttatgggactacaacagcagccacaggaaccttgaatagtaaagaatatggtcatactttccgcagtgacctgagag

SEQ ID NO: 703576 - DNA, 100 bp, Homo sapiens
gttactgcggctggggcggccgaggaacccccaaggatggcaccgattgggtgattctgggggcccacttgtctgtaatggtgtgcttcaaggtatcacg

SEQ ID NO: 703577 - DNA, 75 bp, Homo sapiens
gcggccccagtgccgcccccgggcgcgctcaggtggccttccttcagggagagaggaaagggcaggagaatctaa

SEQ ID NO: 703578 - DNA, 100 bp, Homo sapiens
ttcagtccgaaggaggaagggaaccaacccactttctcggcgccgcggctcttttctaaaagtgcagaagtcaattcatctggaaagactatctctgagt

SEQ ID NO: 703579 - DNA, 75 bp, Homo sapiens
aactgggctttcggcgcggggggacagaggaggctcgtggggagttttcggctttgtgagaaaccttaccatcaa

SEQ ID NO: 703580 - DNA, 98 bp, Homo sapiens
ccagacaccggtgtcatgagcaggaaggaaccgctggaaacactgaagaggaccaaactcttacccaggatctactggagcagctgttggagcccatg

SEQ ID NO: 703581 - DNA, 100 bp, Homo sapiens
caactctttcaggaactttggctacacacagaagaagagagatggggtgagagctaaagcattccaaaatatgcccggtgctatccgcccagctgctcct

SEQ ID NO: 703582 - DNA, 100 bp, Homo sapiens
acttcgacctgagctgggaggccactagcagccagttccggcccgaggacaccgactaccagcagggcgccatgttttggaagtttgacctgcacacaag

SEQ ID NO: 703583 - DNA, 110 bp, Homo sapiens
gaggtgttggtgaagaccttggactctcaaactcgtacctttattgtgggggcccagcccccggtccctgagaagcggccccctgaaatacagcatttccgcatgagtga

SEQ ID NO: 703584 - DNA, 97 bp, Homo sapiens
cgaggtttggagccggagcggattattggagctacagactccagtggagagctcatgttcctgatgaaatgctgcatatctatgtgagactgaattt

SEQ ID NO: 703585 - DNA, 80 bp, Homo sapiens
cctggggctgctaatgctctgggtctctgacttcattagaggggtggtagactcggaggatctccctctaaacatatccc

SEQ ID NO: 703586 - DNA, 48 bp, Homo sapiens
tgtacctgcagtcagatgatgaggtactctgtggatatccccttggac

SEQ ID NO: 703587 - DNA, 74 bp, Homo sapiens
atttagagctgcggaacaggacgccctctgatgaattgcattttgtgaaaaaagaacaagaattttctgcaagg

SEQ ID NO: 703588 - DNA, 98 bp, Homo sapiens
cggggaggtcacctgacgaggaggttaatccctatatcctgaagaagaacatgatcctcatgacaaatcatttctatgcagcgatcttgggatatgat

SEQ ID NO: 703589 - DNA, 100 bp, Homo sapiens
gttaatgggccgggaccgaaacctagccccggacgagaagcgcagcaacgtgcggtgggaccacgagagcgtaggcgaaaaccaagagtacatcggcctc

SEQ ID NO: 703590 - DNA, 98 bp, Homo sapiens
cgcagttcttcatccacccactaatgatcagagatgcaattgaccgtgaagttgaagctgttgatagtgtatgtccgtggttcagaccctgtattaaa

SEQ ID NO: 703591 - DNA, 98 bp, Homo sapiens
aaaagagaccgagtggatcatatcctgagtcaaggaaacttttcttttgagctactgacagcttaactcctgtgaacaaaatttggagcatatttgtt

SEQ ID NO: 703592 - DNA, 73 bp, Homo sapiens
tcggacgctcctgctcggctgggtcttcgcccaggtggccggcgcttcaggaatgtctgaatctgaacaggct

SEQ ID NO: 703593 - DNA, 50 bp, Homo sapiens
atcccgagcagcgtcatgtaccccttggagcccacagtgaccatctcccc

SEQ ID NO: 703594 - DNA, 100 bp, Homo sapiens
cattaacctgcgagaagtcatctgcacgtccagggtgtccctggccagtgtccttccacctgtccacaagcatggggaacatcttcgccaacctcttcaa

SEQ ID NO: 703595 - DNA, 100 bp, Homo sapiens
cgaggccgggcacagccttcctgtgtggttttaccgcccagagagcgtcatggacctggccaggcggcactccagggtccggcccaaggtgactgtcctg

SEQ ID NO: 703596 - DNA, 82 bp, Homo sapiens
ctgaaacagaaattctggaacacctatatggtctgggatctgccgatatgggggatatgaagacccctgattttgatgacct

SEQ ID NO: 703597 - DNA, 100 bp, Homo sapiens
cgccggggaggcagcgcgggatcccagcctcaggcgtgcgcggacggtgtgcggatccgagcagttggcagactaaaaagagagcggtctatgagtgaaa

SEQ ID NO: 703598 - DNA, 83 bp, Homo sapiens
gtgctcgctggcaccccgaacgggttgcttcccccgctgcgaggtacatccagacactgaaggaccacaggccccggatggtg

SEQ ID NO: 703599 - DNA, 121 bp, Homo sapiens
aggattggaggtgtcagtgttaaaggaacctctacaacgaaggtgaagccacggaagataaggtaaatacgagttcacagtataccagcaaaagtaggatttacatattattttgaagatt

SEQ ID NO: 703600 - DNA, 100 bp, Homo sapiens
gggtgcaggcagccctggtgtgggagcggccagctaggagcgctctgtggtgcctggggctgaacgcggctttctgcttccaccaacactttcttccaaa

SEQ ID NO: 703601 - DNA, 75 bp, Homo sapiens
caaatccccacaggagaaggatttcaacatggagcccagctatgacttcctacacatctatgaaggggaagattc

SEQ ID NO: 703602 - DNA, 100 bp, Homo sapiens
aggccagcctttgctctatctccaggcaagaattgtcagacagtattggctccctgttccccaaacccttgtgagaatgctgctgtttgcaaagagtcac

SEQ ID NO: 703603 - DNA, 100 bp, Homo sapiens
ggcaggggcggaggcggaggcagaggtggaggcgctttgaaagggcccccagatgccgacggccctctctacctcccctacaagacgctggtctccacgg

SEQ ID NO: 703604 - DNA, 96 bp, Homo sapiens
cccggttcctgggcccacgctaccgggagctggtcaagaactggttcgtgctggccgtgggcagcgccgtctttgatgccatgttcaacgggggaa

SEQ ID NO: 703605 - DNA, 97 bp, Homo sapiens
ggatttgttaaggattccaagtaactcttatttggaagaggagcaggacttggatggtgagaaggggccatcatcggaagggcctgaggaggaggac

SEQ ID NO: 703606 - DNA, 82 bp, Homo sapiens
ggtgctatctcggagacacatgaaggtggcattttttggcaggaggatttgttggtattgaggaaaacggtgaaatcctttt

SEQ ID NO: 703607 - DNA, 97 bp, Homo sapiens
gcgaccagaccggcccccccgaggttacgtcgctggatttgtagacttggaggtgagcaacagaccagacctctatgatgtgtttgtgaatctggca

SEQ ID NO: 703608 - DNA, 74 bp, Homo sapiens
cgaccatatctccttgatcctggctgtggactggctagtgttggtgatgacaaaactgtgaagcagtggaaaat

SEQ ID NO: 703609 - DNA, 74 bp, Homo sapiens
ctgcgctcgcgcccggatccctcagacagaagcattaaaatgcgtggctcaggctagcaagaacagatcactgg

SEQ ID NO: 703610 - DNA, 100 bp, Homo sapiens
cgggatgggagcaggccaacgtcctgcggcctggttgagctcgcactgacaatcgcaggtagttctcactggaattggtgcagatgagcaacttgcaggt

SEQ ID NO: 703611 - DNA, 100 bp, Homo sapiens
gacggcaccgtcaccgaggcgccgcgcacagtcaagaagtatctccagatgaaatggccactgcttgatgtccaggcagggagcctccagagtagacaag

SEQ ID NO: 703612 - DNA, 90 bp, Homo sapiens
gtgatattttgatctgccgtgatcaatatcaggaaaggccccatcttcccttcacacctgctcgaagagtgtggaaaaactaccttcctg

SEQ ID NO: 703613 - DNA, 100 bp, Homo sapiens
atcacctcgatgactcttgggtgactgtatttggagcagagaggagccttcaggggaagtagaggtggccgaggttggggcacacgaggaaatcgtagtc

SEQ ID NO: 703614 - DNA, 76 bp, Homo sapiens
gaacctgcagtcctttaacgagatcactgctatgaaaactacccctgagtgtggtcccacaggatatgtagagaaa

SEQ ID NO: 703615 - DNA, 75 bp, Homo sapiens
tccaaaggcagggcaaggaaactggccacaaatcaggatcctcatgaccagccaaagagaagaagaattaggaag

SEQ ID NO: 703616 - DNA, 98 bp, Homo sapiens
gtccgaggctcgcgggcggcgggcccggacaaacgatgcggccggcaacacctggaactggctctacttcatccctctcatcatcatcggctccttct

SEQ ID NO: 703617 - DNA, 100 bp, Homo sapiens
caagaataaaggaatgaatgaatggaagaatgatataatgccacagaactttcaaagaatcctgaggttggcttgaagcctgtgtggtatagtcccaaag

SEQ ID NO: 703618 - DNA, 83 bp, Homo sapiens
cagagtgccggaccccagcacacagaagccgagacgccgccaccggcacggccaggccagcatggtggaccacttacttccag

SEQ ID NO: 703619 - DNA, 74 bp, Homo sapiens
gtttctccaaggtttgaaaagcagctggcctgcaaggatgctttggagtctgcaatgaagaatggcctgtgggg

SEQ ID NO: 703620 - DNA, 83 bp, Homo sapiens
caaaaatccagaagtacaagcagtctggttccaaataagtttcgctatccattctactatgagatgtgttggtatgtgttgga

SEQ ID NO: 703621 - DNA, 98 bp, Homo sapiens
cgaaacctggaggcccggggggcccagctcccgtagggagccgtgggcgctcggtgcccgggccgggcagtgatcgtaaacttgttgataaagaagat

SEQ ID NO: 703622 - DNA, 78 bp, Homo sapiens
actgaaggaatcaagacagcggaatcagacaggtggtcttcgagggatagcacgaggtggtctgacaggactaacact

SEQ ID NO: 703623 - DNA, 100 bp, Homo sapiens
aattttccttgacctttaggtgcttttatattcatctcaaaaacaaaattctgaactcaggacttggcaattgaggagctcaagcttgggaaaatggtgt

SEQ ID NO: 703624 - DNA, 100 bp, Homo sapiens
caggaatcatgggctatcaaagatcgtcagtatttaaacagatcacatcatgcgtgagtacaagctagtggtccttggttcaggaggcgttgggaagtct

SEQ ID NO: 703625 - DNA, 75 bp, Homo sapiens
ggaagctactactacgtggtgcttggaaagcaattctgtggtgttcttggtcacacatttatggagtttctgaag

SEQ ID NO: 703626 - DNA, 75 bp, Homo sapiens
cagcaatgaagaagaggaagaaagtgaaaatgattgggaagaggttgaagaaaaagttacgtcgatcacaacacg

SEQ ID NO: 703627 - DNA, 96 bp, Homo sapiens
gagcacaacaagatggccatgtcccaggtgtcagttgtacccgaggcgttctcagcagcagcaagtacctgtggtggatttccaggctgaactgag

SEQ ID NO: 703628 - DNA, 50 bp, Homo sapiens
ttggagaactcactgatgaagtttctgatactgtccttcctgaaatgaag

SEQ ID NO: 703629 - DNA, 82 bp, Homo sapiens
atcattatcacaggttcagaagatggttgctccttgagggcaggacagttcttatggctttatccgttgcgtaagcacagag

SEQ ID NO: 703630 - DNA, 98 bp, Homo sapiens
acaaacctcacagccagagccagagtacaagttgtgcaaagtgaggaagattactgtgggagtgaagggaatccctcacctggtgactcatgatgctc

SEQ ID NO: 703631 - DNA, 75 bp, Homo sapiens
aagactcttcccggttgatcgtggattatttgaggtggtgaagcagtattttccaatttgaagattcatttgaag

SEQ ID NO: 703632 - DNA, 83 bp, Homo sapiens
atcatgctggccaagaagatcatcattaaggacggaggcacgtaagactttgaccccgacgcaggcttcagtgattgccgcgg

SEQ ID NO: 703633 - DNA, 105 bp, Homo sapiens
cgctgcccagaagaagggaaggcgcgagtgaggaaaggaggtactgtaggaatcatattgacaggtcatgaaaatgagaccaaaagatctctggaagcgattaat

SEQ ID NO: 703634 - DNA, 100 bp, Homo sapiens
ataattccaatcatcttacaaaactggaaactgaggcatctaatatgaagctctgcaagatttgaagggtcccttaatatggaccttaatgaaatcagca

SEQ ID NO: 703635 - DNA, 80 bp, Homo sapiens
gttcgccagcagcccaagagcctcaaaagcttgtgagcctgcaggtcctggatcaacacccagttgggacaggagaccac

SEQ ID NO: 703636 - DNA, 89 bp, Homo sapiens
tggatttatttctcgattcgctgtcggaggagaatgagaccctggtggagtttgctattggaattgaatgatctggcacgggaccctcc

SEQ ID NO: 703637 - DNA, 98 bp, Homo sapiens
gaaaaatcgagcagaaagaatgtctttcagatagagaacgtcacttttcaccatgaagggttcttctggaggtgttggtttaatgggattgtggaaga

SEQ ID NO: 703638 - DNA, 100 bp, Homo sapiens
ggaaaggccagccggtttgagaagacctcttccatctaaatgacagtagctacagcaagctgggtagcaggcagatccaaaggatatcatgaagtttcca

SEQ ID NO: 703639 - DNA, 79 bp, Homo sapiens
cagcctcccgagtggctgggattacagtgtgacagctatgaaattcgccctggtaaacaccttggagtgtgcatttctg

SEQ ID NO: 703640 - DNA, 100 bp, Homo sapiens
atgaggatgatttccagatccaaagatcacctaacaggtggagctcagtattctggaagattactcttgtctctgctgctcctgggaaagtgatttgtga

SEQ ID NO: 703641 - DNA, 80 bp, Homo sapiens
aacatgctagaattacctggaacttcatcatcatctacttcacaggaattgccatttgacagctaacccccgcatcggtg

SEQ ID NO: 703642 - DNA, 100 bp, Homo sapiens
ccatcagcaagctccagtgctacgtgtccctggcattttaggtgtcggttggtagagacggggtttcaccgtgttagccaggatggtctcgatctcctga

SEQ ID NO: 703643 - DNA, 100 bp, Homo sapiens
gagtcccgtattctcagagtaaaagttgtttctggaattgatctcgccaaaaaggacatctttggagccaggggtcagcagattatgatccagaggccaa

SEQ ID NO: 703644 - DNA, 83 bp, Homo sapiens
tttgtggatcgctgtgatcgtcacttggagatttcctctggaagacatcccgctggatgaaaaggaagcagctcagtggcttc

SEQ ID NO: 703645 - DNA, 102 bp, Homo sapiens
tgccctgagacggtgtcccgccgaaagggttgaaaggaggagcaggaggtactgatggacaaggaggtaccttccggtacacctttcatggcgatcctcatg

SEQ ID NO: 703646 - DNA, 76 bp, Homo sapiens
aaggccctggaagtgacagagcgggtgccacgtctatgtgggcttcgtgctgtgggctgctgaatgaagtcatggg

SEQ ID NO: 703647 - DNA, 101 bp, Homo sapiens
cggcagaggatccagtgttcaccatcctggccccggaagccggcacagtcttcactaccgtagaagaccttggctccaagatactcctcacctgctccttg

SEQ ID NO: 703648 - DNA, 100 bp, Homo sapiens
gcactgcagtgttcccattattcgattctttggcagttggtgaaaattactgatggctctccttccaaagaattatgcatagtaatgtgcttaaaggact

SEQ ID NO: 703649 - DNA, 100 bp, Homo sapiens
tggtcgcaaaggtcatgctgttggtgatattcctggagtccgctttaaggccccgagtccccgtacacgcactggaagcagacggtgttctacatggagg

SEQ ID NO: 703650 - DNA, 75 bp, Homo sapiens
tacgtcccgctgccgtcgccgccgccaccatgcccaagagaaagggcttttgttgtaacaccctgactttaaaag

SEQ ID NO: 703651 - DNA, 83 bp, Homo sapiens
ggaaaaacttcttgccaaccaaagtaatagcctgcagctggtgttttgagaagccctactgctgaaaacttaacaattttgtg

SEQ ID NO: 703652 - DNA, 74 bp, Homo sapiens
gatcagatggtactgaactttttgatcaggccctttctggttactgtggctttatggcagccaacctttatgct

SEQ ID NO: 703653 - DNA, 75 bp, Homo sapiens
gacatgttctcaccacccttgctgctgaaatgggttgcggattgaacaagttagagaaacgtgatgaaaaacggc

SEQ ID NO: 703654 - DNA, 88 bp, Homo sapiens
agatcagattcaggttcgacgggcagccaatcaatgaaactgacactccagcacagctttcaccaacaatcaccagtggtttacacaa

SEQ ID NO: 703655 - DNA, 83 bp, Homo sapiens
gggttattcgagtgaccgagaccgcggccgggaccgagggttctccttactatgacaatgtccgccccctctcttaccctgat

SEQ ID NO: 703656 - DNA, 49 bp, Homo sapiens
gtactgcgcctggatgtggccaggaattgaatgatctggcacgggaccc

SEQ ID NO: 703657 - DNA, 100 bp, Homo sapiens
atggatgttaaaaatcaacaccaggactacagtaaggctgaaatcattgaagtgcttggagtgcagaactgaaagagtgtgcaggatgacagaattcgag

SEQ ID NO: 703658 - DNA, 97 bp, Homo sapiens
tgaaagaacactttgcacagttcggccatgtcagaaggtgcattttaccttttaatctacctgttactcgtattttggacaatcttatggagatgaa

SEQ ID NO: 703659 - DNA, 75 bp, Homo sapiens
gttggaataccggctctcagcggctgatgaagatttgataaagtggaaggcactgtttgaggaagtccctgagtt

SEQ ID NO: 703660 - DNA, 75 bp, Homo sapiens
cagctgcggtggcagctgctgagttctcggtgaaggccgtttgagcaaggaagacattgaacgtatggtccagga

SEQ ID NO: 703661 - DNA, 71 bp, Homo sapiens
caagatgagccccaaggacctgtttgggttgggacaaccgaggaggctgcggcaccccctgccctgctcac

SEQ ID NO: 703662 - DNA, 75 bp, Homo sapiens
gctactctctctttctggcctggaggctatccagcaaatgcactcggtgatggaaagagagccactattctgaag

SEQ ID NO: 703663 - DNA, 82 bp, Homo sapiens
tgcaacctgtccggggatcccagggaggacgagattgaggagctgcgggccgagatgctggagatgcgggacgtctatatgg

SEQ ID NO: 703664 - DNA, 100 bp, Homo sapiens
tgctggttctgctgcttctgggccctacgcgcggcttgcgcattagaaatgatatttgccaaatttgatgaagtgcaaagttcaggcggtatgattttga

SEQ ID NO: 703665 - DNA, 100 bp, Homo sapiens
agatgctcatcctccaggaacagcaatattgcatatcaaggacaaccgcatccagggtggctacgagaacgtgccgactattgacatccacatgaaccag

SEQ ID NO: 703666 - DNA, 90 bp, Homo sapiens
gcttcccagggatcttgagagtgaagatctcgaaggatttcataggtgtttgtaaaatgtatgaagaacatctgaaaagaatgaatccca

SEQ ID NO: 703667 - DNA, 100 bp, Homo sapiens
caacgctgtgaccctgggagattactaccagggccggaggattaccatcaccggaactaataatcacaagaagttgtcagaatttggaattagaaatggc

SEQ ID NO: 703668 - DNA, 75 bp, Homo sapiens
cagccgatccagcctgcggagcctgtggggcagtctgaaccggacggcttttctcatttccacttgtacgtgtgc

SEQ ID NO: 703669 - DNA, 87 bp, Homo sapiens
aacatctatcgtaatccccaaaacagtgcacagacggctgacggctcacactagaaactccagaaaatcttgccaaacttctgacca

SEQ ID NO: 703670 - DNA, 90 bp, Homo sapiens
gagcaatgacattgggggcctgtggaaattttcagaaatggatcagacaatggctgccaatgctcagaagaataaattcttgattgatgg

SEQ ID NO: 703671 - DNA, 75 bp, Homo sapiens
aagctgacactctcaccctgaaggaacgggagcggctgaagaaaagggtgttggtgtctgtccagtcccttatat

SEQ ID NO: 703672 - DNA, 51 bp, Homo sapiens
tctcaaccttgtacaagccttaaggagcctgccagatgtgtctgctacaga

SEQ ID NO: 703673 - DNA, 50 bp, Homo sapiens
cccagggctgcctggtggctgagacatcaacgagtgtgcaacaccgtcga

SEQ ID NO: 703674 - DNA, 100 bp, Homo sapiens
caccagtagcttttctgagaatacttgctgaaaaggaagttttctggaatggatgtgttcagagcaacattgttttgttgacacaagcatttagaagaaa

SEQ ID NO: 703675 - DNA, 100 bp, Homo sapiens
gtgatggataggagcaaccctgtaaaaccagccttagactatttttcaaacaatgaggtggaaagtgagaaatggtacctgtctacagacttcccttcaa

SEQ ID NO: 703676 - DNA, 98 bp, Homo sapiens
caccgtctggtgtctaaaccgcctcggacaagccaaacggctcctgggacagattgtggaccgctgtcgaaatggacctggctttcataatgacatag

SEQ ID NO: 703677 - DNA, 100 bp, Homo sapiens
cccagattatcgaggacagcagaacaaagggggagaaattggctttacgatgaacatgttagacattggtggaggattcacgggaactgaatttcaattg

SEQ ID NO: 703678 - DNA, 98 bp, Homo sapiens
aaataatttagagtctcctctttgcatcatcagttttctgcactggaaattacagggctatctttgaagaaaccaggcattatattgtacttctagca

SEQ ID NO: 703679 - DNA, 90 bp, Homo sapiens
gcaggcccggagctgcattgaggaccgactgaggctggaggatgagaacgagaagcagggctcacgagcagctaaatgtgaaacatgaac

SEQ ID NO: 703680 - DNA, 75 bp, Homo sapiens
ggctgcggcggggcggacggtcgcgcggcggcaggcacagtactatactggcaattgctggagaagattttgcaa

SEQ ID NO: 703681 - DNA, 97 bp, Homo sapiens
gtttgtcactggcacatctcgggtgcctatgaatggatttgctgaactatacggatttggtgctatggagaaatttttggtagaatataagagtgca

SEQ ID NO: 703682 - DNA, 98 bp, Homo sapiens
gaagcagtaggaaatgtcactgcagctttaaaaagcagtgggctctggaacaacacggtgttcatcttttctacagaaatagttgttgctgaaagtgt

SEQ ID NO: 703683 - DNA, 87 bp, Homo sapiens
ctggttccagctgcagcacgtggacgctgactcggaagtgcaggagatggtaacctgcacctcaatgtgacggcggaggccttcagc

SEQ ID NO: 703684 - DNA, 74 bp, Homo sapiens
caagagcgattgctacacatggacagtgatgatgaaattcctatcaggatggagctgacctcaagggaaagagg

SEQ ID NO: 703685 - DNA, 96 bp, Homo sapiens
gttcctcattaacatctgtctgtccgcttagtcatcacatcatttcactgtgatcatggaagggaagtggttgctgtgtatgttactggtgcttgg

SEQ ID NO: 703686 - DNA, 96 bp, Homo sapiens
agagagaggaataccgcaagagctggagtaccgccacctccccgctgggtggggagaggcccttcaggacttgaactgccatgtcctctgaagaag

SEQ ID NO: 703687 - DNA, 97 bp, Homo sapiens
gaagcaaattgaaggcacaggaatatccatgtcggcttgtagagagattgcacatcatctgttcctgtggtatcccccaacacggatgagtttttag

SEQ ID NO: 703688 - DNA, 90 bp, Homo sapiens
cgctgtgacggccaccaagattgccaggatggccgggacgaggccaattgccgttgtcccagttttggtgcatctcctgtctgctatcag

SEQ ID NO: 703689 - DNA, 49 bp, Homo sapiens
ctggtggactggctgctggctcaggtcctagcttactctgccaccactg

SEQ ID NO: 703690 - DNA, 88 bp, Homo sapiens
gagagcaagccgggcggcctgccccgccggagcagcatcatcaagcttcctgcctgacacagctcacttcaagaagtgcacaatgtca

SEQ ID NO: 703691 - DNA, 75 bp, Homo sapiens
tcgcggctctaacggggctttctacaaggaatgcgatgttaattctggggcattgatgttttacaatgcctgatc

SEQ ID NO: 703692 - DNA, 100 bp, Homo sapiens
tctgagactggataagatgaccttcagtgtgctgctcaaaaacagagttgtctgctggttctcagcttgaagaagattctgcagtccttattgatccttt

SEQ ID NO: 703693 - DNA, 100 bp, Homo sapiens
accagattcttgatggtatccattacctccatgcaaattgggtgcttcacagagacttgaggcgacaggaagaagggtattacagccgcctggaagccga

SEQ ID NO: 703694 - DNA, 89 bp, Homo sapiens
tggagttcttacaacatggcagacattgacaagaaatctactttcttcaatgtgttaaccaatagtcaggcttcagcagaaaacttccc

SEQ ID NO: 703695 - DNA, 96 bp, Homo sapiens
caaaattggaggtggagaaccaagtttaccctcagaaaaagtaagaactgaagaggcagggtcgacaagtgcccccaatgatttatggtacaactt

SEQ ID NO: 703696 - DNA, 121 bp, Homo sapiens
gcgagtggactcctgcgcctccatgtacagccgctccatccagggccaccatgtctgcctcctggtgaaaaagctgcaccacctcgtgagcgatgacgtctgcctgaaggtggtggagctc

SEQ ID NO: 703697 - DNA, 85 bp, Homo sapiens
agagccatctctttataattccctaagcatagctatgcagactctaaagcagtatttggcagtcgtattcagagataaacccctg

SEQ ID NO: 703698 - DNA, 51 bp, Homo sapiens
tcaattttcgccaactctagtaaacctccacagctgttgagaaaaaggaga

SEQ ID NO: 703699 - DNA, 82 bp, Homo sapiens
gacagcacctcatcccctggatgggggaccacaagatcctcatcgacagccctgaccctctattctgcaccctgtgagccac

SEQ ID NO: 703700 - DNA, 90 bp, Homo sapiens
ctcagcttcacctccatgggcatcaacatgtggtacaggagctgcagcaggccatctccaagctggaggcccggctgaacgtgctggaga

SEQ ID NO: 703701 - DNA, 100 bp, Homo sapiens
tcacacccatgcctatgatattcttctcctggttaatcaagaattctctatttctgctccgtcatccatgccacttacagttgaaagcagagtgtaacaa

SEQ ID NO: 703702 - DNA, 90 bp, Homo sapiens
gaatttcctcttctactttcggacagacgaggccgagattttcagctgaactctcatctctcaacactggcaaatattcataagatctac

SEQ ID NO: 703703 - DNA, 100 bp, Homo sapiens
ttggggggaaactaggtcgatggtcggcggcgcccggatgggcagctgaggcgtcccatcaggtccccgcaatgttatctccatcgtcaatgagacgtcc

SEQ ID NO: 703704 - DNA, 75 bp, Homo sapiens
ctggtcccctgctttaaccatcgaaaatgagtgtgattatccaaaaccctctgggttcttctacgttggaactgt

SEQ ID NO: 703705 - DNA, 100 bp, Homo sapiens
actgcgccgcgtcttcctcaagctgcatatctatgtgagactgaattttcctcttagacttcagctaaaactgtgtattgcatcaggctgagagcagaca

SEQ ID NO: 703706 - DNA, 101 bp, Homo sapiens
tgtatgtagaagaccagaagtggatggagagttgcataccctgtcctgagggcgcggcacggagtgcatgcgggccgctgccatgacgaccgccatcttgg

SEQ ID NO: 703707 - DNA, 100 bp, Homo sapiens
ctccagaggatcatggcagctcctatgagtcaagctacaacttcaagcagaagagagaggagttgtgtctatcaaaggagtgtgtgctaaccgttacctg

SEQ ID NO: 703708 - DNA, 100 bp, Homo sapiens
aaggcggtgcggtgtgcctcgggtcggtgcaccgtccgggattttatccaccggcactgccaagatcagagctcagggcgactgtgaccctgaagcacca

SEQ ID NO: 703709 - DNA, 100 bp, Homo sapiens
cgtgacggaagttcgagccctcagggcacacgtgtttcacgttgacaggtttgcttgggacgctagtaaccatgggcttgctgacttagccaaagaagag

SEQ ID NO: 703710 - DNA, 89 bp, Homo sapiens
acccgacagagcaaattggccgcagcgaagaaaaagatgtccaacatcacagtcacatacagagatggccgagtggcacagctggagca

SEQ ID NO: 703711 - DNA, 75 bp, Homo sapiens
ggcacggcgtggaggaggaaccagaccgcggccagagcgttcaggtgtgttctactccctcttctgggaatgaag

SEQ ID NO: 703712 - DNA, 88 bp, Homo sapiens
ggaggttcgagcgctgttctcgctccggagccgctgcacatttcgttctggccaggaatgatggatgaactctccgagttgagagaat

SEQ ID NO: 703713 - DNA, 100 bp, Homo sapiens
cctcccacctcgtctgggctcgcggcgtctccggggaaagccgtggccccgagggcggatccgagattcacagtctgagaatgaggcttcaccagtaaaa

SEQ ID NO: 703714 - DNA, 50 bp, Homo sapiens
ttgactacaattctcaacaacagttctctcagctactggaagagaaaaac

SEQ ID NO: 703715 - DNA, 100 bp, Homo sapiens
gacgctgttagacgccgagaccccagagaagagacgcagttactcatctcaagggcagggtctgggtctttatcgtttggttaccacagagaagcgcttc

SEQ ID NO: 703716 - DNA, 73 bp, Homo sapiens
gagctctgaccgaggcgcctcgctggggcggggaccttgccttgcccgggggaaatcctcattgacgattcaa

SEQ ID NO: 703717 - DNA, 82 bp, Homo sapiens
tggcaatggcacaaagttctctcgatcagggcatacatctttcttcgacaaaggaaaaactgattgcttatcaacgagaatt

SEQ ID NO: 703718 - DNA, 78 bp, Homo sapiens
gcaccctaacatcatcgcattcaatgctccagcttttctgcagctcacccaaggctgctctccgctatgctgctgttc

SEQ ID NO: 703719 - DNA, 120 bp, Homo sapiens
agtggcggtccgacagagtcctccgtgtcctcccccgcatgacccccttgcggctatgtgactacgtttgtgacctcctcttagaagagtcaaatgttcagccagtatcaacaccagtaa

SEQ ID NO: 703720 - DNA, 83 bp, Homo sapiens
catccaagaaaacagcaaaacttcacgtagcggtgaaggaactgtggctgcaccatctgtcttcatcttcccgccatctgatg

SEQ ID NO: 703721 - DNA, 98 bp, Homo sapiens
ctttacaacagtgccactgacccctatgaggtcctgctgtactagccaccaaagcagctgctggtactaagaaatatgatcttagtaaatggaaatat

SEQ ID NO: 703722 - DNA, 100 bp, Homo sapiens
cgagctgctgctgcccgaggcggaccgacccgggccccgcacagcaaatccagtttgctgatgacatgcaggagttcaccaaattccccaccaaaactgg

SEQ ID NO: 703723 - DNA, 100 bp, Homo sapiens
tggacaacatgtcccaacattacatcccaacggagccggtgggagaggagagcatctccgacgcagagaaggtggccatggatctcaaggaccccaaccg

SEQ ID NO: 703724 - DNA, 135 bp, Homo sapiens
aggacagcgtggactttgatattgatgtgaacgcctctgtgtttgaaacaaacattcgagaattcatcatcgaatatgaagatgcaatgcacaagccagggctgtggcaccaccaaactgaagtttctggaacac

SEQ ID NO: 703725 - DNA, 75 bp, Homo sapiens
ggaacttttaagtggagtggtggatcagaccaaagatgggtaaggaagatactccctcattacttggcctctgtg

SEQ ID NO: 703726 - DNA, 74 bp, Homo sapiens
gtggagcagaaggcagaaagcgtgggcagaattatgcctcacacggaggcatcttatgttaacctacctaccat

SEQ ID NO: 703727 - DNA, 82 bp, Homo sapiens
gagaaggaggggtatgagccacacatccccgaccacttgcggcctgagtatgccggtggctgctggcagcggaatcccccag

SEQ ID NO: 703728 - DNA, 82 bp, Homo sapiens
ctggacgcccgtgcactgggccgcgcatttcggcaagaacaccttccaccatgaccacctcagcaagttcccacttaaataa

SEQ ID NO: 703729 - DNA, 75 bp, Homo sapiens
gcctgtaccaaacgtggttgtacgagacgtggcctgtggcgctaaccacacggggctgacattcaccctacgccc

SEQ ID NO: 703730 - DNA, 82 bp, Homo sapiens
ccccgtggatctctggagtgttggctgcatatttgcagaaatgtttcgtagaaacaccagatactgctacaccatctcatcg

SEQ ID NO: 703731 - DNA, 100 bp, Homo sapiens
ggaagagctgcagtctttgtgggacaaggttcggcagtgtcttcccgagcctcaacatggctgtgaagaggcgggaacaggccttgcaggactacaggag

SEQ ID NO: 703732 - DNA, 100 bp, Homo sapiens
ggccccgctccctcccagcagagctacctatctatggagaaaatcattcaagtggccaagacctctgctgcacaggaatactcccccagttgcaagaggc

SEQ ID NO: 703733 - DNA, 50 bp, Homo sapiens
gcgaagacgcggtgggccgcccctccgacaaagggtggaggatatgaaag

SEQ ID NO: 703734 - DNA, 75 bp, Homo sapiens
tgaaactgtacacaacaagcatcttgatctagaaaatataacgatggcgtgatcaacatgagcatccccattgta

SEQ ID NO: 703735 - DNA, 51 bp, Homo sapiens
agtgttatatcctccaggaatactggccagattcaattagcagagcctcac

SEQ ID NO: 703736 - DNA, 83 bp, Homo sapiens
tctcgttccagttccagagaacgttcgagatctcgtgggtcgaaatcaagtaagaagactgttagaatgccctcggtaacaca

SEQ ID NO: 703737 - DNA, 100 bp, Homo sapiens
tttctggtgtcctgaacctggaagttgtgctttttaagttctgcctcctgggggcattgctggcccccatccgagtgcttctggcctttatcgtcctctt

SEQ ID NO: 703738 - DNA, 51 bp, Homo sapiens
agcggagagcgagagaggggagcaggtgccctacgagacgctgaacaaacg

SEQ ID NO: 703739 - DNA, 90 bp, Homo sapiens
atgggcccccactccatgtcggtgcccaccacacccaccctgggcttcagcactggcagcccccaggattactacagcatcccatttccc

SEQ ID NO: 703740 - DNA, 100 bp, Homo sapiens
catcctgagtttcccacttgattacccgttaagtcccccaaagatgagatttacctgtgagatgtttcatcccaacagagcccagtttcctccaattgca

SEQ ID NO: 703741 - DNA, 98 bp, Homo sapiens
caaaaggcaaattattttggaccttcagattaggttatacattggctcttcaaagacgttcacctcatcagagaaatccctgactcctttgcagtggt

SEQ ID NO: 703742 - DNA, 100 bp, Homo sapiens
gtggtcactactgtgtggggagttggcaacgcgacacagagccagggtcttcccggaagccctggaccccaaggccccgttggcccccctggaaagaaag

SEQ ID NO: 703743 - DNA, 83 bp, Homo sapiens
aaagtcatcacctcctgggatcagatgtgcattgaggttacaagaggacccacctgtgggtgtcagtggcgcaccatctgaaa

SEQ ID NO: 703744 - DNA, 100 bp, Homo sapiens
ttgacctcaccaagagggcgggagaactcactgaggatgaggtggacccccaaaagtacaagggcatatttaacggattctcagttacacttaaagagga

SEQ ID NO: 703745 - DNA, 71 bp, Homo sapiens
aagcgctatgccaagaagcgaaatgtgctcattggccattcctacggccaagacaatgcaaactccagtga

SEQ ID NO: 703746 - DNA, 101 bp, Homo sapiens
agtaaagttggaacacagcagagggtgtgtaataaaatacaggacactggggttgggaaatcaagcatcgtgtgtcgatttgtccaggatcactttgacca

SEQ ID NO: 703747 - DNA, 75 bp, Homo sapiens
acgagctgttggcatccttggatgtgctagtgctgctgatgacagatgtactggtgtttctccaggaaaaggacc

SEQ ID NO: 703748 - DNA, 100 bp, Homo sapiens
gtgaccgagagcgcgaatatcgtcatcgttagaagtgatgcagaagaccacaagcctttgaaaaaaggaagtcgaactccttcagacaggactgtgaaaa

SEQ ID NO: 703749 - DNA, 100 bp, Homo sapiens
ggcagaaccaccccagtgcacctccctggcctggtctgctgatggccaggttctgaagaaggccttccaggccacgctcaggtggctcctgagctcaccc

SEQ ID NO: 703750 - DNA, 88 bp, Homo sapiens
tatggcttcgtcaagttcttcaccaatgcctggtgttggctggacttcctcattgtggctgatagatcactgcgaccagaggaaattg

SEQ ID NO: 703751 - DNA, 87 bp, Homo sapiens
aaaacaaaggtagaacatggaggatcgtcaggctctaaacaaaattctggttccagcaacagatagaaatgctttaagttcactctg

SEQ ID NO: 703752 - DNA, 100 bp, Homo sapiens
gcaggccctcaggtacgacaagtcatctggggacctggagaatgatgagcaggcagccagtgccatctctgagctggtcagcacagcctgcggtttccgg

SEQ ID NO: 703753 - DNA, 100 bp, Homo sapiens
gccaggagtcatgagcgacagcggcgagcagaactacggcgagcgggaactagaacagtctttggctagctggactcagaacttgaaagaacttcaaact

SEQ ID NO: 703754 - DNA, 100 bp, Homo sapiens
gactgtagtccacatggagctctcagcataccgtgcaacagtgccaccatggcaactgcaccatacaactactcttacatctttaaatatattattattg

SEQ ID NO: 703755 - DNA, 83 bp, Homo sapiens
ctgagtacgacagcctcaaacaggagctggagcagctcaaagaggtcaatgggaaggatctttcaaaggccactcatgaagag

SEQ ID NO: 703756 - DNA, 88 bp, Homo sapiens
gctgcagcagagcgagtacttcgttccaacatggacatcctgaagccaatcctgcactttcctgagcacctggaccactttacggaga

SEQ ID NO: 703757 - DNA, 50 bp, Homo sapiens
cgccactttccggggtgcacagcaagtgggtggccattcagggcaactgg

SEQ ID NO: 703758 - DNA, 75 bp, Homo sapiens
cctgctcctgggtgccgtggcatgtcgatttgtccttcactacaggatttgttaaggattccaagtaactcttat

SEQ ID NO: 703759 - DNA, 75 bp, Homo sapiens
ggcggatgccctgcagtacctgcagaaggtctctggagacatcttcagcaggtttgatgaggcggcactctctat

SEQ ID NO: 703760 - DNA, 80 bp, Homo sapiens
gtaccgcaggatgacctggaagggctggtgcgcctgcagctcgggcggcagcgtgacgtctgcgctcctcagaccaccgg

SEQ ID NO: 703761 - DNA, 101 bp, Homo sapiens
ctgcggcgcgctgctggacgaagagctctcctccttcttcctcaactatctcgctgacacgcagcttcggaaccaaaaagaagcttcccagagccggggcc

SEQ ID NO: 703762 - DNA, 82 bp, Homo sapiens
cgggaactcgactcttggcgccaccgcctcatgcactgtgctcttgtcaggatggtgaagctgttcatcggaaacctgcccc

SEQ ID NO: 703763 - DNA, 90 bp, Homo sapiens
cgggcttctgatggaggagctactcctctgggaggacagaaaagcataacccctactgtagaactaaatgcactgtgcatgaaacttgga

SEQ ID NO: 703764 - DNA, 75 bp, Homo sapiens
gaaatcttcaagaatttctgaggacaggagctcacatctggaaggtgaaaggtgtagcagtcactcggcctacac

SEQ ID NO: 703765 - DNA, 99 bp, Homo sapiens
tgcagctattgaacgtttgacatgtggcaagtttgaattgagatgtgctgtactactgggactcatcaaacaaatctttctgggaaatgtgcacaactt

SEQ ID NO: 703766 - DNA, 98 bp, Homo sapiens
tggggctcactttgcaaacacggccaggaaggttgatccaaggattagttttggatcatggtgcccgtcatccagatatgaagaagcgagtagaagat

SEQ ID NO: 703767 - DNA, 74 bp, Homo sapiens
aaaaacctaaaggataccttagggatggcatagagtttgcatttaaataccaaaatcagaaaggacaagagtat

SEQ ID NO: 703768 - DNA, 60 bp, Homo sapiens
tagcaaataacctacatgtcagactgaagtatattcatttcaaccaactagaaatgctac

SEQ ID NO: 703769 - DNA, 75 bp, Homo sapiens
ctttatgaaccagtgtatcccaagtgcagtacgtgattcaagggtatcacaaaagaagagagtatattgctgctt

SEQ ID NO: 703770 - DNA, 100 bp, Homo sapiens
ggaaaaggaagcttaatatggattccaaagagcgtttggatcaggacggacgcttgagttactggaggtgaactgtttgaagacatagtggcaagagaat

SEQ ID NO: 703771 - DNA, 100 bp, Homo sapiens
ttggtctacaaagacagcagtaggtttcagcaacatttgctgcaagtttagtcaccagtcctgcaattggagcttatcttggacgagtatatggggacag

SEQ ID NO: 703772 - DNA, 90 bp, Homo sapiens
cgagaacatcctcagctttatgtcctacgacgaaattagccagctccgcctggcacgtgtggttctcaaatataggcattctgatgggaa

SEQ ID NO: 703773 - DNA, 100 bp, Homo sapiens
ctcatacctggaacctggacatgtgtggaatttctaatctcattcctggactttcctgcaggaaaggccgagggggacggcaagatgcacatcaccctct

SEQ ID NO: 703774 - DNA, 97 bp, Homo sapiens
ctggtagttccatgctgtctgttcagacttcagcttggtcttgggtgatggttgcagttttccaactcgccttgtggggatggatccagaacaagct

SEQ ID NO: 703775 - DNA, 98 bp, Homo sapiens
tggaaggcagtgacagcgacagcgaggagcagacccttcagctgtgagctggcaccgagaggggtaaaatggtgcagaaggggacttacactgagttc

SEQ ID NO: 703776 - DNA, 82 bp, Homo sapiens
cggagaggtagccatgatgccccacttggtgaatggagatgcagctcagcagctcattgctatggacagtgctatcaccctg

SEQ ID NO: 703777 - DNA, 75 bp, Homo sapiens
gcccggaccgctgcatccacagctgctacaggagctgagagaccctaccctcactttccgtctgcttggctcccc

SEQ ID NO: 703778 - DNA, 76 bp, Homo sapiens
cagaaaccttcacatcttggtcaaggtgaactctggtccaggtcccaggtgagcaggtcttgggggtggtttttgt

SEQ ID NO: 703779 - DNA, 100 bp, Homo sapiens
ggacgcccgcggagagagccactcccgcccacgtcccatttcgcccctcgcgtccggagtccccgtggccaggtcagccatgtcatctgagcctccccca

SEQ ID NO: 703780 - DNA, 88 bp, Homo sapiens
gtttgaatctcagagtgaagatgagttgacaccttttgacatgagcatccaggctttggatgaagagtatttaaaagtagatgcccaa

SEQ ID NO: 703781 - DNA, 100 bp, Homo sapiens
aagataactacaaaagactcagagactatataagtagcttaaagatgacaccttgcattccctatttagttagcagacttgaagaaagagaagcagaact

SEQ ID NO: 703782 - DNA, 99 bp, Homo sapiens
tctgtgagggtgaagatgatgaccacactgagaactggccttcgattcaaggatgattttcctgaattgtgttgcagattgaaaactgtaactatgcag

SEQ ID NO: 703783 - DNA, 83 bp, Homo sapiens
gacctggccaagggctccacacaccaagaccaagacaatgcagatcttcgtgaagactctgactggtaagaccatcaccctcg

SEQ ID NO: 703784 - DNA, 90 bp, Homo sapiens
aatggaacaatatttgcatatggacaaacatcctctgggaagacacacacaatggagatcctgagactccagcaggatgtcttatcaaca

SEQ ID NO: 703785 - DNA, 127 bp, Homo sapiens
atcatcggcgagagcccagccagcgcgcccgtggaggtctttgtcggcgaggctggtgtcatggagaaactccagctgggcccagagattctgcagcgggaaaatccaaggcttatttatgccaggc

SEQ ID NO: 703786 - DNA, 100 bp, Homo sapiens
cacgggggccgccgcagcaccatggcgaccaccgtcagcactcagcgcgggccgggccaattcctgtccccccagcagcatggcatcgtgtgctgaaccc

SEQ ID NO: 703787 - DNA, 100 bp, Homo sapiens
tggtgctatcctgtcatacatcatgtgtgtgatgcctttgagtaatggacagatgggccagcctctcaggcctcaggcaaattatagtcaaatacatcac

SEQ ID NO: 703788 - DNA, 83 bp, Homo sapiens
actggatcgaaatgtccatgagaaaaagcttggagataaagttgctttttactgataacgaaggaggcccaacttcattcaat

SEQ ID NO: 703789 - DNA, 101 bp, Homo sapiens
gtcgaactgaaccagcgatggcaactacaaaagcagtcaagtctggatgattactgtccttctgaccaagttgacactattcaagaaaaggtcctcaatat

SEQ ID NO: 703790 - DNA, 100 bp, Homo sapiens
gacactgcgactccggagacagcccaaatatcctcggaagagcgctcccaggagaaacaaaatggagatttacagacagtcatctgggtggaggacaccc

SEQ ID NO: 703791 - DNA, 100 bp, Homo sapiens
ttttatggagaacctgtaataaaagcatgtattgaaaatggagccagttgtatcgacatcagtggagaacctcaggtggagtttgtccatatgctcaatg

SEQ ID NO: 703792 - DNA, 75 bp, Homo sapiens
gggctgcttcgacggcaacgtcaccttgacggcagaggagaaggcagagcccccccaggctatgaatgccctgat

SEQ ID NO: 703793 - DNA, 100 bp, Homo sapiens
gccgccacctcggtcgcgatgggggcgcaggaccggccgcagtgccacttcgacatcgagatcaaccgggagccggcccctgaatgtgacagtgatccgc

SEQ ID NO: 703794 - DNA, 96 bp, Homo sapiens
cacacccaggaaaagactcaggacggacaagcacagtcttcggaaggtttccagccatagttcccaggccaccaaggactctggtgttggccttaa

SEQ ID NO: 703795 - DNA, 100 bp, Homo sapiens
acagccctgtgtgacaccaagataagtaacgctctggtggttgctgggatctctctccaagctgcaaacctgtatggctacatcctttgtaagatgggag

SEQ ID NO: 703796 - DNA, 82 bp, Homo sapiens
gatggcctgcaaagcatatcgggatctggcctttgagaaggggatcaaaactccagaaatgaacgaatgatcacacactttg

SEQ ID NO: 703797 - DNA, 100 bp, Homo sapiens
agccgcccccagcaccaccagtgaggtggttaagagcctgacctccgagggcatctaccgcaagtgtgggcagacatcgaagacacagcggctgctggag

SEQ ID NO: 703798 - DNA, 95 bp, Homo sapiens
cagctgctctttgataagacggaggatgtcagcttcatgaaggtgaccgaagaggcctatgtcccagtgagtgacatgaacggcctgggatttaa

SEQ ID NO: 703799 - DNA, 50 bp, Homo sapiens
cgttccttgaggaggtttgaaaaagtctgccatcatggatgttctcgcag

SEQ ID NO: 703800 - DNA, 83 bp, Homo sapiens
ctggccaacttctgctacagacgactcaatggagaacttaatgttctggatgatattttaactgaagtaccagaacaagatga

SEQ ID NO: 703801 - DNA, 90 bp, Homo sapiens
tggcagagtaagggtgacttggtctgccgcaaattccgagacgaagccacgtgcaaggacacctgccccccactcatgctctacaacccc

SEQ ID NO: 703802 - DNA, 75 bp, Homo sapiens
caagaacggcggtacccgggtggttaaacttcgcaaaatgaccccaccaacaactgaacgctttggtcaggctgc

SEQ ID NO: 703803 - DNA, 111 bp, Homo sapiens
gtgcatttgaggatggactacgacatccctttattgtcaaccaccccaaggttaaagccgagccagccaaaatagaagctttccgagcttcactttccaagctaggggatg

SEQ ID NO: 703804 - DNA, 82 bp, Homo sapiens
ccgccccccaccgccgccccctccggcgtgttcatgcccccggggtgtcgtgaaaactacccctaaaagccaaaatgggaaa

SEQ ID NO: 703805 - DNA, 75 bp, Homo sapiens
cagtcctccagtgtttggatattcaggtgaccctggcaaagatgagagtgcacatttcgtcctgcctgaaggtcc

SEQ ID NO: 703806 - DNA, 51 bp, Homo sapiens
cgaggaggcagggtctgatggggtgctgcaggtgaatagtttgatccagac

SEQ ID NO: 703807 - DNA, 50 bp, Homo sapiens
cggctggctgcagaagcaggaaacgtgatggaatcttgctctgttgccca

SEQ ID NO: 703808 - DNA, 100 bp, Homo sapiens
gcagcctggggactctgcctcgtgccgctgagcctggcgcagatcggccttttctgattatcagatgcaacaaatgacgtccaattttattgaccagttt

SEQ ID NO: 703809 - DNA, 100 bp, Homo sapiens
gccttgtcaaagatgccagatgtgggagacacgccaaagctcccaaggaggactgacaaatggtagtggtcgatatatctctgcagcacctggagcagaa

SEQ ID NO: 703810 - DNA, 90 bp, Homo sapiens
cagctatacagttcatactggaaagtccccaaagctccagagatagatccagtagagtgtttggtggcagataactctgtaacagtggct

SEQ ID NO: 703811 - DNA, 74 bp, Homo sapiens
ttgagcgccgattttatgccaggcaccgtgctggggatgccaaggcctgcgtagtacacggcagtgatctaaag

SEQ ID NO: 703812 - DNA, 100 bp, Homo sapiens
ggaggctgagcaggatgaggtggccgctctgctacatgcccacctgagctcgggccagcccgacacccaggggggtacatggtatggagtagacatcaac

SEQ ID NO: 703813 - DNA, 100 bp, Homo sapiens
ctggtgaccgagcacccgcctccgggcatcttcaactaagaagcgcacgctgaaggggtccattgagctctcccgaatcaaatgtgttgagattgtgaaa

SEQ ID NO: 703814 - DNA, 83 bp, Homo sapiens
ggcgggaataagtaccagaccattgacaactaccagtgaacgagataattgggagagacatgtcccagatttctgtttcccaa

SEQ ID NO: 703815 - DNA, 90 bp, Homo sapiens
tatgaagagacacagtatggtagccacacccccagagctagagccggtgcaggccacgcagaacaagacagggaagtatgtgccgccgag

SEQ ID NO: 703816 - DNA, 100 bp, Homo sapiens
cagcatcaagatccgtctgacagacggtctggaaaatcccgaagcagaagcccgtattcatctaggcattcaagatctcgtagcaggcacagattgtcta

SEQ ID NO: 703817 - DNA, 98 bp, Homo sapiens
tcggttcctgaaggaccctggtggaggaagaaagagcttgtcaggaagatcggaggtgccaagtagcagagaaagcatcccccagctctgacagggag

SEQ ID NO: 703818 - DNA, 83 bp, Homo sapiens
aaagaaggtggcactggccaagaagctcctggcaaaactgcgctttctggctgaggaggtctatgttaacaatgaatgggcaa

SEQ ID NO: 703819 - DNA, 74 bp, Homo sapiens
cagcagtcagttgaacaagacaacttatttgatccgtggtccttcagcatatctctgtgctgcagacaacacac

SEQ ID NO: 703820 - DNA, 75 bp, Homo sapiens
ccattatagagctggaattaggcaaatatggacaggtccaagagtttggagtttgtgaagttcgtgacctcaaac

SEQ ID NO: 703821 - DNA, 100 bp, Homo sapiens
tggcaatttacaacccccatactgtaccaggcaaggtactaggttttgacaagcttgcatcatgcgtgagtataagctagtcgttcttggctcaggaggc

SEQ ID NO: 703822 - DNA, 82 bp, Homo sapiens
tgatcccattgggggttgatacagcagagacgtcatacttggaaatggctgcaggttcagatttaaaattggtggtgaatgg

SEQ ID NO: 703823 - DNA, 97 bp, Homo sapiens
accaccacaaagctcaagatgtaggacatctccatcaattcaggaggctccctccgggttacccccactccagaggctacagatgcacatgttgaat

SEQ ID NO: 703824 - DNA, 82 bp, Homo sapiens
tccgccatcgagcgcccctccgagctggggttggacgctgccagtttgcacagcagcaggttttaaaatcaaagatgggaaa

SEQ ID NO: 703825 - DNA, 75 bp, Homo sapiens
tgccgtggcatgtcgatttgtccttcactacagcctgatctagttgaatctgaagatgtggacctgctgatgaag

SEQ ID NO: 703826 - DNA, 75 bp, Homo sapiens
ggcgctctgagctggtcttctggcggtggatgatgtctggcgataaagggatttctgccttccctgaatcagaca

SEQ ID NO: 703827 - DNA, 100 bp, Homo sapiens
tttctgtccaggcaagggtgtgtgctgaatgactcaaggattttttgggcggccttctgatctgtttaccacgtgagcaagcagctcggttctgtgcaga

SEQ ID NO: 703828 - DNA, 75 bp, Homo sapiens
ttgatgctgaggagctcctggtcgatgaagaggatgatgtttttggtgaaggacctaatgcactgcacagcattt

SEQ ID NO: 703829 - DNA, 100 bp, Homo sapiens
gtgcagccgaaaataaaacatcgccccttctgcttcagtgtgaaaggccacgtgaagatgctgcggctggaaacccagcgtttgctggcagaaccagttc

SEQ ID NO: 703830 - DNA, 88 bp, Homo sapiens
tgatatcagacccagtgccatgagggaaatagcaattgatgtcccaaatgtgtgttctactccctcttctgggaatgaagcctcccca

SEQ ID NO: 703831 - DNA, 75 bp, Homo sapiens
ggtagatttgatgttagaagccatccagggagcccattctggcatccacgtgagcccagtgatcccaatgagcgc

SEQ ID NO: 703832 - DNA, 75 bp, Homo sapiens
gttgacaaccaacttctgcatgtgaaggacactgaagccatgaagagagcattggcctccatagactccaaactg

SEQ ID NO: 703833 - DNA, 101 bp, Homo sapiens
gcctttatcaaaatcccaggctgtcggaagcaagttttctggatatgccgcagaaggatccgtgccagaagcaagcctgtgagatacagaaatgtttacaa

SEQ ID NO: 703834 - DNA, 100 bp, Homo sapiens
aattttgatgtattaaaggatgtcaagtccaagagagagataaggtctcagaagacagaactagaaccatgggaaaatgaaactgaagccgtggtcacgt

SEQ ID NO: 703835 - DNA, 96 bp, Homo sapiens
tgccaatgttggagccgtctgcaaagtgtccccggcaagaagtacctggagtagaacagaaaaattattatgtctgtgttcccttgggactcattg

SEQ ID NO: 703836 - DNA, 98 bp, Homo sapiens
gaagatgatgatgtcctcagtattgattcagatgagtgtgggtcagagagccaaactgactatatctccagattatgcctatggtgccactgggcacc

SEQ ID NO: 703837 - DNA, 148 bp, Homo sapiens
cgataattcaaaaacactatcccagggagtgcaagcttagagcgtctggccaagaatcagaggaagtgggtgcacattcaggttcccgagcacaaacatcaagataacgttcactgccctgtccagcgagaagagagagaagcaggag

SEQ ID NO: 703838 - DNA, 100 bp, Homo sapiens
aagacctccgctcaggcccctctttcgaatgctccacgccctcctgcgatctagaatggaatgaatctgaagtctgctgcagtaaaacacagaaggcttt

SEQ ID NO: 703839 - DNA, 100 bp, Homo sapiens
tggatttccaccaacattcaaggaaacaaatcaactaaaaacaaaattgccagaaaatctttcctctaaagtcaaactgacaaatttacatgtattggag

SEQ ID NO: 703840 - DNA, 100 bp, Homo sapiens
agctatgcatgctgcttttgatgtctgacaacgtggatcgttgttttgaaacgaatttggataaagagagggcagtgctactacaacgccggaaaaggga

SEQ ID NO: 703841 - DNA, 82 bp, Homo sapiens
gtaaaaaacacaagcaaggtttcctaaaacgcagggacagagctcatcgggaaatcaaggatattttctataaggcaatcca

SEQ ID NO: 703842 - DNA, 99 bp, Homo sapiens
ggatggtgcgttgcgtgccctacttcaaggataagggcgacagcaacagctctgccggctggaaggttttcatctctgtgaactgcttaagcacagatt

SEQ ID NO: 703843 - DNA, 80 bp, Homo sapiens
gcgtgctactgtgcgctcgatccagcaccatggggaagcgggacaatcgggtgtggacagaggactgcagaaaatcaacc

SEQ ID NO: 703844 - DNA, 111 bp, Homo sapiens
gtggaggagctgtgcagccgcgaggaggcgcgggaggtgttcgagaacgaccccgagacgaggctgggaggcggcagaatgcagccagaggagggcacaggctggctgctg

SEQ ID NO: 703845 - DNA, 82 bp, Homo sapiens
gtggctctagcaggctccactaactggggctacgactctgatgggcagagcactacaaacaccactggtttcccgaaaagcc

SEQ ID NO: 703846 - DNA, 75 bp, Homo sapiens
gctgaacaagaagttggccaacaaggaattgaatgatctggcacgggaccctccagcacagtgttcagcaggtcc

SEQ ID NO: 703847 - DNA, 98 bp, Homo sapiens
ctccccacaaacactgtgtcctcagcaaagcctggcccagcactggtgaagccctccaggggacccctctctcagccaccctctctctggtgatgtca

SEQ ID NO: 703848 - DNA, 83 bp, Homo sapiens
gaaggaacgaggcaaggagctaaagcagcgtgcgttcagccctgggggcctacttggaagtgcaccagcaggagcaagagaaa

SEQ ID NO: 703849 - DNA, 98 bp, Homo sapiens
gcgcgagaaggagcgcgagcttgaacgcagcgtggcctgctggatgtgtatggatttgaatcatttcctgacaacagtctggaacagttgtgcatcaa

SEQ ID NO: 703850 - DNA, 98 bp, Homo sapiens
aagggctggagtgcctacgcctgctcaatgagatcattgccgacttcgacgagataccccagaatcttccatgctccgtcacactgcagccaggccca

SEQ ID NO: 703851 - DNA, 100 bp, Homo sapiens
gccagcgcagcgacggggcgctgcctggcccaggcgcacacggaagtgacaatgcagatcttcgtgaagactctgactggtaagaccatcaccctcgagg

SEQ ID NO: 703852 - DNA, 75 bp, Homo sapiens
caaataaggaaggatttgggctgggtcttcagttgaaaaaattcatgttacatgtaaagctgtcctcatttgtga

SEQ ID NO: 703853 - DNA, 78 bp, Homo sapiens
gcggcggctgcggcccaatataggggacggcaaaacagaacagaaaggcggagataaaaagaggggtgttaaaagacc

SEQ ID NO: 703854 - DNA, 98 bp, Homo sapiens
ggtggagggcgtgttgtcgcaggtggacttcttgcaacaggttaacgtgtatggcgtgtgcgtgccaggaagacataggccaaggagccagacttcct

SEQ ID NO: 703855 - DNA, 74 bp, Homo sapiens
gggacccccaggaggtgaccctgcagcctttccgctgtgcccattgccattactcctgcaacatatctggctct

SEQ ID NO: 703856 - DNA, 96 bp, Homo sapiens
gtttaagactctgacattcctggctgtcatgctcattgttctgaactccacggtggcggcgggaaggccaaggtctctggcagacccagcagccga

SEQ ID NO: 703857 - DNA, 101 bp, Homo sapiens
cttaccgcatctggctggagccctgcattcgcggcgtgtgcagtcctcctgcccctgctcgagtcttgcagtgtgcggcccgacgccagcgtttccagtca

SEQ ID NO: 703858 - DNA, 83 bp, Homo sapiens
cgccgaggcaccgaggcactcagaggaggaaacaagctcacatcttcctgtgggaaaccttctagcaacaggatgagtctgca

SEQ ID NO: 703859 - DNA, 100 bp, Homo sapiens
aattagtatcttcagatctttggagaattgtcttgaacagcagtcaaaatggagctgatgaccaaagactaatagggatgccaaaggaaaaatatgatcc

SEQ ID NO: 703860 - DNA, 100 bp, Homo sapiens
gcgtgatccggcaccaaatcggcccgcggtgcggtgcggagactccatgaggccctggtgtcctgtggccaggcggaaagcagtgagaagcccaacgctg

SEQ ID NO: 703861 - DNA, 99 bp, Homo sapiens
gccgggccgcggcgccgagtcgaacggggagccgagctggagctgccgcggcgcagccagccatgaaccagagaatcagtcagagtgctccagtgaaac

SEQ ID NO: 703862 - DNA, 75 bp, Homo sapiens
ctggattgctgcaaggctgagggacgagaacgaggtggagcagctgcgccaggccattgaagaactgtactactt

SEQ ID NO: 703863 - DNA, 83 bp, Homo sapiens
aggttaacgtgtatggcgtgtgcgtgccagagtgcctggtgaagaatgtgatgggatcactagcatgtctgcggagagcggcc

SEQ ID NO: 703864 - DNA, 50 bp, Homo sapiens
atgtacctgttaccactttcaaaagcttactagaaagcagcacccgcctg

SEQ ID NO: 703865 - DNA, 100 bp, Homo sapiens
tggacatattgttaaatgtttagattctttttgtgatccatttctcatttctgatgagttacgaagaattgaagaattggaggagaaacttaatgatgca

SEQ ID NO: 703866 - DNA, 97 bp, Homo sapiens
cttgtgtatggcaaagtggatagcttctggaagggtgtacagggagcatggtgccagcatctgcttctgatgaggcctcaggaagcttccaatcatg

SEQ ID NO: 703867 - DNA, 100 bp, Homo sapiens
ggatgatgaagtagcacagactcctatgccatcagaatatcagaacatgactgtggatcatttgacattgtgcagcaaagaaatggttatggagaagccc

SEQ ID NO: 703868 - DNA, 85 bp, Homo sapiens
cacacagctcagaacagttggatcttgctcagtctctgtcagaggaagatcccttgatattgatgatgttaagaagttcaaaccg

SEQ ID NO: 703869 - DNA, 101 bp, Homo sapiens
tgaacctgaggaccattattttttaatgaccgaccaagaccatcactatgaccgatggagactatgattatctgatcaaactcctggccctcggggattca

SEQ ID NO: 703870 - DNA, 100 bp, Homo sapiens
tcctgagttgggagccagtggccctgagcaatagcacgaggcctgttgtctaccaagtgcagtttaaataatttggtgcttccagatgtgagttatcagg

SEQ ID NO: 703871 - DNA, 74 bp, Homo sapiens
cgaacacaaatgcaggagggagaggtgccaagaagcagcggtacacgtcaaaaggctgagtttcaaattctgga

SEQ ID NO: 703872 - DNA, 75 bp, Homo sapiens
ctcccactccttgccactgacccttcttccttttatagcattgagaaggatggactgatcctttgaaatactcca

SEQ ID NO: 703873 - DNA, 100 bp, Homo sapiens
ggatgagcctgcagagcgcgcagtacctccgataaggatgattatgcttacaatgcagtagcccaggatgtgttcaaccacagctggaagacatctgcaa

SEQ ID NO: 703874 - DNA, 100 bp, Homo sapiens
gatctgtgcccttatactggtctcaggacatttcaactatgatgcctaaaccacctattacatgttttaaaatcaaagatgggaaaatcggagaaaattg

SEQ ID NO: 703875 - DNA, 83 bp, Homo sapiens
gcagacgctgccctttaaggagggccatatcctacaggactttgaagggagtacagaagtaggtttacgagtgaagagaccct

SEQ ID NO: 703876 - DNA, 80 bp, Homo sapiens
gtcaacggtgcccctgcatgtgctcattaaacgagaagattcatcaccgctttgatggctgcctcacaaacttcacaaac

SEQ ID NO: 703877 - DNA, 50 bp, Homo sapiens
aacaggagctggagcagctcaaagaggggatgttcgtctaaccccagaag

SEQ ID NO: 703878 - DNA, 82 bp, Homo sapiens
tggccacttgcttgggatcctttatcctggtcatcttctatttccaaagcttgggcactgtttaaaggaaagttccgagaag

SEQ ID NO: 703879 - DNA, 75 bp, Homo sapiens
actgtctccagaattacttgggaagtaaaaatctgcgaggcttggtacaccaggggttggaaaaaccacactagg

SEQ ID NO: 703880 - DNA, 126 bp, Homo sapiens
ccgccctggcccgtcatggagatggaaaaggagttcgagcagatcgacaagtccgggagctgggcggccatttaccagcggccctccaggcactgaagcgtaagaagaggtatgagaagcagctgg

SEQ ID NO: 703881 - DNA, 96 bp, Homo sapiens
gaactgcacgataaaggaactcaggcgcctcttcttagttgatgatttagttgattctctgaagttccttggacacagcatgaatttgagttggcc

SEQ ID NO: 703882 - DNA, 74 bp, Homo sapiens
gcggccggagaagggctgcgggttagggggccggcgcccgcggttcagggtcctcactgagcagcgagtcgtcc

SEQ ID NO: 703883 - DNA, 75 bp, Homo sapiens
gctgcggacggcgctgcggtacatccagtgcagggctcgcggcctggcaagaatgtacagctgacagagaacgag

SEQ ID NO: 703884 - DNA, 100 bp, Homo sapiens
cggcagcgggcggacggccggcgggggcggcgtgcggcctagcgtctcagtgacatattcgatgccatgttccctgtcactcacatcgctggggagactg

SEQ ID NO: 703885 - DNA, 100 bp, Homo sapiens
gccttgaacattccgaaactgtcaagattggcaaggaaaaaagggttgctcattttgggtatcactggagtctgatggaaagagataggcgcatctctgg

SEQ ID NO: 703886 - DNA, 74 bp, Homo sapiens
agaagtgatgctggaaaatctcaggaatctggtctcattggttcaaatctgaacatcaatgatgtactagggaa

SEQ ID NO: 703887 - DNA, 100 bp, Homo sapiens
gccgagtggcggtccgacagagtcctccgtgtcctcccccgcatgacccccttgaaatgctgctcatggattctcccttattcaggtggacaacacaaag

SEQ ID NO: 703888 - DNA, 99 bp, Homo sapiens
cccggggtgtaataatgttaactgaggtggcagggactcagctcggaattctgtatagaaaaagcacctggatcccagtctttcaatggcttcaagaca

SEQ ID NO: 703889 - DNA, 83 bp, Homo sapiens
gcagcagcacagcgacaagacgttggaatcgaagcctcttaaaatggcagatgacttggacttcgagacaggagatgcagggg

SEQ ID NO: 703890 - DNA, 83 bp, Homo sapiens
caacctcttgaggatcgaatcttcactcccgctgtctcagcagtctacagcacgaattattctcctgctgttgacttcaggac

SEQ ID NO: 703891 - DNA, 100 bp, Homo sapiens
tgagagcattttggaagaggaaccacaagaaaatcaaaagaaacttttgcccttatcagtaacacctgaggataaaagaatcagagtgtctcaacccttg

SEQ ID NO: 703892 - DNA, 90 bp, Homo sapiens
ctgcgcgcctcgcctcacagcgaaacgccgcgcactcggagccggcacggctcggcgtaatctatgccagcaattatgacaatgttagca

SEQ ID NO: 703893 - DNA, 98 bp, Homo sapiens
gcagaagaataggaacctctacttccccaccaaaaagtggcacacactggagagatatcaaggtggtagcccagtggtgcacacagggggacttgctg

SEQ ID NO: 703894 - DNA, 100 bp, Homo sapiens
aagatgggcaggttagcccaggaagcctgctcttagctggtgccatagctgcttgcagttccccacaatgatgaatggacccgatttgccaggacccttg

SEQ ID NO: 703895 - DNA, 82 bp, Homo sapiens
gtcggggaggcaagatgatccaccagcggttccatcctacacttggtactatactggcaattgctggagaagattttgcaat

SEQ ID NO: 703896 - DNA, 75 bp, Homo sapiens
ctcgggcaagaccaccttcgtcaatgtcatcgcggaaggcgcaatggcgaggaagttatctgtaatcttgatcct

SEQ ID NO: 703897 - DNA, 100 bp, Homo sapiens
ctcagctttgaggaaaagccagtttatatccaagacttagatgagttagtaacaggagtatgggaaggcaaatacaacttcttctgtcagggcacacgca

SEQ ID NO: 703898 - DNA, 96 bp, Homo sapiens
gttcggccgcaagaagcagagccgcgtcacggagcaggacaaggccatcctgggcagagcggcttgggtaaatccaccttaatcaacaccctcttc

SEQ ID NO: 703899 - DNA, 51 bp, Homo sapiens
ctgcagccaacccttcagcaaggattttttatcaagcagaaatgcatcgaa

SEQ ID NO: 703900 - DNA, 83 bp, Homo sapiens
ctgactctcggactgagaaacgcaaggacctcagcagccatgtcgaagccccatagtgaagccgggactgccttcattcagac

SEQ ID NO: 703901 - DNA, 75 bp, Homo sapiens
ctgcgcatgatcgtcatgggacacagaaggtctggagagggacaagtttgataacaagacagtgtcatttgagga

SEQ ID NO: 703902 - DNA, 75 bp, Homo sapiens
gtaggcgttggtcttctgatagcaactttaatgtgctccagaacctgggtatcaacccagcaaacattggcttca

SEQ ID NO: 703903 - DNA, 100 bp, Homo sapiens
aattgcattgttattacagagaaactctgtgacttcctggagactcacttcctagatgaggaagtgaagcttatcaagaagatgggtgaccacctgacca

SEQ ID NO: 703904 - DNA, 95 bp, Homo sapiens
aatgtacacgataattaaagagtaaagttgtgctcaacggtccttggatgtggctgtgttgcccaagctattctcagtcgaggacgttttggagg

SEQ ID NO: 703905 - DNA, 123 bp, Homo sapiens
cttcctggaggtgaaactgggcaagaggccccagcccgtgaaaagtgaggcaatctttggcagccagacactacctaactccaatttatggacaatgaataatggtgcaggttgtagaatttc

SEQ ID NO: 703906 - DNA, 100 bp, Homo sapiens
cctggccttccttctgctcaactttcgtgtctgcctccttttgcttcagctgctcatgcctcactcagatagaaaaggagggagttacactcaggctgca

SEQ ID NO: 703907 - DNA, 101 bp, Homo sapiens
gcattacctgtacccattcaccggcggctaccggcggcggcgcgcagcgtgtcaggcggagagacccgccgccaggaactttatattgctgttggaatatc

SEQ ID NO: 703908 - DNA, 75 bp, Homo sapiens
gattcgcagtggtcgcttcttctccttgcggacaaacataaattgcagagattcctgactgctgacatggccctg

SEQ ID NO: 703909 - DNA, 75 bp, Homo sapiens
gtttacttggtccagaacatccactagcctcactaaagttggaaaatggatataccttatttgattatgatgttg

SEQ ID NO: 703910 - DNA, 82 bp, Homo sapiens
tacgttgctggtctttctggctccacctgtttagcagccactgctgcatcaggggcttttgttccaccaccaagtgcacaag

SEQ ID NO: 703911 - DNA, 98 bp, Homo sapiens
aagacgtttggtttaaagaattaaaaggaagaacaacttaagagcttcttcaaaggatggacaaccggaaattttctacacattttggaattcagtta

SEQ ID NO: 703912 - DNA, 75 bp, Homo sapiens
ggttcctggtcatacaccagtactaccaaggacagcttttttcctgcaagatctgatgagacgacaggaagaatt

SEQ ID NO: 703913 - DNA, 90 bp, Homo sapiens
ctcccgcgcgcacctcagccgcctcctagcggcgcggcgctcgctcctacggcaccacaaggccacataaggagggtgaggtccctggag

SEQ ID NO: 703914 - DNA, 102 bp, Homo sapiens
accccaccgtgttcttcgacattgccgtcgacggcgagcccttgggccgcgtctcctttgagtctctagtgatccctgaaaagttccagcatattttgcgag

SEQ ID NO: 703915 - DNA, 98 bp, Homo sapiens
gagcgagagcgagtgcctgagcaacatccgcgagttcctgcgcggctgcggggcttccctgcggctggagcacctgtggaatcctctcaagaggaaca

SEQ ID NO: 703916 - DNA, 96 bp, Homo sapiens
agatggaggatgtcaataaccctgggctcagggtcagagcccagcctggggactatgtgctggtgaaggttttgcactgattgcaaaaataaagtc

SEQ ID NO: 703917 - DNA, 96 bp, Homo sapiens
gaaagtcctcgctcgtcaccagcaagcttgcgggttccctgtattgaacactgatatacaaggaatgaatagaagtcaagaaaaacagacctggtg

SEQ ID NO: 703918 - DNA, 75 bp, Homo sapiens
gtcgctttgttacacctttcaagtgtctcgctctgctgcataaaatcttagttgagaatccatcagcaagaatta

SEQ ID NO: 703919 - DNA, 100 bp, Homo sapiens
ccaagaccggccacatcccagcactgcccacctctggcatgctgcagacagacctttccgtccttcatgaacacacgtgtggtagacagatgactgtcct

SEQ ID NO: 703920 - DNA, 80 bp, Homo sapiens
gggaccatcgtcgtgaggatcgtgtgcattacaggagtcctccacttgccactgggtgatgatgaacagtctacacagat

SEQ ID NO: 703921 - DNA, 95 bp, Homo sapiens
gaggaggcccgagcggcggcggtggcggcgaaggccgaggcgatggcccactgcgtgaccttggttcagctgtccatttcctgtgaccatctcat

SEQ ID NO: 703922 - DNA, 74 bp, Homo sapiens
ttaagagaaggattgcattatacagagaaatgcatcgtgattcctgtccattggactgtaaggtttatgtaggc

SEQ ID NO: 703923 - DNA, 75 bp, Homo sapiens
accagacagatcgctgtcaaaaccctaggatttgaagcattcattaccatctggacttggtctctcagaaaccca

SEQ ID NO: 703924 - DNA, 100 bp, Homo sapiens
tcaagaggttccaatcttcgtgttcactttaagacctgcaatgcttcttttgccacccgagaccgtctgcgctcccacctggcctgtcatgaagacaagg

SEQ ID NO: 703925 - DNA, 90 bp, Homo sapiens
tgcagataatgtagttggaaaaaggaggagtattctgatcttttcaggagaaaatatggagaagtcttgtgcaagcaaggaagaagtcaa

SEQ ID NO: 703926 - DNA, 90 bp, Homo sapiens
tcttcattgttggactattgtggttggcttctgttacgctaggaatatggcaaacgtcactggaaggactgagcgcattcaggagcctgg

SEQ ID NO: 703927 - DNA, 100 bp, Homo sapiens
cggggtccgcggtccaggctgctgccgcgacggggccggcggcggggcagctgccaggaacgagggtagcagattgatagagctacattctcctgatagc

SEQ ID NO: 703928 - DNA, 100 bp, Homo sapiens
taattatcccaaccctgctgtgaataatgacatctgccttgacgaagtggcagaggaacttatacataccgagcatcaaatattaaggcacccggagaac

SEQ ID NO: 703929 - DNA, 100 bp, Homo sapiens
tgaggacactgaagccacccaggtgtaccccaagctgtacttgtcacctcgaattgagcagtttaccttatgggtgggaggaagcttacacagcagatgg

SEQ ID NO: 703930 - DNA, 83 bp, Homo sapiens
acagagcctcgcctttgccgatccgccgcccgtccacacccgccgccagcttcgttccagagcccagcatgaatggatacgcg

SEQ ID NO: 703931 - DNA, 100 bp, Homo sapiens
cccgggagacacagtgtcagaattacaagtcaggtcaattcagtgaagatatgatacccacagtgggcttcaacatgaggaaggtaactaaaggtaacgt

SEQ ID NO: 703932 - DNA, 89 bp, Homo sapiens
gaagtctgtgatagaagctctcaaggataatttcaataagactctcaatataaggacctcaccagtgttctaagaacggaagcatctgg

SEQ ID NO: 703933 - DNA, 100 bp, Homo sapiens
tttggaagagggagtcaccactggacctccaaggaagccacgtgcagacatctacaaccttcgatctcctgacgaggtgaaggccatgccgcctcctggg

SEQ ID NO: 703934 - DNA, 107 bp, Homo sapiens
tgtatttgaagataagtttaggccagacatggaggtaggtgagctcgtgaaacaatatgaagaggagaaaatagccttttaaggaaattggcccacagaaaggatgg

SEQ ID NO: 703935 - DNA, 105 bp, Homo sapiens
tcaggaacagggacagcacctcatcccctggatgggggaccacaagatcctcatcgacagtgtggacgaatgtggaacctcgctctgtggctgtgttcccttggc

SEQ ID NO: 703936 - DNA, 100 bp, Homo sapiens
gaagatagccctggataagaacccagaaacccgacccagtgccgcgcagctgctggagaaaaagatgttgctggtccatttgacgaagaagtccagagcg

SEQ ID NO: 703937 - DNA, 100 bp, Homo sapiens
tcacggcgtacgccctcatggggaaaatctccccggtgactttcaggaaacatgccctgaactgtcacagaatgaaaccagcgctcttcagcgtcctgtg

SEQ ID NO: 703938 - DNA, 75 bp, Homo sapiens
cgggagagccagcggcagccagggacctacactttggctttaagctgcagaaccttggcctgaaaatgctacatt

SEQ ID NO: 703939 - DNA, 97 bp, Homo sapiens
cttgccactcagctgacatatgaaggactcattgatgaaatttatggcattcagaacagtgaaagacccctgacaaaagacaatcatcttctgggta

SEQ ID NO: 703940 - DNA, 100 bp, Homo sapiens
tgcggtgctgctcagtgcagttcagaatcagcttaaaatggctcgtttcaccattgtggatgggaagatggggaaaggagtcagcttcaaagacgtggca

SEQ ID NO: 703941 - DNA, 100 bp, Homo sapiens
cggagccggccgtacgcggtgctgcgagggcagaacctgggtgctgactctggctgcccaggagctgtctaggcctgggtgcctcgggaggactccccaa

SEQ ID NO: 703942 - DNA, 106 bp, Homo sapiens
cataaggaactctatcccaggaatacagctttgcattagggtcatgtaggtacaacagcaaccaagaagatcgatgtctacctccctctgcactcgagccaggaca

SEQ ID NO: 703943 - DNA, 75 bp, Homo sapiens
gccagcccctgcacagccctcagcagaggattcggacacagaggacgactctgtgcatccggctgcagagggaaa

SEQ ID NO: 703944 - DNA, 100 bp, Homo sapiens
ctgaacccgaggccctgcctactatctatgttgttacccccacctatgccagtaattataaagtggactgtgcctgtcacaagggaaaccggaattgtcc

SEQ ID NO: 703945 - DNA, 98 bp, Homo sapiens
atgaagcaaccgcccattcagtctacggctggggccgtcccagttcgcaatgagaaagacctgaaggctgaaattgacaagttggccactgagtatat

SEQ ID NO: 703946 - DNA, 83 bp, Homo sapiens
acttcgagtgggtctacaccgaccagccgcacgccgaccggcgccgggagatcctggaacaccttccaccatgaccacctcag

SEQ ID NO: 703947 - DNA, 60 bp, Homo sapiens
tagtggatatagcacaccatccccagccaggcgagcctccctcagccctgggcctgtcca

SEQ ID NO: 703948 - DNA, 83 bp, Homo sapiens
attcaggatgagagtgcgatggggaatccaacagaattctggttgcgaggggcggtgttgaagaatgtgtgggcgaacatcct

SEQ ID NO: 703949 - DNA, 83 bp, Homo sapiens
caacagcaatggcggaaggagaagatgtgccgccgctgccaacgtcgagcggcgacggctgttatttctcaaactctgaggct

SEQ ID NO: 703950 - DNA, 83 bp, Homo sapiens
atagagttgagcctgtgggacacttcggtaatagttatgcacgagtgcgagctgtggtgatgacccgagatgactcaagtggt

SEQ ID NO: 703951 - DNA, 75 bp, Homo sapiens
tgacaagttcgataaaagtgtgcagaccaagcattgacaaaatctctaagataacctctccagtattaataattc

SEQ ID NO: 703952 - DNA, 87 bp, Homo sapiens
aaggaaggcatggaaagttccagccggttcgagagctagatgtggacgagtgctcactagcagaaaaaacctgtgtgaggaaaaacg

SEQ ID NO: 703953 - DNA, 75 bp, Homo sapiens
aacgcagagacaaaagaaacgggccccgactggccaagtcctgtatctgccatgtctgtggcgtccacctcaaca

SEQ ID NO: 703954 - DNA, 74 bp, Homo sapiens
tcaactccagagtgcagaagttgctgagtgtcctgatggcactgcctcctaaaccaccaaaacctactactgta

SEQ ID NO: 703955 - DNA, 75 bp, Homo sapiens
gccagggtcagaaagtgcagaaggttatggtgcagcccatcatacggctacgtcaccaactccaaggtgaagttt

SEQ ID NO: 703956 - DNA, 87 bp, Homo sapiens
actttggggaaggagctctttatgtactttggaccaaaagctttacggcatttcagtagaaccatggaggagctggttcatgacctt

SEQ ID NO: 703957 - DNA, 98 bp, Homo sapiens
gagcatgtgattgaggccctgcgcagggccaagttcaagtttcctggccgccagaagctgctagcagaagaaagtcttcccacaaccccattttattt

SEQ ID NO: 703958 - DNA, 75 bp, Homo sapiens
ttacacagacgtggggcgatgcttgtgaccctgcagctcctcaaagtgctgcgacaagagactttggacaaaaat

SEQ ID NO: 703959 - DNA, 100 bp, Homo sapiens
cagcatggaaacctgtgaagttagctgggccaggccaaagagagcttcaccagcctccaccaagacgggacaagcagggagtttatccggcagcccaaag

SEQ ID NO: 703960 - DNA, 100 bp, Homo sapiens
cgcagggcgatggacggccgaaccccgcgcccgcaggacgccccagccagatcaccacgcttattaatcataaagataataccaaaaagtctgataaaac

SEQ ID NO: 703961 - DNA, 75 bp, Homo sapiens
tcagaaagtggctgacatggccaccaacacacgtgtagactatgccagttactaccagggcctatgggattgcca

SEQ ID NO: 703962 - DNA, 82 bp, Homo sapiens
atggctgcgagaccctagaggcctgcggcctgcggtgcgcgcggagccatggttatcatgtcggagttcagcgcggaccccg

SEQ ID NO: 703963 - DNA, 100 bp, Homo sapiens
aagccgcagagtagaagaggctttggttttagcaaaaggagcccggaggaacattccaaaggaaaaatttcagggtggagagattcaaccagttagcgtg

SEQ ID NO: 703964 - DNA, 100 bp, Homo sapiens
ctgccatcttagatattgctggtctcgctgcagtgactgacaacagagatgccctgtatccaagcccaatatgggacaccagcaccgagtccgggacccc

SEQ ID NO: 703965 - DNA, 124 bp, Homo sapiens
gttcggttgaaggattctgtgtgctgtcggacccagagggtgacggcgccgctaggatgaagctcgtgagaggttggaaagaaccatgactgtattcaggaaggcacatgaactgaagcttctg

SEQ ID NO: 703966 - DNA, 100 bp, Homo sapiens
ctctcgaccccttctgcccggcgcttcggcccgggccgctcaggtgcagatatgattctataacagactcttccagaaatgatatgaagaggaaatttgc

SEQ ID NO: 703967 - DNA, 85 bp, Homo sapiens
acccttgcatggtgtttcaaagggtggtgaagaactaaggtttgcatatatggtgaccacagtacttcttagtgtattggtgaag

SEQ ID NO: 703968 - DNA, 100 bp, Homo sapiens
ctgagaggggctgcggccggagcgggcggctgagacaaaggcgacggtcaaaatgcagatcttcgtgaaaacccttaccggcaagaccatcacccttgag

SEQ ID NO: 703969 - DNA, 80 bp, Homo sapiens
ttgagaagcagaacccagctgaaggactgaagctccttcagctcaaaaattttaacaccctgatggcagtggtgggaggc

SEQ ID NO: 703970 - DNA, 98 bp, Homo sapiens
catgtagacgcccccgcaggcgcccgcggcagcgaacgaaattgagaaagctgatgatcatctgcagcagcccttgcaaaaccaaaaaatactgaaga

SEQ ID NO: 703971 - DNA, 87 bp, Homo sapiens
atccagttggaccttttggacaggaaagtgtaacatcagttacagagagtagcccatcgaagccagagcagtgaaggagtcagttct

SEQ ID NO: 703972 - DNA, 101 bp, Homo sapiens
cgggccggccccgcggggagcgcccccggcgcgatgcccttcaggaaagcgtgacgacagcatgtacgatccctgaatgggcccgtgggcatatttagtca

SEQ ID NO: 703973 - DNA, 82 bp, Homo sapiens
atcaacaatcaaagacaatatcaatgacaaactgacggaaaaggagagagaccactgaagatcctggtgtcgccatgggccg

SEQ ID NO: 703974 - DNA, 90 bp, Homo sapiens
acaaggctggcagcttcatcactggaattgatgtcacctccaagggtgtgaaacacataaggttgccaacacaagttcttttcacacaac

SEQ ID NO: 703975 - DNA, 75 bp, Homo sapiens
cagcgcgggaggcaggttccgcacggccgttggcatccactgtgaatgataagctggagctgcaggagtgtctgg

SEQ ID NO: 703976 - DNA, 83 bp, Homo sapiens
ccgccctggccatctaccatgtggcctgtccccaggcgcggctgccggccatgccctctgtctgcctcctcctgctgctcttc

SEQ ID NO: 703977 - DNA, 78 bp, Homo sapiens
gcggtgctggctctgctgaaggccatcgtgcaggggcaggtgaccctggcaaagatgagagtgcacatttcgtcctgc

SEQ ID NO: 703978 - DNA, 100 bp, Homo sapiens
aaggaattaccttggagaggctgtgagccacaatgcatcgctggaagtagccaatttgtcaaagatgaaagtgaccttatcagctttggatacttctgag

SEQ ID NO: 703979 - DNA, 100 bp, Homo sapiens
atgttatcatgagggaattccggtcagggtcaagtcgtgttctgatcactactgacttgttggatcctgatggtgaacatgccaggagagcaatgcaaaa

SEQ ID NO: 703980 - DNA, 75 bp, Homo sapiens
cgagcggagctttggttggaaggaccagcgcaaatctgccggaggcgctgggcaatgaccccgggactccaggcc

SEQ ID NO: 703981 - DNA, 100 bp, Homo sapiens
aaagaccaggttcaagggtctctccagaaaatcttgtggacaaatccaggggaaggctgaagtttctctttggctcatcagccacccaggccttggacct

SEQ ID NO: 703982 - DNA, 50 bp, Homo sapiens
gcaccttgcgcttcttgcagtcgacaatgcagatcttcgtgaagactctg

SEQ ID NO: 703983 - DNA, 83 bp, Homo sapiens
cttcgatcgcctcgcgccggctgctctttccggggcgaactttctgaccaagtatacaactacccagagggcctaggagaagt

SEQ ID NO: 703984 - DNA, 82 bp, Homo sapiens
tgtcttcggtggactccttcggcagtccacccaccgccgccgcctcccaggtcatcaagagagagggcacaggtacagagat

SEQ ID NO: 703985 - DNA, 87 bp, Homo sapiens
gggacttcacctttgtctcctcagcagacgcggaagatacgtttgaaatggtttctgaagatgaagatgggaaattgggatttaaag

SEQ ID NO: 703986 - DNA, 100 bp, Homo sapiens
cgggggcgcgggcggcggcgccggcaggaaggtggcgatggcaacggggcaggtgttgtttcatcgttttttctactccaaatctttcgtcaaacacagt

SEQ ID NO: 703987 - DNA, 75 bp, Homo sapiens
tgataggcagcatattcctgatacatatctatgtgaacgttgtcagcctagtgccttgctttccatgacatttcc

SEQ ID NO: 703988 - DNA, 100 bp, Homo sapiens
tgaagatatgcttcgtgggatctttgagccttttggaagagtgcccctgggcgctgggattgctctagcctgtaagtataatggaaaagatgaggtctgc

SEQ ID NO: 703989 - DNA, 98 bp, Homo sapiens
ccagtcggacctgactgcattgtgtgatgaaaagaactgggaagatgaggtttatataactttccaagacaaggaagttgtgcaaagcctcacagcta

SEQ ID NO: 703990 - DNA, 51 bp, Homo sapiens
agaggtcggagatgggtttaagtgtgggactacaatactggcagagtggga

SEQ ID NO: 703991 - DNA, 82 bp, Homo sapiens
cggagatcctgatgaagttcgagcactaatatttaagaaagaagatgttaactttcagacaggtgctctagttcacagctat

SEQ ID NO: 703992 - DNA, 96 bp, Homo sapiens
ggtttccctcggcgtgctactgtgcgctcgatccagcaccatggggaagcgggacaatcgggtggtgttgacttcaaaatcaaaactgtagagcta

SEQ ID NO: 703993 - DNA, 100 bp, Homo sapiens
cgctactcctggcagtgcgtcaatcagagcgtcctgtgcggaggagaacatttgcctgcactgggcggcgttctccggctgcgtggacatagccgagatc

SEQ ID NO: 703994 - DNA, 90 bp, Homo sapiens
ggcacggctgaggcccgcaagcgcaaggatgtcatgaccgggccgtcctgctctatgagtacgtgggcaagcggatcgtggacctgcagc

SEQ ID NO: 703995 - DNA, 83 bp, Homo sapiens
cgaccccgtcccgaccctggccgccccgagcggagcctggaggtgaaattcgatgctactgtgatgctgcccactgtgtagcc

SEQ ID NO: 703996 - DNA, 100 bp, Homo sapiens
ggcacagcctctcagtcaacatctccttcgcagccgcgcaaaaaaagcagaggtgatcatgaactaccatgtcggggagacggtgctgtccttgcagaag

SEQ ID NO: 703997 - DNA, 100 bp, Homo sapiens
ccctgcgtcaggaattcagcaacctggaagaggtctctgttctaggatgtcccgacccagtggtgcatgagatcgcctatcagtacggaaaaaatgtagg

SEQ ID NO: 703998 - DNA, 100 bp, Homo sapiens
caaagagccccgaagctaagagcccccttcagtcgcagcctcactctagggtttcctatcgctgaagtgttcacgctgaagcccctggagtttggcaagc

SEQ ID NO: 703999 - DNA, 101 bp, Homo sapiens
gtatgtctcctgtttcttttcaaagagtatgattcatccagccttccagctctgttatttaaagcaagaacacttctgggagccgaaagccatctgcgaaa

SEQ ID NO: 704000 - DNA, 75 bp, Homo sapiens
ccaggaggccaggggtgtcgccatgctctgcttatgataatgtcaacaaagttcgagtagctatcaagaaaatca

SEQ ID NO: 704001 - DNA, 78 bp, Homo sapiens
cggacttcacctgagctacctcaggctttgtgccttgggcaaagggcagcttactcctggaagaggactgactcaagg

SEQ ID NO: 704002 - DNA, 100 bp, Homo sapiens
tggcaagggcttattgttcctgtgatggcaagtgtgtgatttgtgactcctatgtgcgtccctgcactctggtgcgcatatgtgatgagtgtaactatgg

SEQ ID NO: 704003 - DNA, 88 bp, Homo sapiens
gacgagttctcccggggaaatgtaccgtccagcgagttgcagatctacacttgcctctactcttcatggatcttttggatgaaagaac

SEQ ID NO: 704004 - DNA, 83 bp, Homo sapiens
cgactctgcgccgccgctgcctccatcctgggcaaacctgcggacatattgatgaccatgagatccctgctcagaaccccctt

SEQ ID NO: 704005 - DNA, 97 bp, Homo sapiens
cggcaggaagtgggaccggtgtctggcggatgcggtcgtgaagataggttgggggccgtcccgctcctaaggcaggaagatggtggccgcaaagaag

SEQ ID NO: 704006 - DNA, 98 bp, Homo sapiens
ctgtcgcctgcagctgctcgcctgtctccgtcggaagggagcccaagctttgcagagccgtttccctggggagatggtaaccatactctattccataa

SEQ ID NO: 704007 - DNA, 100 bp, Homo sapiens
aatctttcaccaatgtaagtctgccttatgttcctccagccaattgcaaagggtacttgataacattacaacagacaaaatattaattgatgtattcgac

SEQ ID NO: 704008 - DNA, 100 bp, Homo sapiens
ccatcatcactttcattgtctcggacgtgcggggcctgggcctcccggtccgcaagcaggacttcagggccacaggtgctgccaagatgctccagggcac

SEQ ID NO: 704009 - DNA, 100 bp, Homo sapiens
ttgaagcccttactcagaatattccaatatgtcattttggtggaatcctcaacatttgtctcttcgccaacgaagttaactgaatccaggcaatacccga

SEQ ID NO: 704010 - DNA, 85 bp, Homo sapiens
ccaggtccccgcccgcaggtcccgggcaggttttataggatcacattgacaaaagtaccatggagttttatgagtcagcatattt

SEQ ID NO: 704011 - DNA, 132 bp, Homo sapiens
gcatggtgtggggttggtgtgattagcttcgcagtctggaaagctttaggagttcacagtgtaaatgaaattgcctttataaatacccttgaagcccagaataaacgtcatgatgttttatcaaaattgaag

SEQ ID NO: 704012 - DNA, 100 bp, Homo sapiens
aggcaaggagctaaagcagcgtgcgttcagccctggggttctccaacggaggagctttttaacctctttccggtgaggtgggaactcatcttcatgatcg

SEQ ID NO: 704013 - DNA, 75 bp, Homo sapiens
cctggttgctgaagaggaggcggaagccaagtgccagccatttttggagtctcctttggtatccgcaaactctac

SEQ ID NO: 704014 - DNA, 75 bp, Homo sapiens
acctatgtacctgttaccactttcaaaaaaagttgaagttgatggtagtttaagtgatagccacgtatctcctcc

SEQ ID NO: 704015 - DNA, 100 bp, Homo sapiens
gaggccttctctagaccttgccaagatggcacaggtatgcgccaggggaacgaccatggcactcagtaccgctcggccatctacccgacctctgccaagc

SEQ ID NO: 704016 - DNA, 100 bp, Homo sapiens
cattcctgttggtgacaacaccgtggccctgttctgggatgagcaaggtgtaaagtctctggatggtcgtcagatccgtgtggatcatgcaggcaagtct

SEQ ID NO: 704017 - DNA, 82 bp, Homo sapiens
gccgctgcccgccaggccccgggggcggcggccaagatgtccgtgcctatgaaggatttgggggcagagcacttggcaggtc

SEQ ID NO: 704018 - DNA, 98 bp, Homo sapiens
tcgacgtcgtgatccagaagtccagagctgaggactgcctgtttgcagcaccctggaggagaagaggttctgctggaacaagctggtgtagatgcaag

SEQ ID NO: 704019 - DNA, 83 bp, Homo sapiens
caacccgcggccccggcgccaagccgccgtcatcttcttcctgtgccaggttcattttccagacactgaaagagcagaatggc

SEQ ID NO: 704020 - DNA, 82 bp, Homo sapiens
aactttgaagagatcgactacaaggagatcgaggtggaagagaattactggatcttcagcctttaccaatcacagctttggg

SEQ ID NO: 704021 - DNA, 74 bp, Homo sapiens
tggcgcttctgccgggccctcagactggggagtgtgagttacatggtgatgaattttgtcctgttttggatgca

SEQ ID NO: 704022 - DNA, 100 bp, Homo sapiens
ttacacaaaacttcatcttctgtaggatctgatgaaaattctcttcattctcttggactgaacttaaatactgataggcttcagggatgacttcttaggg

SEQ ID NO: 704023 - DNA, 100 bp, Homo sapiens
cggacctacaacggcagctaggacagcagcctttccgttcccgggtctggcctcctcacctggtacctgatcagcatcgtgtcttctcggaaaaaaccag

SEQ ID NO: 704024 - DNA, 100 bp, Homo sapiens
tctctgtgtgttccttattttgtgcttgaacttgatcaaacaggtagctacagcaagctgggtagcaggcagatccaaaggatatcatgaagtttccagg

SEQ ID NO: 704025 - DNA, 80 bp, Homo sapiens
ccacccaccgccgccgcctcccagccgccgccatgtctgcgcatctgcaatggatggtcgtgcggaactgctccagtttc

SEQ ID NO: 704026 - DNA, 75 bp, Homo sapiens
ctgcatcagctcagccatcgcgtatttaggtcagttaacgtccataccaggatacctgaatccctccagtaggac

SEQ ID NO: 704027 - DNA, 100 bp, Homo sapiens
cacggccgggggcgtctttcagagcattacggaagccctcaatctagaagagtagaggtccaaaggtgccatatgttcacactgtgagcctgcaagatct

SEQ ID NO: 704028 - DNA, 126 bp, Homo sapiens
aagaaaatcgaccagaagcagtgaaaagttgtgaagctctggcacagaaaattgaaggaattgccgtgtgcaacatcccgtctgcagccgtggaagagacagcggactctaccatctgccacatcc

SEQ ID NO: 704029 - DNA, 100 bp, Homo sapiens
taaaaagaagtgttaagaattgcctttgggactctgaaggctgaagctggtgcaggcctttacccatgctcctgcaacattagaagcagacagaggtgga

SEQ ID NO: 704030 - DNA, 83 bp, Homo sapiens
tcagttactgtcagcaccaaaaaatcccaccagacatggacctttgctctcacttgtaagatcctctgccttgtcaatgttag

SEQ ID NO: 704031 - DNA, 75 bp, Homo sapiens
cggacccaaagtgccatgtctttaatgctgcgggctgaactaccacaagcgctgtgccttcagcatccccaacaa

SEQ ID NO: 704032 - DNA, 75 bp, Homo sapiens
ctctgtctcagcgccgcctccctgcttcttaacagatgacctgagaattaatttatggcacttagaaatcacaga

SEQ ID NO: 704033 - DNA, 91 bp, Homo sapiens
cttactaccaaacagcacttcctggcaatgatagatacatcagtgtgggaagccaagcagatacaaagtggagattggagaattggaagag

SEQ ID NO: 704034 - DNA, 99 bp, Homo sapiens
cggggctaccggatcggtcggaaatgggagcaatggaccacagaaattctgcattgaaaaagttgggaaagaaaattggctacccagaagtcatacctg

SEQ ID NO: 704035 - DNA, 74 bp, Homo sapiens
attgaaaccctccaaaccacgtcatctgattggagagcctggggatgtacaggagatgcctgctccagaatctc

SEQ ID NO: 704036 - DNA, 116 bp, Homo sapiens
ttgctctcaactgtgttggtgggaaaagctccacagagctgctgcggcagttagcccttgcaccagaatagagagatgatagacccagacaagttctgcagcctctgccatgcaac

SEQ ID NO: 704037 - DNA, 101 bp, Homo sapiens
ccgtggacttcctcgcagaggtggacaagctggtgcagctgattgagtgccccatcttcacatttaagtgggcagaccaacatccacctcagcaaaaactt

SEQ ID NO: 704038 - DNA, 101 bp, Homo sapiens
gtgatcttggtgccatagagagtctccgggtccctggaaagacggtggatgtgatggcagaagacagagacaccattctggaccccaagatagacgcttca

SEQ ID NO: 704039 - DNA, 124 bp, Homo sapiens
ccgactcggtcacaaggaaaatggattcagtttgcatctctccctcctttaaacagcttctccgggtctcagcatgccccagcatgagaccagatgtaagctctcctccatccagctcctcaac

SEQ ID NO: 704040 - DNA, 88 bp, Homo sapiens
cctacagatcttccctttcacctatgaaagcaaacgtatgggcatcatcgtgcggggctggtgaattaccatatctccgtcaagtgca

SEQ ID NO: 704041 - DNA, 75 bp, Homo sapiens
tcataacaaagttcacaaccggacaaggaccctcacatgtgcaggggatattggtgctggaaaaggcaaatacta

SEQ ID NO: 704042 - DNA, 75 bp, Homo sapiens
cttgcagttgaaggagtataacacagctcatgatggagcagtccaagaagtcctccctcatggtggcccgcagta

SEQ ID NO: 704043 - DNA, 80 bp, Homo sapiens
atggacgagcctcccgggaagcccctcagctgtgaggagaaggaaaaggttatcaatactctggctgaccatcatcatcg

SEQ ID NO: 704044 - DNA, 101 bp, Homo sapiens
aggacacccggacacctggaagctgggaaatgctatgctaagaaggaatctgatcttaatggcgcccagatcaagcttcgagaatatgaagcagcactgaa

SEQ ID NO: 704045 - DNA, 73 bp, Homo sapiens
tgatgcaattgtatatcagatttcagacccaaagtttacgcctatcagacctacacagaaaatcgcatctttg

SEQ ID NO: 704046 - DNA, 75 bp, Homo sapiens
ggcggcgggagaggcgccggggccgcacaggtaaagagtgtgtacaacagttagctgaaaacaccaggtatttca

SEQ ID NO: 704047 - DNA, 82 bp, Homo sapiens
gcagaagtcgcgtgtctaggtgagtcgcggtgggtcctcgcttgcagttcagcgaccacgtactgtcaagatgataagcatg

SEQ ID NO: 704048 - DNA, 90 bp, Homo sapiens
gcaaaagatttgatgaaagtacttcagggagtcaacggtgaggtgtttggagaagagggattgaccctgaatcttgaagacgttcagcct

SEQ ID NO: 704049 - DNA, 100 bp, Homo sapiens
aggaggctaagaaagtggtgaatcccctgtttgagaaaaggcctaagaattttggcattgcagaagaaggaggaggagtcggcgggcggcaccaagggca

SEQ ID NO: 704050 - DNA, 96 bp, Homo sapiens
atgtgggtgtagagattatggaaaaattcaatacaattagtgtctccaaatgcaacagatggcacctggagagacatctatagcaggaaatcaggt

SEQ ID NO: 704051 - DNA, 82 bp, Homo sapiens
gggagcggcgttggaggccaccgtttccaggcctgccgaggaggaactgaagacgaagaacatggatgataacacctttgcc

SEQ ID NO: 704052 - DNA, 51 bp, Homo sapiens
ggatcgcgaccggtgcaacttctaggcataatcaccagcaacacccgggac

SEQ ID NO: 704053 - DNA, 100 bp, Homo sapiens
ctttcttgtctcatgtcgtcagccagcaccaagccttgttgggcactatcagggcgtgatggagcctactaccagctgtttgtacgagacggccagctcc

SEQ ID NO: 704054 - DNA, 100 bp, Homo sapiens
attaccctttgtgtcatcctccacagctccagggaaggcactcaaaagtggggggcaggaaaggcagctgttgtgctgtgtatggacgtgggctttacca

SEQ ID NO: 704055 - DNA, 75 bp, Homo sapiens
tcagaaagaattcatcacactgtgtgtatgcaacagcgttattgcaacaggctaacgaaaacagacaaaattcaa

SEQ ID NO: 704056 - DNA, 100 bp, Homo sapiens
gtactcaacatattgactgtatttgggctgcagcacagtttcacgctatggatacattgtatagacacagctatgatttgagcagtgccattagtgtctt

SEQ ID NO: 704057 - DNA, 100 bp, Homo sapiens
gaattaggtatccctcctgatgatgaagactgaaggtgtagactcagcctcactctgtacaaatgtcatcacaatggatcccaaagacaattggtcaaaa

SEQ ID NO: 704058 - DNA, 77 bp, Homo sapiens
acttcctccccgcgccccctccccctcgccatgaaggtggaagttaaacgagctgagcctcgggacagcaagagcca

SEQ ID NO: 704059 - DNA, 90 bp, Homo sapiens
agctcataaccgaagatgtcagcctcccctgtcccgaacgcagtgtgtggaaaggtttctatgatcagagatattcgagagagggagatt

SEQ ID NO: 704060 - DNA, 82 bp, Homo sapiens
ctggagaagctgggattggagattccacccaaacttgctggtcactgggaggctgatcagctgaccgaagaacagattgctg

SEQ ID NO: 704061 - DNA, 98 bp, Homo sapiens
caggacagcatccaggcctcattggacagcattcgaggcagagatctggctccacaaggaggcccagaaggagggctggagcaaagctgccaagctcc

SEQ ID NO: 704062 - DNA, 100 bp, Homo sapiens
catggctgcggccgccgcctccgcctcccaggatgagctgagtacatgtcccagagcaagcacacggaggcccgggagctcatgtactcgggagccctgc

SEQ ID NO: 704063 - DNA, 82 bp, Homo sapiens
ttaactttcattgtcttttccgcccgcttcgatcgcctcgcgccggctgctctttccgggctgatcagctgaccgaagaaca

SEQ ID NO: 704064 - DNA, 75 bp, Homo sapiens
cctggccctggccctgatcatcctgctgggcttcgtccagatcgggaaggacagccctcagcgcctttttccagg

SEQ ID NO: 704065 - DNA, 92 bp, Homo sapiens
ggaagaccgcgcgcagggcctgcagcgggagctggacggcgagcgcgagcggcgcgagaaaatctggtggctggacccagagctgacctatg

SEQ ID NO: 704066 - DNA, 90 bp, Homo sapiens
cgatggacatggacatgagccccctgaggccccagaactatcttttcggacagtggtgattatcctcttaccatgcctggacctcagtgg

SEQ ID NO: 704067 - DNA, 51 bp, Homo sapiens
tgatgttaacaaatgtgagattgccaggttttagcaaagccaaactcgaat

SEQ ID NO: 704068 - DNA, 75 bp, Homo sapiens
tccaggaaattcagcctcaaaaccgtcctgctgcttgctgaccaaatgatctgtgacttcctccgcggagccaca

SEQ ID NO: 704069 - DNA, 102 bp, Homo sapiens
gtggatgagttccacctcattttagagtatcaagcaggatattgacggccaagcactcctgcttctgacccttccgacggtgcaggagtgcatggagctgaa

SEQ ID NO: 704070 - DNA, 100 bp, Homo sapiens
aacatcggaaaccgtcaagtacctgacgcggggcaagattctgctgtgcacaggaagggaaaaggccgaggcatcagcgtgtgaagaccgcaaagacgat

SEQ ID NO: 704071 - DNA, 90 bp, Homo sapiens
tgatcacgcagctggctggcttcagtggaccagatgcagcccatgagactgttcccattatgctggtaggaaacaaggctgacattcgtg

SEQ ID NO: 704072 - DNA, 98 bp, Homo sapiens
aaaaatgcccagcgcggcgcggggctgcggagtcgtccggagccgctgcgcgggattttatattggaagacatggatcttgctgccaacgagatcagc

SEQ ID NO: 704073 - DNA, 145 bp, Homo sapiens
ggcccgggccgcacccgccggccccatgaggagggacgtgaacggagtgaccaagagcaggtttgagctcagcgacatgtcctcacctacatggaggatgcagtgtgccagctgctagaaaacagggaagatattagccaatatg

SEQ ID NO: 704074 - DNA, 90 bp, Homo sapiens
aggacctactcacagataggaattgaaggagctgctggcactaaggctggccctggaggatgggtgtggccctgggcctggacccccgag

SEQ ID NO: 704075 - DNA, 80 bp, Homo sapiens
ggaggagattgcacaagctccctcagtctcccatgcctgtgtctaacgcccctcacgagggatcgtgatctggaactcgc

SEQ ID NO: 704076 - DNA, 100 bp, Homo sapiens
gccgcggcaggcgaagagagaagagatgggaatttcttagccataggctcacatgacaactgcatctatatatatggcgttagtgacaacgggaggaagt

SEQ ID NO: 704077 - DNA, 51 bp, Homo sapiens
cgaactccgcaatgaggacgttcaggtgaacctgagcaaggtgggcgagta

SEQ ID NO: 704078 - DNA, 82 bp, Homo sapiens
catgcggaagatcgtcgccacctggatgctggagggcagttgggtgagaagcagcttccatcttcaacctcggatgatcggg

SEQ ID NO: 704079 - DNA, 120 bp, Homo sapiens
ctctgccgtggagctgggtgctggcacggggctggtgggcatagtggctgccctgctggaattttccccagagaatacctccttcaacagatccacctgtattcacttgccgacctgcag

SEQ ID NO: 704080 - DNA, 49 bp, Homo sapiens
cgggaagcagggattccagtgccaaggagaggcagatgcgaaccagaac

SEQ ID NO: 704081 - DNA, 50 bp, Homo sapiens
aaggattccaagtaactcttatttggttggaaagggcaaagaaattacaa

SEQ ID NO: 704082 - DNA, 80 bp, Homo sapiens
gggccagggaaccctggtcaccgtctcctcaggatgctgaaatttctggaaaagacaatggaaatcaggggcaggaagag

SEQ ID NO: 704083 - DNA, 75 bp, Homo sapiens
gatggccaagaactaagtaacgatctggatgcccagattgactggggcgactttggggtagaggcagtgtctgag

SEQ ID NO: 704084 - DNA, 100 bp, Homo sapiens
ggacccctagccggagcatgcccttacggacatccaaaaattgcttggaactgacttcatgggtaccataagtacagagaacaagggatgctgaggcttc

SEQ ID NO: 704085 - DNA, 75 bp, Homo sapiens
tcccactgcaaaaaggcctggaacccagacctggactcagaggcgctgctagccctgcccctgcctcagctggtg

SEQ ID NO: 704086 - DNA, 100 bp, Homo sapiens
cttcgagacaaggctgtcagcccctagggcttatttcaaaacctttgtccctcagttccaggaggcagcatttgccaatggaaagctctaggaaacacca

SEQ ID NO: 704087 - DNA, 100 bp, Homo sapiens
ggacgatggacagccagggcaggaaggtggtggtgtgcgacaacggcaccgggactcatggagagatttctcatggatggcttgtatccttcaaggtttg

SEQ ID NO: 704088 - DNA, 88 bp, Homo sapiens
ggaggtggtggacgagacggaggcgctgcagcgcttcttcgaaggctcagccgcccagtgggctcaggcccagagcccagagcaacca

SEQ ID NO: 704089 - DNA, 98 bp, Homo sapiens
gccggcctgggcaggtgtcttcctcgagagatttggacacctcccacactgagtccccaaccccccatgactcaaattcacaccgccctcaactgcag

SEQ ID NO: 704090 - DNA, 74 bp, Homo sapiens
tccgaagcgggagtcaggctgagccttcggcccccaagctatgacttctgccaggtcctgcagtggtttgccga

SEQ ID NO: 704091 - DNA, 75 bp, Homo sapiens
caccaagcggtgagactatcacctatcgccaagtgggtgaagttgaacaaattgctatgatgaaaccaaaaggcc

SEQ ID NO: 704092 - DNA, 100 bp, Homo sapiens
ctggatgagcagagagctgtgaaatatctttggcttgcagccaacaatggggacaaagccaaaggccccttgttagctggccatccctgccccatttttt

SEQ ID NO: 704093 - DNA, 75 bp, Homo sapiens
gagaagtggagaagaaatcagtcagccgcaggtttccgcagacatgcagctccagttacaagaaggcagttccca

SEQ ID NO: 704094 - DNA, 100 bp, Homo sapiens
gttccaccttcagagcgtcacggcgtacgccctcatggggaaaatctccccggtgactttcaggtccacgctgcttttatgagctgtaacactcaccgcg

SEQ ID NO: 704095 - DNA, 53 bp, Homo sapiens
caaagacccttcccaggggaggacattcggcaggaggctggagctgagacgtg

SEQ ID NO: 704096 - DNA, 80 bp, Homo sapiens
aaattcgatttgcaaatcattcagtgaatcccaactgttatgccaaagattgcgcagtctctttgtggagaggacttgat

SEQ ID NO: 704097 - DNA, 90 bp, Homo sapiens
aaggatgtttgcaaaaactatgctgaggcaaaggatgtcttcctgggcatggctaccatattttttgcccagtttgttcaagaagccact

SEQ ID NO: 704098 - DNA, 75 bp, Homo sapiens
ccatttcacctctaaaaaatgggatgggaaacctaaagatttttcatgatgatggtgtattctgggtcactttct

SEQ ID NO: 704099 - DNA, 83 bp, Homo sapiens
gccacgggggccgccgcagcaccatggcgaccaccgtcagcactcagcgcgggccggactctggtccttcctgtggttcgtgg

SEQ ID NO: 704100 - DNA, 75 bp, Homo sapiens
agaagaggcgttcgctgcgcgtgcacattccgagtgcagcagctgccccgagccccgtgcttggcaacattcccc

SEQ ID NO: 704101 - DNA, 100 bp, Homo sapiens
cctgcctcagccttccaagtagctgggaccacaggtgtgcaccatcacgcccaggtgacacttggacagaaacactggcctatgtgctcttctggggagt

SEQ ID NO: 704102 - DNA, 100 bp, Homo sapiens
tgcatctggttcttctaaaggagcaattctccaatacttacagtaatctcatattaacagagttgcatgctgagaatttgaaaaatgaagatgatgtaga

SEQ ID NO: 704103 - DNA, 100 bp, Homo sapiens
aagaatcagcaaatactactgaaagtgcaatatttgagtatcactgcgaggtacgcatagctgctaaattcatcactcatgcacccccaggggaatttaa

SEQ ID NO: 704104 - DNA, 101 bp, Homo sapiens
aggttcttcgaaaactgaagcagatgttgaacaacaagtctttcccagggaactccgatgaagtgttccaacaaaatgagcgagtgaaccaagaagaggat

SEQ ID NO: 704105 - DNA, 98 bp, Homo sapiens
gccgtgacctgtacaggtcgcgggagtcgtagggaggacgccgggacacctggaagccgagaaatggtttgtggtaaatatgccagctctagaacaca

SEQ ID NO: 704106 - DNA, 83 bp, Homo sapiens
cttttgcctcagatactattttgaagtggagatccttcagggtttggtgagtggaaatctgggaggcacacttgggccgactg

SEQ ID NO: 704107 - DNA, 51 bp, Homo sapiens
tctagagtctggaatatttaaaaagccatgtgaagatgtgcttgcttcccc

SEQ ID NO: 704108 - DNA, 99 bp, Homo sapiens
actattcttgctgtggggcttgtgaagccaaaagcaggtccaggaggcccaggaggtcctgggggacccatgggtcgcatgggaggccgtggaggagat

SEQ ID NO: 704109 - DNA, 100 bp, Homo sapiens
gcctggctccccatactagtcgccggaagtgctctctggcgtggtggtcatatcgagtaaggattcagtccaacaccagggagtgtctttgaccatggaa

SEQ ID NO: 704110 - DNA, 100 bp, Homo sapiens
caatgtctcagcctttcagccttaccaagcaacaagtgaaattgaggtcacaccttcagtccttcgagcaagacccagatgatgtggtaccagttggcca

SEQ ID NO: 704111 - DNA, 75 bp, Homo sapiens
ccacaagctgacctttccatcctccctcctctacccatgggctcatttgaagatgactcttctacaaaagtggac

SEQ ID NO: 704112 - DNA, 95 bp, Homo sapiens
tgcacccacgtcctttgagggtcctttcgggaagatcgtgcaccaggtgagggagcacacgtcgcatttggaggcagagctggaaaagcacatgg

SEQ ID NO: 704113 - DNA, 78 bp, Homo sapiens
ggactcagaccagtctctgcaagaacacatcatctcagagttggagcacctgacgtttgtcaacacggatgtgggccg

SEQ ID NO: 704114 - DNA, 88 bp, Homo sapiens
gctgtcatcacaaaagagttgattgaaattatctctggtgctgcagctctggttgaaaaataccggccacagaccctgaatgatctca

SEQ ID NO: 704115 - DNA, 76 bp, Homo sapiens
acatcctctttaacccagttcccaccctcacagtcaggtttcccaaaccactccttatgatccagtgaatattcaa

SEQ ID NO: 704116 - DNA, 98 bp, Homo sapiens
gacctcctggaagccaaaaatgggattgtggtccatcaggagtctgtgtgtgccacctatggaagtggcttaagcagcacgtgtattgtagacgttgg

SEQ ID NO: 704117 - DNA, 96 bp, Homo sapiens
ccggccggagctgacccagtgggccacgggctccggactccagaactttccaagcgggggaaacttggcggcggtgtggggctgccttccaggagg

SEQ ID NO: 704118 - DNA, 100 bp, Homo sapiens
ggcctggcccttggcctcctcctgctgctactgtgtccagcgcagaggatgtactgagtaaagatgctggggaatgtgcaatatgccttgaagaattgca

SEQ ID NO: 704119 - DNA, 101 bp, Homo sapiens
attgtacccacggcagagttccaagacaggatatcgggagtaactattcccagtcagaggcgctatgtgtattattatagctacctgttaaagaatcatct

SEQ ID NO: 704120 - DNA, 101 bp, Homo sapiens
gtgaatttccatgtcaacatagtccagttcttcaccaaaggacatggatgaaaatgaaagcaaccagtctctgatgacaagcagccaatatcctaaagaag

SEQ ID NO: 704121 - DNA, 90 bp, Homo sapiens
ccgccggcagcttcgctggaagcgagcccacagcctcggtgccccccgagtcggacgtgtaccggatgctccacgacaatcggaatgagc

SEQ ID NO: 704122 - DNA, 90 bp, Homo sapiens
aagtggctgctattgaagccctaaatgatgtatgtgccaagagttgtaacctctgcacaacagaaagcaggaagaactattacagcccgg

SEQ ID NO: 704123 - DNA, 119 bp, Homo sapiens
tcaaggatatgctgtattcagctcaggaccaggcaccttctgtggaaggtgtctgacttccagcaactgctggcctgtgccagggtgcaagctgagcactggagtggagttttcctgtg

SEQ ID NO: 704124 - DNA, 100 bp, Homo sapiens
ggcgaacccgcggcgcaataacgtttatatcctggaacctggagatcctcctttgttacagcaaccactacagacatccaaatctggtattcaacaaata

SEQ ID NO: 704125 - DNA, 90 bp, Homo sapiens
ctgggcagagactccaagacaagctcagccgaggtcaccatccagaacctagaagtcggaatccggaagaagatcgaacatgacgtggtg

SEQ ID NO: 704126 - DNA, 75 bp, Homo sapiens
ctgatggctctccttccaaactgtgattgggttattatacccctgcattgacagacatctaggagaaccacataa

SEQ ID NO: 704127 - DNA, 50 bp, Homo sapiens
ccggagcacccgacccctgagaaaccactgattgcttgtgtggagaaaca

SEQ ID NO: 704128 - DNA, 98 bp, Homo sapiens
atccttctgctgctgaaccaatgccaacaggtggtttgggaacattccatgcccttctaaatacagctgtacatgtagtcatgtattcctactatgga

SEQ ID NO: 704129 - DNA, 73 bp, Homo sapiens
aaggagttcgagcagatcgacaagtccgggagctgggcggccatttaccagctctgcagtccttcatccaagc

SEQ ID NO: 704130 - DNA, 50 bp, Homo sapiens
ccggccggcaccaccgctgcaagagccggaggttgacggatatattcaga

SEQ ID NO: 704131 - DNA, 100 bp, Homo sapiens
agtccaacacaatcacagcaacagactctcctgcagaccttcccaggaagccagagccacacacaccatcatggtcctgaaccacaatggacactgccag

SEQ ID NO: 704132 - DNA, 74 bp, Homo sapiens
ttaagaatgagggtgccgaaccagatctaatcaggtcgggtcacagccagcagctatgtctgacataaatcttg

SEQ ID NO: 704133 - DNA, 76 bp, Homo sapiens
ggcagatattatcatagttgctgcagcaatgacagcactgaccgaagaggcagccgtgactgtaacacctccaatc

SEQ ID NO: 704134 - DNA, 82 bp, Homo sapiens
aatggctgcgagaccctagaggcctgcggcctgcgagtcaatgcatgtgttgatgtggtgctctcaggggtgaagctcttgc

SEQ ID NO: 704135 - DNA, 51 bp, Homo sapiens
tttgaagtcattgaaaatgaagagctagacctccttaactacgtgttttgc

SEQ ID NO: 704136 - DNA, 75 bp, Homo sapiens
atgagggagtcatatttggagaaccaaggtgtcgtgaaaactacccctaaaagccaaaatgggaaaggaaaagac

SEQ ID NO: 704137 - DNA, 50 bp, Homo sapiens
gtcggtcggggaaggccacccaggtgagaagccctaccactgcaactggg

SEQ ID NO: 704138 - DNA, 98 bp, Homo sapiens
ctgctgtcccgggcctaccccctggactccctggagaagcagatggaaaagggactggtttggctgaaagacaaagaagcaacacattgtaaactttg

SEQ ID NO: 704139 - DNA, 50 bp, Homo sapiens
gcctgttgagcaaccgggaccccagggtgagaactctgtctcagtcgacg

SEQ ID NO: 704140 - DNA, 74 bp, Homo sapiens
gcggctctttgtatgatgacgattttttatcaagcagaaatgcatcgaacaacgagaatcaagatcactgagct

SEQ ID NO: 704141 - DNA, 73 bp, Homo sapiens
ctggttaataacgagttctctagcgctagtgatgtgaggcagcagacgccccttcacctggctgcagagcacg

SEQ ID NO: 704142 - DNA, 75 bp, Homo sapiens
atgatatcataaaactgtgtggggtcatctataacgaagttatacagacctccaagtactacatgagagatgtga

SEQ ID NO: 704143 - DNA, 99 bp, Homo sapiens
tggaaagacccaggagaagccgcccaaagaactgctatgacttcacacctatggattcttctgcagtttatgtgttaagtagtatggctcgccagcgtc

SEQ ID NO: 704144 - DNA, 75 bp, Homo sapiens
gaagcacaattgtggactgtcttaaagatttggatgtctcaataaaacgtggagtggcagggtcccagccagtga

SEQ ID NO: 704145 - DNA, 50 bp, Homo sapiens
ggaggcagaggtaaacttggagaggtcaaaatgcagatcttcgtgaaaac

SEQ ID NO: 704146 - DNA, 75 bp, Homo sapiens
cccccagcggccgccggctcccccacgagtaagagatgctaaaaaccttgtacctatggaccccaatggcctgtc

SEQ ID NO: 704147 - DNA, 75 bp, Homo sapiens
cgcagtggtcgcttcttctccttggacaaggtgttgtgttggagcgctccatcttcagtgactttgtgttcctgg

SEQ ID NO: 704148 - DNA, 82 bp, Homo sapiens
aaagcatttgtgcattcagatgctgctaaacaacttttggaaaagaagaagagagtccaactcaaagatatgggagaggatt

SEQ ID NO: 704149 - DNA, 100 bp, Homo sapiens
gagagccctgtcatcttctaaacagagcagcagcagcagagatgataacatgtttcaggtcttcaatgaaatttatccagtatggacttactcttacctg

SEQ ID NO: 704150 - DNA, 133 bp, Homo sapiens
tgctggaggcggagaggcacggaggagccgctggggctgccgccacggccgcccggaggtactggctgtgatcgaacttctcaaccctcagagacttagatcttccacctcactccctcagccaagcctccag

SEQ ID NO: 704151 - DNA, 109 bp, Homo sapiens
ctgagatcaaatggcacttcattggccacctacagaaacaaaatgtcaacaaattgatgggtacaggtttgcagattccgccagcagcacagcaagctctacagatgag

SEQ ID NO: 704152 - DNA, 82 bp, Homo sapiens
gatccgctgtacttgcgtccgctacagtatgtcaatcgcttgccccagcacagaggtggggctggtgtccgagcacttctcg

SEQ ID NO: 704153 - DNA, 100 bp, Homo sapiens
ctccactatgccccttaccacaggagctctgcacagcatgttgacatagcggctttattgataaaatacaacacgtgtgtaaatgcaacagataagtggg

SEQ ID NO: 704154 - DNA, 96 bp, Homo sapiens
ctcacagccagtgaccttgcagccagtgacctcaaaggatttcagccacagattttcagacgatgctggttggttttcaagaaggcttctagcaaa

SEQ ID NO: 704155 - DNA, 97 bp, Homo sapiens
aggaagatctgcatggtgggaaggacctgatgatacagagactttttcacagggtacctttagtggttgccaatctgggcatgtctgaacaactggg

SEQ ID NO: 704156 - DNA, 75 bp, Homo sapiens
tccctcgccgtcactgttgtataaattttgcagaaaaaacttcagcatgtgccaggaacacaacctcaccttgat

SEQ ID NO: 704157 - DNA, 76 bp, Homo sapiens
ttttttgacaccaaaaaggaaggggacgatttggtttatggctagatgctgatttataccacggacgaagcaactc

SEQ ID NO: 704158 - DNA, 87 bp, Homo sapiens
gaggcgggagcaggagcccgcggccggccagccgaagatggtggcggctactcctcctggcctggtctccaagtcctctcctaagaa

SEQ ID NO: 704159 - DNA, 95 bp, Homo sapiens
gcctcaactaatgacttcccagttcatcagcgtcttcagggaggagatgaagtggcggcagtgggcggacgactggctggtgcacctgatctccc

SEQ ID NO: 704160 - DNA, 96 bp, Homo sapiens
gacgctaatctcacagctcttgcagctattggaccaaggaagaagagaccactagaatctggaattgaggaaaatcatcagcgtgttagcattttc

SEQ ID NO: 704161 - DNA, 74 bp, Homo sapiens
ccggctcctgcaaatgcaaagagtgcaaatgcacctcctgcaagaaaagagtctcgctctcagtcaaaatctcc

SEQ ID NO: 704162 - DNA, 96 bp, Homo sapiens
tgtgggattaggaccaagggatcctgcgggcatttatcaggcacagggctgaaatctctttaatgatggagggaagcaggcagacgcgagtgtctc

SEQ ID NO: 704163 - DNA, 75 bp, Homo sapiens
tacctacttggagagaagctcaaccactggaaatggggtatgaggatacatgggctgcacttcacagaagagcca

SEQ ID NO: 704164 - DNA, 88 bp, Homo sapiens
gagagcggggtggatgtgaactcccaaaatgaggtcaacggctggaagagagaagggcacagttacctaagtatcaacgtaatcttcc

SEQ ID NO: 704165 - DNA, 100 bp, Homo sapiens
caaccggggcctggacaccgggcgcaggagggcagcaccagaggccagtggcactcccagctcgaacggtgtgctgctgaggactgtcttggaccctgtc

SEQ ID NO: 704166 - DNA, 100 bp, Homo sapiens
acaaattaattgtcagcgtgccctgtactcttcactcacataagccaccgcttgctggaatgtatcctgtcaggtataatgtcagtgaatggcaagaaag

SEQ ID NO: 704167 - DNA, 80 bp, Homo sapiens
aagttcatatcctgctggtttaacagatgatcccagactttaaacagcaaatttcagaattggagaaacagaagcaagat

SEQ ID NO: 704168 - DNA, 80 bp, Homo sapiens
aggactatagagcaagagggagagatgacaagctgactcaggtgttgacaccttggcagtgtttatggccagcagcggaa

SEQ ID NO: 704169 - DNA, 74 bp, Homo sapiens
gctcacgttgaccaactctttgatgatgcatccagagatgcttcctgggaattagaggaaaacgcttatcaaga

SEQ ID NO: 704170 - DNA, 75 bp, Homo sapiens
tgaaatcagaggagatgtaactatcgaatttcagaaactgtggaggagtgtcactgtagattccatggacgagga

SEQ ID NO: 704171 - DNA, 83 bp, Homo sapiens
agacggaccaccacaggatgtccggcgggaggcaggaggacatggatttgattgacatactttggaggcaagatatagatctt

SEQ ID NO: 704172 - DNA, 95 bp, Homo sapiens
cgtgcggcaagtgagcgatttggtgaacagacactcccttctgtaggtccactccatactcggcatacgacccagagacgtacacaggccactgg

SEQ ID NO: 704173 - DNA, 100 bp, Homo sapiens
aatttaccaattcctgtggtgacgtcagaccagtgtcagttgtacccgaggcgttctcagcagcagcaagtacctgtggtggatttccaggctgaactga

SEQ ID NO: 704174 - DNA, 75 bp, Homo sapiens
tctccagcgggcctggactgtgggctggtgtgtggaactgtggtctaccatcacggcaacagtgcgacgggcggc

SEQ ID NO: 704175 - DNA, 49 bp, Homo sapiens
aggatattcctcatgacattgctgtctgctccagaaacatgacaaggag

SEQ ID NO: 704176 - DNA, 96 bp, Homo sapiens
ggagctgtggataacgggaggtgaatttccatgtcaacatagtcctggctttctcctgtttctcagaggatttatcaattatgcaaaagttcggaa

SEQ ID NO: 704177 - DNA, 100 bp, Homo sapiens
gggggattctcgacctgctaacagaactggaccttttcggactgtgaagatcctaatcctttgattcgagccttggcagtcagaaccatggggtgcatcc

SEQ ID NO: 704178 - DNA, 90 bp, Homo sapiens
agcctgcagagcgcgcagtacctccgaattcccacatttcatgggtgtgagctgaaaaaaagacttgaagctaacattcctctgctgtcc

SEQ ID NO: 704179 - DNA, 100 bp, Homo sapiens
actccatactgaggaggaaaattataatgtggttgcaccaggctgtctttcacaatccagagagacaagagagacacctccaacttcgacaaagagttca

SEQ ID NO: 704180 - DNA, 75 bp, Homo sapiens
tgcagacatctacaaccttcgatctcctgacgaatgggcccaaaagcacaagaactggaggtttcagaagacgag

SEQ ID NO: 704181 - DNA, 80 bp, Homo sapiens
agaggagcagcccccggagacagcggcacagaggtgcttctgccagacaatgcagatcttcgtgaagactctgactggta

SEQ ID NO: 704182 - DNA, 119 bp, Homo sapiens
gaagtagagagcgaaaccatcttcaagttagcagcgtttattttacagttctgtggctcctgatggatctgagaagatggacgtggaggatgaaaatctgtctgattattttgaactga

SEQ ID NO: 704183 - DNA, 96 bp, Homo sapiens
gtgctggggccgcgccacttccgcaaacaggtgcagcggggatctgatgagcttctttcttctggcatcattaacggaccttttaccatgaatagt

SEQ ID NO: 704184 - DNA, 100 bp, Homo sapiens
ggattctggaaccgtggagacaccgagaaaccatgagtgtaaggttaccccagagtatagacagtatgagtttaaagccaagaacatcaagaagaagaaa

SEQ ID NO: 704185 - DNA, 74 bp, Homo sapiens
tgacaatgactttgagccctaccttactggacagtcaaatcagcgtgaagcctctgcgggccttcttttcgtct

SEQ ID NO: 704186 - DNA, 100 bp, Homo sapiens
gccatcctctataagcggctgaaagtgcctcctgcgattaaccagttcacccaggccctggaccgccaaacaggccgcattgacaggaagattgagttcc

SEQ ID NO: 704187 - DNA, 119 bp, Homo sapiens
tgcatttatcaccttctgtggaaaggaagctgcacaggaagccgtgaaactggaatccagcactacgccctgccctctactgactggaggcaggcctctgcctactttagaagttaaac

SEQ ID NO: 704188 - DNA, 75 bp, Homo sapiens
gaatctcactctgttaaagctggtctgttctaactgaggatgttgccttatggctgtttagcaacaggagatcgc

SEQ ID NO: 704189 - DNA, 76 bp, Homo sapiens
caagagtgcttatcccagctaagctccaggctggagagatttaccagcatgagaattaagaaggagaaggaaaagc

SEQ ID NO: 704190 - DNA, 83 bp, Homo sapiens
cgctactctctctttctggcctggaggctatccagcgaacttagtgatttggcccgtgaccctccagcacaatgttctgcagg

SEQ ID NO: 704191 - DNA, 100 bp, Homo sapiens
ccttgcttgaagccaaaatgcatgccatatcagcacacagcaagaaggaggccatcagcaaactgggaagaggaccctcaccaggaaccacatctgccag

SEQ ID NO: 704192 - DNA, 75 bp, Homo sapiens
atacccgatcgcggttttaatcgacgagctccgcaatgaagacgtgcagacaatgcagatcttcgtgaagactct

SEQ ID NO: 704193 - DNA, 98 bp, Homo sapiens
cgagtaggaccgagagtgttgggaagaggagcgcgtccccggggaaatgaggatttgcctcaaagggcactgcaaaaattgaacagaggaatcccaag

SEQ ID NO: 704194 - DNA, 83 bp, Homo sapiens
ccacgttcaaacaagcagctttttgaattactttgttatgcagaaagtgaactgtggctgcaccatctgtcttcatcttcccg

SEQ ID NO: 704195 - DNA, 75 bp, Homo sapiens
atttttgtgctaatttggtgcttagtaatttttctggcagaggatgaacgtgaagccagagaaaatgtgaagaga

SEQ ID NO: 704196 - DNA, 75 bp, Homo sapiens
caccgatttcctctcgccgagcggcggtgaaggagaacgacctgctcagaatgagaagaggaaggagaaaaacat

SEQ ID NO: 704197 - DNA, 90 bp, Homo sapiens
aattaagggaaaatggatgtagaaaatgagcagatactgaatgtaaaccctgcagattgttcagagattttcaatgatgggtataagctc

SEQ ID NO: 704198 - DNA, 82 bp, Homo sapiens
ctcatccacagggcctcctgccagccccagcccctggagaggatgcaggcctccggtgtggctgtctctgatggtgtcatca

SEQ ID NO: 704199 - DNA, 83 bp, Homo sapiens
tccccacgcaaccccagatccatttacactttacaggtggatgtgaacactgaccggaagatcagtgccaaggagatgcagcg

SEQ ID NO: 704200 - DNA, 100 bp, Homo sapiens
gtgaaggtgctagacgtgcagaagcggcgggtgcccaacaagcattatttgttgacctcctgtactggagagacattaagaagactggagtggtgtttgg

SEQ ID NO: 704201 - DNA, 100 bp, Homo sapiens
tctgcttttttcattgttccactggacgctcatcagagggaagatctttttcctcaattgagcaaactattcatggaaggatttagaagcctaaaagaag

SEQ ID NO: 704202 - DNA, 90 bp, Homo sapiens
ccccaccttccctcgccctaatcccccaacgaggaaggaaggagcagttggttcaatctctgggcaatagccctctggaacaagacaatt

SEQ ID NO: 704203 - DNA, 51 bp, Homo sapiens
ggctttaatcctgaaagccatgcagcggaaatacactttcgggaaatggcc

SEQ ID NO: 704204 - DNA, 82 bp, Homo sapiens
agctctgtggaggagcagcagtagtcggagggtgcaggccctgggaggagcggggacactgaggacctctctccaaattggc

SEQ ID NO: 704205 - DNA, 82 bp, Homo sapiens
gcaggtccccagccattaaacacattttacaaagccatgccctacagaattaaacatgtggacatgaaccaaaagagcatat

SEQ ID NO: 704206 - DNA, 80 bp, Homo sapiens
cttttgatatctggggccaagggacaatggtcaccgtctcttcaggctgaaggggatgctaagggagataaagcaaaggt

SEQ ID NO: 704207 - DNA, 82 bp, Homo sapiens
gtatcaagccaagaacagcccaatctcctttctgggcaaacgttccaagcacatggattaattgatgtatgttgagtttatg

SEQ ID NO: 704208 - DNA, 75 bp, Homo sapiens
atggacagacatgtcttcccatggagctagttgctacattgcctgatgatgttcagcctgggcctgatttttatg

SEQ ID NO: 704209 - DNA, 74 bp, Homo sapiens
tacctgatgccgatattcaacgctttcgggacagagcagaatgggctgatatagatccggtgccgcagaatgat

SEQ ID NO: 704210 - DNA, 51 bp, Homo sapiens
ctgtgattttcagaggggaatgctaagagtctgaagatgatgagaaactga

SEQ ID NO: 704211 - DNA, 100 bp, Homo sapiens
ctcagcaggcggggaagatgaaaggaaataagcgggttttgaaaacaaaaaaaagaaggagtggaagagggggccaggatccaggcctccatccccacag

SEQ ID NO: 704212 - DNA, 49 bp, Homo sapiens
cggcggcgaaggaacccgataaggggttccgagtctgaggaagacataa

SEQ ID NO: 704213 - DNA, 97 bp, Homo sapiens
actggtgtaccctggtggacgtgcacccagaggaccaggcggcgttactgtaaaatggggaaaggagaaatttgaaggtgtagaattgaatacagat

SEQ ID NO: 704214 - DNA, 76 bp, Homo sapiens
cgcagtatcatgctggccaagaagatcatcattaaggacggaggcacgatgatcacagtcgtgttaaactgcaaaa

SEQ ID NO: 704215 - DNA, 74 bp, Homo sapiens
gcccgcctgccctgaggagtccccgctgcttgagtgcagcagctgccccgagccccgtgcttggcaacattccc

SEQ ID NO: 704216 - DNA, 75 bp, Homo sapiens
cactgcaacctccacctcccaggggtcgctgtgatgaaattcaagaaccccccagtgaacagcctgagcctggag

SEQ ID NO: 704217 - DNA, 105 bp, Homo sapiens
agaaataaaggcagaaaaagaggctaaaactcaggctatacttttggagatggacggcatcagaattaatgtaactacactgaaagatgatggggacatatctaa

SEQ ID NO: 704218 - DNA, 125 bp, Homo sapiens
atcatttgggagatccaagagattcagtatcactcgctcccttgatgatcttgagccataccggctctgcagcccatagtccacgacctctttgtattaagaggaacaaataaagctgatgcagg

SEQ ID NO: 704219 - DNA, 90 bp, Homo sapiens
ctcagcctcatctgtaaaatgtgatcataaataccgggtacctggaagtgctcgtgtacaagtccccagagtatgagtcccttggttttg

SEQ ID NO: 704220 - DNA, 73 bp, Homo sapiens
acctggatcccagtctttcaatggcttcaagacaaccagaagtgcctggttcagcagactgtacaggatcttt

SEQ ID NO: 704221 - DNA, 75 bp, Homo sapiens
gaagatctgctctctcaatatgaaaatggtagctccacagtagagcaatgtaattgaagctgctccagatatgaa

SEQ ID NO: 704222 - DNA, 75 bp, Homo sapiens
cccactttctacctcgtctgctttctcacaccagttgttgctcttctcccaagaggaggccagataaccatgtca

SEQ ID NO: 704223 - DNA, 100 bp, Homo sapiens
gtacaacacggtggcaagcaagtttaatcagacctgctcacacttcagaatagagaagagtctcttctccttcaagtccgtggttctggtggagcccgac

SEQ ID NO: 704224 - DNA, 101 bp, Homo sapiens
cagtgattgaacaaattttgcactacatgattcacaatgcatttaaatcaaacggtattgagatggattgggttatgaaacataatggtccaaatgacgct

SEQ ID NO: 704225 - DNA, 100 bp, Homo sapiens
ggcttacacggcggtccccacggtcctggtaacccccctgggcgcccttggagtaccgttcgggggatgccaacagacagatcagcgacctcaaatttaa

SEQ ID NO: 704226 - DNA, 98 bp, Homo sapiens
ccccgggatcaaaagaaagcgaagtgcgcctacatctagaaagctgctgtcagacaaaccgcaggatttccaggtcagagatgaacagcagtgttggg

SEQ ID NO: 704227 - DNA, 100 bp, Homo sapiens
ccttttggcccaatgaatatcaggccttcaagagggaattgaaaactaaagaacctgtaatcatgagtactcttgagactgtacgaatatttctgacaga

SEQ ID NO: 704228 - DNA, 83 bp, Homo sapiens
agcagttcatgcagcacctctacccacaggatcactactcttggaatcaaagataaatccaaatactgcatatcagaaacaac

SEQ ID NO: 704229 - DNA, 100 bp, Homo sapiens
cttcgggccctcctgccttcgaatactcccccagttgcaagaggcgcaggaccgtggaagacttcaacaaattctgcacctttgtcttggcctatgctgg

SEQ ID NO: 704230 - DNA, 83 bp, Homo sapiens
cacagcactctgggcgaaaattggatgtgaaaatgaagccagaccgaggtttagatcctgataagcatcttgggaaaaccctg

SEQ ID NO: 704231 - DNA, 51 bp, Homo sapiens
attttccaaggagtcattggggatttaagcgagagcctcactggttcccag

SEQ ID NO: 704232 - DNA, 75 bp, Homo sapiens
ggagtcccgcaggaaggaggccttcttgggccgcctctgtcatctcactagacatttgaggaacctcctgcctgg

SEQ ID NO: 704233 - DNA, 98 bp, Homo sapiens
agtgacgagtttgtggactcctttaagtcttactgttaacagtcccaggaatggaagagaccacatcagaggcagacaaaaacctttccaagcaagca

SEQ ID NO: 704234 - DNA, 90 bp, Homo sapiens
gttcctgggaaggtggagccaccagcctctccttgggcacagtcttttgctgagcgcctgcgcctgggaattgcagtgattcatggagag

SEQ ID NO: 704235 - DNA, 75 bp, Homo sapiens
gtgaaggggaagaggcccaccctggagtaaccctcactggagaatccagaggtgtctgacttccagcaactgctg

SEQ ID NO: 704236 - DNA, 74 bp, Homo sapiens
cgcagcacctcctcgccagcagccgtccggagccagccaacgagcgtgatggaatggggagaagatattaaagc

SEQ ID NO: 704237 - DNA, 88 bp, Homo sapiens
ccagcttggcgtcctgagaaatggttatgaagacagtatggagtttccagaccatagtagacatttgctacagtgtctgagcgagcag

SEQ ID NO: 704238 - DNA, 82 bp, Homo sapiens
tgaagaagagttttttcagaattcaaagctcctaaactcgatgcattctatttctcatcatttggctcataactggaggaag

SEQ ID NO: 704239 - DNA, 83 bp, Homo sapiens
ctcaccgcagccccctcctggcgacccgcaagcaacatgagtgagaatgaggaagaggaaatttctcagcaagaaggcagtgg

SEQ ID NO: 704240 - DNA, 100 bp, Homo sapiens
cgtgaccgagagcgtgaccgagagcgcgaatatcgtcatcgttagaaggaagatgaagtcctcagtacattctgaagaagatgattttgttccagagcta

SEQ ID NO: 704241 - DNA, 74 bp, Homo sapiens
cgaatttcagcgtaaactgcagcatgatgttctgaagcttgagattgctaagaagcctcgaacgccaacctctg

SEQ ID NO: 704242 - DNA, 100 bp, Homo sapiens
cagaccgtgagctggaggagtaccgcagggaggtggagaggaagcagaagggctctgaaggccctggaacgtctttgaaactccctggaactaatcagac

SEQ ID NO: 704243 - DNA, 105 bp, Homo sapiens
tgcagatcatgatgtttaagaacatgacgccgtcacccttcctgcgattctacttagattgtcacggattctgcctctgtggagcgtttactggggaagacggac

SEQ ID NO: 704244 - DNA, 83 bp, Homo sapiens
gtggaacagctacgcatagaagccgggattgagcgcatcaaggtttttagaacttcagccataaaaatgggcagaattttcct

SEQ ID NO: 704245 - DNA, 90 bp, Homo sapiens
tttacgttcacctcggtgtctgcagcaccctccgcttcctctcctaggcgacgagacccagtggctagggagaggctagtggtaacaggc

SEQ ID NO: 704246 - DNA, 90 bp, Homo sapiens
gcagctatggggctgttactagtccaacctctacccttgaaagcagagatagtggcatcattggaagctgttttaggttatgtgaaagag

SEQ ID NO: 704247 - DNA, 98 bp, Homo sapiens
gccacctctgcctgagacctccggtcgccgcaagaagctggagaggatgtacagcgttgaccgtgtgtctgaacttcagtgaagatttcatacattgg

SEQ ID NO: 704248 - DNA, 75 bp, Homo sapiens
tggcagtcggtcatccacctgctgcagatggggcaggtgtggagagtcggtatttcttcaatagatatatctcaa

SEQ ID NO: 704249 - DNA, 75 bp, Homo sapiens
tcttcccacggacgcgcgagacaatgaggagattgtgcttcaagaagaccatagggaagaacgcattttcatctt

SEQ ID NO: 704250 - DNA, 90 bp, Homo sapiens
ttgaggaaagaagcagctatgaagaccagggggttcagctttccaagacaaaggcgacgactgtaagggcaagaggcacctcgacgcgca

SEQ ID NO: 704251 - DNA, 75 bp, Homo sapiens
tgttcgacgtgcggcccgaatgccagcgcctcttctaccggggcaagcagcaaaatgatgcttcaacacccaggc

SEQ ID NO: 704252 - DNA, 75 bp, Homo sapiens
gcgacggcctggctttctgcgccatcctgcaccgccaccggcccgacctcataggtggggctggtgtccgagcac

SEQ ID NO: 704253 - DNA, 97 bp, Homo sapiens
gagtttgaaaaaacggatggaagtaccagactatgaaatggagaagcattagggtgtccgactacgtgggtttcatagctgtggaaaagccaaaggg

SEQ ID NO: 704254 - DNA, 100 bp, Homo sapiens
cccgaatcactgatggaattggacagtgcatggagatggttcagcaggacaaggtttctgcagatggctctgtggtcctgcactaggaaactgaaagcgg

SEQ ID NO: 704255 - DNA, 89 bp, Homo sapiens
gcagaagtcgcgtgtctaggtgagtcgcggtgggtcctcgcttgcagttcagcgaccacgatggtcagtaggacagaaggtaacattga

SEQ ID NO: 704256 - DNA, 122 bp, Homo sapiens
gaagtggtgaaacccaaacaacatctcctgctattccttgggctgcctttcctgcaggaacttaagagatttgagaacttcataaaatctcgtcctccttttgatgttgtcattgatggtct

SEQ ID NO: 704257 - DNA, 100 bp, Homo sapiens
ggagtttggaagcccttttcctccaaatcctgggaaaggtgagacgatgcggatcgcctcctccgagtttgcagatgacccttgctcgtcggtaaagcgc

SEQ ID NO: 704258 - DNA, 100 bp, Homo sapiens
ggcggccttcgaggaggtgatgatggacatcggctccacccggggttaaagcacgaattgggagctctcagcgacatcaccagtcagcagccaaagacct

SEQ ID NO: 704259 - DNA, 92 bp, Homo sapiens
ggcgaagcgctgcgctcgcgcccggatccctcagacaatgcagatcttcgtgaagactctgactggtaagaccatcaccctcgaggttgagc

SEQ ID NO: 704260 - DNA, 101 bp, Homo sapiens
ggctcacctgtgcgggatggaacaaaagggtcctaaaaaggtggggacgctgtggcgagaagccgggcttagctggaaggaatttctacctgaaggccagg

SEQ ID NO: 704261 - DNA, 75 bp, Homo sapiens
ggtccctgaagagggaagacacgcggaaacagtaggttcagctgcagcccggaaagaaatcataagaaacaaaat

SEQ ID NO: 704262 - DNA, 98 bp, Homo sapiens
ccggggcgtcggcatgctcacccgcctctacaacatcaagaaggatctgaaccaatgatgctgggttcacccacatctccaaagccaggagttaatgc

SEQ ID NO: 704263 - DNA, 74 bp, Homo sapiens
ggagagccgccagggctctatcaaggggctggtgtactccagcaacttccagtattcaactccctggacatgtc

SEQ ID NO: 704264 - DNA, 75 bp, Homo sapiens
gtccagagctgaggactgcctgtttgcagattgaggacgagacgcaggtgtcacgggccactcagggtgaacagg

SEQ ID NO: 704265 - DNA, 115 bp, Homo sapiens
gtgaagttagctccaaatcccagactagctgctaccccaagcccgggagcttctcagctgcagctgcccagaaagaaggtgactcgggcctctgtcctggacttctgtaagaata

SEQ ID NO: 704266 - DNA, 75 bp, Homo sapiens
cgagggagtcagcgaccgcaaggagaccctcctgttcttaactgtgggcgatgagaaaggtggtggactcttctt

SEQ ID NO: 704267 - DNA, 90 bp, Homo sapiens
ctgctggcaagacaaccattctgtataaactgaagttaggggagatagtcaccaccattcctaccattgaattagcaagagaactggatt

SEQ ID NO: 704268 - DNA, 100 bp, Homo sapiens
gtccccgcagaggaccccccgacaccagcatggactgctgcaccagcctccaaggcaggtcatcctgacactgcaacccactttggtggctgtgggcaag

SEQ ID NO: 704269 - DNA, 74 bp, Homo sapiens
gaaacttcaatagttactggttaactgcttacttcagtgattcgcctttgccagtctcatctcgtgtctgcttt

SEQ ID NO: 704270 - DNA, 90 bp, Homo sapiens
gtcccgctgcagccgagatgccgggggagcggggccttccacaccccctccgtgggtgtgtgcccacgacccttcctcagggcaccatca

SEQ ID NO: 704271 - DNA, 100 bp, Homo sapiens
aacatcacagtcacatacagagatggccgagtggcacagctggagcaggtattagaaaactactcggatgctccaatgacaccaaaacagattctgcagg

SEQ ID NO: 704272 - DNA, 83 bp, Homo sapiens
gaaatcgtgcacatccaggctggtcagtgtggcaaccagatcggtgccaaggtgaccagtatgcactgaagatgaggtttgtg

SEQ ID NO: 704273 - DNA, 99 bp, Homo sapiens
tggaagccgagaagcctctgaggcgctatggggcggtggaggagacggcttggaaaacggagagactggggagaagttctcccaaagaatatttggaaa

SEQ ID NO: 704274 - DNA, 82 bp, Homo sapiens
attgactggtgacatgcagttgtccaaaagtgaaattttacgaactcagcgtggggtagagcagcggctgccatgctcttct

SEQ ID NO: 704275 - DNA, 100 bp, Homo sapiens
tccaaaaagtgatattggatggatatgggagctgtggccctcagaatttaaacttaaggaaagagtgggaaagtgaggaaacctctgtagaggagcagga

SEQ ID NO: 704276 - DNA, 75 bp, Homo sapiens
ctcggcactaggcagcggaggagcccgaccgacccggttctcagaggcactgtgactgacttccctggatttgat

SEQ ID NO: 704277 - DNA, 98 bp, Homo sapiens
ggtgactcttctcaaatgccttctcatccccacatagtggccagcatcgaaatgttcagccttttagtgatgaagatgcatcaattgaaacaatgagc

SEQ ID NO: 704278 - DNA, 98 bp, Homo sapiens
tcgctgcccgcctgccctgaggagtccccgctgcttggaacttaagagatttgagaacttcataaaatctcgtcctccttttgatgttgtcattgatg

SEQ ID NO: 704279 - DNA, 101 bp, Homo sapiens
gctgtgttgaacttttactgtgtctgcctgttgagttatcagataaacagtgggaacaatttcagacactggtgcaggctattgagggcacctacattgac

SEQ ID NO: 704280 - DNA, 82 bp, Homo sapiens
gcccgccagcatgccccagtccaaagacagtactactggtatgacgagcgggggaagaaggtcaagtgcacggccccacagt

SEQ ID NO: 704281 - DNA, 75 bp, Homo sapiens
gtgctcagccaggccgactacctcaacctggtgcagtgcgagacgctagaggattttctggcatccttaaatctt

SEQ ID NO: 704282 - DNA, 100 bp, Homo sapiens
tgctgccaggagaaactaagttgctgaacggatcaataacacagcagtggggcatgcgcttgtcctgcctgcagggagagacctcacagacttcctggag

SEQ ID NO: 704283 - DNA, 100 bp, Homo sapiens
gaagaacaaagggaagttccgggtgccgaaaatcgctgaatttacgatgtacttgaaggatataatggaacaatatttgcatatggacaaacatcctctg

SEQ ID NO: 704284 - DNA, 73 bp, Homo sapiens
gaggagcaacaatgtgggactatacggtcctacaacgtgactttaaaaagacagcagaaagcaaaaatgtccc

SEQ ID NO: 704285 - DNA, 51 bp, Homo sapiens
ggctgttcttgtagttttctgcatagataaaaatgagccgtcagactgcta

SEQ ID NO: 704286 - DNA, 100 bp, Homo sapiens
atcttacatcgaggactgtgcatctttatgataattggatcaaagatgctgttaccgaagtgcatgtttgggattttgttgaagaaagctggatacagta

SEQ ID NO: 704287 - DNA, 100 bp, Homo sapiens
tcggggcacatccagtgtcacagggctgctcaggtgtccctggccagtgtccttccacctgtccacaagcatggggaacatcttcgccaacctcttcaag

SEQ ID NO: 704288 - DNA, 111 bp, Homo sapiens
gcatactgaagtggtttgcaacatccttcttctggataacactgtacaagctttcaaagtcaatatctctcaaaggccttggttctgacagaaattggccccaaacgtgac

SEQ ID NO: 704289 - DNA, 100 bp, Homo sapiens
cgagtctcaatatctgtcttcggtggactccttcggcagtccacccaccgccgccgcctcccagatgaggacggggacttggttgccttttccagtgacg

SEQ ID NO: 704290 - DNA, 101 bp, Homo sapiens
gtgtcaaaagagcttctctccagagtagaaagacggtgatcgttggctcctacttgattgcacacggtttcttcagcgtctatggcatgtgtgtggacacg

SEQ ID NO: 704291 - DNA, 100 bp, Homo sapiens
tgggggttgtcatgtttatcacactccttggatgatttccgaaggggttgctcaagaggctgaaagagaagaaaaaggccaggttggagccccgggatgg

SEQ ID NO: 704292 - DNA, 75 bp, Homo sapiens
tgaaggcgcagcccggaggccgcgcgggtggtggaatactctgatgtgattctggaagtcctggatgccagagac

SEQ ID NO: 704293 - DNA, 78 bp, Homo sapiens
aatgagggaaaggcagcgcctgcccgagagggatggaagcttcctggcgccaggtggccggtggccgaggccgatccc

SEQ ID NO: 704294 - DNA, 82 bp, Homo sapiens
gacggcgagcgcgagcggcgcgagaaatggaggacctggagaggaatgacggctcggccgagaggccttacttcatgtcttc

SEQ ID NO: 704295 - DNA, 75 bp, Homo sapiens
agcctcagttggaagcagccgatccagcctgcggagcctgtggggcaggttacgagaagtttctgagaagctgaa

SEQ ID NO: 704296 - DNA, 85 bp, Homo sapiens
aggaggaataatatttatggagcatatattatggaacacagccgcctggttgccaatctcacttacactctgcagctggatggcc

SEQ ID NO: 704297 - DNA, 83 bp, Homo sapiens
gtttactgtaataccagcaagaagtggttctgcaacggacgtggaaatacttctggcagccatcagagggttctcgcttcagc

SEQ ID NO: 704298 - DNA, 100 bp, Homo sapiens
caggagaattatgggagcgcatttccccaggttctaaatggagcccctggatttataaacttgtgcgatgctttgaacgcctggcagctggtgaaggaac

SEQ ID NO: 704299 - DNA, 75 bp, Homo sapiens
tggcagtgatgaaaacctaacagggtggccccctgtgccagctcagggaggaggtacaggagaactgtgtgcggt

SEQ ID NO: 704300 - DNA, 83 bp, Homo sapiens
ctcggcccgcgggggagccccgggagccgcacggctgcagagactgcaagtctggaagaacagctgcaaggatggggagaagt

SEQ ID NO: 704301 - DNA, 100 bp, Homo sapiens
gccgcccgcggcgatctcgatcccgctgacccgaatcctggaatgccaacgtgcgggacaagagctatgcggggcccctgcccatcttcaaccgaagcca

SEQ ID NO: 704302 - DNA, 100 bp, Homo sapiens
gccatgcaaggctggcgcgtctccatggagaatctgaattatccagaacagaaagttgtgactgttggacagttcaaaattggtctgatccatggacatc

SEQ ID NO: 704303 - DNA, 100 bp, Homo sapiens
tcacctgtccgctcactggggccaccctgaggaaggaccagcgggacgcctgcatcaaggaggccattctcttgggtgaccctgtttgcagcacgatgtc

SEQ ID NO: 704304 - DNA, 100 bp, Homo sapiens
ctgtggccacaaggaaggcaacgggcccacggaggttccggccccgaaggactgcgtcgatccctgctgtgattctttgacctgccagctgaggccaggt

SEQ ID NO: 704305 - DNA, 75 bp, Homo sapiens
ctacacagtgttttccaggatcagcatcttcacacactactagataccatgaagattatgacccacaaactgtga

SEQ ID NO: 704306 - DNA, 75 bp, Homo sapiens
ggaaattgggaatgaattggatgaacaaaatggtgcagttttgacacacttctgtctagcagctgagtattgtga

SEQ ID NO: 704307 - DNA, 100 bp, Homo sapiens
aaagaccttactgtttgtgagccaccaaaaccacagtgttctttgcctcaagacccagctattgttcagccaactgggtacatggaaaactcagtctcct

SEQ ID NO: 704308 - DNA, 88 bp, Homo sapiens
tcaagagaagctgcaagagcaacatctttcctcaccccaagagcccccctccatgcgcctgaaggcccgacccagcagccctggcttt

SEQ ID NO: 704309 - DNA, 96 bp, Homo sapiens
ctgtcctggtacaaggatgaggagcagctgctccaagcttttctgccatttgaagcttcttctgggagccagctgtgaccagaggaatagctccag

SEQ ID NO: 704310 - DNA, 88 bp, Homo sapiens
ggcgaaaggaagcaagcagttcagaagagccaaggaataaacatgcaatgaacccaaaaggccctactgccaataaagggaaaataag

SEQ ID NO: 704311 - DNA, 100 bp, Homo sapiens
tgccctccttgtcctcgtctgcaccatggccctctgctcctgtgcacaagggaaccccaagagcatccaatagaagctgtgcaattatgtaaaattttca

SEQ ID NO: 704312 - DNA, 83 bp, Homo sapiens
ggactccttcggcagtccacccaccgccgccgcctcccaggacaggtcccagaagaggaggccagtcacaatggacagcgccg

SEQ ID NO: 704313 - DNA, 100 bp, Homo sapiens
atcgcatcatgtccgggcagctggagcgttgcgagcgcgaatggcacgagctggagggagaatttcaagaactgcagaaaaagcttgtggtgaagggggg

SEQ ID NO: 704314 - DNA, 96 bp, Homo sapiens
aatcaccccggatttgtggcaagaagcatgctggattgtaatcaggaccctgatgctcccataagacagaaaatgccccttgatgatctggataga

SEQ ID NO: 704315 - DNA, 100 bp, Homo sapiens
ggaccggcagctgatgttctctcagtttgcacaagggaggcgacagagacagcagcaggtggagccgccaccaaaatgcagattttcgtgaaaaccctta

SEQ ID NO: 704316 - DNA, 50 bp, Homo sapiens
cacatgtacatctgatcagttccaggtcagcccttcataaacccagatgg

SEQ ID NO: 704317 - DNA, 82 bp, Homo sapiens
cgagttatgcccaccctccaactttgcgacggaaatgtgtcatcgaaagccagggctgcccctgatggggcctggcaatgac

SEQ ID NO: 704318 - DNA, 75 bp, Homo sapiens
gtgctgtttgtatgcacgacttgaagacacgcacttatcattcagtggaacatccatgatagcagtcttctgtaa

SEQ ID NO: 704319 - DNA, 100 bp, Homo sapiens
cagcacaagcagttttgaaaatttaagtgcaaaaagcatgacaaagcaatatgaggttgccgtgctggaaaggcagctcatcatgcagagtgaaatgagg

SEQ ID NO: 704320 - DNA, 74 bp, Homo sapiens
gccgtctccttaacaccgaacaccgtgcactttacaggtccccgatgaaccaagagaaccctccaccatatcca

SEQ ID NO: 704321 - DNA, 100 bp, Homo sapiens
ggctgcccggggccaacatgaccaggtcgtccctgatggcccctggaggcgaagctcatcacaggatgaggaaaggacagaggcacagagaacccccaag

SEQ ID NO: 704322 - DNA, 85 bp, Homo sapiens
gaatgaccaaatttacgccatgaaagtggtgaagaaagagctggtgcatgatgacgaggacgccaacaaggagagcagcaagacc

SEQ ID NO: 704323 - DNA, 75 bp, Homo sapiens
gacttttccaaggcttcagaagcggcctcacctctgccaggcagcttcaaaagatggtccatgatattaaaaaca

SEQ ID NO: 704324 - DNA, 74 bp, Homo sapiens
cgttcacagatgctgagagtgaaggggggttaaagctgaagctcaacaaagatatagtgatctctgtgggcatt

SEQ ID NO: 704325 - DNA, 131 bp, Homo sapiens
aaacgagtgaagcagctgagtgatgggcagcccccaccacccgcccaggccagccccagcagcaacagcagcacagaattaaggaagttcactggagtaaaatggaggcctcagtaatattacccattctg

SEQ ID NO: 704326 - DNA, 96 bp, Homo sapiens
ctcagaggggcctctacaaggatgtgatgatggggacctatgggaacctactctcattaggaatgtatcctgtcaggtataatgtcagtgaatggc

SEQ ID NO: 704327 - DNA, 100 bp, Homo sapiens
ttacttttaatcatctttattatctcattgaagcttggaattacatagctggaaaggatcttacaggtaaaggatcagatttgtgatgtgagaatatctg

SEQ ID NO: 704328 - DNA, 82 bp, Homo sapiens
gtggaatgaaaaggaagtattagaaatgagctgaagaccattcacagtctcccatcaaaggacgtgcacagccttatgatcc

SEQ ID NO: 704329 - DNA, 100 bp, Homo sapiens
aagagaaaccttctaagtggaaatttaatcggacagcgtttttacatcaaaggttagcactctacgtatatgaatatctgctccatgtaggagctcagaa

SEQ ID NO: 704330 - DNA, 100 bp, Homo sapiens
ggaattctttgatgaaaagctgaattctttatgtatggcttggctcgtggaccatgattgtcttgccagctgtgtttgtctgcattgcccttgtgttcag

SEQ ID NO: 704331 - DNA, 100 bp, Homo sapiens
atgcagctgtacaacagcatcttcagcctgctcagcttcgagaagattggctacacagctgtggacatcggaaaaccagggagacgaaggagacgctggg

SEQ ID NO: 704332 - DNA, 90 bp, Homo sapiens
aaatatagtaaaaggcaatgagaaccccagaaacagaaagcagctacaacctgattgctcgctgtaagcagctcatctgtgaccccagct

SEQ ID NO: 704333 - DNA, 73 bp, Homo sapiens
gcagtctgggcagtggaggcagagggtgagtcctgcaaatgttaagtgatttgctcaaggtgcccatttcgca

SEQ ID NO: 704334 - DNA, 95 bp, Homo sapiens
cagaagtcgccgaacgttctgctgcagaacctgtgctgcaggatcctgggcaggagcgaagagcatctgctgcacccaagcctgagccggttcct

SEQ ID NO: 704335 - DNA, 115 bp, Homo sapiens
acctgagaaccttgtgctccaggctgccccataataagtggcagcggtgggagcgagagtcaggaggaggaagagcctcaggagaggaacagcagtccacagcggccagcagtct

SEQ ID NO: 704336 - DNA, 101 bp, Homo sapiens
gctccaggagcaagtactccaggaagcacagagctgtaccagtacacggcccacgttgccagtgaaagagtttctagccaaagccaaagaagactttttga

SEQ ID NO: 704337 - DNA, 97 bp, Homo sapiens
taaatgtagtattcattgggcacgtaggagcgtgaggatcatccccggagaggacgggaggatcggcagcacagggaaccatcagaacaggaacaca

SEQ ID NO: 704338 - DNA, 75 bp, Homo sapiens
tagtaacatctgaaaaaacagctttgtcctgggtgaaaaaggatgaaaatgttaatctatgatccagccaaacga

SEQ ID NO: 704339 - DNA, 82 bp, Homo sapiens
gggcgctgcccactccgcgtctgaggaggtgcgggagctcgagggcaagaccggctgttcctagaaggtgagcgcggacggt

SEQ ID NO: 704340 - DNA, 88 bp, Homo sapiens
accggatggcaagaatcagctggggcagaagcgcgtggtcaaggaagaagatggactgcggatgaggaagacagtgcagagcaacagc

SEQ ID NO: 704341 - DNA, 82 bp, Homo sapiens
gctgcatccccatcttcggcatgtccttcgcctgccagtcggactttgaacatgtcggggatcgccctcagcagactcgccc

SEQ ID NO: 704342 - DNA, 75 bp, Homo sapiens
cttagctgtgctcgcgctactctctctttctggcctggaggctatccagcatgatcaagcggtgctgattcacga

SEQ ID NO: 704343 - DNA, 111 bp, Homo sapiens
gcatagctgctacactgaagatgaagcaaggcccaatgacccaggcggtactccaaagattcaggtttactcacgtcatccagcagagaatggaaagtcaaatttcctgaa

SEQ ID NO: 704344 - DNA, 95 bp, Homo sapiens
ggagatcccctcagttctgcgctgctcccgttccccctccccagagcaaggtgacttaagagattaaaattaatttggttgctgttggttctgaa

SEQ ID NO: 704345 - DNA, 100 bp, Homo sapiens
tgacttcctgaaaggatgtgcaaccctccaagtggaaacttcacagagaatgcagttgtcttgacttcaggtctgtctgttctgttggcaagtaaatgca

SEQ ID NO: 704346 - DNA, 82 bp, Homo sapiens
ccgtgccgcgagcgcggcctgcaggagatccgggtcttcctccagcagctcaagggccgcgtagcccgggaggccattcaga

SEQ ID NO: 704347 - DNA, 100 bp, Homo sapiens
ccaggtccagaagtatgatgactcctttgacgacgttgaccgcacactggatgaatggaagccaggttcaggagaagtggcacctggtggaggacctgtc

SEQ ID NO: 704348 - DNA, 100 bp, Homo sapiens
ggggactcggagctgagaggagctgctgctcggaccagcgcgggtgcaacaccggaggatttcagcaacctcccacctgaacaaagaaggaaaaagctgc

SEQ ID NO: 704349 - DNA, 100 bp, Homo sapiens
cccccaccatccctaaccggctggctgcagacccggcgttcccacagctgtgcagaacttagcgccacgcgctgctgttgctgctgctgctccccgggct

SEQ ID NO: 704350 - DNA, 90 bp, Homo sapiens
atgggcggcggaaaatagcctttgccatcactgccattaagggacagagcagaatgggctgatatagatccggtgccgcagaatgatggc

SEQ ID NO: 704351 - DNA, 100 bp, Homo sapiens
aatttctcctggggctcagagtgtctttctaggaacccaatctgccttcatgaagaaaagacagaggcagaaaggaagatggcttactgcctgacaaatt

SEQ ID NO: 704352 - DNA, 83 bp, Homo sapiens
cgctgattctcacgggcccggctgccggcccccgctctgccctgagcaaaatatgctgtgaattccatcaagaagaaagtcaa

SEQ ID NO: 704353 - DNA, 100 bp, Homo sapiens
tgccgcaggacctgcagcatcccagaggtggcttgctttggtgaaggtattcatacagccttcctaaaggcaatgctttccacaggatttaagatacccc

SEQ ID NO: 704354 - DNA, 82 bp, Homo sapiens
tagctgtgctcgcgctactctctctttctggcctggaggctatccagcacacgctttcaccagcttcgagcccctcctcggt

SEQ ID NO: 704355 - DNA, 51 bp, Homo sapiens
ggaactgtcaggtacctcaaagctgttctggacttggtgcctctttctgtt

SEQ ID NO: 704356 - DNA, 96 bp, Homo sapiens
tgaatacctaatagtttttccaaaattgggattttttatcaagcagaaatgcatcgaacaacgagaatcaagatcactgagctaaatccccacctg

SEQ ID NO: 704357 - DNA, 102 bp, Homo sapiens
attttaaagactgttgtgaacagggatgtacctaataaatattattcatctgtgccagaggaaggaggggcaacccatgtctatcgttatcacagaggcgag

SEQ ID NO: 704358 - DNA, 100 bp, Homo sapiens
cctcgtccagaacgtggtcagcaagttatttgctggtataaaggatggagaaagcctgcagctctttgaacaaagttctcgctctgcgcataaacaagag

SEQ ID NO: 704359 - DNA, 100 bp, Homo sapiens
gacagatcgctgtcaaaaccctagatttcctttgacctcgctgagtacactgcggacgttgacggagttggcactctacgacttctagatgcagttaaga

SEQ ID NO: 704360 - DNA, 100 bp, Homo sapiens
gccacagcatcctccagcacctcaggcaccataaggatgaagtggctggtgacatattcgacatgctgctcaccttcacagattttctggcttttaaaga

SEQ ID NO: 704361 - DNA, 83 bp, Homo sapiens
tgagtattgtctttatatcctgacactatgaatgctacttggatgcctcttaaggtcaaaatgcagatcttcgtgaaaaccct

SEQ ID NO: 704362 - DNA, 75 bp, Homo sapiens
gcagtggtcgcttcttctccttgtacgtcgctgccccgccctcgggactccatccgcagctgtgccctcagcatg

SEQ ID NO: 704363 - DNA, 75 bp, Homo sapiens
agacaagctggactggggaagattcttcctctgctctgttaaaagcgaaaatgaaacaattgcctgcggcaacag

SEQ ID NO: 704364 - DNA, 82 bp, Homo sapiens
ggagctgcagtcggcactgctactgcgaagacagctggcaggtatgatgatgtcaaacgtgatgctgatgctacagttacag

SEQ ID NO: 704365 - DNA, 108 bp, Homo sapiens
agcctcaaactcccaggctcaagcaatcctaccatgtcagccttcccagtagctggaactacagggtgtacaactatgagcctttgacacagctcaagaatgtcagag

SEQ ID NO: 704366 - DNA, 83 bp, Homo sapiens
cggagatcctgatgaagttcgagcactaatatttaagaaagaagatgttaactttcaggcagatcgggagcggtgccgagaaa

SEQ ID NO: 704367 - DNA, 74 bp, Homo sapiens
aaatatacaacaaggccattttctcaaacgagagtcagcctttaacgaagacaatagatgtgcatcttcaaatg

SEQ ID NO: 704368 - DNA, 82 bp, Homo sapiens
aaccaaaggcaccggccttgatgaggcaatggaatggtaactataactacccaatattgcagccatggagtccatgcttaat

SEQ ID NO: 704369 - DNA, 100 bp, Homo sapiens
ctccttttcgtttccggaaacatggacgcgccagcggagctccggctccttcgccctggacgcggaggccgcggtgtgcggggcgacggcgaggccggaa

SEQ ID NO: 704370 - DNA, 78 bp, Homo sapiens
cgagaccaagagcgcgcgggtcaaagggggatatgagactttctactcggaatatcctgagtgttgcgtggatgtaaa

SEQ ID NO: 704371 - DNA, 82 bp, Homo sapiens
tgctgtcagcatggcccaggctcctgctgacccgggcagagaagctctggattaatcgaattacagctgctagccaggaaca

SEQ ID NO: 704372 - DNA, 133 bp, Homo sapiens
ggggccatggcgaagcacgagcagatcctggtcctcgatccgcccacagacctcaaattcaaagagctgggtgagattaaaaacatcaccaccacacagccttcactggagctggacgggctggaaaagtaca

SEQ ID NO: 704373 - DNA, 74 bp, Homo sapiens
ggagcaccaggatctcgggctcggaacgagactgcacggtatggcaagagagtggcagacataaaggagagcaa

SEQ ID NO: 704374 - DNA, 51 bp, Homo sapiens
agttcatacaagcagagctaaaggttatgatgtgattgctcaagcccaatc

SEQ ID NO: 704375 - DNA, 115 bp, Homo sapiens
aaggagtgcgcaggcgcggaatctccgacttgccatggtcgtctttgtctgccgctctacccttctccaaaagaagagccaagagaaggtccttttctacaaatatcagagccat

SEQ ID NO: 704376 - DNA, 51 bp, Homo sapiens
gtccagattgtcatcgagatgcaggctgcagttcatggagctcgtttcaaa

SEQ ID NO: 704377 - DNA, 100 bp, Homo sapiens
aaggtcatcattgtccaggcctgcagaggtggtgaaacaccattcaaagtcgtagtcaaatctctttcacctaaagagttggtccggatacatgtcccta

SEQ ID NO: 704378 - DNA, 76 bp, Homo sapiens
ccaaggccacctggggaagaagcaggtgcctccggatctcttccaggaggtggacacactggacatcagttccatc

SEQ ID NO: 704379 - DNA, 51 bp, Homo sapiens
ctttgcaacagaattacagagtatgatgtgggagcacagcatggccgtggg

SEQ ID NO: 704380 - DNA, 96 bp, Homo sapiens
tgacagcacaggtcacagtaaggccaaaaatgtgcatactcacagagttagagagagggatggtggaacaagtgtcattcaaggatgtatgtgtgg

SEQ ID NO: 704381 - DNA, 90 bp, Homo sapiens
gctggagacatggaccgcggcgagcaagccctttggagtgaatcaacctggaccttatatcatgtatacaactgtagatgcaaatgggta

SEQ ID NO: 704382 - DNA, 90 bp, Homo sapiens
tacatcctcacttgtaacgtgtcattagagtatgagaaaactgcttaattcaccattatgagaaatgcttccagtcacaaaaatgcagcc

SEQ ID NO: 704383 - DNA, 100 bp, Homo sapiens
ccctaccctcatccatggaaacccggagggagagtcccgcctgaagaaacctggatctttgctagaaagagagagtgttcaagaaggccagtccaaatgg

SEQ ID NO: 704384 - DNA, 75 bp, Homo sapiens
caccaaaaagctttctgctagggatatgattctataacagactcttccagaaatgatatgaagaggaaatttgcc

SEQ ID NO: 704385 - DNA, 100 bp, Homo sapiens
cgggtgggcgacctcttccagaagctggcaatctgaaagcaaatcctgtttagatgcaggcgaaggttcctggtgacccaggctctcaccttaccgtccc

SEQ ID NO: 704386 - DNA, 51 bp, Homo sapiens
gatggagaagggaacagtaaatttttgagggtcaaagaaggctcttccaag

SEQ ID NO: 704387 - DNA, 112 bp, Homo sapiens
tgctccttcccactggactcctgcatgaatgccaccaaccacgccatcctgcagtccctggaaagatgaatgggagggctgattttcgagagccgaatgcagaggttccaag

SEQ ID NO: 704388 - DNA, 80 bp, Homo sapiens
cagcgggtgaggctgcaacacgaggctgccgttcagcacccgtcgagcgagccaaggaggtcctgctgctggcccggtag

SEQ ID NO: 704389 - DNA, 121 bp, Homo sapiens
cagccccccagctgaccctacagctgtacataagtgtcatgcagcaggacgtcactgttggaagaagaattgcctatctgtttgccaaagcttatctggtttccaagaaaccgcagtacct

SEQ ID NO: 704390 - DNA, 100 bp, Homo sapiens
ggcgcccagcaatcacagaagccgacaaggcgttcaagcgaaaacatgaccgctgagcccatgagtttgacggtgagaacatgtatatgagcatgacaga

SEQ ID NO: 704391 - DNA, 100 bp, Homo sapiens
agctaccccagacctcaagtgacttggtttagagaagggcacaagattattccaagcaacagaatgtgtaccttccggtttcccagcacggccatcaaga

SEQ ID NO: 704392 - DNA, 82 bp, Homo sapiens
ccagattattgagatggcctgtctgataactgactctgatctcaacattttggctgaagtccagtggcattgcagagcacgg

SEQ ID NO: 704393 - DNA, 50 bp, Homo sapiens
aatagatctctcggctctgaggatacgtaggtaacctttccagagatgtg

SEQ ID NO: 704394 - DNA, 96 bp, Homo sapiens
gcgcatctgacggttgtctcggttactcataggatggcattccctgtggatatgctggaaaattgcagccatgaggaattggaaaattctgctgaa

SEQ ID NO: 704395 - DNA, 75 bp, Homo sapiens
ggcaaggtctccaagtcccagctcaaggatttcagtttcccaaacctgagatgatctgtcagctggagaactggg

SEQ ID NO: 704396 - DNA, 100 bp, Homo sapiens
ctcagattggagaaaatttgcctcaaagcgagtctcaaaggtgttcctggatttggtgatgtggaaacagctgtaaaatttgcaactcagcttattgacc

SEQ ID NO: 704397 - DNA, 74 bp, Homo sapiens
ggggactccaaagtgaaagtggcggtgcggatacgacccatgaaccggcgagctggagcagttcaacatgatgg

SEQ ID NO: 704398 - DNA, 90 bp, Homo sapiens
gggaaatcgggctgaagcgactgagtccgcgatggaggtgcctatcaagtggatggcattggaatcaattttacacagaatctataccca

SEQ ID NO: 704399 - DNA, 100 bp, Homo sapiens
tgatggctttgtacggcttagaggacttccctttggatgtagcaaggaagaaattgttcagttcttctcagcagttgcgattcttgcagcatcaaatggc

SEQ ID NO: 704400 - DNA, 83 bp, Homo sapiens
aacaagacagttctgtctgcagaagcccattatggctgtaactggagatgacacagttccaaagaactactggttcagatttt

SEQ ID NO: 704401 - DNA, 97 bp, Homo sapiens
ttcttcggtgccgagcactccggactctacgctgaagccgacgtagcttctctgaacagacgcatccagctggttgaggaagagttggatcgtgccc

SEQ ID NO: 704402 - DNA, 104 bp, Homo sapiens
gttcatccctaagggtcctaaccggggtgtgaacgagctctatgtcgatgacccagacaaggacagcggtggcaagatcgacgtcagtctgaacatcagtttac

SEQ ID NO: 704403 - DNA, 75 bp, Homo sapiens
ctacccgggatacggaggagggatggcagaaacggtggacacaagcgaaatggtcaacggcgctacagaacaaag

SEQ ID NO: 704404 - DNA, 100 bp, Homo sapiens
gggacctgcatgtgtgtgcgcgcgaaggagcggaagaatggcagtgctcaaactcaccgaccagagcacaaagttatcattgttgggctggataatgcag

SEQ ID NO: 704405 - DNA, 75 bp, Homo sapiens
aaggaagcgatactgtctataccaatggagcaatgtttgcaccttctgctccatctcctcaccacatcagccccc

SEQ ID NO: 704406 - DNA, 89 bp, Homo sapiens
gaatgacaataactttgttagcagggaggattgcaaacgtgcatgtgcaaaagaatacagttgagttttgccaaatttgacagttcacg

SEQ ID NO: 704407 - DNA, 100 bp, Homo sapiens
gtgcatctttgcttactgcagtgtccagacagttacaggacaggctaacaccaatggaggctttacttcagacaagatctatccatactaatggaaatgt

SEQ ID NO: 704408 - DNA, 82 bp, Homo sapiens
aggactaatagctggcaaatttctgttccatcagcgtttgtttggtcagcccaaggccaaccccactgtcactctgttcccg

SEQ ID NO: 704409 - DNA, 75 bp, Homo sapiens
atgatcacgcagctggctggcttcagtggaccagaggctatgatggtcacacgttcctggacagtgtggagtgtt

SEQ ID NO: 704410 - DNA, 83 bp, Homo sapiens
cgcgtagacctccgctcccccaggagcaggacatcgagactttacatggctctgttcacgtcacgctgtgtgggactcccaag

SEQ ID NO: 704411 - DNA, 100 bp, Homo sapiens
tccaggagcccgggtccacttcagccagttggagaaaagggtttccaggtggtgctgtcacaggggacccactgggaccgcctcccgctgatacccttca

SEQ ID NO: 704412 - DNA, 100 bp, Homo sapiens
gccggtgactttcacttccagccagctgtgaagaagggccagatattcgaagcttacaacatggcagctttgtggaaattaccttgtattttcatctgtg

SEQ ID NO: 704413 - DNA, 90 bp, Homo sapiens
atggaagtgaatccccctaaacaggagcacctgctggcgctaaaagggctttgttcgcgggggtcacagctctcatggctgcagctagcg

SEQ ID NO: 704414 - DNA, 88 bp, Homo sapiens
cgccctccctcaccgccaaggtcctgcttcaccgaacagcacctcaggagcagtaacagagtatgcaagaggaggagacctgcacaac

SEQ ID NO: 704415 - DNA, 90 bp, Homo sapiens
agccattctcttcgaaattatgcactgaacatctctgagaagcggagactaaggtgggaatggaagtggccccacatctcaaagaaaccc

SEQ ID NO: 704416 - DNA, 75 bp, Homo sapiens
cacccgcctgccaggcgctcgggggccgaactggccctggactacctctgcagcccgagcgggaagaagttccgc

SEQ ID NO: 704417 - DNA, 75 bp, Homo sapiens
caaagaatagagttgagcctgtgggacacttcggctgtgagaaacgaccgaaacaagaagaagaaggaggtgccc

SEQ ID NO: 704418 - DNA, 107 bp, Homo sapiens
gcagtgacatctgtaaaagtgtctcagttgctgtgtttagagaacatcaaagataaaccctggcatatttgattcgccaaagtgaggacaaaaggaaccatgctgag

SEQ ID NO: 704419 - DNA, 75 bp, Homo sapiens
agtgaatcagaccttcaactggaatacaagtactccaaagattcaggtttactcacgtcatccagcagagaatgg

SEQ ID NO: 704420 - DNA, 75 bp, Homo sapiens
tgccagtaaactcacctttgggactggaacaagacttcaggtcacgctcggtccagcctgatgagtgaagaggct

SEQ ID NO: 704421 - DNA, 90 bp, Homo sapiens
aacgttttagagtaccaaccattgtgtgctgtgaggtaaagggtattgtgtcactctgtctgctgtttgaaactcttcttcaaacttatc

SEQ ID NO: 704422 - DNA, 100 bp, Homo sapiens
gcaggacccggtctcgggaccagccggaacctggcttctgtatttaccatgtacctggagcattggtttggcagctgaaccaggttgttttccagattgg

SEQ ID NO: 704423 - DNA, 82 bp, Homo sapiens
tgcaacaagttaagctgaagaccgaagcaagagctggttcagacaatgcagatcttcgtgaagactctgactggtaagacca

SEQ ID NO: 704424 - DNA, 100 bp, Homo sapiens
gcaagttagtggattaaaatctcccaagaggaatgacaaacaaccagctcttcagtgctgaagctgctgaaagatggcagaagaagtggtggtagtagcc

SEQ ID NO: 704425 - DNA, 98 bp, Homo sapiens
cacgagcgtaaggtccagctggtcaccgacagggatcacttcatccgaaccctcagcctcaagccgctgctcttcgggcacattcgcctcccaggtga

SEQ ID NO: 704426 - DNA, 51 bp, Homo sapiens
atgctggcaaagtggaaaaatgtgcgattgcaacacctgctcggtataccg

SEQ ID NO: 704427 - DNA, 100 bp, Homo sapiens
agagaaacccccaagctaggatttctgcagctcatgaagccttggagataaatgaagtggtggacatgacaacagagtcaactgcatacagtggcatcaa

SEQ ID NO: 704428 - DNA, 74 bp, Homo sapiens
cagggaagaggagaaggtcattccgctgcttctgcagaaagccgtcattacacctgattttgaaaaaaaccact

SEQ ID NO: 704429 - DNA, 100 bp, Homo sapiens
ggtagagggtcagtcgagagtagccttcgttaaccttaattgaaactgaaagtgttgtgaagagcgaagacttttcgctcccagcttatatggatcggcg

SEQ ID NO: 704430 - DNA, 98 bp, Homo sapiens
acgcagtgctttgcaacgctaattagactcatgccacttgaggtcatgcttcaccccttcctccatctgctgcacctaccactgattctacagattcc

SEQ ID NO: 704431 - DNA, 100 bp, Homo sapiens
catcttgttctcgagttttctctgccatgttgctattgcaggacggaggctcagaaacacttatgggattttctaagcacggagggttcacttccttaac

SEQ ID NO: 704432 - DNA, 82 bp, Homo sapiens
gaaggaaattgtcccgaatccctgcaggtcccaggtctccccgctgcgctgcttgaggctcagccatggcccagcagagagc

SEQ ID NO: 704433 - DNA, 100 bp, Homo sapiens
ttttcttcctgcccctcgttgatgagagcattcgaagtgacctcagcagggcatccaggacttaaccaccaccatgtcgagcaaaagaacaaagaccaag

SEQ ID NO: 704434 - DNA, 128 bp, Homo sapiens
ctagtagccacggtgtggcagctgctctgaaccaggacctggacccggacccaaagtgccatgtctttaatggggtggcccgattctacaggtcacggaaaaagcacttgatcaccacccagacagaa

SEQ ID NO: 704435 - DNA, 82 bp, Homo sapiens
agccgcctctgtattacttaccaggtcaacaacggttccagcctcagggatgagtgcatcacaaacctactggtgtttggct

SEQ ID NO: 704436 - DNA, 98 bp, Homo sapiens
cttgctgcggtttttgttcctggggctgagtgccctcggtctcctctgagcctccggcctccataagacccaaaacagatgacacctcttcccagtcc

SEQ ID NO: 704437 - DNA, 96 bp, Homo sapiens
cgggcgggcctgcaggcggggcggtgtcggcggccggagcccccgcgcgggccgcctatcgggctgcagaacaactctctgctccccatcaagttc

SEQ ID NO: 704438 - DNA, 50 bp, Homo sapiens
ctgtgtgaaggagcagatcccagctctgttcactcggagagcccgccggc

SEQ ID NO: 704439 - DNA, 80 bp, Homo sapiens
taggggccgagtacgcccgggtggtgggatctgaatacacacggactccagtgggggtgactcatgtgcttctgaggagg

SEQ ID NO: 704440 - DNA, 75 bp, Homo sapiens
catgtcgggttattcgagtgaccgagaccgcggccgggaccgaggggtaagcaggaagagaacgacgtggtggag

SEQ ID NO: 704441 - DNA, 132 bp, Homo sapiens
ccgaccctactgagccgtgagagccgcagtggatggctggaggtgcagggccaggaggaacatgaggtttgtctacagattttgagcgttcgaagttgacccctgactaagtatactttgctgctccctcag

SEQ ID NO: 704442 - DNA, 83 bp, Homo sapiens
atcacgaccacatttgtcatgatgacagtgacaagttgacttttgtgccctggtaattctgtatcctgtttaccgtttaccta

SEQ ID NO: 704443 - DNA, 98 bp, Homo sapiens
tgttctgtttagtaacaagattaccttcttaatggacctcctgatacaccagttgacggtatgtacaagctgtgaggacaacgcagaagccaatgggt

SEQ ID NO: 704444 - DNA, 50 bp, Homo sapiens
gactgtgaaagtgacttgctggagtgagctttctcttaagtgtgccaagc

SEQ ID NO: 704445 - DNA, 100 bp, Homo sapiens
aggctatctgaagaaaagtagaaggaaaaacagaacgttgcaaactctggaaaaaaacttggcccaccaagaaaacacattgtggagcgctatacagagt

SEQ ID NO: 704446 - DNA, 100 bp, Homo sapiens
cggagaaccagtaccggctgacctcgctgtacgccgagcacccaggcgactgcctcatcttcaaggtttacccaaggtccagcctagcccctaggcacca

SEQ ID NO: 704447 - DNA, 101 bp, Homo sapiens
aggactagagagccagcaatgcctccatgaacaatctcacccaattactctgctcaggaaagtgatgaccccatggcttatattcactttactgctgaagg

SEQ ID NO: 704448 - DNA, 100 bp, Homo sapiens
cagtttgttgtgcttgtcaagatcaggtttatcaggtagaagatgtgtgtgaagaagaaatgccagaagagtcagatgaatgtgtccggatggatagaac

SEQ ID NO: 704449 - DNA, 97 bp, Homo sapiens
ctccgggggtaaaagagatcaccgacaagatcaccacggacgagatgatcaaacgcctgaagcttggttctacagccattgggatccagacatcaga

SEQ ID NO: 704450 - DNA, 75 bp, Homo sapiens
acaacctattgataccacagctgaactttcttctaagtgccacagtgaacaggaacgaatgcaggaatttgggaa

SEQ ID NO: 704451 - DNA, 75 bp, Homo sapiens
aaaattttggaaagagaagatgctcggctgatggtttttggattcaaagcataaaaaccattacaagatatacaa

SEQ ID NO: 704452 - DNA, 100 bp, Homo sapiens
gcagcaaccgcagcagcagccttcaggtgtggatgaggtcaccattgtcaacattttgaccaaccgcagcaatgcacagagacaggatattgccttcgcc

SEQ ID NO: 704453 - DNA, 100 bp, Homo sapiens
gccgcacctttctgcgccaccgggtcatggaagtcatgcaagtaaaatgcccattcccatcaagaccagacaatggatttgtgaactatcctgcaaaacc

SEQ ID NO: 704454 - DNA, 73 bp, Homo sapiens
tgaagtacaaaatattttccagagattcagttgtggaaattctttttgaacaagataatgaagagcaatcagt

SEQ ID NO: 704455 - DNA, 115 bp, Homo sapiens
ttaggcgtggagagggagtgatgtcttccagactcggtgctgtacccgccgagatggtaacctgcacctcaatgtgacggcggaggccttcagcccctcgctcctggctgccctg

SEQ ID NO: 704456 - DNA, 75 bp, Homo sapiens
tgggtgatttgttctgtatcagaagacaatatcatgcaagtgtggcaaatgggctttttggattttggaactggg

SEQ ID NO: 704457 - DNA, 82 bp, Homo sapiens
gtcccagagtcctcagctgtataatcaaacctccaatccacctggctctccgatcagcaagttgctcggatggaaaaactag

SEQ ID NO: 704458 - DNA, 50 bp, Homo sapiens
gcatccggagagtggacaagaaattactccacaggatccgctgaacatag

SEQ ID NO: 704459 - DNA, 101 bp, Homo sapiens
gggaagacgagaaagagagtgggagagagagaggcagagagggagagagggagagtgacagcagcgctcggtcaaaatgcagatcttcgtgaaaaccctta

SEQ ID NO: 704460 - DNA, 75 bp, Homo sapiens
cctgtctcaagagaagaccaatgttcatataaatggtggcagaaataccagaagaacttcctccgttgccaaaat

SEQ ID NO: 704461 - DNA, 114 bp, Homo sapiens
cgaaagagaggcctcccggctcgacaagttcaagcagctgcttgccggccccaacacggaccttgttctgacccagtgggtgatatatgccatccgaaaccttaccgaagacaa

SEQ ID NO: 704462 - DNA, 82 bp, Homo sapiens
ctcagactcagacttcgagccatcccagaaccacagccaagggggacagccgcgccgctgctgcttttccgaagaggtgact

SEQ ID NO: 704463 - DNA, 100 bp, Homo sapiens
ctgatgacaaaaagcttcagagttctctaaaaaaactggctgtgaataatatagctggtattgaagagcttcacgagaagtttgaccttctaaagcggac

SEQ ID NO: 704464 - DNA, 97 bp, Homo sapiens
agcagcctgtaactgctgacaagcagcaaggtcatgaacctgtctctcctcgaagtcttcagcgctcaaggattttttatcaagcagaaatgcatcg

SEQ ID NO: 704465 - DNA, 96 bp, Homo sapiens
ggggaatcacaaatggttctgcaacagcaatcaaggtggaagccccagcagactatggcagctggcagatggtaacgggctgtggcagtattcagg

SEQ ID NO: 704466 - DNA, 100 bp, Homo sapiens
tttttaccttttgtgctgagccaactcgagccaggctgcaaaaagacgaaggggaggaccaggctggcgatgaagatgaagatgatgaatgggatgactg

SEQ ID NO: 704467 - DNA, 104 bp, Homo sapiens
cctgccgtccttctccactttcgccagcccgtgccgcgagcgcggcctgcaggagggctgggttacgacccctacaaccctgagctgcccaagccccccgcgca

SEQ ID NO: 704468 - DNA, 90 bp, Homo sapiens
gggcctccagggtctgcagacaaggcagggtagtcaaaccacacactccattaataaggtttcctgacagaagagacaatcctaaaccca

SEQ ID NO: 704469 - DNA, 75 bp, Homo sapiens
ccgtcatcaacacaagctaatagcattgttctggaatcatcaccgaaagtgatgaagcattgggcccaacaatga

SEQ ID NO: 704470 - DNA, 83 bp, Homo sapiens
caaggaacggaaaggagattacttggggaaaactgtccaagatcgatgctatagaagacaaacaagggaaggttttttttcct

SEQ ID NO: 704471 - DNA, 83 bp, Homo sapiens
aggagccagttaccatgactcatccaggagggtgcatctgcccggaagactcagactcctgcagcccagccagtaccaagacc

SEQ ID NO: 704472 - DNA, 100 bp, Homo sapiens
gtgatgagttcccaatgattttaattggtaataaagcagatctggatcatcaaagacaggaaatctatacctttggaagaatattgggaaaagggagctt

SEQ ID NO: 704473 - DNA, 76 bp, Homo sapiens
ccaagaagcattcttcatctaaagataaggtttattatttccgacaaggacatgaagcctatgtcgaaatggcccg

SEQ ID NO: 704474 - DNA, 100 bp, Homo sapiens
cgagagcgtgaccgagagcgcgaatatcgtcatcgttagaaggcccttctgcgatgttttacctggctgcggctgtgtcagatttctatgttcctgtctc

SEQ ID NO: 704475 - DNA, 75 bp, Homo sapiens
taattgctatcaatgcgaatgatcctgaagcctcaaagtttcatgggtgacctgaaggcgtatctgcgcagcgag

SEQ ID NO: 704476 - DNA, 103 bp, Homo sapiens
actagggaagcacagatgtggaaagtgaatgtgcggaaaatgccttcaaatcagtaccatcttcctcatgggaccagtgaaacagctgaagcgaatgtttgag

SEQ ID NO: 704477 - DNA, 100 bp, Homo sapiens
gccaagctcttaagcatcgtggcgctggtggggggagtcctcatcatcatcgcctcctgcgtcatcaacttaggcgagagcgcctgctcgctgtgccccc

SEQ ID NO: 704478 - DNA, 100 bp, Homo sapiens
ccccgaggagccctgttccaaagcctcctggaccgtccaagaagttggtgttcgaggaagagacattgttgttcttggtgtggagaagaagtcagtggcc

SEQ ID NO: 704479 - DNA, 100 bp, Homo sapiens
tggttgaaagttttccttcttacagagatgtgactctgtttgaggtttcatctgatggaaatcttccccagcaagccgcgtcagccccaagccgtgtggc

SEQ ID NO: 704480 - DNA, 82 bp, Homo sapiens
ccgacagctcagccagacttcccctatggtcagtatgaggtggggctggtgtccgagcacttctcgcaggccccgcagaggc

SEQ ID NO: 704481 - DNA, 75 bp, Homo sapiens
ggaggaaattcaacaggagctgatcaaccaaggtattgctattaaggagtcagcaaaagtgggtgatcaagctca

SEQ ID NO: 704482 - DNA, 100 bp, Homo sapiens
cccatgttgtcatggcttaacatcagggtgataaaagaaaatgtggctgaagttacccgaagttcagcttgcagtgtaattcagaagagttaagaccaga

SEQ ID NO: 704483 - DNA, 100 bp, Homo sapiens
tgttctgccggaatttgaaaagtgcctgctgataaagaatttgtatggtctttgtggaaacgtctccaggttacaaacccagatctcacacaagtggtca

SEQ ID NO: 704484 - DNA, 100 bp, Homo sapiens
tgaaaagtgcgaccgttctcccaaggaatttccacggcaacttgctgagcgagagcgagaagcggcccttcgtggaggaggcagagcgccttcgcgtgca

SEQ ID NO: 704485 - DNA, 100 bp, Homo sapiens
gcaccacttcgaccagcttcatcctcagacagctccagggcccacaacggcagtgtcctacatgtcggtgaaatgtgtggatgcccgtaagaaccatcac

SEQ ID NO: 704486 - DNA, 97 bp, Homo sapiens
aacaaatggaagtaaggatgcgttgaataagttttcaggtgacttcatggtcatgacgattttcttcaatgtgagcaggcggtttggctatgttgcc

SEQ ID NO: 704487 - DNA, 97 bp, Homo sapiens
gccggctccgcctcaccagcaagcgcattcccagacgcccactattgcttggttctacttcctttatcccgattggccgtcggacttatgccagtgc

SEQ ID NO: 704488 - DNA, 100 bp, Homo sapiens
ggatgacaaccgtacccggctgtaccggcagatcctcaggggcaagtacagttactctggggagaactgtggacaacggaaggctgagccccatccattg

SEQ ID NO: 704489 - DNA, 100 bp, Homo sapiens
aaaggacggatgatgtcacagtcatctggatcaggagatgggaatgatgatgaggctactacctctaaagacggtggaattgaatgatctggcacgggac

SEQ ID NO: 704490 - DNA, 100 bp, Homo sapiens
attcccctctgggatcattttctttctatctgaagtatatttttagaagttcttcagaaaagaactgttgggtatatttacttctggcacatgggaagag

SEQ ID NO: 704491 - DNA, 50 bp, Homo sapiens
gccgcggggcagccgccgctcctccgggattcgacggaggcgccttgcac

SEQ ID NO: 704492 - DNA, 90 bp, Homo sapiens
gagaagaaggcccagaactctgaaatgagaatgaagagagctcagagggtacaccacccggactacaacaatgagttgacccagtttctg

SEQ ID NO: 704493 - DNA, 99 bp, Homo sapiens
ggcggatgcggtcgtgaagatagatgggagcttgcctgattgtcaacccatcggcctggaccccagagcccacccagttgagcgtgtgcagagggcccc

SEQ ID NO: 704494 - DNA, 100 bp, Homo sapiens
tgacgccatcctgccgcagctggcgcagcccacgctcatgatcgacttcctcacccgcgcctgcgacctcgggaaagcaggcaggatgggagagtcgccg

SEQ ID NO: 704495 - DNA, 75 bp, Homo sapiens
tacctggtgcagggcctgattgaggactgccagctggcgctgcagatgtggatcaatccatgtgctcaggtgatc

SEQ ID NO: 704496 - DNA, 101 bp, Homo sapiens
aggaaatcatggaggccgaggctgtgctccaagatgaggaggacggaagtgtggtgaaggtggacacagaagccgcaggagctggccaagaggactcccgg

SEQ ID NO: 704497 - DNA, 115 bp, Homo sapiens
cgatttttcgcttctcttcagggatgagtcatgtggtggtgaaaaatgaccctgaactggaccagcaggaatccaggtaaaaatggcttgtctaatagctgcattttgttagata

SEQ ID NO: 704498 - DNA, 140 bp, Homo sapiens
attatgaagtattaattcttccactgatatctcaaaaggtgatctggacaaaggaacaggtatctcagcgggacgaccctgggacagtctccactggggcagatccagctgaccatccggcacagctcgcagagaaacaa

SEQ ID NO: 704499 - DNA, 82 bp, Homo sapiens
cctgcagtacctgcagaaggtctctggagacatcttcagcaggaacccaagacagaccaggatgaggagcattgccggaaag

SEQ ID NO: 704500 - DNA, 100 bp, Homo sapiens
aagtatgtctgatccagaccaggactttgacaaagaggaaccgttctcgctatgttgcccaggctggtcttgaactcctcagctgaaatgagcctcccac

SEQ ID NO: 704501 - DNA, 96 bp, Homo sapiens
cacaaaatgtgctggttgatggtgttaagaaactctcagtttgtgtttctgagaaagggaaacacctttgtccaagtcccctatttcccggacctt

SEQ ID NO: 704502 - DNA, 100 bp, Homo sapiens
gtccgcgctgcgctgctgaggccgggccggccgcccagacgctgcccgcgggcccggccacggcggagccaaggtcttgaggaccggcccagctcaggct

SEQ ID NO: 704503 - DNA, 75 bp, Homo sapiens
ccgagccccagcgacacccgaggggctacacagtatataaggtcaccgcccggtccttgcctgcattaattgaac

SEQ ID NO: 704504 - DNA, 82 bp, Homo sapiens
tctaccgggcgccccacgggccgaagccgccaaggagagtttcgggggcatgcgcctgctgcgtcgggcagacttccacgtg

SEQ ID NO: 704505 - DNA, 76 bp, Homo sapiens
cttagacaagaagatggtcacacggggtctggctctgtcacccaggctggagtgcagtggcacgattatggctcat

SEQ ID NO: 704506 - DNA, 75 bp, Homo sapiens
aaatttctagctcgaaggtttaagcaagatggaaagttgccttttgttcctccggaggaagaatttattatggga

SEQ ID NO: 704507 - DNA, 100 bp, Homo sapiens
agcgaggcggggccgccggggccgccatggagcccgactcggtgattgaggacaagaccatcgagctcatgggaacttaggctgcggaactatgtcccgg

SEQ ID NO: 704508 - DNA, 100 bp, Homo sapiens
tgaacagactagccactttgcattgactggaaacaatggcatttacagaaagagtcaacagcagtggcaacaggacccctaccatggaggagaccatcaa

SEQ ID NO: 704509 - DNA, 75 bp, Homo sapiens
gcacacattgaatgggccaaggaaaaatcgagcagaaagaatgtctttcagatctttaagcaagcgacaatgaag

SEQ ID NO: 704510 - DNA, 98 bp, Homo sapiens
gaaaagctccagtcttttgactctccagaaaggaaacggattaagtactccagggaaactgacagactcctgaggaagaagagattttaaacaaaaaa

SEQ ID NO: 704511 - DNA, 75 bp, Homo sapiens
gctggaaggaaccgctctcgcttcgtcctacacttgcgcaaatgtctccggtatgtcttactgaaagaaagaaac

SEQ ID NO: 704512 - DNA, 75 bp, Homo sapiens
acggaaacgccgaggaacccggctgaggcggcagggccgcaagcttcttatcattgggaccactagccgcaaaga

SEQ ID NO: 704513 - DNA, 83 bp, Homo sapiens
gaagaaagctggccggggcctgggcctgagcatcgttgggaaacgattttctctgtgggcagttctttttgttttgggaagac

SEQ ID NO: 704514 - DNA, 100 bp, Homo sapiens
agcagctatgaaaggttttgaagaggtcataaagaaatttccaaggtgtgccgaaggctatgcactatacgcccaggtcagatgtaccaacagtaccagc

SEQ ID NO: 704515 - DNA, 123 bp, Homo sapiens
tctaccagcccatgcccctgaaggcctcgctggagatcgagtaccaaaaactgccaagttttggaccttatctggaacagcgcaagaaaatcatagcagaaaacaagattagactgaaagaac

SEQ ID NO: 704516 - DNA, 82 bp, Homo sapiens
acatggtcatgagctttgtgaacctggatcatgctttacgattatggaatatccagacggacactctggtggcaatatttgg

SEQ ID NO: 704517 - DNA, 74 bp, Homo sapiens
gaaactaacctcaacctctgccatcacaagggctggcttagcaggagctccagcccgtgctgtatcagctgtaa

SEQ ID NO: 704518 - DNA, 82 bp, Homo sapiens
cagcctgcaccatgccgccactgctgcacccccaatgggcaccccactctgcagagaagatggcgaattagaagatggtgaa

SEQ ID NO: 704519 - DNA, 75 bp, Homo sapiens
tcaccatgttggtgctgtttgaaacgtctgtgggttacgccatctttaagttcacacaaaagatgttggacaatt

SEQ ID NO: 704520 - DNA, 75 bp, Homo sapiens
aacccgcgaaatgatgggatagcgttgcaaatccttaaaagagtcttaacggtcctcagaatggttggaatgacc

SEQ ID NO: 704521 - DNA, 75 bp, Homo sapiens
gggggatggagcgagcgccgagccgggtcagcatgctccttttgatgcaatgattatggtgaacatcagttatta

SEQ ID NO: 704522 - DNA, 74 bp, Homo sapiens
aggcgggatgtgtcagtcaaagcagcctctgaacttctcatgaaactctcagattgtattgtaggaggcattgt

SEQ ID NO: 704523 - DNA, 100 bp, Homo sapiens
agagacaacgactatgtccaattttcatgctcagaatgtttgatgtgggaggtcagagatctgagcggaagaagtggattcattgcttcgaaggagtgac

SEQ ID NO: 704524 - DNA, 75 bp, Homo sapiens
aagagagattggcctggagtaaaagctgatgatcggaatgattacagagcagcccgacggccatggaggctgaag

SEQ ID NO: 704525 - DNA, 100 bp, Homo sapiens
gaaggaatatatcctgactgatttatatttgccttccctccatgatctccaacactatccgataaagtagaagcaactgaggtaccgtgaaagagaaagg

SEQ ID NO: 704526 - DNA, 100 bp, Homo sapiens
gctgtcctgccctacgagctgcggttcaaggagcccttaccggaatacgtgcggctgggcgcagttgtgtagcagttgagtaatgctggttagctgttaa

SEQ ID NO: 704527 - DNA, 100 bp, Homo sapiens
cgccgcggcccgcctggcctgcagcgctcccacccccggcggcggcacgatgccctttgacttcaggagcagaagatggctgtgccacccacgtatgccg

SEQ ID NO: 704528 - DNA, 87 bp, Homo sapiens
attgaacaaatgtttccttaaagtgcctcgatctaaggatgaccctggaaaggttctgagttctgtccgcacagaatgggacccact

SEQ ID NO: 704529 - DNA, 50 bp, Homo sapiens
catttgggagaaacacagccagaagcttttgtctggtcctctgagcccca

SEQ ID NO: 704530 - DNA, 83 bp, Homo sapiens
ctggagtgcgtgggggaccggctgttggcgggaggatacgaagcgttttcggcttcctgcccggagctgtgcagcaaacagtc

SEQ ID NO: 704531 - DNA, 100 bp, Homo sapiens
attgccacttcgtatctgtggcatctacacgggcgacagcttcgtcaccccttgatggggcagcctcttcccctcatcacagactatgctgttcagccac

SEQ ID NO: 704532 - DNA, 75 bp, Homo sapiens
caacgatcccaaccgccgagggctcatcgaagttaaatgaagttcgaaagagattgaatgagctaagagaattag

SEQ ID NO: 704533 - DNA, 132 bp, Homo sapiens
gccagagcctggagtctgcgaaggccgggacccggttccccggcccacagtgggggtgtgcaaacccgagagaactggaaggacagaataacgggctcccagattcacaagccccaccaagaggatcacccc

SEQ ID NO: 704534 - DNA, 96 bp, Homo sapiens
gacagctggaaggcctcgttcctccgagctggcgtctaccccgagaaggaccaggaaagtatgtgatggtgatgggagtggttcaggcctgcagcc

SEQ ID NO: 704535 - DNA, 100 bp, Homo sapiens
tcccagatgaagacttcctgaatgtcatgacctacctgactagcatccccagtgccggtggtggtgtgcacattgagccccggtatagacagttccccca

SEQ ID NO: 704536 - DNA, 75 bp, Homo sapiens
cccagttccaaagtgtcttaaagccctggtacctgacagtgtaaagaaggagctcctacaaagaataagaacatt

SEQ ID NO: 704537 - DNA, 100 bp, Homo sapiens
ctacttgtctcctagtggaaattcatctccacccggatcacctactcttcagaaatttggagtcagaaataccatcagaggaggggtactgtgactttaa

SEQ ID NO: 704538 - DNA, 90 bp, Homo sapiens
gtaagaccccgactcttcctggtgaagcatctgatgcacgttccatccggcgctcagctgggcttgaggatgggtcatcagttaaggaag

SEQ ID NO: 704539 - DNA, 80 bp, Homo sapiens
cgacgtccctcaaaccttgcttctaggagataaaaagggtgaggtggctttgaccccgggttgcccggccagcacgaccg

SEQ ID NO: 704540 - DNA, 98 bp, Homo sapiens
tgtgaaaagtgaaattgttccactgttcactagtctagcttcagatgaacagtccaagtggtaagaagttcagaagcaagcctcagttggcaaggtac

SEQ ID NO: 704541 - DNA, 83 bp, Homo sapiens
agaggatggaaatcagcgcggagttaccccagacccctcagcgtctggcatctaggaatggcttcttgtgggaaccaaacaag

SEQ ID NO: 704542 - DNA, 75 bp, Homo sapiens
cgggcacagaaacacagcagcgggagcagcaacaccagcactgccaacagtgacctgtgtgaccttgcgctgttg

SEQ ID NO: 704543 - DNA, 53 bp, Homo sapiens
ccggagccgcctgggatgttcaaaatcatattccatgcccatcagcattgaat

SEQ ID NO: 704544 - DNA, 74 bp, Homo sapiens
attgttgtccttgttgagagaggaaaccactccaaaatcgtcgcaggggcctgagggaagacatgctggagacc

SEQ ID NO: 704545 - DNA, 75 bp, Homo sapiens
gccccgggcaaagcccatctggtccgccgagcagtcttactactttgaccgcgatgatgtggctttgaagaactt

SEQ ID NO: 704546 - DNA, 75 bp, Homo sapiens
tttattgcctgtttgatgagcactaagactgaagagaatggcgaggcaggtttcagatggagctctgcgatgctt

SEQ ID NO: 704547 - DNA, 100 bp, Homo sapiens
ccgaggaggtgtcgcaggagcacatcgagaccgcttaccgcatctggctggagccctgcattcgcggcgtgtgcagttgtcgagatgtccacagaaggag

SEQ ID NO: 704548 - DNA, 75 bp, Homo sapiens
ctcatttcctggccgctcctgggcttcgcgcatattgaagaagtgagtctttttggaaaatcagaattagagaaa

SEQ ID NO: 704549 - DNA, 74 bp, Homo sapiens
aagagaagcaatgggaatttacatcagcaccctcaaaacaggagaacccatccccccacggaccttgactgaag

SEQ ID NO: 704550 - DNA, 50 bp, Homo sapiens
gggcttcctggcccgaaaggagagcctagatggggtttcaccatcttggc

SEQ ID NO: 704551 - DNA, 100 bp, Homo sapiens
accgtgaccgagagcgtgaccgagagcgcgaatatcgtcatcgttagaagcgctcctttaccctcatcgtggaggcctgggactgggacaacgataccac

SEQ ID NO: 704552 - DNA, 101 bp, Homo sapiens
acagtgcccaggggtctgagtctcacagcttgtaaaggcagtcatggatcaggtaatgcagtttgttgagccaagtcggcagtttgtaaaggactccattc

SEQ ID NO: 704553 - DNA, 90 bp, Homo sapiens
ccgggagcaggagctgggcctaggtctgcgccctggtattctcatgggagcagttataaaaattatagagtttaaaaaactggcgaattg

SEQ ID NO: 704554 - DNA, 76 bp, Homo sapiens
ccgtcatattccacccattactaaggaaagaccacagcaagattctttcattcgtctcctcctagcctgggggacc

SEQ ID NO: 704555 - DNA, 83 bp, Homo sapiens
ccaagatgcgagtctggttttatcgaggagcttccggaagagaccaggaggtgttcacagaactgcaggagaagtatggggag

SEQ ID NO: 704556 - DNA, 74 bp, Homo sapiens
tgactgcacttcttttttgagaaaggaaggaatatatcctgactgattcaattaccagctctggctgggtcgcc

SEQ ID NO: 704557 - DNA, 74 bp, Homo sapiens
gggtgacaaggccgccgaggaacaggatgtctctgcccacccacgcaacccagactatgaagagtccggtgaaa

SEQ ID NO: 704558 - DNA, 100 bp, Homo sapiens
gcccaccaagaccccctctttccacataaagagaccagctccccggcccctggcccaccacaaggagggaattccagagacgctgtaacactctgatttc

SEQ ID NO: 704559 - DNA, 75 bp, Homo sapiens
ggcggcgctttcggcgcgggcccgggccccgagcgcccgaacagatctcggcctgatggacgcctggtgtggacg

SEQ ID NO: 704560 - DNA, 90 bp, Homo sapiens
cagcagaagaaacacttcctataaatctcgcccaaacaggaaaggaaggtgcttttgcacttgtgtttaaaagtgttcattttcccgggc

SEQ ID NO: 704561 - DNA, 74 bp, Homo sapiens
atggaactgtatgccagcagcttgttgtacagactaaaaacagcccttgtagaaagagatgatttctcatcagg

SEQ ID NO: 704562 - DNA, 74 bp, Homo sapiens
gacttcatccagggctgcatcgtcctgcaggtattctctactgccgctgatggtcaaacgcaagtggaaattaa

SEQ ID NO: 704563 - DNA, 83 bp, Homo sapiens
cgaacgggttgcttcccccgctgcgaggaaagccatcaccaagtcgggcctccagcacctggccccccctccgcccacccctg

SEQ ID NO: 704564 - DNA, 90 bp, Homo sapiens
gcaggttttaaatcaagatttaacattccaacacataaaaattatttatccaacagctcctcccagtgcaaggatgatgctgaaaggaat

SEQ ID NO: 704565 - DNA, 71 bp, Homo sapiens
ctcctctgattccttcaacgaggacatcgctgcctttgccaagcagtcagaatctggagatgtgagtagaa

SEQ ID NO: 704566 - DNA, 101 bp, Homo sapiens
acgtgcttcctgcttcatagataagaggtgacaaccagggcatccccatcatgtccagcatcaagctgaaagaggagcagcgcataaccaccacctccccc

SEQ ID NO: 704567 - DNA, 75 bp, Homo sapiens
agcagcaaagaagtgctatctggaaagagaggttgtacctacaacagatcatatagatacagaaaaattgaaagc

SEQ ID NO: 704568 - DNA, 101 bp, Homo sapiens
tggcggcaatagggaaagtgaggcagctgcaaggagggcggcgggactgcactcgagtgtccagacctgctcgatgaagttcaccatgtctattctcaaga

SEQ ID NO: 704569 - DNA, 82 bp, Homo sapiens
ggacctcggcgctcactgttcggagccgagctgtcagcgcttgggaaatctggcattttttaaagtttgcgccccacaaaga

SEQ ID NO: 704570 - DNA, 75 bp, Homo sapiens
aagagtcgctttgttacacctttcaagtgtctcgtaccttctccaggcaaattccgttcccctgcagcaccatct

SEQ ID NO: 704571 - DNA, 74 bp, Homo sapiens
tcctgcaggtctcggagccctcggaggtgttcacagaactgcaggagaagtatggggagattgaagagatgaat

SEQ ID NO: 704572 - DNA, 97 bp, Homo sapiens
gtgcccgcccttagcggcccggcgttgaattccgggaagtgggagcttcaggctcgctccgtgcggattgatgtacagctatatattttgtcctttc

SEQ ID NO: 704573 - DNA, 146 bp, Homo sapiens
accctggggcggagggtggaaggcagcttccgtcgaagaggagggggctgcggtggccaccgcggcggagcccgaggacctcagcagccatgtcgaagccccatagtgaagccgggactgccttcattcagacccagcagctgcac

SEQ ID NO: 704574 - DNA, 95 bp, Homo sapiens
gaagactatggcatcacaagtgtcgaaatggtgttcacactggccctgaatcaagggaacaccagttttcacatgctggcagaagcaatggccgg

SEQ ID NO: 704575 - DNA, 100 bp, Homo sapiens
ttttaatgttagcgttgttaatactacctgcttttggatagaatgtaaagagttcacccagggcatgatcttacctacaatgaatggagagtcagtagac

SEQ ID NO: 704576 - DNA, 98 bp, Homo sapiens
tcaagcgcagctatgtctgtcatgctagaagtgccaaaggcgaagttgccaaagcagccaaggtgaagcagaaagcaaacatgtctgacaaagagcta

SEQ ID NO: 704577 - DNA, 83 bp, Homo sapiens
gccggcgccacacggtgaaggtgacgccgagcaccgtgctgcttcagattttctccaaaggaacatccggtgcttgccctgcc

SEQ ID NO: 704578 - DNA, 101 bp, Homo sapiens
ctgtgttcactgctggacgcctctgggcaatcttaccctcctgggaactgagagaggctgcatttgatgccagaaggcaaacacaacctgcatttgcgttt

SEQ ID NO: 704579 - DNA, 48 bp, Homo sapiens
cggctcccccactacttccccgtggctttgtgcccggggtgctgagcc

SEQ ID NO: 704580 - DNA, 98 bp, Homo sapiens
gggattccggcgccgctctccgagctcgatccgctgctcgcacgggagccagctgggtgagagtgataatcttcaaaatgaagactttggaaaatttt

SEQ ID NO: 704581 - DNA, 100 bp, Homo sapiens
tggctaccgttcggactatttgtagtcatgtacagaacatgatcaagggtgttacactgttcttctggatctgcctcagtcctgacacacagcagctcgg

SEQ ID NO: 704582 - DNA, 83 bp, Homo sapiens
gctgagccagaggccaactgcagaggaactggaacagaggaacattttgaaacaatccacattcatctcaatggaaggatcct

SEQ ID NO: 704583 - DNA, 82 bp, Homo sapiens
caagagcgcaggcagtggccacaagagcgaggagaagcgagaaaagatgaaacggaccctcggatcctctggttggaagcat

SEQ ID NO: 704584 - DNA, 50 bp, Homo sapiens
ggacttctctgggcggcctcaaatgctggttatattctgggcactaaatg

SEQ ID NO: 704585 - DNA, 101 bp, Homo sapiens
cggctactacttaataatgacaatctcctcagggaaggggcagcacaatggcgattttgctgacagctgccaagaaaatgcttcactcaacagtcctcatg

SEQ ID NO: 704586 - DNA, 97 bp, Homo sapiens
agcatggatgccactagtgagcgggactttgtggtctctgctggatgaaccgaatcctaacagtccagccaatagccaggcagcacagctttatcag

SEQ ID NO: 704587 - DNA, 75 bp, Homo sapiens
cttgaatcccttgaccttactgatgagaaaaaggtgagacatggaatccattaaaattgcattatcagttaagaa

SEQ ID NO: 704588 - DNA, 98 bp, Homo sapiens
gcgcgcagcgcggggagctgccagtgtcttctgtggcttcagcgtcacctagtgcaggctgccattcaacaaacgcattgtcaacagtcaaccaaaag

SEQ ID NO: 704589 - DNA, 99 bp, Homo sapiens
cgcgtcttctttcaggctgaggagcaccactaggctggacagcgacagagtgtcgtctgcctctagcacagccgagcggggaatggtgaagccgatgat

SEQ ID NO: 704590 - DNA, 100 bp, Homo sapiens
agatcatcatgaaagagaccgtggatgctgaagctgctcagatggaagataaaaagccctttatcctgtcttccatgaggcttcctctcctggacaccaa

SEQ ID NO: 704591 - DNA, 51 bp, Homo sapiens
cagcggcagtcccctgcccaagtgtgtgctgacttgataagaggcgcaaaa

SEQ ID NO: 704592 - DNA, 75 bp, Homo sapiens
caggggcggaggcggaggcagaggtggaggcgctttgaaaggggatcttctctggatcaagcaatggtggtgaaa

SEQ ID NO: 704593 - DNA, 82 bp, Homo sapiens
cgggcggcttcctggcctgggcgctccggtggcggcggagcacatgggaactaaagaggaatttgttaaagtcagaaagaag

SEQ ID NO: 704594 - DNA, 87 bp, Homo sapiens
cacttcatagtagacgagttgaatgccaaggatgaatttttagatgtgatctactggttccgacagatcattgctgtggtcctgggt

SEQ ID NO: 704595 - DNA, 98 bp, Homo sapiens
ccttgaatggcgactagatgtacaggttgtctgcattcaaaagagcattctattaaagctaccttaatttggcgcttatttttcttaatcatgtttct

SEQ ID NO: 704596 - DNA, 101 bp, Homo sapiens
tgtcagcatggaaagtcgggggctttcgcccgggtcctcctagaaattccccccgaagaagactcccccacatctggctgctgcagaagaatattttgcct

SEQ ID NO: 704597 - DNA, 86 bp, Homo sapiens
caacagtgtaccagcagggcgttggctatgtgcccatcacagacctgcctagagctggaacgttacctccagagcgagccctgcta

SEQ ID NO: 704598 - DNA, 119 bp, Homo sapiens
gagagtcttaaaatcctgctctggccggattccagactcgtgggggaaaggctgacagaaagaatttactttcaggttttcttacctaaagggagcaaagagaagagcaaaccaatgtt

SEQ ID NO: 704599 - DNA, 75 bp, Homo sapiens
ggcagccaggctgaggcctaatgtcacgagaagagaatgccttctagatgcaaaatcacctccaaaccagaccac

SEQ ID NO: 704600 - DNA, 101 bp, Homo sapiens
gatcacacgcccactaaagcccagaagaatgtggctaccagcgaagaccactaaggcttttcttcctacgatgctggagattaatcatggtcatattgtga

SEQ ID NO: 704601 - DNA, 100 bp, Homo sapiens
caccgccgcacgccccgcctggcgctggctgtcagcctcagcatctgggtaggtgcgctcgctggaggcccacatgtacccggaaaagctcaaggtgatt

SEQ ID NO: 704602 - DNA, 100 bp, Homo sapiens
gaacccgttcgcggtctctcaggttttggagacgacgatctagtggatcttttgcgggacaggaggatgaatttcacccattcatcgaggcacttcttcc

SEQ ID NO: 704603 - DNA, 90 bp, Homo sapiens
ggtgacagttaagacttccttttcacaaatacttggacagttttcctttaatgcagccatttcatgcatcaatggatattcattcagcac

SEQ ID NO: 704604 - DNA, 101 bp, Homo sapiens
gactacaggacctgtctgacgatagtccaaaaactgaagaagatggtggataagcccacccaggaacaggcctttgagagcagccagaagtacaaagaggg

SEQ ID NO: 704605 - DNA, 100 bp, Homo sapiens
caaactgtatggtggagaaagaagtgggaaggatctgcgcgggttcttcgtgaactttgtggttgggcaggatccgggctcagacgtcgccttccacttc

SEQ ID NO: 704606 - DNA, 90 bp, Homo sapiens
ctggcggtcacctggcacaccagcgcccgcaggatgcccaggatcacgcagatttgcgaagccatttcttcacagttgggatgaagcttg

SEQ ID NO: 704607 - DNA, 76 bp, Homo sapiens
acgtgctcttcgctcacctggatgacaacgagaggagtgaagaaaaaatgactgctgcccgcattagaaaatgcca

SEQ ID NO: 704608 - DNA, 100 bp, Homo sapiens
catgaacaggcatctaatgttcttagtgacattagtgttggtgttcgaggaagagacattgttgttcttggtgtggagaagaagtcagtggccaaactgc

SEQ ID NO: 704609 - DNA, 75 bp, Homo sapiens
tttatacagggccgtgatgttggagaactacaggaacctggagtctgtgggatccacctcagaaaaagatggaat

SEQ ID NO: 704610 - DNA, 50 bp, Homo sapiens
gctggctttggcgtatacacaggaccaaactcttacccaggatctactgg

SEQ ID NO: 704611 - DNA, 75 bp, Homo sapiens
tgggcactccagtaaaaatgacatccacacactgttgaaggtccgtggcactcaggtagttggttctgacatgac

SEQ ID NO: 704612 - DNA, 90 bp, Homo sapiens
cgacaagggtgttcccgaactagagtgggtactccaaagattcaggtttactcacgtcatccagcagagaatggaaagtcaaatttcctg

SEQ ID NO: 704613 - DNA, 75 bp, Homo sapiens
aatgtctgactctgactctcggactgagaaacgcaaggctgaccccgcactacatctacccaccagccatcgtgc

SEQ ID NO: 704614 - DNA, 90 bp, Homo sapiens
tcatatgatccatcttagtgaagaattaggatacaggaaggatttgatgccctggatccctttattcccatcctggtttccaactataac

SEQ ID NO: 704615 - DNA, 75 bp, Homo sapiens
aatgtgctttagaagttaaaaagtggcgagtaagaaaagaagctatgatgggtctggctcagctttataagaaat

SEQ ID NO: 704616 - DNA, 82 bp, Homo sapiens
cttctccactttcgccagcccgtgccgcgagcgcggcctgcaggagatggtgtcgggcaccaacgtgtacggcatcctgcgg

SEQ ID NO: 704617 - DNA, 75 bp, Homo sapiens
tgagagaccactctttccccaaagctagcaacatggaccacagatatactggtgactccgctctcctctggccaa

SEQ ID NO: 704618 - DNA, 90 bp, Homo sapiens
tggacctccaaggaagccacgtgcagacatctacaaccttcgatctcctgacgaacagtaaggattgtatcctggagccgctttccctgc

SEQ ID NO: 704619 - DNA, 100 bp, Homo sapiens
agagaaccaccagcattgccaccaccaccaccaccaccacagagtctgtggaagaggtggttcgagctgctctgttaaaagcgaaaatgaaacaattgcc

SEQ ID NO: 704620 - DNA, 80 bp, Homo sapiens
cgccagcctgcgaaggtggcggcgctgctgctcgggctgctcttggaggagcagctgatgagccagatccgggagacgca

SEQ ID NO: 704621 - DNA, 75 bp, Homo sapiens
aagagaagggaatgctaagaactgctgggaggatgacaaaactccccaacttttaaatcatttgaagaaaaggtc

SEQ ID NO: 704622 - DNA, 100 bp, Homo sapiens
taaaacaaccttggtttgcccttatcttgtagacactggcatgttcagaggctgccgaatcagcaaaagttcaaacagaccctccctcagttccaatatg

SEQ ID NO: 704623 - DNA, 82 bp, Homo sapiens
gatccagaagactgtgatcgagcccttaaaaaagtgcaactgacatgggtgaaccccagggatccatgcggattctagtgac

SEQ ID NO: 704624 - DNA, 100 bp, Homo sapiens
ctggcggtttccgaccgttggtgtctggcacgcgccaccccgatgtaccaggtggatgcccggagcataccagtgttagcaaaatggcaaaattcatata

SEQ ID NO: 704625 - DNA, 50 bp, Homo sapiens
caggcatgtgccaccacgcccaggtttctagagccatctgggctttccgg

SEQ ID NO: 704626 - DNA, 100 bp, Homo sapiens
cagaaacatcatccagttttatggagtaattcttgaacctcccaactatggcattgtcacagaattcctggaaaactcaagcaattcgtatttgacttac

SEQ ID NO: 704627 - DNA, 100 bp, Homo sapiens
tctgaaaaaaagagaaacctgggtgaactttcacggacaacctcagaggacaacgaagtgttcgatgaggacggggacttggttgccttttccagtgacg

SEQ ID NO: 704628 - DNA, 92 bp, Homo sapiens
ctctgggtctccaggcccgcgaccgtccgccagtcgtcccgaggcctccggtgtggctgtctctgatggtgtcatcaaggtgttcaacgaca

SEQ ID NO: 704629 - DNA, 100 bp, Homo sapiens
ccttcagtggggctattggactgacttttcttatgctgggatgtgccttagaggattatgggattaaagcaaggagagccaatcatgactggcaaaacac

SEQ ID NO: 704630 - DNA, 78 bp, Homo sapiens
tttaagtctggagcaggcactgagctgtctgtgcgcgttgtcatggatgcactggtagaagatgatatctgtattctg

SEQ ID NO: 704631 - DNA, 98 bp, Homo sapiens
gctcaccaaccgcgtgtgggaggacaggccctcgtccgcagcccccctcccaactcccaaatcccccggcgtcggagatgaggccccggatgctgcca

SEQ ID NO: 704632 - DNA, 97 bp, Homo sapiens
ggaggcgctggcgcaacaggtgcccggcttgcagcgctgggtgcggcggctggaggcggagctgcaacgctacaggctggggtgcaatggtgcgatc

SEQ ID NO: 704633 - DNA, 99 bp, Homo sapiens
ggaggaaggaacgaggcaaggagctaaagcagcgtgcgttcagccctggggatgcctaaatcaaaggaacttgtttcttcaagctcttctggcagtgat

SEQ ID NO: 704634 - DNA, 100 bp, Homo sapiens
tcgaccggcgacagcagccaggagtcatgagcgacagcggcgagcagaactacggcgagcgggactgatcctttgaaatactccagccatgactaaaaga

SEQ ID NO: 704635 - DNA, 82 bp, Homo sapiens
ccggcgcctccactccgtcccccgcgggtctgctctgtgtgccatggacggggccgccttcaacaacaacgtgagcgtggcc

SEQ ID NO: 704636 - DNA, 90 bp, Homo sapiens
ccaggagaagttagcttcagagttctttgtggatggacttgattctgatgagagataccaagtctttatgcttcattcaaatatgcaaac

SEQ ID NO: 704637 - DNA, 90 bp, Homo sapiens
ggagcaggtgcagagcactgcgctgtcagcgatagcccagtggatggccattccagctttccgggccctcctgcagatccgggcggtgcg

SEQ ID NO: 704638 - DNA, 98 bp, Homo sapiens
caacctctcccacaaggatgtcaatttctcagaggaggagttccagaagcatgaaggtggaaaacgaagctcattcccaacgtgcaaagccaaggcag

SEQ ID NO: 704639 - DNA, 100 bp, Homo sapiens
cctgaccattggggtcacggtgtttgccgtggggaagagtgtggccatctggggccgtgtggtatttgccactcaggagacatgtccctatgacatagca

SEQ ID NO: 704640 - DNA, 83 bp, Homo sapiens
aaagatggaagactaccaggctgcggaggagggctctttgtgatggatgaggacgccaccctccaggaccttccccccttctg

SEQ ID NO: 704641 - DNA, 82 bp, Homo sapiens
ggcaggcctgaggtccttgttggctgcttgctggagagcttttagaggaacttgataaaacaccatggcagtatcctccaga

SEQ ID NO: 704642 - DNA, 80 bp, Homo sapiens
agctggtcttctggcggtggatggagccttcacgtaaatgggtccagtcatgcctcccagtaagaagccagaaagctcag

SEQ ID NO: 704643 - DNA, 85 bp, Homo sapiens
tacgagacgtggcctgtggcgctaaccacacgggtccgagtgattggaagctccacattggcactctgccacctggcctcagggg

SEQ ID NO: 704644 - DNA, 100 bp, Homo sapiens
cccgtcttctgctgagtgctgccgccccttcccaggacagcggaggtggaacttcgtcgcgctgcaacccccggctcggttttttgaagggaaggagcta

SEQ ID NO: 704645 - DNA, 75 bp, Homo sapiens
gccatggaggacgagatgcccaagactctgcagattttgacaacaaaccagtaaatggccccaagtcagaatcca

SEQ ID NO: 704646 - DNA, 75 bp, Homo sapiens
tggaaagtcacccaaagccgccccaagtgcaggcaatactgaacactgcgcagcttgcagaggtctcctggcagc

SEQ ID NO: 704647 - DNA, 74 bp, Homo sapiens
aacagtttgtcccagattttcagtctgataaccgtctctggacctctgactgacactgtgcctgcccaggtccc

SEQ ID NO: 704648 - DNA, 73 bp, Homo sapiens
accaaaacaagttctgaaaatggaagttgctgttttgaaaaagctgcaagttgttcttcctaacataaaatca

SEQ ID NO: 704649 - DNA, 76 bp, Homo sapiens
gacaagagcctcatccacaccgtgttgctgcaaaaggactatcagccaaggccacctttgatgccatttctaagac

SEQ ID NO: 704650 - DNA, 100 bp, Homo sapiens
gacaggactttgggtctgggtgagccttctcgtggcggcggggaccgtccagcccagcgattctcagtcagaatgaaactagtgatcgagaagatggcct

SEQ ID NO: 704651 - DNA, 99 bp, Homo sapiens
atcaagctgtctaagtccaaagatttttacccagttaccatggtttgggaccacagagatcacgtcaacaacagcctgttccaaatagtgatgctgtct

SEQ ID NO: 704652 - DNA, 138 bp, Homo sapiens
gactgaaagcactttatcattatgcttcctcaagatcgaggggcttcaggacagtgaacatggagtaagccctgaaccaattcatcttaagattttttcacccaacgttgtcaatttgacacttgtggatttgccagg

SEQ ID NO: 704653 - DNA, 82 bp, Homo sapiens
ggaggcacagctgcagtctgacgagagggggactggtgattgcagctggaagtgcccatgaccgagctggcgtcctccgggg

SEQ ID NO: 704654 - DNA, 100 bp, Homo sapiens
cgaggtggagggtggaacgcgggcgcctgaaggagttgttgtctcggcagcgcccgcggagacgtgaagagaatgctgcgtttttatatggccttggttt

SEQ ID NO: 704655 - DNA, 75 bp, Homo sapiens
tgcagagcagctggcacgtgacttccgcatccctgacaagaggatgaatttttagatgtgatctactggttccga

SEQ ID NO: 704656 - DNA, 83 bp, Homo sapiens
tttcttagccctctacttttcaagacaccaagtgagaggccaaccaggcctaaaggggagtggccccagtggcggtagcggcg

SEQ ID NO: 704657 - DNA, 80 bp, Homo sapiens
ctcaccaagccctgttggagactatgcaaaacaagtttatcaagacagggtcttgctatgttgcccagactggagggcag

SEQ ID NO: 704658 - DNA, 100 bp, Homo sapiens
gaacggagccgccttggcctcggggtctccctacaccaacggggcccagatcattgatctgatgatgctggtcatcgatgtgaccaaggggatgcagacc

SEQ ID NO: 704659 - DNA, 49 bp, Homo sapiens
cctggatccaggataacggaggctgggtcccccccgcctccagccagcc

SEQ ID NO: 704660 - DNA, 100 bp, Homo sapiens
tagcagaaaccctgtctttcaggattcctgggacacagagtacatgttggatgctgctaggaatttgcaacccaatttatatgtagtagctgaactgttc

SEQ ID NO: 704661 - DNA, 112 bp, Homo sapiens
ggatgatgtgcttggtggagcagctgcctgggagaatgttgactctactgcaggtggaaccgtcccaaaatgtcccttgctcagaagaaggatcgggtagctcaaaagaagg

SEQ ID NO: 704662 - DNA, 100 bp, Homo sapiens
cggcgttatgacaggaagcagagtggctatggtgggcaaactaagccgattttccggaaaaaggaaactagcagagttgttcacatcatggattttcaac

SEQ ID NO: 704663 - DNA, 82 bp, Homo sapiens
cagcacgagcacgtagcaggtctccttgcaagacttcgaaaggtagttgatgtcacttggcgatattcctgcaaacatgaag

SEQ ID NO: 704664 - DNA, 75 bp, Homo sapiens
aaagaattgaaaccctccaaaccacgtcatctgattgtggcgacgtctgaaagcccagatgattgagaaaaggtc

SEQ ID NO: 704665 - DNA, 116 bp, Homo sapiens
aggaggcagtgaagaaagtgattgcatcgatgaccgtgggcaaagatgtcaggttgcaaaagcttctcatttcagagagatgccaggatcctaagtgcctgccaaacttaccaatt

SEQ ID NO: 704666 - DNA, 100 bp, Homo sapiens
atcatcagaggacaagtccccagagtatttctatgtgggtaaaaagatggcctatcagaaggtccatgcagatcaaagagctccaggacactcacagtac

SEQ ID NO: 704667 - DNA, 100 bp, Homo sapiens
gacgccaggatttcctggaagcagagaaatgggcggaccgccacctaccgcggatgcttccgactgccagagaacatcacacatgccttccccagctccc

SEQ ID NO: 704668 - DNA, 82 bp, Homo sapiens
gcctacgcagagctcatcgtccttggctcggacatcatcatgcagctggacgacgtggttagcagtactgtgactgggccac

SEQ ID NO: 704669 - DNA, 82 bp, Homo sapiens
aacgaggcaaggagctaaagcagcgtgcgttcagccctgggagcactacaaacaccactggtttcccgaaaagccgtccaag

SEQ ID NO: 704670 - DNA, 101 bp, Homo sapiens
tgtcgggttattcgagtgaccgagaccgcggccgggaccgaggagtgaagacatttccacctggacacctgaccatgtgcctgccctgagcagcgaggccc

SEQ ID NO: 704671 - DNA, 100 bp, Homo sapiens
gaagaggaagaccctcctgccaaaaggaaatgcatctttatgtcagaaacacaaagcagcccaaccaaagggtctactctgtccaggtgctgcaacgccc

SEQ ID NO: 704672 - DNA, 82 bp, Homo sapiens
tcacatcaacttctaccagctggatgtcctggaacaggtggaggcctatcaagctgaggctcgtgaggctctggccacactg

SEQ ID NO: 704673 - DNA, 117 bp, Homo sapiens
cagagtcctacagtggcaggtaatggagccagtactttgacagcaggttgcaaagattacattgcagtgaaggagaagtatgccaagtacctgcctcacagtgcagggcggtatgcc

SEQ ID NO: 704674 - DNA, 74 bp, Homo sapiens
aactaggatgtcccgacatgaagcaggcttatggctatgggccatacggtggtgcgtacccgccaggaactcaa

SEQ ID NO: 704675 - DNA, 100 bp, Homo sapiens
cccctgcaggaactctacaacccaatccagagtgtgaacatggctacgcctcttcattcccgtccatgccgagcccccgactgcagcattcaaagccccc

SEQ ID NO: 704676 - DNA, 75 bp, Homo sapiens
gttctcattactgccagggctgtgcctacaaaaaaggcatctaataggattcaggaatcaaagaatcagtgtact

SEQ ID NO: 704677 - DNA, 83 bp, Homo sapiens
ctttccactgaggatgacgggacagtggccttcgcgctaacgaagataacgaaggaggcccaacttcattcaataaggagcct

SEQ ID NO: 704678 - DNA, 75 bp, Homo sapiens
acgatctccatatttcattgcaagcttttcaggatgtccagcaaagaatcctgtgggaaaaaagagacatctcag

SEQ ID NO: 704679 - DNA, 99 bp, Homo sapiens
agtgtgtgtgcgaacgggaacagagacgcaagccaaattcacctccgtggagctgctcagggaatacatttcgagtaaaggagtttggaattagtccat

SEQ ID NO: 704680 - DNA, 83 bp, Homo sapiens
ccgggggcgccatggcgaccggagcgaacgccacgccgttggcatctgtccgatctttcctgtttcccccactccattccctt

SEQ ID NO: 704681 - DNA, 100 bp, Homo sapiens
tatctcccccatctcattgccacggctgaaccctccttctcaatcttggaacagcacccccttctttaagaaggtagaagatagcaccatgccgattcgt

SEQ ID NO: 704682 - DNA, 100 bp, Homo sapiens
tggaatgatgtcgtcagtaatgcctggaatgatgatgtctcatatgtctcaggcttccatgcagcctgccttaccggtttggaaagaaatcccggcctgc

SEQ ID NO: 704683 - DNA, 117 bp, Homo sapiens
gttatattccatctactgtctttttcttcaatgggcagcatatgaaagtggattatggagacgagttgtactgctgtcacaggaaatggacgctggattacaagcatggcagctcag

SEQ ID NO: 704684 - DNA, 100 bp, Homo sapiens
agaaagcgggcgagcagcagttgagcgagcccgaggacatggagatggaagcctacaacacagcagtcccctcaggatgagcaggaaaagctcttggatg

SEQ ID NO: 704685 - DNA, 101 bp, Homo sapiens
ctcagaaattttggaaaaagttacatgtgaaagaagatatattccaggatggcaatggctatattagtgctgcagaacttcgccatgtgatgacaaacctt

SEQ ID NO: 704686 - DNA, 100 bp, Homo sapiens
gtggccggatggggcaccttcataaaggagtctgtgcagaagaacgaattcatttctgaatactgtggtgagactctgtccctacctgtggttgtcatcg

SEQ ID NO: 704687 - DNA, 82 bp, Homo sapiens
tgagaacttggagcttcggaagaaggtagaggttctagagaacactaatagcatcgagagtaaacatgaggttacgatcctg

SEQ ID NO: 704688 - DNA, 100 bp, Homo sapiens
cccttgcgcctgcctctccaggatgtctacaaaattggtggtattgatgaagatgaccctactgctgatgataccagtgctgctgtaactgaagaaatgc

SEQ ID NO: 704689 - DNA, 83 bp, Homo sapiens
gtggggctcacggcgcctgccttggcgctggccggctacatcgaggtctcttgtggctcagagcataatttggcaataattgg

SEQ ID NO: 704690 - DNA, 90 bp, Homo sapiens
ttgaggatcgaatcttcactcccgctgtctcagcagtctacagcacgggcctgtcctcccaaagccaactctaaggagaggagaggaaga

SEQ ID NO: 704691 - DNA, 100 bp, Homo sapiens
tgaaagctgagctaggaattcccttggaagaggagcagtgaggagaatgaataccttccaagaccagagtggcagctccagtaatagagaaccccttttg

SEQ ID NO: 704692 - DNA, 74 bp, Homo sapiens
tgtggggacagggcgacgtgtgtccaggcgtttgccgatctgactgcagccatgagcagcaatgagtgcttcaa

SEQ ID NO: 704693 - DNA, 75 bp, Homo sapiens
cccgggatcccagagctacccttcttggagcccacagggtgcatcccaggcagctcttagtgtggagcagtgaac

SEQ ID NO: 704694 - DNA, 75 bp, Homo sapiens
agtgacggggactggatttgccctgacaaaaagagaactgcttatctgtgcagcaatctatccgagggcctttgg

SEQ ID NO: 704695 - DNA, 75 bp, Homo sapiens
gacatttgctacagcatcccacattaagtcaacggctgctcccggcagatcggcttctcctttgtacgacccaag

SEQ ID NO: 704696 - DNA, 50 bp, Homo sapiens
tgtacctggtctctcctttggagaatgtcttattagtaggtaagaaacag

SEQ ID NO: 704697 - DNA, 116 bp, Homo sapiens
ctttgaccgagaggctgctggagctcgtgtttggacgccttagaccatgctcagcctccaagcagccttgtcatcgacaaagaatctgaagtttacaagatgcttcaggagaaaca

SEQ ID NO: 704698 - DNA, 51 bp, Homo sapiens
gcagtgctcaaactcaccgaccagtttgctaatccagactttacacaacct

SEQ ID NO: 704699 - DNA, 82 bp, Homo sapiens
cccggaaatgtccggcaagatcgagaaagcagatctgcttggctttgaggaagagtggcagtactgcctcactgcataaggg

SEQ ID NO: 704700 - DNA, 100 bp, Homo sapiens
taacattccaacacataaaaattatttatccaacagctcctcccagcaatttcctgctgcagagagcattttaagaaaggacagcattcctgtgacctct

SEQ ID NO: 704701 - DNA, 101 bp, Homo sapiens
acagcgccttcctcaacgacgcggacatggtcatgagctttgtgaacctgggaggccccgtgtgggccgcggcccggccctcaccatggagtccatgttcg

SEQ ID NO: 704702 - DNA, 100 bp, Homo sapiens
gaagttgtgtttcgctattgcacgaagttcagcccagaggagaaactcgctcgccttcagaagacagactctgctaacaccagatagtggaaagaaacca

SEQ ID NO: 704703 - DNA, 83 bp, Homo sapiens
ccggtgccttttggctgtgcgaagcctccgcagggttctccaaaaaatgtggaatcctttgcatctatgctgagacattctcc

SEQ ID NO: 704704 - DNA, 82 bp, Homo sapiens
ctacaccccaatcaccagttccgtgtccactatccgacagtatccagcttcgcagaatcaagaacggctatgtgcgtttaaa

SEQ ID NO: 704705 - DNA, 75 bp, Homo sapiens
gttggagctttgcagctgacctacatctcgaaggaggcatacaccatacatggtacagccagagtaccgaatcta

SEQ ID NO: 704706 - DNA, 80 bp, Homo sapiens
ctgactgcgagaaggtggctgtggagttcgggaaccagctggagacgcaaacatgcagatctttgtgaagaccctcactg

SEQ ID NO: 704707 - DNA, 100 bp, Homo sapiens
gggtgaagtggcaggaggaggaggaggggctccggctggtctgtggtgagggagccccagactctggtaaatgctctgcttcctcctgcctggatacttc

SEQ ID NO: 704708 - DNA, 75 bp, Homo sapiens
ctaaaaggatatgtgttgctaatacccatctttactggcatcctaaagcttcccctaaagtacgactgagcttgg

SEQ ID NO: 704709 - DNA, 100 bp, Homo sapiens
cacagcagcagctggatattgagccggatagacctattggatatggagcctttggtgttgtctggaatacggggtgctttgcattcaggaatacagaaaa

SEQ ID NO: 704710 - DNA, 101 bp, Homo sapiens
agagccgacggcaggcgctggaggcccgaagacgccgaggaggcagagcaccgcggcgccgagcgcagacccgagagggatgtttgtattcatcaagacaa

SEQ ID NO: 704711 - DNA, 75 bp, Homo sapiens
caagcattggtatctacggcctggacttctatgtggatgagctcaggtttctacaaaaatgtggtgaagattcaa

SEQ ID NO: 704712 - DNA, 98 bp, Homo sapiens
cgacaccctgcgccggggcctgactgcccacggcatcaacatcaagatcccaccaaatattttggttgtgagctgggagcacagacccagtttgatgt

SEQ ID NO: 704713 - DNA, 100 bp, Homo sapiens
gtggagattatacatctctcatcatttcagcaacaaggaaataaattagtggcagagtaagggtgacttgggaactctaatgatccaggacaaagaagtt

SEQ ID NO: 704714 - DNA, 89 bp, Homo sapiens
catctaaagcaccagtaaaatatggtgaactcattgtcttaggccccgacgaagacccatcatgagcaaccacacagctacgcacattc

SEQ ID NO: 704715 - DNA, 100 bp, Homo sapiens
tccctggccggggcgcagttcggaggttcagctctgtgggcaccttcgcacgggccctggactgcagcagctccgtccgacagcccagcctgcacatgag

SEQ ID NO: 704716 - DNA, 83 bp, Homo sapiens
gtgaagagaggttttgaattcacgcttatggtagtgggaagtcctggctgagcaaggttggaagccctagttctcgcattgac

SEQ ID NO: 704717 - DNA, 75 bp, Homo sapiens
tgtgcagactcagactggccaaaattcaatccctgctttagctcaggcccagaataaagagaccagtgttttagc

SEQ ID NO: 704718 - DNA, 88 bp, Homo sapiens
ttcgaagtggctgtgggtattgctgcggctggtgcgtcgtcgctctagcacctgtggaatcctctcaagaggaacagtcattgtgtga

SEQ ID NO: 704719 - DNA, 90 bp, Homo sapiens
tctactcataaatcaagtgataataaactagaggagatcttggcatatacagaagggctgcatggaaaatggctgttcacagagatacga

SEQ ID NO: 704720 - DNA, 90 bp, Homo sapiens
ggagagagaacctgtggagtacatgaacttatctgtattagaaaagggatctcagtgtggatgctggcttgagtcctgctcagttccagg

SEQ ID NO: 704721 - DNA, 87 bp, Homo sapiens
gaagcacccgacattcccctaaggagagtccacagcaggggcgacgcttcagagactgacaacctctgggctgatggggaagatgga

SEQ ID NO: 704722 - DNA, 75 bp, Homo sapiens
acagcagtcaaaatggagctgatgaccaaagacatatctgaagagatggattaagaatgctttggattaaggatt

SEQ ID NO: 704723 - DNA, 50 bp, Homo sapiens
cagcacaggacctggaaaaattacatgcaagagggcacattgggagattc

SEQ ID NO: 704724 - DNA, 97 bp, Homo sapiens
ccgaagccagcatgatctccaagttaaaggcctatgagagctacaagaagaaggactacacccaggtggactacttaatcaacgggatgtatgcgga

SEQ ID NO: 704725 - DNA, 101 bp, Homo sapiens
tgtcttcagatcttcacagcacagttcctgggaaggtggagccaccagcctctccctggttgattcacaaaaggctgcaacaaagcaagtcaacaaggcac

SEQ ID NO: 704726 - DNA, 75 bp, Homo sapiens
ttgcaaaatacagccctggagatctttatggcaaacagagttgctgacggtgcacggacgcaccaaggagcagaa

SEQ ID NO: 704727 - DNA, 100 bp, Homo sapiens
cctcaagctgtgaagttcctttacactgggtgtgtaagaagatcatacatctgtcggtggcctgggagacagtttttatgaatacttactgaaagcatgg

SEQ ID NO: 704728 - DNA, 100 bp, Homo sapiens
tcgtgttccaaatcatcgcctttctggtgggaggcttgattggggatggccgcttccattcagcactgccacccagagaactgctggtgaggactgccgt

SEQ ID NO: 704729 - DNA, 100 bp, Homo sapiens
gcggaggacgacgcgctcaaccagatcgcgcgggagtggcaaaaatagaatgtttgaagtcattggagagaccctggagcacgatttcccaagctggatg

SEQ ID NO: 704730 - DNA, 110 bp, Homo sapiens
tgcctgctaacatggataagcatgccctgaaaaagtatcgtcgagaagcctatcatcggtccatgaaagacctcctcctccttctccacctccctctacaatatatgagt

SEQ ID NO: 704731 - DNA, 98 bp, Homo sapiens
aagaaactgcaaaggatgaagaggaagagcctcccagcatgactcagctacttcgagattttatagctaccttgggaaaactttcaggattacatggc

SEQ ID NO: 704732 - DNA, 100 bp, Homo sapiens
gaacgactagtggtcgtggctgaacattgtgaacgtagtctggaagacttgcttcgagaaaggaaacctgtgagatgcatcatcccattcagatgaaacc

SEQ ID NO: 704733 - DNA, 82 bp, Homo sapiens
aacagtgtaccagcagggcgttggctatgtgcccatcacagacctccgggagagcctggaggagatccttcccaagctgcag

SEQ ID NO: 704734 - DNA, 83 bp, Homo sapiens
actacagagtgtgccaaagttctgttttccctttgacgttgaaagtctcctttagcattggaaacaccaaatcgggtatcctt

SEQ ID NO: 704735 - DNA, 100 bp, Homo sapiens
gtgagaaaggcccacctgtgtcctggttgagggtctccagggttctttggggcccgagcggacaaggcaaaatctcagcaagttcggacctctagtacaa

SEQ ID NO: 704736 - DNA, 100 bp, Homo sapiens
agttcaatcacttggcgtgacttcactacttttaagcaaaagacgtggggtagagcagcggctgccatgctcttctgtggcttcatcatcctggtgatct

SEQ ID NO: 704737 - DNA, 75 bp, Homo sapiens
gttcgacgtgcggcccgaatgccagcgcctcttctaccggggcaagcagagtggagactgctgcacggactctgg

SEQ ID NO: 704738 - DNA, 51 bp, Homo sapiens
gctgcaacacaagatcaagaactccatctgatgtgcctggcatcagaaggg

SEQ ID NO: 704739 - DNA, 100 bp, Homo sapiens
aacgttgcaaactctggaaaaaaacttgggtatcatttaaaggatgtgattgttggaaaaatttacttcttattagtaagaataaaaatacaacatatgg

SEQ ID NO: 704740 - DNA, 88 bp, Homo sapiens
tgtagagaggaccccggtacatctgaaagccgggaaatggcggcggcggcggcgcccgggagccggagccttcgcggcgtccacgtcc

SEQ ID NO: 704741 - DNA, 90 bp, Homo sapiens
tcgcgttcatgtggctcctggacaagagaggatgtgggctctcttgatgagaagatgaagagcttggatgtgaatcaggactcggagctc

SEQ ID NO: 704742 - DNA, 100 bp, Homo sapiens
tgctggcgctctggctgtgctgcgcgacccccgcgcatgtccacaggtcctggctaccctgggaagagacaagaagtaaatgaagaaagaggaagattcc

SEQ ID NO: 704743 - DNA, 73 bp, Homo sapiens
gctgccccgcaacctcaaccctggcatggcatatctcacagatttcctctgccagtttgctcagcagccctgc

SEQ ID NO: 704744 - DNA, 100 bp, Homo sapiens
aggatgggaaaccacgcaggcaaacgagaattaaatgccgagaaggccagtacggttatcctgaatacatgtctaacaattttccttgcaacgttagctg

SEQ ID NO: 704745 - DNA, 100 bp, Homo sapiens
ataggctgcgctaccggaatgtcatccagcgagtgattagcttgatgtagttttagagaccaatctggcaacaatccgggttctggaagcaatacagaag

SEQ ID NO: 704746 - DNA, 75 bp, Homo sapiens
ttgcctacagcacggcgacaatacccaaagacagagagaccaggccaaaacagcttcatgaaatcccagcctttt

SEQ ID NO: 704747 - DNA, 99 bp, Homo sapiens
aagcaaccctgacttcttgaagaaagacagatcctgtgtcacccggcaactcagaaacatcaggtccaaggacgcgccagcggagctccggctccttcg

SEQ ID NO: 704748 - DNA, 49 bp, Homo sapiens
gaaccggcactgtgagaagatgagtgttgaaaagatagacctgaaggga

SEQ ID NO: 704749 - DNA, 100 bp, Homo sapiens
aagcgaccaaagcgcctgaggaccggcaacatggtgcggtcggggaataagactgcctgcgctgctgacttaaggccccaacaccaaacacagaagcaac

SEQ ID NO: 704750 - DNA, 75 bp, Homo sapiens
ggctcacctgtgcgggatggaacaaaaggaccttttaccaatttgaggctgcgtgggacagctccatgcacaact

SEQ ID NO: 704751 - DNA, 101 bp, Homo sapiens
ctgttttggaactgtcaggtacctcaaagcgccgcagcctgggattccccagggacccccccggagccgccgcgtctcccatggacttgcccggggactcc

SEQ ID NO: 704752 - DNA, 90 bp, Homo sapiens
gctggacagctagctgcttatggctataaaattacaggttgctccgactgtgtgttccaggagtggtggctctgaggtgtgaccctgccc

SEQ ID NO: 704753 - DNA, 88 bp, Homo sapiens
cctcacggagctgggcgacgagctgaccctgggagacatcgacgctctaaccatggaatactgggaatgtccctttctgtgaaggagg

SEQ ID NO: 704754 - DNA, 98 bp, Homo sapiens
gagctctaatgacaagctcatgtacaaaattacaagtggaaatccacaaggattcttttcaatacatcctaaaacagctctagaggacaaaatcccag

SEQ ID NO: 704755 - DNA, 87 bp, Homo sapiens
caagtttgacttagctgctcgcacactgctagcaagagcaggtacatcaggaacgtctctatcaagaatacaatttcagcaaggctg

SEQ ID NO: 704756 - DNA, 100 bp, Homo sapiens
cgtgcttaaattagtgaacttttgggcaccaactggtcgatttaccatagaaattggtagttgctgcaaaaagagtgtatactcttgatgtaccagatgc

SEQ ID NO: 704757 - DNA, 75 bp, Homo sapiens
tttttctggaatgtcattatcagacacaatggagagaagcctcatcagtgccaagtctgtgggaagaccttctct

SEQ ID NO: 704758 - DNA, 98 bp, Homo sapiens
aatttcatggagaagaaggccttgactacggaggggttgccagggtgtcagtgtggaggcagttgatccagtgttccaagctaaaatgttggatatgt

SEQ ID NO: 704759 - DNA, 83 bp, Homo sapiens
gagagtcctggtgactttgaacatgctggtgccgctagccaagctgtcctgcctgggtcagtcttcactgtttccaatggaag

SEQ ID NO: 704760 - DNA, 90 bp, Homo sapiens
gcatcccaggacctaccagaatctgtaagactttgaccccgacgcaggcttcagtgattgccgcggatcagaagcctgagcactttggct

SEQ ID NO: 704761 - DNA, 100 bp, Homo sapiens
actaaagcttgacggcttggacgaagatggggagaaggaagcgagactcatacgcaacctcaatggcacagagacatctaccaatctccaccaaaagctc

SEQ ID NO: 704762 - DNA, 75 bp, Homo sapiens
tcgctgcatctttctcatgaagcacggggaacgggtcggatgtgaaactggaacgccaagctgaagaagaacgaa

SEQ ID NO: 704763 - DNA, 82 bp, Homo sapiens
acgaggacgcggactgcgaaggcagcattttgaaagcgaagcagaagccgtagaatcagcggcgagcctgttgaaagaaccc

SEQ ID NO: 704764 - DNA, 100 bp, Homo sapiens
aatcaatacgattggaaccagcacaagtacaaatatggtgtaagatacttcttcaagattggacagctggggaccttcttctgattaaccttaaaccaac

SEQ ID NO: 704765 - DNA, 100 bp, Homo sapiens
ggagcagctgctcaagtactcgccggacccggtggtcgtccgcggctccggtcacgtcaccgtatgacctgagaattaatttatggcacttagaaatcac

SEQ ID NO: 704766 - DNA, 100 bp, Homo sapiens
gctcctgctgcacatgtatgacagtgacaaggtgagaagccctaccactgcaactgggacggctgcggctggaagtttgcgcgctcagacgagctcacgc

SEQ ID NO: 704767 - DNA, 101 bp, Homo sapiens
ctttagccatgtggatacctacggagcacgagaaatacggcgtgggttgatgagaacatgaaggtagcacagaaaagagatgctgtcttgcagggaatgtt

SEQ ID NO: 704768 - DNA, 100 bp, Homo sapiens
cacacgacgtgcgctatgggtcagctcagggagccaatggtactctggagaacccagccctggacacaagtctgttggaggaatttctgggcaatgactt

SEQ ID NO: 704769 - DNA, 73 bp, Homo sapiens
ttccatcatggcgtcaatgcagaaatgcactcggtgatggaaagagagccactattctgaagaacacttggcc

SEQ ID NO: 704770 - DNA, 101 bp, Homo sapiens
tagacacatcagtggagtccatgctacctgattgcccccgggtctcagcaggtgtcatcaatcttacagaagaagtgctgtgggtcaaagtgaatataaac

SEQ ID NO: 704771 - DNA, 100 bp, Homo sapiens
ttccagcactggactcatggaggctgagcatttattcagggtaagaaggtggatggctctgtaaatgcctatgccataaatgtctctcagaagaggaagt

SEQ ID NO: 704772 - DNA, 74 bp, Homo sapiens
gcgtcaccgccgcggacttcgctttgggccatgaccaggaagaagaccttcgtcagatcttcatgttaactgtt

SEQ ID NO: 704773 - DNA, 75 bp, Homo sapiens
tgactgcacttcttttttgagaaaggaaggaatatatcctgactgattgctactctgaacgcccggacgtccatt

SEQ ID NO: 704774 - DNA, 51 bp, Homo sapiens
gtggacagatctgagagatactgagggagtggagcttggtttcgggatctc

SEQ ID NO: 704775 - DNA, 75 bp, Homo sapiens
cagcaggttgggagatggcaaagacatcttctggtcagagatacttcttaaaaacagtgctcggcatggcaggga

SEQ ID NO: 704776 - DNA, 88 bp, Homo sapiens
cctctgcaacgggctcatcaactcctacgaggacaaaagcaacgacttcgtatgtactatactggcaattgctggagaagattttgca

SEQ ID NO: 704777 - DNA, 74 bp, Homo sapiens
gaaagaaattattgataccaatggagctggagatgcatttgttggaggttggaaaagagactgttcaaaccact

SEQ ID NO: 704778 - DNA, 98 bp, Homo sapiens
cttcaagaatacaccttggcccgaggctgaagccattgctccacaggttggcaatggcatagaatgtcaagctaaccaggcgtccgctacttcagaag

SEQ ID NO: 704779 - DNA, 102 bp, Homo sapiens
tgttgatataaatagtgtggttagggcgggtctcgggaactgccatggagtgaagtgttgagtcaagtcttcaccacttgctggttcccaggagtaaacttg

SEQ ID NO: 704780 - DNA, 50 bp, Homo sapiens
tccggagagtggacaagaaaattcttcgctgctgctgccttaccgccgag

SEQ ID NO: 704781 - DNA, 75 bp, Homo sapiens
gcttgatatcacagaggaaactctgcattctcgcttcctggagggtctttacggaataaaggatgatgtcttcct

SEQ ID NO: 704782 - DNA, 100 bp, Homo sapiens
ttcggcggcgggcgagtgactgcggccacgcctgaaaggcgactctccttgatcctgccatgaagcagtttctgctgtacttggatgagtccaatgccct

SEQ ID NO: 704783 - DNA, 50 bp, Homo sapiens
ccaaggacaaccctggcagcatcgggaagcttcggaaccaaaaagaagct

SEQ ID NO: 704784 - DNA, 100 bp, Homo sapiens
tgcgtgtgcagcccgggatatgagcctgtttctggggcaaaaacattcaagaatgagagcgagaacacctgtcaaggtgagcgagtgctgtgctttcatg

SEQ ID NO: 704785 - DNA, 75 bp, Homo sapiens
gccggcaccaccgctgcaagagccgggaacttgctactaccagcaccatgccctaccaatatccagcactgaccc

SEQ ID NO: 704786 - DNA, 75 bp, Homo sapiens
gatgagagctgacttgcgcattgctgcctgccttaggaagaatacaagcgattgagtgaagcactagcagaggat

SEQ ID NO: 704787 - DNA, 80 bp, Homo sapiens
agatcttgactgcatttttgggaaaagacagagtaagaagactcccgagctttgaaatatcagtgatgtataatgaatct

SEQ ID NO: 704788 - DNA, 50 bp, Homo sapiens
gggacctgaagtgcagacccctaagctggaaccagtgggccgcaagacta

SEQ ID NO: 704789 - DNA, 95 bp, Homo sapiens
tagccagcagacccagctacgtggactagagggggattcccgaagtcttccgttttctgagaatgtgagtgctgttcaaaaattagacttttcag

SEQ ID NO: 704790 - DNA, 100 bp, Homo sapiens
agggtcaagtcgtgttctgatcactactgacttgttggggcaagattcttgccaagagaattaatgtgcgtattgagcacattaagcactctaagagccg

SEQ ID NO: 704791 - DNA, 100 bp, Homo sapiens
cagctgacagcccttcctgacgatctggggcagctgactgccctccaggatcttgtgctgtgaagacatttcccaagtgcttcatgttagccagcaaatc

SEQ ID NO: 704792 - DNA, 50 bp, Homo sapiens
aggagaacgacggctactttcggaaggatcactactcttggaatcaaaga

SEQ ID NO: 704793 - DNA, 75 bp, Homo sapiens
gcctcccagagaggggagccggcgaggatcaaaatcttcgaaggaggatgttgatcttgtctcagaatattgccc

SEQ ID NO: 704794 - DNA, 75 bp, Homo sapiens
gctgtttctcatctttatactcttccagggccaattcctgtccccccagcagcatggcatcgtgtgctgaaccct

SEQ ID NO: 704795 - DNA, 100 bp, Homo sapiens
atatgctggagagctgtctcccacgtgcattttcccaagggctgaaaacacagttaaatcactttcaaagttaaaagactattaagaacacaagatgggg

SEQ ID NO: 704796 - DNA, 100 bp, Homo sapiens
caccgccgtgctgggcaatcagtccaagctcaccttaaccccatgggtcggccttcggaagatcaatgtgtcctactggtgctgggaagatatgtcccca

SEQ ID NO: 704797 - DNA, 75 bp, Homo sapiens
gacacccatgccttacgacttacaagaaatcacctgcccaccaccccctgttatctacaatggggcacacaccgg

SEQ ID NO: 704798 - DNA, 100 bp, Homo sapiens
ggaggagacggcggccttcgaggaggtcatgaaggacctgagcctgacgcgggccgcgcggactggacgccgggcatggcagtgccacgggacattgcag

SEQ ID NO: 704799 - DNA, 100 bp, Homo sapiens
aagaaaagaagaaaatgattgaaaatgaaaagctgacaatggaactgactggaggtagctttgcagtttggggagggctgttttccatgattgactgtag

SEQ ID NO: 704800 - DNA, 83 bp, Homo sapiens
aaagaatcccggccagacgtgcgaacagctccagctggattctcctgagaatgatattcctatggagatcaccacggcagaac

SEQ ID NO: 704801 - DNA, 100 bp, Homo sapiens
cttccatatccgggtgcggctccaccccttccacgtcatccgcatcaacaagatgttgtcctgtgctggggctgacagatttattccccatgtttacaga

SEQ ID NO: 704802 - DNA, 100 bp, Homo sapiens
tagtctactatgacctcgttgtgagcctctgaacgattttgacactttcccgaggcctagggttgcacgttttcaaaaaatacctaatggtgaaaatgag

SEQ ID NO: 704803 - DNA, 82 bp, Homo sapiens
agtcttctctgcatcccagccatcacctggatttacctgttttctgggagcttcgaagctgtttgcagacaaggtcccaaag

SEQ ID NO: 704804 - DNA, 100 bp, Homo sapiens
cacaagaagaggattggaaccagttccgatacagcacaatgagaccgtccaggctggacttgaactccttcctcggctgaagtgatcctcctgcctcagc

SEQ ID NO: 704805 - DNA, 74 bp, Homo sapiens
ggtacctgctccgacggcgaagaaatgtccatgacctccctcaggcgagttcctggggaaaaccccagggcaaa

SEQ ID NO: 704806 - DNA, 102 bp, Homo sapiens
gaggatgacggagctgcagtcggcactgctactgcgaagacagctggcagatgccttcaattaagttgcagagttctgatggagagatatttgaagttgatg

SEQ ID NO: 704807 - DNA, 100 bp, Homo sapiens
cagccacgagggtatgaatgccgggatgctgtgaacgagtgtgatattactgaatattgtactggagactctggtcagtgagtgggtaaaaagagaattt

SEQ ID NO: 704808 - DNA, 80 bp, Homo sapiens
tcaccagtcagtgtttgaaggagaagagagcaagcctcttagcaaatatccggctgtgatcaatgatatttcattctggt

SEQ ID NO: 704809 - DNA, 100 bp, Homo sapiens
ctccaacccttcccaccgtatccagtgtgcagcaggctacgagcaaagtgaacacaacgtgtgccaagctgttgaaggaggatgttcccatcttggtcag

SEQ ID NO: 704810 - DNA, 100 bp, Homo sapiens
ctaatgtctataaagccagtatgatagcaatgatggcaggttttacaactgcctacagcatgctttggaaagggaaacgatgactaacttacatcccaag

SEQ ID NO: 704811 - DNA, 74 bp, Homo sapiens
aaacataagttggaggttctggaatctcaggttcagaaacagcatatttagaaaacagatctaattctagacct

SEQ ID NO: 704812 - DNA, 90 bp, Homo sapiens
agatagtggaaagaaaccatgtgctgaaatgtttgacgacactgatggtttggccatcgaagacggcaatttggaggaaatggaagagga

SEQ ID NO: 704813 - DNA, 75 bp, Homo sapiens
ccggcccggacatggccgccaacatgtacagggtcggagcacccaccaaggctccggatgtgttccccatcatat

SEQ ID NO: 704814 - DNA, 101 bp, Homo sapiens
ggcgcggacgcgcagcatggcggtggaggacgaggggctccgggtcttccagagcgtgaagatcaagatcgggcaccatgccggtggaaaggatgcgcatg

SEQ ID NO: 704815 - DNA, 101 bp, Homo sapiens
ggcgcggggaagtcatgctcgcttcacggaggcaatagctagccggtctgaaggggcgtctcgattacctgagctctctgaaggtgaagggccttgtgctg

SEQ ID NO: 704816 - DNA, 74 bp, Homo sapiens
gaccagaagaaactgcaccggaaatgtgcctaccaggcgggagtcatggatgtagatgctgaaagagagaagat

SEQ ID NO: 704817 - DNA, 82 bp, Homo sapiens
aatgaaacaagcctttgctgaattggagagctgtgaggaagggaaactgtctacctctcaagatgctgcttgtaaagacgca

SEQ ID NO: 704818 - DNA, 75 bp, Homo sapiens
agcgtttcagttttggtcatcggaagtggtgccttcagcacaggagccaaaaacctgtatatcatctccgtgaag

SEQ ID NO: 704819 - DNA, 126 bp, Homo sapiens
caggcgccgaggaggaagagcgagcccggacggcgcctctcgaacgagtgtgggcgcgaggcagccgcttacaaacacgcagatggcaagaagattgatggcaggagggtccttgtggacgtggag

SEQ ID NO: 704820 - DNA, 90 bp, Homo sapiens
ctgtcttgcccgagccaaggagaggtggcggtcccttagcacaggaggctctgaagtggagaacgaagatttttgcactgagtggccagc

SEQ ID NO: 704821 - DNA, 76 bp, Homo sapiens
acaggctgaggacgactttatgaccaagagctgaacaagacagaatgttgctgcgggatgtaaaagctcttaccct

SEQ ID NO: 704822 - DNA, 82 bp, Homo sapiens
cccagatccatttacactttacaaaatgaagctgttgtcatttctggaaggaaactggcccagcagatcaagcaggaagtgc

SEQ ID NO: 704823 - DNA, 82 bp, Homo sapiens
cgagatggacagcgtgctgatgaagatccacacctcactgcagtcgaagactgaggctgatgtgaatccaaaggcctatccc

SEQ ID NO: 704824 - DNA, 75 bp, Homo sapiens
ggaacatggctagcaggaatgcttactgttgcgtggttcgttattaacagagagacatctccccatacatttcaa

SEQ ID NO: 704825 - DNA, 98 bp, Homo sapiens
ccgtcccgacccgggccccgccatgtccttcttccggcggaaagcacccagtcagcttgaagagtttcaaatggaccctaccactgagaaatcaagat

SEQ ID NO: 704826 - DNA, 75 bp, Homo sapiens
ttttcagccgtcaccaccatcacaaaaggtaactaggatttctacctcaaccgcgagacctatgcaaggacggtg

SEQ ID NO: 704827 - DNA, 101 bp, Homo sapiens
tgtccccagagctgagaacagtgcctaaagcacaacagacactgatctcatggtggatgttcctggacatggaaaggtgatggtggacattgcatatggcg

SEQ ID NO: 704828 - DNA, 100 bp, Homo sapiens
ctgagggtggcggcggtcgacatgttccaggtcccggatagcgagggcggccgcgccggctccagagacacctatggctgccgatgaaggctcagcagag

SEQ ID NO: 704829 - DNA, 96 bp, Homo sapiens
gtactccctggtgctcatccccaaagccaagccactcactctgctctgggacaagttggatggcttgaggactggtactaaaaggaaacgtgactg

SEQ ID NO: 704830 - DNA, 90 bp, Homo sapiens
ttcaggtgctggaaaggaatgaggagttacagagggccgagaaggacaggatcagcttcggggagttttgcctggctcacctgttactga

SEQ ID NO: 704831 - DNA, 74 bp, Homo sapiens
cttatgggggcccggcctcctcatcactccagttctggatgaacttagcagtgtctgcaaaaacgaatcttttc

SEQ ID NO: 704832 - DNA, 81 bp, Homo sapiens
aggaatccgagaagagcagagcggagggagccccagacacggtttggtgcacctcgatttggaggaagtagggcagggccc

SEQ ID NO: 704833 - DNA, 90 bp, Homo sapiens
gcgaaggccgggacccggttccccggcccacagtgggggtgtgcaaacccgagagaactgggtctgctggagtttgctggaggtccactc

SEQ ID NO: 704834 - DNA, 75 bp, Homo sapiens
tgttgacaggatttgcgtgggcattcctcctggtgaggggcttccatcgttggcgtgaactgccgctttgggccc

SEQ ID NO: 704835 - DNA, 82 bp, Homo sapiens
aagcgtctccgttgggtccggccgctctgcgggactctgaggaaaagctcgcaccagagttttgattcatcatggataatct

SEQ ID NO: 704836 - DNA, 75 bp, Homo sapiens
ttgagattgaaagtgagagtgtaagtgaaaaagcttgtggagagactccagagcaaatacgagcaccaagtggca

SEQ ID NO: 704837 - DNA, 100 bp, Homo sapiens
agggagagatgatggatctccaacatggcagccttttccttagaacaccaaagattgtctctggcaaagcaaagagagcaggatgaatggacagtaccag

SEQ ID NO: 704838 - DNA, 100 bp, Homo sapiens
tgatgaagagtatcaggaatttgaagagatgctggaacatgcagagtctgcacaagcaatgatagtaagaaatgctaaagatacagctcatacaaaagca

SEQ ID NO: 704839 - DNA, 105 bp, Homo sapiens
gtggagccggagctgggcgcggattcgccgaggcaccgaggcactcagaggaggtctcctccgggctggggctgagcaagccctcggagtgaccgtgggtgacag

SEQ ID NO: 704840 - DNA, 100 bp, Homo sapiens
ccttgaatctgcagaaagcagctccgagccccagaccagctctcaggatgactttaaaccagggtggttatgaccgctactcaggaggaaattacagaga

SEQ ID NO: 704841 - DNA, 97 bp, Homo sapiens
ggcctgcggcagccggtaccagcaggtcgggaaagaggttaaagaagacacgcaagtatgatatcatcaccactccagcagagcgagtggaaatggc

SEQ ID NO: 704842 - DNA, 101 bp, Homo sapiens
gctgccaaggcccctgtgaaggccaggatacttccccaaggtactccaaagattcaggtttactcacgtcatccagcagagaatggaaagtcaaatttcct

SEQ ID NO: 704843 - DNA, 51 bp, Homo sapiens
tcatcaaaaatagtgatagctttgataagcaattaagttggaatatgcaag

SEQ ID NO: 704844 - DNA, 82 bp, Homo sapiens
ccctccccaagtcgacgccgcaacccggggaaagcaggtgccagaaccctgtggagcatcatgaactgggaagagtagctga

SEQ ID NO: 704845 - DNA, 50 bp, Homo sapiens
ctctgtcagaggaagatcccttgtgcacagccagagaacaacacatcaca

SEQ ID NO: 704846 - DNA, 75 bp, Homo sapiens
gcactgtttcctatgatcctaggaaacccactgtgaagacaaagtggaagatgctttctacaaaggtgaactcag

SEQ ID NO: 704847 - DNA, 100 bp, Homo sapiens
ggacagctgagtttcaaaggcaagagcctcaaactcaacactgcagaagatgctccctcagaggcccctgatgtctggagaattgtgagcttggagccag

SEQ ID NO: 704848 - DNA, 75 bp, Homo sapiens
ttcgcagtggtcgcttcttctccttgaagttcaccatgtctattctcaagatccatgccagggagatctttgact

SEQ ID NO: 704849 - DNA, 100 bp, Homo sapiens
gattctggggcagtatcaacggagtctccgggacctgcaggctgggacaatgaaaagaaaatagctattttacatgaaaattttacaaccgtgaagccgg

SEQ ID NO: 704850 - DNA, 121 bp, Homo sapiens
gtctggtctgaggagacggggacccttctcacaccggccgctgccgccgccgcgctccggaacaggatgtggctttgtttgagatgaatcagtcggattcaaaagaagtggacagttcaga

SEQ ID NO: 704851 - DNA, 51 bp, Homo sapiens
ctcttcgatgtgcgagactttggaaaggtcttgggctggcacgaagagctg

SEQ ID NO: 704852 - DNA, 100 bp, Homo sapiens
gtccggctgcagcagcaagtcccatcggaggacctccctgccctgtataccgagggaacagctttaccgatttgttacaactcaagcaagggccagcaga

SEQ ID NO: 704853 - DNA, 99 bp, Homo sapiens
gggagatccacagctaagacaccgggacctcctggaagccaaaaatggtcctggcattgatgtgcctgctccagacatgagcacaggtgagcgggagat

SEQ ID NO: 704854 - DNA, 100 bp, Homo sapiens
caccgtggctacactctggaccccaatggcaaaacctgcagccaaaccagcctggacaccaagtctgtgtcagaaggccacctcaagaggaacatcgtgg

SEQ ID NO: 704855 - DNA, 100 bp, Homo sapiens
ccgcaatgacgtcatcggcaaggggctgggtgaccgatggcttcagttccctgaaagactactggagcaccgttaaggacaagttctctgagttctggga

SEQ ID NO: 704856 - DNA, 83 bp, Homo sapiens
aacttcatcatcatctacttcacaggaattgccattttacctttgtgttggatgaatttaagcgcaagtactccaatgaggac

SEQ ID NO: 704857 - DNA, 100 bp, Homo sapiens
ggtcctggtggatgatggatggatattagcatactgccatgttcgtactgccaaatctgtcgaaagggagataatgaagaactgcttcttctttgtgatg

SEQ ID NO: 704858 - DNA, 95 bp, Homo sapiens
ataagagtcagcatggagagcccctgctaatggagtacagccgccaggagctactcaggaaggaacagaagatgctggagaaactcgagtttgaa

SEQ ID NO: 704859 - DNA, 75 bp, Homo sapiens
gcccatccagactgtttgatgctgaacttcaccgttaaggtaactaggatttctacctcaaccgcgagacctatg

SEQ ID NO: 704860 - DNA, 75 bp, Homo sapiens
gattttggtagagaagaatgaacattgtattgagaacaatatagatttgcagcggaatggccaaagactatgacg

SEQ ID NO: 704861 - DNA, 100 bp, Homo sapiens
gccgctatggatgatcgagaggatctggtgtaccaggcgaagctggccgagcaggctgagcgatacgacggtggagccgccaccaaaatgcagattttcg

SEQ ID NO: 704862 - DNA, 100 bp, Homo sapiens
ggggcggggcgcgtttaagagctgcgggccgggtgcggacggcggaggcggcgggactggtccctgtaatctatgccagcaattatgacaatgttagcag

SEQ ID NO: 704863 - DNA, 80 bp, Homo sapiens
atttgccatcatggaactgcaagtagtacttaaacttcacccttgtttagcccctattaaggttgctttggatgtaggaa

SEQ ID NO: 704864 - DNA, 50 bp, Homo sapiens
cgcctgccccgaggtgatccggggtgaggcgctcaggcaagttctggtca

SEQ ID NO: 704865 - DNA, 75 bp, Homo sapiens
ggaggaagcaggagcagcccaagcgccttccctcaccttctcggacaaactatttagtggaaaaggcttacattt

SEQ ID NO: 704866 - DNA, 100 bp, Homo sapiens
gccagatatgtgagcttaagtatgaattcctcagagagagaagactgtaataatggcgaaccccctaggaagataataccagagaagaattcacttagac

SEQ ID NO: 704867 - DNA, 82 bp, Homo sapiens
gtgggagtctccgcgtcccgctcgctgggagagaggtttggtgcacctcgatttggaggaagtagggcagggcccttatctg

SEQ ID NO: 704868 - DNA, 100 bp, Homo sapiens
ccacagctgattttggtgaatatggccagcttcccagagggtgatcagcccatgacctaaacctccagacaaaataaaacggaaaatttgctagaatcaa

SEQ ID NO: 704869 - DNA, 51 bp, Homo sapiens
aacctgttccaggattgccaggagtctgtaagtacactgttcacgaccagt

SEQ ID NO: 704870 - DNA, 100 bp, Homo sapiens
caagaaagaccatcaagtttaccagctggaagtgatggagagagtattggaaactgtcccttttgccaacgccttttcatgatcctctggcttaaaggag

SEQ ID NO: 704871 - DNA, 82 bp, Homo sapiens
gtcgggggagtcgtaaacaaccctgaagagaacagccaggcctggtgccaagtcctgccctgccaacttcttggcagctgcc

SEQ ID NO: 704872 - DNA, 75 bp, Homo sapiens
tcaaccaccctggcagacaaggatggcgagatttactgcaaaggataagcacattgaagaagtgcggaagaacaa

SEQ ID NO: 704873 - DNA, 101 bp, Homo sapiens
ctgcattggggccaaacacagaatcagcaaagaggaggccatgcgctggttccagcagaagctttgtgtccctggtgatgttggaacattaatgatggaac

SEQ ID NO: 704874 - DNA, 100 bp, Homo sapiens
ggactttgatgattttaacctggaggatgcagtgaaagaaacttcctcagtaaagcggaagatcagttttcctgccatccaggctgctccctccttcagc

SEQ ID NO: 704875 - DNA, 75 bp, Homo sapiens
ggcacctccgagcgcaaggacagcgcgaggtccgcgcagcccagcgcagccatatagcctgggctggaagctctt

SEQ ID NO: 704876 - DNA, 51 bp, Homo sapiens
gcagggaacttttggcagagctcccactaatctgagtgggacatacttttg

SEQ ID NO: 704877 - DNA, 90 bp, Homo sapiens
tgtttgaagtcaacattcgatttattggaggcctacttgcagcatattacctatcaggagaggaggaaatggccattttcaagattgcag

SEQ ID NO: 704878 - DNA, 83 bp, Homo sapiens
ctcgctgaccccatcactgtgcaagctggggctgcaggcttgaccactatgctatcatcaagtttccgctgaccactgagtct

SEQ ID NO: 704879 - DNA, 75 bp, Homo sapiens
cgcagtggtcgcttcttctccttgtttgcagatggcgtgtacctggttctgctcatgggccttctggaagactac

SEQ ID NO: 704880 - DNA, 87 bp, Homo sapiens
ccatttcaaagaacagaatgctaaggaagctgtggcaagatgacgtagctttgccaaagacttagaagctaagcagaaaatgagctt

SEQ ID NO: 704881 - DNA, 50 bp, Homo sapiens
cgcgaatatcgtcatcgttagaaggacttggaagaacaaagtcggttgat

SEQ ID NO: 704882 - DNA, 96 bp, Homo sapiens
atcagcaggctccgggctgaagattgcttctcttctctcctccaagaaacgtgaagagggctggtgggtggtgattggagatgccaagtccaatag

SEQ ID NO: 704883 - DNA, 98 bp, Homo sapiens
tgttctctgtgctgagcggcgggactgagctgttgagttagagccaacatgagtgagagtgaccgtctccttatcaagggaggcagaatcgtcaatga

SEQ ID NO: 704884 - DNA, 99 bp, Homo sapiens
cggcgagtttccgatttaaagctgagctgcgaggaaaatggcggcgggagaaactatgttccaacttcctgtcaacaatcttggcagtttaagaaaagc

SEQ ID NO: 704885 - DNA, 74 bp, Homo sapiens
atttcggcgtgggcaggtcgacagtgaccactaaagtgaccctgtggcctttttgaagatgtaactattagagc

SEQ ID NO: 704886 - DNA, 90 bp, Homo sapiens
agcgcccggcagccttcgacgcgatgttccgccggagcttgaatcgttttgagatcatgaatcagacagataaaaatcaacaagaaatcc

SEQ ID NO: 704887 - DNA, 100 bp, Homo sapiens
tggggcccgggccgtaccgagctaccaggctgctgttccatttcctccaagtcaccggcttacagcaaaagaagtgtttgataatgatggaaaacctcgt

SEQ ID NO: 704888 - DNA, 83 bp, Homo sapiens
tcttggtccattgccacctggatggggtactgatgctttgggttggaaaaaattgtacacagaattttctcagccaagttcta

SEQ ID NO: 704889 - DNA, 115 bp, Homo sapiens
agccaggaggaagaaagaatggctgttgggcttcttaaagccatgtaccaggcacctctaagatactgatggctctgcagaggacccattcattgcttctgcttttgctgctgac

SEQ ID NO: 704890 - DNA, 95 bp, Homo sapiens
ctcagcctcccgagtggctgggactacagacctgtggatatctgggctttgggctgtatgatcattgagatggccactggaaatccctatcttcc

SEQ ID NO: 704891 - DNA, 85 bp, Homo sapiens
actgggcataaagtagctgtgaagatactcaatcgacagaagattcggagccttgatgtgagaccatttgtttgtgactatgaag

SEQ ID NO: 704892 - DNA, 74 bp, Homo sapiens
gacgcaggcggacaaggacgcgctggatggcctcctccagcaggtcttcaaagcttcacctttctccaaaggca

SEQ ID NO: 704893 - DNA, 97 bp, Homo sapiens
ttggatcggatccttctggagtccgtgtgccagcaacagagctgggtccgggtgtacgtagtattattgattccacagaatacagccaacctccagg

SEQ ID NO: 704894 - DNA, 82 bp, Homo sapiens
tacagcattttatgggacttgaagtttttgatgagtcttgctctgttgcccaggctggagtgcagtggtgccatcatgccaa

SEQ ID NO: 704895 - DNA, 97 bp, Homo sapiens
acctgttcatcgaggagtgtctcaagttctgtacctccaaccaggaggccatagagaaggtcttagtcctgggtaacaagcgagaccttccgggagc

SEQ ID NO: 704896 - DNA, 100 bp, Homo sapiens
ctgcccccaactgcacgcggaagagcacgcagtccgacttggccttcttcaggttcccgcgggaccctgccagcggcgtcttcgacatcttcggaacatt

SEQ ID NO: 704897 - DNA, 98 bp, Homo sapiens
ctggataccattgtcaagatccctccacatgtactgagggtgataaaagaaaatgtggctgaagttacccgaagttcagcttgcagtgtaattcagaa

SEQ ID NO: 704898 - DNA, 100 bp, Homo sapiens
tcaaatgcccccactccaagtacggctcgtgtgggcgctcgtccacaaacactccgtggctgagaggcagcggatccaggcagcgatgctgagccacctc

SEQ ID NO: 704899 - DNA, 100 bp, Homo sapiens
gtcatccggtccctccacgggcggctgcagggtggagcaggaggatgcattagcacaacaggcctttgaagaggctcggagaaggacacgcgaatttgaa

SEQ ID NO: 704900 - DNA, 59 bp, Homo sapiens
tcatatgaaggacccactgcagaagtggtggagatcaggagaacctcagtctgacgaca

SEQ ID NO: 704901 - DNA, 100 bp, Homo sapiens
ctccagggtttggtgacaatagaaagaaccagcttaaagatatggctattgctactggtggtgcaagtccagagcctaaggaccagactttgaaaatgat

SEQ ID NO: 704902 - DNA, 100 bp, Homo sapiens
cagctaattgcatggagtgtcgtgtggaccctgctgatagtctggggatatgagtttgtcttccagccagagaggctctggtatcagttcctcttcagta

SEQ ID NO: 704903 - DNA, 75 bp, Homo sapiens
ggcatatgttcgactggctcctgattacgatgctttggatgttgccaacaaagttcgagaacttgtcttggacaa

SEQ ID NO: 704904 - DNA, 74 bp, Homo sapiens
ttttcttggctctcgtcgcaccgggggtcctcggaccacctttcactcacctgaggactccacagaagatggta

SEQ ID NO: 704905 - DNA, 50 bp, Homo sapiens
cttggagccaggcgccggggtctgagtgatgctattgctgagattagagc

SEQ ID NO: 704906 - DNA, 98 bp, Homo sapiens
atgacagatgaggagatcttagagaagctaagtccctccagctacaaggtgggcaccatggcggagaagtttgactgccactactgcagggatccctt

SEQ ID NO: 704907 - DNA, 99 bp, Homo sapiens
tatgtctcaagatggcggccaatgtgggatcgatgtttcaatattggaagcgctttgatttacagcagctgcagggtctaggtgctggagtgcgcacgg

SEQ ID NO: 704908 - DNA, 74 bp, Homo sapiens
tcaattcaaaggacctgcccccagagagaggggatcatcaagtaccatgtacgtgtcaggcccgccagggcccc

SEQ ID NO: 704909 - DNA, 87 bp, Homo sapiens
ggcctgacgcccaccctcaatggcgggttttttggaacgaagtggatgatgttcctcgctgtgggcatctacgccctctttgtctcc

SEQ ID NO: 704910 - DNA, 82 bp, Homo sapiens
gagctattattccctgtattaaaggttaccattccatcaaatacaatatctgtgaatggaaggtcaagactcagccattcca

SEQ ID NO: 704911 - DNA, 83 bp, Homo sapiens
ctcaaagctgctgccgccccttgggctaaaagaactccatccggcacaacctgtcactgcatagtcgattcatgcgggtccag

SEQ ID NO: 704912 - DNA, 80 bp, Homo sapiens
gcaaggctgagggacgagaacgagaatcttgacaaaacttttggaagtgtcagatgatccccaagtcttagctgttgctg

SEQ ID NO: 704913 - DNA, 100 bp, Homo sapiens
cccgcttttataactacacgctgtgtcggaacggggtgaaagagaagcacggctccgactactccaagcgatgtgcattttgtaagcactttggagccac

SEQ ID NO: 704914 - DNA, 51 bp, Homo sapiens
ctcagccgcccgccgcccgccggggtttgtctgcatagcccagcaagatta

SEQ ID NO: 704915 - DNA, 75 bp, Homo sapiens
tagtctgaaccgggatcttacaggagaattagagtatgctacaaaatgaggcctgcctgtgttaatacacctagt

SEQ ID NO: 704916 - DNA, 75 bp, Homo sapiens
ggaacatggcggatcggctcacgcagcttcaggacgctgtgaattcgacagagtgggaagctttggagctgacgg

SEQ ID NO: 704917 - DNA, 98 bp, Homo sapiens
gtccacggagtgtatgaccacaaacagccatcaaggtttggagaaaattgaagttttacagcaacatgaaaatgaagacatatataaattagcatttg

SEQ ID NO: 704918 - DNA, 89 bp, Homo sapiens
gaactccaagcgtgaccagctttctgttgggaacactcaaaggattggattcagcatcaaaatacatctactcatattgagagctgtcg

SEQ ID NO: 704919 - DNA, 90 bp, Homo sapiens
gaaaggataatggctacttcctgattaaacccactctccacagtagctttggatatgttaaatcctcatgttactttgcctgttttttac

SEQ ID NO: 704920 - DNA, 100 bp, Homo sapiens
catcccataaaaactatggagaagaccagtccaatgtatatgaaaatgatgatcagctcctgtgggaccctgagtacttaccagaagataaagtgattat

SEQ ID NO: 704921 - DNA, 82 bp, Homo sapiens
cgggctttaggctggaagcgccttagaggagccatttttccagatttgaggcttaagcaacttcttccggggaagagtgcca

SEQ ID NO: 704922 - DNA, 82 bp, Homo sapiens
gtcgccaggcacaagacacgtcggatgttgcagcagagccagcagctagcgcaggagcagctgatgagccagatccgggaga

SEQ ID NO: 704923 - DNA, 99 bp, Homo sapiens
ataaaactccagcgagatccgggccgtgaacgaaagcagtgacggaggagcttgtaccaccgacaatgcagatcttcgtgaagactctgactggtaaga

SEQ ID NO: 704924 - DNA, 74 bp, Homo sapiens
tcctcatctgggacactgctggtcaggaacgggaaattatgatgtgatgaccccaatggttgatatacttatga

SEQ ID NO: 704925 - DNA, 100 bp, Homo sapiens
atggaagatgaggaggtcgctgagagctgggaagaggcggcagacagcggggcttcaacggaccacaccaaaatgccatctcaaatggaacacgccatgg

SEQ ID NO: 704926 - DNA, 100 bp, Homo sapiens
acttgcgacaagttgccggagccgcggggcgcgggcggcggacagattgaccttcagagcgagacaatgcagatcttcgtgaagactctgactggtaaga

SEQ ID NO: 704927 - DNA, 82 bp, Homo sapiens
ggaggaggcggagggcgcaaagcgagccgtgagacggtttaagcggaagcatcttactgccattgactgccagcatttggct

SEQ ID NO: 704928 - DNA, 101 bp, Homo sapiens
gcaccggcaactcaaatctctgcaagagaaagtctccaagaaggaggtggccctgctgcagttgatggagacgccagagctggcggggcaggaggacgctg

SEQ ID NO: 704929 - DNA, 100 bp, Homo sapiens
atgaaatcctccccacttatgtttgtaaatgtgagtggaagccatgaggccaaaggcagttgtattgcccccctggtggacctcactccaacccacagtg

SEQ ID NO: 704930 - DNA, 75 bp, Homo sapiens
gcgccctgagagaacagggtggccgcttggtccaggaatggatcgtgattatggccctggatcttatggaggtct

SEQ ID NO: 704931 - DNA, 78 bp, Homo sapiens
tgatcccaccttctgggcaaagaatgtagtcaatttaggaaaaattgaggcttcagaaattgtccagtctctccagac

SEQ ID NO: 704932 - DNA, 83 bp, Homo sapiens
actaccgatcagtcatcagagcatgtatggaggaaatgcaccaggttgcaaatggagtttcgctcttgtcgcccaggctggag

SEQ ID NO: 704933 - DNA, 101 bp, Homo sapiens
aaaacacaaagcaagagaaaaaccttatgatagtaaaagtttgcggactgcatttgcccagtataacatggatcagttcacgcctgtgaagatagaaggat

SEQ ID NO: 704934 - DNA, 83 bp, Homo sapiens
ctggcctcagcccgccacatcaccctgacctgcttacgcccaggcttgttttcctgctcagaacaaagtgacttccctgaaca

SEQ ID NO: 704935 - DNA, 83 bp, Homo sapiens
tgggtcagtggagccattgacgcagagtgggaaatatggctatgagagtatctacgctgccctgaggagcatctatcacagtg

SEQ ID NO: 704936 - DNA, 75 bp, Homo sapiens
tgaagatcttggaggagattgacacactgttccttcctgtgtacagcccttctgaggaggagaagaggaaccccg

SEQ ID NO: 704937 - DNA, 100 bp, Homo sapiens
ttggcattcccattgctgtgcctacaccttcgccacccactattggaccagcaatagcgtttatggcagcatttagcggacacagaagcacatctgaaag

SEQ ID NO: 704938 - DNA, 98 bp, Homo sapiens
gcgaaggcggcggctcctgccctctcgctttccctctcgcgtctctggctgcaggtagacatagctgacattgagaatgaagagaaccgctactgtct

SEQ ID NO: 704939 - DNA, 98 bp, Homo sapiens
cttctgggagctgaggaaccagatatcttgaaaagctgccagaaagttgcatttgctggtctggcctttgcgtccttctacctggcagggaagttaca

SEQ ID NO: 704940 - DNA, 92 bp, Homo sapiens
cggggaggccagagcgtggagcgctgcgcggcgcggcggccgggccctcgagacggggacgtgatgtcttggcattgcccattttcaagcag

SEQ ID NO: 704941 - DNA, 100 bp, Homo sapiens
tgcaggaccccaaggaccttctggcctgaagtttgcaaactcagctctggagttcagcagcaacagcagcaggaaaaacctgcccctgctcccccctccc

SEQ ID NO: 704942 - DNA, 76 bp, Homo sapiens
agcgcctcgtcgacatgagtgatgtggaggaaaacaacttcgagggcagagcccgatgagagaaagggaaagttaa

SEQ ID NO: 704943 - DNA, 75 bp, Homo sapiens
ccgtgagcaagcagcgacgccagcggcggagaaccgacgaaagattggtgctgaagacatggacggcttccaggc

SEQ ID NO: 704944 - DNA, 90 bp, Homo sapiens
agattctctttgtggccagatgggtttgtatggacaggcttgtccatctgtaacttcattaagaccccatatcatgtgaacctcctcctg

SEQ ID NO: 704945 - DNA, 90 bp, Homo sapiens
ggcttctctgaggcggcgagagatggtcaggtctggagctcgaccgggccaggacttcagggccacaggtgctgccaagatgctccaggg

SEQ ID NO: 704946 - DNA, 90 bp, Homo sapiens
ctcagcgcggacctagacctggaatcgcccaagtccctctactcgcgagttattcctagacatggcttacagagtcttgggaaagttgct

SEQ ID NO: 704947 - DNA, 75 bp, Homo sapiens
gcaatgtcacttacaacattaatcagatactgcatttaaggaattacatgaatgacagtcttcgaaccaatgtgt

SEQ ID NO: 704948 - DNA, 75 bp, Homo sapiens
gtggaacattacaaattcaactagcaaaagaaagctttctgcacagccctgccaaggtaaccctgctggggtcag

SEQ ID NO: 704949 - DNA, 51 bp, Homo sapiens
gcagtggcgtttggaggagactcgaatgtggccccgtcccagagcaccacc

SEQ ID NO: 704950 - DNA, 83 bp, Homo sapiens
ggccagcatccaagccgcgtcggctgaaagttccgggcaaaagaacactcgtgaaactgctcaggccatcaagggtatgcata

SEQ ID NO: 704951 - DNA, 49 bp, Homo sapiens
gcctcccctgggtgctcttcatcttggacagagtttcactcttgttgcc

SEQ ID NO: 704952 - DNA, 100 bp, Homo sapiens
cctggaaatcttcttagatacttgggttcagccagcaattgcccaaacccaaagtgtggaggttatgatgtgattgctcaagcccaatctgggactggga

SEQ ID NO: 704953 - DNA, 50 bp, Homo sapiens
ggggaagtgatttgcctcagcttgtactttgggcaagacctgaagctcac

SEQ ID NO: 704954 - DNA, 75 bp, Homo sapiens
aaggaaacacatttcatatactgcaggtgatctttgcagagctgtttcaacttccagcaccccctcacattgatg

SEQ ID NO: 704955 - DNA, 75 bp, Homo sapiens
cacatttgcagctcattgaaggaaagtaacaaatgtggcaattattttggatctatcacctgtcatcataactgg

SEQ ID NO: 704956 - DNA, 50 bp, Homo sapiens
cgagaaaaccatctccaaagccaaagggctaccacccgatgccccatgaa

SEQ ID NO: 704957 - DNA, 82 bp, Homo sapiens
aaaaactctttgagtttcggagaggagtaaagaggtatcatgatattagctggtttgacatcaagtcatttgtgagtcatca

SEQ ID NO: 704958 - DNA, 75 bp, Homo sapiens
tgcctcttgatctccgccaccgtcttcaggccagcaatgatagcactgatggggagccagaagaaaagagacgga

SEQ ID NO: 704959 - DNA, 82 bp, Homo sapiens
ggagagcgccgaggacgacgagcgcagctgtcggggccgcgagtcggacgaagggaattggctcgggaaaaggtaatgcgag

SEQ ID NO: 704960 - DNA, 100 bp, Homo sapiens
ccatctacacgaaaggcaccccggagattgctttctggggaaggttcagggagcaagtttccgaggttggaaagaagtgacttcactgtttaacaaagat

SEQ ID NO: 704961 - DNA, 114 bp, Homo sapiens
atctctaacccaagaaacagagcttttggaatccttacttcaggaggtggagcaccaggcaaatggagttgagcacttgtgaaaatggatctttaaatatggaaataaatggtg

SEQ ID NO: 704962 - DNA, 100 bp, Homo sapiens
gacctggagccgtcccaggactgtgcaggggactctgtcacatcacctgtgtgccgcccgcctgtggtcctgggagcccgaggccagcccggctgccgca

SEQ ID NO: 704963 - DNA, 100 bp, Homo sapiens
acaaagacgcttattatcggcgagtgaagagactgtacagcaattggcggggagcccagctgacaatgctgccctcaagtcaggtgaccggatcctcttc

SEQ ID NO: 704964 - DNA, 75 bp, Homo sapiens
aggaatttgtggctggctggatctctgctccttgaggagaatgaccagctgatccgctgtattgtggagtatcag

SEQ ID NO: 704965 - DNA, 100 bp, Homo sapiens
ccacagccaacttccaacaagatgtgggcacaaaaactaccattcgcctgatgaactctcagaacagctttgctgagccatcaaggtctaatggaagcat

SEQ ID NO: 704966 - DNA, 101 bp, Homo sapiens
gaatatcctgcaaaaatcaactgtagctggttcataagggcaaacccaggcgaaatcattactataagcattttgaaagcgaagcagaagccgtagaatca

SEQ ID NO: 704967 - DNA, 118 bp, Homo sapiens
cccaggtcccggcctccgtaatgagagcccggaaccactctttgtgccgcagcttcgcagattacaccaccaccttcactgtcagatccacttaaagagctttttcgacaacaggaag

SEQ ID NO: 704968 - DNA, 100 bp, Homo sapiens
gtgactaccgtcgtgaggcggcttgtgcccagaatttcaggtctggagcccggcactgtggtcataacagagcaggcagtggatacctgcttcaaggcag

SEQ ID NO: 704969 - DNA, 100 bp, Homo sapiens
ctgaggatttccaagagcaaggatgaaaaattgaagtcacagcccctcagcaccaagcagaaggtggagccgccaccaaaatgcagattttcgtgaaaac

SEQ ID NO: 704970 - DNA, 100 bp, Homo sapiens
ctaaccgttacctggctatgaaggaagatggaagattactggcttctgtttctagagaggaaggatctccccagctgtcttcagcaaggccgtctcctgc

SEQ ID NO: 704971 - DNA, 101 bp, Homo sapiens
attacccagcctgaaagaagaaaactttcagctttggctttgctctctcttctgccatctgataatagggccaacattgcctagacaaaactcacaactac

SEQ ID NO: 704972 - DNA, 75 bp, Homo sapiens
ggttgtgcctggaggtggaggggaaggacacagcattgttggttttgccatgtactattttacctatgacccgtg

SEQ ID NO: 704973 - DNA, 100 bp, Homo sapiens
gtgcactgaggcctcagaatctgctctacccgacttaacaggtcgaattgacataaaacagttgatagcaaagaagataaagttgacagcagaggcagag

SEQ ID NO: 704974 - DNA, 100 bp, Homo sapiens
gatacactcaagctgttgaaaatgagcagctgtcctcatgtctctccagcagatgtgtatatctcatgattgatatggagaaactagtcatgggccaaag

SEQ ID NO: 704975 - DNA, 87 bp, Homo sapiens
cttaaagacaggtatcctcggaaacggtttgtggctggagtaggagcaaacagcaagctcagctatgtgaaccatgcagaggacctg

SEQ ID NO: 704976 - DNA, 90 bp, Homo sapiens
cccaaccctgccagctgagcaaaggacagtcttacagcgtcaatgtcaccttcaccagcactgcaagctttcttcctggtggcagatgac

SEQ ID NO: 704977 - DNA, 131 bp, Homo sapiens
ggcagaaggagccccagagctcaatgggggaccacagcatgcacttccttccagcagctacacaggaaaccactgttgctgcgattgccccggatatgccagaggaacctgatgtccctgctgatggccgt

SEQ ID NO: 704978 - DNA, 102 bp, Homo sapiens
ttctactcaagccttattgaagagataggaactcttggttgggataaaggctgtggccctgagaaagatcacgtctacctgcagctgcaccacctacctcca

SEQ ID NO: 704979 - DNA, 75 bp, Homo sapiens
tctgccggacatggtggtgtcccacctttttgggaagggtagaagagcagaggatggctctgtcattgattatga

SEQ ID NO: 704980 - DNA, 51 bp, Homo sapiens
aggatggcttggccttgcacataagctctggacttattggacaaaatgttg

SEQ ID NO: 704981 - DNA, 75 bp, Homo sapiens
aggagccgggcgcaatggagcggaagaggtccgcgggagagctgtggggcttggtgagtgtttcgtggcctctcg

SEQ ID NO: 704982 - DNA, 82 bp, Homo sapiens
gcttcggaacaagagaccctggtgagaagccatttaaatgtgatcagtgcagttatgtggcctctaatcaacatgaagtaac

SEQ ID NO: 704983 - DNA, 98 bp, Homo sapiens
caacaagagtcctcaatccaacagcccagtgcttctgtctcgactgcactttgagaaggccttagattttagtgatgatgaaaaagagaaggaagcca

SEQ ID NO: 704984 - DNA, 82 bp, Homo sapiens
gcgagacctcacctgcatggacttccactatgaggcctgaggtcctttcgagactgctggggaacctggtggtgaagaacaa

SEQ ID NO: 704985 - DNA, 82 bp, Homo sapiens
gccgtccgccttctctgtcagctctttccccgtcagcatcccagccgtgctcacggtgacttaagagattaaaattaatttg

SEQ ID NO: 704986 - DNA, 90 bp, Homo sapiens
ggaaattctgtatgttcttcgccattatattcaggtggaagttgatgggtcgaaactaaatgtgaccagcacgtggaacctggcttcgcc

SEQ ID NO: 704987 - DNA, 75 bp, Homo sapiens
taagcactgctgcactttatgagatgtcgccctctggtcgcctgtgtcttctcaccatcgttggcctgattctcc

SEQ ID NO: 704988 - DNA, 100 bp, Homo sapiens
gaagaagggaaggcgcgagtgaggaaaggaggtactgtagggaaatcctcattgacgattcaatttgttgaaggccaatttgtggactcctacgatccaa

SEQ ID NO: 704989 - DNA, 99 bp, Homo sapiens
aggaatcagaaacctgaagttagaaaggctcaacgagaacaagctatcaggtttttgtaaggccagcttccttcctttactggaatttgcctatacttc

SEQ ID NO: 704990 - DNA, 73 bp, Homo sapiens
gcatggattgggagatactgggtggcagtagagaagagcatcacagaagttgctcaggagctgacagagctgg

SEQ ID NO: 704991 - DNA, 100 bp, Homo sapiens
acaagtcaagaatccttttggcttagagatcactaatccatcttcagcttcaattacaaggaagtcgagacaacatgagtgtgattttgatctgttttcc

SEQ ID NO: 704992 - DNA, 75 bp, Homo sapiens
ggaagaaggtggtccttgtaccctacacctcggagcatgtgcccagctcctgaaactgggcactggtctcctgga

SEQ ID NO: 704993 - DNA, 100 bp, Homo sapiens
ctgagcgcaaggtcctcttctacacagatctggtgaatccccgtgccatcgctgtggatccaatccgaggaatttctccaagaagcaacgctatttttcc

SEQ ID NO: 704994 - DNA, 87 bp, Homo sapiens
actttgacctgccaggagctcttctgtgtgccagggtggtggactatttaacaaaaaaacctgctccaccaaaacctgaacccaaac

SEQ ID NO: 704995 - DNA, 85 bp, Homo sapiens
tttggggaccagagatggacggtcactcagcctatggaggaaacgggattatgaaggttatttatgctccctgctgctccctgca

SEQ ID NO: 704996 - DNA, 100 bp, Homo sapiens
tctgtggtccacagtgacctctccagcattgtgatcctggataactccccaggggcttacaggagccatccagtacgcctgcctcacaccttgcgatgcg

SEQ ID NO: 704997 - DNA, 100 bp, Homo sapiens
ctcaggggccatggcgaagcacgagcagatcctggtcctcgatccgcccacagacctcaaattcaaagatgccttcaattaagttgcagagttctgatgg

SEQ ID NO: 704998 - DNA, 96 bp, Homo sapiens
cactcgctgccaagggctacagaagtgtgcatcccaaccttccttctgacaagtcccagatgtcggtgcagatctcttgtccatgtgccagcgaaa

SEQ ID NO: 704999 - DNA, 75 bp, Homo sapiens
tgacaggctctgtcactaaaatagtttcgccatgttccacaaggtcagagttcctcgccagagccttctgaaccg

SEQ ID NO: 705000 - DNA, 82 bp, Homo sapiens
gtgaagtaggaccgaattcctgtgccgaagaggcctgcagtgggagagcaggggaaagcaggcaggatgggagagtcgccga

SEQ ID NO: 705001 - DNA, 100 bp, Homo sapiens
gtgggatctcaccgtgggtccgattagccttttctctgccttgcttgcttgagcttcagcggaattcgaaatgcagttggaattgatcacaccttttcag

SEQ ID NO: 705002 - DNA, 122 bp, Homo sapiens
ttggacaaactcttctgaaaggtgggcaacctagaaagccagttgatgccacttgctattggagttgtggggaaatcctcattgacgattcaatttgttgaaggccaatttgtggactccta

SEQ ID NO: 705003 - DNA, 107 bp, Homo sapiens
tcgggctgaagcgactgagtccgcgatggaggtattctctactgccgctgatggtcaaacgcaagtggaaattaaagtgtgtcagggtgaaagagagatggctggag

SEQ ID NO: 705004 - DNA, 100 bp, Homo sapiens
gtggatctcaagtactaccggccaactgaagtggttagcatggcctcattgaaagaactagatcaaagactctttgaaaattacatcgagttgaaagcag

SEQ ID NO: 705005 - DNA, 100 bp, Homo sapiens
actcggccttcttcactgtcactgtcacaggcgttcccgttgcccgctctctcccggaagcagaggacggtgctggtcgtgtgtggcccggagcagaacg

SEQ ID NO: 705006 - DNA, 97 bp, Homo sapiens
aagattgtcatgattgtttatcctaatcccaatgctgaagtaagattgtcttggaaatactaagttgggatgctgaaatttctggaaaagacaatgg

SEQ ID NO: 705007 - DNA, 97 bp, Homo sapiens
aagttggaaaaagaaatggaacagaaacatagagaggaactggagcaattgaagctgactactaaggagaataaggatggcactggatctttaaaac

SEQ ID NO: 705008 - DNA, 100 bp, Homo sapiens
agaactatttgtctcagagctcggagctggacccccccatcgagtcgctgatccctgaagaccaaatagaaacagaagcctatcagttgctgaagaaggc

SEQ ID NO: 705009 - DNA, 105 bp, Homo sapiens
aactcagttagaaagaacacgtcagcgaaacccatctgatcgacatgttattggcttggcaactcttgtgaaatttcatagatctcgtcgcttactgggagtctg

SEQ ID NO: 705010 - DNA, 76 bp, Homo sapiens
aaaaggattgtaatttgaaaaaagtatctattccagttgtaacctccatttctgacatccccactggtattccagt

SEQ ID NO: 705011 - DNA, 100 bp, Homo sapiens
ccttctcatctctcccttcgcccagttccctgcatcctaagactcgaaggcagcacaggacctggaaaaattacatgacattcggaaattctttggagta

SEQ ID NO: 705012 - DNA, 98 bp, Homo sapiens
agtacttgggcttgccagtggcggattacttcaagcagtggattaatctgaaaaagacacaatctgggagcaatatggaggatggactggaatgggag

SEQ ID NO: 705013 - DNA, 87 bp, Homo sapiens
tctgatgaagaagttattcaagatggattggattcagcatcaaaatacatctactcatattgagagctgtcgacagttacgtcaaca

SEQ ID NO: 705014 - DNA, 86 bp, Homo sapiens
cccgcccgaccccgtcccgaccctggccgccccgagcggagcctggagatgccgacaaaaggatcaaggtggcgaagcccgtggtg

SEQ ID NO: 705015 - DNA, 75 bp, Homo sapiens
cggggccccagaggccgcggacaccgacctggaggaatgcgatgttaattctggggcattgatgttttacaatgc

SEQ ID NO: 705016 - DNA, 89 bp, Homo sapiens
accagttggtggtgacaagaacggcggtacccgggtggttaaacttcgcaaaatgcaactattggatgattatccgaaatgtttcattg

SEQ ID NO: 705017 - DNA, 100 bp, Homo sapiens
ctccctgtatgcatggtgtggggttggtgtgattagcttcgcagtctggaaagctttaggagttcacagtgatgaaaactcctcctctactaatctctgt

SEQ ID NO: 705018 - DNA, 98 bp, Homo sapiens
cggtgctccccatctgcctggcgttgtgcgcagagctggaaagcatggctgttgtgaaaggaagcatgtttacaccaatgccaaaaagcagatgctaa

SEQ ID NO: 705019 - DNA, 78 bp, Homo sapiens
ttaataacaagcaattgcacatcaaaatcagttcccgtgaggagaccttgccaccatggaagaaagagtacaaagacg

SEQ ID NO: 705020 - DNA, 97 bp, Homo sapiens
acctgcgcgaagctggccaaagcctgcccagacggctcacctgtgcgggatggaacaaaagccctaggcggcgtcgccgcagccgatcccggagtcg

SEQ ID NO: 705021 - DNA, 97 bp, Homo sapiens
atcgcagctgcccgccgagacgctgcaccaggtcctgcaaccctggttccagtctggcaagcattgtagacctggctgctgaagactgacggggccc

SEQ ID NO: 705022 - DNA, 80 bp, Homo sapiens
cagaccggccgctctcccctcctctcacggcacctcccaccatgaaggaaggtgctcgggtcttcggggcactgggtccc

SEQ ID NO: 705023 - DNA, 100 bp, Homo sapiens
gatgaaggtggcaaagtgctgcttccaaagctcattgacttttctgctcaggttgggcccgaaggcatcctgcagaacggggctgtggacgacagtgtag

SEQ ID NO: 705024 - DNA, 75 bp, Homo sapiens
aggcggtggaccagccgcgccaggttttgcacactagggaccaagaagccctcggggacactgctgagaaaagac

SEQ ID NO: 705025 - DNA, 75 bp, Homo sapiens
tgctatccaggctgccattgacctcacagcgggggctgcaggttctccttcttcatcaagaaaaagtggaaccag

SEQ ID NO: 705026 - DNA, 75 bp, Homo sapiens
gggacatgttgctggccaataaggtgcaagaaagcctttgaggtgaaggtgtatgaaagtcatcataacagatgt

SEQ ID NO: 705027 - DNA, 74 bp, Homo sapiens
atgcagcagaacgcagggggcctctgtaaggcacatggaggtgattaggaagaagcttgttcgtaaaacgctgg

SEQ ID NO: 705028 - DNA, 75 bp, Homo sapiens
ttgtaagcttgctcctgctaaccacttcattgtctgagagagaaacgtcctcttcctgatggatgggaacaagcc

SEQ ID NO: 705029 - DNA, 96 bp, Homo sapiens
cagggtcccaagctggaccacctcctcagaacccttgatgacacggctgttcctccttttgcctcgcagtcacctctgtgccctgctggttgtctt

SEQ ID NO: 705030 - DNA, 102 bp, Homo sapiens
ggacacctcgggggtttcctgctttatggcgaaggaacctaggtccctctgtcctggctggagtcgctttcatggtcttgctgattccactcaacggagctg

SEQ ID NO: 705031 - DNA, 100 bp, Homo sapiens
ctgcgaggaaaatggcggcgggaggggtcgggccccggctcagtggtcccaggcagctcgggtgtcggaacccccagacagttcacgcgacaaagaatca

SEQ ID NO: 705032 - DNA, 50 bp, Homo sapiens
ccggggaggtcacctgacgaggagaaagcgaaattattattgacgatgga

SEQ ID NO: 705033 - DNA, 100 bp, Homo sapiens
tggaaacattctttgaattggattatcccaaagcgtaaaactgaggaagaacgtcagaagaaagaagatgagagagcacgcagagaatttattaggcaag

SEQ ID NO: 705034 - DNA, 83 bp, Homo sapiens
ttcaaagcacctagtacctcctaccattgtcaactgccttatgccagcctggaccatcttggaggcagtgtaggatcatggaa

SEQ ID NO: 705035 - DNA, 122 bp, Homo sapiens
accaataaccagctgctgcgagtgaagtacctcctggtgtattcacagaagccacccaagagggagacagacgatgctcacccagtcagtaagaagagtccagcctgggaagaagaacccca

SEQ ID NO: 705036 - DNA, 51 bp, Homo sapiens
gctaaagcagcgtgcgttcagccctggggtccccagtctatgtgaggatct

SEQ ID NO: 705037 - DNA, 75 bp, Homo sapiens
tgtttgtgttgcgggggccggacttcaagtagccggatcgagctgggagatgtgacaccacacaatattaaacag

SEQ ID NO: 705038 - DNA, 101 bp, Homo sapiens
tggggagcggcaacgccggtggctcggggccccgcggaaaagttttcaatggttccagcaggtcaacacgggagaaggaacctgttcaaaaacacaaaagc

SEQ ID NO: 705039 - DNA, 82 bp, Homo sapiens
ccaagaacctcctacgggccttttatgagctgtcgcagactcaccggggacagacgttgaaagataccacgtccagttcttc

SEQ ID NO: 705040 - DNA, 88 bp, Homo sapiens
tccagaatgaaatccatgctcagagatgccaagaagaatctagacagacaggcctttctagggagcatttcctgaagacgtagtcatg

SEQ ID NO: 705041 - DNA, 100 bp, Homo sapiens
ctgtgacctgtgaacagggctgtggctttgtttgctagcaaaatgctttaagcctgcccttccatatcttgacgtggatatgatggatatctgtaaagag

SEQ ID NO: 705042 - DNA, 88 bp, Homo sapiens
tttgttactggaacctgccgattgccagtaggaggatttgctgatctcatggaactgatagtgcatcagccgacccaggtaatttaaa

SEQ ID NO: 705043 - DNA, 100 bp, Homo sapiens
gaaactaggcataaggaagaatgtctcatgttcgagtctggggctgtcgctgtgctctgtttattttcttgaaaaggctccaggcttcggcttggaaaat

SEQ ID NO: 705044 - DNA, 88 bp, Homo sapiens
tgggttgatatatcttccaacactgccgggaagtgcttaaacagccttcccagcccacagcagcaggggtacagcagctctcacattc

SEQ ID NO: 705045 - DNA, 96 bp, Homo sapiens
acttcagctcagaaactggacgtggatgcatactgccctggaattatccagactgccttgccactagatgaatggaagacaatgatttgaactaag

SEQ ID NO: 705046 - DNA, 75 bp, Homo sapiens
agccgagtcactactgcctgcctgcctgcctgctacgatttagcatgtagactgctggggcaatcaatggatgaa

SEQ ID NO: 705047 - DNA, 88 bp, Homo sapiens
gcccgaccgggcgctccgcttcctggagaaggcacagcggctgtatccgacgccgcgagttcgcggggtattccctcagcggatacta

SEQ ID NO: 705048 - DNA, 75 bp, Homo sapiens
aacagaatcagctgttccctgcgaaaggaaacctatgagaatatcccaggccagtcaaagatcacattcctctta

SEQ ID NO: 705049 - DNA, 75 bp, Homo sapiens
ctaaatgcactctttcgaaagaaagatatgatttttcttcagggaacagaggtcatatttaaagtggctttaagt

SEQ ID NO: 705050 - DNA, 100 bp, Homo sapiens
aaaacttcttgtctggaagagttctgcaggaacaagcacatcatgattgacttggggactggcaacaacaacaagattaactgggccatggaggacaagc

SEQ ID NO: 705051 - DNA, 51 bp, Homo sapiens
ggggtgaagaagcaaagactcggtgctggtacagggctgcctcttggaccc

SEQ ID NO: 705052 - DNA, 50 bp, Homo sapiens
cggagaccgagcccgaacagcaggggggcaacaacgccggccacacggtg

SEQ ID NO: 705053 - DNA, 100 bp, Homo sapiens
caacctctcgcacacgggccgcggcatcctcagcatggccaactccgggcccaacagcaacaggtctcaattgagatcctgttggaaagcaactgcagca

SEQ ID NO: 705054 - DNA, 82 bp, Homo sapiens
gtcgcgcggaggcggaggcttgggagtgaagacatttccacctggacacctgaccatgtgcctgccctgagcagcgaggccc

SEQ ID NO: 705055 - DNA, 98 bp, Homo sapiens
gcccatcatcctcgtgggcaacaagagcgacctggtgcgctctcgtgaggtctcggtggatggtgacaatctccaatagacttgtgtcttcaccttgc

SEQ ID NO: 705056 - DNA, 75 bp, Homo sapiens
gaatctggattgtcacctttgctgcaaaaaattacggatgttgatgttagtgaagattcacctcctcccctacct

SEQ ID NO: 705057 - DNA, 100 bp, Homo sapiens
ggacagtgtacgcttcgaggacttcacggagctctggagaaacatgaagttcgggactatcttctgtttaatggatcgagaagtggcgttgcttgctgaa

SEQ ID NO: 705058 - DNA, 100 bp, Homo sapiens
ctgaaacagaaattctggaacacctatatggtatctagaagagcagaagacagagaatggaaaagataaggaacagaaacaaacaaataccgataaagaa

SEQ ID NO: 705059 - DNA, 98 bp, Homo sapiens
ccgtacctgtgccagatgtacggcggaggagcctgtgtgaaatgcagcaaaggggtgtttggggctggccaggcctgtcaggccatggggaacctcta

SEQ ID NO: 705060 - DNA, 88 bp, Homo sapiens
atcgccctcatcaccatgatgttggagcttcggcccggctctgtggtctgtgagtctgcgctcctggttgcagccagaatgcatgact

SEQ ID NO: 705061 - DNA, 90 bp, Homo sapiens
ggctcggcgcccggcggggactgcaggaacacaatgcacaacatccgtggcaacaagcaggcccagggaacaggccatgaacctccaggg

SEQ ID NO: 705062 - DNA, 100 bp, Homo sapiens
acttaggtctgttagaggaagacgacgagtttgaagagttccctgccgaagcttagaccatgctcagcctccaagcagccttgtcatcgacaaagaatct

SEQ ID NO: 705063 - DNA, 75 bp, Homo sapiens
gctcccttctgccccagctccgtctcggcggcggcggcttgatatatggtccaaatccaactatcaagtattcca

SEQ ID NO: 705064 - DNA, 50 bp, Homo sapiens
cttacatcttgcatcctcaagcgcttgaccacatattatcccctccaccc

SEQ ID NO: 705065 - DNA, 97 bp, Homo sapiens
gcactcatcattggctttggtatttcagagatgtgaagcctgataacatgctgctggataaatctggacatttgaagttagcagattttggtacttg

SEQ ID NO: 705066 - DNA, 75 bp, Homo sapiens
aagagcccctcatcgagctcttcgtcaagcaccaaatcagatgaaagccaaggaagggaggaatgtgtacagttc

SEQ ID NO: 705067 - DNA, 83 bp, Homo sapiens
ccgagacacaccaggccggcaggctgagaaaagcgagaccgcgtgcgaggaccgcatccgcagtgtcatgcagaagtacctgg

SEQ ID NO: 705068 - DNA, 100 bp, Homo sapiens
ttgtcttcttccttactgtaatgggactatttctactccacataatctgataacaacgaacttgatgcaagtgataggtttgccaaggtcagacctctca

SEQ ID NO: 705069 - DNA, 97 bp, Homo sapiens
ggatttgttaaggattccaagtaactcttatttggtgtcacgtcttgaaattttaaatgtcctcagtgactctctacctctggcagatgatgttgac

SEQ ID NO: 705070 - DNA, 100 bp, Homo sapiens
acctgcagggaacaagaattgcaactgcatccgagaaaaagaagcacagcgtgctgatgtctgtgattgccggggaggctgtcgcatccgtgaggaccct

SEQ ID NO: 705071 - DNA, 83 bp, Homo sapiens
gaacgaggcaaggagctaaagcagcgtgcgttcagccctgggcttcgagagctgtgcccaggagtgaacaaccagccctacct

SEQ ID NO: 705072 - DNA, 101 bp, Homo sapiens
ctgtattctcctccgaaccccttcatgcccaaatcccggaaactccagcgtgtctccagccgtgagcgcatcagcgaggaggtggggctgctgcagctcct

SEQ ID NO: 705073 - DNA, 83 bp, Homo sapiens
ggaggcgcgggaggtgttcgagaacgaccccgagacggtaactaggatttctacctcaaccgcgagacctatgcaaggacggt

SEQ ID NO: 705074 - DNA, 97 bp, Homo sapiens
aaacaataggacggaaacgccgaggaacccggctgaggcggcagaatgtccctcttccagtggaaagcccaaccatgcagacatcttgctcataaac

SEQ ID NO: 705075 - DNA, 98 bp, Homo sapiens
tggaattggttatgctactgtgttctcagacagcaccagttgcccttgaagcagaaaacagaggtgaaatgaaactagctctccagtatgtcccagag

SEQ ID NO: 705076 - DNA, 75 bp, Homo sapiens
gatcggaccggccactcaatattgcacaccttatatgggaggcgtgtccggagcggtgactggaaggggtacaca

SEQ ID NO: 705077 - DNA, 83 bp, Homo sapiens
aggtcggggagcgctcggactacgcgggatttcgcgcgtgtgtgtgtcaggtattgttgcagcatctggcagtgagactgagg

SEQ ID NO: 705078 - DNA, 100 bp, Homo sapiens
aggcggcggggacaccggcgagtccccagcagggcccctgggctcccggaagaacactcgtgaaactgctcaggccatcaagggtatgcatatacgaaaa

SEQ ID NO: 705079 - DNA, 76 bp, Homo sapiens
caaaaagctctgaaggacttgctgaaatgggtcttagaggttgctccttgagggcaggacagttcttatggcttta

SEQ ID NO: 705080 - DNA, 82 bp, Homo sapiens
tccttcggcagtccacccaccgccgccgcctcccaggcctgggttctgaggaaaacgcaatggtggccatggacttgggctc

SEQ ID NO: 705081 - DNA, 100 bp, Homo sapiens
accatgggacactattacgcaacaggtcaaatgggctctctcattcttggagtgaaaggattccagacacaaaacatatttcagacatctgtgaaaatgg

SEQ ID NO: 705082 - DNA, 108 bp, Homo sapiens
cgtatgtgaacttccagcagccggcggacggtaatagcctgcagctggtgttttgagaagccctactgctgaaaacttaacaattttgtgtaataaaaatggagaagc

SEQ ID NO: 705083 - DNA, 73 bp, Homo sapiens
ggcccgcgctgaagagagctgccgaagaggaggatgaatctgaggacacagatactgatggggaagaggagac

SEQ ID NO: 705084 - DNA, 100 bp, Homo sapiens
gtggacgcccgggccgggctgcgcccgcttcttgcaggtgcatacattcagagggccacactggtgtgaatactgtgccaactttatgtggggtctcatt

SEQ ID NO: 705085 - DNA, 100 bp, Homo sapiens
aatttggaggtggcaaacagcttcgcagtcactaatgcttccctgcatgaattccccaatgacatcttcacaaacgaggatagaagacaaggtgcggtgg

SEQ ID NO: 705086 - DNA, 101 bp, Homo sapiens
cacagctcatcatgatggacttggagctgccgccgccgggactcccgtcccagcaggactcaactaaagaagtttcttggaaaatcagtaaagagagcaaa

SEQ ID NO: 705087 - DNA, 90 bp, Homo sapiens
caagctatagagcaagtccaaacccagactcatgtagcatctgccccagatgaagaactggtggatgtttctgcatctgtcttaccagaa

SEQ ID NO: 705088 - DNA, 76 bp, Homo sapiens
ctgcgcacctggaaagttacccggctgtctggtactataagatctccgtggtgctcatgtgctttgtggtccccac

SEQ ID NO: 705089 - DNA, 83 bp, Homo sapiens
tggagtttatctggagtgaggtggccggttcttggtgggatctgagcaggactgcctccgggcctgccaggagcagatcgaag

SEQ ID NO: 705090 - DNA, 84 bp, Homo sapiens
cggcgagggcgcgcggctggtgtccgccccgcccgaaaggtgtggacactgccagcggctgcagccgacttggaatgacctggg

SEQ ID NO: 705091 - DNA, 95 bp, Homo sapiens
gccaccgattttgctatgtctctgagctgcgagactatctgttatagtccctgggtcaagacaacaatttttataccttcgtcgtggttcagaaa

SEQ ID NO: 705092 - DNA, 75 bp, Homo sapiens
atgattcttcagataacttctgtgaagctgatggataaatgctgtatccaatgctcaggtgagaggtgatagcta

SEQ ID NO: 705093 - DNA, 100 bp, Homo sapiens
agctattgacaacaaaatcgagcaagctatgatagagtcagcagatgcatgcctgatccttgccaacaagtactgcgctgacccggatgcggaggatgcc

SEQ ID NO: 705094 - DNA, 100 bp, Homo sapiens
ccggaaggctttgattgaagaacgtggccgattctgtaccttcatctctatgctgcggccagtgattgtgacttaagagattaaaattaatttggttgct

SEQ ID NO: 705095 - DNA, 75 bp, Homo sapiens
ccggtgtggagagcggtgctgaggctacgcgggctggagactcagggcactcctctttatgctgctcactttcgt

SEQ ID NO: 705096 - DNA, 83 bp, Homo sapiens
cagtggaaaggaaccgttctggatcaggttttgctgttactgctcagtgtagtcacaccttgaataagaaatggaaaaccttg

SEQ ID NO: 705097 - DNA, 96 bp, Homo sapiens
tgtcgccccgctgggagaagtgaccctcctgcgcctgaataatccagaatggctactctgatctatgttgataaggaaaatggagaaccaggcacc

SEQ ID NO: 705098 - DNA, 83 bp, Homo sapiens
agctcaaatggcaagacgaactcaaccagcacaacagatgatgaacaatggcctcctccaacagccctctgccttgatgttgc

SEQ ID NO: 705099 - DNA, 51 bp, Homo sapiens
atggagtctcactctgtcgcccaggctggagtgtaatggcacgatctcggc

SEQ ID NO: 705100 - DNA, 100 bp, Homo sapiens
agtggacgcacatacagaagacagccatgcactgagctggggacatgcaacaataacaggaattgactttaaaattaggaccatagagctcgatggcaag

SEQ ID NO: 705101 - DNA, 75 bp, Homo sapiens
atgttcaagtttaccaaaagagaggcaccgctggaacactaatgagaattttcccactgtaaaaaaccgagcaag

SEQ ID NO: 705102 - DNA, 88 bp, Homo sapiens
tggaggacatctgggggccacaaatgctccttctcctggagacgcaactcaaggttgcccccaagtttcctggcagtgtgtgatactg

SEQ ID NO: 705103 - DNA, 97 bp, Homo sapiens
gatgatcccacgggagcccactccaatgcaccaatcacagctcatgccgaggtggaggtagtggaggaagctaagcctcccagtagcattggatgca

SEQ ID NO: 705104 - DNA, 122 bp, Homo sapiens
cgcatcccggacggtacttctgccactgctgctccgtggagatcgtcccgcgcctgccgctccaccgggggacggctacgtgcaggcggacgcccggggccccccggaccacgaggagcacc

SEQ ID NO: 705105 - DNA, 100 bp, Homo sapiens
aaaatctccgcagctctggttcctgttgcggccgctaaaccatttacacagctggtgaaagaaatgcagcttcatcgagaagactttgaaataattaaag

SEQ ID NO: 705106 - DNA, 90 bp, Homo sapiens
tatctggacacctttaaggattctcgcctcagattagtgacaagagctggggttaggatccggttggactctgacatcggatgccctcaa

SEQ ID NO: 705107 - DNA, 100 bp, Homo sapiens
gcagttgttgaaattgtccccgcagttttcaatcatgggtatgttagagcccaccaaggaaccactgaaaccactttctgctgcagaaaaaatagcttcc

SEQ ID NO: 705108 - DNA, 76 bp, Homo sapiens
ctctcttttaatcaacatcttggcaagagtcttctggtccctgttgacgacccagatgatgtggtaccagttggcc

SEQ ID NO: 705109 - DNA, 114 bp, Homo sapiens
tgcgcttcagaccctgtatatcttggcatatctgcattactgccctcggaaggagaagatggggagccccgaggatgacctgattgggattccattcccggaccacagcagtga

SEQ ID NO: 705110 - DNA, 75 bp, Homo sapiens
taccttatcagtgcaggagaggattgtgtctgcttggtgtggagccatgaaggtaactaggatttctacctcaac

SEQ ID NO: 705111 - DNA, 83 bp, Homo sapiens
gaggacgggctttaggctggaagcgccttagaggagccatttttccagaattgcctgaggttctgtccattgaggaggaagtg

SEQ ID NO: 705112 - DNA, 96 bp, Homo sapiens
ggacgtaccaggaggatggtgcccaggacagagcgggatgccaccagcttgtccaaagggaagttccaggagctcctggtgggcatcgttgtggag

SEQ ID NO: 705113 - DNA, 100 bp, Homo sapiens
ggctcattgtagcctcaaactcccaggctcaagcagtcctaccatgtcagccttcccagtagctgggaccacaggttcgttaccgtgaacgcatcaccat

SEQ ID NO: 705114 - DNA, 90 bp, Homo sapiens
gccgtgcaggcggccgtcagcaacctcgtccgggttgttgatcattatgaaaatcctagaaacgtggggtcccttgacaagacatctaaa

SEQ ID NO: 705115 - DNA, 74 bp, Homo sapiens
atctctttataattccctaagcatggctatgcagactctaaaaattcagaaggagctggcggacatcactttag

SEQ ID NO: 705116 - DNA, 83 bp, Homo sapiens
gaaaggtgtactgcaaggaacaaaatgtttgtaaattctccttttaccaagtgcaaatggtcaagaaaaggcttcatccggac

SEQ ID NO: 705117 - DNA, 99 bp, Homo sapiens
cccccggagacagcggcacagaggtgcttctgccagttaatgacagttcggactatcacaggaaatatctactatgcaaggtcaggaactaagattatt

SEQ ID NO: 705118 - DNA, 99 bp, Homo sapiens
ggcgaagatcgccaagactcacgaaggtttccaatacttatctacaggaatcgccatgaccccagctctgagggaggcaacagcaaagggtatcagctt

SEQ ID NO: 705119 - DNA, 100 bp, Homo sapiens
tccgcgacctgagcagctccttccgggacggcctggccttctgcgccatcctgcaccggcaccggcccgacctgctgcataatcaccagcaacacccggg

SEQ ID NO: 705120 - DNA, 82 bp, Homo sapiens
aggaggccttccagctgtttgaccgaacagtttttcagaagaagtgaagtcaagatgaagaaccatttgcttttctggggag

SEQ ID NO: 705121 - DNA, 101 bp, Homo sapiens
gtgggggaactgctggggaaggcgattggcatcgatctctccatcccttccgaggcccgacttcgagatctcggctcaccaaattccacaacctgaaggca

SEQ ID NO: 705122 - DNA, 100 bp, Homo sapiens
cttagaaggcaaaagagggaggagatgcgactcgaagcagaaagtgctgcatttgatacagttcttgggataaatgttgcagtcaagaaactaagccgtc

SEQ ID NO: 705123 - DNA, 98 bp, Homo sapiens
gagctcaggccaccaaaaagaagaaggaagaccggcccccgacccaggagaaccccgaggaggcatgtgagcgcagcctggcagagatggagtcctcg

SEQ ID NO: 705124 - DNA, 75 bp, Homo sapiens
catcgcggccctggacgtgctccaccgacactgcaaagcggagtttaagagagctgtgaaagtagcaacaggaca

SEQ ID NO: 705125 - DNA, 100 bp, Homo sapiens
ttatatccagaatcatggacggacagaggatgcacttgtccaatcctcaatcctgttatagctgaggtggtaccagtttaagaagtgagaacttcttcac

SEQ ID NO: 705126 - DNA, 100 bp, Homo sapiens
acaacgatcccaaccgccgagggctcatcgattgacatgtacgtggaggggacactggatctgctggaactgcttatcatgcatcctttcttaaaaccag

SEQ ID NO: 705127 - DNA, 83 bp, Homo sapiens
gactctttctgttcaggccagaccctctgggagcttctcagccattttccacagatcagatactcaggagaaggaagtcagag

SEQ ID NO: 705128 - DNA, 75 bp, Homo sapiens
ccgggagcggcggcagcggcggcgcggaggcggctgaggtgcgagccggtgtgatgaatgcagactctgctacca

SEQ ID NO: 705129 - DNA, 90 bp, Homo sapiens
gtattgctgtgggtgctgggacttcccgtccgcggcgtggaggcaaatgcagccctgaggatttggctactgcatataacaacagggggc

SEQ ID NO: 705130 - DNA, 109 bp, Homo sapiens
cttgtccacgacaccggctacttctcagctttaccatccctggaggagacctggcagcagaaactgtgtactgttcagagtgtcaactgcagagacattgaagggcgtc

SEQ ID NO: 705131 - DNA, 74 bp, Homo sapiens
aacgtgtgcccacacagagagaaatgcgtctgttactagagtggagagtctaccttcgtctcacatgtgccaca

SEQ ID NO: 705132 - DNA, 90 bp, Homo sapiens
ctgctaattgggccaaatgctcctttaatttttgaacgagatcccaaagagaagattgatattgggctgcctccacccaaagtctcccgg

SEQ ID NO: 705133 - DNA, 97 bp, Homo sapiens
tgagctaaaatggctgaggagagagtcgcgacggtttgatgaaatcctggaggccagtgatgggatcatggtggctcgtggtgatctaggcattgag

SEQ ID NO: 705134 - DNA, 49 bp, Homo sapiens
cagctgcctcagttcttagcgcagggtgtccatcgcgcttccttcactg

SEQ ID NO: 705135 - DNA, 102 bp, Homo sapiens
ccggagtgtaggcggcagaggattcgctcccagagcagctgcggccagggcgcaaccatgtcgccatttcttcggattggcttgtccaactttgactgcggg

SEQ ID NO: 705136 - DNA, 98 bp, Homo sapiens
tgtgcagactacatggcatctaccataggggtactcttttcgtttggacagaggtatctgccggtactgagatgtaagtgatcagctgaagggagaaa

SEQ ID NO: 705137 - DNA, 90 bp, Homo sapiens
gatccgcctgcctcagcctccaaagtagctgagactacagctgggatctagcaattgggaggcagcagacttgggtaatgaagagagaaa

SEQ ID NO: 705138 - DNA, 100 bp, Homo sapiens
gcagaaggagctggaggatgcctactggaaggacgacgacaaacacgtcatgaggaaggagcagcgcaagctcaggagcatctatcggctgcacgccaac

SEQ ID NO: 705139 - DNA, 75 bp, Homo sapiens
ggacatcttcatttacagagcaacttgatgaaggtacacccaatagagagagccaacacagatctatagatttct

SEQ ID NO: 705140 - DNA, 82 bp, Homo sapiens
cggccttcatcgacatcagtgaagaagatcagcagtacttctggaatagaaattctaaacattagcctgccgaacaactgga

SEQ ID NO: 705141 - DNA, 100 bp, Homo sapiens
gacctgtgcaacaacctcttgaggatcgaatcttcactcccgctgtctcagcagtctacagcacggttatgaagacagtatggagtttccagaccatagt

SEQ ID NO: 705142 - DNA, 101 bp, Homo sapiens
ggctgtccaacgccttccagctccggctcccgctgcctgcaccatgtccgccagagggtttacagagtccacggggaatgggatgcaagccagaagctgta

SEQ ID NO: 705143 - DNA, 75 bp, Homo sapiens
gcatggtcagtgccgtttaacctttattgtggtggagtccaccccgctgtgatatatgtaatcgacagtgcagac

SEQ ID NO: 705144 - DNA, 74 bp, Homo sapiens
tgtctctacaaaaaggtgcatataccactggacagagcgggatgccaccagcttgtccaaagggaagttccagg

SEQ ID NO: 705145 - DNA, 100 bp, Homo sapiens
gaacaaactcgaagaacagctgtggaaagaagttgcaaaacactggggctcagaaacacttatgggattttctaagcacggagggttcacttccttaaca

SEQ ID NO: 705146 - DNA, 75 bp, Homo sapiens
gcatactcacagagttagagagagggatggtggttactctggccaggacttcgactgggcagattatcacaagca

SEQ ID NO: 705147 - DNA, 74 bp, Homo sapiens
cgaggtggagcgcgacaacctggccgaggacatcatgcgcctccgggagaaaatctccgggggcatcaaacctg

SEQ ID NO: 705148 - DNA, 83 bp, Homo sapiens
gtccaagatgcagcaggtcggaggaaacagccagaccgagagcagcctgccggggcggaggcataatcaccagcaacacccgg

SEQ ID NO: 705149 - DNA, 97 bp, Homo sapiens
tttaatggaaaatcgcttggttaaaacctgacacttttaacaggtcatcctgtacagttctacagcatgaataggcctgcctctcgccatactcccc

SEQ ID NO: 705150 - DNA, 100 bp, Homo sapiens
tggatgggctgcccccaaaagtgactggcccgcctcctggcacaccccagccccggccacatgaagagctggctttatgtgctggggcagaagagatccg

SEQ ID NO: 705151 - DNA, 75 bp, Homo sapiens
gacagccctgtgtgacaccaagataagtaacgttgaggaacaggttagcaccactgagagagtgtttcaggatag

SEQ ID NO: 705152 - DNA, 74 bp, Homo sapiens
cctgaacactgggatcaatactcagcatccagctgtcaaatcaacaccaaggttcggcaggaattattggagga

SEQ ID NO: 705153 - DNA, 83 bp, Homo sapiens
cttcggcagtccacccaccgccgccgcctcccagcaagatggaattggggaggaggtgctcaagatgtccacggaggagatca

SEQ ID NO: 705154 - DNA, 80 bp, Homo sapiens
cttccccctcggaaaatggttcccactgccgggcgagttgctgatatgtgttcaagatgagtgggatgggagaaaatacc

SEQ ID NO: 705155 - DNA, 100 bp, Homo sapiens
tgaacctgtcactgttcgggaagtcacctgtattgatgaagatgaccctactgctgatgataccagtgctgctgtaactgaagaaatgccaccccttgaa

SEQ ID NO: 705156 - DNA, 90 bp, Homo sapiens
ggagctctacgcctcctacgtttacctgtccatgaatcactgagcttcagctcaaacttgagagtgcccttactgaactagaacaactcc

SEQ ID NO: 705157 - DNA, 100 bp, Homo sapiens
gagatgcgcaggctcaacatacccgtactacaggatgatggctttctcttcctctgggtcacaggcagaagggacaatggagaacattgcagcccaggct

SEQ ID NO: 705158 - DNA, 98 bp, Homo sapiens
gaactcagctgggttggtgaatgttattatcaacccttactttgctaagcaagaaactgaactgttacaagattacccttgaatgtctaccacaaaat

SEQ ID NO: 705159 - DNA, 90 bp, Homo sapiens
gcaagaaccagttaactgtacaaactacacagctcatgtacgagtatgcgttgagacatttgtacgtgctggtcaacctttgtgagaagc

SEQ ID NO: 705160 - DNA, 75 bp, Homo sapiens
tttgactactggggccagggaaccctggtcaccgtctcctcagagtgtgaacatggctacgcctcttcattcccg

SEQ ID NO: 705161 - DNA, 99 bp, Homo sapiens
ctccaagaaaaaaaccacaaatgtttttctgttttgcctgaatacatgatttaaacaagagatttccacagaagcttccaatcagaagactatacaacc

SEQ ID NO: 705162 - DNA, 75 bp, Homo sapiens
atgatagcttccaagggacaaggtgtcaacaatgtgccgtgctcacatggagtggccaagaagaagtagtgagtc

SEQ ID NO: 705163 - DNA, 101 bp, Homo sapiens
ctactatgtccagcctatttgcacaccatccaggagtcagtttattactggaaaagtcttttatgacatcaagagaaatgatcccagaaagaaaaaatcaa

SEQ ID NO: 705164 - DNA, 121 bp, Homo sapiens
ctcttcttgaactggtgctgtctgggcttcatagcattcgcctactccgtgaaggtgagaagccctaccactgcaactgggacggctgcggctggaagtttgcgcgctcagacgagctcac

SEQ ID NO: 705165 - DNA, 82 bp, Homo sapiens
ttgcatatatcaactgtggccttaatgagcatgttgacagcatcgatgctagacagacatgatcctgagcagctgaagaagg

SEQ ID NO: 705166 - DNA, 100 bp, Homo sapiens
gaaagcaaacagaaatttgtgctcaaaacccccaagagattagcagctattactgaactccaggaggcaacaggagggggatgggatggaggtggggacc

SEQ ID NO: 705167 - DNA, 98 bp, Homo sapiens
gatgcccactttcatcaacttctctgtctgctcaacagtcaggttctgaaagaacagtaccttggctacaggaaaatgttcttgggagatgctgttga

SEQ ID NO: 705168 - DNA, 82 bp, Homo sapiens
agccttgtcctcagggaagctggggctggtgcaactttcagaagtggtcccagggcttgtcaatgaggcagatcagattcag

SEQ ID NO: 705169 - DNA, 100 bp, Homo sapiens
tctgttggctcagatacactctctgatttggggatctctagcctacaggatggcttggccttgcacataaggagcagatccctgcttatatcaaaacgga

SEQ ID NO: 705170 - DNA, 82 bp, Homo sapiens
ccggggcgcagttcggaggttcaggcaacgccctgctgcggcggctggtccgcattggggtgctggatgagggcaagatgaa

SEQ ID NO: 705171 - DNA, 83 bp, Homo sapiens
cggaagaccaaagaggatgagaaggacgacaagcccatccgagtcgtgatgagaggagatggattgaaaagcagaacagagca

SEQ ID NO: 705172 - DNA, 101 bp, Homo sapiens
cctgccccttcatgcatgcgcggaggccgcctgctagcaaggtccggaaggtccatttcgacacccaggagcacgggcctcaggccatcacggggctggag

SEQ ID NO: 705173 - DNA, 83 bp, Homo sapiens
cagagctgggtgccaggctgaaggatcactgaggaaggggaagtgggcaaagcaggcatccggtcttgggatgtcgatcctgg

SEQ ID NO: 705174 - DNA, 75 bp, Homo sapiens
gaagctattacattgcttgaacaaaataattgggacttagtgatgcatccaagaagtcagattcaaatccgctga

SEQ ID NO: 705175 - DNA, 89 bp, Homo sapiens
ccagtcggtgctccggggaggtcacctgacgaggagcttctgaaagtacagagaagcttaacaactccactggcctccagagctcctca

SEQ ID NO: 705176 - DNA, 73 bp, Homo sapiens
cagaggctggggagtagctgctgaggttggcagcgctaaaccgggccttcagaaagttgttgatgtgctggat

SEQ ID NO: 705177 - DNA, 87 bp, Homo sapiens
aaagcctctctcttgcccaaaccacgatgggaatagtattgctgtttaggtgcaaactaggtgtattacagtacacagttgtcagac

SEQ ID NO: 705178 - DNA, 100 bp, Homo sapiens
caagaatgaacaatccgtcagaaaccagtaaaccatctatggagagtggagatggcaacacaggttctaagaattttagatccagttacctgcaaagaga

SEQ ID NO: 705179 - DNA, 100 bp, Homo sapiens
taaagacatagttcctggtgatattgtagaaattgctgcctcttgttgctgtaccacatagaattcactcaacaagtagaaacgtgagagaagaaaaaac

SEQ ID NO: 705180 - DNA, 75 bp, Homo sapiens
ggtggatcccgccgggaggtactttgctgggtcatctttctgaaggattggttactaaatggtacagatctccac

SEQ ID NO: 705181 - DNA, 82 bp, Homo sapiens
tgtcagccttcccagtagctggaactacagaagctccaccatgaggcgaggtggatggaggaagcgagctgaaaatgatggc

SEQ ID NO: 705182 - DNA, 82 bp, Homo sapiens
aatgaaccttgacccacaccaaggagctggtggtgtctgtcgattgactgagtgctggagctggcagccctgtgcaggctgc

SEQ ID NO: 705183 - DNA, 101 bp, Homo sapiens
cgggaggttcggttgtcgcccgttggccgcgcggcgccgcgctcggcggccgccattgcaggaatcagtgacattcaaagatgtgtctgtggacttcaccc

SEQ ID NO: 705184 - DNA, 75 bp, Homo sapiens
ggccgtgggggacatcgtctgggcaaattgtggctactaatttgccccctgaagatcaagatggctctggggatg

SEQ ID NO: 705185 - DNA, 83 bp, Homo sapiens
gggaaaagaagcccaaagttttaaagcttgcgcgatctctggcctcttcaactgcatcaccatccaccctctgaacattgcgg

SEQ ID NO: 705186 - DNA, 74 bp, Homo sapiens
agcccctcatcgagctcttcgtcaaggattgtcttggggatcatcacaaagaagaacatattagagcatctcga

SEQ ID NO: 705187 - DNA, 100 bp, Homo sapiens
caggacccgaggccaggagccaggggcccagaagattctttcagtgacctgtatagttcctatgtaatcttttacttcctgctgctgtcagtggtaataa

SEQ ID NO: 705188 - DNA, 51 bp, Homo sapiens
gtcagtctcctcctctctgttgcaggcctgaagctgcccagcaggcattcc

SEQ ID NO: 705189 - DNA, 100 bp, Homo sapiens
tagaagtacgtccaggaatagaagtgacctgctttttcgcaagtggataagattgtggaccagctgcagcagttaatgcaggtgtatgacttggctgccc

SEQ ID NO: 705190 - DNA, 82 bp, Homo sapiens
gaattacgccaagagtcagcctgacatggccattatggccgtcaacacctttgtgaaggggggcatgtgctctgtgtacctg

SEQ ID NO: 705191 - DNA, 100 bp, Homo sapiens
gtatgaagaacagtcacaggacagtgacttgctgtctcctgactcagtcctgagttgcttgtatcctggggatcatggaaagaaaactccgaatccagcc

SEQ ID NO: 705192 - DNA, 89 bp, Homo sapiens
cagttttatgctgatgagagctataacttaatgggaagaaggagaaagggccaacccctgaagaagcaatacagaaactgaaggagaca

SEQ ID NO: 705193 - DNA, 83 bp, Homo sapiens
cttagccctctacttttcaagacaccaagtgagaggccaaccagcatttcctgtgttacatctgcaaggaatacgtagaggat

SEQ ID NO: 705194 - DNA, 90 bp, Homo sapiens
ggcgctggagagggggcgctgagctgttgggggaagaggaagaacgtctgagaaataaaattcgagctgatcatgagaaggccttggaag

SEQ ID NO: 705195 - DNA, 83 bp, Homo sapiens
gagggtagcttgcacctgtcccaactgtaaagaaggtggtggaaggggcttctttcctgtcgttgttggctttattagaagag

SEQ ID NO: 705196 - DNA, 75 bp, Homo sapiens
ggcgaggtggccggagccgtgtggaccaggaggagcgctgtgatcatggagctcagcttggtctccatggggctg

SEQ ID NO: 705197 - DNA, 100 bp, Homo sapiens
gtatagaaaactcgaggcaactattgtgcacaaatgaagatgtttccagccctgcctcggcggaccaaaggatcctccaggtcctattgacaatactaag

SEQ ID NO: 705198 - DNA, 100 bp, Homo sapiens
agagcatggctcttccagcatctcacatctccacaaaccggaggactacccccagactgcagtaagtgttgtcatggagactacagctttcgaggctacc

SEQ ID NO: 705199 - DNA, 98 bp, Homo sapiens
gtgcggggaggtaacaagaaataccgtgccctgaggttggacgtggggaatttctcctggggctcagagttccagcctagggtgaatgtttccccctc

SEQ ID NO: 705200 - DNA, 134 bp, Homo sapiens
cgaggcgctagggaagatcgcaccgcggacgcccgctgagcttggcgcacgggccgaccagacaatgcagatcttcgtgaagactctgactggtaagaccatcaccctcgaggttgagcccagtgacaccatcg

SEQ ID NO: 705201 - DNA, 50 bp, Homo sapiens
cttcaaaatttcaggtcttaaatctggctcatcttcaggtggaactaatc

SEQ ID NO: 705202 - DNA, 82 bp, Homo sapiens
gtggccggcctgacaacacagggcgtggggacctgatttcccatcgccttctgtccccctaaaggcttcagatcctgaggag

SEQ ID NO: 705203 - DNA, 96 bp, Homo sapiens
atttgatgtactgctttaaacttaaagacctctttggacccgaaattgtaaggtgtcatggagaaactccagctgggcccagagattctgcagcgg

SEQ ID NO: 705204 - DNA, 75 bp, Homo sapiens
tgcaggctctggggagtcgccatgggtatcaaaaagccattcacagaggtcatccgagccaacatcggggacgcc

SEQ ID NO: 705205 - DNA, 75 bp, Homo sapiens
ggaaaacaattggttccctccgtcctatgaagcaggttcaagcgtcctcagtaagccttgttcagtgactgtagc

SEQ ID NO: 705206 - DNA, 78 bp, Homo sapiens
gaagaagcatcgttaaagtctctcttcaccctgccgtcatgtctaagtcagaggaaccttccctgtatactgtcaaag

SEQ ID NO: 705207 - DNA, 100 bp, Homo sapiens
gaaaaaccatcgaagaatgaaaccggcttgttgtcttcaattaaaaaatttattaaaggaagcacacctaaggttggtcaaagaaaaagtgatgtatgaa

SEQ ID NO: 705208 - DNA, 98 bp, Homo sapiens
ccctgcgttgtaccatccgcctgtgggacacctaccagattgcttgctgatgccattgttctttttacatcaagtcaagaggaagttactcttgctgt

SEQ ID NO: 705209 - DNA, 100 bp, Homo sapiens
ccgggcccagcacagccagcaccgcacgccctgcaagggagcttgccacagctaccttggatggtaaactccagctctttctagctgagtaaccactgac

SEQ ID NO: 705210 - DNA, 52 bp, Homo sapiens
gccgagcaggctgagcgatacgacgaaaaagcttgtggtgaaggggggcaaa

SEQ ID NO: 705211 - DNA, 101 bp, Homo sapiens
gtgtccttggaggtgaccagggccactgcaggcatggtgctaggtgtttggagaagagggattgaccctgaatcttgaagacgttcagcctcatgacttag

SEQ ID NO: 705212 - DNA, 100 bp, Homo sapiens
tgaggagaggagcgtcaacagcagcaccatgggagcagatgtctcaagtattagatgccatgtttgaaaaattggtcaaagatggggagcatgtaattga

SEQ ID NO: 705213 - DNA, 97 bp, Homo sapiens
tagtattgatgaaaagagggactgccataacattcccaaaggtgatgctgtggagtcttcaaaaagcccgaccactctggattacaaatttacagga

SEQ ID NO: 705214 - DNA, 75 bp, Homo sapiens
cgagggcctcggccatccaagggtctcccaggatggcctggtgggaatccaacaattaccagtccttctgcctgc

SEQ ID NO: 705215 - DNA, 75 bp, Homo sapiens
cccctctatttacattccattgatgggaacttaccacatactcaggtacaacaaataacactgtgactccaacct

SEQ ID NO: 705216 - DNA, 87 bp, Homo sapiens
ggatatcgggtggcggctcgggacggaggacgcgctagtgtttgcccaaaggaccagccaaaacctcacctcaagccacgcatatga

SEQ ID NO: 705217 - DNA, 100 bp, Homo sapiens
cctgaggctgcaccaagtggcgaaggagccggctccaaggtctacgaccccttccgctttgacccagagaacagcaaggggaggtcacctctggctttta

SEQ ID NO: 705218 - DNA, 107 bp, Homo sapiens
cccgcgtccagcacctacgtcccgctgccgtcgccgccgccaccatgcccaagagaaagaatggacagacctcaggggaagaagctggacttcagccgtccaaggtg

SEQ ID NO: 705219 - DNA, 143 bp, Homo sapiens
catgattgaacgatctgtggtggaagcagcagtccaggaatgcagtcagtctgttgatgaaactatgatgtacagttacccagcacgtgtacctcctcctcctcctattgctcgggctgtagtgccctcgaaacgtcagcgtg

SEQ ID NO: 705220 - DNA, 100 bp, Homo sapiens
agcaagattaactgaggagatcaaattgagtcaggctccccagaggcccatctcaacacagagaaccgctgcggctcctaaggctggccctggtgtggtg

SEQ ID NO: 705221 - DNA, 100 bp, Homo sapiens
gcgctagtcagtgcgcatgcgccgtcgctaggcaacaggacacagctccgggcgccggcgtagaatctgagctgcagagatgtggtatggtgtattcctg

SEQ ID NO: 705222 - DNA, 100 bp, Homo sapiens
agtgaaatggggtgaatcatttgacaaactgctttcccatagaggggtttgccaacttgttaataagatggaggagaatactggcaaggttaagcctttc

SEQ ID NO: 705223 - DNA, 83 bp, Homo sapiens
cgaaaacggtgaaggtcggaaccgacagcctcctccgagaaggacctgcctagagctggaacgttacctccagagcgagccct

SEQ ID NO: 705224 - DNA, 75 bp, Homo sapiens
ggaaagtatttgtggtaataacccttaccgggagtttcactgaaggaaatgccagtcctcgattcatccgttgta

SEQ ID NO: 705225 - DNA, 100 bp, Homo sapiens
ctggacctgctgcctgactacctggctgccatagatgaggccctggcagccttgcacgtgacggtcttcctaacagagtacgcggggccccttttcatct

SEQ ID NO: 705226 - DNA, 75 bp, Homo sapiens
gccatgatttaaatatcggcgttaagaaatcgagctatagcagattatcttcgttcaaatggctatgaagaggca

SEQ ID NO: 705227 - DNA, 152 bp, Homo sapiens
tcctgacacacttggataccacccagcagatgattgctaattccttgaaggacaataccaccctcttgacccaggaacgtcaaggtcgtgggaaataaaaggcagttctacacagactgcagcaacggttgcatctgcatatcctaagagga

SEQ ID NO: 705228 - DNA, 75 bp, Homo sapiens
tcacctctcaccgcgcatgtttggagttacagccaagttctacttctgaatctatggatcaactactaaacaaaa

SEQ ID NO: 705229 - DNA, 100 bp, Homo sapiens
agaaaatcagaagtacagttttatctagccacatcttggagctgtatgacaaaattaacacaaagtcttcaccacaaatcaggaatcctccaagcgatgc

SEQ ID NO: 705230 - DNA, 100 bp, Homo sapiens
ccctcaggatcagaccgtagcccttccggaaacctccatgaggcggatttccctgactgaagaccatgttgcaggcccacagctgcctacagaaccgtcc

SEQ ID NO: 705231 - DNA, 82 bp, Homo sapiens
gtagcttggatccttgtgggcatgatccataatcggtttcaagatggagcagatggtgctttttacccagatgaaatacaaa

SEQ ID NO: 705232 - DNA, 100 bp, Homo sapiens
accatcttcgacttgagcgaagttttatgcaaggatgatggcttggaaaaaagtccaatgaaaaaaaaacagaagaagaaagagaacaaggagaacaagg

SEQ ID NO: 705233 - DNA, 100 bp, Homo sapiens
aggtcacaattcgctccccagtgcagatttatccacctatcaatgtgctgccctcactatcacggttaatgaagtctgctattggagaagggatgaccag

SEQ ID NO: 705234 - DNA, 50 bp, Homo sapiens
cgccgccaccacccactccggacacaggctatgactttgcagccgtcctg

SEQ ID NO: 705235 - DNA, 75 bp, Homo sapiens
caataatgaaagctcttcagaggagatctattgggaaactgattataaccactcgggcaccatcgatgcccacga

SEQ ID NO: 705236 - DNA, 98 bp, Homo sapiens
atcgcaggaggcgatgaggtggcagaggtctcctttgagaaggagacccaggagaacaaactggtgtgcatgatgacccagcagatggctgggatgaa

SEQ ID NO: 705237 - DNA, 101 bp, Homo sapiens
tgtgaaaaaagccatttccgaaggaatacctcaatagcattctccagcatgccaaggatttcaaggaatatcacagatccgtcacaggcaaaatccagaag

SEQ ID NO: 705238 - DNA, 75 bp, Homo sapiens
gctctgtaaaagccccgcctctgccttcggatagagctccctctttgcccactagcagggcattagctggtgctg

SEQ ID NO: 705239 - DNA, 98 bp, Homo sapiens
ggagacgacgctgctgggtccgctgagcggggcgacccgagcctactttggggataaaggattatttggtcttctggatttggaggcaatcagcggac

SEQ ID NO: 705240 - DNA, 75 bp, Homo sapiens
tgtactgcaaggaacaaaatgtttgtaaattctccttttaccaagggtattacttatgaccatgtcgaattaaat

SEQ ID NO: 705241 - DNA, 100 bp, Homo sapiens
cttgctgcaggctctggggagtcgccatggactgctctgcatttggcctgtgccaacggccatccagaagtggtagctcttctggtggacagaggatgtc

SEQ ID NO: 705242 - DNA, 74 bp, Homo sapiens
aactgctgaaaaagtccatcagtgttcaggatctagtgaaaagccatttgatgtatgcggtcagagaagaagtg

SEQ ID NO: 705243 - DNA, 100 bp, Homo sapiens
ccgggacccagctgcccgtatgaccgcgccgggcgccgccgggcgctgccctcccacgactatctgttatagtccctgggtcaagacaacaatttttata

SEQ ID NO: 705244 - DNA, 80 bp, Homo sapiens
tcaaggataagggcgacagcaacagctctgccggctggaaggtattgatgtcaagctgaaccatcgtaggaagttgaaag

SEQ ID NO: 705245 - DNA, 100 bp, Homo sapiens
gtccagccacatcacattggagtcacaatcaaagaactggatctttatctggcttactttgtccacactccgggtcgccgtcgttgctccgctcgctctg

SEQ ID NO: 705246 - DNA, 83 bp, Homo sapiens
gaaaaatatgtggatactccatttggcaagtacaagccagctgccatgttgtgagcacataccacatagctccatggagatgc

SEQ ID NO: 705247 - DNA, 75 bp, Homo sapiens
aggataaagagagcctgacagaagatgcctccagggagtgcagcaacaaggaatgtcccttcctgcacatcgacc

SEQ ID NO: 705248 - DNA, 50 bp, Homo sapiens
tgatcatcctgctgctccccggaaactccaagaatgaaaaggctctgggc

SEQ ID NO: 705249 - DNA, 98 bp, Homo sapiens
ctgcacctcgaggcttccctggacaaggaggtggtccattatggctgacatgcaaaatctggtagaaagattggagagggcagtgggccgcctggagg

SEQ ID NO: 705250 - DNA, 83 bp, Homo sapiens
cacacagaggatgatgctgactttgatgaagacaccttcagcagtaaacaagataaaacaacttcttaaagataagcctgagc

SEQ ID NO: 705251 - DNA, 82 bp, Homo sapiens
gcgtgtgtgagcgcgccggaccaagcgggcccagaagcggtgcctccggagccagcgtggtggccatagacaacaagatcga

SEQ ID NO: 705252 - DNA, 96 bp, Homo sapiens
cagcactggactcatggaggctgagcatttattcaggctgtgcaggaaccacccagacacccgcacccgggcatgcttcacacagtggctgtgcca

SEQ ID NO: 705253 - DNA, 100 bp, Homo sapiens
tccaaaagcttgaaacggagttacaagaggctaccaaagaattccaggtgattcgcaaggggtggctcaccatcagcaacattggcatcatgaaaggcgg

SEQ ID NO: 705254 - DNA, 97 bp, Homo sapiens
cagcctcccgaggagctgggactacagaatcctggtaattgatgtccacccgagaaatccctgcagatgttccagcctctgtctagtccagatagcc

SEQ ID NO: 705255 - DNA, 83 bp, Homo sapiens
aaagagatgtggggggattctcgacctgctaacagaactggaccttttcggaggccactgtctgcagctcccgtgaagatgtc

SEQ ID NO: 705256 - DNA, 100 bp, Homo sapiens
gcggccatggctcacctccggggatttgccaaccagtaagactttgaccccgacgcaggcttcagtgattgccgcggatcagaagcctgagcactttggc

SEQ ID NO: 705257 - DNA, 75 bp, Homo sapiens
aggacagcacctagtcgtggccggaggagtctcagagctgtcagaaagcccagatgacttactcaatgccttgaa

SEQ ID NO: 705258 - DNA, 75 bp, Homo sapiens
cgtcggttctgtccgggaggaatgacggggtcaaggtgaccaagaatatggcccaggtgaccaaagccctggaca

SEQ ID NO: 705259 - DNA, 100 bp, Homo sapiens
atcatgctgccactgtgccctacctggccccatggcgggtgccagaaaatggacacgaccttcaccgagggtgctgtaccggggcagttcagcaacccag

SEQ ID NO: 705260 - DNA, 83 bp, Homo sapiens
tgactacctgctgtacaccctcaacaaacaccagcgctttggccgccaccggcacggccaggccagcatggtggaccacttac

SEQ ID NO: 705261 - DNA, 100 bp, Homo sapiens
ctcgaagtggtgagcaggaacggaagaaccccatggcactctatatcctgaaggacaagataaactcatcctgaaagtcgctgttgttctcctgctgagc

SEQ ID NO: 705262 - DNA, 92 bp, Homo sapiens
gtcgcttgaaaagactgggcttgtccttgctggtgcatgcgtcgtcggcctctgggcagcagcaattctgtggtgttcttggtcacacattt

SEQ ID NO: 705263 - DNA, 100 bp, Homo sapiens
agaagcagctccacgaaaggcagccgcggatcgccgcgctcagcgacaaacaagatttgcgcaagcaggtagcgccgctgctgaagagtttccaaggaga

SEQ ID NO: 705264 - DNA, 118 bp, Homo sapiens
ggccggagaggagcatgaatggagcaaaatggcggatcatgtgcagacaacaagggaggtgtcacagttttccatttagatcaacaacttcaagttcttaccatggaaaattccgaga

SEQ ID NO: 705265 - DNA, 100 bp, Homo sapiens
agattctttgtagcagacactgcaaatgaagctctcgaggctgctaagagactaactgcaagtgtccactgcttgggaaagtgtgggaagctgacttgga

SEQ ID NO: 705266 - DNA, 100 bp, Homo sapiens
tcaaaccagatattgttgacaaagaggaggagatacaagatattattcttagatccggattcaccattgttcagtgttctggacttggtgcctctttctg

SEQ ID NO: 705267 - DNA, 155 bp, Homo sapiens
ccaggatgcctttgccgccgccaagctcctggccctggccctgatcatcctgctgggcttcgtccagatcgggaagggtactccaaagattcaggtttactcacgtcatccagcagagaatggaaagtcaaatttcctgaattgctatgtgtctg

SEQ ID NO: 705268 - DNA, 90 bp, Homo sapiens
gtcgacatgttaaaacgggtcagttggcagccatcaaagttatggatgtcactgaggattttgcctaccattttacagtatttgtcttct

SEQ ID NO: 705269 - DNA, 100 bp, Homo sapiens
catccaggttgatgaagctaatttattgacttggcaagggcttattgttcctgaattgaatgatctggcacgggaccctccagcacagtgttcagcaggt

SEQ ID NO: 705270 - DNA, 75 bp, Homo sapiens
cagcaccatggggaagcgggacaatcgggtggtgtggacactgccagcggctgcagccgacttggaatgacctgg

SEQ ID NO: 705271 - DNA, 75 bp, Homo sapiens
cacagcagcatgggacagtcagggaggatccaggaggctgcaagccagggcctgaaattcgttggtgttatacct

SEQ ID NO: 705272 - DNA, 73 bp, Homo sapiens
catttcacagctgattcctgggagcacatccatttcattggcaaggcatacttctccgccttcccaccacccg

SEQ ID NO: 705273 - DNA, 78 bp, Homo sapiens
ccatgagctgactcatgcttttgatgatcaagacttaattcagtgcacaaatgagatgaatgtgaacatcccacagtt

SEQ ID NO: 705274 - DNA, 83 bp, Homo sapiens
gtgaaaatgaagccagaccgagccaaaccaaacaggaagcttacttttctctacctagccaatgatgtcatacagaacagcaa

SEQ ID NO: 705275 - DNA, 100 bp, Homo sapiens
tggaccgttctcctcctcggcctcctctctcactgcacaggtggaagaactgagtaagaaactggctgactctgaccaagccagcaaggtgcagcagcag

SEQ ID NO: 705276 - DNA, 100 bp, Homo sapiens
acgagtgctgtgactgtgttggttcgatacaagaggctgttttcctagcgtggcttgctgcctttggtaagaacatgtcgtccatcttgccattcacgcc

SEQ ID NO: 705277 - DNA, 100 bp, Homo sapiens
acagttcattcatattcagccttttagcttccacaagaagagactatgagaagatacaggaggagctgacacgtctccagattgaaaatgaggcagccaa

SEQ ID NO: 705278 - DNA, 75 bp, Homo sapiens
atgggaacatacgatgatggagcaaccaaccccattgacaaaccttcagattctctcagtatagggaacggtgat

SEQ ID NO: 705279 - DNA, 82 bp, Homo sapiens
ggatgggcagctacagcttggttccatgtactatagaggagatgttaaagtaacccatcttgcaggacgacattgaagattg

SEQ ID NO: 705280 - DNA, 101 bp, Homo sapiens
aaggaggacttgcagaagtaccacaacagggacacctggttccagctgcagcacgtggacgctgactcggaagtgcagattcacaatgacatcctttcaag

SEQ ID NO: 705281 - DNA, 50 bp, Homo sapiens
gaactacagaaacctgatcttccttgtgctgtggagcatccgagtgtgcc

SEQ ID NO: 705282 - DNA, 99 bp, Homo sapiens
ggaggaagcaggagcagcccaagcgccttccctcacccgccctgatcgtgcgcgaccagaccgagctgcggctgtgcgagcgctccgggcagcgcacgg

SEQ ID NO: 705283 - DNA, 100 bp, Homo sapiens
acatgcttgattttggcttggctcgacaatttaccaattcctgtggtgacgtcagaccataaactgtttcacgttagacctgtaacccaaggagatgtgt

SEQ ID NO: 705284 - DNA, 101 bp, Homo sapiens
acagcaatatctctgggctttcacaggtcaccatcagaaaagctaagtttgctgtatagtgaggatcaggagatctgatcctgattgcagaaccttccctg

SEQ ID NO: 705285 - DNA, 128 bp, Homo sapiens
ctgctgaggactggggcctcattttggatatctgtgataaagttggtcagtctcgcactggatgtagacaaggctggaaaggaaatcgatgccatatcaagtttaatcctcctgctacagacttcaca

SEQ ID NO: 705286 - DNA, 83 bp, Homo sapiens
cagccatgcaaaggcaggggaggaagccacctcgaggtgaaaggtgtagcagtcactcggcctacacccacagcatcgacctt

SEQ ID NO: 705287 - DNA, 100 bp, Homo sapiens
cggccggactgggaagatggacgcagaaagatcaactgaaatcggcaaacttctgagttcctacttgcaaaagaaaagtgacgtggaggatcactcggtg

SEQ ID NO: 705288 - DNA, 75 bp, Homo sapiens
ctgagagaacagggtggccgcttggtccagaaaccgaagctgaaagactggcatcctcctgggggctttattctg

SEQ ID NO: 705289 - DNA, 90 bp, Homo sapiens
gtggggtgaagaccccagttttgctgaccttattcaccatgacttatcaggatgcattcagtctactagcatattcagatccctggaaca

SEQ ID NO: 705290 - DNA, 75 bp, Homo sapiens
tgaggcttccccagccacatggaactgtactgggcctaatcgctacgtgcctctttggctatgatgcctatgtca

SEQ ID NO: 705291 - DNA, 83 bp, Homo sapiens
tgaaggacctgaaaatcatatagagaaagacagatggaagtctttaaggtgctggagaatctggtaaaagcaccattgtgaag

SEQ ID NO: 705292 - DNA, 90 bp, Homo sapiens
cgctgagcaggtcatctttgtccgagctgcagcagttgccacgatgatcgtgcccgtgcccaccaagccaacggagggccaggacgtaac

SEQ ID NO: 705293 - DNA, 100 bp, Homo sapiens
ccacccaatcttcgaaaactggatccagaactccattgtggatggagagagaaagaaaaagccagagaggagagctggggtccacctcgagaatcaaggc

SEQ ID NO: 705294 - DNA, 75 bp, Homo sapiens
gcagattcctccgggcagcaggtctgaaccggacggcttttctcatttccacttgtacgtgtgcgctgcttttct

SEQ ID NO: 705295 - DNA, 100 bp, Homo sapiens
tttgcaaccattggtctgcaggacatcactttagatgatggtatttgagtacagcatcccagacaaacagtatacagattggagccggactgtccagaag

SEQ ID NO: 705296 - DNA, 108 bp, Homo sapiens
ggctctcgcacgactgcatctctctctgcatccaggcgcagatgcttgtgaccacaccagaaaaatgggatgtagtgacaagaaagagtgttggggatgtagctcttt

SEQ ID NO: 705297 - DNA, 100 bp, Homo sapiens
gcccggcgagtcgggctctggaggaaaagaaaggccgtaagttcatcatcgccaacgctcgggtggagaactgcgccgtcatctactgcaacgacggctt

SEQ ID NO: 705298 - DNA, 90 bp, Homo sapiens
gtgaggttgggccttggccgcctgagcccttgagttggtcacttgaaccttgggaatattgagtatgatccatttgctgagcacagacct

SEQ ID NO: 705299 - DNA, 100 bp, Homo sapiens
gttaagaataaggcctactttaagagataccaagtgaaatttagaagacgacgagcttcggaaccaaaaagaagcttcccagagccggggccaggagccc

SEQ ID NO: 705300 - DNA, 51 bp, Homo sapiens
tggctgacctcgtgttcccgtggtgatgcagacagaaagcattgtaaattt

SEQ ID NO: 705301 - DNA, 83 bp, Homo sapiens
cctgggcgagcagcggcgggggcccgaggggtccctgtgcgttttattgcgacctgccggtgggaactttgtctccgagtcgg

SEQ ID NO: 705302 - DNA, 100 bp, Homo sapiens
cggcgcgaggacagcgcgtgcccgcgaggagccgccgcgcgcccgcgccctccgcgcgacgccaggtggctgggccaaggaaggggcctctgagcccagc

SEQ ID NO: 705303 - DNA, 83 bp, Homo sapiens
gcctgtgtcctaggcaagatcatgtacatttttgggggctacgagcagcaggaattgcattttccagatcacgtgcagtcatg

SEQ ID NO: 705304 - DNA, 74 bp, Homo sapiens
cacgagttcaggcgtctgagacttggtgggaacggaccttcctcttagaatgtctacacaaggaagtacaggat

SEQ ID NO: 705305 - DNA, 104 bp, Homo sapiens
ttactgacaatgtgagcagtgcttttgaacaaggtatagtagagtgcaatggaggagtggccgaagaggatgaagtggaggtcatccttgcacaggagcctgcg

SEQ ID NO: 705306 - DNA, 100 bp, Homo sapiens
accgagttttcttcattaaggcaattgcccagttcatgactgccataggcaacacactggtccaggacatctgttattctccagatacccaaaagctcct

SEQ ID NO: 705307 - DNA, 100 bp, Homo sapiens
tcaacctcgacaggcgaacaggatatctgaaggcaatccggctcatccaggcctgcgtggatgtcctttccagcaatgggtggctcagccctgctctggc

SEQ ID NO: 705308 - DNA, 80 bp, Homo sapiens
ctgagagctgggaagaggcggcagacagcggggtgcatggcggcctgctgcagatcttccctgagggccggcccgtggta

SEQ ID NO: 705309 - DNA, 100 bp, Homo sapiens
gaaacaactgatgagagcctgaggagccattttgagcaatggggaacgctcacggactgtgtggtttttcaagtacgaaaagtaacaggagcaaatactg

SEQ ID NO: 705310 - DNA, 100 bp, Homo sapiens
gcgctaccatggcgtttggcaagagtcaccgggatccctacgcgacctccgtgggccacctcataggcaaagaggccatgctgcgacagaaggactatga

SEQ ID NO: 705311 - DNA, 100 bp, Homo sapiens
ctcaacgaaatgtggaagtgtcagaacatgcttcggagccatgtacgcgaactattggatttgcacaagcagcctacactttcaccaacaatcaccagtg

SEQ ID NO: 705312 - DNA, 98 bp, Homo sapiens
cacatccaccatgaaagctaagctgctgaagcctagatattatcctactgaagatgtgcctcgaaagctgttgagccacggcaaaaaacccttcagtc

SEQ ID NO: 705313 - DNA, 83 bp, Homo sapiens
gcgccttgatcgagtacttgagctgcaagatgggattcagatctgttctcaagcctgtcgttccaggacccaggagggagaag

SEQ ID NO: 705314 - DNA, 100 bp, Homo sapiens
aaatgctgactggtaaaaccctttttgcagataatagattgttgacagcaactgattctattcagttgtgggctcctccaggagatgatattctggaaga

SEQ ID NO: 705315 - DNA, 95 bp, Homo sapiens
ccgggagcgagcccaggcggcaggagctcagcctgaggaagaaaggcctggagtgcctcgtgtccattctcaagtgcatggtggagtggagcaaa

SEQ ID NO: 705316 - DNA, 83 bp, Homo sapiens
cagctttatgtcctacgacgaaattagccagctccgcctggcaaggtgaaccctactcagtgtgaagcaatgaccatggttgc

SEQ ID NO: 705317 - DNA, 82 bp, Homo sapiens
gcccagcaagagattaaagatgcagtacgccacggggccgctgctcaagttccagatttgatctgactgcagccatgagcag

SEQ ID NO: 705318 - DNA, 99 bp, Homo sapiens
accatggtctacaagactctcttcgctctttgcatcttaactgcaggtcgagcctcttaggcagagtttaacacatgggagctgcctgcctgctgctgc

SEQ ID NO: 705319 - DNA, 100 bp, Homo sapiens
accgcattttggaactgctgtcctggggatgtggtcgtctgggcttcttattcaagactcggcttccgttacaagatgaggtctgtgtatgctcacttcc

SEQ ID NO: 705320 - DNA, 75 bp, Homo sapiens
gacagtaattaatgatcctttaatcagcatgattcttcagaggctcttcaggttctcctctgtcattcggtcagc

SEQ ID NO: 705321 - DNA, 99 bp, Homo sapiens
agcttcaaatgattttgcaagccgaatctggactgtggatgattatcgattacgggtgccgtgagcgatgtggagatgcaggaacactatgatgagttt

SEQ ID NO: 705322 - DNA, 83 bp, Homo sapiens
gacgtttctgagtgtgtcgcggtcaccatgtaggtcccattagtccaccacagccaccttcagtcagtgcatggaataagccc

SEQ ID NO: 705323 - DNA, 90 bp, Homo sapiens
ctgacagctggtgcgcctgcccgggaacatcctcctggactcaatcatggcttgtaatggagatgtatgcatttcgattcttcatccgcc

SEQ ID NO: 705324 - DNA, 88 bp, Homo sapiens
gctgtgcaaccatcttctggcttttgaaatatcggttgcacactgggccacagaggatccagcaaggatgaagaaatggagcagcaca

SEQ ID NO: 705325 - DNA, 100 bp, Homo sapiens
ccctgccctcccccttgtcccgggatcgctccgtcgcacccaccatgatggaagacgacgggcagccccggactctcccttagagatttgtttgattcca

SEQ ID NO: 705326 - DNA, 82 bp, Homo sapiens
cgccagggtgtcactggagacagaatggaggtgctgccggactcggaaatggggagcacgtgaattgcctctgcttacgttc

SEQ ID NO: 705327 - DNA, 75 bp, Homo sapiens
ggactacaaggtcgcctacgtgcagctggtattgttgcagcatctggcagtgagactgaggatgaggacagcatg

SEQ ID NO: 705328 - DNA, 75 bp, Homo sapiens
ggaatcctcaaaatgctgtggctcttcttccagagaatgacacaggtgaaagcttcagctttagctgcagctgcc

SEQ ID NO: 705329 - DNA, 83 bp, Homo sapiens
cgacaagtggaggcgccgctctagcggccgggactctgaactatggcggaactgtggctgcaccatctgtcttcatcttcccg

SEQ ID NO: 705330 - DNA, 49 bp, Homo sapiens
aggccgcgacgagggcgctgaggaccatggccaacctggagcgcacctt

SEQ ID NO: 705331 - DNA, 100 bp, Homo sapiens
gcaaagaacaagagaagacctcagatgtgaagtccattaaaggtaagcggaagggtacagccaatgcccgaatgccagagaaggtcacatggatgaggag

SEQ ID NO: 705332 - DNA, 74 bp, Homo sapiens
gaggggaaaccccgtaaagtggttggttgcagttgtgtagtagttaaggctattcaagatctctggcagtggag

SEQ ID NO: 705333 - DNA, 90 bp, Homo sapiens
aaaatgtcggcccggacgccattgccgacggtgaacgagcgggacacggaaaatcatgttggaacaggattccaggagaatgaaccctag

SEQ ID NO: 705334 - DNA, 100 bp, Homo sapiens
ggagcttgacgccttagataacagccatcctattgaagtcaagagcacctcacagctgctgagccgtccgctatctgcagtggtgctgaaacgaccggag

SEQ ID NO: 705335 - DNA, 90 bp, Homo sapiens
tcaaaatcccaggctgtcggaagcaagcaataatgacgatgaggacctgacaccagagcagaaggcagagcgtgagaaggagcggaggat

SEQ ID NO: 705336 - DNA, 51 bp, Homo sapiens
gaaaccccaccatcggctactgccaggagatatgtcagtattgaattctcc

SEQ ID NO: 705337 - DNA, 74 bp, Homo sapiens
caaagaccatccagttatacagtgtaaaatcagagcagcttgtaggagcaacggtgggaatgccctctgaggaa

SEQ ID NO: 705338 - DNA, 100 bp, Homo sapiens
gcacaatctggcctcccggtacggatagagagtattaaatgtggtttaagggaaaccacaggctccgagagtgatgggggtgactcaagcagcaccaagt

SEQ ID NO: 705339 - DNA, 83 bp, Homo sapiens
taaatgcaaaacagtggctgttgcagagtgggtattaaggacattgctggtatccatttgccaacaaatgtgaaatttcagag

SEQ ID NO: 705340 - DNA, 88 bp, Homo sapiens
caaaactaaagcaggccacttcaaagtgaagctgtggtctaccaatctagacaactcagtggcaagcattgaggcaaaggctaatgtg

SEQ ID NO: 705341 - DNA, 82 bp, Homo sapiens
accccagatccatttacactttacaataatggcatcagctgctaaggaatttaaaatggacaacttttcacctaaagctggc

SEQ ID NO: 705342 - DNA, 75 bp, Homo sapiens
catcattgaccaggtgaatccagagctccatgacttcatgcagaggtccactgtcccacgagcagaagctgtcac

SEQ ID NO: 705343 - DNA, 82 bp, Homo sapiens
cggcgccctgcaccgcgcctcgcaaaggaaccttctgaccagcctcatgggctcctcagagcaggaggatggggaggagagc

SEQ ID NO: 705344 - DNA, 97 bp, Homo sapiens
caccttgtttgatgtgaatgccattgtcgcccatgttctctttccccctgggattacaggagtgttgaagaaatgttgtgacacatcagaacaccgc

SEQ ID NO: 705345 - DNA, 74 bp, Homo sapiens
cgggagccgccgcgggcaggacgcgcgctgcaggtgctggttgccgaggagaacgtggacttccgcatccacgt

SEQ ID NO: 705346 - DNA, 98 bp, Homo sapiens
tccgggagcacagttccgccgaactcacagatgaatgcttctcacccggaaacaaacttgccagttgggtatcctcctcagtatccaccgacagcatt

SEQ ID NO: 705347 - DNA, 100 bp, Homo sapiens
gacttgcaccctgtgatctctcactcatcccaaattctgcatgtggatgtttggaagagacttttggatgtgggtacctgaatgacttcaacactgcttg

SEQ ID NO: 705348 - DNA, 74 bp, Homo sapiens
ctcctggcatcagctctattcaaatctggttcagattttacagctctgggtgcaaacagctgcacagcaagtgg

SEQ ID NO: 705349 - DNA, 75 bp, Homo sapiens
ggtcgcggaggtggcagggggcctggctccgggcagtgcgggcagaaggagaagacagcctgaagaagatgcagc

SEQ ID NO: 705350 - DNA, 82 bp, Homo sapiens
tcccctgcaccatgagctggggcaccgagctctgggttttttattggcacctcagtctcaacattttcttttcggattcatg

SEQ ID NO: 705351 - DNA, 82 bp, Homo sapiens
agcaggctttgtgtcaagacgtggcacgtgtcagagaatttgacgttggttgaagccatggataacagaacccacagatgca

SEQ ID NO: 705352 - DNA, 80 bp, Homo sapiens
acctcgacgtcttgcctgtgtcccacttgttcgcggcctatagttgtcactcagcccagtccatcagtttctcagcccag

SEQ ID NO: 705353 - DNA, 95 bp, Homo sapiens
gtctatggactttccgaagacgagtaagactttgaccccgacgcaggcttcagtgattgccgcggatcagaagcctgagcactttggctcgagac

SEQ ID NO: 705354 - DNA, 90 bp, Homo sapiens
cccccttcgatgacctccagagcctcccaaacgacgtgttccctgtattgaacactgatatacaaggaatgaatagaagtcaagaaaaac

SEQ ID NO: 705355 - DNA, 82 bp, Homo sapiens
tgaaaaccactgtcttcggcatgacaggccatctgcctgacttctgcatgctcatgccatggtctgaaaaagttcttttctt

SEQ ID NO: 705356 - DNA, 136 bp, Homo sapiens
tctgcggaagaggtgggtgctcgccctggtcttcgggctgtcgctcgtctacttcctcagcagcaccttcaagcagatcctggtgtatagcctggaagcaggacgccgcctcttgaagctgggtaacgttctccgt

SEQ ID NO: 705357 - DNA, 110 bp, Homo sapiens
gcacccgccttttctctctctcctctggcaggatgaggcgtgcaggcctgggtaccaggtcatcagtacaccatctgatattttcatggtgatggaatatgtctcaggag

SEQ ID NO: 705358 - DNA, 100 bp, Homo sapiens
gtcgtcggcatcctcctggcctacctggcagagtgtgaacatggctacgcctcttcattcccgtccatgccgagcccccgactgcagcattcaaagcccc

SEQ ID NO: 705359 - DNA, 90 bp, Homo sapiens
tgtttggaaagacccaggagaagccgcccaaagaactgaacagctttgctgagccatcaaggtctaatggaagcatggttcggcattctt

SEQ ID NO: 705360 - DNA, 82 bp, Homo sapiens
tccgccccccaggaggggcgagagggagccgcagctgatgtcaggttgaaggtttagaacagatgtggaaaaatgtttactt

SEQ ID NO: 705361 - DNA, 83 bp, Homo sapiens
cgccgcgggacctctccgggccatggaaagaagcttccggttctgaggtcctggaggtgccatttccctctctgttgaagcaa

SEQ ID NO: 705362 - DNA, 75 bp, Homo sapiens
tgctgtccttctttgtggagagcaagctctttcgacgtgtagcagcagctttgccgggaatggaaagcacacagg

SEQ ID NO: 705363 - DNA, 100 bp, Homo sapiens
agctttctgcagcaaggaagcccacgtaccaggggctgtcttggtatctagaagagcagaagacagagaatggaaaagataaggaacagaaacaaacaaa

SEQ ID NO: 705364 - DNA, 75 bp, Homo sapiens
tggagtggagatgctgccctggcttcaccgggagcaactgtgatgaggatcctgggtgtttggctgacctacaga

SEQ ID NO: 705365 - DNA, 82 bp, Homo sapiens
tggtcttgctcggccgatgaagtgcagaggtttttttctgttgtcatttacgtgctgaagcatattgacttgaggaaaacgc

SEQ ID NO: 705366 - DNA, 49 bp, Homo sapiens
tctcccaggaatgtggaggagaggtgtaaagggtcaagtttttgatcag

SEQ ID NO: 705367 - DNA, 98 bp, Homo sapiens
tttcatgtgcgatgatgaggaggactacgacctgcatcctgaggttagcattacacttctcccagtggagcccatgacttctgatcaggacgctaagg

SEQ ID NO: 705368 - DNA, 82 bp, Homo sapiens
gagacttttctcagatgttggatatttgcttggaaaaacgtgtgggtacgaccttggagtccaacctataccttctcaggga

SEQ ID NO: 705369 - DNA, 75 bp, Homo sapiens
caagtttcctgacttcttccatcctctggaaatcagctgtgggatcccaacggcttcaatgactggaccttctcc

SEQ ID NO: 705370 - DNA, 50 bp, Homo sapiens
tccagccctgcctcggcggaccaaaggatgttacatcctgtccactgcag

SEQ ID NO: 705371 - DNA, 74 bp, Homo sapiens
cggcagtggatcgaccccgttctgcggccccgaggcctgcctggagccccagatcaccccttcctactacacca

SEQ ID NO: 705372 - DNA, 90 bp, Homo sapiens
ctactgacgaagcttggaagttgcagaaggggaccgtgattagggtattttccattccagaaggacaaaaactctttgagtttcggagag

SEQ ID NO: 705373 - DNA, 80 bp, Homo sapiens
ctttaagtccatggaccaggacttcggatcatgatgctgccgccaccgccgccaccacggagcgagaagcccagatagac

SEQ ID NO: 705374 - DNA, 98 bp, Homo sapiens
aggagaggagggaactgcggagcggtttgtgaagtttgccaacatcgaggaggacaccccgtcctatcaccggagctatgacttctttgtgtcccgat

SEQ ID NO: 705375 - DNA, 75 bp, Homo sapiens
agaggccgtgcgggacgcgggcgccaggaccggccgaacgcagagagcactgcagtttcctcctgaaggctggct

SEQ ID NO: 705376 - DNA, 82 bp, Homo sapiens
gttggcctaggcgaagatccggactctgggtgttttgctaccgtgaccgtttaggataaaagaatcagagtgtctcaaccct

SEQ ID NO: 705377 - DNA, 82 bp, Homo sapiens
tgctcttttggttgaacagtctcgatcagaaagaacccagcgggtgccgcttctccacccgaggcttccacctccaacgagc

SEQ ID NO: 705378 - DNA, 76 bp, Homo sapiens
cagtatccgggcctcccgagaggaaccagcagcacaaacactgttggggcaacagtgaacagccaagccgcccaag

SEQ ID NO: 705379 - DNA, 100 bp, Homo sapiens
ggacgcttcacgtgtcccgtgtgcttagaggtgtacgagaagccggtacaggtgccctgcggacacgtatggcccactgcgtgaccttggttcagctgtc

SEQ ID NO: 705380 - DNA, 75 bp, Homo sapiens
tggatttaaaagacagtcctcgtcagcactgactttcagctatggaatcggaaccacagaggacacattaataac

SEQ ID NO: 705381 - DNA, 75 bp, Homo sapiens
acaggaacttggtagtagtcaatcagcagggctggagtgcagtaacaccactgaagctcactgtaactttgaact

SEQ ID NO: 705382 - DNA, 83 bp, Homo sapiens
cggagcttatactcctcccagtgacgggtctggagtgcgtgggggaccggctgttggcggccgaggtgctcggtggagtcatg

SEQ ID NO: 705383 - DNA, 97 bp, Homo sapiens
atggaaagtgcgtcatcctaaggaacatcgacatcagccaaatggccgatgacacagtggcagaactggacaggcatctggcagtgaagaccaaaga

SEQ ID NO: 705384 - DNA, 83 bp, Homo sapiens
tcaaggataagggcgacagcaacagctctgccggctggaagggagtgcatccgccccaacccttttccccctcgtctcctgtg

SEQ ID NO: 705385 - DNA, 51 bp, Homo sapiens
gaggagcagggcctgactgcgcagctccttcgagaactcatagaacggaag

SEQ ID NO: 705386 - DNA, 100 bp, Homo sapiens
cagaaataatcaagagttgacatcataccaggacaggcgacactaacaggtgaagatctcgggagaccatgactaagaaaagaattgctgtgattggggg

SEQ ID NO: 705387 - DNA, 97 bp, Homo sapiens
caggctgcggcagacggcgacagtggcggcggcgccatggcagggcttgcaggaagatgagaatgtgcctactgctcctgatcctccaagtcaacat

SEQ ID NO: 705388 - DNA, 90 bp, Homo sapiens
acgtgctcctctccatggggttccccagagcccgcgcctgaggcaacttctcctagaatctcaatctcagctcgatgccgccaagagcga

SEQ ID NO: 705389 - DNA, 100 bp, Homo sapiens
gagctggagagcgtggacaagagcgcggggcaagtggctcggaacacagctcctgccgctggatggggaactcgtcctggcttcaggagccggattcggc

SEQ ID NO: 705390 - DNA, 75 bp, Homo sapiens
gacaaagaaacactctccttctgccacatttgttttgagctaaatattgagggagttgtaagacgttcatcgccg

SEQ ID NO: 705391 - DNA, 100 bp, Homo sapiens
tggcggatggcccccggtgcaagaggcgcaaacaagccaatcccaggaggaaaaacggtctcggcgcggaagatggccggcggcgtggacggccccatcg

SEQ ID NO: 705392 - DNA, 95 bp, Homo sapiens
ctgggagctgttagagggcagggatcctagctgacacatctatgtcctcgccttggttggaggttggaaaagagactgttcaaaccactgaggat

SEQ ID NO: 705393 - DNA, 100 bp, Homo sapiens
cgacaggagctgcacaagctgctggacaaggaccctgacctgcctgtcgtcgtggtggccaacaagcaggtctcctctgagcctccggcctccataagac

SEQ ID NO: 705394 - DNA, 75 bp, Homo sapiens
ggtgggggcttagcgcactggaggagcggcgggcttcagacaggtaaactgtcttgagccccaccctcacctgcc

SEQ ID NO: 705395 - DNA, 96 bp, Homo sapiens
gaggattgtgcctgagaagaacccacagaggtaaagattatagttcccaacagcacagcaggtctgataatagggaagggaggtgctactgtgaag

SEQ ID NO: 705396 - DNA, 75 bp, Homo sapiens
gcgagcgtctgggcgggtggtagaaaaatggctacaaacttcctagcacatgagaagatctggttcgacaagttc

SEQ ID NO: 705397 - DNA, 100 bp, Homo sapiens
aatgaacatgtatttaaccaagttccaacaaaagaatgctgccgcaggatacagttgatatattagttggatggcatatagatcatactcagaaaccttc

SEQ ID NO: 705398 - DNA, 74 bp, Homo sapiens
tcagccagcacactcctcgcgagcaagcaggagcgagaacccgagcagcgccatgagcaacactaccgtcgtcc

SEQ ID NO: 705399 - DNA, 75 bp, Homo sapiens
ccccttccgggagcctagatcctgtgctttactctgaagactcctgtcaccactgactaaagaagagaaaactgc

SEQ ID NO: 705400 - DNA, 98 bp, Homo sapiens
ggtgtcaagaagctcagaatgttcctcagatgttagcaatgatggttgatttggaagaagatgaggactgggcaaatgcagatgaactagaagatgat

SEQ ID NO: 705401 - DNA, 87 bp, Homo sapiens
aggtcccaggtagccgcggagcgcacccccgtgcccttttcagacatatctgaagagatggattaagaatgctttggattaaggatt

SEQ ID NO: 705402 - DNA, 100 bp, Homo sapiens
caagatcctaacaaaacaccaagattttatcctgttgttaaagaaccaaaagccattgatgtaaagcaccagtaactccagatagtggttattcatcagc

SEQ ID NO: 705403 - DNA, 74 bp, Homo sapiens
ctgcccagcgtggtggggcagcagaagctccagagcccagacttgcaggagatatgtcagtattgaattctccc

SEQ ID NO: 705404 - DNA, 98 bp, Homo sapiens
ttcccttcttcataactgatcaccctttccatatgcaggtcctggtgcttgatggtcgaggccatctcctgggccgcctggcggccatcgtggctaaa

SEQ ID NO: 705405 - DNA, 75 bp, Homo sapiens
acgaggtctatgagaacaagacggacgtcatcctgatcttggaactgaccggattccatggctctgtaacttgca

SEQ ID NO: 705406 - DNA, 90 bp, Homo sapiens
gaaaatacaaatcacacgcataatggatgaaaggaaccgacaggtaaaatctgtaaaaactgggtcagttttttggacaatgtgctgctg

SEQ ID NO: 705407 - DNA, 100 bp, Homo sapiens
gttctactgtgggtctggactgatctccatgtcctgttgtggggcttttacagcctttgggaagatgagaatgtgcctactgctcctgatcctccaagtc

SEQ ID NO: 705408 - DNA, 100 bp, Homo sapiens
catgtgcaggaccctaacgacaggcgcctccggcccatttacggactcacagaaaacactggacttccccggaagctacttgaaaaacatgacccctggc

SEQ ID NO: 705409 - DNA, 50 bp, Homo sapiens
ccgaataggagtccttccaaaaatgtcaaaatgcagatcttcgtgaaaac

SEQ ID NO: 705410 - DNA, 128 bp, Homo sapiens
tggcgcttggcaccagcatgaactccccatcctcagcaatcccatcaggtgttttgggtctttaaggaggagaagtacttgaaagaggccatggagtgtagcgatgtgatttggcagcgaggtttgct

SEQ ID NO: 705411 - DNA, 83 bp, Homo sapiens
ccaatctgagcgtgctgcggacggcgctgcggtacatccagtgtactaatggtcacttgatgtgcgctggctgttttatccac

SEQ ID NO: 705412 - DNA, 100 bp, Homo sapiens
gatggccaatcccaacaacaacctcatcaactgtgccgctgcaggatctgagctcaacgggacccaggtggagtctgtacagctcaaagtcaacatagcc

SEQ ID NO: 705413 - DNA, 90 bp, Homo sapiens
cttgacttcacagaaaagtttcaacctgtggttcaactggacaagaatccttcaagaaacaggaaaaaactcctaaaacaccaaaaggac

SEQ ID NO: 705414 - DNA, 75 bp, Homo sapiens
cgatagtccaaaaactgaagaagatggtggataagcccacccaggtctgggaggggctgaacgtggtgaagacag

SEQ ID NO: 705415 - DNA, 100 bp, Homo sapiens
atgggacctacaccctaattatccggctgcggcacaacgtgattaagacaggggaggagccccagccccgcgacgaggaggaagcggagctggagctgct

SEQ ID NO: 705416 - DNA, 50 bp, Homo sapiens
cggatgctcactccaaagtctcagcagatggtggaattgcacgacttaga

SEQ ID NO: 705417 - DNA, 100 bp, Homo sapiens
gaaatcccagtgctgatcgagccgtatctcctcagaggatcaggcgtgtgtccagttctgtgaacaaggggagaagaattgccttcagctccacgtcgtt

SEQ ID NO: 705418 - DNA, 83 bp, Homo sapiens
ggcgcggggtccgcgcccggagcgccccgccgcgcacagttgtactcagactatctctactttgcaagttcgaataaatccgc

SEQ ID NO: 705419 - DNA, 96 bp, Homo sapiens
gatgaccacaagctgtccttggatgagctgggccgcaaataccaagtggacctgtccaagattggtctagctgtctgctatgacatgcggttccct

SEQ ID NO: 705420 - DNA, 100 bp, Homo sapiens
ttactctgaggaaggcaacattgaacatgccttcatcctctataacaagtatatcacgtttgttggcatccaaagctgttggggttgatggtgctgaaaa

SEQ ID NO: 705421 - DNA, 100 bp, Homo sapiens
accggagattctcagggcaacccagatctgcaatggcagcagataaaagtgacgagtggtttgccaaacacaataaacccaaagcttcaggttaacggaa

SEQ ID NO: 705422 - DNA, 100 bp, Homo sapiens
tgagggtgatgatggattctgtgtgtttgagagcaacgccattgcctactatgatgctgaaattttcttctaaggagaaatatcccttatttacttttgt

SEQ ID NO: 705423 - DNA, 90 bp, Homo sapiens
ctgctaactaatctgcaaacaattcaggttcaaaccttgtactactcagctgatcacaagctgcttgatgggaacctactagatggacag

SEQ ID NO: 705424 - DNA, 98 bp, Homo sapiens
tttggtttgactgtgtatactctacaatctaagaaggatttcagcaaatttggagcagggtttcatcacccaaacatactagagttggctgcatattt

SEQ ID NO: 705425 - DNA, 100 bp, Homo sapiens
cgacgtgatcgtgctgggcaccggcctgacggtaccaggtcatcagtacaccatctgatattttcatggtgatggaatatgtctcaggaggagagctatt

SEQ ID NO: 705426 - DNA, 83 bp, Homo sapiens
ggtggactccttcggcagtccacccaccgccgccgcctcccagggcgtctctggccgagcctctttttgtggaaaacgacagc

SEQ ID NO: 705427 - DNA, 74 bp, Homo sapiens
caaggaatccatgtttcttccaagaagcaggagtgagctgagtcgacagaaacttcatacccaagagctgcttt

SEQ ID NO: 705428 - DNA, 73 bp, Homo sapiens
gcggttctaaagctgcgaggcccgcggccgccgactgctgcgaggccagctgcgggccgtccagcggctgtgc

SEQ ID NO: 705429 - DNA, 100 bp, Homo sapiens
catgaatggagcaaaatggcggatcatgtgcagctgagatctgtatctgtggacctgaatgttgatccctcgcttcagattgacatacctgatgcgctca

SEQ ID NO: 705430 - DNA, 75 bp, Homo sapiens
ttgaccgctcctccaactaaccagtggcatttttctgaagttgttcattaagacttcccagcattcctacagata

SEQ ID NO: 705431 - DNA, 90 bp, Homo sapiens
ctccaagctgtacaatgaggtccgagcctgtagggagaaggaccgtgaccctgaggccaataacggaaaactgcctgacaacaaagtcat

SEQ ID NO: 705432 - DNA, 75 bp, Homo sapiens
ccaagacttaaagtttcctagatcccagcttaagctccaccatgaggcgaggtggatggaggaagcgagctgaaa

SEQ ID NO: 705433 - DNA, 96 bp, Homo sapiens
ctggtagagtatgtgaggaaacagcccaataggggcacaaaacgtccccgggatgatgaagaggaggagcagaagatgcgtcggaaacaaactggt

SEQ ID NO: 705434 - DNA, 75 bp, Homo sapiens
gatctctgaagaagacaaaaggaatcctaccagtgaagaaaaaatgactgctgcccgcattagaaaatgccacaa

SEQ ID NO: 705435 - DNA, 75 bp, Homo sapiens
agacagaacagttaatcctcaatttaagcctgatctaacccctagaaacagagcaatgtaattgaagctgctcca

SEQ ID NO: 705436 - DNA, 100 bp, Homo sapiens
ctgtgcagctcctgaaaggagagacacttgtgaacattcaagtgaagcaaaagcctttcatgattataaaattcaattctacagggagtggattatgact

SEQ ID NO: 705437 - DNA, 101 bp, Homo sapiens
cccagaagacagtggagggagcagggagcattgcagcagccactggctttgtcaaaaaggaccagttgggcaaggtccagtggcattgcagagcacggatg

SEQ ID NO: 705438 - DNA, 100 bp, Homo sapiens
ccggatagggctgacgctgctgctgtgtgcggtgctgctgagcttggcctcggcgtcctcggaacatcagaacagacattgtcatggatgttggctgcag

SEQ ID NO: 705439 - DNA, 80 bp, Homo sapiens
gagcggcggcgaacatgcgcttttgacacattggaggaaatctggcattttttaaagtttgcgccccacaaagaggaaat

SEQ ID NO: 705440 - DNA, 100 bp, Homo sapiens
tggaggacgaggagagacagaagaagctggaggccggcaaagccaagagctggaagtcgagtgtgctactcaactcaggagatttggagacaaactgaac

SEQ ID NO: 705441 - DNA, 80 bp, Homo sapiens
gtcgggagagcgcgcctagccggctcgcgagtgctggagaatctggtaaaagcaccattgtgaagcagatgaggatcctg

SEQ ID NO: 705442 - DNA, 100 bp, Homo sapiens
gcccagcagaatttgtatagagatgtgatgttggagaactacagaaacctggtctccctaggggaggctcagaagcaagaagaagatgaaagttgtgccg

SEQ ID NO: 705443 - DNA, 100 bp, Homo sapiens
aaatacaaagcaaagattgtttttgcaggaatcgtccgcctaagagatgggctgcgagaccgctatcccgtggaagattatctggacctctttgacctgg

SEQ ID NO: 705444 - DNA, 51 bp, Homo sapiens
ctggagatgacacgtgcgtggggtgttggcttgacaaaagtaagctgaagc

SEQ ID NO: 705445 - DNA, 75 bp, Homo sapiens
gaagccgaagccgcacctcccgcatggcccctccggccagttcccttttagactatggcgacatacctggagttc

SEQ ID NO: 705446 - DNA, 83 bp, Homo sapiens
cctggtacccgtggtgggtacgagagggcttcttcaaaccagaatatcagggaggaataagtttttttcatctgtaatttgga

SEQ ID NO: 705447 - DNA, 96 bp, Homo sapiens
aaaaagaactggaggagccaaggcaacagttggggaatggcggtcaatgtgtattctacctcgataacccaagagactatgagcagacatgacatc

SEQ ID NO: 705448 - DNA, 100 bp, Homo sapiens
gtgagcggtggcagtcgcgaccgcgggtgcatccagtttctgcgcccagagatgatttacacaatgaagaaagtacatgcactttgggcttctgtatgcc

SEQ ID NO: 705449 - DNA, 95 bp, Homo sapiens
gaccaggagcgctctctgtcgctgagtaacgtcaaagggaacccagcacctaccagtaatcatggcccagatgccacagaagctgaagaggattt

SEQ ID NO: 705450 - DNA, 100 bp, Homo sapiens
tcgtggccccttcgacctgcgctccgcgctctggcgctacggtctggccgtcggctgcggcgccatcgagtcacctaaggtcctgcgagtacaagggtcg

SEQ ID NO: 705451 - DNA, 75 bp, Homo sapiens
ggttggcatcccccacatacgggatctaccgaacagaaagggacaaagggacattgtatgagctcaccttcaaag

SEQ ID NO: 705452 - DNA, 82 bp, Homo sapiens
caactgtactgggagagctaggatggaaaacatatccattaaatgggatcgccaaactgaggcagcaactacaacgcagtaa

SEQ ID NO: 705453 - DNA, 75 bp, Homo sapiens
cagccatgacggcgatgtgcggatatgggataagaggtgggtaattccagaattgattggccataccattgtcac

SEQ ID NO: 705454 - DNA, 50 bp, Homo sapiens
tcaccagcactgtctccaccctagaggttcttcacacacccccattcggc

SEQ ID NO: 705455 - DNA, 97 bp, Homo sapiens
atcgagcagctgaacgagtgcaagcagctgtccgagtcccaggtcaagagcctctgcgagaaggctgtgggtgagcgtggaggatgctcagatgcac

SEQ ID NO: 705456 - DNA, 75 bp, Homo sapiens
gccacctgttcctcagttccaaccacagcaacaggcggaggtggcccacatgtcccagacccaggaggagaagct

SEQ ID NO: 705457 - DNA, 75 bp, Homo sapiens
gttttacttcaagcaggggctgatttaatggttcaggaatgatgggcgtacagcctgcagcttatgttagtgctc

SEQ ID NO: 705458 - DNA, 100 bp, Homo sapiens
caatactgggccacatgctgccagttgctttggggccaagaagggcaaagggaagttcgccatccgacctgacaaaaagtccaaccctatcatcaggaca

SEQ ID NO: 705459 - DNA, 99 bp, Homo sapiens
cgggaccgggatcgtgaccgtggagggatgtacagttacccagcacgtgtacctcctcctcctcctattgctcgggctgtagtgccctcgaaacgtcag

SEQ ID NO: 705460 - DNA, 90 bp, Homo sapiens
agctgttcccactggctctgctgaccttgtgccttgctacagattctcgttgacactggaagcagtaactttgccgtggcaggaaccccg

SEQ ID NO: 705461 - DNA, 90 bp, Homo sapiens
gtgagacgtgcctttgaccttctgccatgattgtgaggcctccccagccacgtgaaactttgtatcacggactgattcaccgagcccaac

SEQ ID NO: 705462 - DNA, 97 bp, Homo sapiens
ccaccactgatgacctggattttaagcaccacaattataaggaaatgcgccagacatggttttgctgggtgagtcaagaaggccctcccctgtcggc

SEQ ID NO: 705463 - DNA, 95 bp, Homo sapiens
cggacttcatcatccctgtggagattgatggggtggtccaccagtgataaaaagttgattgcagaaggacctggggaaacagtattggttgcaga

SEQ ID NO: 705464 - DNA, 50 bp, Homo sapiens
tcttgagtagctgggattacagcatgatctccttctgtccagactgtggc

SEQ ID NO: 705465 - DNA, 75 bp, Homo sapiens
agcacggcgagcagtctcaggcctttagtgatgatggcctctggctgtacctggcagggagcagcctgccctgtc

SEQ ID NO: 705466 - DNA, 76 bp, Homo sapiens
gtggacagaggctatttcagtatagagaaactatgttccaacttcctgtcaacaatcttggcagtttaagaaaagc

SEQ ID NO: 705467 - DNA, 75 bp, Homo sapiens
cgacgcgcccgagaacacgctggcggccattcggcaggacagaagttaatcgcatcccttatacccatgacatcc

SEQ ID NO: 705468 - DNA, 75 bp, Homo sapiens
cctaggcgaagatccggactctgggtgttttgctaccgtgaccgtttaggagctagagttaatgccaaagacagc

SEQ ID NO: 705469 - DNA, 100 bp, Homo sapiens
agaaggagcaggattaccaaagggcttccacctctacctcggatgggatgctgaccttggacttgatccaagaggaagacccttcccctgaggaaccaac

SEQ ID NO: 705470 - DNA, 127 bp, Homo sapiens
tagcacctaaggtcttagatggtacgcgttgctatacagaatctttggatatgtgcatcagtggtttatgccaagaaggaaaatcacctcggcagtgtttgaaggaaggatactgcaactctttgaa

SEQ ID NO: 705471 - DNA, 75 bp, Homo sapiens
cgcggagtcccaatgaaacgggcagccatggccctccacagcccgcaggtctcatcatgctcattggctggtcgc

SEQ ID NO: 705472 - DNA, 75 bp, Homo sapiens
gccggtcaggctcgccgccgagctggtaaggggcctggataccaagaagtgactgctcatctaatccataaagct

SEQ ID NO: 705473 - DNA, 75 bp, Homo sapiens
gactcaaacatgaataggacaaagaacagaccgctggttcgtggacagatcagtttctgccactgccttctacaa

SEQ ID NO: 705474 - DNA, 74 bp, Homo sapiens
acgcccaatgtgctctgggacctggttgacaggataggcagaagatggctgtgccacccacgtatgccgatctt

SEQ ID NO: 705475 - DNA, 100 bp, Homo sapiens
ctacaagaacagaaccatcctgggctacaagacgctggccgcgggctccatcagcatggctgaggtgtatgagctcagtggagagcaccatgacgaagag

SEQ ID NO: 705476 - DNA, 75 bp, Homo sapiens
tttgatgagccagctaggaactaagcaggactcaagcaagctacaggaaaatcttctgcgctcctcagaccaccg

SEQ ID NO: 705477 - DNA, 82 bp, Homo sapiens
gctgccctccggctccaagaaggttatctcctcagccaacagagctgtggttgccaaagcaatgaggacctgaagcaagaga

SEQ ID NO: 705478 - DNA, 73 bp, Homo sapiens
gacaaacgatgcagcaactattttaagagaactagaaggtgtccgcaatgttgccagtgtctgtctgcagatt

SEQ ID NO: 705479 - DNA, 90 bp, Homo sapiens
agaattcaaggccaaggaagctgcgggaggccacggagaagatggtatctatgaagccaccaggtttccaggcatccctggctagagacg

SEQ ID NO: 705480 - DNA, 75 bp, Homo sapiens
cctcagccctcatgtattcattcgtattatattggaggagtggagtcaacatatcaatggagcaagtcacagtcg

SEQ ID NO: 705481 - DNA, 75 bp, Homo sapiens
gttagcaatgatggaaagtggggtgagagactatagcaagcaggaaaaatgaggaagctgtgagtaccagtggaa

SEQ ID NO: 705482 - DNA, 82 bp, Homo sapiens
atgatattagtgatactttctctgaaccagatagacgatcagctgaacactctcttgaaggagttccagctaacagaggaga

SEQ ID NO: 705483 - DNA, 50 bp, Homo sapiens
agattatgaccttaacatcagtgagctgatgttcctggagaccagcgctc

SEQ ID NO: 705484 - DNA, 75 bp, Homo sapiens
cgacggagaaatggactcctcttctcgctcctgtggagtttcgtcttctggaatccacattcatctcaatggaag

SEQ ID NO: 705485 - DNA, 83 bp, Homo sapiens
ccagaaacgtcactatcaagaaggatatcacattggagtcactgccaagtcatagccataaatgatgagtcggtcctctttcc

SEQ ID NO: 705486 - DNA, 101 bp, Homo sapiens
tcgggccccggagacgggcgaggagcacggcagcagccaggttcgagaacttgtcttggacaattgcaaatcaaatgatggaaaaattgagggcttaacag

SEQ ID NO: 705487 - DNA, 76 bp, Homo sapiens
gactaaactggcgggctccgtggaagcgtggccggcagcgtcccggacgaggagaggcggggtttcaccatgttgc

SEQ ID NO: 705488 - DNA, 100 bp, Homo sapiens
ctacagaaggttaaaagcatcttgactcctgaagacttcattagaggggtggtagactcggaggatctccctctaaacatatcccgtgagatgttgcaac

SEQ ID NO: 705489 - DNA, 101 bp, Homo sapiens
gcagcagcagacacgcatcgcagagctggagaagacgtcagctgaacacaaacaccagctggcggagcaggatagatcactgcgaccagaggaaattgaag

SEQ ID NO: 705490 - DNA, 83 bp, Homo sapiens
caaggagtcctgtgatccatcactcggattggcaggacctggggccaaaagccaagatgtattcgtgtcaataaatttcagag

SEQ ID NO: 705491 - DNA, 100 bp, Homo sapiens
cccgttttggcattgctgctaagtacatgctggattgtagaacttctctctcttgacctagagtcccgcagggatgtgaagagagaagaaggagaggcct

SEQ ID NO: 705492 - DNA, 74 bp, Homo sapiens
attgtctcatgatcagtggatggttggtgttcgaggaagagacattgttgttcttggtgtggagaagaagtcag

SEQ ID NO: 705493 - DNA, 74 bp, Homo sapiens
tggtgcctggcgtcacactggatttgatagaaaagcagtgttgtaagcacggggacagagacgtacgtgagcag

SEQ ID NO: 705494 - DNA, 98 bp, Homo sapiens
accctgaaagcaaccaggaggcagtaaattcttcagctgctcggacagatgaagctccccaaggagctgcaggagaactatcctatccctgaaccagg

SEQ ID NO: 705495 - DNA, 76 bp, Homo sapiens
attctctgagtaggaacaatgaagagccagatgaccaagatgctccagatgaacatgagtcgcctccacctgaaga

SEQ ID NO: 705496 - DNA, 98 bp, Homo sapiens
cggtttccctcggcgtgctactgtgcgctcgatccagcaccatggggaagcgggacaatcgggtggttcggacaagtggacctccctagaaagaaaac

SEQ ID NO: 705497 - DNA, 75 bp, Homo sapiens
tgcctcagcctcctgcgtagctgggattacagcctgccacagtgactcaggtcactcaaggaactatccgaccag

SEQ ID NO: 705498 - DNA, 90 bp, Homo sapiens
ggacccagctggctcacaaccgctagccacgatggaggtgatgaacctgatggagcagcctatcaaggtgactgagtggcagcagacata

SEQ ID NO: 705499 - DNA, 100 bp, Homo sapiens
gggatgactccgctgaggtggacgtgtacaacccgacgaggaacgaatgggacaagatcccgtccatgaatcaggtcaaaatgcagatcttcgtgaaaac

SEQ ID NO: 705500 - DNA, 100 bp, Homo sapiens
cctgggggtgcgcgcctgcgacctgcccgcctggtggaagatagatgataagcctgtaaaaattgacaagtgggatggatcagctgtgaaaaactctttg

SEQ ID NO: 705501 - DNA, 100 bp, Homo sapiens
ggtgtatctcaggagctcttctctgctggcttggtggatggtcacgatgtagttatagacttaattgtaggagcttttggtgtagatcgagctatcttat

SEQ ID NO: 705502 - DNA, 48 bp, Homo sapiens
cagaccccttcaagttctagtcatggctcacggaatttgaagacaccc

SEQ ID NO: 705503 - DNA, 100 bp, Homo sapiens
ctcagccgtgccctccgcccctcagagtccactgccagctggttcgactctttgcacgaggaattgaagagaatccgaagccagactcacacagctgaga

SEQ ID NO: 705504 - DNA, 75 bp, Homo sapiens
agactgtggaacttttaagtggagtggtggatcagaccaaagatggtgccaaacccaagtctgaaatccacgtgt

SEQ ID NO: 705505 - DNA, 101 bp, Homo sapiens
aaacagaacgttgcaaactctggaaaaaaacttgggagaggcagatgcgaaccagaacaatgggacctcctctcaggacacagcggtgactgactccaagc

SEQ ID NO: 705506 - DNA, 100 bp, Homo sapiens
ggggagattacttttctggaagttcgtaagaaggcaacaagttcttctcctctacagaaggattttgcaaacaattcggcaagttccaaatgattctgat

SEQ ID NO: 705507 - DNA, 100 bp, Homo sapiens
atatgggggttctggagagcggggtgtggggtttggtgcacctcgatttggaggaagtagggcagggcccttatctggaaagaagtttggaaaccctggg

SEQ ID NO: 705508 - DNA, 76 bp, Homo sapiens
ctcagacctggggcccctacctccctacagacagagccacaaggttctaagctggtctatgtccatcaccttcttg

SEQ ID NO: 705509 - DNA, 100 bp, Homo sapiens
ccagccatgattttttggctccagatttggagcaagaggtggtggtggccttcccccgaagaaatttggtaatcctggggagcgtttgcgtaaaaaaaag

SEQ ID NO: 705510 - DNA, 83 bp, Homo sapiens
gtctgtctttaaggacagactgtatgaactggacatctcgttccctcccagggcgggcaggtccggacgcgctgggccctggt

SEQ ID NO: 705511 - DNA, 98 bp, Homo sapiens
gtgaacaacccgttcttgcctcaggccagtcgcctccaggccaagagggatccttcacccgtgtctggtcccaggtctccccgctgcgctgcttgagg

SEQ ID NO: 705512 - DNA, 75 bp, Homo sapiens
tttaagggctacgggaagatcctggaggtggatctgaagaacggtactcccttccggtacctacttacaccttcc

SEQ ID NO: 705513 - DNA, 100 bp, Homo sapiens
gggcgccctttcctcatcatcaaggatcaggaccgcaagtcccgtcttatgggacttgaggccctcaaggctcctccattaccatccgcctcatcttgat

SEQ ID NO: 705514 - DNA, 82 bp, Homo sapiens
tttctgctgctgaagtaatgcaatggtctcaatctctggaaaaacttcttgccaaccaaaccgaattaagaaagtggtttcc

SEQ ID NO: 705515 - DNA, 96 bp, Homo sapiens
ttcaggtgcttgattttgtgcaggatccgtgctttgcccaaggagatggtctcattaaggtacatgtccagggccgccgggtccccttccccattg

SEQ ID NO: 705516 - DNA, 88 bp, Homo sapiens
ctttaatcggttagacttctcaagtgcaattcaagatatccgaaggttcaattatgtggtcaaagttgtttacattcagagctctatc

SEQ ID NO: 705517 - DNA, 97 bp, Homo sapiens
gccttggagagaaaacttgcaaggaaaggaacatgtttgaatttcagatgtgttcctcaatgaatcacgatttaagtgccctgtatgctcaaaattt

SEQ ID NO: 705518 - DNA, 133 bp, Homo sapiens
atcaggctctcggggcaagagctacccgctgtgcccctactgctacaaccacccacccttccgagacatgaagaaaggaagtggagagactgattttggacctcagctcaagaacctcaataagaagctcttc

SEQ ID NO: 705519 - DNA, 87 bp, Homo sapiens
aaaaaaaagagcaagaaacagaaatatgaaaaaaacaatgagtcatctgatagctcatcagaagctgtagagaaatatgaagaagtg

SEQ ID NO: 705520 - DNA, 75 bp, Homo sapiens
gtttccatcacgagtgccgccagcatgtctgacaaactgccctacaaagtcgcttgtctccttcagatggagccc

SEQ ID NO: 705521 - DNA, 80 bp, Homo sapiens
aagatcactaatccagtttatgaaacaggctgtggaaaatctctgttctcacaaagtctccccaatgctctacaagcaac

SEQ ID NO: 705522 - DNA, 76 bp, Homo sapiens
ttcgcagtggtcgcttcttctccttggtgaagtcagcactgtgcttaagctggataacacagtggtggggcagacg

SEQ ID NO: 705523 - DNA, 87 bp, Homo sapiens
tactgagcctgttggaggaactggcccggaaacaggaggacgtacatggtgcgggtccgagctgtggtgatggcccgagatgactcc

SEQ ID NO: 705524 - DNA, 83 bp, Homo sapiens
tcgagatgtctacttcgaagactggcaagcacggccacgccaagccccgcggcagcacacttcctttgctggaagggccccag

SEQ ID NO: 705525 - DNA, 100 bp, Homo sapiens
cgtttgggaatgtcaagctggtggtccacgactgtcccgtctgggtgcccaccagctgacctctcctccttctcagtcagagtctctgctggccatgttt

SEQ ID NO: 705526 - DNA, 51 bp, Homo sapiens
agcagcatgtgacaccgaccagtgacccccatctcactgtggaagatgcaa

SEQ ID NO: 705527 - DNA, 75 bp, Homo sapiens
ggctgcccggggccaacatgaccaggtaagaatgattgatgttggctgatattggagtgctcattcacatgaagt

SEQ ID NO: 705528 - DNA, 75 bp, Homo sapiens
ctcgcgcgcgaccgccgaatcgctcctgcagcagagatccagagacaatggccccgatgggatggagcccgaagg

SEQ ID NO: 705529 - DNA, 99 bp, Homo sapiens
ctttgcacctcgcagctaaaaacggccacatcgacatcatcaggacagagcgggatgccaccagcttgtccaaagggaagttccaggagctcctggtgg

SEQ ID NO: 705530 - DNA, 74 bp, Homo sapiens
ggacaccattttctgccgctggacgcaaggcatgaatgctttacagttgcagaacctggcgacgctggctgctg

SEQ ID NO: 705531 - DNA, 90 bp, Homo sapiens
ggccatcttcaccgtgtacctgggctcgagcctgcacatgaaggctgtgtggcttgcgcatcctgcagccctacgccgagaggatccccg

SEQ ID NO: 705532 - DNA, 98 bp, Homo sapiens
ttctacgtgtcccccgaggatctggaggcacagctgcagtctgacgagaggggacggctgtcctcagcgaggggccgtgcacccgctcctgagcagcg

SEQ ID NO: 705533 - DNA, 100 bp, Homo sapiens
caacatcgcggtgcagcgaatcaagcgggagttcaaggaggtgctgaagagcgaggagcgggtatttctgtgggacttggatgaaaccatcatcatcttc

SEQ ID NO: 705534 - DNA, 98 bp, Homo sapiens
aagaattgcctttgggactctgaaggctgaaggctagtcaccctgctgtggaatagaaggccagaattgatcagtctcatctgagagtaactttgtac

SEQ ID NO: 705535 - DNA, 79 bp, Homo sapiens
tgaaggaaaacctccttatgctgatatacatccaatgagggaagaggcagaaatccaggcagaacttgaacgtttggaa

SEQ ID NO: 705536 - DNA, 50 bp, Homo sapiens
tcctaggagaggagcagctagaagggtccttggatgtggctgtgttgccc

SEQ ID NO: 705537 - DNA, 82 bp, Homo sapiens
gaacggacgcgcgctgctgccgggttcacacgacgcgctgctgccgcgattacccgggtcgcaatggaagaagagatcgccg

SEQ ID NO: 705538 - DNA, 95 bp, Homo sapiens
gggtctccaggcagcggccgtcgccgcatccccggcagcagctccaggcaaagtgacagaaactccccaacttttaaatcatttgaagaaaaggt

SEQ ID NO: 705539 - DNA, 85 bp, Homo sapiens
tcaagaatgaagccgtggaccttcgcggatccctttgtggccttccacatcaacaagggccttgtgaagaagtatatgaactctc

SEQ ID NO: 705540 - DNA, 74 bp, Homo sapiens
tcgggggcaagcggaaggtgatgcccaagatggaccagctccctcgtgaaagatgcttctgttcctctgattga

SEQ ID NO: 705541 - DNA, 75 bp, Homo sapiens
ttttggaactagtgccggcggctctccaccccccagtctgttcggcacttgaagtactccttgtttaagaaatca

SEQ ID NO: 705542 - DNA, 90 bp, Homo sapiens
aattgctgaagaactcgcaagctcctacgaaagaaagctcatcgagggacagtatgatttggtgaaatgcctggctcctattcgagaccc

SEQ ID NO: 705543 - DNA, 100 bp, Homo sapiens
gtcagcgtgggcagttctatcagtgttgggtaattccagaattgattggccataccattgtcactgtattactgctcatgtcattgcactggttcatctt

SEQ ID NO: 705544 - DNA, 82 bp, Homo sapiens
gatcatccatgtgagtgaccatgcagcaaaagaaggagggtcctctcagtgattaaggttggagtcagttagctgctatgca

SEQ ID NO: 705545 - DNA, 73 bp, Homo sapiens
gaaagttcctcaagatggagactttgactttgtctgaaggggcgtctcgattacctgagctctctgaaggtga

SEQ ID NO: 705546 - DNA, 137 bp, Homo sapiens
ggaagatgcctccctgcacgcccgccgcgcacagagcataaagaatctgcgctgaggaggcaggagaagaaagccgctttgacccccctggccccctgtcagccggaatgtcctgtgaagtgcttgtcaccttcaag

SEQ ID NO: 705547 - DNA, 75 bp, Homo sapiens
caacatgcacagcctggcgacggctgcgagctcttcagaaaccaggctgctttcaggaacattgctgtggattcc

SEQ ID NO: 705548 - DNA, 97 bp, Homo sapiens
ctcccaccctgtgcccaactgcttcatgagcgtcaccatgcgcccctgcccacaccactgccggtggagccccgcctgggggagctggcggtggcgg

SEQ ID NO: 705549 - DNA, 74 bp, Homo sapiens
agccctggtgccaggtgtccatccccgtgctgagcttgcctgggaccagtggcagggaccccggaacctgaagg

SEQ ID NO: 705550 - DNA, 98 bp, Homo sapiens
ttgccttccatcctgatggcaagagaaaactctctgcagaggaattagagcgaaaacggcaagagatgatggaaaacgccaaatggagggaggaggag

SEQ ID NO: 705551 - DNA, 100 bp, Homo sapiens
ccgaagacctgatgtctctgtccaaggagatgaagtaacactggaagccctcaatctagaagagtagaggtccaaaggtgccatatgttcacactgtgag

SEQ ID NO: 705552 - DNA, 84 bp, Homo sapiens
cgggccatgtcggtgggcgagctctacagccaggtaattttttctgcaggatgaattaagagaagagacacttgctcatcaggc

SEQ ID NO: 705553 - DNA, 100 bp, Homo sapiens
tacctttcggggacattggacactactctaggaccggggaagcagctcgagagtgtcgtagaaagaagaaagaatatgtgaaatgtttagaaaacagagt

SEQ ID NO: 705554 - DNA, 75 bp, Homo sapiens
agtacggaccataataatcaggagtgaagtcccagggatattctgtgctgattttggggtaagtgcgttcctagc

SEQ ID NO: 705555 - DNA, 75 bp, Homo sapiens
tcgtcgcgggattgccagcccctgcaggggggctccatgtcctacccgctgcagcgtgtccggagcggtgactgg

SEQ ID NO: 705556 - DNA, 74 bp, Homo sapiens
ttccacgtcatccgcatcaacaagatgttgtcctgtgctggggctgacagccgagcccaggaagtgcgtcccct

SEQ ID NO: 705557 - DNA, 90 bp, Homo sapiens
ccatcgatgtgcggcgtccgctgtataaggatgtgaccgcgtgcctgccagaatgggaggatgggcatttttaccttgccaagtactatg

SEQ ID NO: 705558 - DNA, 71 bp, Homo sapiens
attgtgaaagaaggttgggttcagaagagggtcagcagataagcagagagccctagaagaaaccaaagcct

SEQ ID NO: 705559 - DNA, 73 bp, Homo sapiens
ctggcccaggaggatgggcccgttgtggacaaagcccacaaacgctatctgctaatgagcattgaccagagga

SEQ ID NO: 705560 - DNA, 88 bp, Homo sapiens
cggagaaggccgccgggcccgggcatggtggtctggggcaacgcggaagaattctgcttggtcagaatcgtgatggcattgtgttcag

SEQ ID NO: 705561 - DNA, 83 bp, Homo sapiens
cttctttaagtccatggaccaggacttcgggtgagaagccctaccactgcaactgggacggctgcggctggaagtttgcgcgc

SEQ ID NO: 705562 - DNA, 50 bp, Homo sapiens
ctcatcgccctggccgacaagcacgcaagaatggaggggccctttggtgg

SEQ ID NO: 705563 - DNA, 100 bp, Homo sapiens
ccgggtgctgctggttagtgtgctctgagggagggtccgagccagccgctgttttgccggaggagcccctcaggccaatagcctaacatggcagaccaga

SEQ ID NO: 705564 - DNA, 51 bp, Homo sapiens
agtgttgctggaacggttcggatagccacataaagaagatccctaatagtc

SEQ ID NO: 705565 - DNA, 85 bp, Homo sapiens
tggatgaacttcttggaaggcagagaaaaggaattacatgaacgacagccttcgcaccgacgtcttcgtgcggttccagccagag

SEQ ID NO: 705566 - DNA, 100 bp, Homo sapiens
ctgggatgagattcaatgaagtggccgcacagtatagtgaagataaagccaggcaagggtggactaaagaggatggacatagaacttccacctctgctgt

SEQ ID NO: 705567 - DNA, 83 bp, Homo sapiens
ccggtgtctggcggatgcggtcgtgaagatagatccggaaggctgcccagcatggagtatgctcagtcctcaagggcagtgaa

SEQ ID NO: 705568 - DNA, 75 bp, Homo sapiens
actcagggccggttgtggccatgaatgatctctgcctttcacaaagaccacctttgtgcatccatgcctactctt

SEQ ID NO: 705569 - DNA, 75 bp, Homo sapiens
aaacatggaaaagacactgaaaggcctcaacagaacaagttgaaatcatcgcagaaggataaagttcgtcagttt

SEQ ID NO: 705570 - DNA, 75 bp, Homo sapiens
gtgtactttgccctcagcatctcccttcatgtctgggtcatgccacctggtttccatcgggcctatagttcccca

SEQ ID NO: 705571 - DNA, 90 bp, Homo sapiens
ctttgggcagccattgagattatacggaaccagaagcagattgccaacattgaccgtattacaaagattcaagttcgaaatatggcaact

SEQ ID NO: 705572 - DNA, 82 bp, Homo sapiens
tgggcagacggattcatttagagctgcggaacaggacgccctctgatcaaaatgatgcttcaacacccaggccaggtctctg

SEQ ID NO: 705573 - DNA, 75 bp, Homo sapiens
cgaggagcgggaagagttgctgggcaagagtgagccatggagctacgtgtggggaacaagtaccgcctgggacgg

SEQ ID NO: 705574 - DNA, 82 bp, Homo sapiens
gattgaattaaacaagacgtgcaaagcaagtggttcacgaggaggccactgtctgcagctcccgtgaagatgtccactccag

SEQ ID NO: 705575 - DNA, 82 bp, Homo sapiens
gaagaagcatcgttaaagtctctcttcaccctgccgtcatgtctaagtcagagtgacatgaagtccgagaggagacccccct

SEQ ID NO: 705576 - DNA, 74 bp, Homo sapiens
tgagcccaggccacagtaccctattcacgctctgtgcttgtgccaaggcaatcttgctgccaatgatctctccc

SEQ ID NO: 705577 - DNA, 85 bp, Homo sapiens
ctggacggcgagcgcgagcggcgcgagaaagaggatacgaagcgttttcggcttcctgcccggagctgtgcagcaaacagtcgac

SEQ ID NO: 705578 - DNA, 102 bp, Homo sapiens
gtcgcgtctcggaaaccggtagcgcttgcagcatgggccaattcctgtccccccagcagcatggcatcgtgtgctgaaccctctgagccctctgccccactg

SEQ ID NO: 705579 - DNA, 74 bp, Homo sapiens
gaaggccataatatagctgattatattgatccagccatcatgaagaaatggcacctcgaaaggggaaggaaaag

SEQ ID NO: 705580 - DNA, 98 bp, Homo sapiens
agagctaaacagatactagctactgtgaaaaacataatggattcagtaaacctggcagctgaagataaaaggcaagaggaggaacgacgtagaagaga

SEQ ID NO: 705581 - DNA, 100 bp, Homo sapiens
cctttattctctcagcacactgcagctacaggcctcgggcctccccggcagcgcggagctgacggtgggcgcggcggtcgcctgcttcctggcgctggag

SEQ ID NO: 705582 - DNA, 85 bp, Homo sapiens
ccgcatttggagacagacatgatgcaaggaggcgtgtacggctcaggtggagaaaggtgagaagccctaccactgcaactgggac

SEQ ID NO: 705583 - DNA, 50 bp, Homo sapiens
cagccgctcacaatatggccatcaggccatggttgcttgttatccgggca

SEQ ID NO: 705584 - DNA, 102 bp, Homo sapiens
gaggagcctggaccgctcattcggactcgtcgggcaggtcaaaatgcagatcttcgtgaaaacccttaccggcaagaccatcacccttgaggtggagcccag

SEQ ID NO: 705585 - DNA, 51 bp, Homo sapiens
ggaagattataactttgtcttcaaggcatctggaatcaagagacccatggc

SEQ ID NO: 705586 - DNA, 50 bp, Homo sapiens
cgacgagcaggtggcggcggctgcagatttaaggaacagtgacaccccac

SEQ ID NO: 705587 - DNA, 100 bp, Homo sapiens
atcacctgtctggagcaaggaaaagatccctggaatatgaagagacacagtatggtagccacacccccagatattgatgatgttaagaagttcaaaccgg

SEQ ID NO: 705588 - DNA, 75 bp, Homo sapiens
ggctctggatggaagccatggatggccgggaacctggaattagaatcatggagatgctgctaaaggaacagtgtg

SEQ ID NO: 705589 - DNA, 75 bp, Homo sapiens
agaaggtgtacatcgtgcatggcgtccagttctggagaccagaaggccaaaatcaaaagtatgggcaggcttgat

SEQ ID NO: 705590 - DNA, 83 bp, Homo sapiens
agtaacccgtttgccgacccggatctcaacaatcccttcaaggtttttctatatgagtggagaagacagctgttaccagggag

SEQ ID NO: 705591 - DNA, 75 bp, Homo sapiens
acaatggtataagcctcattatcaacctcaagtactacagccttccagcagccttcccagacccacagatcacac

SEQ ID NO: 705592 - DNA, 148 bp, Homo sapiens
catctgttgcagaagaataggaacctctacttccccaccaaaaagtggcacacactggagagatatcatgatcctgccatgaagcagtttctgctgtacttggatgagtccaatgccctggggaagaagttcatcattcaagacattg

SEQ ID NO: 705593 - DNA, 76 bp, Homo sapiens
tgctatttactctgctcgagatgatgaggaattggtccatcataaagatagggaggtggtgatggagcacccctct

SEQ ID NO: 705594 - DNA, 75 bp, Homo sapiens
tcgtgatgggacaggtggtcggactcagtatatttgccttccctccatgatctccaacactatccgataaagtag

SEQ ID NO: 705595 - DNA, 90 bp, Homo sapiens
agattcgcagtggtcgcttcttctccttggaccacagaatactggccatggtgcaacttctggttttggcagtgcttttacaggacaaca

SEQ ID NO: 705596 - DNA, 100 bp, Homo sapiens
gagctggaatgactggcaacccagattgctgctaaaattgattcaattcctcacttgaataattccacacctctagtggacccctcagtatatggatacg

SEQ ID NO: 705597 - DNA, 100 bp, Homo sapiens
ccaagttagtgacagatcttaccaaagtccacacggaatgctgccatggagatctgcttgaatgtgctgatgacaggtgcctcattagcttactattgcc

SEQ ID NO: 705598 - DNA, 75 bp, Homo sapiens
ctaaagcttgtggaaaagctggatgtgctctccttgtttttgggccatcctcatcataacacacttctgtttttc

SEQ ID NO: 705599 - DNA, 100 bp, Homo sapiens
cccgggactccctgtgccttgcttggagctgacgccgacggccaccacaagggcccgggccaccaggaagagcctgctgcatgtcccctatggagacggc

SEQ ID NO: 705600 - DNA, 89 bp, Homo sapiens
ctacctgcggcgtcggcagctgctgctccgaggggaacgcccttttgcttgtgactggcagggctgcgacaagaagttcgcccgctccg

SEQ ID NO: 705601 - DNA, 100 bp, Homo sapiens
tgaaaaggaaaaggagagtattgccagagcaagagctggatctcgtctttctgcagttaatagtatcatatctatcgtttttggtactcgaagaattgcc

SEQ ID NO: 705602 - DNA, 75 bp, Homo sapiens
gaacagctgtggaaagaagttgcaaaacactgggagaataaaggcagccccgttgatgactgaaaatgacaaagc

SEQ ID NO: 705603 - DNA, 100 bp, Homo sapiens
tcggattgtgctggctgcctgtagtgattacttctgtgccatgttcactagtgaggttaacgtccctaaaacccgccggactttctgtaagaagtgtggc

SEQ ID NO: 705604 - DNA, 51 bp, Homo sapiens
atttgcagagaattggaggaagatccattgtcatgacttctgagctgtttg

SEQ ID NO: 705605 - DNA, 100 bp, Homo sapiens
gttatgtgaagaactttttgagaaaatcaatgacaactgtaatgaagaaatgtcttactctgtagagtgaatgaagaatggctggaaggggagtgcaaag

SEQ ID NO: 705606 - DNA, 95 bp, Homo sapiens
tttaaaatcattggaccatttagtaagaagaattccagtcttataaagcgcatattaaatttcctattgactacccctattcaccacctaccttc

SEQ ID NO: 705607 - DNA, 75 bp, Homo sapiens
aaggcagagatgctagagatcgtgcaggagcacatggatgaagtatgctcctcgcagcttctaacttcagtaagg

SEQ ID NO: 705608 - DNA, 75 bp, Homo sapiens
tgggaaggtggagccaccagcctctccttgaatgatatggaacctagcaaagctgttccactgaatgcatctaag

SEQ ID NO: 705609 - DNA, 100 bp, Homo sapiens
ctcggcgcccgcctgccgcctccggagcgcctgtgtggtatgagtttaaagccaagaacatcaagaagaagaaagtgagcattatggtttcagtggatgg

SEQ ID NO: 705610 - DNA, 82 bp, Homo sapiens
aagaaaccgctgaggcttatttgggaaagaagtgcagtcattggagaaatcgatgaagaaacagattctgcgcttgatttgg

SEQ ID NO: 705611 - DNA, 83 bp, Homo sapiens
ccaccgctgccctcagctccgagtccagggcgagccctgggcgctgcctatggcacagccaagagcggtaccggcattgcggc

SEQ ID NO: 705612 - DNA, 100 bp, Homo sapiens
ccgcccgggtcgtggcggcgggcgcccagcgcgtgaatcatcggactcaggtacatctgtgagtgagaacaggtgtcaccttgaaggtgggagtgatcaa

SEQ ID NO: 705613 - DNA, 99 bp, Homo sapiens
aaaacataggccttgtgatggaatgggaaattccagagataatttagagaaaaggaacagttccgtaagctctttattggtggcttaagctttgaaacc

SEQ ID NO: 705614 - DNA, 89 bp, Homo sapiens
gagctgagtggttgtgtggtcgcgtctcggaaaccggtagcgcttgcagcatgatcaacaggcggtccttcgggtcggagtggacatcg

SEQ ID NO: 705615 - DNA, 82 bp, Homo sapiens
cgcgcacttcgtcatgttcttcgcgccctgcccttcctggatctggagagagcagctgctgctgccccaccacctgccaggc

SEQ ID NO: 705616 - DNA, 75 bp, Homo sapiens
atcttactgaaggcagtgaagcgaagaaaaggatcccagaaagtttcaggtggagccgccaccaaaatgcagatt

SEQ ID NO: 705617 - DNA, 83 bp, Homo sapiens
attgataacaccctgtaacagctgaatgtgttcagagcaacattgttttgttgacacaagcatttagaagaaagtttgtgatt

SEQ ID NO: 705618 - DNA, 98 bp, Homo sapiens
ctatgggtacggaggcaactcggcgacagcaggctacagccctgggaggagcggggacactgaggacctctctccaaattggcctctcaactcacagg

SEQ ID NO: 705619 - DNA, 97 bp, Homo sapiens
ccggagcctcacagctgtattcatgtggctacgtgctgaccctcatcaccgacggcatgcgcagtgtccgagcgttccactttgacaaggcggccgc

SEQ ID NO: 705620 - DNA, 83 bp, Homo sapiens
agatctagaatcaactgagagagatgcttaaaaatcaccagttactttaatgaggcactgtgttggcactcactgaaaataac

SEQ ID NO: 705621 - DNA, 75 bp, Homo sapiens
gtcacacaatgtcggggatggacctccagatttccttactggagaaatggcttccctgaggcaagtgtaacctac

SEQ ID NO: 705622 - DNA, 100 bp, Homo sapiens
tttgtcaccagaatgaatgaagtgcttcagatttaaatacctcagggtctggagggaaaggaagccggctgccagacctaggatccgactacaaacctcc

SEQ ID NO: 705623 - DNA, 100 bp, Homo sapiens
gtatgtggatgtcacagccaaaacgaagcgagcagctgcaaagcatctaatagaacgctactaccaccagttaactgagggctgtggaaatgaagcctgc

SEQ ID NO: 705624 - DNA, 98 bp, Homo sapiens
atgggatccggctcctccagctaccggcccaaggccatctacctggacatcgatggacgcattcagaagatggcggctcagcggcagcgggcgctggc

SEQ ID NO: 705625 - DNA, 50 bp, Homo sapiens
tgggagcagcggtggaagcgaagcaactggaacagatccagaaggagcta

SEQ ID NO: 705626 - DNA, 75 bp, Homo sapiens
cggaaaccggtagcgcttgcagcatggaagctcttactcctcagaaatgtattcctcacatcatcgtccggggtc

SEQ ID NO: 705627 - DNA, 100 bp, Homo sapiens
gcagagtcggcgatctgagccccaggcagaaggaggcattggccaaggagatagtggagcaaaccatgcggaggaggcagcggcgagagtgggaggcccg

SEQ ID NO: 705628 - DNA, 83 bp, Homo sapiens
ctcgactcggtcctgtttcgacagcgaacatgtcgcggcctgtcagacctgcctagagctggaacgttacctccagagcgagc

SEQ ID NO: 705629 - DNA, 90 bp, Homo sapiens
cgagcggcggcggcggcagcgggtcttgggtcctccgagagcagcagcggataaggagcacaagtgtcctttgatttgtgggaggaaact

SEQ ID NO: 705630 - DNA, 101 bp, Homo sapiens
taccaccagacccgtagttcctattgattcatcagattttgcattggatattcgcatgcctggggttacacctaaacagttctggaggctggaagtccaag

SEQ ID NO: 705631 - DNA, 100 bp, Homo sapiens
gagagaactgctggaaggagactggatgatagaatttggatgaggatcgcagtacggaacctgaccgattgcaggtgtttcacaagagagccatcatgcc

SEQ ID NO: 705632 - DNA, 75 bp, Homo sapiens
atgcctgggtcccgccgggtctgaagcctgaacagagtttgccagatccggcccggtgcctgggttccaggagga

SEQ ID NO: 705633 - DNA, 78 bp, Homo sapiens
atcaggggatcttgctggcaagtctgcgctcctcagaccaccggcaggtgaacagcctgatgcagaccgaggagtgcc

SEQ ID NO: 705634 - DNA, 75 bp, Homo sapiens
gatgctacatatgataaagctccagttgaaaaagaaggaatccacgttctagttctcagaggcactgtgactgac

SEQ ID NO: 705635 - DNA, 50 bp, Homo sapiens
atccttctcacctaacactggaactttcacgatggccgtaaagcacagca

SEQ ID NO: 705636 - DNA, 74 bp, Homo sapiens
aggttaagctggctgtcctgaaatattataaggtggacccccaaaagtacaagggcatatttaacggattctca

SEQ ID NO: 705637 - DNA, 51 bp, Homo sapiens
atggagaatgagattgctgtcctgcacaaggtgactctggggggcccctga

SEQ ID NO: 705638 - DNA, 99 bp, Homo sapiens
ggactaaacgaattcattcagaacctagttaggtatccagaactttataaccaacttttgtatgaaaacacagaaaaagatctttctgatactcagcga

SEQ ID NO: 705639 - DNA, 132 bp, Homo sapiens
tcaaaaaaaaagaagcctctcactttcagtccaagctaattacacctcctcctccaccaccctcaccagaaagttccagaaagctgagtctgatctggattacattcaatacaggctggaatatgaaatcaa

SEQ ID NO: 705640 - DNA, 100 bp, Homo sapiens
aaggaagtttccgtggaagaaaggagatcatcacctccatcctgctgagcgggcggatcgggcccaacatccggttggctgagtgctatgggctgaggct

SEQ ID NO: 705641 - DNA, 50 bp, Homo sapiens
ctttgtggctttgctaaaggacagatcaaaggctcgtggtccagcaagag

SEQ ID NO: 705642 - DNA, 100 bp, Homo sapiens
gcctgttggaccttcgagcctagctgctcgcacaggactcggccacctgcccttcctgcaccgactggccaggtcctggtccagcctcagatcatcaaga

SEQ ID NO: 705643 - DNA, 74 bp, Homo sapiens
agccttcctgatttctgcagctctgtgtgaagtgaaaatgcctcgtgtaaaagcagctcaagctggaagacaga

SEQ ID NO: 705644 - DNA, 83 bp, Homo sapiens
ctcaaaaccagcagtcttctgggtatgaatctgatgaacaagaaaagagtgcctatcaagagtatgacagtgacagtgatgtt

SEQ ID NO: 705645 - DNA, 88 bp, Homo sapiens
gataggcttaggaattttgtcttctgttgggcttggaacagggctgcacacctttctgctttatctgtactatactggcaattgctgg

SEQ ID NO: 705646 - DNA, 75 bp, Homo sapiens
gacgacggtccctcagcccagccaccatgagcaccaagcagatcacttgcagaattaaatgtgagggagtctgac

SEQ ID NO: 705647 - DNA, 83 bp, Homo sapiens
gggagatgcacagctaagatgccaggaccacctggaagcctagaaatggtttacccaaggtccagcctagcccctaggcacca

SEQ ID NO: 705648 - DNA, 118 bp, Homo sapiens
ttgtaccagtgtttatacaaaagatagagctgctaaatgtaaaattccagccctggaccttcttattaagtttctggaactaatgcaactgaagtatcatgagaaagctgcagacaaa

SEQ ID NO: 705649 - DNA, 100 bp, Homo sapiens
ggatgtgatgatggggacctatgggaacctactctcattaggctgatgagccctgaaaacacactcctgcagcccagggaggaggaaggggtcaagtatg

SEQ ID NO: 705650 - DNA, 50 bp, Homo sapiens
gaaggttgtgactttagtatacagatcacctgctgttaccagctaccacc

SEQ ID NO: 705651 - DNA, 96 bp, Homo sapiens
gttttagcctagctgttctcaaggcggattaattagcccaagaaacattatattcatgtacagcagggaagaactggaaactcagagaaagaaact

SEQ ID NO: 705652 - DNA, 75 bp, Homo sapiens
gccccggagcccctcggcggcgccaccatgtactcgggagccggccccggccgagacgcatccagagctttcgtg

SEQ ID NO: 705653 - DNA, 83 bp, Homo sapiens
cacgttcttccaagaaaccaacattcccaacagccaccaccaccaccagatgtgtactaatggtcacttgatgtgcgctggct

SEQ ID NO: 705654 - DNA, 100 bp, Homo sapiens
cgtttggctgtgacctgacggagtatctggaaagctcgggacaggatggtgccttagctggaccaattattgtggagccacatgtcacagcagtatgggg

SEQ ID NO: 705655 - DNA, 100 bp, Homo sapiens
cattgacatttaattttagggtcctttatatagaagggagagtagggtcgacacatgttgaaagatgactggacggtgtgtccacattgtgacttccctg

SEQ ID NO: 705656 - DNA, 83 bp, Homo sapiens
tgggggactatgtggagaacctgaacaagtcccagctgaagctgggcatctggggcgctcaaattgaaattattccatgcaag

SEQ ID NO: 705657 - DNA, 116 bp, Homo sapiens
atgccgaaggtgaaggcgctgcagtgcgccctggcgctggagatcagctcaaggaggtgcttcctgagaaggagaagatcctggacaagctggagctgagcttgatccacagcaga

SEQ ID NO: 705658 - DNA, 100 bp, Homo sapiens
gaagtcttcagctcctgcagctctgaagtggttctggtcgctttgctgttcgtgatatgagacagacagttgcggtgggtgtcatcaaagcagtggacaa

SEQ ID NO: 705659 - DNA, 76 bp, Homo sapiens
cttcagggtcacgagatgagcgctatcggtcagtcaccaggagactaaagtccatcaaaaacatccagaaaattac

SEQ ID NO: 705660 - DNA, 50 bp, Homo sapiens
tgaatttccatgtcaacatagtcctgttgcctgtgtccctggagtgttac

SEQ ID NO: 705661 - DNA, 101 bp, Homo sapiens
cgtgacaccttctacaaggagcagctggagcgtattgagaggaagcctcccgcgacgatgcccctcaacgttagcttcaccaacaggaactatgacctcga

SEQ ID NO: 705662 - DNA, 100 bp, Homo sapiens
gttagataaacttgtggatggacttgctacctcttgggtgaactctagcaattacaagctgaagaaatcaggggagaaacccctgcttggtggaagcctg

SEQ ID NO: 705663 - DNA, 50 bp, Homo sapiens
cagtcagcatttgcagactttgcgtccagaggaccagaggttaatttatt

SEQ ID NO: 705664 - DNA, 83 bp, Homo sapiens
gggcagtggacgcggttctgccgagagccgttgattatggaagattcccacaagagtaccacgtcagagacagcacctcaacc

SEQ ID NO: 705665 - DNA, 114 bp, Homo sapiens
gcaccatgccgctcctaagcctgcacagccgcggcggcagcagcagtgagagttacagaatgtctgaaggggacagtgtgggagaatccgtccatgggaaaccttcggtggtgt

SEQ ID NO: 705666 - DNA, 100 bp, Homo sapiens
gaaggaggatctggacaatgccagcaaagagttcagccggcgctggtgtgtccttggtgacggggtcctgagctactttgagaatgagcgggcagtgacc

SEQ ID NO: 705667 - DNA, 100 bp, Homo sapiens
tgaaggttggcctgacaaattatgctgcagcatattgtactggcctgctgctggcccgcaggagaacagtacgactctgtgaacagctctccacagttat

SEQ ID NO: 705668 - DNA, 51 bp, Homo sapiens
atacttttgaactgttaactcaagataatgagaagcccatgcgagtggtgg

SEQ ID NO: 705669 - DNA, 49 bp, Homo sapiens
ggtcggggccgaggcgcgaggaggcagcacacttctgcttttgttcctt

SEQ ID NO: 705670 - DNA, 101 bp, Homo sapiens
cactgtgagatccgaatgcgctacttgaacggactcgatcggggagctgatcaccttctattactattggaagaagacccccgaagcagccagctcccgag

SEQ ID NO: 705671 - DNA, 80 bp, Homo sapiens
ctgatggggccttcacctgctgcaccaatgacaaggccacccaggtgagtacccccacgtcggggtccatgtgcccgcct

SEQ ID NO: 705672 - DNA, 75 bp, Homo sapiens
gtcgcggccatggcttatcactcgggctacggagcccacggtaaagtccatggttccctggcccgtgctggaaaa

SEQ ID NO: 705673 - DNA, 89 bp, Homo sapiens
aggctgtcctggccaacctgctgctggaggaggataacaagttttgtgcagattgccagtctaaagtccacagatcctggtccctacaa

SEQ ID NO: 705674 - DNA, 100 bp, Homo sapiens
ttcagaagaaacaaaagtgccaccgaagagtgagaaagatcagtctaaagaaaaggagaagaaagtgaaaaaaacaattccttcctgggctaccctttct

SEQ ID NO: 705675 - DNA, 100 bp, Homo sapiens
gtctaatagacctaaagccacagtcttcaagagcccacggacaccacctcaacgggccgttgctccagggagaactgcaaatatcttcatccacccccac

SEQ ID NO: 705676 - DNA, 82 bp, Homo sapiens
caagaaatgaagaacgagattcagacacagatgagccagatgaccgaagctggctggaacatcatgtggtccatcagtactg

SEQ ID NO: 705677 - DNA, 100 bp, Homo sapiens
ctggacggcaacctcattatccgctatgatgtggaccgggccatctccgggggctccattcagggagtggttttcagagacatttcagaaagtgaaggag

SEQ ID NO: 705678 - DNA, 83 bp, Homo sapiens
cgcgagccacaggcacggaaacctcgcgccgaccggggccctaggcccgacgacggcagacaatgcagatcttcgtgaagact

SEQ ID NO: 705679 - DNA, 82 bp, Homo sapiens
ccttcaactccacttttatctccaccatagtgtactaatggtcacttgatgtgcgctggctgttttatccacctactagcag

SEQ ID NO: 705680 - DNA, 100 bp, Homo sapiens
gccctgaggagcagggaagcatggctattgtggatgtaaaagccatgttcaaggtaaggaagatactccctcattacttggcctctgtggatctctaacg

SEQ ID NO: 705681 - DNA, 83 bp, Homo sapiens
tcagtggagaagaccagcaagcgtggcggcaagatcatcgtgggcgacgccacagagaaagtgagagccacgagccaaggtgg

SEQ ID NO: 705682 - DNA, 90 bp, Homo sapiens
cctgaacctcccaagtagcgggactgcaggattacggggcgctgaaagacatcgtgatcaacgcaaacccggcctcccctcccctctccc

SEQ ID NO: 705683 - DNA, 80 bp, Homo sapiens
gcacgtgtttgcggttcagccctttgatgaccgcagcaggcctgcttcggccttctgctcttctgttgtgtggtgaccct

SEQ ID NO: 705684 - DNA, 100 bp, Homo sapiens
gagagacgtcttcctggagcgggaggcgatcccgcgccctgggtgcggtgaggccgctgggacagcggaggtgcctcccgacgcgaagcagcgagctgag

SEQ ID NO: 705685 - DNA, 51 bp, Homo sapiens
gtctccattgagcgcggaactcgccacgtttgaaggatgacctctaggaag

SEQ ID NO: 705686 - DNA, 80 bp, Homo sapiens
ctctcagtggtcctacctggggatattatcaaatctactactgttcatggcaggatttaagtgccctgtatgctcaaaat

SEQ ID NO: 705687 - DNA, 97 bp, Homo sapiens
aggaggactccaagaccttcgaccagctcaccccggacgagagcaaggagaggctaggtctaccctgacatttgcactatcagccttgtagcagtga

SEQ ID NO: 705688 - DNA, 100 bp, Homo sapiens
ggtgccggcctagcgtcctggaattacttcaatcaaaggagaaggcagagcccccccaggctatgaatgccctgatgcggttgaaccagctgaagccagg

SEQ ID NO: 705689 - DNA, 100 bp, Homo sapiens
ggacgagtcaagaaagccgtagccaacgctgttcagcaggaaggcttggcttttttgtgggggctcctaattctcctaaaatatcggtggcgaaagttag

SEQ ID NO: 705690 - DNA, 75 bp, Homo sapiens
gcatctactcggccctcattctgcacgacgatgaggtgacagtcacgtcatgatgctatggactcctactacgac

SEQ ID NO: 705691 - DNA, 88 bp, Homo sapiens
tgaatcaattttgcatgagaggattgaacaagagattgagatggaaatgaaagaaaagcacttggttctgcttcgagatggaaggaca

SEQ ID NO: 705692 - DNA, 90 bp, Homo sapiens
ctccctctcaaccacaataacaggcggagggtcggcgtagtactatactggcaattgctggagaagattttgcaattgttgcttctgata

SEQ ID NO: 705693 - DNA, 98 bp, Homo sapiens
atgccctgcagtacctgcagaaggtctctggagacatcttcagcagacctgcctagagctggaacgttacctccagagcgagccctgctatgtttcag

SEQ ID NO: 705694 - DNA, 51 bp, Homo sapiens
gccatctgtggtgccaattgaagggctgaagaagatgcagagcagcctgaa

SEQ ID NO: 705695 - DNA, 82 bp, Homo sapiens
cccgggccgggctgcgcccgcttcttgcaggaactcgaatcatttatgacagaaagtttctgttggatcgtcgcaattctcc

SEQ ID NO: 705696 - DNA, 83 bp, Homo sapiens
ttgagggtccacaccgcgagggaagatgcgtgcgcccatttccagaatgacagggtccagaaactggcgagccacgagggaca

SEQ ID NO: 705697 - DNA, 83 bp, Homo sapiens
ttgccgtacccaccggagcctggcgcagcctccctctattaccagatttggtgttgtactgcgaggcattcctgaccacctac

SEQ ID NO: 705698 - DNA, 90 bp, Homo sapiens
tgagtccccttgcccgctccttcaggggctggcaaggtttaattgcttatggatgtcattcacttgtggtagtgattgattccattactg

SEQ ID NO: 705699 - DNA, 74 bp, Homo sapiens
aagaatcattcttgcagcatttcgtgagttttttgagaaccctgcttttcgtcccgatgggctgaaactctatc

SEQ ID NO: 705700 - DNA, 98 bp, Homo sapiens
ctgggaaatccatagctaagatgccaggaccccctgaaagcctagacatgattctgtttctggcgtctgcatacgcaagtccccaactcgctgaggag

SEQ ID NO: 705701 - DNA, 100 bp, Homo sapiens
caccatctgggacgataaccctgccccctccacccacgataagcaggttcaggagaagtggcacctggtggaggacctgtcgcgactgctgccggagcca

SEQ ID NO: 705702 - DNA, 82 bp, Homo sapiens
cttggactgagtcctgcaggacacaggtgtgcattgctaagtgcaacagtacctcttccctggatgcagtgctctcccagga

SEQ ID NO: 705703 - DNA, 80 bp, Homo sapiens
tgagcttcctgagagagggacactaccctcgcttagaaatcttcccaaggctgcagacaccgacggatttgctttgggag

SEQ ID NO: 705704 - DNA, 100 bp, Homo sapiens
tgacagcacaggtcacagtaaggccaaaaatgtgcatactcacagagttagagagagggatggtggttctctacttttagagtcgaaaataaatcctaac

SEQ ID NO: 705705 - DNA, 75 bp, Homo sapiens
aagcattctcctggccattgcccttctggaaggaggcaacaccaccatccagaattggcagagggggtcgatttg

SEQ ID NO: 705706 - DNA, 88 bp, Homo sapiens
caagaacctgctatcagactgctctgtcgtctctacctccctagaggacaagcagcagaaggtgcttcctggaggggcctgccccact

SEQ ID NO: 705707 - DNA, 51 bp, Homo sapiens
cagaggtggaggcgctttgaaaggcagtcacccgcagggccaaggtggctc

SEQ ID NO: 705708 - DNA, 112 bp, Homo sapiens
caaccctagtcccccgcgcggccccttattcgctccgacaagattggtccttcccgattccgggcccctgagttgctcttcaggccagatttgattggagaggagagtgaag

SEQ ID NO: 705709 - DNA, 100 bp, Homo sapiens
gaaccgggcagccgcccagcgaagccggcagaagcacacagacaaggcagacgccctgcaccaggggcagggtggacaggaagcagctcagcccagcctg

SEQ ID NO: 705710 - DNA, 101 bp, Homo sapiens
gcgcgggccgaccgggcgcaccgaccatggcctccaaatgccccaagtgcgacaagaccgtgtacttcgctctgtgggcaccttcgcacgggccctggact

SEQ ID NO: 705711 - DNA, 100 bp, Homo sapiens
ttttccttgacctttaggtgcttttatattcatctcaaaaacaaaattctgaactcaggacttggcaaaaacaagccaacgacctggtggccacactgat

SEQ ID NO: 705712 - DNA, 51 bp, Homo sapiens
atgtggagcccaagcaggaactgaaggtggacccaagtggagagattgtgg

SEQ ID NO: 705713 - DNA, 96 bp, Homo sapiens
ctgcaggaaccagactgggggcgagctgagcacctgtagtcaatcacacgcaggtgtggatgaggtcaccattgtcaacattttgaccaaccgcag

SEQ ID NO: 705714 - DNA, 92 bp, Homo sapiens
ggtttgaatatcgtaagcgcacgtttaaacatctcaaggttgcacagagcattgaggatcaccatcaggaagtgattggtttctgcagagag

SEQ ID NO: 705715 - DNA, 75 bp, Homo sapiens
ttcaaccatgagcagcatgaatattaccatactcacatccccaacatcttccagagtcttgctttgtcgcccagg

SEQ ID NO: 705716 - DNA, 83 bp, Homo sapiens
acaggccacgcggccacgcagtccgagcgggagccgagccgggcggggcgagggcagctccgaatccagggcctgaaaaccca

SEQ ID NO: 705717 - DNA, 75 bp, Homo sapiens
cactgaggaaggggaagtgggcaaagcagcaagctgtgtaatgttcttgatcgactaaatgtgattgcagaaagt

SEQ ID NO: 705718 - DNA, 100 bp, Homo sapiens
cacagctgccgccttctcccctgatagccactacctcctctttggggccccaggaacctataattggaagggtggaaaaggagggagctgctctcaggct

SEQ ID NO: 705719 - DNA, 82 bp, Homo sapiens
tggactttgttctgaattactccaaagccaattctgtggtgttcttggtcacacatttatggagtttctgaagggcagtgga

SEQ ID NO: 705720 - DNA, 90 bp, Homo sapiens
gtgcgcaaacttgacactcaccctgaccgttacagctggcggatgctgccaagcggggagcgtttggccatgagcgctatgagaacgggg

SEQ ID NO: 705721 - DNA, 82 bp, Homo sapiens
cgctgagcacgttcttccaagaaaccaacattcccaacagccaccaccaccaccagatggttttaaaatcaaagatgggaaa

SEQ ID NO: 705722 - DNA, 100 bp, Homo sapiens
tcgatcagagatcggcggagaccctcgaagtgcgcaaacttgacactcaccctgaccggctaatggaggttggcaggatgctactaccccttcatcagtg

SEQ ID NO: 705723 - DNA, 90 bp, Homo sapiens
gtggggtgtgagaacttgatcagtttgtgtcagccaccttgttctctaaaggcagtacaagaaacatggtgccggcatctgcttctggcg

SEQ ID NO: 705724 - DNA, 96 bp, Homo sapiens
gtcagcttggtcatgatctaccagttcattgttcaggttttaaatgatacctgggtttccttcccttcgtggtctgaggactctacctttgtgagt

SEQ ID NO: 705725 - DNA, 96 bp, Homo sapiens
cacccgcccaggccagccccagcagcaacagcagcacaggtgaagctttgttctaagaatatttgtttcatctagtttatgagtccaaatgatata

SEQ ID NO: 705726 - DNA, 82 bp, Homo sapiens
cacaggagtcgctggatagactgcacaaggtgaagactgtctgcagcaaggaaatttggtgagcggcctccacctaaacgac

SEQ ID NO: 705727 - DNA, 100 bp, Homo sapiens
tatgcagccaaaggctactttgacgccctggtgaagatgggggagctggccagcgagagccagggctccaaagaactcgttccagggtcacccccgagag

SEQ ID NO: 705728 - DNA, 75 bp, Homo sapiens
tgagtggatggggacctgcctgctggtatggcgatttagtactgcattttgttctgttaatgaatggaaatttgc

SEQ ID NO: 705729 - DNA, 75 bp, Homo sapiens
ggctgagggaaaagcgaggcaaggcaggcggttactggggcttccggatgcagatgacgatgcgtttgaagagta

SEQ ID NO: 705730 - DNA, 100 bp, Homo sapiens
cgaaggagtgccaacgacgagctcttccgggcgggctccagactcagtcaaggcggataagaaggcggcacaagaaaagatgatccagcaggagcatgag

SEQ ID NO: 705731 - DNA, 75 bp, Homo sapiens
ccaccctcagcccctgccactagtgagatgaccacgggccggatcgtggcacccagaggctgccaggactttggc

SEQ ID NO: 705732 - DNA, 100 bp, Homo sapiens
gacggtccccactttcccctgagcctcagcacctgcttgtttggaagggtgaagttgaacaaattgctatgatgaaaccaaaaggccagactgaacacga

SEQ ID NO: 705733 - DNA, 100 bp, Homo sapiens
agcagactcttgatacagatagcactttggaggatctttctggacattctgtgagggtgtttgccagcttcccagtaaaaatgatgaaaaagaatatcca

SEQ ID NO: 705734 - DNA, 75 bp, Homo sapiens
gacgatcattctgcaagcaggcaacctgaatacagaggctgggaggcggcagaatgcagccagaggagggcacag

SEQ ID NO: 705735 - DNA, 50 bp, Homo sapiens
cagcggagctgacacagccaacaaatgaagctcgtgaccgagaacctgaa

SEQ ID NO: 705736 - DNA, 96 bp, Homo sapiens
acatgctataaacaatccaccaagcttctgggccttgctgagctgctgagggttgcagtctttaacacctctgtgtgaagatgacaaccaggcaca

SEQ ID NO: 705737 - DNA, 87 bp, Homo sapiens
gcgtctgggcagcctacgctttccggcctccccatggccacccatggaccagtcggcattcacttcctcccttctgcggcccataaa

SEQ ID NO: 705738 - DNA, 74 bp, Homo sapiens
acagatcaagatcaagaccggcgtggtgaagcggtttttttaacatgtggggatttggaagagtcagcaaacaa

SEQ ID NO: 705739 - DNA, 50 bp, Homo sapiens
cccagcactttgggaggctgagcaaaggaaacaagtttctgactctggtg

SEQ ID NO: 705740 - DNA, 76 bp, Homo sapiens
aacccaccaagccccgctaggagccacctagactggatgcagagcatggcatcaagcatgatggaaccatgtgtga

SEQ ID NO: 705741 - DNA, 100 bp, Homo sapiens
tgaaggttattttctggtcagctttggccggagccattcccctgaatggtgactctgaggaagaagatgaagtaccggacgatgagactctgaaccaaat

SEQ ID NO: 705742 - DNA, 100 bp, Homo sapiens
agcgcgaatatcgtcatcgttagaaggcatgagccatgagcccaagtccccttcgctagggatgctttccaccgcgaccaggaccaccgccaccgtcaac

SEQ ID NO: 705743 - DNA, 98 bp, Homo sapiens
tggaaagtatgtatttgatgttgggtgtgaacaacatggtgaatatcgtttaacagatatggaagccacagatgatggacataacaacaaccttcttc

SEQ ID NO: 705744 - DNA, 82 bp, Homo sapiens
aacacctgggcaacagaatattggtcaagttgctgaccttgaaataacgaaggaggcccaacttcattcaataaggagcctg

SEQ ID NO: 705745 - DNA, 100 bp, Homo sapiens
gcaagaggtgtcggaggtctcatctttgaactactgccggagcttctgccaggaatagagctgtgcccccctggaaaacggttcatgattacgatggtgg

SEQ ID NO: 705746 - DNA, 100 bp, Homo sapiens
catcatcatagctcactatggccttgatcctcctgccttagcctcccaagcagctggtattacagaagggacaatggagaacattgcagcccaggctctg

SEQ ID NO: 705747 - DNA, 82 bp, Homo sapiens
aacaatctggactaacaccagtacaagcccaagggagattacagatgagaagcggttagctggctattgtcaagcatgtgat

SEQ ID NO: 705748 - DNA, 100 bp, Homo sapiens
tgcgaaagctgccaaaagtgacatgcaggttggctggatatttacagacctcgtctcagaagatacccgaaagggtaccgtccgctacagtcgaaataag

SEQ ID NO: 705749 - DNA, 82 bp, Homo sapiens
gtgtgctgggctggtcccccttggaggatgaagaaggttataacgatggagaggtagatgacgaggaagatgaagaagagct

SEQ ID NO: 705750 - DNA, 74 bp, Homo sapiens
aaggattccaagtaactcttatttgctgaagaaacacttaaattctggaaatagcgactcagtatcatggccag

SEQ ID NO: 705751 - DNA, 98 bp, Homo sapiens
caccgggcatgtgtcgtctggctacgtggagcggctgaagggcatgtccctgcttgtcagggctgagagcgacggttaatgacccagagactgcagta

SEQ ID NO: 705752 - DNA, 96 bp, Homo sapiens
gctacgctaacctatcgggttctctctccgcgcgttcaggggccacctacagatgctcctgcagtggacacagcagaacaagtctatatctcttcc

SEQ ID NO: 705753 - DNA, 74 bp, Homo sapiens
gaaagtggtgaatcccctgtttgagaaaaggcctaagaattttggcattgcatgtagagcgcatgaagtacagg

SEQ ID NO: 705754 - DNA, 105 bp, Homo sapiens
ctgcaatagatacatggagcccatcagaatggcagatggcttatgaaccacagggataccaataactagtgcctcgtactacgcgacagtgaccctggatcaggt

SEQ ID NO: 705755 - DNA, 90 bp, Homo sapiens
gatgccagatgtgggagacacgccaaagctcccaagctcccctcccacccggtcactccgtccagcaagcacgcagacagcaagcccgcg

SEQ ID NO: 705756 - DNA, 74 bp, Homo sapiens
gttggagaactacagaaacctcgtctccctgggccctgaaagcagcagatctcacctgcattggaggatgagac

SEQ ID NO: 705757 - DNA, 83 bp, Homo sapiens
acccccctctgcatcggtcggctcaggacttacggaaacagcaattctgtggtgttcttggtcacacatttatggagtttctg

SEQ ID NO: 705758 - DNA, 97 bp, Homo sapiens
cgggcctgcaccatgagcgtcccggccttcatcgacatcagtgaagaagatcagtaagcctgcccctggggtctggcagccactgcagcccggatgg

SEQ ID NO: 705759 - DNA, 75 bp, Homo sapiens
ctgggagcctagaatgcatcagtgcccttgtggcgaatggggctcacgtcgagacatgctgctcagttcctccag

SEQ ID NO: 705760 - DNA, 118 bp, Homo sapiens
atacatgatgtcttcagccagtataaaaacacagctcgacagtacgcctacttctataaagtcatccaggatctcaaagatttcatgagacaagctggggaagtaacgtttgcggatg

SEQ ID NO: 705761 - DNA, 50 bp, Homo sapiens
cattggtgcacagttcgtttaaggtgaccaagaatatggcccaggtgacc

SEQ ID NO: 705762 - DNA, 75 bp, Homo sapiens
tccagtctgatccttttgttggcagtgtgtgatctgtatgatggactttgtttatggggacccaattcgatttct

SEQ ID NO: 705763 - DNA, 75 bp, Homo sapiens
gcaattggcccatccgtgctcaatgctgccagagatgatattagcaaggtatccacaaattacccattatcaaaa

SEQ ID NO: 705764 - DNA, 74 bp, Homo sapiens
aatcagttgaagtaataagagcaacgccttcagcaggccatcctggaaacccctgacaggcagctgaccctgaa

SEQ ID NO: 705765 - DNA, 75 bp, Homo sapiens
ataagcctcgacttagaagctaccgagttaccctaagaaaggaaacaatgtgatgagaaccattcatggggtggg

SEQ ID NO: 705766 - DNA, 80 bp, Homo sapiens
ggaccttgttgcggttgacttgcagtggtctaagcccacctcagttgcagaggaaagtggtcgcttatggtcagaggagc

SEQ ID NO: 705767 - DNA, 99 bp, Homo sapiens
tgccaggacccgcttctctgaaaggctctccttgcagctgcttagacgctggatttttttcgggtagtggaaaaccagattgaagataaaactttccaa

SEQ ID NO: 705768 - DNA, 75 bp, Homo sapiens
cgaagctggccgagcaggctgagcgatacgacggtggtgtttttaaggctcatcttactttcccaaaagattatc

SEQ ID NO: 705769 - DNA, 75 bp, Homo sapiens
gacgctgcctcggcccggacgcgcccgcgcccccgcggctggagggtgcctcccgcgacgatgcccctcaacgtt

SEQ ID NO: 705770 - DNA, 83 bp, Homo sapiens
tccagcctgcgccaccacgtcacgcacacgctcggcgctgcgatccgcgcatataacggaaataatgcaaaaggtgtcccaag

SEQ ID NO: 705771 - DNA, 57 bp, Homo sapiens
gtgcataaacgaggcgcagcgggtgaagtgaagcacccgcccgcagagccctcccgc

SEQ ID NO: 705772 - DNA, 100 bp, Homo sapiens
attggtcccccaggaccaccaggtttgatgaattatatccagatcgagagacagaagattctgaaagggttcaatgaaatgagagtcatcttggacaatg

SEQ ID NO: 705773 - DNA, 90 bp, Homo sapiens
agaacgctttctgttcaagaggcagctgcgtatttaaaattggtcgcattatgtttcagctcttctcagacatatgtccaaaaacatgca

SEQ ID NO: 705774 - DNA, 90 bp, Homo sapiens
tcgatgtgctctgcgtgttgctggcctcccagcagcatggctttcaccggcaagttcgagatggagagtgagaagaattatgatgagttc

SEQ ID NO: 705775 - DNA, 82 bp, Homo sapiens
ttcgagtgttgcagagcctgcggggcaagatctgaactcattatacaatgacaaatggaggcagcattaacagttctacaca

SEQ ID NO: 705776 - DNA, 100 bp, Homo sapiens
gcacagagggctcctggcgctggacagatgggacaccattcaacgccgcccagaacaaagctttccacctggatgtttgaggttgtgtagatgtggccgg

SEQ ID NO: 705777 - DNA, 101 bp, Homo sapiens
ctggaattttctatgaagcacaatacaaagaagtaaaagtggtggctaatgaagtttatctcgacaatgctagttgcagtctgtgtgaccctgaccaagtt

SEQ ID NO: 705778 - DNA, 97 bp, Homo sapiens
tgggcaggagtccttggaattcatccttgttcaagcagacaacccccatctgctcaccatccagccggacctcagcaccaccaccaccacctaccag

SEQ ID NO: 705779 - DNA, 83 bp, Homo sapiens
ctggacggcgagcgcgagcggcgcgagaaactggcgtgcggccaggatgggcagctgaagggcttcgcggtgctggagtatga

SEQ ID NO: 705780 - DNA, 101 bp, Homo sapiens
gcggttccgagcggggcccaacatggcggagagagaggtggagtccggcccccgaaagagggcaatactgaacactgcgcagcttgcagaggtctcctggc

SEQ ID NO: 705781 - DNA, 82 bp, Homo sapiens
tgcctgcaacctgtccggggatcccagggaggttttaaaatcaaagatgggaaaatcggagaaaattgcccttccccatggc

SEQ ID NO: 705782 - DNA, 100 bp, Homo sapiens
gcaaaacactaagaatcctaaaagcactactggtagaagttccaaatctaaagagggaagtgttcgccagttactacatgaaaagataagagatgcttat

SEQ ID NO: 705783 - DNA, 90 bp, Homo sapiens
caattgttcagttgcaaaaagaaactggagccaccatcaagctgtctaagtccaaagatttttacccagacggagtctcgctttgtcgcc

SEQ ID NO: 705784 - DNA, 101 bp, Homo sapiens
ctggccatggcctccaactttaacgacatagtcaagcagggctacgtgaaaatccgcagcaggaagcttggggaagcggggagaggtggtgagagatgacc

SEQ ID NO: 705785 - DNA, 100 bp, Homo sapiens
atgctgccaaaagcataaccaatggcagtgatgatggagctcagccctccacctccacagtgcaccaattccagctggacatcactgtgaaaatgggacg

SEQ ID NO: 705786 - DNA, 97 bp, Homo sapiens
gcaggagaaaatacggcattgctaggtacttccattcaaccaacccttggtgccaatggtgtgatattagacaaccagcctatagtcaaaaaaaggc

SEQ ID NO: 705787 - DNA, 100 bp, Homo sapiens
cggcactcaccacacccggcatcagacctggcactacttgtccaagacgtactggtggcgagggattatcttgaacacataacctccattggccccagga

SEQ ID NO: 705788 - DNA, 99 bp, Homo sapiens
tcgaccttcaatccagttccaaggactccacggggtactttgcagcaactcagtttgaacccctggcagcaagatctgcttttccttgttttgatgaac

SEQ ID NO: 705789 - DNA, 74 bp, Homo sapiens
cgtcccctctgcagcctctctgacaagtggcccattacgcagtccaggcaagaagatcccggagcatcactagg

SEQ ID NO: 705790 - DNA, 76 bp, Homo sapiens
gagagctgacttgcgcattgctgcctgccttgtacagtctgaaaatacagcctgttgagaaaatgcatctagctgt

SEQ ID NO: 705791 - DNA, 82 bp, Homo sapiens
caaccattgacgccatgtcgggttattcgagtgaccgagaccgcggccgggaccgaggacataatgaagcctacacctggac

SEQ ID NO: 705792 - DNA, 73 bp, Homo sapiens
ttaacttctgtttacatggaactcagacatctgcaaatcatgctgcagaaccttggcctgaaaatgctacatt

SEQ ID NO: 705793 - DNA, 98 bp, Homo sapiens
tcagatggtagtttgactttatggaacctgaaaagcccaagtcgccctttccagaccacaattccacatggtgttgggaaatcttcgttagtccatct

SEQ ID NO: 705794 - DNA, 75 bp, Homo sapiens
tctcgctgctcggtgcgaggcggcggagagcgaggcctgaaaccaaggtgtatgttggtaacctgggaactggcg

SEQ ID NO: 705795 - DNA, 100 bp, Homo sapiens
acacagaggatttccggactgaccgggcagtgagaatcaccaattctgctctctttgctgaactcggttatttcacagacactgatgagctgcaattgga

SEQ ID NO: 705796 - DNA, 100 bp, Homo sapiens
gccccccaggaggggcgagagggagccgcagctgatgtcaggtctaccagccacagtctctgcacgtttccaagagcagcagaaaatgaacacattgcag

SEQ ID NO: 705797 - DNA, 83 bp, Homo sapiens
ggagaactcctgactgattagcattcacaccaggaaagagccagacttctcagaggtcagtctgttcaacaagtgggacccca

SEQ ID NO: 705798 - DNA, 100 bp, Homo sapiens
tcaatcctgggaaaaacttcaaactggtcaaatgcactgtccagacggagatccggagcttacaagaccctatgaaaaaattagttgagaaagaagagaa

SEQ ID NO: 705799 - DNA, 75 bp, Homo sapiens
aggctagaagagctcgatgagaggaactgtggctgcaccatctgtcttcatcttcccgccatctgatgagcagtt

SEQ ID NO: 705800 - DNA, 75 bp, Homo sapiens
gttcgtcatggggctgtttggaaagacccaggagaagccgcccaaagaactgccagagactgctgctactttgaa

SEQ ID NO: 705801 - DNA, 100 bp, Homo sapiens
agaaggcacaaaaattacttcttgaactcaacaaaataagaacaatccggacatttcttttggactcgtgagctgaagtgcagatgaccacattcaaggg

SEQ ID NO: 705802 - DNA, 98 bp, Homo sapiens
cctgcatatctgaagcggctcccagtccctgaaagcattaccgggttcgctaggctcacagtttctcacccacggataataaatttgctacatgctct

SEQ ID NO: 705803 - DNA, 100 bp, Homo sapiens
gataaccagcattgagcacaaccgggacctctccttcctgcgggttacctacctgggcaaagtctccaccactggcatgcagtttttgtcaggctgcaca

SEQ ID NO: 705804 - DNA, 100 bp, Homo sapiens
agcagccgcccgcttcaaccccaggggaccagaggaactcagccctgattgcgacaatgtatttcaaaggcattgaagcagggaaggttccctattttcc

SEQ ID NO: 705805 - DNA, 100 bp, Homo sapiens
gaggggccccagcagcccccgaaggccctatcaggacatggagtatgaaagacgggtgtcaaattgagaaccaggtagatccccaccacctacagtaaaa

SEQ ID NO: 705806 - DNA, 74 bp, Homo sapiens
gccgggatggaggacgttaactctaacgtgaacgcggaccaggaggaaaccactgattgcttgtgtggagaaac

SEQ ID NO: 705807 - DNA, 75 bp, Homo sapiens
atcctggaggtggatctgaagaacggccactgaggcggctcccagctgcgttggcgacatggccgacacccccag

SEQ ID NO: 705808 - DNA, 100 bp, Homo sapiens
agacggggcagctggacgagctggagaaggccatcaccacgcagaacgtcaacaccaagtgcatcaccatccccagatgtcctggcgtccgcaataccgt

SEQ ID NO: 705809 - DNA, 95 bp, Homo sapiens
aacagtgacggaatgcctccatacatgctgtgggtgagcgtggaggatgctcagatgcacaccgtcaccatctggctcacagtgcgccctgatat

SEQ ID NO: 705810 - DNA, 100 bp, Homo sapiens
attgctgagttcaccgtcagcatcacggagggtgtcaccgagaggtttaaggccaaccccttcaaggagcgaatctgcagggtcttctccacatccccag

SEQ ID NO: 705811 - DNA, 75 bp, Homo sapiens
atcgtctatcattggatgaagtggctccggagatgtttgggccccatggtatccctgtgacagtatttcccaaaa

SEQ ID NO: 705812 - DNA, 100 bp, Homo sapiens
cggtcctcctgcaggagatgcaggcattgacacagaccttcaacaacaactggtcctatgaaggcttggagtcccgatttcagagcaagtctggctatct

SEQ ID NO: 705813 - DNA, 100 bp, Homo sapiens
attagggaaagatttatcttttctccactcatataaaatgtcaaaatgcagatcttcgtgaaaacccttaccggcaagaccatcacccttgaggtggagc

SEQ ID NO: 705814 - DNA, 85 bp, Homo sapiens
accgcttcgtgcaactctccgggcggccgcacctgccaggaaattgacaatggcccttcagctatgctaggtctataatgggaag

SEQ ID NO: 705815 - DNA, 90 bp, Homo sapiens
ttatcaagccctcaaagccacccaggcaaagcaggcacttttggcaaagaaggaggtggtgttcccactgatgaagagcaggcgactggg

SEQ ID NO: 705816 - DNA, 100 bp, Homo sapiens
gagcaatcaagcagatcatcaaagggagagatgtcatcgcacaatgagtgatgtgtctgcaggaggagccactgtttttcctgaagttggagctagtgtt

SEQ ID NO: 705817 - DNA, 51 bp, Homo sapiens
atccaggagaacggcggctggatgttgccgatgactatatccacaccgcag

SEQ ID NO: 705818 - DNA, 83 bp, Homo sapiens
ctgcggccaattcggtggaacgaggacgcggactgcgaaggcaggcaccgaccgtcacgagctaacttcctggaagagctttc

SEQ ID NO: 705819 - DNA, 82 bp, Homo sapiens
cggggacacagggcagcccgcagaggacagcgaccacgatggactcaccctgtcacccaggttggactgcactggcctcaac

SEQ ID NO: 705820 - DNA, 100 bp, Homo sapiens
caggggtctcggaaaccatgggttattgcagtggcaggtgcacgcttatctttatctgtggcatgcaactggtaagaatgattgatgttggctgatattg

SEQ ID NO: 705821 - DNA, 100 bp, Homo sapiens
gtcttccctgacctcttgcggcccccgagcgctgctgacattgagacctggtgtcagccttacagcagcagctgtcgattcggcagaccgaagtcctcgg

SEQ ID NO: 705822 - DNA, 100 bp, Homo sapiens
ctgctgaaggatgaacggagaggaagaattctttgatgccgtcacagggacgatgatgacattaatgatgttgcatcgatggctggagtaaacttgtcag

SEQ ID NO: 705823 - DNA, 82 bp, Homo sapiens
cctcggggtccggaaccagacgatgagacagagttgcgaccgcgcggcaggggtccattgtagggggagaaagaaatattca

SEQ ID NO: 705824 - DNA, 50 bp, Homo sapiens
aaggaccatactgtgcgctctactggtatcaaagagagtgtgtgctgggg

SEQ ID NO: 705825 - DNA, 75 bp, Homo sapiens
ggggccattcccaaagtcaaagatcaaggagtggagcttggtttcgggatctcggtgctgcagacggcgagacct

SEQ ID NO: 705826 - DNA, 100 bp, Homo sapiens
gacgtcgcgaggattaagtttaagacttcgcgagaacagaatttcttttggcacctcctctccgcgcgttcttggggtgtctgatgatttgtgagcctca

SEQ ID NO: 705827 - DNA, 50 bp, Homo sapiens
aaaaccaggcaaatatgttggagagtgtcagagatggctttggattcccc

SEQ ID NO: 705828 - DNA, 110 bp, Homo sapiens
catcagtatgagcgcctatctgcgagaacagagaagggagctctatagtcggagtggagaactgcaagcttggatttacactgggcaacgtggttggaatgtatctggct

SEQ ID NO: 705829 - DNA, 75 bp, Homo sapiens
gccagaacgacctgatgggcacggccgaggacttcgccgaccagggtttccaggcctgaggtgcccgccctggcc

SEQ ID NO: 705830 - DNA, 100 bp, Homo sapiens
cgggaccccagggcagcgaagcagccggccaagagccactgcacaatgaggagctggcaggagcaggccgggtggcccagcctgggcccctggagcctga

SEQ ID NO: 705831 - DNA, 100 bp, Homo sapiens
gggccatgtgcaggaccctaacgacaggcgcctccggcccatttacgactgtgccctgtccacggtgcctcctgcatgtcctgctgccctgagctgtccc

SEQ ID NO: 705832 - DNA, 75 bp, Homo sapiens
tgatgaaaatgaagaagaagatgcctttaccgaccatgccaattctcggaagcaagaagcagagtggaaagaaaa

SEQ ID NO: 705833 - DNA, 100 bp, Homo sapiens
cccggcccggcgaactaactggagcacggagctgcagccggttgggccggtgtactttcccggtgaccattgtgaggtagatattttgttctaattttcc

SEQ ID NO: 705834 - DNA, 100 bp, Homo sapiens
ttgccggtctgggagttgggggcaaggagaagatcctggtgctgctgctgcctccactgtactcagacccaggtagcacaggattgtccatcctccagca

SEQ ID NO: 705835 - DNA, 75 bp, Homo sapiens
aaagggctatgaacgattaaaagaagaactcgcaaaagctcagagggaccagatctttatggaaaatgtaggtgc

SEQ ID NO: 705836 - DNA, 98 bp, Homo sapiens
gaggatctttgctcttccatccgcctttgatcgtcttcctcttcagccatccagagggctctgaactcctacttcgagcctccggtggaggagagcgc

SEQ ID NO: 705837 - DNA, 80 bp, Homo sapiens
aagaaacagggtccacagcagttccctatgggtcttttaaacatgaatctttgtctgaagtggaagaaaaatacaagaaa

SEQ ID NO: 705838 - DNA, 74 bp, Homo sapiens
tgacagagtacaccttgtacttgggatttcacaggttcctcaacttaaaagggatgaggagaccttggagacgg

SEQ ID NO: 705839 - DNA, 100 bp, Homo sapiens
ctccagagaaaattgagcagctcagacagttgatattcataaagagaaagttgcaagaagagaaattggtattttgactaccaataaaaacacttcaagg

SEQ ID NO: 705840 - DNA, 96 bp, Homo sapiens
gcctgagcgcctgccctgcctgcagcgcctcctggaccttggagctgatgtcaatgccgctgacaagcatgagcagcaagatgggcatggaggcgg

SEQ ID NO: 705841 - DNA, 82 bp, Homo sapiens
aaagaaggctgtaccgttagccctgagaacactcgggtgcctcgcctgcccgaatttgctgactgggctcaggaacagggag

SEQ ID NO: 705842 - DNA, 98 bp, Homo sapiens
aggtgcgcgccggccgcggcttcagcctggaggagctcagggtgttcctacatgaggccacggcccggctgatggcgggggccagccccacacggaca

SEQ ID NO: 705843 - DNA, 102 bp, Homo sapiens
aacatctcaccaatttcaaatctgccagtgagctcctccgacagcgaggcccccgaggccaaccccgccgacggcagtgacgctgacgaggacgatgaggac

SEQ ID NO: 705844 - DNA, 100 bp, Homo sapiens
cggtttcaccgcgctcgttatcatgtggcagaagcactatgactttgagagttttgacctgcctgaagagcaccagattgcgcacctccccttgagtgga

SEQ ID NO: 705845 - DNA, 100 bp, Homo sapiens
tctcagatgacttcgtctcccaccgactgcctgtttaagagccatccaaaactctgtttgtcaaaggcctgtctgaggataccactgaagagacattaaa

SEQ ID NO: 705846 - DNA, 51 bp, Homo sapiens
catcacgcccttcggcgccgaccagtatacgctcaacggcaagaaagtgga

SEQ ID NO: 705847 - DNA, 75 bp, Homo sapiens
ctgtgcctggcctcaactgttgcttcttataaaggatgttgcttcagagtgtgaagtcaaatgcatgccaacatt

SEQ ID NO: 705848 - DNA, 75 bp, Homo sapiens
ttccatcaaaaagtgattaagcagagaatggagaagaaggttgattccagtacctttgtgttggatgaatttaag

SEQ ID NO: 705849 - DNA, 100 bp, Homo sapiens
cacagccagaatggggaggaggagcctgagtggtgtggacatgcctgcaatcctgctgaaactcggatttaaagagtccctggtacagtcaaaaatggca

SEQ ID NO: 705850 - DNA, 75 bp, Homo sapiens
gccgggtgctgcggctctgcgcggtccccgccagcgccccatcctgagccggccccaggcatggaagagctgata

SEQ ID NO: 705851 - DNA, 51 bp, Homo sapiens
agacctgcccaagtctcccaagggaaaatttcatggaaatccaatgcatgt

SEQ ID NO: 705852 - DNA, 113 bp, Homo sapiens
ccgaagtcagttccttgtggagccggagctgggcgcggattcgccgaggcaccgaggcactcagaggagagtgcctggtgaagaatgtgatgggatcactagcatgtctgcgg

SEQ ID NO: 705853 - DNA, 50 bp, Homo sapiens
tgcgtcaatcagagcgtcctgtgcgattgacttgatgcacaacatcacaa

SEQ ID NO: 705854 - DNA, 97 bp, Homo sapiens
ctgtagtgggcggccagagcgccggcaagagctcggtgctggagaacttcgtgggccggacggtggccgcagaggtgcggaagcaggtgtcccggga

SEQ ID NO: 705855 - DNA, 100 bp, Homo sapiens
aaacgagaacaacggaggcagaggagctgaagactccagtatgcaactgactacaaggaggctgcctgctgtttcccggggagatcatgaaacgaggtcg

SEQ ID NO: 705856 - DNA, 123 bp, Homo sapiens
gaatctccggagcgaggaacagaagaagaagaaccggaagaaactgtccgagaagcccaaagtgtgaaatctaagaatcccctgccaactcttgagggctcaatccagaatgttgaattgaag

SEQ ID NO: 705857 - DNA, 50 bp, Homo sapiens
cagcctgctgacattgggtataaggaaaatgtttcaacgtgcgcaagagt

SEQ ID NO: 705858 - DNA, 100 bp, Homo sapiens
ctgcggaaattcatctttaaggacgaagagagatgccagcctgttattgcgctccaggccactatcactccagccaacctcagtatcgcccagtcccttc

SEQ ID NO: 705859 - DNA, 90 bp, Homo sapiens
aggggaaagagcaccgaagaagcttcgaggatctggtggagccgccaccaaaatgcagattttcgtgaaaacccttacggggaagaccat

SEQ ID NO: 705860 - DNA, 73 bp, Homo sapiens
actcttgcgccccctgctggtttcctgccctgtctaaatggctgcaagcaactgacctcactagagaagtgta

SEQ ID NO: 705861 - DNA, 100 bp, Homo sapiens
gccttttggatgctctctgccctgaatccttgggtttcctatcctgggagcaggagagtgtgcctatttgaatgacaaaggtgccagtagtgccaggcac

SEQ ID NO: 705862 - DNA, 74 bp, Homo sapiens
gaagcagaggcacccacgctcctacaatgaaacccttttccaaagagaaatgaagaagaaaactgtatgtaccc

SEQ ID NO: 705863 - DNA, 50 bp, Homo sapiens
gggacctgatgaagcgaagatcaagagccatccaaaactctgtttgtcaa

SEQ ID NO: 705864 - DNA, 100 bp, Homo sapiens
ctggaggatgagctacgccgagcgggctccctgcgcgcccagctggaggcgcagcggcggcaggtcaagtctggcaccatctttgacaacttcctcatca

SEQ ID NO: 705865 - DNA, 75 bp, Homo sapiens
actttcattgtctcggacgtgcggggcctgggcctcccggtccgcaagcaggtgccaagtcctgccctgccaact

SEQ ID NO: 705866 - DNA, 100 bp, Homo sapiens
gtcttggtccgccgggagtctgagctcaggttcatgatagagacctaggagatgaatatggatggaaacaggtgcatggagatgtatttagaccatcaag

SEQ ID NO: 705867 - DNA, 100 bp, Homo sapiens
gcaggctgctaccgcccctccgcttccagacattctcagctgtcaggttggatggcaagcatgtggtgtttggcaaagtgaaagaaggcatgaatattgt

SEQ ID NO: 705868 - DNA, 100 bp, Homo sapiens
aagatccgagcaataggcaaaatggccagagtgttctcagtgctcagatgaagaagatgactttatgtgtaagaaggcggcctctaaatcaaaagagaat

SEQ ID NO: 705869 - DNA, 100 bp, Homo sapiens
tccgaaggagctccaggaagagcaaagccgagctgcaggctgctactattctgaccaagtccactttggagaaccagaattggagagctaccacccttcc

SEQ ID NO: 705870 - DNA, 100 bp, Homo sapiens
taccccatcaccagaacccagcagcttgccagcatcgttgcagggacatgagagatggctttagaagaaaaagtttctactcttcccattatgcgagaga

SEQ ID NO: 705871 - DNA, 100 bp, Homo sapiens
agaagttcatggatgctgtcaacaagaagagcagttcccaggatctgcataaagagactcttgaagacaactctgaaaagtgggctgtgactcccgatgc

SEQ ID NO: 705872 - DNA, 74 bp, Homo sapiens
tttcccagctgggagcacagagaggacatcgctgagatcacagagatgttcctaatgtggatctaccacccctg

SEQ ID NO: 705873 - DNA, 75 bp, Homo sapiens
gtgccgtttaacctttattgtggtggagtccaccccgctgtgcactgctcagcacgcaggcatgtgaggaagctg

SEQ ID NO: 705874 - DNA, 101 bp, Homo sapiens
gcagaatcagcccattgcaggaatgggataccaagtctcccaacaacagagacagccaaagatgtaacttatatatgtccattcactggcgctgtacgagg

SEQ ID NO: 705875 - DNA, 100 bp, Homo sapiens
aggagcccgagatggagggatccttctgagaagtgaagccatttggactttctgggccggagcctcaacagaaagctcctttagttcctcctcctccacc

SEQ ID NO: 705876 - DNA, 83 bp, Homo sapiens
cagcacttcattatgcagctaagaccgcaggatggaaacaagcccactgagactagtcaacctcaatctagcacagggggtta

SEQ ID NO: 705877 - DNA, 75 bp, Homo sapiens
gtgtaaaacaaaaatattatggtctttgtgcacatttacatcaagatctttgtggagttcacctctgtgtttgac

SEQ ID NO: 705878 - DNA, 100 bp, Homo sapiens
ggcaggggaagctgaaaggacctttcactccctacttttggccagggccttctgtgccacctgccaagaccagcaggtggagatgtttggggtgacaggc

SEQ ID NO: 705879 - DNA, 82 bp, Homo sapiens
tgtgttgaatgacatgggagacacgccgcttcatcgagctgcctttacaggacgaaaggcctatgagagctacaagaagaag

SEQ ID NO: 705880 - DNA, 75 bp, Homo sapiens
aggaagtgactcaaactgtgagaacttcaggtaccgtatcctgaaccccagtgccatcccggatgacaccttcat

SEQ ID NO: 705881 - DNA, 80 bp, Homo sapiens
gataggcggccatggtccaaccttgaagttaaagccttccatctgaagtatgatgaagttcgtctggatccaaatgttca

SEQ ID NO: 705882 - DNA, 50 bp, Homo sapiens
gaggaattcagcgatttatacaacgagcattttaagtcttccacatcaag

SEQ ID NO: 705883 - DNA, 76 bp, Homo sapiens
ttgcagtatgtggccagttatttgcctcagtaaaagagttctcagaggcactgtgactgacttccctggatttgat

SEQ ID NO: 705884 - DNA, 75 bp, Homo sapiens
gaggataccccattggttccattggtagctggcagtgttgtgatggcttttgaagaagtatgcccggacagaata

SEQ ID NO: 705885 - DNA, 74 bp, Homo sapiens
tgcgactattctccgggagccgtccgtgtcaccgccggaacctggcgcaggattatatctgtccaagatgcgag

SEQ ID NO: 705886 - DNA, 102 bp, Homo sapiens
atgttggagaactacaggaacctgctttctctcgatgaggataacatccctccagaagatgagctgaagaagcaggtggagagtgccgagctgaagaaccag

SEQ ID NO: 705887 - DNA, 100 bp, Homo sapiens
agagattcatatgagagttatgctgacattatctctacggtagaattcaaccacacgggagaattactagcgacaggggacaaggggggtcgggttgtaa

SEQ ID NO: 705888 - DNA, 98 bp, Homo sapiens
agtagaacagcaaagagatttaacgtcacagtttttgaagaccaaggggctggggagaacaccaaaacaaacctggagagcatcctctcttaccccaa

SEQ ID NO: 705889 - DNA, 83 bp, Homo sapiens
ccaccaccatctccatcacccaccaacaacaccacaataatccacagccaagcttacaacaggttgatgaacatagtaaacct

SEQ ID NO: 705890 - DNA, 100 bp, Homo sapiens
cgagaagaagtcagaaatctacagttactcacacaagctcctcagtgggtagtgcacttccacgaagacgctgctgtgcatatattaccattggaatgat

SEQ ID NO: 705891 - DNA, 100 bp, Homo sapiens
cctggactgcattgtcgaatggtccaaggtgtggatgaggtcaccattgtcaacattttgaccaaccgcagcaatgcacagagacaggatattgccttcg

SEQ ID NO: 705892 - DNA, 75 bp, Homo sapiens
tgctgccgccggcgaaggaggaggcgttgccggctttgccctttcggatgaagcatacagatccctacgagatca

SEQ ID NO: 705893 - DNA, 82 bp, Homo sapiens
tgtgaaagcgggcgttttggaagataccggaagtagagtcacggagaggtacgtacctgtgggcatcatgttccttgttgga

SEQ ID NO: 705894 - DNA, 100 bp, Homo sapiens
ttcttatgacccatccagtccacaaaccagccagaccaaccctggaatggtccccagccatggattcagtcccagatcttatttctttgacaaccctcga

SEQ ID NO: 705895 - DNA, 81 bp, Homo sapiens
aagaccaggagatcctgcatagccttcacagagagtccagttgccaaggtgccgtgagcgatgtggagatgcaggaacact

SEQ ID NO: 705896 - DNA, 83 bp, Homo sapiens
aagtctgcgaggaggaagtcgcctctgtgctcgtgagtccagggatctaagcgtgagtgcatctccatccacgttggccaggc

SEQ ID NO: 705897 - DNA, 96 bp, Homo sapiens
aacaacagtgacaagaacagtgggccacaggggccccgaagaactcccacaatgccacaggaggaggcagcagaattctgcttggtcagaatcgtg

SEQ ID NO: 705898 - DNA, 101 bp, Homo sapiens
ggctgggctgcggagcgcgggcctcggcggcgcagaaagctcctgctgcttctgtaccccgcctgtccctcccagctgcgcagggccccttcgtgggatca

SEQ ID NO: 705899 - DNA, 99 bp, Homo sapiens
tcatgatgcaaaattttggtctgatgatagcagatcctatctgttcaattcttatagccattcttatagttgtaaggaatgtatcctgtcaggtataat

SEQ ID NO: 705900 - DNA, 100 bp, Homo sapiens
ctgacagtattgaggaggaggctgcacaccatagtcaccagcaaaatgcaactgccctgcctggtacttggcgaagaacagacgtgcacttagagaaccc

SEQ ID NO: 705901 - DNA, 100 bp, Homo sapiens
agagaagacgatctgcacttcgcattttggcattgacatttaattttagggtcctttatatagaagggagagtaggagcttgaaatcgtcattggagatg

SEQ ID NO: 705902 - DNA, 100 bp, Homo sapiens
aggaagtaatccctagtgtcagcagattcagcggtactggtgtataataggcctgcacagctgaccacagttgggaaacgttgctgtctttggattcagg

SEQ ID NO: 705903 - DNA, 100 bp, Homo sapiens
aatccccacatgttgtggagggaccctgtggaaggaggagacatcacagctttcccagatcgggaggaaaaatatggaatgtgttttaccgctgactgaa

SEQ ID NO: 705904 - DNA, 100 bp, Homo sapiens
tcagagacaagaagaggctaacatgactgataccactataatttagtgaaagtggagaatgaggacatgaataaagaccagatcttgctggaaaaagaag

SEQ ID NO: 705905 - DNA, 75 bp, Homo sapiens
tagaggacttccctttggatgtagcaaggaagaaattgttcagttcttctcaggagcagctgagaccctcagccc

SEQ ID NO: 705906 - DNA, 73 bp, Homo sapiens
cagcctcaaacaggagctggagcagctcaaagaggaactgcaagcacatgttgaccagataactgaaatggca

SEQ ID NO: 705907 - DNA, 90 bp, Homo sapiens
gatgaaaaaacaaaaggactgtgggattccattaaaagatttccagaagctgttctgtcaataacaaagtctcaaagaaaaccacaaaac

SEQ ID NO: 705908 - DNA, 82 bp, Homo sapiens
ctggtgatattgtagaaattgctgcctcagcctcaccatgtgtgtcaggagctgtttccagtccccccgtctccagtgggtg

SEQ ID NO: 705909 - DNA, 50 bp, Homo sapiens
tgagatgattgccaaacccccagatgcccagcctacagagtctgagaagg

SEQ ID NO: 705910 - DNA, 100 bp, Homo sapiens
ggatgaaggagcttcaaacccaaagagagccaggactgtctccagtttggtcctcctgctgaaggggaagtggtccaagtgagatggacagacggccaag

SEQ ID NO: 705911 - DNA, 100 bp, Homo sapiens
acccaggccactacccacccaacattgactgcacatggaacattgagaccttgaaaatccaaactgtgggcatcccaatctatgtaagttttgcattcat

SEQ ID NO: 705912 - DNA, 51 bp, Homo sapiens
cctgtacagcctgcagaactgtggacccaagtggagagattgtggaactgg

SEQ ID NO: 705913 - DNA, 75 bp, Homo sapiens
caacaacgaggaaatatttccaacatgcgtgggaatatttttcaagatgtcttacacagagacactctagtgaaa

SEQ ID NO: 705914 - DNA, 100 bp, Homo sapiens
gggcgaagcacgctactacctggtgcagggcctgattgaggactgccagctggcgctgcaggatgcacatgatggggaagtcaacgctgtgcagttcagt

SEQ ID NO: 705915 - DNA, 100 bp, Homo sapiens
accccggaagaggctggctgggacttctggttcagattgggtgagatacaattccatggaattttaccactgaaccagtggagggctaattttgtcattt

SEQ ID NO: 705916 - DNA, 50 bp, Homo sapiens
tctttctggcctggaggctatccagcgactttgtgttttatgccccacgt

SEQ ID NO: 705917 - DNA, 100 bp, Homo sapiens
gggcacacgcccgctcgcacaagccacggcggactctcccgaggcggaacctccacgccgagcgagatattgaggagaaaggcgtccggatgaagctgac

SEQ ID NO: 705918 - DNA, 80 bp, Homo sapiens
ctaacttctactgacgaagcttggaagttgcagaagtaaggtacctgccgtgggcagatctgagctttcttcttggacac

SEQ ID NO: 705919 - DNA, 100 bp, Homo sapiens
ctctccggagccctcgcctactgcctggccctccagctgtatgtgcggcgccgaaagaagctacccagtgtcctgatgctgagtttgtgtgtgaacggac

SEQ ID NO: 705920 - DNA, 98 bp, Homo sapiens
cggaagctctttgaccttctggatgtccttgagttcaaccaggtgggtcttcaaacaactctatgataaaggccttgtttatagaggtgtgaaagtca

SEQ ID NO: 705921 - DNA, 100 bp, Homo sapiens
caccgctacctggtcctcgatcttgctctgctgtttctgatggggattctagaagcagttcggttatacctgggtctcttcgagccaggggacatgcagt

SEQ ID NO: 705922 - DNA, 75 bp, Homo sapiens
gaagctggccgagcaggctgagcgatacgacgatggcggctcagcggcagcgggcgctggccatcatgtgccgcg

SEQ ID NO: 705923 - DNA, 100 bp, Homo sapiens
ggcacaagattcctaatttggaggtaaaatgtgatcagtactggccagcccgtggcaccgagacctgtggccttattcaggtgaccctgttggacacagt

SEQ ID NO: 705924 - DNA, 82 bp, Homo sapiens
agaacttgaaggttaaaccactagcccatttcacaggaactgtggctgcaccatctgtcttcatcttcccgccatctgatga

SEQ ID NO: 705925 - DNA, 131 bp, Homo sapiens
actgattttatgggaaaattaagcagatgctccagtttgagaaacctggatctgcgatctgtttgtgtttgtatctgttcaaactaggaatagcaccccagatccaggatttgttgggcaaagtagacttc

SEQ ID NO: 705926 - DNA, 75 bp, Homo sapiens
ggcggatgccctgcagtacctgcagaaggtctctggagacatcttcagcaggcgctgagatgcgtctggagagcc

SEQ ID NO: 705927 - DNA, 75 bp, Homo sapiens
caaagctttgcgcaacgccaacctcaggcgagatggcaccttctaaaaatgaacaagagcagctctgatttggaa

SEQ ID NO: 705928 - DNA, 100 bp, Homo sapiens
aaaaaaagtttcctataactggagttttaaggaaccaaccggtgagccctctcctaagagacccaggggaagacccaaaggcagcaaaaacaagagtccc

SEQ ID NO: 705929 - DNA, 101 bp, Homo sapiens
attagctttagtgaaatgggctaataatgctggcaaagtggaaaaatgtgcgctactctcggaaccgcacgtttgacacgtacattgggcagggctacgtg

SEQ ID NO: 705930 - DNA, 74 bp, Homo sapiens
tactttgagtgctgtctccatgtttgatgtatctgagcaggtccctttctagagataggagaagagagagatcg

SEQ ID NO: 705931 - DNA, 100 bp, Homo sapiens
gaggaggttttcaggaccaaaattgtggaaaagtcactctgcggagctggagtttgttcagatcatcatcatcgtggtggtgatgatggtgatggtggtg

SEQ ID NO: 705932 - DNA, 100 bp, Homo sapiens
gaaaagtgcggacaaattcataaagctttacaaggagtttcagattttgaaaagaaaacaagtaatcgttctgagattgaaacccagacagaggggagca

SEQ ID NO: 705933 - DNA, 90 bp, Homo sapiens
tgcaaagccaaaagaaatttcagaaattcaacgtttaaattatgaacagtcactgcaataacatagcaaaattaatggattaacaatata

SEQ ID NO: 705934 - DNA, 100 bp, Homo sapiens
agaaaatatagcagatatggaaggtgcactgtctgtgtatgatgaccaaccaaatgcgcacaagaagtttatggaaaagttagatgcttgtatccgtaat

SEQ ID NO: 705935 - DNA, 95 bp, Homo sapiens
acactgaagagtacgtcttcgggtctacccctaatcactggtgacatctttactcattaacctgggaagccccgtaaaagaagttcgtagggctg

SEQ ID NO: 705936 - DNA, 75 bp, Homo sapiens
ctttgggaagcatgtcaccaacccggccttcaccaaactccctgctattgagggcacctacattgacaagaaatg

SEQ ID NO: 705937 - DNA, 100 bp, Homo sapiens
tccggcgcggagacggtggagtctccgcactgtcggcgggcttcggaaccaaaaagaagcttcccagagccggggccaggagccccaagcgccctctagc

SEQ ID NO: 705938 - DNA, 87 bp, Homo sapiens
cggcccgcctggcctgcagcgctcccacccccggcggcggcacgatgccctttgacttcaggagattggcggcagtaagcacacaat

SEQ ID NO: 705939 - DNA, 101 bp, Homo sapiens
agcgtgtgcgctgtaaacagtgtgagtgcatgtgcgccagcgcgtgcaaggacacgcaacatggccaacgccctggccagcgccacttgcgagcgctgcaa

SEQ ID NO: 705940 - DNA, 90 bp, Homo sapiens
acagaaattagaagaacagattgcaaatcagactggaagatgtgccggtggtggtgtgcacattgagccccggtatagacagttccccca

SEQ ID NO: 705941 - DNA, 101 bp, Homo sapiens
agtgccccatcaccttccgcaggatccagctccctgcccgaggtcatgactgtcgccacatacagggcaattgaaggaacagactaaaaatcgtgtcctgg

SEQ ID NO: 705942 - DNA, 100 bp, Homo sapiens
gctgaccaggggcttgagagctgggttctattttccctcctcaaactgactttgcagccacggagaggagccgctcccactcaggggaccgctacaggcg

SEQ ID NO: 705943 - DNA, 100 bp, Homo sapiens
ggagacagcccaaatatcctcggaagagcgctcccaggagaaacaaatacatgatcacggatatcatcgggaaggatgatggcttgggcgtggagaatct

SEQ ID NO: 705944 - DNA, 100 bp, Homo sapiens
gcgctcgctcgggtggcgacttcctccccgcgccccctccccctcgccatgaaggcatcagttttgaatgtcaaggaatccaaagctcctgaaagaacgg

SEQ ID NO: 705945 - DNA, 100 bp, Homo sapiens
gccagcccgagtgactcactcggccaaggaaactcccagggcccgcccaggacccccaagccgccgcggacgcaggcgctgtgtgcagtggctgaaagtc

SEQ ID NO: 705946 - DNA, 74 bp, Homo sapiens
cccagttggcccagaggatctcttctaacatccagaagatcacacagtgttggttggatgactgcctgcaacaa

SEQ ID NO: 705947 - DNA, 100 bp, Homo sapiens
atcaacaatgagtacaactaccgctgctggaccacaaaccgctgccagaaaaagctgccaaatgctgttaaatcaactgagagaaatcacaggcattcag

SEQ ID NO: 705948 - DNA, 75 bp, Homo sapiens
tcaaacacagaagctcctggagatgacaaagtggtttttagaacttcagccataaaaatgggcagaattttcctt

SEQ ID NO: 705949 - DNA, 87 bp, Homo sapiens
ggggccgcgctctgctgcttcctcgtcctagtgatccacgcgcagttcctcaaagaagcagacggttgatgatgaagcgccggccgt

SEQ ID NO: 705950 - DNA, 100 bp, Homo sapiens
cgtgaagatgatgaggatgaagacctttatgatgatccacttctacttattaaatatttcacgccatggataccttgcaaaggaacggctacgacctggc

SEQ ID NO: 705951 - DNA, 75 bp, Homo sapiens
gcagggcatcgcgctcaagtacggtgtcacgatgaggagcgggaaggcctcctgcaccctggagaccgtgtggga

SEQ ID NO: 705952 - DNA, 75 bp, Homo sapiens
cacagaccttactccccttagaacagggccaattcctgtccccccagcagcatggcatcgtgtgctgaaccctct

SEQ ID NO: 705953 - DNA, 82 bp, Homo sapiens
atgatttctccatcctgaacgtgcagcgggatccaggtccggcacgatcaagacccaggctacatgcatcacaagtttgcca

SEQ ID NO: 705954 - DNA, 83 bp, Homo sapiens
ctgggacactgctggtcaggaacgggatgaagtgtcctcttgctagcaccaataaaagatttctaattaacacaattaaaaac

SEQ ID NO: 705955 - DNA, 76 bp, Homo sapiens
gttttgaagagttctgcgttttgccagtcacctctcaactgtgtgccaaaggtgtttcaggcctcacctgaagatc

SEQ ID NO: 705956 - DNA, 100 bp, Homo sapiens
agtgaactccggcgtggctgaggaaggaggaggcacccacaggctgctgggaggagagcataaggaaggatgccaattctgcgcttctcagtaactacga

SEQ ID NO: 705957 - DNA, 100 bp, Homo sapiens
acgtgtgcttcttgggcgtcgttgtcaccatcgtctccgccttccagttcggagagcaaagaacagtctgaacttgatcaagatttggatgatgttgaag

SEQ ID NO: 705958 - DNA, 100 bp, Homo sapiens
gcaccgcggcccccaggacacgcgctaccaaagagaaccctgtacagtaagaaatatggtgtggacctcatcagatacactcatgcagcaaacacagttg

SEQ ID NO: 705959 - DNA, 100 bp, Homo sapiens
gcgccccgctgcctcgccgccacactttcctgggagcggcggccacggaggcaccatgaagaagtcttactcagcttatgtttattcagagccaaggcca

SEQ ID NO: 705960 - DNA, 51 bp, Homo sapiens
gaacttataatcgtcactggattgaggagagacttcagcatgcaaaccttc

SEQ ID NO: 705961 - DNA, 98 bp, Homo sapiens
ggccccggacgaaggtactcgcagcacttggagcgcagaaccggccgcgcccggtcgcaatggaagaagagatcgccgcgctggtcattgacaatggc

SEQ ID NO: 705962 - DNA, 88 bp, Homo sapiens
gaaaggttggagctgccgccgcctgcagtcggtgaccgcgcgactcggcgcccgcccgcgacgttacatccaagaggaaataatccag

SEQ ID NO: 705963 - DNA, 80 bp, Homo sapiens
ctctgctcttcctcccttcgctcgcaccatgttcaaatctgaacatcaatgatgtactagggaactactcattgactctt

SEQ ID NO: 705964 - DNA, 90 bp, Homo sapiens
ggtgacctgactctctgaggctcattttgcagttgttgaaattgtccccgcagttttcaatcatggtgtggatccggagttgtatgagtt

SEQ ID NO: 705965 - DNA, 85 bp, Homo sapiens
ggcggaggtcgataagctggaactgatggttctctacttttagagtcgaaaataaatcctaacactgcataccagaaacaacagg

SEQ ID NO: 705966 - DNA, 51 bp, Homo sapiens
gaaaaagtgtgacttggcagctggtggcgaaattcacatactcactgtctg

SEQ ID NO: 705967 - DNA, 82 bp, Homo sapiens
accggcaaagttcacgtgactgtggatctcaagtactaccggccaactgaagtgcacatggattaattgatgtatgttgagt

SEQ ID NO: 705968 - DNA, 51 bp, Homo sapiens
aggggacccagtgcgcccgcatcgtcgaggattcaagatgaccaacgaaga

SEQ ID NO: 705969 - DNA, 101 bp, Homo sapiens
gcgggatgcacgcctgtgtcctcattgctccaaactgtgttgtttcagctgtattaggggaaaccagcagatgagggcgtaagtgaaaaagctgaagtaca

SEQ ID NO: 705970 - DNA, 90 bp, Homo sapiens
gaggaatccagctctgcctgacatccaggcatcctctccaaattgcatagggattaatgaaaatcaagttccatcctcagacaagaggta

SEQ ID NO: 705971 - DNA, 100 bp, Homo sapiens
aagccttgggctcccttgcaggattcagaagtgtatttagcatctctagaagagcttaaagcagcgcctgggtaagagtaacatccaggcacggttaggc

SEQ ID NO: 705972 - DNA, 83 bp, Homo sapiens
cgaagaagcatcgttaaagtctctcttcaccctgccgtcatgtctaagtcagaggatgttcacggaagaccagggtgtagatg

SEQ ID NO: 705973 - DNA, 100 bp, Homo sapiens
aagaaactgaagcaaaagatcagcgaggagcagcagcagctccagcaggcgctggctcctgctcaggtgcgggccagtgctattgcccaggacgcggacc

SEQ ID NO: 705974 - DNA, 75 bp, Homo sapiens
ttgtgttcctggcttccctctggatgctgacagaaacaagggctttatcctgtggataaacgcagagtgaacgag

SEQ ID NO: 705975 - DNA, 75 bp, Homo sapiens
acacctcaagattcacctgaattgaggcaacagttgtttttgactaaaggccagaatgcattggtagagctacag

SEQ ID NO: 705976 - DNA, 97 bp, Homo sapiens
cggagctggctgcccagcccaaaggcccatgaggggatgcagttatgggctctgtcgccgtggacatggtggagctgctgctgctgcagaacgcaca

SEQ ID NO: 705977 - DNA, 100 bp, Homo sapiens
caaagaccatgcgccggaacaccattcttcgccaggccaggaattttgatcctgtggcctataggattgaaccaatggtggtcccaggagtggaatttga

SEQ ID NO: 705978 - DNA, 82 bp, Homo sapiens
tggagctgggtcagtccgccgctcaccccgcggccgcaccttcccgccttctcaggaagtgctctctggcgtggtggtcata

SEQ ID NO: 705979 - DNA, 51 bp, Homo sapiens
ggattccaagtaactcttatttgaggaagaagaggtggataagatgatgga

SEQ ID NO: 705980 - DNA, 130 bp, Homo sapiens
cgcaccatgccgctcctaagcctgcacagccgcggcggcagcagcagtgagagggcgccctgcgtccggcagaggaggcgagcatcccgctcaggtgatgaggaacccctcgcgcacccagcgcagaagg

SEQ ID NO: 705981 - DNA, 100 bp, Homo sapiens
gagaattcgtccgctcccgaggctgagcagggcggggctgagtaaatgccggcttaccatctctaccatcatccgggacttatcaaactggtttcaaagc

SEQ ID NO: 705982 - DNA, 76 bp, Homo sapiens
tccagctcctgaggaacatgcaggttttatgacttacctagtggagcctttatttacagaatgggccaggttttcc

SEQ ID NO: 705983 - DNA, 100 bp, Homo sapiens
tacgggagaaccttcttcacgggacaagaaaagtacattccacaagttgcagttttgcctctgggaacaggcaacgatctatccaatacattgggttggg

SEQ ID NO: 705984 - DNA, 83 bp, Homo sapiens
tcgtcttccacttgcacgaaagctttcctaggccaaaaagaggtctcgtcagcctatctcggcccctctcttttcatgtcctg

SEQ ID NO: 705985 - DNA, 100 bp, Homo sapiens
ctgagcggagggcgcggcgcgagaacgttaaacccatccagagtaatggctgcggccttacccaggaccctgggggagttgcagctgtatagaatattac

SEQ ID NO: 705986 - DNA, 96 bp, Homo sapiens
aggccctgtgcgctaaggccaggctcatcatatgcccgaagctcagtggttacggctgtgaaatttacaatttctgaccatccacaacctattgat

SEQ ID NO: 705987 - DNA, 90 bp, Homo sapiens
tgccaaggccaggaacaggaagtctgctttgctgaagagggcatacggagtggtgtccatgtgcatcgggactggaatgggagccgctgc

SEQ ID NO: 705988 - DNA, 100 bp, Homo sapiens
tgagtatgtcggaggagagcgacatggacaaagccatcaaggtgaagtcccgcttggcttttgggaagcccctggtggagcagggcacagtgctggcgga

SEQ ID NO: 705989 - DNA, 90 bp, Homo sapiens
gagctgtacagagacgtgatgcggatgaactacgagctgttggcatccttggttgccaccttccagagaagaggtacgagatgacaagac

SEQ ID NO: 705990 - DNA, 75 bp, Homo sapiens
gattagtcatgcaataaatgttctggttttaaaaaatacatatctggttttggttatatcttaagtgtggtgctg

SEQ ID NO: 705991 - DNA, 100 bp, Homo sapiens
cacttcttctctggattgaccattcctgatgggggcgtgcatattgtagggggtgaactgggatcttcaagatgaagttcaaagggagaatactaatctg

SEQ ID NO: 705992 - DNA, 74 bp, Homo sapiens
ttatgatgcaagacccagcgtaaatgcagtggccaacaaggcacagaaaactgaatctgtagataacgagggag

SEQ ID NO: 705993 - DNA, 50 bp, Homo sapiens
gcctcctgcgtagctgggattacaggttctgccctgatgtttcctggaat

SEQ ID NO: 705994 - DNA, 100 bp, Homo sapiens
caggagtggagtgatatcagacaccgagcttcagcaagctctctccaacgatgctcagtgacctccaggagtctgtggccagctctcgcccccaggaggt

SEQ ID NO: 705995 - DNA, 50 bp, Homo sapiens
attccaagtaactcttatttgatagaatgagtccatttaagtcccaggac

SEQ ID NO: 705996 - DNA, 87 bp, Homo sapiens
ggaacctctgggagggctgcagacattgaggagctttgtgccgtcaacttgtatggccctgacgcgcaagtggacaggagcaggctg

SEQ ID NO: 705997 - DNA, 97 bp, Homo sapiens
tcatgccccagcaccaaaggcaaggatttggacggtttctcattgatttcatctacgtaggagctggtatgaggatcacacaatgcaagcaaataaa

SEQ ID NO: 705998 - DNA, 75 bp, Homo sapiens
agcagtgaatctacagggacgccatcgaatccggattggagaatccatgttgaccaaatgcaccagcacagaagt

SEQ ID NO: 705999 - DNA, 100 bp, Homo sapiens
tgcatctttatccaatcaagtgcccttggacaaagcctgaaaccaggtttggtatgcagaatgttgaaattcctcatcttcctcaagattttgaagttgc

SEQ ID NO: 706000 - DNA, 74 bp, Homo sapiens
cttgtcaacgcactgatggatttccaccaaagggtataaaattcccgtcattgaaaatctaggtgctacgttag

SEQ ID NO: 706001 - DNA, 100 bp, Homo sapiens
gaagatgtcggccttctgagccgactgcggtggtcaagaggtcccccacggcccttcaggatgaaagctgcggtgctgaccttggccgtgctcttcctga

SEQ ID NO: 706002 - DNA, 82 bp, Homo sapiens
gagccgggcggggcgagggcagctccgctctccagtgaagaagccaagtcttctaaaggcccaccaattcgagggagactct

SEQ ID NO: 706003 - DNA, 50 bp, Homo sapiens
tcctgcagtaccccactctacgatcagggtaacaagatgctcaactatag

SEQ ID NO: 706004 - DNA, 100 bp, Homo sapiens
aagcagtgttcatggagttcattgaattatggcatagatcttgggaaaattgcgactggcattgctcgggtaccacttgctggagctgctggaggccctg

SEQ ID NO: 706005 - DNA, 100 bp, Homo sapiens
ggctttggccccacaggctgtcaagtgaattaccccaaaactctacaatgtgccaacatccaacttcgctcagatgaggagtgtcgtcaagtctacccag

SEQ ID NO: 706006 - DNA, 97 bp, Homo sapiens
aaacagccgaaagaaaagcagccagggcaaccacgagacagacaacatgaaccagatctacggtttcgagggtgaggtgaaggccaagtacacagcc

SEQ ID NO: 706007 - DNA, 90 bp, Homo sapiens
cccgcagagagttaacttctgtttacatggaactcagacatctgcaaatcatgatttcaacactacacttgcacaatgtctttgaaacca

SEQ ID NO: 706008 - DNA, 100 bp, Homo sapiens
cgtcaaactgctctttgagatcgcttcagctcgcatcgaggagagaaaagtctctaagtttgtgggttttcagagaaagatgctgatgaggtgaaaggaa

SEQ ID NO: 706009 - DNA, 101 bp, Homo sapiens
ccaggagcacccggcgtcccagacaagtgagtcctgcaaatgttaagtgatttgctcaaggtgcccatttcgcaggaattggagcccaggccagttctctg

SEQ ID NO: 706010 - DNA, 86 bp, Homo sapiens
gcgtgtcgttctgcaccagcgccttgatcgagtacttgagcaattctgtggtgttcttggtcacacatttatggagtttctgaagg

SEQ ID NO: 706011 - DNA, 82 bp, Homo sapiens
cactccccagggcagaaatagcgaccatggcgaggagccttcacgtaaatgggtccagtcatgcctcccagtaagaagccag

SEQ ID NO: 706012 - DNA, 75 bp, Homo sapiens
atggcctggagttcattctttaccacattttaagccagatattaacctggctgcagagccaaaagtgaaccgagg

SEQ ID NO: 706013 - DNA, 89 bp, Homo sapiens
gtgtgaccagtgtggaaacccaaaggagctggaagctatcaaagctcgagtcagggagatggaggaagaagctgagaagctaaaggagc

SEQ ID NO: 706014 - DNA, 75 bp, Homo sapiens
ctctgatgcaagcgaagaaccttttccctaatacgtacctcattgtgggagcagacagtgagcaagctgacattg

SEQ ID NO: 706015 - DNA, 74 bp, Homo sapiens
ggatcttgagagtgaagatctcgaaggatttcataggggatggactatttgggttctcggcaatacgttcaccg

SEQ ID NO: 706016 - DNA, 97 bp, Homo sapiens
cgctgccgctgccgcacctccgtagctgactcgggctgaagaagatgcagagcagcctgaagctggtggactgtatcatcgaggtccacgatgcccg

SEQ ID NO: 706017 - DNA, 102 bp, Homo sapiens
cgcagtatcatgctggccaagaagatcatcattaaggacggaggcacggtcatcatcagatttgaaatatttaaagtggatacaaaactatttcagcaatgc

SEQ ID NO: 706018 - DNA, 100 bp, Homo sapiens
aggcaccaagacgcaggggggatatccacagttcgatcaagaaataagcgggttttgaaaacaaaaaaaagaaggagtggaagagggggccaggatccag

SEQ ID NO: 706019 - DNA, 96 bp, Homo sapiens
agaactcagctttggaacatttcaggcctggcacggaatgcagtttttacataagttgtttacccaaggtccagcctagcccctaggcaccatgtc

SEQ ID NO: 706020 - DNA, 98 bp, Homo sapiens
ctcccccatcgggaacctggggaaggagctgggcccagacttgcaggaagatttcgatgtcgatcattttgtgtctgactgtaggaagcgggtccagc

SEQ ID NO: 706021 - DNA, 75 bp, Homo sapiens
gaaactttttggtacccctttttatccactcattggcagagaagctaatggtaccaaaccaccactggatgcaga

SEQ ID NO: 706022 - DNA, 98 bp, Homo sapiens
tcaggggccatggcgaagcacgagcagatcctggtcctcgatccgcccacagacctcaaattcaaaggcctctccttccgatgaaaagagaaaggaag

SEQ ID NO: 706023 - DNA, 75 bp, Homo sapiens
ggggaccgactctggggaccctcgccgaagaggcccgatgagagaaagggaaagttaaggatgctggagcagaac

SEQ ID NO: 706024 - DNA, 98 bp, Homo sapiens
atgaagctcaagttgaacaagatgctcagctacaagagactgtgaaaaggaagttggaaggagctcgatcaccacttaatggagaccagcagaatggt

SEQ ID NO: 706025 - DNA, 90 bp, Homo sapiens
cagctggctagactggaggagagggtgtcagcagttgagtctttggagggccccctgctccaggtggaaggactgagtgaccttcgacta

SEQ ID NO: 706026 - DNA, 90 bp, Homo sapiens
cggcgagtttccgatttaaagctgagctgcgaggaaaatggcggcgggagattcctagaggggagtgcctgcgagcctcgggtgagcctt

SEQ ID NO: 706027 - DNA, 80 bp, Homo sapiens
agacccctcttctagacctcatgagcgacgcccttgtcctcgccaaaatggaagcggggagaggtggtgagagatgaccc

SEQ ID NO: 706028 - DNA, 75 bp, Homo sapiens
gaaagttgaacagaacgcggctcccagccacaccaagttcagggtgtggtgctgcagcaggacagctacattgag

SEQ ID NO: 706029 - DNA, 75 bp, Homo sapiens
acttcaaggtcaagatggtggacgagcttaagagagctgatgctgagccccaagacctcgagagtacgaacctct

SEQ ID NO: 706030 - DNA, 82 bp, Homo sapiens
ttctttatgctttccaagaacagactacagaggaggaagaacgtgcaaaacgtgaggagctagagcgaatactggaagagaa

SEQ ID NO: 706031 - DNA, 83 bp, Homo sapiens
cctcagttggaagcagccgatccagcctgcggagcctgtggggcagataaacaggggtcacatgacgacagaagccaagaggg

SEQ ID NO: 706032 - DNA, 51 bp, Homo sapiens
cacacgtaccacctggatgttgtggtcaggatctggtgattttgaagagaa

SEQ ID NO: 706033 - DNA, 83 bp, Homo sapiens
cttggttcatccctaagggtcctaaccggggcctagtgtaagcggaatggatccgcctttcggggatgcctttcgaagccaca

SEQ ID NO: 706034 - DNA, 80 bp, Homo sapiens
gatccgctttgacgtgatggtgaacggcaaggattttttatcaagcagaaatgcatcgaacaacgagaatcaagatcact

SEQ ID NO: 706035 - DNA, 97 bp, Homo sapiens
cctctccagcctcttgcgaccacagccagagcctcagcaggagcctgttctcatcaccatggcaacaggctggagtgcaatggcaccatctcggctc

SEQ ID NO: 706036 - DNA, 100 bp, Homo sapiens
gaatcctgtcggagttgtagccatgccctagattatttgcaggtgtcttccctcgaatggcagccatcagtctgggaggtttcatctttctgggggctta

SEQ ID NO: 706037 - DNA, 75 bp, Homo sapiens
gctgtttcgtctatccatacacaatctgaacaggaattaagaataactcaaagtgaatttgatcgtcaagcagag

SEQ ID NO: 706038 - DNA, 82 bp, Homo sapiens
cttgtttcaaggtttacaggaagtatttttattggaagaggatctaggagaaatgctagtgatgccataaaaggagaaggct

SEQ ID NO: 706039 - DNA, 100 bp, Homo sapiens
catctacatctcccacaggaagtgtcacacagcagtcaagtatgtcccaaacgtctgtaaagagaaatgtgtatgaccttacaagtatccccgttcgcca

SEQ ID NO: 706040 - DNA, 73 bp, Homo sapiens
ataagctttgcaacagaattacagagtatgattgcaaagtttattgaaggtgttgtgttacagttattagagg

SEQ ID NO: 706041 - DNA, 101 bp, Homo sapiens
ctatgatgctgatggtgatggagattttgatgtggatgatgccaaagttttattaggattgtgcagactggtgcttaaaatggaagtcgatattaatggag

SEQ ID NO: 706042 - DNA, 82 bp, Homo sapiens
aagaggctcaatgttacaccactggcaagaatagtagacagtgatgtgtgttctgaaattgtgaaccatgagtctagtactt

SEQ ID NO: 706043 - DNA, 98 bp, Homo sapiens
ccatgcctcgcaccgtgcccggctctaccatgaagatgggctccctggaggtgcacaatgcccaccttcacagcaggaaggactcaaattggaacaca

SEQ ID NO: 706044 - DNA, 82 bp, Homo sapiens
cctggacaagtatgtggaaatagcgcggctgtgcaagtacctgccagagaacgacctgaagagtctcactctgtcaaccagg

SEQ ID NO: 706045 - DNA, 101 bp, Homo sapiens
gagtgtttgacatagacctggaccagccagaggacgcgggctctgaggatgagctggaggagggggtccacgctgcttttatgagctgtaacactcaccgc

SEQ ID NO: 706046 - DNA, 74 bp, Homo sapiens
agatgcggttttcctcgcagaacgcctttatgcagaaggtcagtcttccacctccactaccggtgccaaaaaaa

SEQ ID NO: 706047 - DNA, 97 bp, Homo sapiens
aatggcggacttctacaaggaatttttaagtaaaaattttcagaagcacatgtattataacagatgatggtggtgctaccccagtacaggatgaacg

SEQ ID NO: 706048 - DNA, 90 bp, Homo sapiens
gtctcagcccaggacctccaggggaacaatgaggcctacgcagagctcatcgtccttggtctgtgcagacttttgcagacaaatcaaaac

SEQ ID NO: 706049 - DNA, 112 bp, Homo sapiens
aagaagggaaggcgcgagtgaggaaaggaggtactgtagtcaccaggagactaaagtccatcaaaaacatccagaaaattaccaagtctatgaaaatggtagcggcagcaaa

SEQ ID NO: 706050 - DNA, 80 bp, Homo sapiens
cggccgtacgcggtgctgcgagggcagaacctgggagaagatttacaaatctctgcctggatgctgtttgtggttacctt

SEQ ID NO: 706051 - DNA, 75 bp, Homo sapiens
gcagcagatgctggagcagcaccttcaggatgtccggaagagagtgcagggccatgctatgatagtggaagctta

SEQ ID NO: 706052 - DNA, 98 bp, Homo sapiens
ggagttttaaagaatgccagcctttttaaagcctccgggaggagttcctgggacacagccattgctgcccaattctatggatcccacacgacaacaag

SEQ ID NO: 706053 - DNA, 100 bp, Homo sapiens
ttcagctacttgaagatagccatcagccgctacgtgactcttttctccaggaggcaagtgaggcctatctggttggcctttttgaagacaccaacctgtg

SEQ ID NO: 706054 - DNA, 141 bp, Homo sapiens
ttcgcacaggtgagctcccgggatgggaaaggcgacctgggggagccgcccccgacacggcccacgaccgcagcaggagggagtccaggagccaaggttgccgcggtgtctccgtcagcctcaccatgaacctggaaccgc

SEQ ID NO: 706055 - DNA, 100 bp, Homo sapiens
gaggtgaagacgcaagaggtgaccctcaggtacttcgggtctccagtctctgctggatgaaccgaatcctaacagtccagccaatagccaggcagcacag

SEQ ID NO: 706056 - DNA, 98 bp, Homo sapiens
tgaacaggctcggctcagcctacgggagaagcaggaggaggtccggagactgcagcaggttggtgttcgaggaagagacattgttgttcttggtgtgg

SEQ ID NO: 706057 - DNA, 101 bp, Homo sapiens
aaggttcaattatgtggtcaaagccatttatgccagtgttcttcctggagagttgatgagggggtacatgacccagtttcccaccttcccaagctggctgg

SEQ ID NO: 706058 - DNA, 98 bp, Homo sapiens
gcaaaatggcggaccgcttctcccgcttcaacgaagaccgagactttcagcttgccagcaaagcacggacagagaaggaggagaagctgagccaggcc

SEQ ID NO: 706059 - DNA, 100 bp, Homo sapiens
gattcttaatcagcgcactggcaagtgcagcgcctgtaatgtttggcgagtctggttcttgcacgcattgcaaatgccacgaggccaactattcatctgt

SEQ ID NO: 706060 - DNA, 97 bp, Homo sapiens
ggctgcagctgctggacgtcctggctcgcctgcggttccaccccgatgcaggtggtcacgtgcttgacgcgggacagctacctgacgcactgcttcc

SEQ ID NO: 706061 - DNA, 51 bp, Homo sapiens
gaggcctggacgaagagggcgaggggcctcggcttcacaggatggggctgc

SEQ ID NO: 706062 - DNA, 90 bp, Homo sapiens
tcccaggctcaagcagtcctaccatgtcagccttcccagtagctgggaccacaggtaacacgtacacagacctctcggccggaatctcca

SEQ ID NO: 706063 - DNA, 90 bp, Homo sapiens
ccccggtgctcgtgatggggctgatcttcgccaaactgtggagcctcttctgtaaccaagattgctcgctgtaagcagctcatctgtgac

SEQ ID NO: 706064 - DNA, 90 bp, Homo sapiens
gctggctggggaaatctggtgtatgttgtcaactatccaaaagctgtggatttctttaaccagatcaacatgttatatggaactattaca

SEQ ID NO: 706065 - DNA, 98 bp, Homo sapiens
gacgataccgaggatgtgtccctggactttggaaacgaggaggagctggcctttaggaaagccaagatcagaaacccagtacagcagtggaatatcta

SEQ ID NO: 706066 - DNA, 100 bp, Homo sapiens
cctcagcctcccaagtaactggaactacagatcccaaagagaagattgatattgggctgcctccacccaaagtctcccggacccaacagctactggaacg

SEQ ID NO: 706067 - DNA, 51 bp, Homo sapiens
tgtatcaagtaatggtgcaaagcctgaagtgaccttgaggaaccctgggag

SEQ ID NO: 706068 - DNA, 100 bp, Homo sapiens
gggaagtgagaagcccaactaaagccccacatttgcagctcattgaaggaaagaatgaagatgataaccgagccagtgagagcaagaaacccaaaacgga

SEQ ID NO: 706069 - DNA, 98 bp, Homo sapiens
aacatctgacagtgcttgcaggatctctcctggacaaatcaatcagaatcaggaaacccaggcccaacggcaggtggatgcaagaagaaatgttcccc

SEQ ID NO: 706070 - DNA, 101 bp, Homo sapiens
tcgcgctgctgggcacccacggagcctccggggctggtgccttatgcccgctcagaggcccacctcacagagctgctggaggagatatgtgaccggatgaa

SEQ ID NO: 706071 - DNA, 100 bp, Homo sapiens
tcctgcatgccctgcagtcggctgtgggccggaaggacactgacaacaaggtggactatggtgcaacagcagaagagctggaagctcactttcatggctg

SEQ ID NO: 706072 - DNA, 75 bp, Homo sapiens
ctcactgcagaggtgctggagctggcagctgggctcaaaatgcagagaactcaaagatattcatttcggccagtg

SEQ ID NO: 706073 - DNA, 75 bp, Homo sapiens
gaataaagggcagctgactaagttccctctcccagcctgtgctgactcagccatcttcccattctgcatcttctg

SEQ ID NO: 706074 - DNA, 100 bp, Homo sapiens
gcgagttcctgcgcggctgcggggcttccctgcggctggagggctcagtgctgtcagagagggactacgagagcctcgtcatgatgcgcatgcgccaggc

SEQ ID NO: 706075 - DNA, 88 bp, Homo sapiens
atgaaaccggcttgttgtcttcaattaaaaaatttattaaaggaagcacacctaagaacccacaatacattatatgcaccagaaatgc

SEQ ID NO: 706076 - DNA, 75 bp, Homo sapiens
ttgccagggcatgtagctctccaggcttgcaagcgattaccagcttcaaggttactgactttttatgatgtttgg

SEQ ID NO: 706077 - DNA, 101 bp, Homo sapiens
gcaggactcatcttaaaaatcatgttggaactgtcaccgctgttcccagacacacttattctgggtctggagatccgggtgaaggtctcagactatgtaca

SEQ ID NO: 706078 - DNA, 96 bp, Homo sapiens
gcagcccttcaagaaagacttgatggtctggtagaaacaccaacaggatacattgaaagatcctttttcgatcattcaatgcatagtgcattgccc

SEQ ID NO: 706079 - DNA, 83 bp, Homo sapiens
cttcccgctccctcacacaccggcctcagcccgcaccggtgctcttacagcctgttccaagtgtggcttaatccgtctccacc

SEQ ID NO: 706080 - DNA, 98 bp, Homo sapiens
tccactcatgatcaaaatcaaccaggatcccttaggcatccagggacgcaggattcacaagattttgatccaaacaatatcttcaaggcattctttgg

SEQ ID NO: 706081 - DNA, 101 bp, Homo sapiens
aacatggtccagaaaacattgtaatggccatcgctggaaacaagtgcgacctctcagatattaggtggatctccttacgtagcagccaaaataaatgaagc

SEQ ID NO: 706082 - DNA, 98 bp, Homo sapiens
gccggcccttgttaactacaacagaccatctgaaacacagtgctctgtgcctatacagtgtacggataaaacagataaacaagaagcgctgtttaagc

SEQ ID NO: 706083 - DNA, 73 bp, Homo sapiens
gacgcagccgtagacaccagctccgaaatcaccaccaagttactccacaggatccgctgaacataggatgttg

SEQ ID NO: 706084 - DNA, 87 bp, Homo sapiens
ctcaggctgctgtggttcatgccacagccaaagaaggacagaataacgggctcccagattcacaagccccaccaagaggatcacccc

SEQ ID NO: 706085 - DNA, 102 bp, Homo sapiens
agagatggagctgacgctcgtggggctgcagtactcgggcaagaccaccttcgtcaatgtcatcgcgatgaggagacggaagtccagagggtttcaatcgct

SEQ ID NO: 706086 - DNA, 100 bp, Homo sapiens
agcagcccccggcccgcgctgcccgcactcctggtcctgctcggggctctgttcccaggtggagtattgctcctggaaaatccaaaaggtgacaataggt

SEQ ID NO: 706087 - DNA, 125 bp, Homo sapiens
aaaagtataatgatgacagtgacgattcatattttacttccagctcaagttgggccatatggtgctcttcccagtctggttcctgtacagtctgctcatgaagctgttccagcgctccacgccag

SEQ ID NO: 706088 - DNA, 98 bp, Homo sapiens
gcttctcaatcgctactcagagccgccgggcagccctgagcgtgcagaacaagaacctggactggttcccccggatgcgggccatgtcccttgtcagc

SEQ ID NO: 706089 - DNA, 82 bp, Homo sapiens
gctaacgcctcccggctctcgtcagcctcccgccggccgtctccttaacaccgaacacccggcaacctttggcactgcatcc

SEQ ID NO: 706090 - DNA, 75 bp, Homo sapiens
tgccaaggagtcccagtgccgccccgcttacaaacacgcagatggcaagaagattgatggcaggagggtccttgt

SEQ ID NO: 706091 - DNA, 100 bp, Homo sapiens
tggagggttcagaccccgcacatattgctgaaaggcatggtcacaaagaactcaagaaaatcttcgaagacttttcacaactggaacagatccagaagga

SEQ ID NO: 706092 - DNA, 82 bp, Homo sapiens
ctcagatgtaactagagagagaaggaacattccagaaactttgggttgcctgtgatttgcttcggaggattattcgtatctt

SEQ ID NO: 706093 - DNA, 51 bp, Homo sapiens
ccggcctgccggcccccagaacaaggtgacaatctccaatagacttgtgtc

SEQ ID NO: 706094 - DNA, 100 bp, Homo sapiens
aaacgaaaaagaacgacatgatgcaatcttcaggaaagtaagagggtgcttgaagtttctgggaagtcggcatccaaccctggtgcttcccttggtgcca

SEQ ID NO: 706095 - DNA, 75 bp, Homo sapiens
ccatagctccttaccccagccctacacgaaaggacctgcttctccagagtctactcttcatcttgtgttgagact

SEQ ID NO: 706096 - DNA, 100 bp, Homo sapiens
cccgactgctgcaggccggctacgagcccgagaggatcagtgaggaggaggacctgcacctggggacatcgttttctgcagaaaccaaccgaagggatga

SEQ ID NO: 706097 - DNA, 82 bp, Homo sapiens
aagctgaagacatcaagaagatcttcgagttcaaagagaccctcggaactcgtgagatggagaataaagaaactctcaaagg

SEQ ID NO: 706098 - DNA, 100 bp, Homo sapiens
tcccggggcccttcccgggcaagaagtctggaacgttttttcttagagttccagaattgagactgaagtgtacccagagacacaaagaaatacagaagtc

SEQ ID NO: 706099 - DNA, 50 bp, Homo sapiens
caggttctcggagggaccgggatagagttaaacatgaagtttctggagag

SEQ ID NO: 706100 - DNA, 101 bp, Homo sapiens
gtctgaacctttgctgtctatggatctgctctaaaccttatagcctgcttatgggggaagcaccacaccccactctggccggagcacgccaagcagctccc

SEQ ID NO: 706101 - DNA, 74 bp, Homo sapiens
gccagcgggaggcggcggcgagtcggatagtaatgatgacactgaagatgtttcactgtttgatgcggaagagg

SEQ ID NO: 706102 - DNA, 78 bp, Homo sapiens
cggcgggagccctcgcgacgcgcccggcccggagcccccagcgcagcggccgcggttaatgttgaagaaggaaaatgc

SEQ ID NO: 706103 - DNA, 101 bp, Homo sapiens
ctggtcttcgccaagatgaagggctacccgcactggccggcccgggaactttatattgctgttggaatatctggagccatccaacatttagctgggatgaa

SEQ ID NO: 706104 - DNA, 100 bp, Homo sapiens
ctggatccttggatacaggaaaccaacagtcacacatgtacattacaggtgtggttcctcagagtgcaccaccagtgccaacagcctcttcccggttcca

SEQ ID NO: 706105 - DNA, 82 bp, Homo sapiens
ccagcgagcagccctcgacttcctggggacgctgtcacaggggacagtggtggtcctgctccatgatgtccgtgatgtgagc

SEQ ID NO: 706106 - DNA, 75 bp, Homo sapiens
gggaacttgcgtgcaacatcttaattcttacttagattcagtgctcaagagtgaagaaaattctactgtctttag

SEQ ID NO: 706107 - DNA, 98 bp, Homo sapiens
cgaggtggatggtgtggatgaagaggaggaggacgaagggcagccattctacaaaagtggaagctgtggtcagaactctgatgaaaatacagcttaga

SEQ ID NO: 706108 - DNA, 75 bp, Homo sapiens
tgcctcaggccagtcgcctccaggccaagagggatccttcacccgtgtctgtgtcaacagcatctccaccctgga

SEQ ID NO: 706109 - DNA, 80 bp, Homo sapiens
gggactaacagctggagagaacagttcattgaagctatcactgtcagtgctgatcccaattttgttcggacatttcttac

SEQ ID NO: 706110 - DNA, 76 bp, Homo sapiens
tgaagcaacaaggggaatggggtcaaaatgagcaggagcacagggatcagttgtccttgtttttttttggtctttt

SEQ ID NO: 706111 - DNA, 93 bp, Homo sapiens
cagggcctgcagcgggagctggacggcgagcgcgagcggcgcgagaaaggtgagaactctgtctcagtcgacgggaagtgcagtgactccacg

SEQ ID NO: 706112 - DNA, 100 bp, Homo sapiens
agcaagacctaaatgagcctcttgccaaagtgtcccttttaaaagatggctacgaattcctggagatcctgaaacaggttgcccgggacaatactgacaa

SEQ ID NO: 706113 - DNA, 100 bp, Homo sapiens
agcttgccccttccatcttcttctatttggtggatgcagagcagggacggctgtgtggatatcggcttcgaaaggtggtgtttggactctagaccatgtg

SEQ ID NO: 706114 - DNA, 100 bp, Homo sapiens
gcaacacccaatggcgtcctcagaatttatcctggttccctcatggacaaagcatttgatcccactaggagacaatggcacgtgtggttctcaaatatag

SEQ ID NO: 706115 - DNA, 83 bp, Homo sapiens
agaaattgagggttcttgccatgttgaagcttcttgtcatgacggggatgaaacaattgaaactattgaggctgctgaggcac

SEQ ID NO: 706116 - DNA, 75 bp, Homo sapiens
ccaggatcgtgtctcattttgaacccagattttaccaaatgttgcaagaactctggagttcttatggtagtaaaa

SEQ ID NO: 706117 - DNA, 100 bp, Homo sapiens
ggaagtgggacaagatggtttacatctcgaacgacatgggaaagtctctttctcatttgcctttgcattcaagcaaagaagatgcttatgatggagtcac

SEQ ID NO: 706118 - DNA, 107 bp, Homo sapiens
tccattggatttaaaagacagtcctcgtcagcactgactttcagctatggaatcgatgatatcatcaagttgaatcgaaaggaagggaagaagcagaattttccaag

SEQ ID NO: 706119 - DNA, 75 bp, Homo sapiens
agcagctgccgctcgagtcacttgggcaattaccagctctggctgggtcgccacaacttgtttgacgacgaaaac

SEQ ID NO: 706120 - DNA, 75 bp, Homo sapiens
ctccgcggtggggcgttgccatggagacgcgggcggcagatttgaaaaatgtgtgagtgctaaggaagctttgga

SEQ ID NO: 706121 - DNA, 100 bp, Homo sapiens
ttctctgaaaattgcagaaaagtaactaacatcttgacaaagaggataaactgattttggttcttgtcatggaagataaaaagtcagtatcatgagcata

SEQ ID NO: 706122 - DNA, 75 bp, Homo sapiens
aggtctggacctggactcacggctgcttggagcgtccgccatgaggagaagagactggggatatttatatctggg

SEQ ID NO: 706123 - DNA, 101 bp, Homo sapiens
cataatatggaatgttcttaacccagaagtagctgaatgtgttactccattgctgaggagtggtaaatgaaattgcctttataaatacccttgaagcccag

SEQ ID NO: 706124 - DNA, 90 bp, Homo sapiens
gctcgagttaaagttggatgtgctggaacagaagccaaggctgcccccaaagattgtttcattgaagtgaattctaaaggtgacagattt

SEQ ID NO: 706125 - DNA, 98 bp, Homo sapiens
caaccgaccgcgggtcgccgcggagccccccgacgggccggcccgcgagcagccggaggccccggtcccgagactggtgctcttggagaaaactatag

SEQ ID NO: 706126 - DNA, 75 bp, Homo sapiens
ctccgtgtgcccgtcgctggtcgtgcgacccaagcccctgcattcctgtacgggccgactgcagcagtggcccag

SEQ ID NO: 706127 - DNA, 100 bp, Homo sapiens
caagaaccaggatgatgacatggatatccgtcagtttgtccacatcaaaaaaaagaaagctgtggtgattcgtcacttgtataatgaagataatgttgac

SEQ ID NO: 706128 - DNA, 75 bp, Homo sapiens
tgcagaggacacgaggcggcgggctggagacatggaccgcggcgagcaagaactcaagacatggctgcccagtgt

SEQ ID NO: 706129 - DNA, 98 bp, Homo sapiens
ttgaattcatctgtgaagcattcaaatcaaagctaaaagcctaaatgtgaaatgctaatgacaagcctgagaagctttgtaggcagccaatcccagag

SEQ ID NO: 706130 - DNA, 83 bp, Homo sapiens
aagaagcaggatgaactgaaacggattgccagagaattggcagaagagccaagattttcttcttcactcctcgcttggtggct

SEQ ID NO: 706131 - DNA, 76 bp, Homo sapiens
cgcctttccagcatgcaggggctgctcagatgtcctaaacgatgctatatttgatgaagatcatgatgagatggtg

SEQ ID NO: 706132 - DNA, 100 bp, Homo sapiens
gcaccatggggaagcgggacaatcgggtggactgctgatggaggaggtttggtagaaaaacactacgtctttctgaagaggctctgtcaggtgttgtgtg

SEQ ID NO: 706133 - DNA, 95 bp, Homo sapiens
ggaggcttcgagtgacccgggtgccgaggagcgggaagagttgctgggccatctatcacacctgtgaggcctccaacttccagtgccgaaacggg

SEQ ID NO: 706134 - DNA, 100 bp, Homo sapiens
gccctgggtcgcttggaagaagccaagatgtccagctcgccgctgtccaagaaacgtcgcgtgtccgggcctgatccaaagccgggttctaactgctccc

SEQ ID NO: 706135 - DNA, 79 bp, Homo sapiens
cgagactccgtgggcgtaggaccctccgagccaggcacacattctggcagttccgccatgagaacccccagacccgggt

SEQ ID NO: 706136 - DNA, 75 bp, Homo sapiens
ctcctgatgagaccctggatgacttcacggacttaaaaatggctacaaacttcctagcacatgagaagatctggt

SEQ ID NO: 706137 - DNA, 80 bp, Homo sapiens
ctctccagtccttgctgaagagactttccgttacatgaccctcaaggacgttttgttctgaagactctcatattcagctc

SEQ ID NO: 706138 - DNA, 75 bp, Homo sapiens
gtgctgtctccatgtttgatgtatctgagcaggttgctgcatctacctttatccctgactgccttgaagttgaag

SEQ ID NO: 706139 - DNA, 100 bp, Homo sapiens
tagcagatatatctggcctaccatccttctgctgctgaaccaatgccaacagagaccatcatgcagacatcagagactgggtcggacacaggctcgacag

SEQ ID NO: 706140 - DNA, 127 bp, Homo sapiens
gattactatgacagaggatatgatcggggctatgatgatcgggactactatagcagatcatacaggagcaattatgtttgcctctccacattttagaagagaaaggtttgagccaggttgcagtgac

SEQ ID NO: 706141 - DNA, 100 bp, Homo sapiens
tgatggccatgaatttattgtaaaaagagaacatgcattaacatcaggcacgataaaagccatgttgagtggcccagattcgtcactcatgctgctgcag

SEQ ID NO: 706142 - DNA, 123 bp, Homo sapiens
tcccaaaccagttcagaagccacccaaaagtaatgttaacaataacccagtgaaacaaagagtcctcttcgtggaaaagaaaaaaatacgctccctttaaacggtggattgaaaatgactttg

SEQ ID NO: 706143 - DNA, 83 bp, Homo sapiens
gcccattatggctgtaactggagatgacacagatgccatggacaatattaccaggcagaaccaattctacgatacccaagtca

SEQ ID NO: 706144 - DNA, 75 bp, Homo sapiens
agggtgccgaaccagatctaatcagactgcgattcctactgcaaggcctccaaggggaagctgaagattaacatg

SEQ ID NO: 706145 - DNA, 96 bp, Homo sapiens
cgttgcgtgccctacttcaaggataagggcgacagcaacagctctgccggctggaagggtgcaacaccggaggatttcagcaacctcccacctgaa

SEQ ID NO: 706146 - DNA, 75 bp, Homo sapiens
agcccgtggagtcggctgagggaaaagcgaggcaaggcaggcggatccagtttgctgaccagaagcaagaattca

SEQ ID NO: 706147 - DNA, 75 bp, Homo sapiens
ataggaacctggtctccctggctctggccaggctgccgcacctctacaggaactttgccgcggagcagtatgcca

SEQ ID NO: 706148 - DNA, 50 bp, Homo sapiens
gacaagaccagcttcgtgtcctttgtggttcccagccccagagccagggt

SEQ ID NO: 706149 - DNA, 100 bp, Homo sapiens
tcaggtctggagctcgaccgggccaggctttacaggaagtatggtgctggcatctgcttggcttctagagagtcttacaatcgtggaggaaggtgaatgg

SEQ ID NO: 706150 - DNA, 100 bp, Homo sapiens
gcagtgcaaacagacttcggagtacctgcgctatgaagacacgcttcttctggaagaccagccaacagcctctactcaatagtccccccagctttgtgtg

SEQ ID NO: 706151 - DNA, 101 bp, Homo sapiens
tcaaggtccacagggcacgcaagaccatgccgaagtccgtcgtgggcctggtgtgggcaagagcagtttactgttgcgttttgcagacaacactttctcag

SEQ ID NO: 706152 - DNA, 100 bp, Homo sapiens
tacagctggaaatagggcacagatccagagcttggggcttccttggtcgcacccaccacctgcctgcccactggtcagccttcagggaccctgagcaccg

SEQ ID NO: 706153 - DNA, 75 bp, Homo sapiens
cacgagcgaggcaactgggccacccacgtctatgtaccatgacacattggcgtgagacctgggagtacgttgtgc

SEQ ID NO: 706154 - DNA, 50 bp, Homo sapiens
agaaagttgctcctcaaaatgactaattggcagagggggtcgatttggga

SEQ ID NO: 706155 - DNA, 75 bp, Homo sapiens
gtcaatggttgggtatattttaggcctgggagataggaattggattcaagtacgtggctctgggagacctcatca

SEQ ID NO: 706156 - DNA, 83 bp, Homo sapiens
cgagaatacagagagaaaattgagacggagctaagagatatctgcaatgatgtactgcaactttgcctgactgcttcaaaatt

SEQ ID NO: 706157 - DNA, 100 bp, Homo sapiens
caccacggctaatttgatggagaaggttcgaggcctacagaacctagcctatcagctggggctggatgagtgttgaaatcacaaagattagacacctttt

SEQ ID NO: 706158 - DNA, 97 bp, Homo sapiens
tattgccttattttttctcatggatgttcttcttcgagtatttgtagaagggttgttggcatggaggggaagatgaggcagcaccttctaagcagag

SEQ ID NO: 706159 - DNA, 107 bp, Homo sapiens
cggcgcctcctccgcgggcgtgaaggcggcgctcctactccctccccggactccgcggatccctccctggtgccacagcagctgagtgcgcatcaaatctgaagaaa

SEQ ID NO: 706160 - DNA, 89 bp, Homo sapiens
acacagataaagaagacaatgctgaggacaaagtagatggcctccagaaacaaacgaacacagaccaccagtgcaaaacaagaaaaagc

SEQ ID NO: 706161 - DNA, 90 bp, Homo sapiens
agcgcccacttctttgagtttctcaccaaggagctagccctgggccaggaccggaaggaaattgacagaactttcataaagccaaagact

SEQ ID NO: 706162 - DNA, 111 bp, Homo sapiens
gaggctgttgaaggagttccaggcacgttaccggcagctggcccagacatgttctgccttttccatgggaagagatactcccccggcgagagctggcacccctacttggag

SEQ ID NO: 706163 - DNA, 114 bp, Homo sapiens
aaaaacaagactggggctgctcccatcattgatgtggtgcgatcgtgttctaagaacggaagcatctgggctggatggaatttagcatcaagcagagtcccctttctgttcaga

SEQ ID NO: 706164 - DNA, 75 bp, Homo sapiens
cttggactgagtcctgcaggacacagtgataatatgcagcatgcatactgggaactgaagagagaaatgtctaat

SEQ ID NO: 706165 - DNA, 100 bp, Homo sapiens
aacaaactcgaagaacagctgtggaaagaagttgcaaaacactgggcgggcgctaatattgacacctgctcagaagaccagaggaccccgttgatggaag

SEQ ID NO: 706166 - DNA, 87 bp, Homo sapiens
tgcacccagtcctgcagcgccagcagctggactatggcatctatgttatcaaccagcagagaccacgcagaggctgcctttggatca

SEQ ID NO: 706167 - DNA, 100 bp, Homo sapiens
ccatgtccgcaccgggacgatcatcctggggacctggtacatggaattgaaagatgttggccatcgtgatcagatggctgcagctagaggaatcctgcag

SEQ ID NO: 706168 - DNA, 75 bp, Homo sapiens
tattttttgactgctctgctcctctatgctggacatcaaatttccagggaactgctcgcagaaagaagaaggtgg

SEQ ID NO: 706169 - DNA, 75 bp, Homo sapiens
aagggataacctttaccgccatgctgtgccttagcctggcccaactagagaatctgtgcaaacagctgtatgaaa

SEQ ID NO: 706170 - DNA, 75 bp, Homo sapiens
cctttatatagaagggagagtaggccatgttacaggagctgaattttggtgcatatttgggtcttccagctttcc

SEQ ID NO: 706171 - DNA, 82 bp, Homo sapiens
tcagttggaagcagccgatccagcctgcggagcctgtggggcagtttctccacagtcgaactcctctaggcccacctgtgcc

SEQ ID NO: 706172 - DNA, 90 bp, Homo sapiens
gcgcagtgcctggggtactacggctacagcaaggacctgaaggagaagaaggagaaggtggaggagaaggcaagccggaaagagcgaaag

SEQ ID NO: 706173 - DNA, 87 bp, Homo sapiens
gacatccaggcgaactcggcctatcgctaccctccgaagtccgatgggaataactgggaacacaagtccatttggacagccctttag

SEQ ID NO: 706174 - DNA, 50 bp, Homo sapiens
actgcttccctcagccataacagcgtgctcaggcagttcttcaagctgtg

SEQ ID NO: 706175 - DNA, 100 bp, Homo sapiens
gctgttacagccctcaacagtgaaagtaactttgcccgagcatatgcacagggtatcagccgaaccaagtactgggagcaggatcctaaggcctttgtag

SEQ ID NO: 706176 - DNA, 98 bp, Homo sapiens
gtgtcctggagagagaaggaagattatcatccctccattcctggcctatggcgagaaaggctatgcagcagtgttgtactgctacttctataaacgga

SEQ ID NO: 706177 - DNA, 100 bp, Homo sapiens
ctcatactctgttatagataaacaaggtgcggtctgcctgcagcctttctgccacctgtactggggctgcacccggaccggctgctacggctgcctggcc

SEQ ID NO: 706178 - DNA, 75 bp, Homo sapiens
taaacatcacgatgctgctcatgaaatcatcgagaccatccgcgagcagctgatgcagctgtacagtgcgcgcca

SEQ ID NO: 706179 - DNA, 83 bp, Homo sapiens
aaagggaccacggtcaccgtctcctcagttgagaagctgatgtctcctcgacttccaactggaaccttgaacccccacatttc

SEQ ID NO: 706180 - DNA, 75 bp, Homo sapiens
ttgctgcagccagcatgggttatactgaggttagagccacagctgaaacaactacaaacaaaatatgatgaactt

SEQ ID NO: 706181 - DNA, 90 bp, Homo sapiens
tccaccccagtctggtcacttcagcggccaccctgccctccaaaggttcattctgatgccccggaggcccagctagccccagacttcggc

SEQ ID NO: 706182 - DNA, 83 bp, Homo sapiens
acatcagcttcggcctgagtgatctctatggtgacaacagagtccatgagtcctgtgggaatggccgctgctgctgctgtggc

SEQ ID NO: 706183 - DNA, 82 bp, Homo sapiens
caagtcagagggcttttactcctacctgtgtaccgagccagacttcccaagtaagaagcggaagaggagccgctggaaccaa

SEQ ID NO: 706184 - DNA, 82 bp, Homo sapiens
ggtgtttcattcttacagtccatatgatcacaagcaattctgtggtgttcttggtcacacatttatggagtttctgaagggc

SEQ ID NO: 706185 - DNA, 75 bp, Homo sapiens
gacttcttgaaaggcaacattaagaaggagctgtttaaggagggtttctcttcccctcccagttcgctgacctcg

SEQ ID NO: 706186 - DNA, 75 bp, Homo sapiens
ctatggaagaaattggaccatacactttctcagatcaggatgtgatggtggcaggtgggatggagagcatgtcca

SEQ ID NO: 706187 - DNA, 75 bp, Homo sapiens
tcggggacggagagaacacgagcccatcagatttctgcgccaggagatgaggggcggtagagccctggaatggag

SEQ ID NO: 706188 - DNA, 75 bp, Homo sapiens
ggctcagttgtccatgaccctgaaggtccaggagtacccgaccctcaagttactgtaaaatggggaaaggagaaa

SEQ ID NO: 706189 - DNA, 100 bp, Homo sapiens
taatacaccatatcaaatattttataaaccacagctatctgtctgcaatccccattctggaaaggaggcaagttggacaaatgcaagtaaaaagcaacgt

SEQ ID NO: 706190 - DNA, 83 bp, Homo sapiens
gaaggagctggcggacatcactttagaccctccacctaattgcaggtttacccaaggtccagcctagcccctaggcaccatgt

SEQ ID NO: 706191 - DNA, 101 bp, Homo sapiens
tcgcagtctggaaagctttaggagttcacagtgttcagaaaagagaccctcgtgactggactgcacagttcatggaggctgcagatgaggccttggatgct

SEQ ID NO: 706192 - DNA, 100 bp, Homo sapiens
cctgccggatctggcgcctacgaggacgtggcgggtggagctcagaccggtgggctagtttgcagaaaaaacttcagcatgtgccaggaacacaacctca

SEQ ID NO: 706193 - DNA, 100 bp, Homo sapiens
cccgtgtcctgcaggtattgggagatccacagctaagacaccgggacctcctggaagccaaaaatggaatcagagatcattgatttcttcctgggggcct

SEQ ID NO: 706194 - DNA, 75 bp, Homo sapiens
ctcctcgctccttggatggcagtggttctgagccagctttgtgacaacaaactgtgctctgcagttttcatcccg

SEQ ID NO: 706195 - DNA, 120 bp, Homo sapiens
cgtggctcaggcccccaatgccatccttgaagtccatgtcctcttcctggagttcccaacggaaaatgtttcaacgtgcgcaagagttgcggtggcgggcagaggactaccacaaatgca

SEQ ID NO: 706196 - DNA, 124 bp, Homo sapiens
ctcagttggaagcagccgatccagcctgcggagcctgtggggcagggttacacatcattttggaatgactgtatatcatctggattacgtggctgtatgttaattgaattagcattgagaggaa

SEQ ID NO: 706197 - DNA, 85 bp, Homo sapiens
agactctctgaagaccagcaggaaagcagtgagcccttacagtactatactggcaattgctggagaagattttgcaattgttgct

SEQ ID NO: 706198 - DNA, 90 bp, Homo sapiens
cctcaggagtcatttctgttccgcacaggcctgctgaactgggtgctttatatagggagctgactccagactatagcatggagagccacc

SEQ ID NO: 706199 - DNA, 100 bp, Homo sapiens
cgtggttggtgattggcaggatcctggtatccgctaacaggctgcactccccgaaagtgcggcagaggtgtcaccgatgtcgtcatcaccagggaggaag

SEQ ID NO: 706200 - DNA, 75 bp, Homo sapiens
aagacatcaccagggctcagaggacacgtcttctgggggcccagcacgtgcttatccagttggtggcctttgcta

SEQ ID NO: 706201 - DNA, 75 bp, Homo sapiens
ctttcgcagagcttccagcagcgatcgccaaactttggcatcagagcaaggtccacacttatcactgaaaatttt

SEQ ID NO: 706202 - DNA, 100 bp, Homo sapiens
accagtaccggatggagaagagcgggaaagggggaagcgacattgactacagcaccgtgctcctcggcatgctggtgacgcaggacgtgcagctcgggct

SEQ ID NO: 706203 - DNA, 50 bp, Homo sapiens
tggcctcactcaaacagtaaacgagccaatggagatcttcgtggatgatg

SEQ ID NO: 706204 - DNA, 80 bp, Homo sapiens
gcaggacccgaagcctaaattccaggagggcaactccccatcagatgagtctgaggagcgggaaagagaccccaaggtgc

SEQ ID NO: 706205 - DNA, 83 bp, Homo sapiens
actccttcggcagtccacccaccgccgccgcctcccaggaagtggccatgcgcaagctggtgcgctcagtgactgtggttgag

SEQ ID NO: 706206 - DNA, 76 bp, Homo sapiens
cctgtaaattatgtgaaacctccaaatgtggttaatcagctgtgttcagcgaatacttatgaacagaaggctccag

SEQ ID NO: 706207 - DNA, 99 bp, Homo sapiens
tctttccaaaaggtcaaggttcacaagtactatactggcaattgctggagaagattttgcaattgttgcttctgatactcgattgagtgaagggttttc

SEQ ID NO: 706208 - DNA, 75 bp, Homo sapiens
cgctacagcaagttttttgacctccaggccaagcagatagaacttcagttcactattggcgaagccattaccagt

SEQ ID NO: 706209 - DNA, 100 bp, Homo sapiens
cttctctacagaagagcttctcctcatcaactggggatgattacagttcttcctaaaaaagactcacaaggcaatgtcaattggaagacaaggtcgagta

SEQ ID NO: 706210 - DNA, 75 bp, Homo sapiens
tcggggccgaagcggacagggaattggaggagcttctggaaagtgctggacgtcattgctcctccttatacctct

SEQ ID NO: 706211 - DNA, 100 bp, Homo sapiens
ccagaaatacccaccagtaaagtttttatcagaaaaggatcggaaaagaattttggaatttgacctggacgtggtggctgtggtcaacgacacagtgggc

SEQ ID NO: 706212 - DNA, 100 bp, Homo sapiens
tccccgcctaggtgctggccgagcgcggggcgggcaggcgagcgcggcggcggcggcgagcgtggggcctcatccacatgctcacccacttggccgaggc

SEQ ID NO: 706213 - DNA, 100 bp, Homo sapiens
acgcctgccccagggaaccgcacaggttcgagaacttgtcttggacaattgcaaatcaaatgatggaaaaattgagggcttaacagctgaatttgtgaac

SEQ ID NO: 706214 - DNA, 96 bp, Homo sapiens
caacctatgttgccctgagttacataaatagtgtggcttcctgttgtggtgcatggccccgagcccttctaatggggctgaactgctctacaagcg

SEQ ID NO: 706215 - DNA, 75 bp, Homo sapiens
gaaagaattaccactaccaagaagggatctatcacctctgtacaggtgaaagacccctgacaaaagacaatcatc

SEQ ID NO: 706216 - DNA, 75 bp, Homo sapiens
ttaatgagaggaatatactcatcatcagtctatttagaagaggctgaaggtgatgtggccgccctcaaccgacgc

SEQ ID NO: 706217 - DNA, 88 bp, Homo sapiens
gcgcccggcgcccctgagccggccgagcggcgacggaccgcgagtgacacctcacactcagtgccggttaaaattactgaagttagag

SEQ ID NO: 706218 - DNA, 75 bp, Homo sapiens
ttctgtgtggattcttcagaaagtgaacttggcattttagatctaattcaaggcaagtgtccagagaatggctgg

SEQ ID NO: 706219 - DNA, 90 bp, Homo sapiens
agacacgctgggccgaccccagagcggcgctggacagggggcggaggaaagcgcaaagggaaaagcaagaagtggaaagaaatcctgaag

SEQ ID NO: 706220 - DNA, 75 bp, Homo sapiens
cgttcctcaaactccgtgaccagatgggcttaggtcacgagcaaggatttggagccccttgtttaaaatgcaaag

SEQ ID NO: 706221 - DNA, 83 bp, Homo sapiens
ccacgtggagtgttaccactgcgaggaagagcctaggctggatgtcttgatcaataacgcagggatcttccagtgcccttaca

SEQ ID NO: 706222 - DNA, 98 bp, Homo sapiens
tgtatgcatggtgtggggttggtgtgattagcttcgcagtctggaaagctttaggagttcacagtgtgctgtccctggacaccaacatcacaaaccag

SEQ ID NO: 706223 - DNA, 80 bp, Homo sapiens
tcattgaagccagtcccttgcccagcagttatccgggaaaaacagctcattggtgggcagtattacttatgggaattgct

SEQ ID NO: 706224 - DNA, 98 bp, Homo sapiens
agatgtccgagcccaaggcaattgatcccaagttgtcgacgaccgacagggtggtgaaagctttgcccgaagtttttacatacaaattctactagtca

SEQ ID NO: 706225 - DNA, 87 bp, Homo sapiens
gtgaatgtcggaatccattatctttcgggaaagctctctggggcagggcagaaaccactaatactagcctcttgcaggtgcaactgg

SEQ ID NO: 706226 - DNA, 75 bp, Homo sapiens
agcacctagatgacgtaactctcatcttttgcctggaccttgcatattttgggtggttgtgtcaaaccgattggt

SEQ ID NO: 706227 - DNA, 89 bp, Homo sapiens
aagagcatgatcggcatgtccaccaaggccaacaacaacgctgccgtgtgtctgctctacctgggcaagctcaaggactccctgcggca

SEQ ID NO: 706228 - DNA, 82 bp, Homo sapiens
attggatgtgaaaatgaagccagaccgaggagaggagaggcagcagcatggcgagtgtcctgtcccgacgccttggaaagcg

SEQ ID NO: 706229 - DNA, 75 bp, Homo sapiens
agaaaccaaatatggtttgcttcaggtctctacagcggaacaatgtcgttcttcccccaaaagcatgatttgctg

SEQ ID NO: 706230 - DNA, 100 bp, Homo sapiens
cagtggaggagtgtgacagggatgatgaagaagacctgctggatggctcacagaacatttcctgcctgttgctcacactctgttgtccacagcatacccg

SEQ ID NO: 706231 - DNA, 100 bp, Homo sapiens
aaagccaagtcaaaatattctccagaattactcaaataccggcacgtgtggttctcaaatataggcattctgatgggaacttgtgtgttaaagtaacaga

SEQ ID NO: 706232 - DNA, 83 bp, Homo sapiens
cgcggttcttctccagcgccctggcctccctcaccttggacacctcgcttgggtgtaaaaagatggttccagcttcaaagagg

SEQ ID NO: 706233 - DNA, 50 bp, Homo sapiens
cgcggccgcagcatctcggaggatcctcctcgccctctgactaatatgaa

SEQ ID NO: 706234 - DNA, 90 bp, Homo sapiens
gggacgtgcctgggcctggcctggcttttctgggaaagtgaggccaccatggctctggagaagtctcttgtccggctccttctgcttgtc

SEQ ID NO: 706235 - DNA, 100 bp, Homo sapiens
aggggcccgagggcggggaccggcggcgctggaggagcgaggcagctgtactaggactgggaacgggtcaagtacaaaagagattttgaagaaagcaaag

SEQ ID NO: 706236 - DNA, 98 bp, Homo sapiens
ctaaacggagtcgccacaccactgtttgtgctggatcgcagcgctgcctttccttatgaagaagacacaagacatgaaagatcagatgtcaacttcat

SEQ ID NO: 706237 - DNA, 74 bp, Homo sapiens
gaaacacataaagagctcagtgaacattcttcagattattaaggaatcccagcagcagcatggtttacggcatg

SEQ ID NO: 706238 - DNA, 100 bp, Homo sapiens
ttcagcctgagcgacgtgccccaggcggagatctcggtgatcagggccaaagcggtcagtgagaaggaagtggactctggaaacgacatttatggcaacc

SEQ ID NO: 706239 - DNA, 75 bp, Homo sapiens
agggacacctggttccagctgcagcacgtggacgctgactcggaagtgcaggattatatctgtccaagatgcgag

SEQ ID NO: 706240 - DNA, 75 bp, Homo sapiens
ttgacagcaaaaatgaagatttaaccgagttacttaatggcatggatgaagttgcagcatgagaaagccgaacta

SEQ ID NO: 706241 - DNA, 97 bp, Homo sapiens
aacatggataagcatgccctgaaaaagtatcgtcgagaagcctatcatcgaaataggaaggttgttgattactcacagtttcaggaatctgatgatg

SEQ ID NO: 706242 - DNA, 85 bp, Homo sapiens
gattctgatccaaaccccctggcccccaccttctgggatgttagcagagccttttaactgccagagaaatcttgggaaattgacc

SEQ ID NO: 706243 - DNA, 74 bp, Homo sapiens
gcctctccagagccaggcacacagcaggcgctccataaatgttcgttggacaaatttacatgtattggagacca

SEQ ID NO: 706244 - DNA, 96 bp, Homo sapiens
taaaattgtcatcagcaaatttccctttcaagatccagaccttgaaaaggaggagatgttaaagtaacccatcttgcaggacgacattgaagattg

SEQ ID NO: 706245 - DNA, 75 bp, Homo sapiens
gcagtggtcgcttcttctccttgagtgtcctgccatacttcgtagctacaaaactggctaaaatccggaagccaa

SEQ ID NO: 706246 - DNA, 94 bp, Homo sapiens
cattggccacctacagaaacaaaatgtcaacaaattgatggggagagtcacaccgggacagctcatgtcctatattcagctcttcaagaacaac

SEQ ID NO: 706247 - DNA, 85 bp, Homo sapiens
atcagacagaacagttaatcctcaatttaagcctgatctaacccctagaaacaggtacaagactgtcatgtcttaaaatatacgt

SEQ ID NO: 706248 - DNA, 82 bp, Homo sapiens
ctctccgacgcaagactgtcccggcccggaaagaagcttccggttctgaggtcctggaggtgccatttccctctctgttgaa

SEQ ID NO: 706249 - DNA, 50 bp, Homo sapiens
caggagctggagcagctcaaagaggtagttagaaacaaacctgtggcaag

SEQ ID NO: 706250 - DNA, 80 bp, Homo sapiens
aggacaccgacatggaacagggactcactggggaaataaactatcaatcttgcccagactggagaaaggactgcagcaac

SEQ ID NO: 706251 - DNA, 82 bp, Homo sapiens
ctgctgggcagttggctggaggggctgctgctgggaacacctggagtctccgcgggcaggagctttgctggcagtagaacac

SEQ ID NO: 706252 - DNA, 80 bp, Homo sapiens
cttccctcgtggccgacggaacaatgaaggtgctggagaatctggtaaaagcaccattgtgaagcagatgaggatcctgc

SEQ ID NO: 706253 - DNA, 100 bp, Homo sapiens
gcctcgactccttaacaggatctacgataaggcctcgatgagtgttaaatcgccatttaatgtgatgtcaagaaataatttggaagcacctccttgtaag

SEQ ID NO: 706254 - DNA, 90 bp, Homo sapiens
ccatgctggccacacggaatttctcaggtctcagtggcccttagcagcagctccattcgtgtggccatgctggaggaaaatggggagcgc

SEQ ID NO: 706255 - DNA, 116 bp, Homo sapiens
atgaaagtgagcagtccagaaagcggcttatcgaacagagccgggagttcaagaagaacactccagaggttactcactataaacaatatccacccaacacaagcaaagtttattcc

SEQ ID NO: 706256 - DNA, 82 bp, Homo sapiens
ggcaattgaacttctgatggaaaccgctgaagttgaacaaaatggtggtctctttataatgccttgggacaataatgcagtc

SEQ ID NO: 706257 - DNA, 100 bp, Homo sapiens
tcccttccctatccccgacgaccggatcctgaggaggcagctgcggtggcagctgctgagttctcggtgaaggagatggtaacctgcacctcaatgtgac

SEQ ID NO: 706258 - DNA, 99 bp, Homo sapiens
aagtcgcctctgtgctcgtgagtgcatggggtataaggtgctggagaatctggtaaaagcaccattgtgaagcagatgaggatcctgcatgttaatggg

SEQ ID NO: 706259 - DNA, 100 bp, Homo sapiens
gttcatgtaaacagcatgacgtgaggccgtggatgcaggcattaaggaaaacaatgaagagtcgttatatggaactctatgaccttaatagagacttgct

SEQ ID NO: 706260 - DNA, 75 bp, Homo sapiens
gcagatgttgtcaaggtggcctaccaggaggccaggggtgtcgccatgtggagacctttggcgacttggcctttg

SEQ ID NO: 706261 - DNA, 75 bp, Homo sapiens
cagagggtggactcgccagtcacaccaaggccacctttgatgccatttctaagacctacagctacctgacccccg

SEQ ID NO: 706262 - DNA, 88 bp, Homo sapiens
ggaaacagctggctaagctcatcattgttactgggatgcttgaagatggaaagaaatttgattcctcccgggacagaaacaagccctt

SEQ ID NO: 706263 - DNA, 83 bp, Homo sapiens
gcgcggaaatctggaaccgggatggcgacgtctacactgagtcggaggcgaaggtcttattagtaggtaagaaacagctgctc

SEQ ID NO: 706264 - DNA, 51 bp, Homo sapiens
ctcaaccagatgaggaagtacaactttgagcagaagatggctgtgccaccc

SEQ ID NO: 706265 - DNA, 100 bp, Homo sapiens
ggggactgcagctgtggggagatttcagtgcattgcctcccctgggtgctcttcatcttggacttaattcagtgcacaaatgagatgaatgtgaacatcc

SEQ ID NO: 706266 - DNA, 100 bp, Homo sapiens
cgctccgtggccttagctgtgctcgcgctactctctctttctggcctggaggctatccagcctcaaattgaaattattccatgcaagatctgtggagaca

SEQ ID NO: 706267 - DNA, 82 bp, Homo sapiens
atgcgaccctcccagaccggccgctctcccctcctctcacggcacctcccaccatgaagaggagcaggatgcaaccgacagg

SEQ ID NO: 706268 - DNA, 100 bp, Homo sapiens
tcatctggaattttgccgatttcatgactaaccagtgttgctcaagaaacagatgtgagagcccagattcgtctgcaatttcgtgatgtcaatggagaac

SEQ ID NO: 706269 - DNA, 100 bp, Homo sapiens
agagctgtctcagaaaactcctccaaaagttactgtggcccatgtcctaaaaactggatatgttacaaaaataactgctaccaattttttgatgagagta

SEQ ID NO: 706270 - DNA, 82 bp, Homo sapiens
gcagtttctcacgacgggccgagcctgccactggcgtgatggtgggcatgggtcagaaggattcctatgtgggcgacgaggc

SEQ ID NO: 706271 - DNA, 83 bp, Homo sapiens
ttatagaccatcatttcttcaggataatgagctcagacatttaatccttaagatttatgtgatcccaatgcaatgcaatgcaa

SEQ ID NO: 706272 - DNA, 100 bp, Homo sapiens
ctgtaatacaaaagctgcgcgtcccttaatttcctcggcggaactattttggtggaaaactctctgctcaagggaaaatgccttggattgaatataatca

SEQ ID NO: 706273 - DNA, 80 bp, Homo sapiens
actatcctggagaaccctttattttacatcattcaacatcttccttcagtttggaaacctgcagaattatgattgccatg

SEQ ID NO: 706274 - DNA, 90 bp, Homo sapiens
tgggtaacacacagaggaaagaggcagcagatcccctagcatctaaacttaacaagttccaggaccgtctgcagccctaacaacaatgca

SEQ ID NO: 706275 - DNA, 98 bp, Homo sapiens
tttcattagcctcagaacgatatgataaagacgatgaagccccctctgatgctgaacatactgacttgtggagtcattggctcctattcggtggtttt

SEQ ID NO: 706276 - DNA, 100 bp, Homo sapiens
ggaaaccggtagcgcttgcagcatgaaccgcatgcacgagtctctcatgctcttcgactccatctgtaacaacaagttcttcatcgatacctccatcatt

SEQ ID NO: 706277 - DNA, 83 bp, Homo sapiens
tcgatgttcttctaatactcctcctctaacatgtcagcgttattgtaatgcaaccaataatttctgaagatcagacagcagcc

SEQ ID NO: 706278 - DNA, 75 bp, Homo sapiens
gcggagccgccaaaaatatgctgaggaggagttggagcaggcagcctggcatcctcgctacaacctcattgttgt

SEQ ID NO: 706279 - DNA, 98 bp, Homo sapiens
gatttcttccaaggaaccaaggcggccctggctgggggaaccactatgatcagaactagtcagccggaagctgagtttggttcctggtgcagaagaag

SEQ ID NO: 706280 - DNA, 100 bp, Homo sapiens
cttctggaaatggagtgaatggagtggtcagaacttcaccacacttgaagctggttatgatgtgattgctcaagcccaatctgggactgggaaaacggcc

SEQ ID NO: 706281 - DNA, 100 bp, Homo sapiens
ggtcatcagcacaggatatgccttgtcagatctgctacttgaactaccctaactcgggaaaggggcgtattcgtcgaggaaactatccaggtccatcgtc

SEQ ID NO: 706282 - DNA, 100 bp, Homo sapiens
ggtctccgtgcagcccaacttccagcaggacaaggtgcgaggaagaagatgtggagatgagtgaggacgcctacacggtgctgacccgcatcgggctgga

SEQ ID NO: 706283 - DNA, 49 bp, Homo sapiens
aggacatgatgcatccactcaatattgctaccagtagtgcagtttcaaa

SEQ ID NO: 706284 - DNA, 50 bp, Homo sapiens
ccgtcaatggcttcatcagcactttgggagaagatggcgaattagaagat

SEQ ID NO: 706285 - DNA, 75 bp, Homo sapiens
tcgtgcagcaacccccacacccagcaccaggtctctaattaacagaagatggcaaagcccagccacagcagctat

SEQ ID NO: 706286 - DNA, 75 bp, Homo sapiens
gacgccgaagagcccgccgcccgcgcgagggacacggccaacacggtgaaggaaaagttcgggaggaagctttat

SEQ ID NO: 706287 - DNA, 75 bp, Homo sapiens
acaaacctctccaccctcagtgacccggtgcagctagaagtccatatcggattacaaggcagaggaagacccagc

SEQ ID NO: 706288 - DNA, 100 bp, Homo sapiens
tggagagatggcaccggcctgaggtcaaggagaaattgaactaaactctcctttgaagactgagatctataaggacaggcagaaattctcagaacaggtt

SEQ ID NO: 706289 - DNA, 100 bp, Homo sapiens
ggaacagcagtggcaagatctcatgtccatcatggaaatgcaggaaaaactctgatgaggctgacctggtccctgccaaggaagccaatgtcaagtgccc

SEQ ID NO: 706290 - DNA, 100 bp, Homo sapiens
gaggagctggagcagttccagaagactggacccatacaatgtactggccccaaagggagcttcaggcaccagggaagaccctaatttagtcccctccatc

SEQ ID NO: 706291 - DNA, 100 bp, Homo sapiens
cgggaggaggaggagatcgtcaggctggcccaggaccgggaggagatgaaggttcaatttcagaagcttcagcaactgcgccttacacagtaccatggag

SEQ ID NO: 706292 - DNA, 143 bp, Homo sapiens
cgggacgggacgtgcggcccagcgagttggtcggtcccggggtcacccgctacgggaagcaggcctcgccacaggtagtgggcagcagtcagtgacaggtgtaacctctgtggatgacagcaacagttactggaggatacggg

SEQ ID NO: 706293 - DNA, 98 bp, Homo sapiens
tactctgaggagcggaactacagccagatgcggatccgggccaagcagtgggccgagccaggacggcaaccttcccaccctcatatccagcgtccacc

SEQ ID NO: 706294 - DNA, 100 bp, Homo sapiens
tgaagaaagtggctcagaagaagaggaagaggtccaggaggcccaggaggtcctgggggacccatgggtcgcatgggaggccgtggaggagatagaggag

SEQ ID NO: 706295 - DNA, 75 bp, Homo sapiens
ccatggcttccgaggagctgtacgagcggtttccaacctagatgaggaaagccgatggacagtccactacactgc

SEQ ID NO: 706296 - DNA, 83 bp, Homo sapiens
ggagcgcaggcctggtgcaaacagactcaagaggctcggagaaccagcttggggtctccaactgaattccttgaagagaaaat

SEQ ID NO: 706297 - DNA, 100 bp, Homo sapiens
aggacgacgaggagcagggcctgactgcgcagaatgttgtaccatctttgggtaggcagacttccctgacgacatcagtgatacccaaagctgagcagag

SEQ ID NO: 706298 - DNA, 100 bp, Homo sapiens
tgatagcttcaaatgaaacttggaaaaaagttgaatgtgaacatggttttggaagagttgtctgcaaagtgcctctgggctggagtacaatggcgagatc

SEQ ID NO: 706299 - DNA, 113 bp, Homo sapiens
tgcagcttcaagcttaggaccacccaccatgcctatccagatatctcttccaaacacatgatgaaggaggtcttgtcaacagggcaaggcaatagagaagtgatccacacagg

SEQ ID NO: 706300 - DNA, 51 bp, Homo sapiens
gctgcgtcggagctctacacaaaggctttccttaaagtttcccatgtctca

SEQ ID NO: 706301 - DNA, 108 bp, Homo sapiens
cttcactgctctgctgtctcctgcaagaactggctcaagaaatttgcctcgaaaaccaaggaactgctcgcagaaagaagaaggtggttcatagaacagccacagcag

SEQ ID NO: 706302 - DNA, 75 bp, Homo sapiens
acagtgtgaccgatgtcatatgctaggccactatacagatggaagcagctcgagagtgtcgtagaaagaagaaag

SEQ ID NO: 706303 - DNA, 101 bp, Homo sapiens
tttatctatattttttgactgctctgctcctctatgctggacatcaaatttccagagaggacatgtactcccaggattccatagatctccttgctaactca

SEQ ID NO: 706304 - DNA, 97 bp, Homo sapiens
tgcggtttttgttcctggggctgagtgccctcggtggaacacctgcagcaggagactgctgctctgaaaaagcaaatgcaaaaaataaaggaacagt

SEQ ID NO: 706305 - DNA, 75 bp, Homo sapiens
ctccgtcccccgcgggtctgctctgtgtgccatggacgggcaccgtctgcgtcctgctgtccttccccttcatct

SEQ ID NO: 706306 - DNA, 101 bp, Homo sapiens
cttagatggtacgcgttgctatacagaatctttggatatgtgcatcagtggtttatgccaaatgagcaccatgccaggactgcccacccggccctgctttt

SEQ ID NO: 706307 - DNA, 74 bp, Homo sapiens
ggagcctggggagaagcgccccaagtttctcgaaggtccatgtgttttgcaaattcaaaaaattcgcaatgttg

SEQ ID NO: 706308 - DNA, 77 bp, Homo sapiens
gaagaattttccaaatgaatttgcaaaacttactgtagccattcagctggttgaatttcacaaatgaaatcatgtca

SEQ ID NO: 706309 - DNA, 82 bp, Homo sapiens
cgccttcgtgcgcttcgaggacccccgatcaacaggcggtccttcgggtcggagtggacatcggatggtggcctggaagaga

SEQ ID NO: 706310 - DNA, 75 bp, Homo sapiens
gaccaattcgggaacaaatactactacatcccgcagtacaagaactggagagggaacaacctatcttcagcactc

SEQ ID NO: 706311 - DNA, 113 bp, Homo sapiens
ccaaagcctgcccagacggctcacctgtgcgggatggaacaaaaggttggtcaaagaaaaagtgatgtatgaaaaagaggcaaaacaacaagaagaaaagattgaaaaaatga

SEQ ID NO: 706312 - DNA, 78 bp, Homo sapiens
acgactgggaccgggacctgctgctggacccggcctgggagaagcagcagcgcaaggaaggcccgaacaagacaggaa

SEQ ID NO: 706313 - DNA, 90 bp, Homo sapiens
gtctgagagtgtaacttcattacttgaacatttaccattgcctttccccatcttcctggttctgctccttcgtggcctagtcttgtggac

SEQ ID NO: 706314 - DNA, 90 bp, Homo sapiens
ggaagaggcattgaggactttccttacctgtttttccagctcacccactgccagcagagatggcttccttagcggtatccaactggccta

SEQ ID NO: 706315 - DNA, 50 bp, Homo sapiens
ggagctgcttcccaataaggaaacagacatggatttgattgacatacttt

SEQ ID NO: 706316 - DNA, 75 bp, Homo sapiens
actgaacccacagaaactgtccaaacatggatagagctactcactgggacaggctggcctgacatggaaggtgaa

SEQ ID NO: 706317 - DNA, 100 bp, Homo sapiens
aagcggccccagcactcccagctgcgcagggcctgccaggtggcgctcgatcctgaggaggatgaaggggctggccctggaggccgagagtgagctggag

SEQ ID NO: 706318 - DNA, 110 bp, Homo sapiens
cttctactggctgcgctcctttctggccggagatcttggatgaggtggaaaaaagacgaggcatctctcctgccctggttcagccactcatgagaagtgtcatggaagcc

SEQ ID NO: 706319 - DNA, 100 bp, Homo sapiens
ccgagacgttgttgagtcccctgtgtcctcttctgggctcccaagaaacatttgcaaaatgggattatccgtggctaccaaataggttaccgagagtaca

SEQ ID NO: 706320 - DNA, 110 bp, Homo sapiens
tggcgtgcactccgcacctcggggacattattgcgcgtggaacggctgcttttggaaggtactaggttttgacaagcttgcatcatgcgtgagtataagctagtcgttct

SEQ ID NO: 706321 - DNA, 100 bp, Homo sapiens
ccatgagtggttccatgatgggaagtgacatggtaaagagaaatgtgtatgaccttacaagtatccccgttcgccaccaattatgggagggctggccaac

SEQ ID NO: 706322 - DNA, 82 bp, Homo sapiens
ctccgctcccccgatcctattcccagtcgtagatcctgaaggagctagacgagtgctacgagcgcttcagtcgcgagacaga

SEQ ID NO: 706323 - DNA, 50 bp, Homo sapiens
aggaaccacacgctgatcatgaaatcatttctcaagaagttcagttgctg

SEQ ID NO: 706324 - DNA, 75 bp, Homo sapiens
gccgcagcccgggcccaggccccggcagcgcctgggacaaggctgctctttggcgtaaattgcaatcgattaggg

SEQ ID NO: 706325 - DNA, 75 bp, Homo sapiens
gccagagtaaagcaaagagaaaggaagcaggcccgttggaagtggttgtggggacttgatctcatcttcatgcca

SEQ ID NO: 706326 - DNA, 75 bp, Homo sapiens
tgtgaagtgctagctgaaggatgagcagcagctagccaggcaaagggcagccccgagaaccacaggtgtacaccc

SEQ ID NO: 706327 - DNA, 75 bp, Homo sapiens
gttcaatgcagacaagacggatgtgatgctggcaagaaacctattggaattcgagacttaattaatgaagctttg

SEQ ID NO: 706328 - DNA, 98 bp, Homo sapiens
tctgcagcaccctccgcttcctctcctaggcgacgagacccagtggctagaaatggcacctcgaaaggggaaggaaaagaaggaagaacaggtcatca

SEQ ID NO: 706329 - DNA, 97 bp, Homo sapiens
agctgcaccagttggcaatgcaacagtctcattttcccatgacgcatggcaacaccggattcagtgaggcatttcatccttcatgaagccattcagg

SEQ ID NO: 706330 - DNA, 100 bp, Homo sapiens
gctgcggcgcctgggactgcaccgcaccgagggcgagctccagggcccgtcacagctggagctgactctccaggcatccaagcaaaatggcacctggccc

SEQ ID NO: 706331 - DNA, 75 bp, Homo sapiens
tgtcgacctgacgctctacacggttgggcccgaaggcatcctgcagaacggggctgtggacgacagtgtagccaa

SEQ ID NO: 706332 - DNA, 100 bp, Homo sapiens
cgctcctttgggaacccattcgagggcagccggcgggaggaacgctcactgtcagcgcctggaaacttgctcacgaccagctgtactggcgctacgatga

SEQ ID NO: 706333 - DNA, 99 bp, Homo sapiens
agggagtgcaagcttagagcgtctggccaagaatcagaggaagtgggctaaagaacgtgccaatggaatggagcttgatgggcgtaggatcagagttga

SEQ ID NO: 706334 - DNA, 83 bp, Homo sapiens
tgctgaccttggcaaagctgccagagatattttcaacaaaggatttgaagccccatgtgccactcccctgatctgcagcttcg

SEQ ID NO: 706335 - DNA, 82 bp, Homo sapiens
caagatcaagcactggaaccgcttccgagacgtgagaagccctaccactgcaactgggacggctgcggctggaagtttgcgc

SEQ ID NO: 706336 - DNA, 87 bp, Homo sapiens
tttctatgtactgcgcctggatgtggccagttactccacaggatccgctgaacataggatgttgccacaaaatctacctcgtgtatt

SEQ ID NO: 706337 - DNA, 75 bp, Homo sapiens
gctggtgatccgcgtggtcatccatgacctgcagcagacgtgccctctggtggtcagaagatgctgtgctgtctc

SEQ ID NO: 706338 - DNA, 100 bp, Homo sapiens
gctggttagtgtgctctgagggagggtccgagccagccgctgttttgccggaggagcccctcaggccaattcagaaggagctggcggacatcactttaga

SEQ ID NO: 706339 - DNA, 100 bp, Homo sapiens
gtcccagctggattcggtgcgggtctggctgggcaagcactacaagaaggtggactataatgcgagtgcctggctgaccaagaatatggacccgctgaat

SEQ ID NO: 706340 - DNA, 90 bp, Homo sapiens
gacatgtatagtatggcttgccttcattccaattttttttggcaccgctcaatcagcggaaaaggctgaccggttccctgatgtgttacc

SEQ ID NO: 706341 - DNA, 90 bp, Homo sapiens
cgccgccccggccccgcgcctggacgccgctgacggccccgagcacggccgcccggccacgttcctctgtgacgagggtgcaggtatctc

SEQ ID NO: 706342 - DNA, 74 bp, Homo sapiens
tgtgctatcagcattctgggaaagccctttctaaggcacaaaatgatgtgatggaaatgaagatgcagtcagag

SEQ ID NO: 706343 - DNA, 97 bp, Homo sapiens
atggaaaacagccgaaaaatggtttcttgatgctttggaaaaaattaaagcaattgggaacgaggaagaagaaaggtggggcgaagccagcaatgac

SEQ ID NO: 706344 - DNA, 82 bp, Homo sapiens
cgccagcggccgagcgggcggcttcctggcctgggcgctccggtggcggcggagatgaggacggggacttggttgccttttc

SEQ ID NO: 706345 - DNA, 97 bp, Homo sapiens
tgggctgcatgcttttcaaacttctgagagggtcatgcaagacaagataatctgccttccgaaaagagtgcagcctgctcagaaccactcttccctt

SEQ ID NO: 706346 - DNA, 101 bp, Homo sapiens
gggggatgcctatgtggtcaagtggaagttcatggtgagcacggcagtggaagaaacattggtttgtgctgacagattcaagtctcaaatattacagagac

SEQ ID NO: 706347 - DNA, 75 bp, Homo sapiens
tgaagttgatggaattacactgtgatacgactgactaatgtttctccatcccagagagatgaagtaattcaatgg

SEQ ID NO: 706348 - DNA, 100 bp, Homo sapiens
ccatctctttgacgctgcctacttcgggcagaaggactctgtgtgtgcatttaaatcaaacggtattgagatggattgggttatgaaacataatggtcca

SEQ ID NO: 706349 - DNA, 100 bp, Homo sapiens
tgcagacagaggtgtgctgacgacctgctacaacagaaacgcaaacatgcagatctttgtgaagaccctcactggcaaaaccatcacccttgaggtcgag

SEQ ID NO: 706350 - DNA, 75 bp, Homo sapiens
gcctcaccaagtcacatgacaagcatgggcaagttacggaagcaatggctaaaggaaagtatctctgatgtcggc

SEQ ID NO: 706351 - DNA, 98 bp, Homo sapiens
ccaccccgagccgattcaagaaggacaaagagatcatagccgagtatgaaagtcaagtcaaaggtggatacccttcgccatgttatcagccagacagg

SEQ ID NO: 706352 - DNA, 76 bp, Homo sapiens
ccgcgaccggacagtgaaggagtgggacctcggccgtgcctattgggagatcgtggtgaaatggtttgaggctgtc

SEQ ID NO: 706353 - DNA, 100 bp, Homo sapiens
gttctttgcagggaggattgaagtcattaaaggcaacattgatgcaatcttcgcaaatactgtggacaatgcccgcatcgttctgcagattgacaatgcc

SEQ ID NO: 706354 - DNA, 80 bp, Homo sapiens
ggggactggtgaagcagggattaaagtgtgaagttcaaatctgaacatcaatgatgtactagggaactactcattgactc

SEQ ID NO: 706355 - DNA, 97 bp, Homo sapiens
tggcattgacatttaattttagggtcctttatatagaagggagagtagaaaagcagcatctgttatagcaaaatacccacacaaaataaagagtgga

SEQ ID NO: 706356 - DNA, 98 bp, Homo sapiens
actcagttcatcagctacattatgtacacaggctttgaagacaagattcccaaaaggagattctctgagatgcaaaatgaaagacgagaacaggcaca

SEQ ID NO: 706357 - DNA, 94 bp, Homo sapiens
ctcagatgctgccagggtccctgaagagggaagacacgcggaaacagggtgtgggccgaagatatgctcatgtggtgttgaggaaagcagacat

SEQ ID NO: 706358 - DNA, 101 bp, Homo sapiens
cttcacggaccagtttcagttcgccgatgggaaacccggagaccaaatccttggacaatgaaaagcgaaccccattgcacgccgcagcttaccttggagat

SEQ ID NO: 706359 - DNA, 100 bp, Homo sapiens
atggactgtgaggaggacattgatgactgccttgccagtgccaaagatgtacaatgggaatttgtacatggtttacttgaaaatgctatttatggaggac

SEQ ID NO: 706360 - DNA, 82 bp, Homo sapiens
gacggctgctcaaacatcagggttctgtacagagtaatgagatgtgtgacggctgcaaaccaggtgtttttttctgaggctg

SEQ ID NO: 706361 - DNA, 100 bp, Homo sapiens
ctcagaggcccggagaacgatgaccaacgcccttcgcaaggcccctcagcacacagctgtcggcttcaaacagacggagagagttgacaaaggcatcgag

SEQ ID NO: 706362 - DNA, 100 bp, Homo sapiens
attttccttttggctaaaagtccccgcccagaggccaattcgtcgcggcggcggtggagatcgcaggtcgctcagggcaccatgccggtggaaaggatgc

SEQ ID NO: 706363 - DNA, 74 bp, Homo sapiens
ttctagctactgcacgtacttcataaagcaggactctaaaagctttgggtttatcttgcagattatggactttc

SEQ ID NO: 706364 - DNA, 100 bp, Homo sapiens
tgtttaagttgaaggagcgctaccgcaacgtgctggacaccatgttcgagctgctgccccggatggccaggtactggtgtggcatactcggacagagaag

SEQ ID NO: 706365 - DNA, 90 bp, Homo sapiens
cctcggccgaccagggacctgcccgcctgcggctgctccggtgaacttgaagatgatttacttggagaagatttgctatctggcaaaaag

SEQ ID NO: 706366 - DNA, 83 bp, Homo sapiens
cgtcgaaaggattggattggcatctttagaaaagttcgtcgctgcttcctgtgctccaggagaggacatctcctgtattcctg

SEQ ID NO: 706367 - DNA, 50 bp, Homo sapiens
cgctgctcccgggggcgacggggcacaggcaggatggccgatgctgacag

SEQ ID NO: 706368 - DNA, 100 bp, Homo sapiens
tgggctgtcactataggattgcccacgcagagggaacctcagaacctgttctggatccacagcaaatccaagcatttgatcagctttgccgtctctaccg

SEQ ID NO: 706369 - DNA, 98 bp, Homo sapiens
taaagaagcaggatgcattctacaaagaacagctggctagactggaggagagggcacacaaaaaatccctttggacgattgaacccaatgaaggcatg

SEQ ID NO: 706370 - DNA, 89 bp, Homo sapiens
cacgcacgggatccagagcgccgcgcacttcgtcatgttcttcgcgccctggaggatacgaagcgttttcggcttcctgcccggagctg

SEQ ID NO: 706371 - DNA, 80 bp, Homo sapiens
cgcaaacccaaagatccccgttcctggagattctgattgagctctctcttccgaatttgtaatgaaagatttactacaca

SEQ ID NO: 706372 - DNA, 116 bp, Homo sapiens
gtcgcgcccgggaggaaggaacgaggcaaggagctaaagcagcgtgcgttcagccctggggctgaaggtgatgtggccgccctcaaccgacgcatccagctcgttgaggaggagtt

SEQ ID NO: 706373 - DNA, 87 bp, Homo sapiens
gcagtcctaccatgtcagccttcccagtagctgggaccacaggtagttgatgtcacttggcgatattcctgcaaacatgaagaggtg

SEQ ID NO: 706374 - DNA, 75 bp, Homo sapiens
gaaaagtcctgcaacatttttgacccccaacatggggctcaagaagcgttactaaaccaaggagatttaactgaa

SEQ ID NO: 706375 - DNA, 98 bp, Homo sapiens
gtggatccttgaatgttgaagatgtccttaccagctttgacaatacaggaaatgtttgttatttcacagttgaggattttgggcagatccataacagc

SEQ ID NO: 706376 - DNA, 83 bp, Homo sapiens
gtcgagtatctggtgaagtggaaaggatggcccccaaaggtttccaggcctgaggtgcccgccctggccccaggagaatgaac

SEQ ID NO: 706377 - DNA, 100 bp, Homo sapiens
tggcttcagtagtttcaaaaggtggcctttccactggagttgcttcacttagctctacaatcaacccatgtgcttcagaggatgattccgaagaagacgg

SEQ ID NO: 706378 - DNA, 97 bp, Homo sapiens
tcaccaggataatattctctcattgattaatgtcaatgctattgtggacgatgaaaggctctctgcagaggagatggatgagaggaggcggcagaac

SEQ ID NO: 706379 - DNA, 75 bp, Homo sapiens
gctgaaaatccgaagtgccgcggaaagtggaggtattagtcactgtaccactggctttactacagaaaggtgcca

SEQ ID NO: 706380 - DNA, 80 bp, Homo sapiens
atcactgcaccttaaaaacaaaagattgagctgcactgtattcctgcaaggggagagccagttgcgcagagccctgcaac

SEQ ID NO: 706381 - DNA, 90 bp, Homo sapiens
gaaaacttcatagctacagttcgagaagttgtgaacagactcgatcgttagggaatgtgattcgcctttgccagtctcatctcgtgtctg

SEQ ID NO: 706382 - DNA, 90 bp, Homo sapiens
cctacaacttattcctgtccggagacagcctaagggtgaggaaaatagcagctgaatactatgacaacctccctcactacaattcctgga

SEQ ID NO: 706383 - DNA, 100 bp, Homo sapiens
ggggtcagagtgccggaccccagcacacagaagccgagacggtccagtggcattgcagagcacggatggttgcaggagccaacttttacattgttggacg

SEQ ID NO: 706384 - DNA, 148 bp, Homo sapiens
cgtgcatggcgaagtccccggagaactctaccctggaggagattctggggcagtatcaacggagtctccggggttatgaagacagtatggagtttccagaccatagtagacatttgctacagtgtctgagcgagcagagacaccaggg

SEQ ID NO: 706385 - DNA, 143 bp, Homo sapiens
agatgtggtggaatatgccaaggaaaaactggagagcttcatcaaaaatagtgatagctttgataaccacagatgctcactgagcggggaagatttgaacagacaatggctttctcccagtgctcatctgcagccaaccattt

SEQ ID NO: 706386 - DNA, 90 bp, Homo sapiens
catcgaagccatgatttaaatatcggcgttaagaattaaacaaccaccatgtcgagcaaaaaggcaaagaccaagaccaccaagaagcgc

SEQ ID NO: 706387 - DNA, 95 bp, Homo sapiens
gggctccgggtcttccagagcgtgaagatcaagatcgggggatatgagactttctactcggaatatcctgagtgttgcgtggatgtaaaacccat

SEQ ID NO: 706388 - DNA, 51 bp, Homo sapiens
actcgatccgcctgcctgcgcacctgctgaaaatgcctcgtgtaaaagcag

SEQ ID NO: 706389 - DNA, 100 bp, Homo sapiens
ctccaccgccacccccgacacaagagacttatggagaatataagatgctgtggacaattatcgagatagactaacagaataccccttctacacacccagc

SEQ ID NO: 706390 - DNA, 98 bp, Homo sapiens
cagggagggctccgctagcccggggggccctccccgcggggcagatgcttgaatcatctaggacttgttcttctggtgctacattattttgttgaatt

SEQ ID NO: 706391 - DNA, 100 bp, Homo sapiens
cctcgtcctcggcgccgccctgcgtggagccgccgccggccacccggaacacagatatgtagaactcttcttgaattctacagcaggagcaagcggtggt

SEQ ID NO: 706392 - DNA, 75 bp, Homo sapiens
cagtgttatatcctccaggaatactggccaggaaccagtgttatccaaggagcagcctgcgttccagtatagcag

SEQ ID NO: 706393 - DNA, 101 bp, Homo sapiens
gtgcaggatcttgatggtggcaaggagagaccttaatggacagaatcaagaaacagctacgtgaatgggatgaaaatctaaaagatgattctcttccttca

SEQ ID NO: 706394 - DNA, 83 bp, Homo sapiens
agcacttggaactcctttataagtgtcagctgtgaggaactgtggctgcaccatctgtcttcatcttcccgccatctgatgag

SEQ ID NO: 706395 - DNA, 98 bp, Homo sapiens
gcatccctgcaccccgcccagttgctggggctggagaagagtaaggggaccctggactttggtgctgacgcagccaaaactggacaagccaaggcatc

SEQ ID NO: 706396 - DNA, 95 bp, Homo sapiens
ttgaagctatgcagtatttctttggcatcactgcagctagtaatttgccttctggattaattccctgaccaggagcgcacccctccccaacgact

SEQ ID NO: 706397 - DNA, 75 bp, Homo sapiens
ggatgaagttgttcattgtttgtcaccacaaaaaggacagggatttgtcttggctgttactatgacacgggaagc

SEQ ID NO: 706398 - DNA, 75 bp, Homo sapiens
tgacgatttggatgaatatacccttagaaaaaatgtggcagtcttaaagcttttcaagccaggccaagaagctgt

SEQ ID NO: 706399 - DNA, 79 bp, Homo sapiens
gtggctgtgcagggccccgagccggcccgggtcgaggaatctatcttctggatttaatctacattgattctgcatatcc

SEQ ID NO: 706400 - DNA, 100 bp, Homo sapiens
gcggtcttaacctctcctctggccgagtccttgcaagaagtgaattacccgaccctggtatagctgtggaccaactgtatatgatcatgcgcaccttggc

SEQ ID NO: 706401 - DNA, 135 bp, Homo sapiens
tcagtaatgcctggaatgatgatgtctcatatgtctcaggcttccatgcagcctgccttaccgccttcctgtgcatcggtggatctgcagggagacagctccttacaggtggagatttctgacgcagtgagtgag

SEQ ID NO: 706402 - DNA, 109 bp, Homo sapiens
cggctgcggcgggaactgcggacggtggcgggcgagcggctcctctgccagagggccatgatccaaaggaaccagagcagttgagaaaactgtttattggtggtctgag

SEQ ID NO: 706403 - DNA, 112 bp, Homo sapiens
agcccgctggcgccgctgcccgccaggccccgggggcggcggccaagatgtccgtgcctgttaaaaagatcaagtggcatgagcagccttttggggaaaattggtgccaaga

SEQ ID NO: 706404 - DNA, 74 bp, Homo sapiens
cacgtgtgagtgagaacatcacagttaatcagctgtgttcagcgaatacttatgaacagaaggctccagcagca

SEQ ID NO: 706405 - DNA, 75 bp, Homo sapiens
ctctgctcttcctcccttcgctcgcaccatggtaaaaccttgttagccaaagcagtagcaaaccaaacctcagcc

SEQ ID NO: 706406 - DNA, 102 bp, Homo sapiens
caactgaattccgagagcctcacagctctgctaaaaaacagagttgaaactgtgggacagccagacagaagagatagcataggagtgtgtgcagaaaaacag

SEQ ID NO: 706407 - DNA, 98 bp, Homo sapiens
acagcagcagcccccgctgcccgagcgggaagagactggagatgaggaggatgggagtcccatcgttgtggaagatatcaataagcgcagagagccgc

SEQ ID NO: 706408 - DNA, 75 bp, Homo sapiens
ccggctgcccactcgcctcacctgagcctggggcttaaaagacaaccttcttgcttctgggacatccagcctgac

SEQ ID NO: 706409 - DNA, 82 bp, Homo sapiens
tactgagcaatatcaagcccattcaaacagaggcatgggacccagatgatgtggtaccagttggccaaagaagagcctggtg

SEQ ID NO: 706410 - DNA, 82 bp, Homo sapiens
ctcgcgctactctctctttctggcctggaggctatccagcgagcggaaagaatgtcggagcgggccgcggatgacgtcaggg

SEQ ID NO: 706411 - DNA, 83 bp, Homo sapiens
gctgtgctcgcgctactctctctttctggcctggaggctatccagcggagtggagcttggtttcgggatctcggtgctgcaga

SEQ ID NO: 706412 - DNA, 100 bp, Homo sapiens
tctgctcttcccagtgagatgcagacccgaatctttgacccagctccaccaggcagcagaaaggtactctgtggatatccccttggacaaaactgtcgtc

SEQ ID NO: 706413 - DNA, 100 bp, Homo sapiens
caaatatccgcctggctggattagagtatgttctgcacttcactgcactgaatgggaagatttactttcgaagctataaaaaaaggtttgttcacgttaa

SEQ ID NO: 706414 - DNA, 102 bp, Homo sapiens
catgcttcaagagccattccttttggaacaatgctgtcaataccagcaaatatgcagaaagctatcggatccaaacctatgctgaatatatggggagaaaac

SEQ ID NO: 706415 - DNA, 75 bp, Homo sapiens
ccgtgaagtcagaggcgaacgccactcagcttttgcggcacttggaggatcccaaaatggctgggcgaaaacttg

SEQ ID NO: 706416 - DNA, 98 bp, Homo sapiens
ataatgaaggctggataccactacatgcagcagcttcctgtggatatcttgatattgcagagttgtctaccttcataacaacaatatctctgtagttg

SEQ ID NO: 706417 - DNA, 97 bp, Homo sapiens
gcaggtttatggagaagggctgttgctaatgctaaaagcattggacaccttatttttgggccatcactgtgcatgtccccatgccctcagcaggagt

SEQ ID NO: 706418 - DNA, 98 bp, Homo sapiens
aagaaaagagctcttggaaaagcaccaaagggagcttcaggagggaagccgagagacacacaagattgcagtattttatgttgctgaaggacaagaag

SEQ ID NO: 706419 - DNA, 83 bp, Homo sapiens
attcgtcttggtaaacttggtggcattttggaagtgtcaaaggccagggacatccctgttgtcatcgacgcggtgagttgact

SEQ ID NO: 706420 - DNA, 100 bp, Homo sapiens
ccggggccgtggctgacatggagcaggtaggcgaaaaccaagagtacatcggcctcgttctcctatattggaagaaaaagacatcccgccccttgaattt

SEQ ID NO: 706421 - DNA, 75 bp, Homo sapiens
gactcaagtctggacctgggacccactgcaggtgctgggcggcggagagccccgagaaggaggaggagagagagc

SEQ ID NO: 706422 - DNA, 75 bp, Homo sapiens
acttgccagttgggtatcctcctcagtatccaccgacagcattccaaggttacagaaattatctcagagattcgg

SEQ ID NO: 706423 - DNA, 100 bp, Homo sapiens
ggccccctgatcccgctgagccccctccaggagcgaaagggttaagaatgatgacagagcgggatgccaccagcttgtccaaagggaagttccaggagct

SEQ ID NO: 706424 - DNA, 101 bp, Homo sapiens
gggtggctcaccgggcagcgtgggtgagcggcgcagcggcggcagcggagagcgagagaggggagcagctgcagaaccttggcctgaaaatgctacattat

SEQ ID NO: 706425 - DNA, 96 bp, Homo sapiens
gaagagcgacaagccgctggcagccgcggatctcaccgccgctcaggcccctgtcaaagggaacaggaagcagtccacggagggtgacgccctaga

SEQ ID NO: 706426 - DNA, 82 bp, Homo sapiens
ggcagccttgcgctgctctaatggtccggacttccgtgtcccgtggaccgggagcccgtggaccgggagccggtggtgtgcc

SEQ ID NO: 706427 - DNA, 100 bp, Homo sapiens
ggagacgtcggttgagcggcggcgaacatgcgcttttgacacattggaggatctcatctggccaccgcgttctggaagaggcgagagggagagcgtgcgc

SEQ ID NO: 706428 - DNA, 100 bp, Homo sapiens
gaggaatccctttggtgtggacatctgctgccggaaggggtcccgaagccccctgcaggaactctacaacccaatccagaaaaagcttgtggtgaagggg

SEQ ID NO: 706429 - DNA, 98 bp, Homo sapiens
cagcgggagggcgcgcggccgagcggaggcggagtcggcgccgagaacatggttggatggcaagcatgtggtgtttggcaaagtgaaagaaggcatga

SEQ ID NO: 706430 - DNA, 100 bp, Homo sapiens
caaactggaacttatgctgtagacatttctttgtggtttatctaaaaaccaaagtattgttgtccagacatgataaataactttttgggactggctaaaa

SEQ ID NO: 706431 - DNA, 50 bp, Homo sapiens
acagaaactttcctgtaaaccagcagaatgtgacagtgatgataacatgg

SEQ ID NO: 706432 - DNA, 101 bp, Homo sapiens
gatttggaaggactgcgctgcagagcatggatcattttgatgacattggtcccagtgttgtaatggcctccccaggcatgatgcaaagtggcttatccaga

SEQ ID NO: 706433 - DNA, 100 bp, Homo sapiens
cggaagctctttgaccttctggatgtccttgagttcaaccaggcgccaagcccatctttgtgtgcttgcatccaactgtgatgagcctatgtatgtcaag

SEQ ID NO: 706434 - DNA, 99 bp, Homo sapiens
ctcagcggcgccttgcggagggaccccagtcggatcatgctaaaaggagataatattactctgctacaaagtgtctccaactagaaatgatcaatgaag

SEQ ID NO: 706435 - DNA, 100 bp, Homo sapiens
cacatccgcacccacacgggcgagaagccctacgagtgcaacatctgcaaggtccgcttcaccagagaggtggagaagagcgagtacttgagaaagaaga

SEQ ID NO: 706436 - DNA, 75 bp, Homo sapiens
agaccgcttaccgcatctggctggagccctgcattcgcggcgtgtgcaggtaagaatgattgatgttggctgata

SEQ ID NO: 706437 - DNA, 90 bp, Homo sapiens
ggagacttcatgcttaaccagtacaccaagacatttgtatagccaggctggagaaaagaagctgccaccatggttgcactttcactgaag

SEQ ID NO: 706438 - DNA, 83 bp, Homo sapiens
ggaaaatccgcaagaccatcatgcagtgtggacgaatgtggaacctcgctctgtggctgtgttcccttggcactccttagtcc

SEQ ID NO: 706439 - DNA, 98 bp, Homo sapiens
ggacaagatcccgtccatgaatcagatcccaaaatccaggagtgagggatctattcaggcccacagagtactgcaaccagagctatctgatggcattc

SEQ ID NO: 706440 - DNA, 100 bp, Homo sapiens
gcgaatatcgtcatcgttagaagggaatctcagtctttgaggagattttaatctcacatgcaaattcagtggcttagtcagcttccccaccctgcaactt

SEQ ID NO: 706441 - DNA, 83 bp, Homo sapiens
tgatgtgaaaaataccacgacaaaaccaccctagtgagtatttggacattctcgctatctcctgtgacagctttgacgaggaa

SEQ ID NO: 706442 - DNA, 100 bp, Homo sapiens
agaagcatgtgtcttccccagctctgcagccacatactatccgtttgttcaggaaccaccagtgacagagctatcttagcggcacagagacgaggagaag

SEQ ID NO: 706443 - DNA, 80 bp, Homo sapiens
agattggaggcgagcgttgggtgtggaacatcattctcaccaccagtctcttctctggttgcccccaagtttcctggcag

SEQ ID NO: 706444 - DNA, 96 bp, Homo sapiens
ctcgcccagccacccccaggacgccttctgcaactccgacatcggtattagaaaactactcggatgctccaatgacaccaaaacagattctgcagg

SEQ ID NO: 706445 - DNA, 100 bp, Homo sapiens
atcgaaagcgttggagaggtgttaccggaacggcggcgacaagggtgttcccgaactagagtggtgctcggccttgttctccccatgtgggccatagccc

SEQ ID NO: 706446 - DNA, 89 bp, Homo sapiens
gcctactcgcccgccaccctgcgctgccgccgctctgaggagttaaaggtgctgttggcagcagcggtctgcacaaaagcaggaaaggc

SEQ ID NO: 706447 - DNA, 90 bp, Homo sapiens
gtgatggagattttgatgtggatgatgccaaagttttattaggctccagtgatcattctacatatattgtacaaacactagattttcacc

SEQ ID NO: 706448 - DNA, 88 bp, Homo sapiens
ctcaggcctttagtgatgatggttgactatagtcaatggggccaatggagccaagtgtatggaaacccacaacagtatggacagtata

SEQ ID NO: 706449 - DNA, 98 bp, Homo sapiens
gactttcttccagcttctgctgtccttctttgtggagagcaagctgaaaaagatcgggggcgggggctttggtgagatctacgaggccatggacctgc

SEQ ID NO: 706450 - DNA, 50 bp, Homo sapiens
ggagtgattgcctacatcttaattgcggcgagcagtaagaagcagcgtgt

SEQ ID NO: 706451 - DNA, 101 bp, Homo sapiens
ggagcctgcacgcgcacggtttggccaaagaagcccccatactcccggtgaaaaagaccccaagactgcttctgagacagaaacagatatctgtgctgaat

SEQ ID NO: 706452 - DNA, 82 bp, Homo sapiens
cgttggagcgcggaaatctggaaccgggatggcgacgtctacactgagtcggaggcgaagatggactcaccctgtcacccag

SEQ ID NO: 706453 - DNA, 91 bp, Homo sapiens
cggcctcctccgtgcggagaagaagctgcggccgcacctggccaaggtgcaggcctggggtagtctcctgtctggacagagaagagaaaaa

SEQ ID NO: 706454 - DNA, 50 bp, Homo sapiens
gtttgtggacagatttatattggtgtgggattatgagactggagattttg

SEQ ID NO: 706455 - DNA, 118 bp, Homo sapiens
tgtgatcaccttattggagaaagggaaagcaccctggatggtagagccagtaagaagacgccgggctcctgttttaacttctagtcatggcgaatgatcgcaggagagcacagactgg

SEQ ID NO: 706456 - DNA, 75 bp, Homo sapiens
ccgacagcacagacagaatccctgctaccagctggcttagcaggagctccagcccgtgctgtatcagctgtaaag

SEQ ID NO: 706457 - DNA, 83 bp, Homo sapiens
tgaggcctccccagccatgtggaactgttggacgtgataagtatgagcctgcagctgtttcagaacaaggtgataaaaagggc

SEQ ID NO: 706458 - DNA, 75 bp, Homo sapiens
acgaatctgcccacccctcctgtaacccagcctgtttcacttcttggccggatcttggacctgaagactgggacg

SEQ ID NO: 706459 - DNA, 78 bp, Homo sapiens
ctctctggaagagggaatcccatcaaagtcagccgtgtggggtctgcaatgcacatgccaaaatttaattcaatttca

SEQ ID NO: 706460 - DNA, 82 bp, Homo sapiens
acgtgggcggtgggccccagccccacagaccagcccagcattcagacctgcctagagctggaacgttacctccagagcgagc

SEQ ID NO: 706461 - DNA, 98 bp, Homo sapiens
tctgaggatggagaactcagcactctggccaggctgccgcacctctacaggaactttgccgcggagcagtatgccagtgtgttcgccatctccctgcc

SEQ ID NO: 706462 - DNA, 95 bp, Homo sapiens
gaaagtttcattgtgtatgtagaagaccagaagtggatggagagacagcatgaaagaaattggtagcaattgcctgaataatgaatttaactttt

SEQ ID NO: 706463 - DNA, 100 bp, Homo sapiens
ttcgagaaggagaacaacttcttttaagatttactggaaacatatttgcttcaaagataagccagagaatccagacagctcaccctgctgggcggcaggt

SEQ ID NO: 706464 - DNA, 83 bp, Homo sapiens
cacgcgggagcagctgtaccaggccatcttccatgctgtggaccagtacctggctttcctccgcaagcggatgaacaccaacc

SEQ ID NO: 706465 - DNA, 83 bp, Homo sapiens
ctttgagctggaccgattagaggagaatgggtaccgatccctctgtgaacagatgtccagaaggcttcttgggggaatattgt

SEQ ID NO: 706466 - DNA, 74 bp, Homo sapiens
cgttcccaaggctccgggctttgcccagatgctcaaggagggagcgaaaggtggagagattcaaccagttagcg

SEQ ID NO: 706467 - DNA, 82 bp, Homo sapiens
cgccgaggcggccacccgagacgcggcgcgcacgctccggcctgcgggcgtgatggtgggcatgggtcagaaggattcctat

SEQ ID NO: 706468 - DNA, 130 bp, Homo sapiens
caaagtgatccgaagcgatggagccccagctgaaggaaagcggaatcgatctgacaccgagcagatgaacaagagaactgggcaacccatgatccacatctacctggacaaggaaacaggaaagcccaaa

SEQ ID NO: 706469 - DNA, 74 bp, Homo sapiens
ctgcctcgccgcgtctcgccacggttgcacactgggccacagaggatccagcaaggatgaagaaatggagcagc

SEQ ID NO: 706470 - DNA, 75 bp, Homo sapiens
gttatcaagctttagagcctggctactcacagttgaagcctgattgcagagatcctcaccatggagaaggaagtg

SEQ ID NO: 706471 - DNA, 100 bp, Homo sapiens
cccgcggccaacatgagcttcttgtttccacaggtcctggctaccctgggaagagacaagaagtaaatgaagaaagaggaagattccaggacctagatat

SEQ ID NO: 706472 - DNA, 83 bp, Homo sapiens
gcgacagcggcggcgagaggatgaacaacaagttcgacgcgtgcgcgcggagccatggttatcatgtcggagttcagcgcgga

SEQ ID NO: 706473 - DNA, 100 bp, Homo sapiens
cttatggcggcgctggagagggggcgctgagctgttgggaatttggtgttcacttggcagaactgactgtagatccccagggggcactggcaatccgtca

SEQ ID NO: 706474 - DNA, 100 bp, Homo sapiens
taagaagcacctggatgagacatttgctacagcatcccacattaagtcaacgagagaagacagagtaatttttaaggaaatgaaagtttggatagaacaa

SEQ ID NO: 706475 - DNA, 98 bp, Homo sapiens
gcctgaggaggcgagctagccgggagttacaccgccaccgccagacaagttggatggcttgaggactggtactaaaaggaaacgtgactgggaggcca

SEQ ID NO: 706476 - DNA, 75 bp, Homo sapiens
agaaaagaagaggaggaattaaattttaatgaagatattctgtgtccacatggtgcttctcagaatgatgatggc

SEQ ID NO: 706477 - DNA, 99 bp, Homo sapiens
gggagtgggaggatgcgcaggggttttctgcacttctacactcagctgtgtcagcgtgttatgatgccgtcccgtaccaacctggctactggaatcccc

SEQ ID NO: 706478 - DNA, 75 bp, Homo sapiens
agtgccaagttagatgccgattacccacttcgagtcctttattgtggagaaactagaagctgatagtcttgaagt

SEQ ID NO: 706479 - DNA, 98 bp, Homo sapiens
cctcccgagtagctggtattacaggggtgggaaccgccaaacctctcccttctttttgacttcacccttggataccatcaaggccagaggatggaacc

SEQ ID NO: 706480 - DNA, 51 bp, Homo sapiens
cccgctaccggaaggccatcgccaaggttaatttggagtggcccctggagt

SEQ ID NO: 706481 - DNA, 97 bp, Homo sapiens
actttgcagaaatgtgtgcagactacatggcatctaccataggggcatccgtgtcattctggaccttactcccaactaccggggtgagaactcgtgg

SEQ ID NO: 706482 - DNA, 100 bp, Homo sapiens
aacacctcagtatcctgcgagctgtacacaccagagtttatttaaccaccttgctgctggcatgaaagcctcaggctgggtctcttctgcgtcagtcgcc

SEQ ID NO: 706483 - DNA, 97 bp, Homo sapiens
ccgccgcccccggagctgctggtttcattcgaggtttcgggccgggatacccacccaccatcccagggtctacaacatccacagccggaccgtcacc

SEQ ID NO: 706484 - DNA, 127 bp, Homo sapiens
cccggatgagtacgataccgaagcgggctgtgtgccccttctccacccagagtgcttagatgagtacgaagatgatgaagcagggcagaaagagcggaaacgagaagatgcaattacacaacagaac

SEQ ID NO: 706485 - DNA, 96 bp, Homo sapiens
agcgcatgctgtcccagctggctgctgctgagagcaggcaccgaaagattttgatcttggctcctacaagagaaattgctgtacagatacattctg

SEQ ID NO: 706486 - DNA, 50 bp, Homo sapiens
gggccattgaagacatcatcacagcctcctgacaaggtgatccgggcggg

SEQ ID NO: 706487 - DNA, 100 bp, Homo sapiens
atccctttggtgtggacatctgctgccggaaggggtcccgaagccccctgcaggaactctacaacccaatccagatgatgcagtgtttgaagttgggtgc

SEQ ID NO: 706488 - DNA, 73 bp, Homo sapiens
aggctgagctgcggtgcttgtaagggcatgagccagaaggagagctctaagtctgccatgatgtatattcagg

SEQ ID NO: 706489 - DNA, 100 bp, Homo sapiens
tgactggggatccagagtaggagggagcctttggtgggatgtgaagttcatttccaatccgccctccatggtggcagcggggagcgtggtggccgcagtg

SEQ ID NO: 706490 - DNA, 101 bp, Homo sapiens
caaagacgaccagcgcagcactccggacagcacatacagcgagagcttcaaggacgcagccacagagttagcagacttgaagaaagagaagcagaactgaa

SEQ ID NO: 706491 - DNA, 74 bp, Homo sapiens
cgcgcggctcggagccctggaagcagcagctcaccgaggacggggactcgctgtgggtgagcgtggaggatgct

SEQ ID NO: 706492 - DNA, 75 bp, Homo sapiens
gaagttggagaagaattaattaatgaatatgcttctaagctgggagatgatatggctgacaagattttgaaaaag

SEQ ID NO: 706493 - DNA, 75 bp, Homo sapiens
tcagcagatgaaccggccatcaaatgtagcacatagctttcagcagaggccaaggcagcattgcttgaatttgaa

SEQ ID NO: 706494 - DNA, 83 bp, Homo sapiens
ggaaagctgcccagccaccagcaaccccccagccgcggcgagtcctttgcacatgttggcaacacacgcatccgcatcggcct

SEQ ID NO: 706495 - DNA, 100 bp, Homo sapiens
gagccaagctggagtttacacaggcaaactgtcagaaaagagtagcctgggctgtctggaaatctgagaagctgcacacatacatgtaagagaagcaaaa

SEQ ID NO: 706496 - DNA, 75 bp, Homo sapiens
attgtggagataatcaacagtaaggatgtcaaagttcaggtaatggggccacctgcttgacacattgtgacggaa

SEQ ID NO: 706497 - DNA, 96 bp, Homo sapiens
acctttactgtgcagctcctgaaaggagagacacttgtgaacattcaagtgaagcaaaagcctttcatgattattttgaacaggaaaatcagcgac

SEQ ID NO: 706498 - DNA, 97 bp, Homo sapiens
cgaccgtatccgctagcgcggcctgggatgcgcttgggctccctggcgtggtgcgctgcccgcgcgtcaggaagaacagcagcacagaccagggcag

SEQ ID NO: 706499 - DNA, 75 bp, Homo sapiens
cgcctggacggctcgggcgctggagctcgcaaaggatctccttcatccctctccagaagaggagaagaggaaaca

SEQ ID NO: 706500 - DNA, 140 bp, Homo sapiens
ggcgcgcagcacgcgcagtatgttgggccctaccggctggagaagacgctgggcaaggggcagacagggatgcccgctgtctgtagccccggcatggtgcccgtggccctgcccccggccgccgtgaacgcccagccccg

SEQ ID NO: 706501 - DNA, 100 bp, Homo sapiens
acggttctgacagtatttcatgacagtatatgggacaggttgctcatcaactcccaacctaagtccagaaagacctccactcttcaaacagttcggatag

SEQ ID NO: 706502 - DNA, 98 bp, Homo sapiens
cttggaggctgttggatctctcctgaataagctgtacattggaatgcgtttacagtcattgtaatggaagcaaaatacatgaaggaaaaactgttatt

SEQ ID NO: 706503 - DNA, 101 bp, Homo sapiens
cctcagaacagaacaacaacagctatgaaaccaaaaccccaaatcttcgaatgtcagagaagaaatgtttaacaaatgtggcaattattttggatctatca

SEQ ID NO: 706504 - DNA, 90 bp, Homo sapiens
gccccccgaagcccagggagagcaaggcgcgcggcgactccggagactccatcctctgccaatggcccttcccgggagggctctaggctg

SEQ ID NO: 706505 - DNA, 50 bp, Homo sapiens
gcgcgtgcgcggacatggcctcaaacggtggcagtagagaagagcatcac

SEQ ID NO: 706506 - DNA, 75 bp, Homo sapiens
tgatgccaacagtgtaccagcagggcgttggctatgtgcccatcacagttactccacaggatccgctgaacatag

SEQ ID NO: 706507 - DNA, 100 bp, Homo sapiens
cactgggttcttcaaaggataaactacctacatagaggacatacctttggttaaaggagctgccgtcagactggtgaattttcagctcgtttccttttga

SEQ ID NO: 706508 - DNA, 90 bp, Homo sapiens
ggcagacagcgagtggcgacgatgaccgccgggagagcctgcccacctccccaccctggacgccgggcgcgtcccggccccccagcagcc

SEQ ID NO: 706509 - DNA, 76 bp, Homo sapiens
agaggatcctccctgaacatcatgaggaatctggtcaacttcttggacacttaatgattgttggcaagaaatgtgc

SEQ ID NO: 706510 - DNA, 100 bp, Homo sapiens
acctgaaatcttacttcccccctctctctctgcttggtaccacagatttaatgtgtgccgaccatttccttcagtgctggacaggctgctgtgaagggac

SEQ ID NO: 706511 - DNA, 74 bp, Homo sapiens
agcggatcgcgtggactggaagtcacactgcggcgtacataccgagcatcaaatattaaggcacccggagaaca

SEQ ID NO: 706512 - DNA, 83 bp, Homo sapiens
tcgctgccgcgcgcccaagctcggcggacggcagtgccccagttccagggtctccctccactgctgtagtaacccgggtccgg

SEQ ID NO: 706513 - DNA, 75 bp, Homo sapiens
accccttcgagcaggtggtcgccagctttctccgaaaggtcagcacttatcaccccgcacctgtctctccaggac

SEQ ID NO: 706514 - DNA, 100 bp, Homo sapiens
ggggcctccgcagcgacaacatggaggccgtgaagaccttcaatagcgaggaagaagatttctctccccatgtcagctgtagtctgcctctggcttcggc

SEQ ID NO: 706515 - DNA, 48 bp, Homo sapiens
agacagcgagtggcgacgatgtgaagagcgattatatgttagagatag

SEQ ID NO: 706516 - DNA, 74 bp, Homo sapiens
tcgctgtgagtgcccaaggtttcaaagcattatatgaagaaagggctattgcaagacacgaagtccgagaaatt

SEQ ID NO: 706517 - DNA, 100 bp, Homo sapiens
cggcaaggctacgatgtcagcattcctgtctatagtccactgtcagctgaggtggatcttccagagaaaggaccagggttatacattggctcttcaaaga

SEQ ID NO: 706518 - DNA, 100 bp, Homo sapiens
catgtcctaatatgttgatggcattccagaatatctcagatgagcaggagtccttcaataatgttaaacagtggctgcaggaaatagatcgttatgccag

SEQ ID NO: 706519 - DNA, 100 bp, Homo sapiens
cacgtgatgggacttgtcgttgggatcctcggctgcttagatctcgggtggagccagccatcctgagacgtccgtacagcccgtactggtggagtgtcag

SEQ ID NO: 706520 - DNA, 100 bp, Homo sapiens
gaattagaagatgatgagcagtttgtttctctgtatggcacagaagaatatttggcacaccttgggcccaccccacctccacatagccttaattacaaat

SEQ ID NO: 706521 - DNA, 75 bp, Homo sapiens
cgctgagcgatttcttcgaggtggagtcggagctgggacggtgcttttcagtgggaagaattggaagaagatatc

SEQ ID NO: 706522 - DNA, 100 bp, Homo sapiens
ggtgctggtgggcagttcagctggaggcgctggggagcaagactatgaggacctgaaggagaagaaggagaaggtggaggagaaggcaagccggaaagag

SEQ ID NO: 706523 - DNA, 82 bp, Homo sapiens
accagcaagatcggcaggcgagattgcctgacccaggcctgctcggccctcacaggacttgcagacctactggaagagaacc

SEQ ID NO: 706524 - DNA, 100 bp, Homo sapiens
tcttggcatttggctttgcctttctggacacagaagtatttgtgacaggtggagccagggcgtgtgatgggagcacggggcctgagctgcagcataagtt

SEQ ID NO: 706525 - DNA, 75 bp, Homo sapiens
ctaatggaagctttaagatactgtaaggaagtgtttggattgtgagctatttcagaactgttctcaggactcatt

SEQ ID NO: 706526 - DNA, 100 bp, Homo sapiens
gagggacataccactatatcagataagcttgacattacagccaagatggtgctgtcccagagacaacgagatgaactgaaaggcttgacgaattttctaa

SEQ ID NO: 706527 - DNA, 99 bp, Homo sapiens
ggagtgttcccagcttgcaaactccagctttgcctgtgagaggaacaagcgtccctgatccagaaggtgtgccggtggtggtgtgcacattgagccccg

SEQ ID NO: 706528 - DNA, 51 bp, Homo sapiens
tgaagatgaaaatttccattacaaggatctggaaatagtatattcctattt

SEQ ID NO: 706529 - DNA, 99 bp, Homo sapiens
ccctggtcatgctccaggaggatgagctgctaagcaagatgagatttgccctcgttcctaaactgtccttgaatgggcaagagggcacatgaagtacgg

SEQ ID NO: 706530 - DNA, 74 bp, Homo sapiens
actatgagatggcatggaaatatagcaatcggacaaatccggcagtaggtctattctggataagcaggttttgt

SEQ ID NO: 706531 - DNA, 100 bp, Homo sapiens
gcgggtcggagtctgggggttcgcgcccgccgacccgcgccctgctccctctcagcacctgggcggacgtttgtgaagtttgccaacatcgaggaggaca

SEQ ID NO: 706532 - DNA, 145 bp, Homo sapiens
ctttaaaaatcgccaaaaattacttggagcaaagggcagtcggcggagcttcgccaaggctggcgcagtcgtgattctaccagaaaggaatgaagaacagaaccttcaggaattgagtcacaatgcagacaaatatcaaatggga

SEQ ID NO: 706533 - DNA, 75 bp, Homo sapiens
agacgcagccgtagacaccagctccgaaatcaccaccaaggtccaaccgtgactgccagatcgaccagcaccacc

SEQ ID NO: 706534 - DNA, 100 bp, Homo sapiens
aacctcgtgagaaaagctttacgtctcattcaagaaaccgaagtgatttccagaggatttacactgtacttgagctggatacactggtggataatttatc

SEQ ID NO: 706535 - DNA, 98 bp, Homo sapiens
tgatgtatgaacataatcttcagagaacagcctgcaatatgacctatggatcatttggtggtgtaaaagagttcagatcattcaggatcaacaactcc

SEQ ID NO: 706536 - DNA, 100 bp, Homo sapiens
gccgggtccagggactgcaacccagcgagggacgcgggcagccatggccgaagcggcgcctgcccgggaggcaacgcacgggccacaggcatgttcctgc

SEQ ID NO: 706537 - DNA, 50 bp, Homo sapiens
cggaaagcagcttcagcagcactccaggtggctgtgaaaaacaatatcga

SEQ ID NO: 706538 - DNA, 75 bp, Homo sapiens
atgctgccaccatccccagctcagccatgcaggccccaacagatttttgcagctcaagtggcagtcctcctttcc

SEQ ID NO: 706539 - DNA, 98 bp, Homo sapiens
cggcctttcctgggctcctcctgggtggtatacgggaccaattaccgcaaagccatcttcatcttcatcaggaaagaccacagcaagattctttcatt

SEQ ID NO: 706540 - DNA, 90 bp, Homo sapiens
accgcgccggcgctcccttgtcacgcctcgggaagcgcgcacctgccaagcaggcttttatcttgagaacatggtgtctggagttaaagg

SEQ ID NO: 706541 - DNA, 82 bp, Homo sapiens
cttgtgaacattcaagtgaagcaaaagcctttcatgattatgctactgcagcactggggtgtcagttgttggtccgacccag

SEQ ID NO: 706542 - DNA, 75 bp, Homo sapiens
ggcaaattggtcggcgtggtccctggtccagtcggagagccagggcccctcagcagaaggcagaacagaaccgag

SEQ ID NO: 706543 - DNA, 100 bp, Homo sapiens
cggcgccgctctccgagctcgatccgctgctcgcacgggagccagctgggtgaccccacgcgggaccagtgcttcggggaccgcttcagccgcctgctgc

SEQ ID NO: 706544 - DNA, 74 bp, Homo sapiens
agcaagaccatcatgctgcgcggccttcccatcaccatcacagagagcgatcgccacgatcatgtctctcgaag

SEQ ID NO: 706545 - DNA, 83 bp, Homo sapiens
ccgaaatccagactctttttaagaggcttcgcgcagttccaaccaacaaggaacaagatcactcaaggtgaaggataatctac

SEQ ID NO: 706546 - DNA, 75 bp, Homo sapiens
aactgagagagatgcttaaaaatcaccagttactttaatgagtctgaaggggcgtctcgattacctgagctctct

SEQ ID NO: 706547 - DNA, 100 bp, Homo sapiens
gcagagaaggcgaggaaagccgaagagatgaggcggcagcagaagctaaagcaggccaatggggccctcgtggaggtaaagtgcctgaatttcaggaaac

SEQ ID NO: 706548 - DNA, 81 bp, Homo sapiens
cgcctgcctccgccggctacagcgggaagagcgagttgcatgctgagaatttgaaaaatgaagatgatgtagacactggac

SEQ ID NO: 706549 - DNA, 100 bp, Homo sapiens
ttcccggaggacggctccgtgtgcacgctgcccactgaggaaacggagaagtgcacggtcaacgaggagtgcttgagatgaacccagtacctcagatgga

SEQ ID NO: 706550 - DNA, 100 bp, Homo sapiens
caggagaccgtcgttgccttgtatttccagagaacaggttatcaatactctggctgaccatcatcatcgtgggactgactttggtggaagtccttggtta

SEQ ID NO: 706551 - DNA, 101 bp, Homo sapiens
gcagttcgaagagctttataaaactgaagcaccaacttgggagacacatggaaatctcatggtgcagcggaactgctgcctgacgctctgcaacttcagca

SEQ ID NO: 706552 - DNA, 82 bp, Homo sapiens
gaatgggccctattgtgctcacacattcagaacctgttacccaaggaattccctaaagtggttggcacttaccatggttccc

SEQ ID NO: 706553 - DNA, 100 bp, Homo sapiens
tagagagtgcttccccttgccgagcactggggccatgtttatgagtggactaagtgaaagcaaacaaacccatgtacacctgaggaatgtcgatgctgcc

SEQ ID NO: 706554 - DNA, 83 bp, Homo sapiens
agagactgctgagcccgtccgtccgccgccaccacccactccggacacaggtgtccttaagtttgctcgcttggtcaagtcct

SEQ ID NO: 706555 - DNA, 50 bp, Homo sapiens
ccaagtagcctgtataccagcacggccagtcataccctaatgatcccagc

SEQ ID NO: 706556 - DNA, 75 bp, Homo sapiens
ccgggagctgggcggccatttaccagggcaacaggtttgtctatgctggctctaactcgggcgtggtccaggccc

SEQ ID NO: 706557 - DNA, 100 bp, Homo sapiens
ccggaagctggttttcaggccacaaatgctttcacaggttgaattgaccaaagcaatggtgatggagaagcctagtcccctgctggtcgggcgggaattt

SEQ ID NO: 706558 - DNA, 100 bp, Homo sapiens
atctatgatgctgatggtgatggagattttgatgtggatgatgccaaagttttattaggtttccctaggacttctgcatgcccatgccacacatatcctg

SEQ ID NO: 706559 - DNA, 100 bp, Homo sapiens
cctctgggcatcgcagccttctacttgtcccatgagaagcctccccagctttctgaggatgatatctggctaaaaagcgagggagacaactatagtgcca

SEQ ID NO: 706560 - DNA, 100 bp, Homo sapiens
ccacgggaaagcttcatttgccacctaccagcattccacctctcctggccccttggatcagccccttctcagagaaagggcattgatgacctgactgggg

SEQ ID NO: 706561 - DNA, 100 bp, Homo sapiens
gagctattagagattgtgaagaagaatttcgatctccgccctggggtcattgtcaggtccacgctgcttttatgagctgtaacactcaccgcgaagatct

SEQ ID NO: 706562 - DNA, 75 bp, Homo sapiens
ctcatccattttggatacacttggggatgatgacttcttcaacataattgctgtaaaagtgcagttttaaagtgt

SEQ ID NO: 706563 - DNA, 100 bp, Homo sapiens
ggctgtcaatgcacactccaacatattgaaagccgccatggacaattctgaggatgctgaaaacgccattcaacagatgggtggccagtggcttggtgga

SEQ ID NO: 706564 - DNA, 53 bp, Homo sapiens
ccaggatggtctcaatctcctgaccttgtgatctgcccgcctctgcctcccaa

SEQ ID NO: 706565 - DNA, 100 bp, Homo sapiens
ggccaaggggcttgctgccacccatcaccacccccctctgcatcggtcggctcaggacttacggaaacaggaagaagaacgattatccattcaaaatttt

SEQ ID NO: 706566 - DNA, 100 bp, Homo sapiens
ggagaattacgggaatgtgttctcactgggtaaatgggcttgatactgtgagagtgcctatgtctgtcgtgaactttgagaagcccaagaccaaaagata

SEQ ID NO: 706567 - DNA, 100 bp, Homo sapiens
cagcattaggaaggcttcattcagctcagcaccaccttgggcgtccactcccaggtggtccaggtgaacgactccatgtatggcttcatcggcacagacg

SEQ ID NO: 706568 - DNA, 74 bp, Homo sapiens
ctaaagaagcgctttgcttacctgtccggtacctgcaccagtcaggggccctgaccatggaggccctggaggac

SEQ ID NO: 706569 - DNA, 97 bp, Homo sapiens
cgccggcggggttcggcctgagctggattgacatagcccttggcgggtcattgctgtggtcatggacctcttcactgatggtgatatctttcaagac

SEQ ID NO: 706570 - DNA, 96 bp, Homo sapiens
acaagcgtcacttgacaagcctatagaatcggacacagcattgttggttttgccatgtactattttacctatgacccgtggattggcaagttattg

SEQ ID NO: 706571 - DNA, 100 bp, Homo sapiens
ggagacgataatcctgtctgtcgactgccaggaaaagaaagctgcattggaaaaggagcgagaagaacggatagctgaagctgaaattgaaaacttaaca

SEQ ID NO: 706572 - DNA, 75 bp, Homo sapiens
tgtcaaaccgcaggcatttcaatcacattatgcacttttccagccattaactccaggctctcgagaatttgaaga

SEQ ID NO: 706573 - DNA, 95 bp, Homo sapiens
ttcctgtacagcctgcagaactgtgctcctgacctctgataaagctgcagccaatttctcagatcgttctttgctgaagaacttgggacattggc

SEQ ID NO: 706574 - DNA, 100 bp, Homo sapiens
tcattttgcggtgaaaacatctgttggagccagcagacctgactggagagaactggatgatgagctcatgaaagaagctgtgctgtacgtggattcccag

SEQ ID NO: 706575 - DNA, 75 bp, Homo sapiens
tttgtgaaaggccaatttcatgaatttcaagagagtaccattggggacagaaagaatttactttcaggttttctt

SEQ ID NO: 706576 - DNA, 100 bp, Homo sapiens
ttatttcctgcatttcctcctttcgtctttacaaggtagccgtttggcgtcgtgaggtgcatggaggactgcaacagaggagtgggggactgaagattgg

SEQ ID NO: 706577 - DNA, 98 bp, Homo sapiens
agatctcccatcactaggagttttgctcgagaggaggcttgtggatcagaatctgaacaaaattgggaaagatgaaatgcttcaaatgattagacatg

SEQ ID NO: 706578 - DNA, 76 bp, Homo sapiens
accaagaaattactgtctcaagtgatacgtgccaccatggcaactgcaccatacaactactcttacatctttaaat

SEQ ID NO: 706579 - DNA, 75 bp, Homo sapiens
gtcccaggactgtgcaggggactctgtcacaattttcggacaagcaaacaccacgctgaagcgatggctcttgga

SEQ ID NO: 706580 - DNA, 75 bp, Homo sapiens
tttgtaacaaatcggaaaagaagaccatctcaccagagcatgtcatacaagtcctgagggaagttacactgatga

SEQ ID NO: 706581 - DNA, 100 bp, Homo sapiens
gggaagactcatcggagcgtgtggatttgagccgccgcattttttaaccctagatctcggacacactgaataataattctctgggcaaaaagcacagttg

SEQ ID NO: 706582 - DNA, 98 bp, Homo sapiens
gccgaggaatgaagagaggcggccgggccccgcgctccgccccggcctagggccttgccccgggagcccgcgaggtcttggctgaacgtttaccattg

SEQ ID NO: 706583 - DNA, 100 bp, Homo sapiens
ccggaagtgacgcagagaagtttccgggactggggccttcagaaggaagaagttgttttgcttacacatggagatagtgtagacaaagtagctgatggat

SEQ ID NO: 706584 - DNA, 83 bp, Homo sapiens
tctcatctttgaactactgccggagcttctgccaggattttttatcaagcagaaatgcatcgaacaacgagaatcaagatcac

SEQ ID NO: 706585 - DNA, 100 bp, Homo sapiens
aacagttcaacagttaactgcagctcaacagcagcaatatgcattagcagcagctcagcagccacatatagtccctacagatgaagaagatgaaatggag

SEQ ID NO: 706586 - DNA, 100 bp, Homo sapiens
ctttgatttcctggcctttaaaaatgacatcagtttctggaagaagaagaagagcatgatcggcatgtccaccaaggtctcctctgagcctccggcctcc

SEQ ID NO: 706587 - DNA, 80 bp, Homo sapiens
gggaaccgcgggctctgccaggagagaagactgcagcagccgctcttctaaaacattcaaaccaaagaagaatatccctg

SEQ ID NO: 706588 - DNA, 100 bp, Homo sapiens
catgaagggggacatgaacctcagaaatcatttctaccagttcggagagatccggacgatcactgttgtgcagagacagcagtgtgctttcatccagttt

SEQ ID NO: 706589 - DNA, 75 bp, Homo sapiens
gcagaaacttcataaatatatgcagattcctgctccaaaacgaggagaaatagtaagacagattggcgatgcctt

SEQ ID NO: 706590 - DNA, 100 bp, Homo sapiens
caaaaagaaccctcaattgatgaaagactgaaagagcatattccttttgtggaactattgaatacatggcaccagatattgtcagagggggagattcagg

SEQ ID NO: 706591 - DNA, 75 bp, Homo sapiens
aaacatctcactgcccatcatggaagcaggcaatactgaacactgcgcagcttgcagaggtctcctggcagccct

SEQ ID NO: 706592 - DNA, 135 bp, Homo sapiens
cgatctcagctcactgcaacctccacctcccaggttcaagtgatcctgctgcctcagcctcttgaataacgagctgcacggccaagagagtcacaattcaggcaacaggagcgacgggccaggaaagaacaccac

SEQ ID NO: 706593 - DNA, 50 bp, Homo sapiens
gacgctgccagcatcgccgccgccaggcatcaagcatgatggaaccatgt

SEQ ID NO: 706594 - DNA, 51 bp, Homo sapiens
cgccgctgctgaagagtttccaaggagaggacaaagcagttccaattccag

SEQ ID NO: 706595 - DNA, 100 bp, Homo sapiens
ggttcagcagtttcttcatcaaaggtactagcaaaggccagacgtcttactcaacaacttccctgccaccacctccaccatcccatccggccagccaacc

SEQ ID NO: 706596 - DNA, 82 bp, Homo sapiens
gggcgagaacgtccactgcgggccggcgaaagctggcctgtttaaagaagaaaacccgtatgctagatttgaaaacaactaa

SEQ ID NO: 706597 - DNA, 75 bp, Homo sapiens
taactacagcgagctgcaggactctaatccagacaatgcagatcttcgtgaagactctgactggtaagaccatca

SEQ ID NO: 706598 - DNA, 74 bp, Homo sapiens
ctcttctggtgtagaaaagattatcaaggccagcattgaaacaggggaccgtgtctggaggatgcctctcttcg

SEQ ID NO: 706599 - DNA, 96 bp, Homo sapiens
ttcacatcgtcgttcacatgggttttttggaccatatacaaacaacactctttttgaaactgatgaacgctaccgacatttaggattctctgttga

SEQ ID NO: 706600 - DNA, 73 bp, Homo sapiens
tgctcccggagagatacggctatgtcgatcgaaatcgaatcttcggaacgaggagaagaccttttcatgtgta

SEQ ID NO: 706601 - DNA, 98 bp, Homo sapiens
atgttttgccacgtggatgtgaagatttcctctaaaagatcgccaaactgaggcagcaactacaacgcagtaaacagagtagtcgtcacagtaaggag

SEQ ID NO: 706602 - DNA, 75 bp, Homo sapiens
ggtgccgcagctgcgatggccgtggccgtggggagaccgtctagtaatcaagtcagaggattatatgacttttat

SEQ ID NO: 706603 - DNA, 76 bp, Homo sapiens
gagtacatgccctttatgaagatattcttgagggttataccttattggtgtggacgttgtctaaatttcggtagcc

SEQ ID NO: 706604 - DNA, 101 bp, Homo sapiens
tgctgcgctacttcctggagcacctgcgtgtcagcgcctgggccgaggccactggtgcatatgttcccgggagggataagccagacctgccaacctggaag

SEQ ID NO: 706605 - DNA, 90 bp, Homo sapiens
ctgaactaggatgtcccgacatgaaggtagtaaacctattgatggcaattttgctgactgtggaagtgactcatccaaactccatgccag

SEQ ID NO: 706606 - DNA, 100 bp, Homo sapiens
actccctaccgcagatccccaggccccctccacccagtcggctagccctcgcctctgccatccggttctgcacttttaaaagaaaagcaaaggcatcgat

SEQ ID NO: 706607 - DNA, 54 bp, Homo sapiens
ctttgaaagccttgatcaggggaaagatggaatcttgctctgttgcccaggctg

SEQ ID NO: 706608 - DNA, 83 bp, Homo sapiens
tgggttcgcggcgcgccctcctgctgcctccccggagctcccgggccagtaggtttggtgcacctcgatttggaggaagtagg

SEQ ID NO: 706609 - DNA, 98 bp, Homo sapiens
tgtgattccctaccgctgcttagattctgaagggagtggtaatggaagtgaagatgcttcaaaggacagtggagaaggttcctgtagtgattctgaag

SEQ ID NO: 706610 - DNA, 100 bp, Homo sapiens
gcaaattttactgttgttgtaatgatgccagaagcaaagaggctactgataaatctttacaagcttgtaaaatctcaggaaggaagacttcaagaagtca

SEQ ID NO: 706611 - DNA, 75 bp, Homo sapiens
cttcgagtcctttattgtggagtctggatgtggatagtgaagctaagaaactattgggtttaggacagaaacatc

SEQ ID NO: 706612 - DNA, 90 bp, Homo sapiens
cctctccgccccccaggaggggcgagagggagccgcagctgatgtcagggggattcccgaagtcttccgttttctgagaatgtgagtgct

SEQ ID NO: 706613 - DNA, 83 bp, Homo sapiens
gcgagcctggaggattgtcactccaacctcttttcgctgctgtgccctccccgagaggattctgtcctttcgtggacgcttct

SEQ ID NO: 706614 - DNA, 75 bp, Homo sapiens
tggccgctcacccgtggaaagtacaggtcctgacagctgtttcaatagtcatgggcattcccacagtgaagagag

SEQ ID NO: 706615 - DNA, 130 bp, Homo sapiens
aatgggctgcggttaagcgtttgccctggtgtcagggccaactgcttcgaagcgccagactttcggagactgtggccaggcccagacatgtccgtccttgtaagttaaaagcttccatgggagccttcct

SEQ ID NO: 706616 - DNA, 100 bp, Homo sapiens
gggaggttttacataaatggagtcctaaacaaataggagaacaccttctactgaaatcagtatgccaagatggaaggaagcctcatacagtgagattaat

SEQ ID NO: 706617 - DNA, 90 bp, Homo sapiens
tgttgtcaaggtggcctaccaggaggccaggggtgtcgccatgaattcagatcaggaaggaggtggaaagaaaaagaagaaaaagaagga

SEQ ID NO: 706618 - DNA, 50 bp, Homo sapiens
ggaagcccggctccgctcagaaaatcaaccagactattatgaagtggttt

SEQ ID NO: 706619 - DNA, 51 bp, Homo sapiens
caacttaagaaccagattcgaattagtgacaagagctggggttaggatccg

SEQ ID NO: 706620 - DNA, 75 bp, Homo sapiens
agaaaacctcaggaaattctacaagggcgtcatggtgggcatgggccagaaggactcctacgtgggcgacgaggc

SEQ ID NO: 706621 - DNA, 100 bp, Homo sapiens
tgttggccagtcaagttcctccactgagctcgctgcgtataaggaggaagcaaacaccattgctaagttcctctgtgacgagggtgcaggtatctctggg

SEQ ID NO: 706622 - DNA, 98 bp, Homo sapiens
cttcattgttccagcttctcgcttcaagctcctgaagattccttatggcagaaagtatgacaaggcatggctcctgagcatgattcagagcaagtgca

SEQ ID NO: 706623 - DNA, 100 bp, Homo sapiens
tcggagcaggagtcactgctgctgcttatgtctcccagcatggccttcagggtgcacagccgcaacggcaaggtctggcaccttccacgctctgtagttt

SEQ ID NO: 706624 - DNA, 75 bp, Homo sapiens
ggtttttcagctcaaaaaccacagctgcacattctttaggatgaagtggcacacactctaactgaaagcagagta

SEQ ID NO: 706625 - DNA, 83 bp, Homo sapiens
ggcgggtggaggttcgagcgctgttctcgctccggagccgctgcacatttcgaagaagctcattcacacagaagacccattta

SEQ ID NO: 706626 - DNA, 98 bp, Homo sapiens
gtgctgccctttttctaccacggggaaatggctcatccacaccaagaatcagccacagacggaacaagcatgcaggactgggctaatgctaatgtcag

SEQ ID NO: 706627 - DNA, 100 bp, Homo sapiens
aatcgacagggacaccgccttcgccattgcctcacagcccaaggagcgtcctcggtccgcagtcctcctggtggatgaaaccgctaccaccccaatattt

SEQ ID NO: 706628 - DNA, 133 bp, Homo sapiens
cttggctcttcggtacgtgaagaacgacttcaagagtatcctgcctacggtgggctagacttgaagcccaccaatatattgcttggagatgaggggcagccagttttaatggacttgggttccatgaatcaag

SEQ ID NO: 706629 - DNA, 99 bp, Homo sapiens
atgagtcatgtggcagtggaaaatgcgctcgggctggaccagcaggacctcagcagccatgtcgaagccccatagtgaagccgggactgccttcattca

SEQ ID NO: 706630 - DNA, 75 bp, Homo sapiens
aaatacatttgtacacgatcccaagcttcgtcagcaattgaagtggttgatatgtgaactctgcagtttatataa

SEQ ID NO: 706631 - DNA, 97 bp, Homo sapiens
tgcatctctgcaaactcaacttgctgggccggtgcaactattcgcagtccgagcgccatatccagaagacccagcagtttataaaccactctcccag

SEQ ID NO: 706632 - DNA, 107 bp, Homo sapiens
gtctacaagactctcttcgctctttgcatcttaactgcaggtagctacagcaagctgggtagcaggcagatccaaaggatatcatgaagtttccagggcctttggaa

SEQ ID NO: 706633 - DNA, 83 bp, Homo sapiens
ctctgcgctcctgcatctgcctccccatgtatcatgaactgatcactaaatatgggaagttggagcctttggcagaagtggac

SEQ ID NO: 706634 - DNA, 90 bp, Homo sapiens
gaattgagctgaagcagggctacacatttttcatcccttccgaagacgtgaacgatcaagagagagggaccatagtagatcacgagaaaa

SEQ ID NO: 706635 - DNA, 98 bp, Homo sapiens
agatgaagaacctgagtcaggacgtaaatggaaccctgatgccagaccagtttgaccaggcggttgtgctgaaccagctgcggtactcagggatgctg

SEQ ID NO: 706636 - DNA, 97 bp, Homo sapiens
cgagaaccgtcagtttgagccagatgcaatgtctgatcgtcaagagagtgctcttatagagctaatggtttgtacaattcgtcaagctgctgaggca

SEQ ID NO: 706637 - DNA, 100 bp, Homo sapiens
cctgtcccagcccctggaaaggggcaggaacgacaaactcaaagtccaggaaaacagttcctcctgaggatttcagagaagagctggacttcctggctga

SEQ ID NO: 706638 - DNA, 100 bp, Homo sapiens
ccatgttagataaacttgtggatggacttgctacctcttgggtgaactctagcaattacaaggatttgaatttgttgaaatgagcagtcgtaaatcaaag

SEQ ID NO: 706639 - DNA, 101 bp, Homo sapiens
ggcaccttttgctccttcgatactcccgatgattccatacggaataagctcattttaattgccagaaacaaaggagctctggaagatcatcgcagaaccag

SEQ ID NO: 706640 - DNA, 90 bp, Homo sapiens
gccatgatggaagttcatttaagtcaccagacacacaattctgtggtgttcttggtcacacatttatggagtttctgaagggcagtggag

SEQ ID NO: 706641 - DNA, 50 bp, Homo sapiens
ccagaagctatccacaacttcgcagagatctccaagaaggagaagcttct

SEQ ID NO: 706642 - DNA, 83 bp, Homo sapiens
ccggcgtgttcatgcccccggggcttctgggaacttggcagacgcagcttagagagactcaccagcgagcgtcattgttgtct

SEQ ID NO: 706643 - DNA, 75 bp, Homo sapiens
ttagaaaattactttcactgtgtcttcagaaagatccttccaaaagatttgtagccaaaccgtgcgccatagccc

SEQ ID NO: 706644 - DNA, 100 bp, Homo sapiens
gttgcctatactttgccgacacattccttcgagatggtcaccaagctccagcagctctcaagccatgcggtcccctttgccacacccagcgtggtgccag

SEQ ID NO: 706645 - DNA, 100 bp, Homo sapiens
ctcttggcatttggctttgcctttctggacacagaagtatttgtgacagtgggccccatgctgattgagtttaacatgcctgtggacctggagctcgtgg

SEQ ID NO: 706646 - DNA, 75 bp, Homo sapiens
gcgaccccacagtgcagcgctccgtgtttgcatcggtggacaaggtgccagattgctcatttagaaagtggatgt

SEQ ID NO: 706647 - DNA, 106 bp, Homo sapiens
agagagtcagcctctggttcagactgcagtaaccattatggctgcagcttcgattgccaatattgtaaaaagttctcttggtccagttggcttggataaaatgttg

SEQ ID NO: 706648 - DNA, 81 bp, Homo sapiens
cgcaaacccaaagatccccgttcctggagattctgattgaggaagctcttcgtgggcggtcttgactggagcacgacccaa

SEQ ID NO: 706649 - DNA, 88 bp, Homo sapiens
atccggaaacatgtggccctacatcaggaatttcatggcaaggggttgttacaagttgagttgaaaacaagaaaaacttgcttttggc

SEQ ID NO: 706650 - DNA, 100 bp, Homo sapiens
cctggagttaaggaacagatccccggaggaggctcttgcagccaatgccggaacaggatttgctgttgctgagcctcaaatcgcaatgttttgtgggaag

SEQ ID NO: 706651 - DNA, 75 bp, Homo sapiens
ttatggacaggtgtatgcctgaagcatttaaaaagaccgctggccggacccccaagctagcccgccaggcctcca

SEQ ID NO: 706652 - DNA, 100 bp, Homo sapiens
tgggtcttccggtaggagctgtaatcaattgtgctgacaacacagctggctgcaccttcgaggaggcaagtgacccagcagtgccctgcgagtacagcca

SEQ ID NO: 706653 - DNA, 90 bp, Homo sapiens
accttggacttctcagcctccagaatgcccgagcagttcagtgatgaagtggaaccagcaacacctgaagaaggggaaccagcaactcaa

SEQ ID NO: 706654 - DNA, 80 bp, Homo sapiens
cagagctgaggactgcctgtttgcaggaccaaaatgtctttgactccaagaagaaagtgaaattaaccaatgcggaagga

SEQ ID NO: 706655 - DNA, 75 bp, Homo sapiens
cgctgccccagggctgcggggacggggaagctgctcgctgatctggccaggcgcctgggcctccactatgtggtc

SEQ ID NO: 706656 - DNA, 100 bp, Homo sapiens
ggcgcggagaagctgcatcccagaggagcgcgtccaggagcggacccgggccaattcctgtccccccagcagcatggcatcgtgtgctgaaccctctgag

SEQ ID NO: 706657 - DNA, 76 bp, Homo sapiens
ggaaaacaacttcgagggcagatggctgcttcaacccccaactccactgctggtgcagccatgaactccttgacct

SEQ ID NO: 706658 - DNA, 75 bp, Homo sapiens
cttatatcgccagtccagcagctaaggatattttgtgcagagcttgtggacaaatgtataggatcaagaattcac

SEQ ID NO: 706659 - DNA, 82 bp, Homo sapiens
cgggcggtgagcgcccatatgggggttctggagagcggggtgtggggctgcaagatcaaggccctgcgggccaagacaaaca

SEQ ID NO: 706660 - DNA, 46 bp, Homo sapiens
ctgaggcttatttgggaaagaaggattatgaagaagctgtgctctt

SEQ ID NO: 706661 - DNA, 90 bp, Homo sapiens
cccctctgctgcctcccgcccccggctgtactatctgcgaaatggagaacgtatttcagtgtcggcagcctccaagctgctgtccaacat

SEQ ID NO: 706662 - DNA, 50 bp, Homo sapiens
agatggtttacatctcgaacggctccctggggaagggaatgcagggttgc

SEQ ID NO: 706663 - DNA, 89 bp, Homo sapiens
gcggagctggagctggagctctcggagggccaccaccacctatcatgacagatggtgaagatgcggattacactcattttacaaaccag

SEQ ID NO: 706664 - DNA, 100 bp, Homo sapiens
tagtgaagaattggcttatggatgtacaggggttcagactgctattgaaggaaattctttgggggattcttacagaagcagagattgatgctcaccttgt

SEQ ID NO: 706665 - DNA, 100 bp, Homo sapiens
actattttggattagtcaatgcaacatttcatacaccatttagtcacctaggccaaagtccggaaggatgctcctcttacacttttccgaagataatgag

SEQ ID NO: 706666 - DNA, 95 bp, Homo sapiens
cgagcacgcgcgagagcggttgcaggacgactcggtggaaacagtcacgtccatagaacaggcatctccttggaaacaatgccatctttgaatgt

SEQ ID NO: 706667 - DNA, 88 bp, Homo sapiens
ctatctccctaccaggagtttctagcactgaagctctacattaatcatactcctccaccactgtccaagagtaaggagagagaaatgg

SEQ ID NO: 706668 - DNA, 144 bp, Homo sapiens
ccgaccttggcaccgcgtttgtcaagttttctactcttacaaaggaactgtccacactgctgaaaaatctggatggaacaaaattcatctgtattggggctctgtattctgaacttctggctgtcagcagtaaaggagaacttt

SEQ ID NO: 706669 - DNA, 80 bp, Homo sapiens
gttcacgcacgggatccagagcgccgcgcacttcgtcatgttcttcgcgccctggccaggtcagagcagcccaccatggg

SEQ ID NO: 706670 - DNA, 100 bp, Homo sapiens
aatcaagttccaaatgaagaaggtggttatcactaggctaaaactggacaaagaccgcaaaaagatcctcgaacggaaagccaaatctcgccaagtagga

SEQ ID NO: 706671 - DNA, 100 bp, Homo sapiens
cgaggcccctatggcagatttgaaaattcacccttgtagagtcattcctgcctttgagcggactcccttttaagccaggaaccatgattgaatggggcaa

SEQ ID NO: 706672 - DNA, 82 bp, Homo sapiens
ggctcagcccacaactcttgtcctaccacctcacccagcagagctccccctgacagaccgcgaggtagagatcctaaacaag

SEQ ID NO: 706673 - DNA, 98 bp, Homo sapiens
cgctcgctgggagagaggtacctctccttttccctctccctttccctaagcctctggaattgctttggcactcgttagatgaatggctagttttaata

SEQ ID NO: 706674 - DNA, 86 bp, Homo sapiens
aaataattgagattcctgatgaagatgatgatgtcctcagtattgattcaggaagccttgtgtgttgccaaagtgcaggtggaaat

SEQ ID NO: 706675 - DNA, 101 bp, Homo sapiens
tagctgaaaacatcatcgttttgaagagttctgcgttttgccagtcacctctcaactgtgtgccaaaggaactaccactgctggaatgaagcatggatgac

SEQ ID NO: 706676 - DNA, 100 bp, Homo sapiens
cagatgggagcttctctcaacctgcagccaccacatgagttagctggccgacttctgtgaggttcccagtgaggtcccgcaggctcccgatggcgagatt

SEQ ID NO: 706677 - DNA, 100 bp, Homo sapiens
ctgaccctgggcgccgcgccgcacgagcaccagcctagagccagccggcacagtcttcactaccgtagaagaccttggctccaagatactcctcacctgc

SEQ ID NO: 706678 - DNA, 90 bp, Homo sapiens
aaaggactcttctaaaaggatatgtgttgctaatacccatctttactggcatcctaaaggagaaccaggtgcatcagcgcattgcggagc

SEQ ID NO: 706679 - DNA, 83 bp, Homo sapiens
cctggcggtggacgagcaggaagcggctgtcaagtcgtccagttacaacacagggatcacaacaaacacaaccgccacagaag

SEQ ID NO: 706680 - DNA, 100 bp, Homo sapiens
ttcagttgcaaaaagaaactggagccaccatcaagctgtctaagtccaaagatttttacccagctgaagaaaaggtgactggtctcatgagccctgaaga

SEQ ID NO: 706681 - DNA, 96 bp, Homo sapiens
ccattgacgccatgtcgggttattcgagtgaccgagaccgcggccgggaccgagggagcggtggtgccccccccgggcacggggccatgtacaacg

SEQ ID NO: 706682 - DNA, 90 bp, Homo sapiens
tgctggctggggaaatctggtgtatgttgtcaactatccaaaaggaattggattcaagtacgtggctctgggagacctcatcatcctcat

SEQ ID NO: 706683 - DNA, 98 bp, Homo sapiens
cgcgccggcagcagccatgagcggcggcgtgtacgggggagtattcctgtgcacacaatatttgacagctgccctgaagggaatggcatcatggccat

SEQ ID NO: 706684 - DNA, 76 bp, Homo sapiens
ccagcacaagtgctacagcgatgcagccgccaagaagcagcttcgagagctgtgcccaggagtgaacaaccagccc

SEQ ID NO: 706685 - DNA, 75 bp, Homo sapiens
cgacaagggtgttcccgaactagagtgggtttggatcctgccgggcccatgtttgaaggggccgacatccacaag

SEQ ID NO: 706686 - DNA, 74 bp, Homo sapiens
gctgtacttctatatctacaagggggtccgcaagggtttgaacataatctttcatgtagctttggctctcctaa

SEQ ID NO: 706687 - DNA, 128 bp, Homo sapiens
ctttgccgccgccaagctcctggccctggccctgatcatcctgctgggcttcgtccagatcgggaaggtttgaaggccggaagtactgcgaacacgacttccaaatgctgtttgctccgtgctgtgga

SEQ ID NO: 706688 - DNA, 90 bp, Homo sapiens
cgagcaggaggcgccatcatgagatgcggtttcaccatgttggccaggctgatctcgaacttctgatctcaagtgatccgcccgcctcag

SEQ ID NO: 706689 - DNA, 75 bp, Homo sapiens
tggtattgtggaaattcccagaggactttggagaccagggccccgtggttatgaatgtgcttcagtttcataatg

SEQ ID NO: 706690 - DNA, 75 bp, Homo sapiens
gccctgttccaggaggacagctacaagaaacacctgaagcatcactgtaacaaatacttcgttgaaagttgccac

SEQ ID NO: 706691 - DNA, 104 bp, Homo sapiens
cgggagcgccgagcgtcgccgccgccgccgccatgaacaactcgggcgccgacgagatcggatgtgaagttcatttccaatccgccctccatggtggcagcggg

SEQ ID NO: 706692 - DNA, 90 bp, Homo sapiens
gcggctccacctggggattcctgaggccgtgtttgtgagttggtgttgaccccgatcaagacccaccacccaacaacgacagctttcaag

SEQ ID NO: 706693 - DNA, 78 bp, Homo sapiens
acaaactggccaagaagggccttactccttcacagatcggatgaccagtgtcccagtgaaggaacgagtgaaggtgtc

SEQ ID NO: 706694 - DNA, 104 bp, Homo sapiens
agaaagaagtctcatcttcctttgaccacgttatcaaggaggcagcctggcatcctcgctacaacctcattgttgtgggccgatacccagatcctaatttcaaa

SEQ ID NO: 706695 - DNA, 100 bp, Homo sapiens
tttgctaacgtttagagagtgcttccccttgccgagcactggaatgaattaccagatggattaaacaaaaagcgtttacaaatcttattaaaaggctatg

SEQ ID NO: 706696 - DNA, 100 bp, Homo sapiens
gtgctgccgccgccagggtctgcagggcctgggccgccgctgctacctgcagcgccgtgtggcacgacacaaaaatcagcatgaagaggaaccacctcag

SEQ ID NO: 706697 - DNA, 75 bp, Homo sapiens
ctacgtgttagaaataaatctgatattgcaccttcacagcaacaagggagactcatgcatctgtatgccgtgtgc

SEQ ID NO: 706698 - DNA, 75 bp, Homo sapiens
ttttggcagattatggctttgtccccacccagcactgatgatattataaaccaaggccacctttgatgccatttc

SEQ ID NO: 706699 - DNA, 90 bp, Homo sapiens
gctctgctgcttcctcgtcctagtgatccacgcgcagttcctcaaagaaggttagagcagccagcgggtacagaatggattttggaagag

SEQ ID NO: 706700 - DNA, 83 bp, Homo sapiens
tcatcttggatttgagtcgtgcttgtgaattttcatgtgttacaacaaccaggtaatgtacagaaggattctgcagcaggcgg

SEQ ID NO: 706701 - DNA, 100 bp, Homo sapiens
gaagattgtgaagcaatagcctaagcactgtgacttctgccgtgttcaccgtgggagacaacgtggtttcaggcagcgatgaccgcacggtgaaagtctg

SEQ ID NO: 706702 - DNA, 100 bp, Homo sapiens
tggagacatcaaacttactaaagacggcaatgtgctgcttcacgaaatgattctggatgaaattgaagaacataacatcaaaatctatcacttacctgat

SEQ ID NO: 706703 - DNA, 82 bp, Homo sapiens
atcgggctgaagcgactgagtccgcgatggagatgtgaagttcatttccaatccgccctccatggtggcagcggggagcgtg

SEQ ID NO: 706704 - DNA, 100 bp, Homo sapiens
tacatgaaggagacctagtggaagtggttctttcagaggagaccttgcctattttgatggacttagtgagactattcttgctgtggggcttgtgaagcca

SEQ ID NO: 706705 - DNA, 75 bp, Homo sapiens
cgcgtggaacggctgcttttggaaggagatcatgaatcagacagataaaaatcaacaagaaatcccatcatacct

SEQ ID NO: 706706 - DNA, 99 bp, Homo sapiens
cggctccgtggggccgtcttcccggcgagtccgcgacggtcgccgcccacggcgagactggatacacgtctgtttaactacgcaaaaggtaatgctggc

SEQ ID NO: 706707 - DNA, 83 bp, Homo sapiens
gctaattaaaacatttttcagggacgtagccatccagagttggttgaatctggcgatgtggaacccatggatatggagggctg

SEQ ID NO: 706708 - DNA, 98 bp, Homo sapiens
agaaaggaagcaggcccgttggaagtggttgtgctgcttctgatgcttggaagatatcctctcagccacaaagatggtaataaatctttgcctcccac

SEQ ID NO: 706709 - DNA, 98 bp, Homo sapiens
ggacaccgagggaccaaagggcgagtgcccaagacaggagcaggacattgtgttcctgatcgatggctcaggcagcatctcctcccgcaactttgcca

SEQ ID NO: 706710 - DNA, 95 bp, Homo sapiens
aagagcttctggaggcagaacttctcaaagttgctaacaaggagaaaactgttcaggataaaagaatcagagtgtctcaacccttgacaagagga

SEQ ID NO: 706711 - DNA, 90 bp, Homo sapiens
gagtacaaaaacggcccttggatgatggagatacgagggcaccatgtagcacagctggaccccctggggattttggatgctgatctggac

SEQ ID NO: 706712 - DNA, 101 bp, Homo sapiens
aagggctccctcgtgaagaacctgaaggacacactagtgcctccacttctcattcagagaattcagtgcatacaaaatcagcttctgttgtatcatcagat

SEQ ID NO: 706713 - DNA, 98 bp, Homo sapiens
cctggaaggtgcgtgtggggctgggtctcggagtgggagacgtggagtgcagaacggaaagatgctgaaggatgggagaccgttcagagaggaaggcc

SEQ ID NO: 706714 - DNA, 100 bp, Homo sapiens
gcgtcttgatccttttgcagatgggtatagaacttgaccagttagacttacgaagagatattgcctacaacttgtctctcatctatcagagcagtgggaa

SEQ ID NO: 706715 - DNA, 100 bp, Homo sapiens
ctcctccccccatgcccgtgccttggctcactatgataacgttatctgtcagtttagattttgaagaatgtgctcacaaattgctgaaaatggagtttcc

SEQ ID NO: 706716 - DNA, 75 bp, Homo sapiens
cactattgtctcacctgatgctggtggagctaagagggtggttctcttcccaaagtggaagccaaattcatcaat

SEQ ID NO: 706717 - DNA, 98 bp, Homo sapiens
ttcagtggctaaatggctccctgattcatgttggccagtcagtgctgaaagatgtaagcaaagtgaagaagctgaagcaatctggagagcccttcctg

SEQ ID NO: 706718 - DNA, 84 bp, Homo sapiens
agggtgttcgactgctagagccgagcgaagcatataattggtgattacaactttcctctataaattaactcttgacactccttg

SEQ ID NO: 706719 - DNA, 100 bp, Homo sapiens
cgccgcaggagcgaagccaggaaaatgtggacacagacttgccaggcagcctggggcagagtgaagagaagcccgtgcctgctgcgcctgtgcccagccc

SEQ ID NO: 706720 - DNA, 82 bp, Homo sapiens
gatgctgcagacactgaacgaggagccagtgacagagtgttgctcagttacccaggctggagtgcaatggcatgatcttggc

SEQ ID NO: 706721 - DNA, 74 bp, Homo sapiens
ggaaaactgtgggctcctggtgtctctgggtactccaaagattcaggtttactcacgtcatccagcagagaatg

SEQ ID NO: 706722 - DNA, 75 bp, Homo sapiens
gtgctgctgggattcgcgctgctgggcacccacggagcctccggggctgaaaactgattgggaggtagctattaa

SEQ ID NO: 706723 - DNA, 88 bp, Homo sapiens
ccgcctcgaaaacggagaagcaggtagaacatctgggaggtcccttgctgaccactggaagaagatgagctcgagctattggagtgag

SEQ ID NO: 706724 - DNA, 76 bp, Homo sapiens
aagtaaatttcgagctaagggttacagtcctttaaatctggaaatttcaaggtgtgtcaaggatgccacaatgcca

SEQ ID NO: 706725 - DNA, 98 bp, Homo sapiens
caagacagtatgcaaggccacgacccacgagatcatggggcccaagaaaaagcacctggactgcccattgctagaagactgggacataatcagcccca

SEQ ID NO: 706726 - DNA, 100 bp, Homo sapiens
ctgaaggccagcaggaacaggctctagcgaaatgggtgctgtgtccccttcctgcatgtggcagaaagttgcaaaggtcctcagccagcagagccacgtt

SEQ ID NO: 706727 - DNA, 74 bp, Homo sapiens
gtggttttgcatatagatggccttgatgatacgtgtttacaggcattggagtttttacatgctaatcaagtgat

SEQ ID NO: 706728 - DNA, 87 bp, Homo sapiens
ctgagcgctacccggttgctgctgcccaaggaccgcggagtcggacgcaggtgctggcccagcagggggagtacagtgaggccatcc

SEQ ID NO: 706729 - DNA, 86 bp, Homo sapiens
cgctgtcatcctcattgctactgccctctgcgctcctgcatctgcctccccataggatcagcactgccagtggagatgggcgtcac

SEQ ID NO: 706730 - DNA, 110 bp, Homo sapiens
cacccatcccccttgctgcctgggggttcagacttgattcacgtggccgcgctgtttcccggcgatgtggaccgcctgcgcaggatgtctgtgatcgaggagggggactg

SEQ ID NO: 706731 - DNA, 100 bp, Homo sapiens
gccggagttcgctgcaagtcggcggaaagtttggctgcgcgggttcccccgaagttcaggcacgtctgagaatggtggatgtggtggagaaagaagatgt

SEQ ID NO: 706732 - DNA, 96 bp, Homo sapiens
ctcttctgcaaggtccggctgctggatggaggggattttgtcagcttgtcgtcaaggcagatcgggagcggtgccgagaaaaatttccttactaga

SEQ ID NO: 706733 - DNA, 52 bp, Homo sapiens
ccgaggaagccggtgttgccgaggtaagaatgattgatgttggctgatattg

SEQ ID NO: 706734 - DNA, 101 bp, Homo sapiens
cttcggccttgtccgagcaaacagaggcgctcatccacagagccacatctgttagctggaatagtcaaatgatttcagttcgtgaagccaaagccattcca

SEQ ID NO: 706735 - DNA, 100 bp, Homo sapiens
ataaaccagtggaagcaggagaagcagcaattatcgtccgagcaggtcaccctgctgattgccttcatctgtgtgcggagctccctgtggaccaactaca

SEQ ID NO: 706736 - DNA, 75 bp, Homo sapiens
tcccttatatactgcttacaagcataatactcaccctactattgagtttgctgatggccgccaaagttggagttc

SEQ ID NO: 706737 - DNA, 99 bp, Homo sapiens
actttgccctcagcatctcccttcatgtctgggtcatgagtgcatctccctcgccccctgagagtctcgtggaggaggagcgaccgagtggccctggtg

SEQ ID NO: 706738 - DNA, 83 bp, Homo sapiens
cttggactgagtcctgcaggacacaggtcctgtccaaaatgcattgctgtcttcacaagagtcagtgagccaaggatacaatt

SEQ ID NO: 706739 - DNA, 100 bp, Homo sapiens
ctggagcaggagcggggccggaactggagccgaggcgcaggtggcgctggattgacgagatgcctgaggctgccgtgaaatcaacagccaacaaatacca

SEQ ID NO: 706740 - DNA, 75 bp, Homo sapiens
gcccagcagatgcaatttatgtttccaggaacaccacttcatccagtgggtgtcaaattgagaaccaggtagatc

SEQ ID NO: 706741 - DNA, 83 bp, Homo sapiens
cggatccgggccaagcagtgggccgagagacacctatggctgccgatgaaggctcagcagagaaacaggcaggagaggcccac

SEQ ID NO: 706742 - DNA, 100 bp, Homo sapiens
caaaagatgatctcagagacatgttctgtaagtggtatgcaatctgccttagtgatgttggagattatgaaggcatcaaggctaaaattgcaaatgcata

SEQ ID NO: 706743 - DNA, 75 bp, Homo sapiens
ccgtaaaagccccaatcttagcaagtgcggggaagagctgggtcgactcaaggaagctattttgccagccacttc

SEQ ID NO: 706744 - DNA, 75 bp, Homo sapiens
ggaagggcaggatgaaaaccaagaaggagattttgaagatgcagatacccaggactccctggaggaaaagcggaa

SEQ ID NO: 706745 - DNA, 74 bp, Homo sapiens
tggaagaagccagcagaggaactccttcttcaccagcctccaccaagacgggacaagcagggagtttatccggc

SEQ ID NO: 706746 - DNA, 74 bp, Homo sapiens
tcaaagaagtttgtccttctgctattgatcctgaaggatgaatctcctccgaaacaacagctgcctctccaaaa

SEQ ID NO: 706747 - DNA, 100 bp, Homo sapiens
ctgctatgcagaaggatgggacttcatctacaatttttagtggagttgccatctatgttaatggatacacagtgtttctctcctgaggcaaagcccaaca

SEQ ID NO: 706748 - DNA, 147 bp, Homo sapiens
atttgttggggagaagaggattggaggtgtcagtgttaaaggaacctctacaacgaaggtgaagccacggaagataagcgtttagtgggctacagatggcatggcatctaaaaccttacaatgcttgattttcatacagaagacact

SEQ ID NO: 706749 - DNA, 82 bp, Homo sapiens
gatctgcatcgtcatcgagccggcccagcttctgaagggagatgtcatggacactcatgaggaccatgatacttccactgag

SEQ ID NO: 706750 - DNA, 75 bp, Homo sapiens
tctatacagggacgtgatgctggagaattataggaacctggtctccctggagctatgccaagaccaagacgagag

SEQ ID NO: 706751 - DNA, 98 bp, Homo sapiens
gaagggcatggcaagactccacctcctggtgaagaaagcaaacatgctgaataagggtcagtgtgtgacaaagtactatcgctggatgcagaagaacg

SEQ ID NO: 706752 - DNA, 90 bp, Homo sapiens
tcgcgacacccttgaagctgagaaatggaacctagaaagattgtacaatgaatggtgattctcgtgctgcggtggtgacctcaccacccc

SEQ ID NO: 706753 - DNA, 100 bp, Homo sapiens
caaacatccatatcataagtggaattttggagatattcaaaggcaactgaggagatagaggaccgggaaacgctggctctcctggcagcaaggagtgaaa

SEQ ID NO: 706754 - DNA, 80 bp, Homo sapiens
caggcctctgggcacccggctcaccgtcactctgacccagcatgccgtcatggaaatgatgagtcagaagattcagcagc

SEQ ID NO: 706755 - DNA, 100 bp, Homo sapiens
ctggggccctgggtgaagtgctccgccgcccttgcctccagggtgataaaagaaaatgtggctgaagttacccgaagttcagcttgcagtgtaattcaga

SEQ ID NO: 706756 - DNA, 87 bp, Homo sapiens
ggacttggttttagactctgatgaggaagaaaatggccagggggaaggaaagctgcaggacaagttcgagcatcttaaaatgattca

SEQ ID NO: 706757 - DNA, 98 bp, Homo sapiens
caccaatccagaggagatcctcagaggggagacccctcgggtggaagaagtggggccatacacctacagattttcagctgaactctcatctctcaaca

SEQ ID NO: 706758 - DNA, 100 bp, Homo sapiens
tgagcgggcaacacaaaggatagctttcaagaagaagttgtatgcacattgttccttgcctgtatctccccttggttcaatagctaccagatttttggaa

SEQ ID NO: 706759 - DNA, 100 bp, Homo sapiens
aacggctcccacagccgggcgttgggggaaagatttccacaagacggcaccctatgtcgtcactggcagcgtagatcaaacagtaaaagtgtgggagtgc

SEQ ID NO: 706760 - DNA, 90 bp, Homo sapiens
gaagtggccgtagcggcttgttggataaggtggattcaccaatgaacttgaagcatcctcatgacctagtcatattaatgagacaagaag

SEQ ID NO: 706761 - DNA, 100 bp, Homo sapiens
ggaatcggtgttccgccagatcaccaacgccaatgagctcaagtacctggacgagttcctgctcaacaagtgtatttgtgtggcgatgtctgtaaaatgc

SEQ ID NO: 706762 - DNA, 98 bp, Homo sapiens
ctgttttgccggaggagcccctcaggccctgagctgactgctgcccactttggaggaggcggtgggctccttcacaagaagactcaacaggaaggcga

SEQ ID NO: 706763 - DNA, 50 bp, Homo sapiens
ataatctttgtatcataccaattggtgttacaggcccaaaaactgcgact

SEQ ID NO: 706764 - DNA, 100 bp, Homo sapiens
cgcccggccgcgggagcctcgtggctgcgtcaccgccgcccccccagacaagatggacaccgcggaggaagaacccagtgacttgattgtaaaaatttac

SEQ ID NO: 706765 - DNA, 75 bp, Homo sapiens
ccagcatcaagatgatttatggtaataaggctagtgatacagagcgagatggactagccccagaaaagacatcac

SEQ ID NO: 706766 - DNA, 90 bp, Homo sapiens
ctggaggggtgaagaaacctcatcgttacagtgatgcagccaacacgaacggttgtcatgtgtaacacaactttcgatcaccgcgaaaac

SEQ ID NO: 706767 - DNA, 100 bp, Homo sapiens
tcagattctggactctttgggatttatactatctcccaggccacagctgctggagatacttgttgagcccattaaagaaatggaagtctcgctatctgat

SEQ ID NO: 706768 - DNA, 87 bp, Homo sapiens
cgaattggagaaaaagttcagtgggaagcatgtcgtctttatcgctcaggaaccactcgttttgactattattttatcactctttgt

SEQ ID NO: 706769 - DNA, 90 bp, Homo sapiens
gactcagcagcagcaactgtgggactttttgactacaattctcaacaacagtttctatgtgctctgccaagaagggaaggttatgagttt

SEQ ID NO: 706770 - DNA, 99 bp, Homo sapiens
ccgtgctcgtcgggcccccttcgggagcgtccgtctccaagagagtatgaagagagtgcgtctgtagggcagggaagatggcggacaagcgcaaactcc

SEQ ID NO: 706771 - DNA, 90 bp, Homo sapiens
cccaaactcctggaattacaactgtagagttggctttgtgggacacagctgggcaggaagattatgatcgcctgaggcccctctcctacc

SEQ ID NO: 706772 - DNA, 83 bp, Homo sapiens
cggcggattgaagagtctgccattgatgagatccaaggattaatgtcgtgcttgctggtggccacgttgtgccccgagatgag

SEQ ID NO: 706773 - DNA, 98 bp, Homo sapiens
cggcggcgctgctcccgggggcgacggaaacgatggaaagaactttctaaggaagacttatctcctgcctttgatcattcaccaaacaaaataatgac

SEQ ID NO: 706774 - DNA, 101 bp, Homo sapiens
ctggcttgctctgagctgcggttactgtgtccaggccccgggttctcaggttgctccttgagggcaggacagttcttatggctttatccgttgcgtaagca

SEQ ID NO: 706775 - DNA, 50 bp, Homo sapiens
caacaccacaataatccacagccaagagttgctacgatggaagttaaagg

SEQ ID NO: 706776 - DNA, 50 bp, Homo sapiens
atgtgacacaaggaaagtattctacaggccttggatggtatactgtaaat

SEQ ID NO: 706777 - DNA, 73 bp, Homo sapiens
gcttccctaagttttgcctcgattgcaacaacatcattagcagaaaggacccaggagcgataacagtaaatca

SEQ ID NO: 706778 - DNA, 75 bp, Homo sapiens
agatacccagacaacaggatcgtctcgtccaagggcgtctctggccgagcctctttttgtggaaaacgacagcag

SEQ ID NO: 706779 - DNA, 102 bp, Homo sapiens
atgcttttggaaaatgagaacaaaaatttaaagaaagatttgaagcactacaaacaagcagctgagtgtaccaacagtaccgttattgccaccacaagtaaa

SEQ ID NO: 706780 - DNA, 85 bp, Homo sapiens
ttcccatcatcgggaacctcttccagttggaattgaagaatattcccaagtccttcacccggtgggtaattccagaattgattgg

SEQ ID NO: 706781 - DNA, 75 bp, Homo sapiens
ggaggcacccaagtctgttttggactccacattgaaggacagtcattttgtttactcattcagccctgttgcagg

SEQ ID NO: 706782 - DNA, 97 bp, Homo sapiens
caacagaacgacctagtatttgaatttgctagtaacgtcatggaggatgaacgacagaaaccatttctccaccgaaggaggagagtccgaaagcgca

SEQ ID NO: 706783 - DNA, 50 bp, Homo sapiens
ctcctgagttgctgggattacagattcaggaggaatcagatatgtggaaa

SEQ ID NO: 706784 - DNA, 100 bp, Homo sapiens
gaccacagctgtggctcgaaaaacagggtttccggagataatcatgcctggcgagtatagtgttggaaacaagcaccgtgatccctttgaagccccagag

SEQ ID NO: 706785 - DNA, 80 bp, Homo sapiens
catgccggcccggcggctgctgctgctgctgacgctgctgctgcccggcctcgggccctcccaggcccaatacttcaaag

SEQ ID NO: 706786 - DNA, 75 bp, Homo sapiens
gccagccccgggacggactgaagctggtgcgcaaggacagagggagacacagctgttggcggggatgcatgctca

SEQ ID NO: 706787 - DNA, 126 bp, Homo sapiens
tttacttatctgggtccttcaacaactggagtaaacttcccctcaccagaagacagaaccaagttgtattgttagacacactggaacaagagatttcaaaatttaaagaatgtcattctatgttgg

SEQ ID NO: 706788 - DNA, 98 bp, Homo sapiens
ttgatccagactcctttacatgatagtcttcctatcacgggcactagtgtggctctcctgttccagcaattgggaaagaatcagaagggggcccagac

SEQ ID NO: 706789 - DNA, 100 bp, Homo sapiens
gttagaaaagcagaggctatactttaagactgtgaaagagttcaaggagatgttcagaaaatcattggtaaagatgtttgaagataaaggattagactgc

SEQ ID NO: 706790 - DNA, 100 bp, Homo sapiens
gtccaactgaacgtaggggggaccaggcttctccacgctgtccctggcggaccagatgagccttctgcagagtgcttggatggaaattttgatccttggt

SEQ ID NO: 706791 - DNA, 80 bp, Homo sapiens
gtcatgacaggcgaggtgggttctgagatcatgacaagatgtttaagatgagtgaaaagatattactcctgtgtgttgga

SEQ ID NO: 706792 - DNA, 95 bp, Homo sapiens
gcaaggagctaaagcagcgtgcgttcagccctggggaccaagaatcgccttcagccctgtctggtgcatccttggcagaaagtgaggaggaaaac

SEQ ID NO: 706793 - DNA, 83 bp, Homo sapiens
catgtccttctctgaatgatgaatacttttactactgtgacaacattaacggaaataatgcaaaaggtgtcccaaggctcctg

SEQ ID NO: 706794 - DNA, 50 bp, Homo sapiens
gcctcccaaagtgttggcattacagtctcgctctgtcgcccatgctggag

SEQ ID NO: 706795 - DNA, 82 bp, Homo sapiens
gcgttgcgtgccctacttcaaggataagggcgacagcaacagctctgccggctggaagacaacgactgaaagacctttcatt

SEQ ID NO: 706796 - DNA, 100 bp, Homo sapiens
cagtgttcaccatcctggccccggaaggctcactcagtaacttgatggattttgtgaagaaaacaggcatttgcgcttcaaagtgggaatgggggaccac

SEQ ID NO: 706797 - DNA, 75 bp, Homo sapiens
tttgtttctccaaggtttgaaaagcagctggcctgcaaggatgtaggctatccggaattcctcaacatacgtccg

SEQ ID NO: 706798 - DNA, 100 bp, Homo sapiens
gagcaacagtcaccagatattgctcaaggtgttcatcttgacagaaatgaagaagacattggtgctggagaccagatgatgaagaacgagagcttcaaat

SEQ ID NO: 706799 - DNA, 128 bp, Homo sapiens
gaacctgtcagctcaggaccatcagacctttttcacctgtgacacagattttttacgtccttcagacacaggcatatgggcaacaaagctatggaacctatggacagcccactgatgtcagctatacc

SEQ ID NO: 706800 - DNA, 49 bp, Homo sapiens
atcagcgacactatggcagtgtctggtgaatcacaagcctttgagaaca

SEQ ID NO: 706801 - DNA, 75 bp, Homo sapiens
acccggcctgggagaagcagcagcgcaaggcttccagcatagagaacaagcaggactggataaagcatatccgcg

SEQ ID NO: 706802 - DNA, 90 bp, Homo sapiens
acctccacagtcaagaggacgaaaaagcttgtggtgaaggggggcaaaaaaaagaagcaagttctgaagttcactcttgattgcacccac

SEQ ID NO: 706803 - DNA, 100 bp, Homo sapiens
cctaccttctctatcagatgctgtgtggaatcaagcaccttcattctgctggaattattcatcgggaactgtggctgcaccatctgtcttcatcttcccg

SEQ ID NO: 706804 - DNA, 51 bp, Homo sapiens
tgcattttccatatcaaggttattgatgttttgaacagagataaggatgag

SEQ ID NO: 706805 - DNA, 104 bp, Homo sapiens
tcagcctcccgagtggctgggactacaggttgtatcagagtaagatggacggtagctttgattgtgattgtggtgagctggagccacctgatcactaacaaaag

SEQ ID NO: 706806 - DNA, 153 bp, Homo sapiens
agaagaagccgacgcccatccagctgaacccggcccccgacggctctgcagttaacgggaccagctctgcggagtccctagctgttggtagtaagtccggttataaatttttctccctttcttctgtggataagctggaacagatctatgaat

SEQ ID NO: 706807 - DNA, 100 bp, Homo sapiens
acggggttgcggatcccgcggccgcggttcggacccgccggcgacatggccagctccggagagtatggtttgaagtggtgaacatggatttttctcggct

SEQ ID NO: 706808 - DNA, 75 bp, Homo sapiens
caagacagagcacctaggattaaattggtttcctaagggccattgacatttagggatgtggccatagaattttct

SEQ ID NO: 706809 - DNA, 83 bp, Homo sapiens
tcgttgcctccacttggcccgtccatagagccagtgtactaatggtcacttgatgtgcgctggctgttttatccacctactag

SEQ ID NO: 706810 - DNA, 100 bp, Homo sapiens
aattatctttcagttcaagtgacaaacgtacctgtggtccctggatccagtgctactgctacaaataagctaatttgacaggacatgctgagaaggtggg

SEQ ID NO: 706811 - DNA, 75 bp, Homo sapiens
tttgctaaaggagcttaagaatattcctatgaccctggaattactgcaggagagaagaccaagaggtcggagaag

SEQ ID NO: 706812 - DNA, 75 bp, Homo sapiens
ggaagagataagcctccacttacagatctgggaaatttctgaataaattggcagaagaacgcagacagaagaagg

SEQ ID NO: 706813 - DNA, 98 bp, Homo sapiens
taagaaacagtgctttctgaaacaacaaagccaaacttccattggtcaggcttctccagggaaagtgaccgaggcagtgaaagaggccattgacgcag

SEQ ID NO: 706814 - DNA, 75 bp, Homo sapiens
ttcgccaactccgctgcctttgccgccaccatgcccaaaacggttctggagacagcctgtatttcttggatcttg

SEQ ID NO: 706815 - DNA, 51 bp, Homo sapiens
gacttctctacatggcaatagatggagtgaaatttcccccttgctttggat

SEQ ID NO: 706816 - DNA, 100 bp, Homo sapiens
catttgcaacttatatcgccagtccagcagctaaggatattttgtgcaggctcccacatcaggacgagaaggagccctcgagttaccgtgggagctgtgg

SEQ ID NO: 706817 - DNA, 98 bp, Homo sapiens
aaggtacttctcaaagtccacgaggacaaggacatctttccaccgaatgccacctggtttataacaaaagatatgtcttctccgactactatgaagaa

SEQ ID NO: 706818 - DNA, 113 bp, Homo sapiens
agccgcgtccccagagagcgccctgagagaacagggtggccgcttggtccagcgggacgaccctgggacagtctccactggggcagatccagctgaccatccggcacagctcg

SEQ ID NO: 706819 - DNA, 98 bp, Homo sapiens
agcgctgtggtggctgctgccctgacgatggcctggagtgtgtgcccactgggcagcaccaagtccggatgcaggatgatcggctgaatgtaacagag

SEQ ID NO: 706820 - DNA, 100 bp, Homo sapiens
ccccgcccggcgggcccggcggccgcagcgaggagaagatctcggactcggagggacggaagaagtctatagtggctgtggagcccaggagtcttattca

SEQ ID NO: 706821 - DNA, 100 bp, Homo sapiens
aaatgtttttctgttttgcctgaatacatgatttaaacaagagatttccacagaaggtatgggctacgtgagttcgtggtgattgcccctgctgcacaca

SEQ ID NO: 706822 - DNA, 76 bp, Homo sapiens
cttgaatacactgagacccggaatcagttccttgatgagctcatggagaggagaaggcagagcccccccaggctat

SEQ ID NO: 706823 - DNA, 83 bp, Homo sapiens
ggcgtggaccacatagacatttacgcggatgtcggcgaagagttcaaccagcccgcggcgccatggctcacgtcggctcccgc

SEQ ID NO: 706824 - DNA, 105 bp, Homo sapiens
tcccctaaagtgcatcctcctaatgggacccggttttacacttttcaaacggtctggaaaatcccgaagcagaagcccgtattcatctaggcattcaagatctcg

SEQ ID NO: 706825 - DNA, 100 bp, Homo sapiens
aagtggcgaaggagccggctccaaggctgccaggatatcgcagatgaattcagagcacaggagattgatggacaggcccttctcttgctgaaagaagacc

SEQ ID NO: 706826 - DNA, 88 bp, Homo sapiens
gcgactttggggcccgtcaccctcaggtctgccatcatggatgttctcgcagaagcaaatggcacctttgccttaaaccttttgaaaa

SEQ ID NO: 706827 - DNA, 83 bp, Homo sapiens
cagcgaagctgctgcggttcctgagccggaggtacatgtcccagagcaagcacacggaggcccgggagctcatgtactcggga

SEQ ID NO: 706828 - DNA, 90 bp, Homo sapiens
gcaatctgcttgcctcagcctcctgaagggctgggattacagtgttctaagaacggaagcatctgggctggatggaatttagcatcaagc

SEQ ID NO: 706829 - DNA, 74 bp, Homo sapiens
acagggaggaaggcgtgaatgaagaaacaggtgggtgagatgaaattacaacttgaaaatgtcatcaaggaaaa

SEQ ID NO: 706830 - DNA, 75 bp, Homo sapiens
cggaagcggatcgggtggagtgtaggtcatatcgccgcgagttgcatgctgagaatttgaaaaatgaagatgatg

SEQ ID NO: 706831 - DNA, 96 bp, Homo sapiens
aagaaagcggagttcgagcggcagcgaaaaatgatgccggaccagatctctgtctcggagttcatcgccgagaccaccgaggactacaactcgccc

SEQ ID NO: 706832 - DNA, 75 bp, Homo sapiens
tatgttgtgtcatttcgaaggctattgacctgaaaagtggttctggaaaagtgtaccaaggccctgcaaaaggtg

SEQ ID NO: 706833 - DNA, 50 bp, Homo sapiens
acatctcaccaatttcaaatctggtgctgggaatacagcaaggaattaga

SEQ ID NO: 706834 - DNA, 100 bp, Homo sapiens
ccggaaaggagattgagattgacattgaacctacagacaaggtggagctgaagaagggagccactctcaaaatcacgctggataacgcctacatggaaaa

SEQ ID NO: 706835 - DNA, 83 bp, Homo sapiens
caggatcggaagcctgcgtaactttctcccttgatccgggagtctttccactgggtcctgaatgaggtggtgattgacagagg

SEQ ID NO: 706836 - DNA, 76 bp, Homo sapiens
acttggttaccaagaagccatacatgatacagacagaagctgctcagttgcttacaagtttcagtgagaagaattg

SEQ ID NO: 706837 - DNA, 75 bp, Homo sapiens
gcagctgcagagccagatgatccacaggatgctgtagtagcaaatcaggtgcccctgggcgctgggattgctcta

SEQ ID NO: 706838 - DNA, 74 bp, Homo sapiens
gggactgttggtctcggccctgcggaagagttcacccagggcatgatcttacctacaatgaatggagagtcagt

SEQ ID NO: 706839 - DNA, 100 bp, Homo sapiens
gtctttctcccgcaagagctataggctgacctcagatgctgagaaatccagggtcacagtctcttgttttcagcagccactgtaaagcagtgagtggcta

SEQ ID NO: 706840 - DNA, 97 bp, Homo sapiens
ggacaaccaatatttccaggggatagtggtgtggatcagttggtagaaataatcaagattgagaggatccagaatccagatctctggaatagctacc

SEQ ID NO: 706841 - DNA, 82 bp, Homo sapiens
caactgcgggacaggaagtggccgtagcggcttgttggataaggtcaaaatgcagatcttcgtgaaaacccttaccggcaag

SEQ ID NO: 706842 - DNA, 100 bp, Homo sapiens
ccctgcagtacctgcagaaggtctctggagacatcttcagcaggttcaagggcagcaggaaagacgagatcctgggcatcgccaacaaccgactgatccg

SEQ ID NO: 706843 - DNA, 90 bp, Homo sapiens
ctcaggctttcctacaactcatgcccagcagcagcaagcaggtttcaggaacttacacctggatgaccaaatgaccctactgcagtactc

SEQ ID NO: 706844 - DNA, 100 bp, Homo sapiens
ggaatacacttatttatgaagatgaaacgaggaggaagagatagtgaccgtaattcatcagaagaaggaactgcagagaaatccaagaaactgaggacta

SEQ ID NO: 706845 - DNA, 82 bp, Homo sapiens
ggagcgttgcgagcgcgaatggcacgagctggagggagaatttcaagaactgcaggaagctcttcgtgggcggtcttgactg

SEQ ID NO: 706846 - DNA, 100 bp, Homo sapiens
atgacagaacttaagaaaaaatcccactttggaggaccagattatgaaagaatggatcttggagaatgtctgaaagtccatgacctggctttaagagcgg

SEQ ID NO: 706847 - DNA, 75 bp, Homo sapiens
gcgcgcctgcgacctgcccgcctgggggccagtgtcattcaaagatgtggctgtggatttcacccaggaggagtg

SEQ ID NO: 706848 - DNA, 80 bp, Homo sapiens
ggatgactccgacatcaacacctctaagactggagaaggattttaaactgtctacggttcttaacctcatctgttaagtt

SEQ ID NO: 706849 - DNA, 73 bp, Homo sapiens
acaaaagccaagaggaggacagttcgctacacagcaatgcatcgaggttatggaggttttgatgactatggtg

SEQ ID NO: 706850 - DNA, 75 bp, Homo sapiens
gggccaggtcaagctcaccaaagctgtgagggctttttggattttggaactggggactcaaagtcaagtgcttct

SEQ ID NO: 706851 - DNA, 75 bp, Homo sapiens
cttcgaggcactcaagtcctggctcagcaagactctcgagcccattcattgaaattatgagactatcattcaaat

SEQ ID NO: 706852 - DNA, 98 bp, Homo sapiens
gacggacgctcgcctgccggctgaggtatccagtcggaattctttattaacaccacccgagcaggtccagggacattatccgtcaccatcgaaggccc

SEQ ID NO: 706853 - DNA, 95 bp, Homo sapiens
gaatcactaagtagggcttgccaccaacagaataaaataaaagatcttcaaaaggagcagaaaactttacagccccgatgtaaaatgtatatccc

SEQ ID NO: 706854 - DNA, 100 bp, Homo sapiens
ggcgctggaggagcgaggcagctgtactaggactgggaacgggaaacctatgagaatatcccaggccagtcaaagatcacattcctcttacaagccatca

SEQ ID NO: 706855 - DNA, 51 bp, Homo sapiens
cttcagcaacatttccgccgccaaagggtggagagattcaaccagttagcg

SEQ ID NO: 706856 - DNA, 100 bp, Homo sapiens
gtaaccacctcacagattccagcttcggaacaagagaccctggtctgaagaactgttgcccaattcaacagtgccagcattccaactttgttaaacctac

SEQ ID NO: 706857 - DNA, 75 bp, Homo sapiens
gggttggaagatggcgtctcccacagacgacaagttggatggcttgaggactggtactaaaaggaaacgtgactg

SEQ ID NO: 706858 - DNA, 73 bp, Homo sapiens
gaaccagaagacgatgaggctcctgcaaaaggtcatcctgtacagttctacagcatgaataggcctgcctctc

SEQ ID NO: 706859 - DNA, 98 bp, Homo sapiens
gcgctaccggaatgtcatccagcgagtgattaggataattctggcctcatagaacaagttgggaagtgttccctcctcccctattttctgaaagtttg

SEQ ID NO: 706860 - DNA, 98 bp, Homo sapiens
tgaaagtagacttaggctgcacatcggaggaaaactcgacgacaggatctgctcgccacccttcatggagctcacgagcctgtgcggggatgacacca

SEQ ID NO: 706861 - DNA, 88 bp, Homo sapiens
cgggctgaagcgactgagtccgcgatggagaggcggggtttcaccatgttgcccagactggtcttgaactcctgagcttaagcaatcc

SEQ ID NO: 706862 - DNA, 96 bp, Homo sapiens
gctaagctcatcattgttactggtttattgttggccaaaaccaggctttgattgaaccaggatgaatgcgggtgttggaagtagaatatatatata

SEQ ID NO: 706863 - DNA, 100 bp, Homo sapiens
cgtcatgctctttgtagcgtggtgcttctgttgctcacagatatgaggccccaggattcctggcgaggtcctcctccccttttccagcagcaaaggtttg

SEQ ID NO: 706864 - DNA, 75 bp, Homo sapiens
aggccgcgaacaagtgggacacaggcaagacgtcgagctcggtgcatcagcaaagcgtgggtgtgtgatggcgac

SEQ ID NO: 706865 - DNA, 83 bp, Homo sapiens
gttggtgctgtttgcggatgctgatgcagaatccacattcatctcaatggaaggatcctgccttaagtcaacttatttgtttt

SEQ ID NO: 706866 - DNA, 100 bp, Homo sapiens
aggtgtgtgcggactgcagcgccccgggggtcaggcccagccccaggcccagtggtattactgaattcactgaatgtggatgcagtatgtgagaagctga

SEQ ID NO: 706867 - DNA, 75 bp, Homo sapiens
cctgaaggatggaactatcttatgcacacaatgcagatcttcgtgaagactctgactggtaagaccatcaccctc

SEQ ID NO: 706868 - DNA, 75 bp, Homo sapiens
gcttggtgatgagtatgatgcacctgcagtagaacgctgtaaatgtaagcctattagagctacacagaagaccta

SEQ ID NO: 706869 - DNA, 82 bp, Homo sapiens
gggacggaggacgcgctagtaactggtcatgctgctggagtggtggtcctgcacggagtgtacactgttcacggaccaggcc

SEQ ID NO: 706870 - DNA, 75 bp, Homo sapiens
cggcgagtttccgatttaaagctgagctgcgaggaaaatggcggcgggaggagaattcctgcactcaggccacaa

SEQ ID NO: 706871 - DNA, 75 bp, Homo sapiens
tcgatggcttcgtggtggaggtctggaaccagctgctaagccagaagcgcgtgtctcggcgcggaagatggccgg

SEQ ID NO: 706872 - DNA, 100 bp, Homo sapiens
ggaggaagatgcaagcggtttgggaccttgaacaaggcaaatatggttttgatgccttcaattaagttgcagagttctgatggagagatatttgaagttg

SEQ ID NO: 706873 - DNA, 76 bp, Homo sapiens
ggttggcaccactgaagtgaccgaatgagattcatgatgttgctatcaaaagttgagaaattgtcagaagaaatca

SEQ ID NO: 706874 - DNA, 90 bp, Homo sapiens
gcagaattcaccagagagcagcagccatgccaatgcgatggcagcggaggaggagaaagagatggacctcccggactcggcctcgagggt

SEQ ID NO: 706875 - DNA, 75 bp, Homo sapiens
actgagctgctggctaagatcaccaacacagacgtgactctgctaactggaatggcttattgtgcaagaaagtac

SEQ ID NO: 706876 - DNA, 96 bp, Homo sapiens
cacagacccagctggaactcggatttgtacacacagatatgacgaaagacttgaaagaagaacatttaaagaaaaatattcctcttgggaggtttg

SEQ ID NO: 706877 - DNA, 100 bp, Homo sapiens
cgcagatcagaggtagtcggacctttcccgctggcgcgcagcctcagctagacttcagattttcctgtccttgatcccagctggactgctcaagaagaaa

SEQ ID NO: 706878 - DNA, 88 bp, Homo sapiens
ttgtactctgtgaggccctgagacacccagagtgtgccctgcaggtgctcgggcaagtgtcgtggacttcgtactgctaggaagctcc

SEQ ID NO: 706879 - DNA, 82 bp, Homo sapiens
gaagctcaccgagacggcgatccgggcgctcgagacttaccagagccacaagcttcgagagctgtgcccaggagtgaacaac

SEQ ID NO: 706880 - DNA, 100 bp, Homo sapiens
ttgacacactaaagatgtccagtaagagatggacagagacgtatgtgcgttggtctcctaagggcacctacctggctacctttcatcaaagaggcattgc

SEQ ID NO: 706881 - DNA, 83 bp, Homo sapiens
gggagccgggcgcggggagctgcgcgaagccggggcggagcacgcgagctatggcattgaagttgatatcgatgtggagcacg

SEQ ID NO: 706882 - DNA, 82 bp, Homo sapiens
ctttgacgtccagaagaccaagtacctgcagatcctgacctctctgatgagatggatcggtattgcagttggacacatatat

SEQ ID NO: 706883 - DNA, 90 bp, Homo sapiens
cggtaccgttacgcggagctctcggaggaggacctgaagcagctggtcatttaatgaacctgaagtactatgtctctccttctgacctac

SEQ ID NO: 706884 - DNA, 100 bp, Homo sapiens
tcatagccgagtatgaaagtcaagtcaaagcgtggggtagagcagcggctgccatgctcttctgtggcttcatcatcctggtgatctgtttcatcctctc

SEQ ID NO: 706885 - DNA, 100 bp, Homo sapiens
ccccgcttccgccgcgtcggaatgagctcccggaaagatgggcttaggtcacgagcaaggatttggagccccttgtttaaaatgcaaagaaaaatgtgaa

SEQ ID NO: 706886 - DNA, 82 bp, Homo sapiens
atagaagacaataaggttctgggaacacataaagctcctgggcttcttcaagggaatgagcttccccattgccagcatagct

SEQ ID NO: 706887 - DNA, 100 bp, Homo sapiens
tgcaacgcgccaaatctaaactggtctcagccttagatccaaggacagtccaaggaagtcctaagaccatggagttggtgatctgggatctgggtttgct

SEQ ID NO: 706888 - DNA, 76 bp, Homo sapiens
tttatattcatctcaaaaacaaaattctgaactcaggacttggcaagtaaaacttccttttcctgtagatcaaatc

SEQ ID NO: 706889 - DNA, 83 bp, Homo sapiens
ccttccgacgtgggcggtgggccccagccccacagaccagcccagcattcaggttagtggttacttggatgattgtacctgtg

SEQ ID NO: 706890 - DNA, 80 bp, Homo sapiens
gcggaggacagctctgatgaggagggggatatgagactttctactcggaatatcctgagtgttgcgtggatgtaaaaccc

SEQ ID NO: 706891 - DNA, 82 bp, Homo sapiens
gctgcggccgtcgcccaggagtcatcggacgccagaatctggattttttatcaagcagaaatgcatcgaacaacgagaatca

SEQ ID NO: 706892 - DNA, 74 bp, Homo sapiens
tcctaatcccaatgctgaagtaagattgtcttggaaatactaagttggccctgcctctttcttgtcgcagtcag

SEQ ID NO: 706893 - DNA, 100 bp, Homo sapiens
gaacgagctcttccctggccccgtgagccttttccccacgactctgaaagaggacagcgttcccaatgtcccagtttaagcgccagcggatcaacccgct

SEQ ID NO: 706894 - DNA, 75 bp, Homo sapiens
ctcggggtctccctacaccaacggtcttttgccaactcctattactcagcaagccagtttgacatctctggcaca

SEQ ID NO: 706895 - DNA, 100 bp, Homo sapiens
cctgttaggggtgccccattgcagaaagccactctggatgcggttcatgctattattcagccggcagggaaaactgcggctgcaaaaatggtacctggcc

SEQ ID NO: 706896 - DNA, 75 bp, Homo sapiens
ctgaacaagacatggaaggaaatgagggcaacttctgaagacttcaacaagaaaaactgttcttgaaaaccacct

SEQ ID NO: 706897 - DNA, 96 bp, Homo sapiens
gccgagctgaggcggtcgcggccatgaaggcacatgaggcagcattggaagccagagccagtccagagatgagtgaccgaatacagcacttggaga

SEQ ID NO: 706898 - DNA, 100 bp, Homo sapiens
actggcacttgtcctcctgtttctatagaaactgggttggaagtcagagctgcacaaagggaaaggatgagctttgatccaaaccttctccacaacaatg

SEQ ID NO: 706899 - DNA, 98 bp, Homo sapiens
gatatgggatgctggaggacatctgggggccacaaatgctccttctcctggagacgcaactcaagattccaaacagaggcattgatttactgaaaaaa

SEQ ID NO: 706900 - DNA, 100 bp, Homo sapiens
aactgccctgctcttcatcccagcttcgagagctgtgcccaggagtgaacaaccagccctacctctgtgagagtggtcactgctgcggggagactggctg

SEQ ID NO: 706901 - DNA, 100 bp, Homo sapiens
ccccgcctcccattccggacctcgttgaggtggagagcagcgtggggtgctggagaatctggtaaaagcaccattgtgaagcagatgaggatcctgcatg

SEQ ID NO: 706902 - DNA, 50 bp, Homo sapiens
gggtggagtgtaggtcatatcgccgcgctgcaagctttcttcctggtggc

SEQ ID NO: 706903 - DNA, 90 bp, Homo sapiens
gtctggagccatgaaggccttgtgctgaccaagctgctcacctcggcaaaatcctcaatgatgatactgctctcaaagaatataaaattg

SEQ ID NO: 706904 - DNA, 82 bp, Homo sapiens
gagggggaccgggagaggcaccaaatctggcctgggggcccgagaagcttcctctcaggagggccgtgtagccatcacccga

SEQ ID NO: 706905 - DNA, 49 bp, Homo sapiens
ctcgaatgggcacacctgtgtagatatgaggccccaggattcctggcga

SEQ ID NO: 706906 - DNA, 75 bp, Homo sapiens
cccaaaccttagaaagctggatgatacaggttggtgacatcgtgaaagtcacaaggatgaatataaatggccagt

SEQ ID NO: 706907 - DNA, 98 bp, Homo sapiens
tggtcaccatggcaaccttgtccctggcccggccctccttcagtttagttgaggataccacattagagccagaagcccagtggagcaaaatgagagcg

SEQ ID NO: 706908 - DNA, 75 bp, Homo sapiens
aaacctcaggacttgagtaacagcaacatgacactttttcaaaaatggcaatggtatcagaattcctcaagcagg

SEQ ID NO: 706909 - DNA, 90 bp, Homo sapiens
ccaagggattcagcctggcggacatcccctaccaggagatcgcaggtcctgagggagtctaacaagttagcagaaatggaagaaccaccc

SEQ ID NO: 706910 - DNA, 97 bp, Homo sapiens
aaagaatcttgttcttgcagggattaagattattcttggagaaaccctgtctgtttactgtaaccttttgcactcaaattcctttatcaggaataac

SEQ ID NO: 706911 - DNA, 90 bp, Homo sapiens
ccgggggcctggctaaggaaaccctattacctccagggattttatattggaagacatggatcttgctgccaacgagatcagcatttatga

SEQ ID NO: 706912 - DNA, 100 bp, Homo sapiens
cggagacgtcggccagcaccgagagcctgctggaggagcgggccgggcggggggcctcggaaggtttattaacaaaactaggatacccaagactgaagaa

SEQ ID NO: 706913 - DNA, 82 bp, Homo sapiens
caattaccaaacagaatggacaagcttaataaaataaccgtccccgccagtcagaagttgagctctaagcgaaagacatgag

SEQ ID NO: 706914 - DNA, 100 bp, Homo sapiens
cagattcgcagtggtcgcttcttctccttgatgaggtggaggaccatcctgctacagtattgctttctcttgattacatgtttacttactgctcttgaag

SEQ ID NO: 706915 - DNA, 83 bp, Homo sapiens
cccaactggccccagtacaaaggtgtccaacacgctctcttgggctctgtatgagctctcccggcaccccgaagtccagacag

SEQ ID NO: 706916 - DNA, 100 bp, Homo sapiens
tgtcatcccacctgagaaccatgctcaccgacccttgaccaggagttaaactttgggatgtgcccgtgatgttggaccacaaggacttagaggccgaaat

SEQ ID NO: 706917 - DNA, 82 bp, Homo sapiens
ttggctgccgtccccgctgctgtgcattggcaattctgtggtgttcttggtcacacatttatggagtttctgaagggcagtg

SEQ ID NO: 706918 - DNA, 50 bp, Homo sapiens
cccggacagagcccgtggtcgcgcaggctttggatctggctgccctctcc

SEQ ID NO: 706919 - DNA, 75 bp, Homo sapiens
agtcaactgaatggctcagctgagcagaatgaagaaagtgggcttctccgaggcacgtgtggttctcaaatatag

SEQ ID NO: 706920 - DNA, 51 bp, Homo sapiens
aagacgccctggtgctcaccaagcaagacttcctctgctaaattacctcgc

SEQ ID NO: 706921 - DNA, 74 bp, Homo sapiens
tagaagtcgaaatggcagaagaagaggagaggacatgatgcatccactcaaacacttcgtgtatgatcatgtgt

SEQ ID NO: 706922 - DNA, 97 bp, Homo sapiens
cgggcggcaccgcggtgcgcaagcgcaaccgtcggtgggtcggggatcggtcgcctgagaggactgcgtgatctttgaggaagtggctgtgaacttc

SEQ ID NO: 706923 - DNA, 100 bp, Homo sapiens
caccggcccgggctccagcgatgacgaggacgacgacgaggacgagcacggtggcgtcttctcccagtccttcctgtggtagaggacattgaatacctga

SEQ ID NO: 706924 - DNA, 83 bp, Homo sapiens
cttcggctgtgtcaatgccattgaattctccaacaatggaggccagtggctggtctcagataacgaaggaggcccaacttcat

SEQ ID NO: 706925 - DNA, 100 bp, Homo sapiens
cgctggtggatgccgacgccgaggccttcaccgcctacctggctccctggggaagggaatgcagggttgctggggctgggcccagaagcagcagcaccag

SEQ ID NO: 706926 - DNA, 103 bp, Homo sapiens
cagacctgccccgcggctgggaggagggcttcacggaggagggcgccagctacttcatcgagtcactttcatgaattcaaaggcaatttaccagtgatttctg

SEQ ID NO: 706927 - DNA, 50 bp, Homo sapiens
atttcggaacctggagaaaatgtatggaacctggctaactgcaagctgaa

SEQ ID NO: 706928 - DNA, 93 bp, Homo sapiens
gggacaggagtatctgaggatggagaactcagcagtactactgagcgagtgtgcttgatccagggaacggttgaagcactgaatgcagttcat

SEQ ID NO: 706929 - DNA, 51 bp, Homo sapiens
tggtcggcgcgtggctcaagctagggctcgtgcaatccgcttcagacagga

SEQ ID NO: 706930 - DNA, 101 bp, Homo sapiens
agaaaagatgccctctgaatctttgtgtttggctgcccaggctcgcctcgactccaaatggttgaaaacagatatacagttgtcacaggtagtactgatgg

SEQ ID NO: 706931 - DNA, 100 bp, Homo sapiens
agatgacatgtctaattatgatgaagaagatgaagttggagcccttgtttttgacattggatcctatactgtgagagctggttatgctggtgaggactgc

SEQ ID NO: 706932 - DNA, 72 bp, Homo sapiens
gcactgcctccacacccacccctccccagctggacagactccaccacgtccacccttaggtcctccaggccc

SEQ ID NO: 706933 - DNA, 75 bp, Homo sapiens
caaaatgtcaacaaattgatgggtgtgagcctcagcagcgatttcattgctggcttttgtggtgagacggaggaa

SEQ ID NO: 706934 - DNA, 75 bp, Homo sapiens
ctgttgcgtggttcgttattaacaggctggccctgcataactcccgtttcctgagtctctgctctgagctggatg

SEQ ID NO: 706935 - DNA, 83 bp, Homo sapiens
ctcatggggaaaatctccccggtgactttcaggaacgtcaaggtcgtgggaaataaaaggcagttctacacagactgcagcaa

SEQ ID NO: 706936 - DNA, 100 bp, Homo sapiens
ctgccttccttgcagaggccatggaggacgaggagagacagaagaagctggaggccggcaaagccaaggtgtgatgaatgcagactctgctaccattttg

SEQ ID NO: 706937 - DNA, 74 bp, Homo sapiens
tctcggaaaccggtagcgcttgcagcatgcttatgttcctgaggaagaattgaaggcagcagaaatagatgaag

SEQ ID NO: 706938 - DNA, 100 bp, Homo sapiens
cccttccgccacggccgtctctggagagcagcagtttgcagaccaatacatctggtcagaagacgtggccctgatgttcaggagcccagggactctggaa

SEQ ID NO: 706939 - DNA, 73 bp, Homo sapiens
caagtaatggtgcaaagcctgaaaatcttggagaggcagaatatgtagtagcactttttatgtacatgtgttt

SEQ ID NO: 706940 - DNA, 100 bp, Homo sapiens
gctattgggaaagaagatgacaatgcacaatggcatgtccttcaagggttagattacttacacagtaagtgcaagatcattcatactgacataaagccgg

SEQ ID NO: 706941 - DNA, 96 bp, Homo sapiens
cgggacaactccgggatgatcgataagaacgagctgaagcaggccctctcaggtttcgattctggacaatcaggaagtccaagccacaatgatcct

SEQ ID NO: 706942 - DNA, 89 bp, Homo sapiens
gcttcccttcctcaaataaggaaattgacacctggcgtgcgtcactggtgtaccgcctgccccagtcgtgggtggggcccaaactgccc

SEQ ID NO: 706943 - DNA, 98 bp, Homo sapiens
gataagcaggaccagatgataccatgaagagaagtttacaggccctctattgccaactgttaattagcagacttgaagaaagagaagcagaactgaag

SEQ ID NO: 706944 - DNA, 124 bp, Homo sapiens
tcaggaccgggcctcaaaatggccacacgcgtacccccgtagcggaaaaacgtgctggagaatctggtaaaagcaccattgtgaagcagatgaggatcctgcatgttaatgggtttaatggaga

SEQ ID NO: 706945 - DNA, 100 bp, Homo sapiens
ctggtcatggtcctcactactctcattctcatattagtgtgtgcttggcactggagaaacaggtgcctggaatacttattaagaaacgatgcaaatccag

SEQ ID NO: 706946 - DNA, 87 bp, Homo sapiens
acagcttttcatcaaacccttcaactcctgttggctctcctccatctctctcaggtatatcaagttactgtgtatcaggcaggggag

SEQ ID NO: 706947 - DNA, 100 bp, Homo sapiens
gtgatgtcttccagactcggtgctgtacccgccaccaagacatttggaggaggtggtggtggtgctagaagtaatctcaatatgaatgctgctggtaacc

SEQ ID NO: 706948 - DNA, 110 bp, Homo sapiens
caactgcaactacgatggctacgccaactccatctacaccgtcaccatagggccaagaccagcttcaagtctccatggtaccagaaaacaacaacctcacagcacctgaa

SEQ ID NO: 706949 - DNA, 80 bp, Homo sapiens
gctcctgtcagtggacagtttggaaaattgcctaagaattatgacccaaaagttaccccagatccagaaagatggctgcc

SEQ ID NO: 706950 - DNA, 75 bp, Homo sapiens
cctcacccgaacatcagggccctccagactcaggcgccccaacagcccatacatcgtgtacatgcttcaagagat

SEQ ID NO: 706951 - DNA, 90 bp, Homo sapiens
cttggactcttgattggaatgttctccctgcagcagtcagcccaaaggaagacgtttgatgcaaatgatttgtatcaggggcagaatttt

SEQ ID NO: 706952 - DNA, 100 bp, Homo sapiens
tactctcgctcacgcagcaggagcaggggacgaaggtgctgtatatattgaccagtactgcaatcctctctccgacatcagcctcaaagacatccaggcc

SEQ ID NO: 706953 - DNA, 75 bp, Homo sapiens
gtgatttcttctgacttgagcctgcagtgtgctgtgagagatctaccactagaacatccagtcatggataaaaat

SEQ ID NO: 706954 - DNA, 89 bp, Homo sapiens
tggttaacttttttgctgcaatcacaaagttgtttacattcagagctctatcaataagaggaatacatattacagtgaattcgacaacc

SEQ ID NO: 706955 - DNA, 89 bp, Homo sapiens
aaaaatggagaggtacagaatttagctgtcaaatggagcaatttacagcaatgagggatttatacatgaaaaatggacaaggatttgca

SEQ ID NO: 706956 - DNA, 83 bp, Homo sapiens
cagaaggagctcaccattggctcggtttccttgttgcagaatgaaagtgtagaaaaaaacaagagcatacaaagtttgcacaa

SEQ ID NO: 706957 - DNA, 83 bp, Homo sapiens
ccccaattcctacttcatggatgtgaaatgcccagtcttatgatgtaatcagcgcgatttcacttcctgaatttcgatgaatt

SEQ ID NO: 706958 - DNA, 100 bp, Homo sapiens
gtttacacttgtcaacttcctcttcagtcatcagtcctttctgagaaaagtctacagcattctttctctgcaggttctcttaactacagtgacttcaaca

SEQ ID NO: 706959 - DNA, 75 bp, Homo sapiens
agcagagaacttctttatccttcgaaggaagcctgtggaggttgctccttgagggcaggacagttcttatggctt

SEQ ID NO: 706960 - DNA, 82 bp, Homo sapiens
aaagggcttaggcccagctgtcttggagcaaagcagctgttgtggggtataatttgggcgactacaatggagagatcatgtc

SEQ ID NO: 706961 - DNA, 116 bp, Homo sapiens
ggtcatctgggcgtgcgggtcccgggttttgatcgcgcgtttgtgtgactattatatggttaaaaagattttggaggaaaacagttcaggtgacttgaacataaattgcgtagatg

SEQ ID NO: 706962 - DNA, 75 bp, Homo sapiens
gttcgcggctctaacggggctttctacaagtttggtgccctggttgtcagatgttggaaagcagtaggacggaac

SEQ ID NO: 706963 - DNA, 74 bp, Homo sapiens
agaattctgggcttccacacaactccagtgctaactcaacagatggagtttcactcttgtctcccaggctggag

SEQ ID NO: 706964 - DNA, 80 bp, Homo sapiens
cgctgagcggagcagctgcgccacgtcagcagtcggctttgattataaaggagaagtggagaagcacacatctcagaaag

SEQ ID NO: 706965 - DNA, 100 bp, Homo sapiens
tgtcgtacatccttgtgggagagaacctcatcaatttccacatttcttccaagttctcttgccctgagacgaccatcagccgcgccttcatgaacgggag

SEQ ID NO: 706966 - DNA, 87 bp, Homo sapiens
cagcaagatcggcaggcgagattgcctgacccaggcctgctcggccctcacagggtgctggagaatctggtaaaagcaccattgtga

SEQ ID NO: 706967 - DNA, 100 bp, Homo sapiens
tccaattcaagaggaggagaggggttgttttataaactgcctggccgaatcagccttttcacgctcaaggctgtgaagctcaccagctctcgaacccagc

SEQ ID NO: 706968 - DNA, 100 bp, Homo sapiens
tgagggattgctactgcacggtgaacctggaccaggaggaggttttcaggaccaaaattgtggaaaagtcactctgtgcctgaagacctctcattagaag

SEQ ID NO: 706969 - DNA, 75 bp, Homo sapiens
aaaacatcgtggccaacacggtcttgctgaaagccagggaaggtatccgttacagcactgatgtgagtgtagatg

SEQ ID NO: 706970 - DNA, 75 bp, Homo sapiens
gccggccgggattcgcggcccggagctcgggaccggtcgcaatggaagaagagatcgccgcgctggtcattgaca

SEQ ID NO: 706971 - DNA, 83 bp, Homo sapiens
ggagcggatcagaagcaagacccagcggctctccaaggtctgcctcagccacctccctgacgctgtcccactgtgtggatgtg

SEQ ID NO: 706972 - DNA, 75 bp, Homo sapiens
ggatttcaacatgcctctgacaatctctagtttccaaagaactactggttcagattttagctcttcccaagttgt

SEQ ID NO: 706973 - DNA, 100 bp, Homo sapiens
tgaagaagcagttctacaaggcgagccagggatttgtcttggctgttactatgacacgggaagcaattgatgaatttcggcgttttcagcgtgacaagga

SEQ ID NO: 706974 - DNA, 100 bp, Homo sapiens
tggagagcttcatcaaaaatagtgatagctttgataagtacctgtataagaatgaaatccatgcactagataagcaaacatttaaaggactcatatcttt

SEQ ID NO: 706975 - DNA, 98 bp, Homo sapiens
cttgaggtggaggactcagaccctgagcctgaaggggaggcggaggacagaatcatgtgagggccaaccggggaaggtggagcagatgagcacacaca

SEQ ID NO: 706976 - DNA, 98 bp, Homo sapiens
agagacagaagcagatggattcgtccttttaggtcttggtggatgtcagtgcttactccccatgaaattaaattttacttcatcctttgagaagcgaa

SEQ ID NO: 706977 - DNA, 88 bp, Homo sapiens
tctctcatcttgggaatctgcgtcagaagtcactcgcagtcccgtcagcccagggcgtctctggccgagcctctttttgtggaaaacg

SEQ ID NO: 706978 - DNA, 100 bp, Homo sapiens
caagagttcagaccgtggcgaagtggagagtgacatgcagttggatggcggtgactgcgtggaattgtcttagaagaaagaaggcaagccaccattttac

SEQ ID NO: 706979 - DNA, 75 bp, Homo sapiens
cctgcaaatgggcaacaggccagcagccaaagtcaagtctggcaccatctttgacaacttcctcatcaccaacga

SEQ ID NO: 706980 - DNA, 101 bp, Homo sapiens
tcaagaacttcttctgaggacagacaggtgctgtctctagcatcacctctcagcacgattttcccgagagttcacagtaagactttgaccccgacgcaggc

SEQ ID NO: 706981 - DNA, 75 bp, Homo sapiens
cgttgcttgcttgcctgtgcgcgcgtgcgcggacatggcctcaaacgcggggatctgacgagcttttctctactt

SEQ ID NO: 706982 - DNA, 80 bp, Homo sapiens
tgaccctgtaacccaaaggaggaaacagctggctaagctcatcattgttactgatcacctcagccagttctcagacactt

SEQ ID NO: 706983 - DNA, 90 bp, Homo sapiens
gcgcgcgcggctgcggggctccagggccgccccgcccgcaggtgctatgctgtgggccccgctcaggtaatcattaccaaatgaggagga

SEQ ID NO: 706984 - DNA, 100 bp, Homo sapiens
cattgctccaaatatccgttgaagcagacttaattcagtgcacaaatgagatgaatgtgaacatcccacagttggcagacagtttatttgaaagaactac

SEQ ID NO: 706985 - DNA, 82 bp, Homo sapiens
attgtcccagatatagccgttggtacaaaggaaccccggggttagcaccgtggtgctgggtgcctatgacctgaggcggcgg

SEQ ID NO: 706986 - DNA, 82 bp, Homo sapiens
cggagagggtgctggctgccgcgcggccgagattttaggacagcaaattaatgactttacccttcctgatgtgaaccttatt

SEQ ID NO: 706987 - DNA, 83 bp, Homo sapiens
ggtccgggcttggagttcgcctcagacgcggtggagccgccggagtctgagaagataacgaaggaggcccaacttcattcaat

SEQ ID NO: 706988 - DNA, 74 bp, Homo sapiens
gggtgattctgaagagggtctggaggagccttctcaagaacagagaaacttccaattgaagacactgagctgaa

SEQ ID NO: 706989 - DNA, 75 bp, Homo sapiens
ggggggagaacgttactgtggagaaccaaccaaggaattacatgaacgacagccttcgcaccgacgtcttcgtgc

SEQ ID NO: 706990 - DNA, 98 bp, Homo sapiens
gctgggggaccttcagcaacctctgggaacacaaccaagcaatcatcaagcacctcctcgcaatcccacagagtattgatgaggaaactgaagtttgg

SEQ ID NO: 706991 - DNA, 100 bp, Homo sapiens
aaaagacctcctattaatgtggaaactctgatgaggaagaaagtgcttcagaatctgaactttggaagggtccactaccagagacagatgaaaaatcaca

SEQ ID NO: 706992 - DNA, 100 bp, Homo sapiens
aataagccgatgcttgccgatgttgtcttcgaaattcaagatacttagtcacctgttcctccacctcttgaaacttgttttgttggtagttgttctgtct

SEQ ID NO: 706993 - DNA, 83 bp, Homo sapiens
cacaaaggcaacggtgactttcaaaatcctcagacagattctaagcctcctgagggattgttaggattccacacagactggct

SEQ ID NO: 706994 - DNA, 100 bp, Homo sapiens
gacagggatgtctacctggtaatagaggacttgaagcagaaagcaagtgaatacgagtcagaagggggccgaaactccactgagtgtacgcttatcctga

SEQ ID NO: 706995 - DNA, 89 bp, Homo sapiens
catggagcccacagcatcctcaggagcttactccacgggaacagcctctagataatctgagttgttgaaaatacgaagcctgttactcg

SEQ ID NO: 706996 - DNA, 96 bp, Homo sapiens
aagtcaccacaaaaacctatcgttagagtcttcctgcccaacaaacagaggacagtgtgggaagttgctgaggtggttttggaggtgttttataaa

SEQ ID NO: 706997 - DNA, 75 bp, Homo sapiens
gtaagaagaattccagtcttataaaattagctctgctctggtatcatactgtagtccgcccgttttttgccttgg

SEQ ID NO: 706998 - DNA, 75 bp, Homo sapiens
ggcatccttcttacgtcgggtggttttactggagtattggaactcaggcttctccagggaaagtgaccgaggcag

SEQ ID NO: 706999 - DNA, 82 bp, Homo sapiens
agaagaaaccagccgaacttcagggtttccaccgttcgttcaaggtgtttcccattaaacactaccaggacaaaatcaggcc

SEQ ID NO: 707000 - DNA, 75 bp, Homo sapiens
aaaaggccatgctagaagtacataagaccttatttgcttagcagtgtctgcaaaaacgaatcttttcctacaacc

SEQ ID NO: 707001 - DNA, 74 bp, Homo sapiens
ggtctgcagtctgtggtgtgtttgctgttcccaggttggatggcaagcatgtggtgtttggcaaagtgaaagaa

SEQ ID NO: 707002 - DNA, 101 bp, Homo sapiens
atattttgcctgctggaacctgctgtatctactcaagagtggaagttttcacaggagctgaccagtgctttggtgcatctaaaactgcatctttttattca

SEQ ID NO: 707003 - DNA, 100 bp, Homo sapiens
agtgagagatggaacccgaagaagaaaggattcgttacagccagagattggtacctgtacgtgaacagccgcgcctggcccaacggtgcggtggtggccg

SEQ ID NO: 707004 - DNA, 100 bp, Homo sapiens
cgatggcagcgctgagtgccaggatggctctgatgagtcccaggagacgtgctgctctcggctgagcaaaatctattcccagtccaccctgtcactgtcc

SEQ ID NO: 707005 - DNA, 74 bp, Homo sapiens
aatctgaaggaaaaggttccacctttgctaagcttttatcaaaatacaactcaaacctagctactccaatagca

SEQ ID NO: 707006 - DNA, 82 bp, Homo sapiens
tccgcacctcggggacattattgcgcgtggaacggctgcttttggaaggtgactgtctctgtacaaccagcttcaaagtgat

SEQ ID NO: 707007 - DNA, 100 bp, Homo sapiens
aaatgattctgatcgcaaatacctgaaagattgggcaagagaagaattcagaagaaacaaaagtgccaccgaagagtcgtgagatggagaataaagaaac

SEQ ID NO: 707008 - DNA, 100 bp, Homo sapiens
ctactattggcatgtgattgcagccaagctggcttttatcattgtcatggagttagggcctagtcaaaattttgaagctgagtcaattcaagataatgcg

SEQ ID NO: 707009 - DNA, 100 bp, Homo sapiens
cagaatactacgttcagctaaattaagggcaaaataacatggcagccagacgaattacacaggagacttttgatgctgtattacaagaaaaagccaaacg

SEQ ID NO: 707010 - DNA, 100 bp, Homo sapiens
gctgtagaaagcttaaacttccaggatgttcacggaagaccagggtgtagatgacaggctgctctatgacattgtattcaagcacttcaaaagaaataag

SEQ ID NO: 707011 - DNA, 75 bp, Homo sapiens
cgatagggatgcagaggatcagaaccggtacctggatggcatgatggcggctcagcggcagcgggcgctggccat

SEQ ID NO: 707012 - DNA, 100 bp, Homo sapiens
tttcctgtagtcccaatgcagccaacaccatcctgaggcaactggacatggagttgatctctctaaaacgtcagacatggcagggaggtttaatagacat

SEQ ID NO: 707013 - DNA, 83 bp, Homo sapiens
ggacggcacaccctacgttaccgtgctcaagggaacggcaggagcagctgatgggatatcggaagagagggccgaagcccaaa

SEQ ID NO: 707014 - DNA, 89 bp, Homo sapiens
cagcggggaggcgggcagctctgcccggcagaaacctgtcttggtgaggacgcttgagcggaagttagaagcaaaaatgatcaaggagg

SEQ ID NO: 707015 - DNA, 90 bp, Homo sapiens
gtaagattgtcttggaaatactaagttggaagaatgtcttccaagcaagccacctctccatttgcctgtgcagctgatggagaggatgca

SEQ ID NO: 707016 - DNA, 134 bp, Homo sapiens
gcagaagcttattgaatttatttaccttttcagagtttccctttaagcactacttttgcctcatcctacaaattttgcttttatgatggtcaacagcctgtgctggctatcacagatcctgacatgatcaaaac

SEQ ID NO: 707017 - DNA, 75 bp, Homo sapiens
cgccgacatgaagaaagacgtgcggatcctgctggtgggagaacgtgctggagaatctggtaaaagcaccattgt

SEQ ID NO: 707018 - DNA, 100 bp, Homo sapiens
catgaagcttctgtgaaccaacttttcaagaaaaagcaatggagattggatggatgcacaatcggagacaaaggaagatgtggacaaggcagtgaaggcc

SEQ ID NO: 707019 - DNA, 95 bp, Homo sapiens
cgcagtggtcgcttcttctccttggagttgacagagctgcagtcccagatctccgacacatctgtggtgctgtccatggacaacagtcgctccct

SEQ ID NO: 707020 - DNA, 142 bp, Homo sapiens
agacaagcttgggaagaggatttaatgttgtttcttccaactctggaaacaattccactagaaggctcaatagttcagacagccttttgattgattatcaatttaccttcagcttattacaggaagatgatcgccaccatac

SEQ ID NO: 707021 - DNA, 101 bp, Homo sapiens
tcgtaaacatctgggtgtatatcaaacggcaagatgtccagtaatgtcccggcggatatgatgttcctcctgctgatcaagagaagctttttatccagaag

SEQ ID NO: 707022 - DNA, 155 bp, Homo sapiens
ctgtgtcgggcattaccagaagagtcttcatgtggacagtctcagggacaccatgtagagaattttggtctcgattcagccgtgctggtatagaggactctaagaagtggggcatgctgtttctggtgaaccagctgtttaaaatctacttcaag

SEQ ID NO: 707023 - DNA, 100 bp, Homo sapiens
ggctgacctcgctgtacgccgagcacccaggcgactgcctcatcttcaaggtacattattccatctttgcagaagctcgatgctgggttttaccgctgcg

SEQ ID NO: 707024 - DNA, 87 bp, Homo sapiens
tgcatgctgtgtcttggggccctttgggacgagtgctgtgactgtgttggcgcggatcaagaagatcatgcagacggacgaagagat

SEQ ID NO: 707025 - DNA, 83 bp, Homo sapiens
cctcgcttgcagttcagcgaccacgaacactctgctccagccaaggtggtgagggcagctgttcctaaacagcgcaaaggcag

SEQ ID NO: 707026 - DNA, 100 bp, Homo sapiens
aagcgatgaaatccaaaggtgaatcttttggttggtgattttgatgatagccacaaagcaagcagggttgagaaatggagtgaagttttgtaaagtacaa

SEQ ID NO: 707027 - DNA, 117 bp, Homo sapiens
ctcaatatctgtcttcggtggactccttcggcagtccacccaccgccgccgcctcccaggagaactacgatgacccgcacaaaacccctgcctccccagttgtccacatcaggggcc

SEQ ID NO: 707028 - DNA, 83 bp, Homo sapiens
cccagaaagagaagcgtgacccggaagcggaaacgggtgtccgtcccagctccgacaggtgcagttcaggagcagatgagatc

SEQ ID NO: 707029 - DNA, 50 bp, Homo sapiens
cttcgttcaagacaggtgtttaagccaggaggatgcattagcacaacagg

SEQ ID NO: 707030 - DNA, 100 bp, Homo sapiens
acggcacctacacttgcgaggcgtccaataagcacggccatgcgagggcgctctacgtacttgtggtctacggctttcctcggagacgggtggcatgggg

SEQ ID NO: 707031 - DNA, 100 bp, Homo sapiens
gcctggacgaggcacaggccagatgaaattgacagttcttcaatgtcagatgatgatagaaaagaggttgtaaacattcagacttggataaacaaaccag

SEQ ID NO: 707032 - DNA, 83 bp, Homo sapiens
gtcagttgctgtgtttctgccggatcagatgagcagattggttagtgaagaaactaatctggattcactccctctggttgata

SEQ ID NO: 707033 - DNA, 100 bp, Homo sapiens
caaataatagctgtttgtattttggctgctgcaggagccattttagtaacaatttggacaagacagcaaatgctattgtcgaagttttctaaagaagaat

SEQ ID NO: 707034 - DNA, 99 bp, Homo sapiens
cggacggggagctgaacgtggacagcctcatcacccggctgctggaggatgccttcaattaagttgcagagttctgatggagagatatttgaagttgat

SEQ ID NO: 707035 - DNA, 90 bp, Homo sapiens
ggggaaaaggcttttcacggagcaggctcggagcctacggggctggcctcggactggatggggttcatggcctcccacgggaacgacgcc

SEQ ID NO: 707036 - DNA, 100 bp, Homo sapiens
atggagctcaagaccagggccctgcagctggaagaggagctgttccagaccgagaaggacatcctgctgcgacctgagctggaggaactcaggaacaaac

SEQ ID NO: 707037 - DNA, 102 bp, Homo sapiens
gatgaacccaacctagtgggtgtaatacatcatgaactgcaggcataagctgtggccatgactactgaagtaggctctgtgtctgaagtgaagaaggactct

SEQ ID NO: 707038 - DNA, 96 bp, Homo sapiens
cggaggcgacggtggcggctctcggagccggcgcgaatccggcccccgcagcgggacccgggctcttctaacatataagagtgacccagccatgag

SEQ ID NO: 707039 - DNA, 128 bp, Homo sapiens
agggaataataagtcacaaagggaggagctggactccatcctcttcctttttgaagtcattcactggaactcccccaagaagctccgggtgaagaacaagcatgtggagttttttcgcaacctctacc

SEQ ID NO: 707040 - DNA, 100 bp, Homo sapiens
cgagcgtgaggagactcagcagaaggtgcagtgtccacaggatgaaatgtccgagtcaggccagtcctcggcggccgccacacccagcaccacaggcacc

SEQ ID NO: 707041 - DNA, 74 bp, Homo sapiens
ccgagatgagaggagaagagcccagcacaacgaagccccgagcctggagatgagggggagccggggcggtcggg

SEQ ID NO: 707042 - DNA, 100 bp, Homo sapiens
tgaagtccgagtcatacccccaggagtaagagcccatagcagtctgccagacaatagagcatatgggggacagatgatttctgctgaagattgtgagttt

SEQ ID NO: 707043 - DNA, 88 bp, Homo sapiens
agtggcagattatggaatagttgcagatttatttaaggatccctctgtgacccagctgaccaacgccccgcagggcggcctggcggaa

SEQ ID NO: 707044 - DNA, 75 bp, Homo sapiens
gaaggcacggagtcgccgcggagcgcagccaagtatcttcaagaccttctcatggagagtgtgaatttttccccc

SEQ ID NO: 707045 - DNA, 78 bp, Homo sapiens
atcttatctacgaaatgattcaggtttgatctgtggatgaaatgaatcatgattttcaagctcttgcattagaatctc

SEQ ID NO: 707046 - DNA, 83 bp, Homo sapiens
ccggaagagagacaaagtgatgttttacggccggaagatcatgaggaagcgtctgttcctcacacaccccgcccaaggacgtg

SEQ ID NO: 707047 - DNA, 75 bp, Homo sapiens
ggaagctgaaaccaactcagaatgcttctgagaagacggcagttctgctactgcgaattgatgacatcgtttcag

SEQ ID NO: 707048 - DNA, 122 bp, Homo sapiens
ctcagtggttgaatcataggcaagtggtgtgtggcacaaaatgcaacacgctacaaggctttggccgaccaagtgtgtaccatgctgctattgtcatcttccttgaattctttgcgtggggc

SEQ ID NO: 707049 - DNA, 135 bp, Homo sapiens
cggcaggaggacccaggaaagggacatctgctcctccaaggcagagcggctcccccctttcgggtgtcgtagtcattcttcagcacaattcttaattggagaccaagaaccctgggcctttagaggtggtctagc

SEQ ID NO: 707050 - DNA, 75 bp, Homo sapiens
taacttctactgacgaagcttggaagttgcagaaggatgctttaatctggatcccaatagagttttggatgtcat

SEQ ID NO: 707051 - DNA, 100 bp, Homo sapiens
gtggcggtgctgaggcacctggagaccttcgagcaccccaacgtggtcaggtgcctgtgtagatcatcctagaatacctgtgtggtgctgtccttcctca

SEQ ID NO: 707052 - DNA, 100 bp, Homo sapiens
tcacgactgtcttcttactggcagtggaacgacctgtggaaacctgtgatccattctcattaaataaatctctggttggctgctgaacagttcaagaaaa

SEQ ID NO: 707053 - DNA, 95 bp, Homo sapiens
ttttcagaggggatcgttgtagaagtctaactggaaaacccaaacttttcattattcaggtcaagaacttcactgaggtccaccctgactacggg

SEQ ID NO: 707054 - DNA, 75 bp, Homo sapiens
tcgcctcggacgtccactgcaccctgcgcgagaagttgctctaggtcgtaaccagcctttgaaaaaggagaaacc

SEQ ID NO: 707055 - DNA, 75 bp, Homo sapiens
ggggagccccgggagccgcacggagaactacgatgacccgcacaaaacccctgcctccccagttgtccacatcag

SEQ ID NO: 707056 - DNA, 83 bp, Homo sapiens
accgcctggtctctttcctgtggccagcccagacctcctgccccccgaggtctgcagtctcctgaacccagcagccatctacg

SEQ ID NO: 707057 - DNA, 82 bp, Homo sapiens
gcaaaactggagtcttctgcctgcgcagctgtacaggaagaggcacatacaaagaaaagaatccccgaaagggcggtttgtg

SEQ ID NO: 707058 - DNA, 74 bp, Homo sapiens
gggagctcagtctgctatcgtacattaggcctgacgttaaagaaaaggaacggctgtagtagatctctctggga

SEQ ID NO: 707059 - DNA, 75 bp, Homo sapiens
tagtggtataccaggaaattctgttctactcgtcacaaatctcaatcctgatacatttctcttgggaagttgtgc

SEQ ID NO: 707060 - DNA, 95 bp, Homo sapiens
gaaaatttcgatattgaagtgtcaaaatccatagatggaaaagatggatctgaaggtttgaatgggccaatgagtatcctcatcattgaagcatt

SEQ ID NO: 707061 - DNA, 100 bp, Homo sapiens
aggagcagccctggtgtcacctatcagtaaaagatcactgtgtccactactatgatcttcgtaacactaaacagccaatcatggtattcaaaggacaccg

SEQ ID NO: 707062 - DNA, 99 bp, Homo sapiens
tgccacctgaagaccattagcagcctgaagcaggaagaggcgacacagtacatcccccagcccatctcgcagtagcagtggtagacgagtgaaatcccc

SEQ ID NO: 707063 - DNA, 75 bp, Homo sapiens
atttctcttctaagagaagtagtaaaaccagctgcagtgttatcaaagctaagcggtacatcgagacggacccag

SEQ ID NO: 707064 - DNA, 101 bp, Homo sapiens
tttttattgacgaaaatggaacagcaacaattagagacacttgctcgatgcctgattttgtgggatgatattttaccaaattccaagtgggttgacagcaa

SEQ ID NO: 707065 - DNA, 87 bp, Homo sapiens
acgattgggctgagcagaggacgacatgttgcttttcgtggaggatactatggaattcataagaagttttcagtcagaagcaccatt

SEQ ID NO: 707066 - DNA, 50 bp, Homo sapiens
ggccgggctgccccgcaggatcatcaagatttggtcgtattgggcgcctg

SEQ ID NO: 707067 - DNA, 75 bp, Homo sapiens
tctgtcctcattctctgcgcctttcgcagagcttccagcagcgaaaatcgcgctgcaactcaaagccacgctgga

SEQ ID NO: 707068 - DNA, 74 bp, Homo sapiens
ggcctactacagcgccgcggggcccaggccgggagccgaccggcacagcagaagctccaccatgaggcgaggtg

SEQ ID NO: 707069 - DNA, 100 bp, Homo sapiens
cctggagtctgcgaaggccgggacccggttccccggcccacagtgggggtgtgcaaacccgagagaactgggctgtgtggttccggtgctggtgccgtgg

SEQ ID NO: 707070 - DNA, 82 bp, Homo sapiens
cctggagcctcagttggaagcagccgatccagcctgcggagcctgtggggcaggaaagatctaggagagagggagaaattga

SEQ ID NO: 707071 - DNA, 80 bp, Homo sapiens
ggtctctggagacatcttcagcagcattccaaaatatgcccggtgctatccgcccagctgctcctagaccaccatttagt

SEQ ID NO: 707072 - DNA, 50 bp, Homo sapiens
ggccaagtccttcgaggcaccaataaaatatactagagtaaaaggatggt

SEQ ID NO: 707073 - DNA, 100 bp, Homo sapiens
cgggcggggcgatggcgcgcgggaggggcggggccacgctgcgggcccgggccatggccgccgccgatgccgaggtcctgacctgagggctgcatcaaga

SEQ ID NO: 707074 - DNA, 75 bp, Homo sapiens
gatttccttccagaaatgatggtggatcattgctctttgaattccagtcccgtattgagaggatccagaatccag

SEQ ID NO: 707075 - DNA, 100 bp, Homo sapiens
ctgacttcaagaatgaagccacggacccttgcgcaccacacactggaagcagacgctgttcatgatggacgacccagtccctgtccatacaggagacgtg

SEQ ID NO: 707076 - DNA, 98 bp, Homo sapiens
tgctgcgcacctctgtcactgtgaaggtggtcatcatcccgccttttgaggacggcactccccggaggatggatagaatgacagaagatgctcttcgc

SEQ ID NO: 707077 - DNA, 75 bp, Homo sapiens
gggaccacaagatcctcatcgacagtatggtttgaagtggtgaacatggatttttctcggcttcacatgtacagt

SEQ ID NO: 707078 - DNA, 129 bp, Homo sapiens
tgctggtatatttctgaataatgtgaagtttactcatgctttctccagtgatctcatgaggacaaagcagtatcagactactgtcccctgtgctcagcctgatactgttactcattgcgctggagttgg

SEQ ID NO: 707079 - DNA, 98 bp, Homo sapiens
ctgcggccggagcgggcggctgagacaaaggcgacgcagaagatggctgtgccacccacgtatgccgatcttggcaaatctgccagggatgtcttcac

SEQ ID NO: 707080 - DNA, 100 bp, Homo sapiens
cagaaaatagcacacttttactctacgcaactgttgctttttcatgacttgcacacctacccctgtggagcgtgcaccctataagggagaagtcgccaca

SEQ ID NO: 707081 - DNA, 75 bp, Homo sapiens
tggaaatgtctactgcacagttgcaccactgagaaggacagagaagatggcgaattagaagatggtgaaatagac

SEQ ID NO: 707082 - DNA, 50 bp, Homo sapiens
gcctggggctgaacgcggctttctgagtccggcagcgtcttctcttgagg

SEQ ID NO: 707083 - DNA, 96 bp, Homo sapiens
gcctcgcctcctcgcagcagcgccatgctccaattaaggaacagctatatcctgcttccttctgtaagcagcatcgacttgtgcaagggttcagtc

SEQ ID NO: 707084 - DNA, 80 bp, Homo sapiens
tgattagcttcgcagtctggaaagctttaggagttcacagtgactcctggcggcgggcagtcagcactggggtccaggct

SEQ ID NO: 707085 - DNA, 100 bp, Homo sapiens
aaaagatctaaagtcacccggcggccaaaggccagtgactaccaacgtttggaccagaagaatcgagagctccagatcatgagaaagctagatcactgta

SEQ ID NO: 707086 - DNA, 101 bp, Homo sapiens
cagatcctggtcctcgatccgcccacagacctcaaattcaaagggaatgaaagctactggttgattttaaagtgcctgggcctcacaggtttggagatgtc

SEQ ID NO: 707087 - DNA, 97 bp, Homo sapiens
tctgtcgctcttgtgccctagcaccccgagaaccgtcagtttgagccagatgtcataggttagcttttcaagacacttcctgcatctctgacctgtt

SEQ ID NO: 707088 - DNA, 100 bp, Homo sapiens
gactcaggctgtgctttggaagagtatgcctgggtcccgccgggtctgaagcctgaacagaaatattcccaagagactctaacttaaaagacaaattcat

SEQ ID NO: 707089 - DNA, 75 bp, Homo sapiens
aacccacaaacatgttcacaacgggcatgatgttccatttaagcagacctcttccatagctgtagctggagcggt

SEQ ID NO: 707090 - DNA, 123 bp, Homo sapiens
tgggtatcaccgccctacacatcaaactccgggccacaggaggaaataggaccatcaaatgttttcaaaattgtgaagatgattatggaaagaaatttccaacctgtgattattttcagtttt

SEQ ID NO: 707091 - DNA, 71 bp, Homo sapiens
cctcctcccccatgtaccacacctgtgtggccttcgcctgggttttttgcatgtctgacacccatgactcc

SEQ ID NO: 707092 - DNA, 100 bp, Homo sapiens
ggggaagtgtctgtagcgtccctccctctcaaccacaataacaggcggagggtcggcgtagtgagtgttgaaaagatagacctgaagggattatcacaca

SEQ ID NO: 707093 - DNA, 80 bp, Homo sapiens
tcctgccgtccttctccactttcgccagcccgtgccgcgagcgcggcctgcaggagatgccgtagggccaggtgagctgc

SEQ ID NO: 707094 - DNA, 75 bp, Homo sapiens
aaggattccaagtaactcttatttggttttcttctggaggcaaaaaattaaaccaaccatctcaggacaccctga

SEQ ID NO: 707095 - DNA, 83 bp, Homo sapiens
aatttttaattctggaattctagagcctaaagagcaggaatcatggactgtgggtgatcttggaaaaagaagggcctcgttcc

SEQ ID NO: 707096 - DNA, 100 bp, Homo sapiens
cagagttgctcatggaggtgcacggaaatgggaagaggcccagtccagagaggaaaggaaacagattcattgtctgtctgaggatgagttaagttcttct

SEQ ID NO: 707097 - DNA, 80 bp, Homo sapiens
ccaaggggccggacacgctctgcttcgacaaggacgagttcatgaagaaatcctgccagaaacctgtagacaaatatatc

SEQ ID NO: 707098 - DNA, 100 bp, Homo sapiens
tttacctgtgagatgtttcatcccaacagtttttcgttggaatatacgttgcacatttatggcgattctgagtgtgagggcagacttctgccaggctcag

SEQ ID NO: 707099 - DNA, 82 bp, Homo sapiens
gcggatggccccaggtgtaagcgcagaaagcaggcgaacccgcggcgcaataacgtgcctccggagccagcgtggtggccat

SEQ ID NO: 707100 - DNA, 50 bp, Homo sapiens
gagcggaaaaacggagcctacgcccactttccttgtggaactgtccagag

SEQ ID NO: 707101 - DNA, 100 bp, Homo sapiens
ggacgagtcttggattcgtgaacagaccacagtggaccacttctgggttccaggaagaggccgactcagtcagccagaccctggcgaagctcaactccaa

SEQ ID NO: 707102 - DNA, 74 bp, Homo sapiens
gaggcctccccagccatgtggaactgtacctagtcgatagtcgctggttcaaacagtggaaaaaatatgttggc

SEQ ID NO: 707103 - DNA, 100 bp, Homo sapiens
cttggccagccaactggacagcggagcacgatgattgatagcccgttttacggagaagacttttactgtgaaattcctcggagctttcgtcacctgtcct

SEQ ID NO: 707104 - DNA, 95 bp, Homo sapiens
caagatcatggtggggagtacggacgaccccagcgtgttcagcctccctgactccaagttttgagtatccgaggagcccaggaggaggaacccac

SEQ ID NO: 707105 - DNA, 83 bp, Homo sapiens
cttccttttactattagcccatcaagaaatgaagaacgagattcagacacagagtaccatgtaatttccactttcaagaggaa

SEQ ID NO: 707106 - DNA, 100 bp, Homo sapiens
cgcccaggccagccccagcagcaacagcagcacaggaatttcttcacatggctcctggagaagtgaccatcacagttcgcctcatccgttcctttgaaca

SEQ ID NO: 707107 - DNA, 74 bp, Homo sapiens
tcctggacaattcacctgcctcctatgtcttccatccagacaatgctgcggcttacagggagaacacagttggc

SEQ ID NO: 707108 - DNA, 87 bp, Homo sapiens
tgttgccagatggtgcaatgttcaaagtactcaagatgaatttgagagtggtggacatgacaacagagtcaactgcatacagtggca

SEQ ID NO: 707109 - DNA, 106 bp, Homo sapiens
cccccaaaagttgtcaggttgaaaatggaagagtaattgcctgctttgattccctaaaggtggagccgccaccaaaatgcagattttcgtgaaaacccttacgggg

SEQ ID NO: 707110 - DNA, 90 bp, Homo sapiens
cagactgatgaaaaatagagctgatcaccgttccagccccaacgtagcaaacagagatttgggattagaatctaccttaatatcgtcaaa

SEQ ID NO: 707111 - DNA, 88 bp, Homo sapiens
ccccgccctcctcgtctcagccccaatttaacgggtgcatgtgcaagtagcctgcagtatgaaatgctgctgctgacggattctatct

SEQ ID NO: 707112 - DNA, 87 bp, Homo sapiens
atccccagcccactgggctacgcagtttgtcccatgaggagcacccccatagccatcctctctatggacatggtgtatgcaagtggc

SEQ ID NO: 707113 - DNA, 97 bp, Homo sapiens
gtgacaggctggttaaagcagcaaagattggatttgtcctgtatccccccagtggaggtcctgcatgggatctgatggatcatgaaaatattttgtt

SEQ ID NO: 707114 - DNA, 75 bp, Homo sapiens
cacaaaggaatgtgggggagagaagtcctgaccagctacagattctcgttgacactggaagcagtaactttgccg

SEQ ID NO: 707115 - DNA, 100 bp, Homo sapiens
aagaccttcaagtttgtcgtcgtcggggtcctgctgcagatgtctttggtggacttgggaaagaggttgctagaagcagcaagaaaaggccaagatgatg

SEQ ID NO: 707116 - DNA, 100 bp, Homo sapiens
aggcgtgctggccggcgtggagagccgccagggctctatcaaggggctggtgtactccagcaacttccaggaaacccagcgtttgctggcagaaccagtt

SEQ ID NO: 707117 - DNA, 80 bp, Homo sapiens
tatgccattggcaaagcagcaaccaattatcagtttacaacctgcacccactaaagcagcagctgtcgattcggcagacc

SEQ ID NO: 707118 - DNA, 75 bp, Homo sapiens
ctggctcaagaaatttgcctcgaaaaccaacttcccgtgcggcctgcgacccatggaaggagagtggtgacatct

SEQ ID NO: 707119 - DNA, 50 bp, Homo sapiens
cacagactctcagcaactcagcagagtctcctaaaaacccagaacagaag

SEQ ID NO: 707120 - DNA, 100 bp, Homo sapiens
aggccttatctgctcagcaagctgctgttattaaccttactggagtaggaagttttatgcagtcacaggcagctgtgttttccaagcagtgaagcacttg

SEQ ID NO: 707121 - DNA, 100 bp, Homo sapiens
ccaatttccagatgccttgttcaacaggtggaggtggaggaagcgtccctgggatcgagaggatgggtcctggcattgaccgcctcgggggtgccggcat

SEQ ID NO: 707122 - DNA, 75 bp, Homo sapiens
acaacaatatcggcattctgtgctacgaagggccaggcgtggacgccgccggaccgctgagactcggggcacggt

SEQ ID NO: 707123 - DNA, 100 bp, Homo sapiens
ttactgctgtgatggaaccacgccctactgttgctcctactacgcttatattgggaatatcctctcgccatttcataattctgaatcatgtctgataacg

SEQ ID NO: 707124 - DNA, 75 bp, Homo sapiens
tttggatatccctagaacgttgagggcacgagtcgggtcctgagaccagaaacgctgcagcagtgctgtgacctt

SEQ ID NO: 707125 - DNA, 100 bp, Homo sapiens
tggaagaggtgaagttgggaaactgcggattgccaacaagatgaaggggatgtccagacattcacaaatggcaaagatcagaagtcctggcaagaatcac

SEQ ID NO: 707126 - DNA, 75 bp, Homo sapiens
caacattcagacccatttccagtcatgagttcgagaacttgtcttggacaattgcaaatcaaatgatggaaaaat

SEQ ID NO: 707127 - DNA, 90 bp, Homo sapiens
ctggctttcagctcctggagtctgtgctcagcgggagatacagatgacccaccaagaattactcagaaccctgtgatcaatgggaatgtg

SEQ ID NO: 707128 - DNA, 82 bp, Homo sapiens
ggccgagcgggcggcttcctggcctgggcgctccggtggcggcggagcgcgagcccagcattgacctgctgcaggccttcgt

SEQ ID NO: 707129 - DNA, 75 bp, Homo sapiens
gaacagaagtctacctttgtggggcttacagaaaggccctgtggacatcctggagatactccttttggtactttt

SEQ ID NO: 707130 - DNA, 100 bp, Homo sapiens
ggtggaggttcgagcgctgttctcgctccggagccgctgcacatttcggtggactggcagaggaagtggacgacaaagttcttcatgctgcgttcattcc

SEQ ID NO: 707131 - DNA, 100 bp, Homo sapiens
gaaacgtgataagaagcacctggatgagacatttgctacagcatcccacattaagtcaacggtctgagtacagtggctcccccgattcaccaaggacctg

SEQ ID NO: 707132 - DNA, 100 bp, Homo sapiens
cggaagacctcactgaccccagagtggcagaaaggctgatgcagcagatatttacagaaagccttctgtgctctagtcgccttgaaaacatccacctggc

SEQ ID NO: 707133 - DNA, 96 bp, Homo sapiens
tacaccttaaagtatcagccaagaactcatgtcgtgtcccattttgtaaactgggagacacctcaaggatgtggacttgggttccagaactcagag

SEQ ID NO: 707134 - DNA, 75 bp, Homo sapiens
caagctcttccactacatcccgggcacggggtttacttccctgccctgaccagcctgctgtcgcagaaggtgcgg

SEQ ID NO: 707135 - DNA, 90 bp, Homo sapiens
ggggtccggacagccgcgcgctgagggtctcggggcgggcgccgcgggacctctccgggccatggtttctccacagacactacccaaagc

SEQ ID NO: 707136 - DNA, 100 bp, Homo sapiens
atctgaatcgacagtttcttttccggccctgggatgtcacgctctggcaggctgccctgagcacgctcaaccccaaccccacggacagctgtcccctcta

SEQ ID NO: 707137 - DNA, 90 bp, Homo sapiens
gaagaagttaatagtttaagaaagcaaagagcaggttcttcatcttcaaaaatgaacagtttggtgctgggtctgccgccagccggcttc

SEQ ID NO: 707138 - DNA, 90 bp, Homo sapiens
gtccagccctctccagtgtatccacagccccgacctttgatgagaactcagctgtccagaagggacttcctcgcccgaagagcgcgggca

SEQ ID NO: 707139 - DNA, 83 bp, Homo sapiens
gtcctcatcgggcttatgttcgaggtgacagagctgaatgaacctctctccaatgaagatcgaaatctcctctctgtggccta

SEQ ID NO: 707140 - DNA, 100 bp, Homo sapiens
caacgcctctttggaagaaatggcttctctagaggaggaagcctgcagccttaaggaagtggttggtgccttagtgacccatatctgcagtgggaatgaa

SEQ ID NO: 707141 - DNA, 100 bp, Homo sapiens
caccccgagaaccgtcagtttgagccagatggagaggagaggcagcagcatggcgagtgtcctgtcccgacgccttggaaagcggtccctcctgggagcc

SEQ ID NO: 707142 - DNA, 75 bp, Homo sapiens
tgttggtgcatttaactacaaaaccagaccaggcatttggaaagacctgaagaccatgggctctgtgtctctctc

SEQ ID NO: 707143 - DNA, 97 bp, Homo sapiens
ttagtttcctgcttgccttcccccagtataaaagaagcctgtattgttttgaatttgaacgtcggttctgcactactgctgaaagatgtactgcagt

SEQ ID NO: 707144 - DNA, 98 bp, Homo sapiens
cccagatctttggtcttcggaatctccttgcaaacgtagatggccccaaagcaatgctgtcttacctgcgtgctcagctgcggaaagcggaaaagtgc

SEQ ID NO: 707145 - DNA, 75 bp, Homo sapiens
gatcattccatggctccaagtttaaaagaactacgtgttttatccaacagacctgaaagatgtctgaaaattcca

SEQ ID NO: 707146 - DNA, 110 bp, Homo sapiens
gctaccagactctgaaaaacctaagtcctttaggtgagacgatgcggatcgcctcctccgagtttgcagatgacccttgctcgtcggtaaagcgcggcaccatggtacgg

SEQ ID NO: 707147 - DNA, 75 bp, Homo sapiens
cctctgggcaaactgttttggaaaaaggtgtgatgaatgcagactctgctaccattttggctgtttggatcctcc

SEQ ID NO: 707148 - DNA, 87 bp, Homo sapiens
acatgcagcgctacgccgtgtggttcggaggctccatgctggcctcgactgtgcccgggagctgggggagttccatgccttcattgt

SEQ ID NO: 707149 - DNA, 88 bp, Homo sapiens
ccaggcctgctatatctttcaccaccgttgccgccttctcgaggagtgcacatttggccatgatcgataccctcatgatggcttatac

SEQ ID NO: 707150 - DNA, 82 bp, Homo sapiens
aaaaagtctgctactactacgacggtgtcgtgaaaactacccctaaaagccaaaatgggaaaggaaaagactcatatcaaca

SEQ ID NO: 707151 - DNA, 75 bp, Homo sapiens
agaaaagtgagtttattctgaagagcatccaggacttaaccaccaccatgtcgagcaaaagaacaaagaccaaga

SEQ ID NO: 707152 - DNA, 49 bp, Homo sapiens
cggcagtggcggcgcgtaggaggcggagtttttcggagctgtacacgct

SEQ ID NO: 707153 - DNA, 95 bp, Homo sapiens
ctgcgagcagttttaccgcgacctccggaggccggcgtgacaggctctgtcactaaaataggtttttggattcaaagcataaaaaccattacaag

SEQ ID NO: 707154 - DNA, 97 bp, Homo sapiens
aagctgctgcttccggatgactttaagttggttagtctgctgctaattggaattgctgcgtggggcattggcttcgggctgatttccagtctccgag

SEQ ID NO: 707155 - DNA, 82 bp, Homo sapiens
ccctgagaacgggaggtcaagagttggagcagacggtcagttctgacaatgcagatcttcgtgaagactctgactggtaaga

SEQ ID NO: 707156 - DNA, 100 bp, Homo sapiens
ctgccgtctgcaccagccatggactgctacacggcgaactggaacccactcggggactctgccttttaccgggaagccatcaaccggctccatgaggccg

SEQ ID NO: 707157 - DNA, 126 bp, Homo sapiens
gttggatggctcttgaaagtctggttaataacgagttctctagcgctagtgatgtggtgtggcagttgggctcttcgtcaccaaacttcactttggaaggacatgagaaaggcgtgaattgcattg

SEQ ID NO: 707158 - DNA, 100 bp, Homo sapiens
gtgcagcacatgcaccggcagaagccgcccatcatccacagggacctcaaggtgaacgaggtggtcttcagccccggggagtcccactgcgccacatgca

SEQ ID NO: 707159 - DNA, 100 bp, Homo sapiens
gccgcgacagcagcagccatggaggacgagatgcccaagactctggcttttttccagacttcaagctcccattccaacagtaagagcttcttccacatca

SEQ ID NO: 707160 - DNA, 113 bp, Homo sapiens
ctaccttgtatgcctcaatttgctggatttaagcactgctgcactttatgagatgccttcaattaagttgcagagttctgatggagagatatttgaagttgatgtggaaattg

SEQ ID NO: 707161 - DNA, 50 bp, Homo sapiens
caagctcgtagcctgccactccgtgcaatatactgatgataatgctctga

SEQ ID NO: 707162 - DNA, 75 bp, Homo sapiens
ctggtcttgctcggccgatgaagtgcagaggtttttttctgttgatattcactgatggactccaaagaatcatta

SEQ ID NO: 707163 - DNA, 88 bp, Homo sapiens
tgctaaatgtagacaatggttagagaagaattttccaaatgaatttgcaaaacttactgtaggcactatgtcgtccgaggcccagaga

SEQ ID NO: 707164 - DNA, 101 bp, Homo sapiens
acgcgcgggaacaacgcgagtcggcgcgcgggacgaaggtgtaccttgaaagacttttaacatacgcagagatagatatctgtccggccaactggaagcgg

SEQ ID NO: 707165 - DNA, 83 bp, Homo sapiens
cgagttcgctgccagccccaagaaggagaccctcatccagctgatgcccttcttcgtatgccttcaattaagttgcagagttc

SEQ ID NO: 707166 - DNA, 88 bp, Homo sapiens
agacctcacagtgccaaatggagctggaagcagtccagtggggggagtcggtgaagtacttcctggacaacttggaccggatcggcca

SEQ ID NO: 707167 - DNA, 96 bp, Homo sapiens
gagcaagaaaaagagccctggaatatgaagagacatgagatggtggatgaacccccagtaccctcttatatatggactgattcttattccctgctg

SEQ ID NO: 707168 - DNA, 90 bp, Homo sapiens
gaagaaggagagtaaagtcagcatgagcaaaaactccaaactcctctccaccagcgccaagagcaatggcaccagcatgatatcattgat

SEQ ID NO: 707169 - DNA, 83 bp, Homo sapiens
gctgcagaagaaggaggaggtggaggcacaggtgaaggtaggcaatgaagttgctacaggaacaggacctaataaaaagatag

SEQ ID NO: 707170 - DNA, 83 bp, Homo sapiens
aagttcgagcactaatatttaagaaagaagatgttaactttcaggtcaggttgccaaaaaggaagatctcatcagtgcgtttg

SEQ ID NO: 707171 - DNA, 90 bp, Homo sapiens
cggaaactgagggagtttccccggggagcggccaaccacgacctgacggacaccacccgggcggtgctcggtggcatggaggtgcggtgg

SEQ ID NO: 707172 - DNA, 75 bp, Homo sapiens
actgtgaggagttcgccgagttccagctgaaggaattgaagaatctgcagcagcaatacttacagattaatcaag

SEQ ID NO: 707173 - DNA, 100 bp, Homo sapiens
acatcttcctctgggagaaatcatcctgccagattattcagttcatggagggggacaagggaggcgtggtacggcttcaggtccagagcgtggagaagcc

SEQ ID NO: 707174 - DNA, 50 bp, Homo sapiens
cctgaagagaacagccaggcctgctcaccatggatgatgatatcgccgcg

SEQ ID NO: 707175 - DNA, 97 bp, Homo sapiens
cgctggagctgggtcagtccgccgctcaccccgcggccgcaccttcccgccttctcagggctcttcaaaggcctaaaagctaaaggcgaggatggat

SEQ ID NO: 707176 - DNA, 123 bp, Homo sapiens
ctgttgtgagaggctcagagaaagcagagggtgagatggatgagtccagcattctaagacgaagagggctccaggccgaatacatcaagcaatggtaacatctttaaatgaagataatgaaag

SEQ ID NO: 707177 - DNA, 74 bp, Homo sapiens
agaaagctcagctggtggtgattgcacacgacgtggatcccatcgaggagcagcaggaggaggtgaggaagcgc

SEQ ID NO: 707178 - DNA, 82 bp, Homo sapiens
atattatttttcattatccttttctgggtgctatgggtgatcattccaagaacacatgcctcactcctgtcagcagttccac

SEQ ID NO: 707179 - DNA, 101 bp, Homo sapiens
tgccctcaaggtcgtgcgtctgaagcctacaagaaagcacgtatctcccatgcgccaagtggagcccccagccaagaagccagccacaccagcagaggatg

SEQ ID NO: 707180 - DNA, 50 bp, Homo sapiens
cacagccctgcggacaacaagcgggagtggcaagaattacaacaaagcat

SEQ ID NO: 707181 - DNA, 101 bp, Homo sapiens
aaaaacatatccgagggtgtcctgttacttccaagtcatcaccagaaaggatcagctcagctactatttaataaaacaaaatctgtagaattcacgttttg

SEQ ID NO: 707182 - DNA, 96 bp, Homo sapiens
aattccccccgaagaagactcccccacatctggattgagaaaatcatgagttctattggagaagggattgacttttctcaggaacggcagaagatc

SEQ ID NO: 707183 - DNA, 104 bp, Homo sapiens
ctggcgcagcccacgctcatgatcgacttcctcacccgcgcctgcgacctcgtgcctgatttgagatggggtcccaggtctcggtggaatcgggagctctgcac

SEQ ID NO: 707184 - DNA, 100 bp, Homo sapiens
ggacaggatccggaggcgccagctcaaccatctgtctcgtaactgtgtaatcaaggaactagcaccacaacaggaaggtaacccaggagaagtattccac

SEQ ID NO: 707185 - DNA, 90 bp, Homo sapiens
gaagtcttcaggggagattgtctactgtgggcaggttttggatccaaatatggaccttcgaacagtgaaacacttcatatggaagagcgg

SEQ ID NO: 707186 - DNA, 82 bp, Homo sapiens
gagaagtggacatgaggttggcaggacccattccaacaatctcgtaaaacatggtggattactatgaagttctaggcgtgca

SEQ ID NO: 707187 - DNA, 101 bp, Homo sapiens
gtcaagacccccaaggacaaggaggaaattgtgatctgcgatcgagcctcggtcaaggagtgctgcattagacgtggaactatctgatgattccttccctc

SEQ ID NO: 707188 - DNA, 83 bp, Homo sapiens
cagctctttccccgtcagcatcccagccgtgctcacggcctccaggcccaaggtcagcatcccactgtcagccatcattgagg

SEQ ID NO: 707189 - DNA, 100 bp, Homo sapiens
acaacactcgatggctggaggcctctgttgtaggcaagatcaacaaaggagaccatctagctggctgcccccgacagtgagtgtgttggctcttgtgaag

SEQ ID NO: 707190 - DNA, 100 bp, Homo sapiens
gggatgaacctcgagttgctggctcctacagaagaagggaaaaaagagctgctgttcctaagtaacgcgaacccctcgctgctggagcggcactgtgcct

SEQ ID NO: 707191 - DNA, 95 bp, Homo sapiens
agaaaaagagtgaggaactgagaaacatggatggccttgggaacgtggaaaagaaagttcaggagccctggaaaggagaaggaataagacggcag

SEQ ID NO: 707192 - DNA, 99 bp, Homo sapiens
ctcccagccacctctgaagttgccaggcttcccaacattcttgtctgtgctgtcggaaaaggtaacagaagatggaactcgaaatcccaatgaaaaacc

SEQ ID NO: 707193 - DNA, 118 bp, Homo sapiens
agctgatggcggagaaggactccctggacccctccttcacgcacgccctgcgcctggtgaaccaagagcgatatctgaagtggctctgatgcctttgccacactcctcgcatctctgg

SEQ ID NO: 707194 - DNA, 95 bp, Homo sapiens
tttaatcgcttactctggagtcgtggccaagggctgtggaactgtttctgtgattcagggtccgattcccatcccacttcagttcagatctcaag

SEQ ID NO: 707195 - DNA, 74 bp, Homo sapiens
gattctgtctattcagaaagacctgctgcaagctttcttcctggtggcagatgacatcatggattcatccctta

SEQ ID NO: 707196 - DNA, 100 bp, Homo sapiens
tttgaacctatctgctttcaagctggtcatcatgatgaaacttagacacaatggtgttatctgaaaaggttagtcagctgatggaatggactaacaaaag

SEQ ID NO: 707197 - DNA, 100 bp, Homo sapiens
tactgacgaagcttggaagttgcagaagggcagctgcaatgactctccgcacggtattattgtcattgcaagcactattggcagctgcagagccagatga

SEQ ID NO: 707198 - DNA, 99 bp, Homo sapiens
ccaaggcaattgatcccaagttgtcgacgaccgacagggtggtgaaaggtgccctacgagacgctgaacaaacgctttcgcgccgctcagaagaacatt

SEQ ID NO: 707199 - DNA, 75 bp, Homo sapiens
tatgttgcctgagggagaggatctcaatgaatggattgctgtgaacagtatctcgggggagctttgtgccttgat

SEQ ID NO: 707200 - DNA, 89 bp, Homo sapiens
agctggagtttgcaatccagccaaatacaactggaaaacagctttttgatcaggaggagatgttaaagtaacccatcttgcaggacgac

SEQ ID NO: 707201 - DNA, 100 bp, Homo sapiens
gaagttggttactccattcgatttgaagactgcagtagtgcaaaaaccattcttaaattattcagagctgggagagcttcccccacgatctcctttagaa

SEQ ID NO: 707202 - DNA, 75 bp, Homo sapiens
aatcccaaatcctcgatttcagagattatttcaggaaccagcacctatgacagaagatctgctagaagagcagtc

SEQ ID NO: 707203 - DNA, 82 bp, Homo sapiens
ccacacagtgtgcctgcaacctgtccggggatcccagggaggaagggaaaaggccgaggcatcagcgtgtgaagaccgcaaa

SEQ ID NO: 707204 - DNA, 119 bp, Homo sapiens
atatactcaattacacttcgactctcaaagcaataccaggatagctgttgtttcagagaaagacaatgcagatcttcgtgaagactctgactggtaagaccatcaccctcgaggttgag

SEQ ID NO: 707205 - DNA, 75 bp, Homo sapiens
tttggggcagaatacagagatatggaatcagaatcctcactatggatgggctcattgaggacattaagcatcggc

SEQ ID NO: 707206 - DNA, 100 bp, Homo sapiens
ctttggtcgcatttgtgggcgcgcggcacgcagccgggaggccgaggactcggagttcacctgcaggtcctcagaatggttggaatgaccctccagcttt

SEQ ID NO: 707207 - DNA, 50 bp, Homo sapiens
caggcgcccgccaccacacccagctgaacaaaaggttcatcctcagtttt

SEQ ID NO: 707208 - DNA, 83 bp, Homo sapiens
atttttgatgcggagtgtgcactggagaaacttactaccgatcatgagaaaggtgtcagagatggctgaagatgggagcgaag

SEQ ID NO: 707209 - DNA, 100 bp, Homo sapiens
agaaaacccatatatccgaatggtcttctgggaactggcttccagctgtttggctatgaggaaaaactgcagtccaatcctctacagcatctctttgaag

SEQ ID NO: 707210 - DNA, 100 bp, Homo sapiens
tgtttgacgggctcctcaccgttgtcctgctggtttggtgcacctcgatttggaggaagtagggcagggcccttatctggaaagaagtttggaaaccctg

SEQ ID NO: 707211 - DNA, 100 bp, Homo sapiens
acaggctgtgaagaagctgtatgacattgatgtggccaaggtcaacaccctgattcgaaggaacccagccagccggcggaatgcaagcagcagtaggaag

SEQ ID NO: 707212 - DNA, 90 bp, Homo sapiens
cttgttgctttggcattaatagcagctttagaattggccccattgacaaaccttcagattctctcagtatagggaacggtgataattccc

SEQ ID NO: 707213 - DNA, 100 bp, Homo sapiens
aaagagccgagcacgcgggtctgtcatcatgtcgcgttacgggcggtacggaggaggcccgcaccgccgccatgatgtgcgaggtgatgcccaccatcag

SEQ ID NO: 707214 - DNA, 117 bp, Homo sapiens
ctgagtttacgtctcttccatctgctgctcacctcagctgcctgggtccccgacgagagccagagctagagccggtgcaggccacgcagaacaagacagggaagtatgtgccgccga

SEQ ID NO: 707215 - DNA, 100 bp, Homo sapiens
gtgaagagtcctggatggcagatggggggaccccggtacggacctgtgcaggtgaggacaggccagaactgtcaagtaatccacctctggctaccatcct

SEQ ID NO: 707216 - DNA, 100 bp, Homo sapiens
tcatggaaaagcagttgctcgaagaactcgagcgacagagacaagctgagcttgccgcacaaaaagctagagagcctgtggacatctctacagcaatgag

SEQ ID NO: 707217 - DNA, 100 bp, Homo sapiens
tttttcggatcatgtctggtggctccgcggattataacagtgggggcccctgaagccactgatggaagccacactaccggggcatcggaccatgaacccc

SEQ ID NO: 707218 - DNA, 98 bp, Homo sapiens
agatacacctgaaaatcttcgcctgaagcagcaaagtgaattgcagagtcaggtatttataacagcaatgatgtagcagtatcgtttccaaatgtagt

SEQ ID NO: 707219 - DNA, 100 bp, Homo sapiens
actatggatccagatcatagactcttaattagaaatacaaagcctttgcttcagagcaggaatgctgcggtgaatgaaaactttgccattgatttgatag

SEQ ID NO: 707220 - DNA, 75 bp, Homo sapiens
gataagtcgaaggggaaggcgcctgaagaggacgaaggttatgatgtgattgctcaagcccaatctgggactggg

SEQ ID NO: 707221 - DNA, 117 bp, Homo sapiens
cctcaacctgctggccacacccagggcccagctcatccagggtttgtcgctggtgctttcggagggcagcctgcgggacggggaggagaaggagccccccatggaggaggatgtggg

SEQ ID NO: 707222 - DNA, 87 bp, Homo sapiens
actgtgacttgcagtcatcatccattaccacaaaattaggagccttcacgtaaatgggtccagtcatgcctcccagtaagaagccag

SEQ ID NO: 707223 - DNA, 75 bp, Homo sapiens
gaacatcctttgactggttagccaggtgaccaagaatatggcccaggtgaccaaagccctggacaaggccctgag

SEQ ID NO: 707224 - DNA, 102 bp, Homo sapiens
gattcctccatgactcaaggcacagactctccaggctttatcctgtggataaacgcagagtgaacgagtttggggagtcctacgaggagaaggccacgcggg

SEQ ID NO: 707225 - DNA, 75 bp, Homo sapiens
gaggctgtggcccagaggctggagctgcgagagagggagcactatgtctgcggaagtccccgaggcagcctccgc

SEQ ID NO: 707226 - DNA, 50 bp, Homo sapiens
atttccagatgccttgttcaacaggagtcagagtattcatcgaaaagaaa

SEQ ID NO: 707227 - DNA, 100 bp, Homo sapiens
cacctcaagcacacccaatggacagcatgcctcaccaagtcacatgacaagcatcagcagataagcagagagccctagaagaaaccaaagcctacaccac

SEQ ID NO: 707228 - DNA, 97 bp, Homo sapiens
cgtggccggagcggcccgcgcctgggctgccggcacttcgcggcaggtgcgcgcggagccatggttatcatgtcggagttcagcgcggaccccgcgg

SEQ ID NO: 707229 - DNA, 100 bp, Homo sapiens
cacttccctcggtctgggcttctctgaggcggcgagagatggtcaggtctggagctcgaccgggccagattgtagaaggcatgaaacaaaaaatgtggag

SEQ ID NO: 707230 - DNA, 96 bp, Homo sapiens
atagtcaactgcgtggaagagaaggcggagtacgtccagcttgttactgaacttcgaatgacaagagccattcagcctcagatcaatgctttttta

SEQ ID NO: 707231 - DNA, 90 bp, Homo sapiens
tgtgtcaaaaccaaacaccctcagctccacattgagagcaaaatctacaagatgatgcagggaggagttgtcgccgtgatcctgaaggcg

SEQ ID NO: 707232 - DNA, 100 bp, Homo sapiens
ctttgacatctttgaagatgaaggattaattacacaaggtggaagcgcctccacctcctggatgccctcccaatgctgctcagcttgcagtcatgcaggg

SEQ ID NO: 707233 - DNA, 100 bp, Homo sapiens
ttcgaatccataacaagttccgatcagaggtgaaaccaacagccagtgatatgctatacatgtgaaagcaagttgaatacattggtgcagaagcttcatg

SEQ ID NO: 707234 - DNA, 111 bp, Homo sapiens
ctttcttccagcttctgctgtccttctttgtggagagcaagtgaaactggaacgccaagctgaagaagaacgaatacggaagcacaaagcagctgctgagaaagctttcca

SEQ ID NO: 707235 - DNA, 100 bp, Homo sapiens
ctcaatctcttcaaactcttcagactggtttatcatcagggtggatgtgacaatagttcactgcatccaagaagaggagaaaacactgaacaaagagcct

SEQ ID NO: 707236 - DNA, 100 bp, Homo sapiens
cttgattctcttatacgctacttttactcagagtttgaaggttgtgaccaaaagaggctccgatcacagaactgtgtggtgcaaagcgggttggttattt

SEQ ID NO: 707237 - DNA, 100 bp, Homo sapiens
ttcttcagaagctggtcgccgccggcagcaagtgcagccgcggagccctgtacacaggcttttccatcctggtgactctgctcctcgctggccaggccac

SEQ ID NO: 707238 - DNA, 100 bp, Homo sapiens
acgctccgtggatgaggctctgcggctggtccaggccttccagtacacagacgagcatggggaagatgacagcattctgaaatcagagcttggaaaccag

SEQ ID NO: 707239 - DNA, 87 bp, Homo sapiens
gccagtaccggggcatgggcctctctatgggcagtatgatctgtggctgggataagaagccagggaaagaatagttggctggtacca

SEQ ID NO: 707240 - DNA, 98 bp, Homo sapiens
cacggcagcgcccacggccactcccgccgcgcaggagtcgggcaccatcccaaagaagcgaagcagctgacacaggatgatgatactgatgcggttga

SEQ ID NO: 707241 - DNA, 74 bp, Homo sapiens
tcgtcacaggctccggctcatggcatcaagtggcatccatcataagatgtttgagacggaggcagatgagaaga

SEQ ID NO: 707242 - DNA, 100 bp, Homo sapiens
aaagggaagccgagtgctcctgcggctcccagactgcaaccagcaggagcattggtttgaaaaggccctacgagacaagaagggcttcatcatcaagcag

SEQ ID NO: 707243 - DNA, 96 bp, Homo sapiens
ggcgacctgaggggagagggaacgcagctgaaagcgtgaactgttgctgggcctaaaggagataacatttatgaatggagatcaactatacttggt

SEQ ID NO: 707244 - DNA, 75 bp, Homo sapiens
ttacgcattcagtatgcatgggcaaactctgagatttcccagatcatgtttgagaccttcaacaccccagccatg

SEQ ID NO: 707245 - DNA, 90 bp, Homo sapiens
gccaagctgtcatcacaaaagagttgattgaaattatctctggtgctgcagctcttttcagaaacaactctccaagttccatttccaagg

SEQ ID NO: 707246 - DNA, 78 bp, Homo sapiens
cttggtcgccgcgtccttggctggcgttactatactggcaattgctggagaagattttgcaattgttgcttctgatac

SEQ ID NO: 707247 - DNA, 100 bp, Homo sapiens
ggaagatgctcagaacagagcagaaatcaaattgaagagagcagttgaagaagtgaagaaattattggtacctgcagtgagctgatcaaccttgccatgt

SEQ ID NO: 707248 - DNA, 75 bp, Homo sapiens
cctccgagtggatgcagcaccccgtcgccggcaaccaagcttcttgaaaggcctgtctacacttgctgtcttcct

SEQ ID NO: 707249 - DNA, 83 bp, Homo sapiens
ctgtgtcccacttgttcgcggcctataggatctttaccttatatagtaaatctctgcccctcgacctggcctgtcgtatctgg

SEQ ID NO: 707250 - DNA, 82 bp, Homo sapiens
gaacgtccttcgtggagatgacctctcagataatttcttgagaggagataactcccgtaaagttcagcaccagcagcagagg

SEQ ID NO: 707251 - DNA, 75 bp, Homo sapiens
ctgccccaatccccggcagctctctcagtgtttctgaaagatctatccagcactccgatggccagcaacaacacc

SEQ ID NO: 707252 - DNA, 83 bp, Homo sapiens
cagagatgcaattgaccgtgaagttgaagctgttgatagtgatatacctgtgtttcccacaatcacagccactgtgacttttc

SEQ ID NO: 707253 - DNA, 75 bp, Homo sapiens
gaaatgaggacatatcagtatcgtaaaataaaacagggtctgttacctagcttggaagatttgctgttctataca

SEQ ID NO: 707254 - DNA, 93 bp, Homo sapiens
tgttgaagatgtccttaccagctttgacaatacaggaaatgtttccaaacatcatgtcaatggcaacagaacagtcgaacctttcccagaggg

SEQ ID NO: 707255 - DNA, 78 bp, Homo sapiens
ggcagtaaaagcatctactgggggacatcctgttgtgaaggtctgctacaatgctgctgctgcacagagctgtggtcc

SEQ ID NO: 707256 - DNA, 100 bp, Homo sapiens
ttcatcctttacgagcacggcctcttgcgctacgccctggatgagatggttgcacgatgggaacacaagacccgcaagctgagcagggccttcggatccc

SEQ ID NO: 707257 - DNA, 100 bp, Homo sapiens
ataaactggaggataagcaggaccagatgataccatgaagagaagtttacaggccctctattgccaactgttaacacaacattctgaaattttttggtta

SEQ ID NO: 707258 - DNA, 100 bp, Homo sapiens
tcatagattgtgtaggcgttggtcttctgatagcaactttaatgtggcttcatgacagaaagatgtgtgttctcggactctgtgctcttattgatatgga

SEQ ID NO: 707259 - DNA, 102 bp, Homo sapiens
ccactttgtgattccctaccgctgcttaggagggatttttgaaacagtggaaaatgagcctgttaatgttgaagaattagctttcaagtttgcagtcaccag

SEQ ID NO: 707260 - DNA, 74 bp, Homo sapiens
gccgcccgcatcagcggcctcggggaatggaagcggagaacgcgggcagttactatgcgagtcagaagaaaaca

SEQ ID NO: 707261 - DNA, 83 bp, Homo sapiens
ccacacctaccactacccgtgtgccagcgatgcagacaatgcagatcttcgtgaagactctgactggtaagaccatcaccctc

SEQ ID NO: 707262 - DNA, 100 bp, Homo sapiens
ggcatgtccaacattcagggtgtctatagcccgattgaacccagtgacttgattgtaaaaatttacagagcggaatcatatgctggtctccaagagttta

SEQ ID NO: 707263 - DNA, 101 bp, Homo sapiens
ctgtcggccctgctgcgagcccacacgcccctccacatggctgccctcctcctgcttccctggctcatgttgctcacagagtcttttattcaaaacttcag

SEQ ID NO: 707264 - DNA, 100 bp, Homo sapiens
tacatggatcacaatgagctcaggaggatgggtactgactggatagaggacggtagacgttacatccaagaggaaataatccaggcaaggaagcacaagc

SEQ ID NO: 707265 - DNA, 80 bp, Homo sapiens
caactccagcagctcctggcctccccgcagctgaccccggctgctgaccctggggctgtccctcctgcatgccgatgtgg

SEQ ID NO: 707266 - DNA, 50 bp, Homo sapiens
ggaaactgcttcttcagctcaaacaagagattctgtttctggcgtctgca

SEQ ID NO: 707267 - DNA, 138 bp, Homo sapiens
agcactgctcgcaggtggactcggtccgtggcttcggaggcaagtttggtgtccagatggacagagttgatcagtgtaaacaggaacatcgataagtagtgtaaaaacttgcacaatgaaatccgaagccaaggatgg

SEQ ID NO: 707268 - DNA, 100 bp, Homo sapiens
ccgagggtagggggaaattcacaggcccaacagacttttataggattcgggaacaaaggcattctgcgatgttgctctccatggaccattttactcagcc

SEQ ID NO: 707269 - DNA, 82 bp, Homo sapiens
gccatcccagaaccacagccaagacggccgaagccctgcagcccacgctacagccggagatgcagctcgagcacggggccat

SEQ ID NO: 707270 - DNA, 75 bp, Homo sapiens
atgctaaatttgtgaatgctgtgtatgataccttacttaatactatattgtactccaagatacttggattacgaa

SEQ ID NO: 707271 - DNA, 50 bp, Homo sapiens
tgcatttctaaaatcgccagcaatgcgtccagaccaaagcatttactggt

SEQ ID NO: 707272 - DNA, 96 bp, Homo sapiens
gcttcccctcccgggtgaggagcgtcctgagactaaggaaagagcctggaaaatggagcagacctggacgaggatttgaatttgttgaaatgagca

SEQ ID NO: 707273 - DNA, 100 bp, Homo sapiens
gctgggcccgcgtggatctctaagacgaggagaagaccttttcatgtgtatggacatacagctcgttgaagcactgtgtggcttccagaagccaatatct

SEQ ID NO: 707274 - DNA, 74 bp, Homo sapiens
cacgtggaattcgcgaagctgccaaagccttagacaattaccaccaccctgtgaatctgcctgcacagtaccaa

SEQ ID NO: 707275 - DNA, 50 bp, Homo sapiens
cccggcaccccccgccgacaaggaggggagaagaaatgggtgaccgttgg

SEQ ID NO: 707276 - DNA, 100 bp, Homo sapiens
gctctagcaggctccactaactggggctacgactctgatgggcagtcatgacttgtgctgaccctggcgagattgccaacgggcaccgcaccgcctcgga

SEQ ID NO: 707277 - DNA, 100 bp, Homo sapiens
cgagaaaaatcacgggctgtccaggaactgtcggaacagaaccaaaggctattggatcagctcagcaggtcccatgaagctgaggtcttgaagcagctgg

SEQ ID NO: 707278 - DNA, 75 bp, Homo sapiens
ggaacggatatggtttcatcaacagaagcaatatccaaggcagtgtcatctgcaacaatgctgtgatcgagaagg

SEQ ID NO: 707279 - DNA, 50 bp, Homo sapiens
aggcgctggcgtccggcctgagagtggctaagcaggttcggttacctgcc

SEQ ID NO: 707280 - DNA, 75 bp, Homo sapiens
atatgatgtgcagtgtccaaagagaggtggaaaacgaagctcattcccaacgtgcaaagccaaggcagcgacccc

SEQ ID NO: 707281 - DNA, 100 bp, Homo sapiens
cctggaggcaaccacagaacacatacggcaggagctggcggtttctcctgccccagtgaccggtccatcttgctgcctctcatcatcggcctgatccttc

SEQ ID NO: 707282 - DNA, 82 bp, Homo sapiens
accagacctgcaagctctttgacacacagcagttcttgtcagctggtaggtgagtgctgtcctcggctcactttcctcaagc

SEQ ID NO: 707283 - DNA, 80 bp, Homo sapiens
caacatccagctcaagtggaagagacccccagagaatggagaagcgctacaaagcagccactgtgcttactgaacggcct

SEQ ID NO: 707284 - DNA, 51 bp, Homo sapiens
cacttctctgtcgtcacagttagatgtgtgagatgccagtaaacacaccag

SEQ ID NO: 707285 - DNA, 75 bp, Homo sapiens
ctggcgccggtcccggtggcgccccgcgcgagctcctgcagtgtgatagtcctcggacagaatcacaaagcctcc

SEQ ID NO: 707286 - DNA, 96 bp, Homo sapiens
actgcagaaacagatgccattcggtttttggttgggacgcagtctcttaaatatgataatcagaaaaagttacgtcgatcacaacacgctcgcaaa

SEQ ID NO: 707287 - DNA, 75 bp, Homo sapiens
tttcaatgctgcgaaagctgccaaaagtgacatgcaggtcctttcccataacctgtgcacggtgctgaaggttcc

SEQ ID NO: 707288 - DNA, 50 bp, Homo sapiens
acagccctgaggcaagagaagaaagccgtcattgtgtggcactggacggg

SEQ ID NO: 707289 - DNA, 100 bp, Homo sapiens
gcgcaggagactgaccgcaacggcagggactgggcacttggagtcctgcatgccaaaatcattgcagctataacattgatgggtcctcagtggtggttga

SEQ ID NO: 707290 - DNA, 82 bp, Homo sapiens
agcagcacatctgtggaggatctgccagggagcaaacctgagcctgatgccatttctgcaaaatgatgcttcaacacccagg

SEQ ID NO: 707291 - DNA, 100 bp, Homo sapiens
aatggagaactattaaccaccattcttcagtgggctgtgattttcagaggggaatactaagaaggatcactgagattctgatgaacagaccttctgcccg

SEQ ID NO: 707292 - DNA, 100 bp, Homo sapiens
tcaaacggcccccagcgcccctggtaactgacaaggaggccaggaagaaggttctcaaacaaggtggtggaggtggatacagcagtcggagaacatctgg

SEQ ID NO: 707293 - DNA, 75 bp, Homo sapiens
gcgagcgcgagcggcgcgagaaagagccattccgtagtgccatcccgagcaacgcactgctgcagcttccctgag

SEQ ID NO: 707294 - DNA, 100 bp, Homo sapiens
cccggaaccgcgattcggcgtgtcagcctaccgtatgtgaacgggagctgtgtgtgtttgcttttcaaaccctgggagtaatgaatgaagctgctgatga

SEQ ID NO: 707295 - DNA, 83 bp, Homo sapiens
aggcagctgcggtggcagctgctgagttctcggtgaaggccaccagcttgggctccccacggagggcagcaagtgggacttgg

SEQ ID NO: 707296 - DNA, 100 bp, Homo sapiens
cccagctccgtctcggcggcggcgggtgctgaaggtcgccatcctggctgagaagtacgcggtggactacacctggtatgtggataccatcttgaacttg

SEQ ID NO: 707297 - DNA, 100 bp, Homo sapiens
tggttctccattgtgatgaaagcacatggtacaggtgtctggaaatgaagtatggaaatgaaatcatgaataaagacccagttttcagaatctctccacg

SEQ ID NO: 707298 - DNA, 102 bp, Homo sapiens
tcgacttcggttcgggtgcgctgctcaaggacacggtctacaccgacttcgacgcagaagatggctgtgccacccacgtatgccgatcttggcaaatctgcc

SEQ ID NO: 707299 - DNA, 74 bp, Homo sapiens
ataatccattctcggattctagaacagactacaaagctgatgaagacccagcattattccagtcagtcaagacc

SEQ ID NO: 707300 - DNA, 87 bp, Homo sapiens
cagaccttattttcctaaggatgagggctcaccagcatttcagcttcaggatggttgtgagtacgtgtttatctggagaactgtgga

SEQ ID NO: 707301 - DNA, 101 bp, Homo sapiens
cctgcctcaggtttatttgtacaaatagcacaggaggacctaagaaaagctggattgctgatttttgctaataaacaagatgttaaagaatgcatgactgt

SEQ ID NO: 707302 - DNA, 83 bp, Homo sapiens
ggaatgaacatgtatttaaccaagttccaacaaaagaatgctgccgcaggctttatcctgtggataaacgcagagtgaacgag

SEQ ID NO: 707303 - DNA, 98 bp, Homo sapiens
gtgaccccaggctttttatggctgtgagacacgttaaaatttcagggtttgctggttggctcccgagcagacagcaggaaagaagaagcccttcgtgt

SEQ ID NO: 707304 - DNA, 100 bp, Homo sapiens
ttcccgaaaattccccttctacaagaacaaggaccagagtgagcaggaaacaagtgatgctgaccgaaaatcctgccttgcttcgttgggcctatgcaag

SEQ ID NO: 707305 - DNA, 100 bp, Homo sapiens
ggggccgccgccttcgccgccaagatgccccggtaccgaggggcggcgctggcgcgggaggagattttgagatcaggagtgagaacgaggtaaatcccaa

SEQ ID NO: 707306 - DNA, 100 bp, Homo sapiens
tcgaagcgagggtctgaagttcacgactactagaaggggaggggagtggaaaggctctcagtgaaaaagccatccgcagagccatcctgtgcaaaggaag

SEQ ID NO: 707307 - DNA, 50 bp, Homo sapiens
agggtcattcatgggcagcgatgaaggccagaagcggactcctagaagag

SEQ ID NO: 707308 - DNA, 97 bp, Homo sapiens
tccatggataaagctgccaatttcagctttagaaatacactggaaggtaaatcaccttctgagcctctgattcccaagagggttggtcttattcaca

SEQ ID NO: 707309 - DNA, 83 bp, Homo sapiens
cttgggtcctccgagagcagcagcgttcgtgccctcgtgaggctggcatgcaggatggcaggacagcccggccacatgcccca

SEQ ID NO: 707310 - DNA, 96 bp, Homo sapiens
gcactgggtcgtcacggaggacgggaaaatccagcagcagacccagattgatcactatgttggcatcgcccgagatcagaccaagtcaattgttga

SEQ ID NO: 707311 - DNA, 98 bp, Homo sapiens
ggtgttcccgagcagcctgacctccagtgagtctaattttcacaattacaccttggtctcattgaatgaagaatttaatcgtggacgaggactaaatg

SEQ ID NO: 707312 - DNA, 135 bp, Homo sapiens
ggacaaagcgtccatcatccgcctcaccacgagctacctgaagatgcgcgccgtcttccccgaaggcaattttctggagtgtttgtgactggactttaacatttccaaaatgtggcgacagtgactgttaagtct

SEQ ID NO: 707313 - DNA, 100 bp, Homo sapiens
agcataggaggaaaattcatcatctggtgtcttataagactttgacacttcctgttttgtctgaaaaaaatgtgaattacctgtgatatttggactccag

SEQ ID NO: 707314 - DNA, 101 bp, Homo sapiens
ctgctcttgaggttcacagatgatacctttgatccagaacttgcagcaacaatagaggccagtaatagtagccatgagtctcgtattggtctagctgaggg

SEQ ID NO: 707315 - DNA, 97 bp, Homo sapiens
attgttgaaccatacaataagatagttgcccggactgcacaactagcaagacttcagttcaacttcctcaattgctttgcctcactcttctatattg

SEQ ID NO: 707316 - DNA, 75 bp, Homo sapiens
caagacacacttccgcgccgtggaccctgacggggacggaatactcccccagttgcaagaggcgcaggaccgtgg

SEQ ID NO: 707317 - DNA, 100 bp, Homo sapiens
cttctctaccttacagatttggatcaatttttacaccactgggatgtaacagaggatagctagcggccaggagaaatacagtggaaaatgcaaaacaacg

SEQ ID NO: 707318 - DNA, 51 bp, Homo sapiens
ggaaaaccccaaaagtgtacataagtttccaaccctttgtaatcagtacta

SEQ ID NO: 707319 - DNA, 100 bp, Homo sapiens
ctcattgaagcttggaattacatagctggaaaggatcttacaggctcccccgaagatgggcctcgagtggtcttcatcgtggacctctggcaccccaacg

SEQ ID NO: 707320 - DNA, 100 bp, Homo sapiens
ttgaggcctggaatttaaacctgagccactatctgaagtacaaaactttttaccaacaaaaaaaagcaagtagttatactcaggaagaacttcaagacac

SEQ ID NO: 707321 - DNA, 80 bp, Homo sapiens
cgggcacctccggtaccgctgcagccaccgcggcccccgcggatgaaggatttgggggcagagcacttggcaggtcatga

SEQ ID NO: 707322 - DNA, 100 bp, Homo sapiens
tgcctccccgtccagaagcctgtaggaaagcggaagcggcctggcaggggaaggatcgagaaatgcactcggtgatggaaagagagccactattctgaag

SEQ ID NO: 707323 - DNA, 50 bp, Homo sapiens
gacgtgaggaacgggagaaacagctagattctggaacttttcaaagcctg

SEQ ID NO: 707324 - DNA, 50 bp, Homo sapiens
tatatccagctgggaactgtctacagaatggagatctcctctcatcagtc

SEQ ID NO: 707325 - DNA, 100 bp, Homo sapiens
gctgctgtggaggctgaggaggcggcggcggagatctggaaatatggctacacacacctttctgcaggagagctgcttcgtgatgaaaggaagaacccag

SEQ ID NO: 707326 - DNA, 103 bp, Homo sapiens
acagatccgtagggaggacaccgtgacttcccggacgctgggaaatggattttttatcaagcagaaatgcatcgaacaacgagaatcaagatcactgagctaa

SEQ ID NO: 707327 - DNA, 51 bp, Homo sapiens
caagaagaaatccacagatttagttcttttgcctgagaatacagatcaacc

SEQ ID NO: 707328 - DNA, 75 bp, Homo sapiens
ggaccccgacagccttgctgactatttcaagaagcatgctacaagtgaaaactgatgagaaactgaatgtgtctg

SEQ ID NO: 707329 - DNA, 74 bp, Homo sapiens
aagcatagtatctatccaagtgaaaaaagtctggtaaaactgcataaacaggaacacgatgaacctattctgaa

SEQ ID NO: 707330 - DNA, 83 bp, Homo sapiens
gcaagggattgctggctacagcttcagaagaccgaagcgttcgtatctggaagggacaagaatccttcaagaaacaggaaaaa

SEQ ID NO: 707331 - DNA, 98 bp, Homo sapiens
gcttcttcttgtgccgtgaacctcgttttgagattaaggataagttctgaacgtcgaaaagaaaagtctcgagatgcagccagatctcggcgaagtaa

SEQ ID NO: 707332 - DNA, 90 bp, Homo sapiens
cggatgccctgcagtacctgcagaaggtctctggagacatcttcagcagactgcctcttcaaggtgtgccccatgaaccgctactcggcc

SEQ ID NO: 707333 - DNA, 100 bp, Homo sapiens
tgccgggggattttagtggtgtataaccttggactcacactgctgtctctgtatatgttctgtgagggcgtctctggccgagcctctttttgtggaaaac

SEQ ID NO: 707334 - DNA, 50 bp, Homo sapiens
caaacttcactttaaaatctgaatggaactgattcatttggaagaaagat

SEQ ID NO: 707335 - DNA, 83 bp, Homo sapiens
ctaacgccttcaggaggaacccacacatgtggaatgaatcttacttgttgaatatcttctggttactagttggattcatttgt

SEQ ID NO: 707336 - DNA, 48 bp, Homo sapiens
agaaaccaaatttgactccggttcaggctttcaaattcacctcacgga

SEQ ID NO: 707337 - DNA, 82 bp, Homo sapiens
cctgcatgtccaagccacccgcacccaaccccacgtgaagaagcatctgcaggacctgtccggcaggatctccagagctcgg

SEQ ID NO: 707338 - DNA, 100 bp, Homo sapiens
ggctacttcttcgttttgcagcccaagacttcacagagaatgcagttgtcttgacttcaggtctgtctgttctgttggcaagtaaatgcagtactgttct

SEQ ID NO: 707339 - DNA, 99 bp, Homo sapiens
ctaatgacaagctcatgtacaaaattacaagtggaaatccacaaggattcttttcaatacatcctaaaacaggaaatggtgttcacactggccctgaat

SEQ ID NO: 707340 - DNA, 75 bp, Homo sapiens
aaaatgtttgtaaattctccttttaccaaggactatcagacttggcttgaccttagagaatttgaaactcgcatt

SEQ ID NO: 707341 - DNA, 100 bp, Homo sapiens
ggagaaatttcgacctgatatgcgaatgctgtcctctcccaagtattcactctatgaagtgcatgtcagcggagttcacacaaaagatgttggacaattt

SEQ ID NO: 707342 - DNA, 90 bp, Homo sapiens
catttcctctccattgacaaaatccatctcattaatgacaatcagccatcctggattggacatttcaccagtgatcattaaagaatgggc

SEQ ID NO: 707343 - DNA, 75 bp, Homo sapiens
attagaaacacactacagaattcttttcaggggtgcaagagacaacactaagcagttgagatttgaagatgtagt

SEQ ID NO: 707344 - DNA, 75 bp, Homo sapiens
gtaaccttgtggagaagaccccggcgctggtgaacgccctggtacctgacagtgtaaagaaggagctcctacaaa

SEQ ID NO: 707345 - DNA, 74 bp, Homo sapiens
ttgtcctggctcttgccctcatcctggttctggaatcctcagttcaagcattatgccagtacatacaggcttct

SEQ ID NO: 707346 - DNA, 75 bp, Homo sapiens
tcgtcttccccgcagtgaccatctgcaccctcaatccctacaggttgggtgtacgatgtgtcagcagagcatgca

SEQ ID NO: 707347 - DNA, 100 bp, Homo sapiens
cagcggtggctgctcccagcagcaccttctctgttcgtgccaagcagacctacccatactgtgcactgcccagggaggctatcatctcccagaagcggct

SEQ ID NO: 707348 - DNA, 100 bp, Homo sapiens
ctattggcttctccttgcctgattgtttgcaggttgtcagagaagtacaggttcttatagagactgctaagaagctaggactccggtgccactcaaaggg

SEQ ID NO: 707349 - DNA, 100 bp, Homo sapiens
acgattgggctgagcagaggacgacatgttgcttttcgtggagtcagaaattggctttggaaaaatggaaacctacatcaaattggaaaagcttggagag

SEQ ID NO: 707350 - DNA, 75 bp, Homo sapiens
gaatgccagccaccagccatggaatgacagggagagagtttttctctcgtttcccagaactctatccttttcttc

SEQ ID NO: 707351 - DNA, 100 bp, Homo sapiens
gaccatggcctccaaatgccccaagtgcgacaagaccgtgtacttcgagatatgaatcaggttcttgatgcctatgaaaataagaagccattttatctgt

SEQ ID NO: 707352 - DNA, 76 bp, Homo sapiens
attcgcgctgctgggcacccacggagcctccggggctggcccactgctcagtggagcgtggaggacgaggaggagg

SEQ ID NO: 707353 - DNA, 100 bp, Homo sapiens
atggggaaactgaggcccagaattgctaagtggcttgcttgagttgacacagggagctccaggactcaccctcagggactccagaacgggtggaactggc

SEQ ID NO: 707354 - DNA, 100 bp, Homo sapiens
ctgctgctgctgctcctggaaaccggattttatagctaccttgggaaaactttcaggattacatggccaggacctttttggaatttggagtaaagtctac

SEQ ID NO: 707355 - DNA, 73 bp, Homo sapiens
cgagaagtacgccgtggactacagctggaatcgggcgcctgattgctgagtgtcatctcaaccccatcatcct

SEQ ID NO: 707356 - DNA, 98 bp, Homo sapiens
ctggacgctactccggacgcaaagctgtcatcgtgaaggaactagcttctaaaaaatccctgcctatgaattattacacagtattctaccatgttcaa

SEQ ID NO: 707357 - DNA, 74 bp, Homo sapiens
agccgggagatccgagagctcttcagctcacggatgattgatatccagaccaggatggctgggcgagcattgga

SEQ ID NO: 707358 - DNA, 101 bp, Homo sapiens
aaaccggcgcggagcaactgaggcccgagccttctcgggacccgggggacgcctaaccccgcgaggaccatgtactggtcagactggggcaaccaccccaa

SEQ ID NO: 707359 - DNA, 101 bp, Homo sapiens
gcccaaccacgtggagctgggacgtaaggatgacgcaaaagttcacaagatgttccttgaccatactggagcaggccatagaggtgctgacccgctccagc

SEQ ID NO: 707360 - DNA, 82 bp, Homo sapiens
ctgaagacctattttactgataagaaaacacatctttacacactaactatccagtcagttcgctgctattcccatgggtcac

SEQ ID NO: 707361 - DNA, 100 bp, Homo sapiens
ggagaactacaggaacgtggtctccctggattttatcatgtgggcaacctgctgcaactggttctgcctggatggacagcctgaggaggtcccaccaccc

SEQ ID NO: 707362 - DNA, 98 bp, Homo sapiens
ggatcctctggccagctgactgcacttcttttttgagaaaggaaggaatatatcctgactgattgacaggaagatgtcacccaagcgcatagctaaaa

SEQ ID NO: 707363 - DNA, 75 bp, Homo sapiens
gccctgctggaccagctcatgggcacggctcgggacgctacgagttccagggagctctgtcctggtgaccgtgcc

SEQ ID NO: 707364 - DNA, 74 bp, Homo sapiens
ggctgcgtggggctcggccgcgcggactgaaggagactgaagatttcccggcaccttcgtgggcaccacagagc

SEQ ID NO: 707365 - DNA, 82 bp, Homo sapiens
tgctgaggacggagccagctcagcatcttcctcctctcagtcggagacccccgagccagaactgctggaactgtggccgcaa

SEQ ID NO: 707366 - DNA, 75 bp, Homo sapiens
cactcatccagtccttcagccactacagtatcgtgggacagaagctgagactgatggagaggcagaaacggaagg

SEQ ID NO: 707367 - DNA, 100 bp, Homo sapiens
accatggccactgactcatgggccctggcggtggacgagcaggaagctgcggctgagtcgtttaaacccattttcctgaacacaattgacccatctcacc

SEQ ID NO: 707368 - DNA, 101 bp, Homo sapiens
ttgggggactatgtggtggacttggacacgtcccagctctctctgggcatctggaaagtttaaggaagaaatctctaaacgttttaaatcacatactgacc

SEQ ID NO: 707369 - DNA, 96 bp, Homo sapiens
ccgggtgtccgcctacatcgactggatcaacgagatcctttcccggagttcagttatgggtgtgagaggtttgcaaggatttgtgggaagtacctg

SEQ ID NO: 707370 - DNA, 75 bp, Homo sapiens
tcctcataaagcgagtcgtcaaggagttgcaggctgagtcatcactagagagtgggaagggcagcagcagcagag

SEQ ID NO: 707371 - DNA, 82 bp, Homo sapiens
tagacatttacgcggatgtcggcgaagagttcaaccagcacttgcacctcctgcgccgccgccccccatccaaggatatgcc

SEQ ID NO: 707372 - DNA, 100 bp, Homo sapiens
aggaatcgtgtgactaataatgtaaaagacgtcactaaattggtcttcctccttcccttacggaattacatcttgatggcaacaaaatcagcagagttga

SEQ ID NO: 707373 - DNA, 50 bp, Homo sapiens
gatcttgtcaagctgtgtcagccatttgctcccattcatgctgaggctcc

SEQ ID NO: 707374 - DNA, 82 bp, Homo sapiens
ggctgttgctgcggagccaggaggggaagcgatggctgggcccgcgtggatctctaagggaaatcctcattgacgattcaat

SEQ ID NO: 707375 - DNA, 75 bp, Homo sapiens
cgcgctccgccccggcctagggccttgccccgggagcccgcgaggatctccagcaccctgccggtggcactactg

SEQ ID NO: 707376 - DNA, 88 bp, Homo sapiens
aaggtgtcaagaagctcagaatggtgattttacaacgagatgctgctctccatagggatgctcatgctgtcagccacacaagtctaca

SEQ ID NO: 707377 - DNA, 74 bp, Homo sapiens
tgccattgctttcagctgctacatcggctacagattccagacagcattggaaaagacatagaaaaggcttgcca

SEQ ID NO: 707378 - DNA, 50 bp, Homo sapiens
tcttaaccatgatctatattcagtgtatcacaatagattgaatcaagaag

SEQ ID NO: 707379 - DNA, 90 bp, Homo sapiens
agaggaccatcctgggtgctggccctgtgctggaggtgctgttggcagcagcggtctgcacaaaagcaggaaaggctattgtttctcgac

SEQ ID NO: 707380 - DNA, 75 bp, Homo sapiens
aaggattccaagtaactcttatttgtacaagccagctgccatgttgtgagcacataccacatagctccatggaga

SEQ ID NO: 707381 - DNA, 100 bp, Homo sapiens
gtggaatgctgtcactcagcactggcagaactgaagcaggcccagaccctgatgagctccctgggctgaggagaagggtgttccaggcctgtgtggagcc

SEQ ID NO: 707382 - DNA, 90 bp, Homo sapiens
gcagtttttcaccctcacgctgatgaacttgtacttcacgcaggttgtcaagttattaagcaacaaaagatcacaagcagttggaatact

SEQ ID NO: 707383 - DNA, 75 bp, Homo sapiens
atttaattttagggtcctttatatagaagggagagtaggtttccttgttgcagaatgaaagtgtagaaaaaaaca

SEQ ID NO: 707384 - DNA, 101 bp, Homo sapiens
actccccccctttattaccctttgtgtcatcctccacagctccagggaaggcactcaaaagtggggggcaggaaaggaagaatccccagcacaagatagaa

SEQ ID NO: 707385 - DNA, 73 bp, Homo sapiens
tttactttcccatcaggtttcctgatgtgagcagatcagaccaaacattgtctggcttgcactgtaaaactag

SEQ ID NO: 707386 - DNA, 89 bp, Homo sapiens
aagtctaaactgcattacaagcagcagtggggacgagctttgaaagaacttgccagacttaaacaggtgctgctgttttttcaaacgaa

SEQ ID NO: 707387 - DNA, 100 bp, Homo sapiens
ttgccttcttcaccacggccgagacgctcacggatatagtgctctcctggtctggagaaaatgatgtggaatataacaacatggaattagaagagggaga

SEQ ID NO: 707388 - DNA, 75 bp, Homo sapiens
tggacccggcctgggagaagcagcagcgcaaggtgctgaatcgattctcctcggcccctctcattccacttccaa

SEQ ID NO: 707389 - DNA, 100 bp, Homo sapiens
gagcttcagccatcacgaggatgatttcggaacctggagaaaatgcagctgaaaaagttggatgaagatagtttaaccaaacaaccagaagaagtatttg

SEQ ID NO: 707390 - DNA, 89 bp, Homo sapiens
tgggagcgagcgcagcaaagcgcccagcctgccgcctcgctgtccctgcggcttctggggagccagccccagtgcctgctgagccgttt

SEQ ID NO: 707391 - DNA, 74 bp, Homo sapiens
gagccagcccgccagcatgccccagtccaaaggcagaagctcctcctggggtagagacagatcttattgatgtt

SEQ ID NO: 707392 - DNA, 100 bp, Homo sapiens
aggaactgtccacactgctgaaaaatctggacttaaagagagatctacttcagagccagcagtcccgccagaagaggctgagccacacactgagcccgag

SEQ ID NO: 707393 - DNA, 75 bp, Homo sapiens
agctgcacttgaggcccagaatgcactgcacaatattaaaactttacctgggcctctgaagagccaatccattca

SEQ ID NO: 707394 - DNA, 82 bp, Homo sapiens
gccacctgtgtgatgatgcctgagttcagccctcagcagccctgggcgctgcctatggcacagccaagagcggtaccggcat

SEQ ID NO: 707395 - DNA, 96 bp, Homo sapiens
gcgttgggaaaagcaccatctccacggagctggccctggcactgcgccatgcaggcaagaagcgtgcatcgcttcaaggccgggacagtgtggccg

SEQ ID NO: 707396 - DNA, 100 bp, Homo sapiens
tggtatgcaggaagggagaatgggttgctcttaatccattaaggaaatgtcagaatctcgttcctcttccctgtgtcatcttcttaattataaataatgg

SEQ ID NO: 707397 - DNA, 100 bp, Homo sapiens
tgggagcacttgtattctcattgccacaatttttcagtggagaatataaattggggtctctttttgaagaacattctagtatgccagtagaaaaaaatat

SEQ ID NO: 707398 - DNA, 100 bp, Homo sapiens
cacagaggttttgcagggtggagttaccgagaaattgacttcggggttaaagatcgaggtccggaagccactaggagattttttaattggttttattgga

SEQ ID NO: 707399 - DNA, 82 bp, Homo sapiens
cttggacatggagctggaaatgggctgcatgttcctctgtgttttcggccttcctggtgataagaagccagacgagtgtgca

SEQ ID NO: 707400 - DNA, 75 bp, Homo sapiens
agcaaaaggcttttaaagccatatacaggtcaagagcaatctgaatccaaatgcaaaggagtttgttcctggggt

SEQ ID NO: 707401 - DNA, 75 bp, Homo sapiens
cagggaagtcgcctggaaaaaccaatagtgctaatagctcgtcagcttgctaaaatccatgctattcatgcacac

SEQ ID NO: 707402 - DNA, 110 bp, Homo sapiens
ccagtacatcattgataacaagggcatcgactcagacgcttcctatccctacaaagccatgattctggatgaaattgaagaacataacatcaaaatctatcacttacctg

SEQ ID NO: 707403 - DNA, 89 bp, Homo sapiens
aacgtgttatggtggatgccaatgaagttccaattcaaaagatgtttgaaaagctgggacctgatcccaaccttgaagaaagtcctaaa

SEQ ID NO: 707404 - DNA, 75 bp, Homo sapiens
agccttgaaaaagctgccctgagacggtgtcccgccgaaagttatcatttaacatggaagaagatgagttcattg

SEQ ID NO: 707405 - DNA, 83 bp, Homo sapiens
ccttccccacgcaaccccagatccatttacactttacaaagtttgcctgcaatggtactgtaattgagcatccggaatatgga

SEQ ID NO: 707406 - DNA, 96 bp, Homo sapiens
ccgagcaggaggcgccatcatgggtggcatggcagcgagcacagacatggctgggctggaggagagcttccgcaagtttgccatccatggtgaccc

SEQ ID NO: 707407 - DNA, 100 bp, Homo sapiens
gtcgcgctgtaagaagcaacaacctctcctcttcgtctccgccatcagctcggcagtcgcgaagcagcaaccatgaaaatgatgcatcctgttgccagca

SEQ ID NO: 707408 - DNA, 89 bp, Homo sapiens
caatgaggaggagacggagcacgccaaagggtgcggaagtgctgactgcacagtttgtacagaaaaccaaattggataggaaaaaccaa

SEQ ID NO: 707409 - DNA, 100 bp, Homo sapiens
tgaagaaggcattgaagatgactattttttggagaggcctgatgcccgaatttcaggcttgggcactgtttaaaggaaagttccgagaaggcatcgacaa

SEQ ID NO: 707410 - DNA, 82 bp, Homo sapiens
ctttgtggctgtgcttgccaggcctggctccacgccatcatgaccgggtcctataacaacttcttcaggatgtttgatagag

SEQ ID NO: 707411 - DNA, 99 bp, Homo sapiens
gcagcgattgcgagaatgaggaggacaacagctacaaccggggacctctgtgagtgaaagccttcagagggaagctgctaagaagcaggccatgaaaca

SEQ ID NO: 707412 - DNA, 88 bp, Homo sapiens
tctcattattataggctccctcctgctgtcaggctacatcagcaaaggggaagagtctaacctgtctctgcaagctcttgagtcccgc

SEQ ID NO: 707413 - DNA, 50 bp, Homo sapiens
agagaattttggtctcgattcagttcctcagcactttgtttgccccctta

SEQ ID NO: 707414 - DNA, 99 bp, Homo sapiens
cccctgggtgctcagtacaaactgctagttaccaagctgaagcacttccagctccgtgacaaatggcctacagctgtgagagcaaatggacatctcctc

SEQ ID NO: 707415 - DNA, 87 bp, Homo sapiens
cctatgtagacagccacaaatgggaagcaagagaaaaagaacattactgtcttgacacgaagatcgattgagaagttattagaatgg

SEQ ID NO: 707416 - DNA, 75 bp, Homo sapiens
cagacactccagagtgaacagcctttacaggttgccaggtgtatgcaacagcgttattgcaacaggctaacgaaa

SEQ ID NO: 707417 - DNA, 75 bp, Homo sapiens
ggaagatggcaatgggcaggaagaagttcaacatggaccccaagaagatgtctggcgataaagggatttctgcct

SEQ ID NO: 707418 - DNA, 83 bp, Homo sapiens
atgacgtaagcatgatacaagaagcccatgttggcataggtatgttcgcaattcgtgctgatcatgattttgtagtacaggaa

SEQ ID NO: 707419 - DNA, 100 bp, Homo sapiens
atcaaagagctgctttgaatcagcagatcctgaaagccgtgcggatgaggaccggagcggaaaaccttctgaaaaccactcacgaattcttgtttggtgc

SEQ ID NO: 707420 - DNA, 82 bp, Homo sapiens
ggccacgcaccccggctcgcccgggcagccacccccggccctgctgccacagcagacttaattcagtgcacaaatgagatga

SEQ ID NO: 707421 - DNA, 82 bp, Homo sapiens
agccgcgaggaggcgcgggaggtgttcgagaacgaccccgagacgggtgctttcttctgcgacctggtactcatctacctca

SEQ ID NO: 707422 - DNA, 51 bp, Homo sapiens
aagcaggaaaatgagatgttatccagtgagaaagatcagtctaaagaaaag

SEQ ID NO: 707423 - DNA, 97 bp, Homo sapiens
attggtaggttggagttgagtctcacgttgaaacagaatgaagtgcttcctggagctaagccggaaatcactgtggaaaatcttcccagttatttca

SEQ ID NO: 707424 - DNA, 80 bp, Homo sapiens
gcattgcctgcaagctctgcgaggccatctgccccgcccaggtgcagctctgtcatttccactctgctctgctgcacaga

SEQ ID NO: 707425 - DNA, 95 bp, Homo sapiens
ggacagccgacctcccatggcaatttttgagttgttggattacatagtcaacgagattcgtattttacatggagaagtgaacaaagtgaaactgg

SEQ ID NO: 707426 - DNA, 99 bp, Homo sapiens
tgatggtgttattactccctggcagtccagtgacgcctttgctaagttgctggagtctggggacttgagcatgagctcaatcaaagtcgatggcattcg

SEQ ID NO: 707427 - DNA, 50 bp, Homo sapiens
caatgacgtgtttgaaggaagacgaggcatccgtgtcattctggacctta

SEQ ID NO: 707428 - DNA, 80 bp, Homo sapiens
tgatttaaacaagagatttccacagaagctacgtggtgaacatgggtctgattgacaaactgtgtgcctgcttcctctcg

SEQ ID NO: 707429 - DNA, 100 bp, Homo sapiens
tggaagacggagctggtcggcccgaagggccaattcctgtccccccagcagcatggcatcgtgtgctgaaccctctgagccctctgccccactgcccgcc

SEQ ID NO: 707430 - DNA, 98 bp, Homo sapiens
caagagaaaacttgactgtatacagaatcttgaatcagaaattgagaagctgaagaagaagaggacagtgctccagtgaaagtggaagaacaaaggaa

SEQ ID NO: 707431 - DNA, 90 bp, Homo sapiens
aaggagctggacatcgagcctgagggaggggaaaggcgcagggttggatttggtctagggagtcccagaaagaagtagaaaaagagagag

SEQ ID NO: 707432 - DNA, 90 bp, Homo sapiens
aagctcatgagcagcctgcccaacttctgcgggatcttcaaccacctcgagcggctgctggacgaagccgagccacatcgctcagacacc

SEQ ID NO: 707433 - DNA, 90 bp, Homo sapiens
aggagctccccagctggtggctggagcgaccccttgttctttggtggcgctggtccctgtgcgttttattgcgacctgccggtgggaact

SEQ ID NO: 707434 - DNA, 75 bp, Homo sapiens
gccgcaccccaggatggatcccccagagcgaatgaatttccctgtttgccaaagcaagtggcttggattctggcc

SEQ ID NO: 707435 - DNA, 80 bp, Homo sapiens
ggaagatgcaatgctgatgtttgataaaactaccaacaggcacagagatttttggaagtaccagcacagtgacgcttcct

SEQ ID NO: 707436 - DNA, 75 bp, Homo sapiens
gatgctattgtggttgaacaatggacagtcctggaaggaactctaatgatccaggacaaagaagttaccctggag

SEQ ID NO: 707437 - DNA, 51 bp, Homo sapiens
gagctgctgttatcccaccaatgttctttcgggaggaccattgcctcaagg

SEQ ID NO: 707438 - DNA, 80 bp, Homo sapiens
gaaatgaagaagaagagggaaatggatgaacttagatgtttctttctcagcaaaatagaggagaagcttacccctcttcc

SEQ ID NO: 707439 - DNA, 100 bp, Homo sapiens
ctcgccgctccctagcaccttctccagtcgacactctcgcgcccggagagtgcagcagctgccccgagccccgtgcttggcaacattccccccaacgatg

SEQ ID NO: 707440 - DNA, 98 bp, Homo sapiens
aaggattccaagtaactcttatttggtattatagctgcaaatgtccttgtattctgtttatggagagtaccttctctgcagcggacaatgatcagata

SEQ ID NO: 707441 - DNA, 76 bp, Homo sapiens
gatttggacaaggccaattacctgtcccaggccctccaggcgggcactgtgtgtggctgacaagattttgaaaaag

SEQ ID NO: 707442 - DNA, 100 bp, Homo sapiens
cccagccatcacctggatttacctgttttctgggagcttcgaaggtgatgggcagaatctgtttacgaaagacgtgacagtgatcgagggagaggttgcg

SEQ ID NO: 707443 - DNA, 75 bp, Homo sapiens
ttcttcagattggaaaataccacaggatggagactacgagtttatttcagcttaaaatgccacccagagaccaag

SEQ ID NO: 707444 - DNA, 101 bp, Homo sapiens
tgcgaattccacattctcatgcatttattgatctgactgaagattttacagcaggtttctaagcatgaattgaggaacagaagaagcagagcagatgatcg

SEQ ID NO: 707445 - DNA, 100 bp, Homo sapiens
atctgcaaacatagagaattctgggcttccacacaactccagtgctaactcaacaggaatggattgtaattgggcaagttgatatggaagctctggtgga

SEQ ID NO: 707446 - DNA, 100 bp, Homo sapiens
aagaagttgcggagaactttgtcggagagtttcagtcgcattgcccagtggttcccagacacaggtaatcttgggcacctccaagagcaaagtttaggag

SEQ ID NO: 707447 - DNA, 98 bp, Homo sapiens
ctcgctgggagagaggtacctctccttttccctctccctttccctaaggtatggcctcacaagtcttggtctacccaccatatgtttatcaaactcag

SEQ ID NO: 707448 - DNA, 51 bp, Homo sapiens
ggagtcttccatcaatcatatctcacagaccaactggtttaaagtatgaaa

SEQ ID NO: 707449 - DNA, 90 bp, Homo sapiens
agtccccgtacggccacccggcggggcctgatcaagatccggggggaccggtgctggcgagacctcacctgcatggacttccactatgag

SEQ ID NO: 707450 - DNA, 75 bp, Homo sapiens
ctgtgatgaaaacccagatgccacatatgatttcaagctgatatgcattcaagatggttacctttccctgctgac

SEQ ID NO: 707451 - DNA, 82 bp, Homo sapiens
tggacagcgaatctcactaccgcccggagctgcccgcaccgcgtacaggtgagaagccctaccactgcaactgggacggctg

SEQ ID NO: 707452 - DNA, 50 bp, Homo sapiens
ggaatttatggtcgcctttttgaatgagctcttgaatgtcgtctctcaac

SEQ ID NO: 707453 - DNA, 83 bp, Homo sapiens
caagaagccggactacaaggtcgcctacgtgcagctggacagagcgggatgccaccagcttgtccaaagggaagttccaggag

SEQ ID NO: 707454 - DNA, 100 bp, Homo sapiens
cctcctttctcaagacaaaggggtgagggatgacggaaaggatgggggcgtgggatgaaagtggacttaacttttaagcattgtcccagatatagccgtt

SEQ ID NO: 707455 - DNA, 101 bp, Homo sapiens
gcggaacagccacagcagcctcccaaggagtctgcaagttggatctagtgaaaagccatttgatgtatgcggtcagagaagaagtggaggtcctcaaagag

SEQ ID NO: 707456 - DNA, 100 bp, Homo sapiens
actgattcaaattcaacagaatcctctgaaacttccacaggctgcaataggatctgtggctttggacacagcaaggtcacatggagagaaacaattagaa

SEQ ID NO: 707457 - DNA, 82 bp, Homo sapiens
tcacgtatacaaaggaaactcagactccagttatggctcaacccaaagaaggttatcaatactctggctgaccatcatcatc

SEQ ID NO: 707458 - DNA, 96 bp, Homo sapiens
ctcctgcacagctgggaaccacgatctacaaggacctgaaggagaagaaggagaaggtggaggagaaggcaagccggaaagagcgaaagaaagaag

SEQ ID NO: 707459 - DNA, 100 bp, Homo sapiens
cggaaaaaagaaaactctagaagtctggatgtcggtgggcctctgagatatgccgtttacgggcacacatccatagttgtgcacaaggatgagttcttct

SEQ ID NO: 707460 - DNA, 100 bp, Homo sapiens
gaagccgatgatcagagtagaacagcagccagattatcgcaggcaagaaagcagcatttgacattgtgcagcaaagaaatggttatggagaagcccagtc

SEQ ID NO: 707461 - DNA, 100 bp, Homo sapiens
ctcatctttggcaggaaggcgaggcttccgcccggcacagggggtcatcaagaacaacctgaaccctacatggaagcgtttctcagtccccgttcagcat

SEQ ID NO: 707462 - DNA, 98 bp, Homo sapiens
cagagtggaccaccccatgaacctcggatggatagaatgacagaagatgctcttcgcttgaatctgttgaagcggagcttggacccagcagatgagcg

SEQ ID NO: 707463 - DNA, 100 bp, Homo sapiens
agacaaccaggatgaagacctttataatgatccacttccacttgatgaatagatctgccataataattgcctctccagtccagcctgtactccaaggaat

SEQ ID NO: 707464 - DNA, 100 bp, Homo sapiens
tatgaatggatcggacagctgatgggggctgcccttcggggtaaggagttcctgattgagtgccatctatggggggacatatatgctgaacaaacctgtg

SEQ ID NO: 707465 - DNA, 82 bp, Homo sapiens
ccgagcgggcggcttcctggcctgggcgctccggtggcggcggagggcagctggtggaatttttgaagaaaatggaatctcg

SEQ ID NO: 707466 - DNA, 75 bp, Homo sapiens
gcgcagcccccggccgcagcgcaggcagcccagcagaattcagaaggagctggcggacatcactttagaccctcc

SEQ ID NO: 707467 - DNA, 100 bp, Homo sapiens
gcctctatgtcagtggtcctgaaactgttcccacagctggaggggaaggtgtccttaagtttgctcgcttggtcaagtcctacgaagcccaggatcctga

SEQ ID NO: 707468 - DNA, 96 bp, Homo sapiens
attttgtacagatcccacaatgcaagcctccaccccacgccagaggagtcaaattgactttatcagctttaatcgatgggaagaacttcagtgcag

SEQ ID NO: 707469 - DNA, 78 bp, Homo sapiens
atggctgccgcgccgccgctacgggaccgcctgagctttctacaccggcatcaagatggtgctcatgtggaccagtgg

SEQ ID NO: 707470 - DNA, 100 bp, Homo sapiens
gaaggcccagccaatgaagatgaagacataggaggtggtcataatgtcacaatctccttgcagtccaggactgggcatactcatatgccttctgtggttg

SEQ ID NO: 707471 - DNA, 98 bp, Homo sapiens
ggagcgaaggtttttgctgcgccaacgcagtgaccgaaggctccgctcacgcccggcctctgaagagccaatccattcaggatgggaaaccacgcagg

SEQ ID NO: 707472 - DNA, 50 bp, Homo sapiens
tagagctgcggaacaggacgccctctgatcttgagcctgatcgagtgcgg

SEQ ID NO: 707473 - DNA, 76 bp, Homo sapiens
gtcggcttgtagagagattgcagcattttgttcccaacatcacctttggtcaccctgtggtagaaagccttcgaaa

SEQ ID NO: 707474 - DNA, 83 bp, Homo sapiens
gagtcatttccttcgtacccacagtgcttcatgagaggttacgggtaaattccggggaggtgtgaaccccttcaccaatggct

SEQ ID NO: 707475 - DNA, 89 bp, Homo sapiens
tttgcttttgtaacttttgatgatcatgatacagttgataaaattgttggatgttggtctcacattggagatccccaagagtgtcacta

SEQ ID NO: 707476 - DNA, 51 bp, Homo sapiens
tgacttgttcaagatgttatcaggccttttcagatattaatggcaaagttc

SEQ ID NO: 707477 - DNA, 87 bp, Homo sapiens
tgaacccagaggtcgtggaggtggccgtggaggcagaggtggcatgggataaagcccccaccctctgctgtcacacagcgcaacaaa

SEQ ID NO: 707478 - DNA, 97 bp, Homo sapiens
atgggcaaccactcaggacggcccgaggatccggaaccagctccttcgagaactcatagaacggaagaccagctccttggatcccaacgatcaggtg

SEQ ID NO: 707479 - DNA, 75 bp, Homo sapiens
cgtgaaacatgtgaacactcaagtgaagcaaaagccttccatgattacgcaaaaagggcagctagctgtagaaag

SEQ ID NO: 707480 - DNA, 125 bp, Homo sapiens
tgcactttcctccttctcaaattgcagcaggagctttttgcttagcactgaaaattctggataatggtgaatgggtctccagaaatgctttgggttcatctttcattgctgcaaggaacttccat

SEQ ID NO: 707481 - DNA, 50 bp, Homo sapiens
gctcccagaggatcaccagcgtggatgatgttgaatttgaagtatcatcg

SEQ ID NO: 707482 - DNA, 100 bp, Homo sapiens
tgggttctctgaagatgattacacggcattaatctcccaaaatattctagaaggggaaaagctacttcaaggatgttggttcctgcaaacaagaactgac

SEQ ID NO: 707483 - DNA, 100 bp, Homo sapiens
caagccttggagtaatttacctgaagagtgacaccattgattttgaaactacttcccaccaaagatctccaatatctcctcggatgtcactgtgaatgag

SEQ ID NO: 707484 - DNA, 75 bp, Homo sapiens
aaaaaggctacaaagctgctttcattggaataggaaggaaaatcacctcggcagtgtttgaaggaaggatactgc

SEQ ID NO: 707485 - DNA, 50 bp, Homo sapiens
ctggcatgacgtgcaggtctctagcgcgagtacgaccccagcaaagcgac

SEQ ID NO: 707486 - DNA, 82 bp, Homo sapiens
ctgtcatgaaacagcaaccagttgctatttctagcgcaccagcatttgtgagaaagatcagtctaaagaaaaggagaagaaa

SEQ ID NO: 707487 - DNA, 50 bp, Homo sapiens
gcctcttgagtagctgggattacagccaagacaatgcaaactccagtgaa

SEQ ID NO: 707488 - DNA, 75 bp, Homo sapiens
gctctttagctgaaatacttctgaagtcctattttgtaacggattatgatccaaccattgaagattcttacacaa

SEQ ID NO: 707489 - DNA, 98 bp, Homo sapiens
aagaagatccatttggctcaatgatcgaactgtgagaatttggaaggctcgcaatttgcaagatggtcagatctctgacacaggagatctgggggaag

SEQ ID NO: 707490 - DNA, 60 bp, Homo sapiens
agccattccttttggaacaatgatggccgggagaataccacactcctgcacagccctggg

SEQ ID NO: 707491 - DNA, 78 bp, Homo sapiens
tcaccactcaaaactgtaatactaaatgtgttaccataccaaggcatcgttggcttcacagtatgactgatgatcctc

SEQ ID NO: 707492 - DNA, 92 bp, Homo sapiens
cagccacatactatccgtttgttcaggaaccaccagtgacagagtagaagtaaaatctggagaagaagatgaagaaattttgtttaaagaga

SEQ ID NO: 707493 - DNA, 75 bp, Homo sapiens
tggagacatcaatgtatttcttaccaaaagacactttcaggtcatctaatacatgggagaaacatggattttgga

SEQ ID NO: 707494 - DNA, 98 bp, Homo sapiens
atcattgggagaaatccccactcctccaagaaccaacccccaaattggctgggacagtgaatacggctttgctgaaaaagtagttgagggaatttctg

SEQ ID NO: 707495 - DNA, 100 bp, Homo sapiens
tcttgggtggtctgtaagccgcggagctaattggagatggtttcacagcacgcagtggcttcgggggtaagcttgatgattaccaggaacgaatgaacaa

SEQ ID NO: 707496 - DNA, 90 bp, Homo sapiens
tgattctgctggaaatcctgatcagctgcttagcttttcagccgcaactttgttaaggacagaataacgggctcccagattcacaagccc

SEQ ID NO: 707497 - DNA, 84 bp, Homo sapiens
tgtagcccccccagtcagtggagacttaaccaaagagatgtttccttccaatgggcttttggtgtaggatgtcggagaaccaag

SEQ ID NO: 707498 - DNA, 74 bp, Homo sapiens
gtggggggattctcgacctgctaacagaactggaccttttcgaggctcacaggacacctgcatgcccaaggcac

SEQ ID NO: 707499 - DNA, 100 bp, Homo sapiens
cgggcccgagaagacctcctttttccaggctttaggtatcaccactaaaatctccaggggcaccattgaaatcctgattgagatggccatcctgcggttc

SEQ ID NO: 707500 - DNA, 74 bp, Homo sapiens
atgaaataacctttgacaagattttcaatcagaaaattgtaccttggccatgtagaagttgatgaatcaagagg

SEQ ID NO: 707501 - DNA, 100 bp, Homo sapiens
cctttaagacgtgcctgcctggtttcccaggggccccttgtgccattaaaatcagcaaagacctgaaggagaagaaggagaaggtggaggagaaggcaag

SEQ ID NO: 707502 - DNA, 100 bp, Homo sapiens
tgcagcctcgtgcggacgctcgtgcacagatacacttagaaatggctgttgcgtattggaaattagtgttatctggaaggtttaaatttttagatctctg

SEQ ID NO: 707503 - DNA, 50 bp, Homo sapiens
gaaagcatccttcatctcctggcggcgactggcggcgcgatggacctgac

SEQ ID NO: 707504 - DNA, 82 bp, Homo sapiens
ccctgagtcaaagaagatgcctcgaactaaacaaattcatcccagaaatctaagaggcctgctggtgggtacccttgatgtt

SEQ ID NO: 707505 - DNA, 100 bp, Homo sapiens
caacgattacctggcggacaagagctacatcgagggcaacgaagtaaacgaggaggttggtccaaaggaagaaagaggaagaaacctcttcgagacagca

SEQ ID NO: 707506 - DNA, 100 bp, Homo sapiens
ggcgaaaggaagcaagcagttcagaagagccaaggaataaacatgcaatgaacccaaaagggaagagagaagggcacagttacctaagtatcaacgtaat

SEQ ID NO: 707507 - DNA, 100 bp, Homo sapiens
ccagtatccattctttatggcagattcatgatgttgctatcaaaagttgagaaattgtcagaagaaatcatggagataatgcaaaatttaagtagtatac

SEQ ID NO: 707508 - DNA, 101 bp, Homo sapiens
accggctccggggccccgataacgggccgcccccacagcaccccgggctggcgtgaggtcagtcccttgttccaaaaattggaaaatgaccagattgaaag

SEQ ID NO: 707509 - DNA, 90 bp, Homo sapiens
ggggccatggccggaatgcagtaccctcagcagcagtaattcgccaaaatgacgaacacaaagggaaagaggagaggcacccgatatatg

SEQ ID NO: 707510 - DNA, 82 bp, Homo sapiens
atttaattccttttcgaccttcaatccagttccaaggactccacgggataatcagacagctaaatggagtctgagcagctgt

SEQ ID NO: 707511 - DNA, 50 bp, Homo sapiens
ctggactggaacctctgggcccacaaatctatgacaagttcaagcagagt

SEQ ID NO: 707512 - DNA, 51 bp, Homo sapiens
gaaaaactttggactgatgatgatagaagatggtgagatttttgcaagtat

SEQ ID NO: 707513 - DNA, 75 bp, Homo sapiens
ctgcaggatgtcttagggcgccagcgagctgctattgaggggcagacgattgcgcagtctctttgtggagaggac

SEQ ID NO: 707514 - DNA, 101 bp, Homo sapiens
aagaggctggactcggattcgttgcctgaggtgggcaaacgcagaggcgggaacaaactagccctcaagacgggaatagtagccaagaagcagaagacgga

SEQ ID NO: 707515 - DNA, 82 bp, Homo sapiens
aaacaactggaaactgttttggatgatcttgaccccgaggttgccaaagcttcttttcaaaggaacaatgatgccttagatg

SEQ ID NO: 707516 - DNA, 95 bp, Homo sapiens
ggagcaggagagctgtctggatggctgggagttcagtcaggacgtctacctgtccaccattgtgaccgagaatgaagatgataaccgagccagtg

SEQ ID NO: 707517 - DNA, 130 bp, Homo sapiens
tggtaactggagccgtagcgtcggtgctggaagacgaggccacagacacttctgatagtgaaggtcaaagttgctcagcggagcccagtagattcaggcaccatcctccgagaacccaccacgaaatccg

SEQ ID NO: 707518 - DNA, 100 bp, Homo sapiens
tcaacgagctgctggaggacgagggccagctgacggagatggtgcagaagatggaggaggctggtgagattggagagatgaaggatggagtcccagaggg

SEQ ID NO: 707519 - DNA, 100 bp, Homo sapiens
ccgaggaagctaaggccgcgttggggtgagaccctcacttcatccggtaaagtcagtgataaatcttttgtttgctgcatatactggagatgtgtctgca

SEQ ID NO: 707520 - DNA, 75 bp, Homo sapiens
tgctctccatcacctatcacagcagcatccgctctctggagcttcccagtgatcctgtccatcgaggagcactgc

SEQ ID NO: 707521 - DNA, 75 bp, Homo sapiens
cttttagaaatggtcacaacttcatggttcgaaattttcgatttcagatgcagaactccaggaagttgtaaaagt

SEQ ID NO: 707522 - DNA, 83 bp, Homo sapiens
gagagccatggacattggagagagtggtattatggtgtaaacaacgattctttggaggaactgtggctgcaccatctgtcttc

SEQ ID NO: 707523 - DNA, 80 bp, Homo sapiens
tgcagattttggcagattatggctttgtccccacccagcactgatgatattataaaattcatctgaaaactacattaaga

SEQ ID NO: 707524 - DNA, 100 bp, Homo sapiens
ggacaacatcaccgtactgcatgtgaagctcaccgagacggcgatccgggcgctcgagacttaccagagccacaagttttccaagagataacttcaccaa

SEQ ID NO: 707525 - DNA, 95 bp, Homo sapiens
agcccttgcgcctgcctctccaggatgtctacaaaattggtggaagaggatcacctagcccgggtagaagaggcaatcacccgtatgcttgtgtg

SEQ ID NO: 707526 - DNA, 74 bp, Homo sapiens
aaattctttcccaaaattcagaaatcaaccaagttcatggacttgcaattgtgaccaaatatattacaaagggc

SEQ ID NO: 707527 - DNA, 82 bp, Homo sapiens
caggcggtgacagagtggagccatggctagagcagttggaattgatcacaccttttcagttgtacttcaatcctgaattaat

SEQ ID NO: 707528 - DNA, 50 bp, Homo sapiens
ttcatctgtggatggagtattggaaaaagctgttgctcaaatgaagataa

SEQ ID NO: 707529 - DNA, 75 bp, Homo sapiens
ccatgtttacaagtcggacaggagcagaaacacacctaccttcccctggaggctattattcgtgaattgggtggt

SEQ ID NO: 707530 - DNA, 51 bp, Homo sapiens
ggccaagactccgtcctgcaaggttggaaaaagactatgttagcaagtgtc

SEQ ID NO: 707531 - DNA, 75 bp, Homo sapiens
gtgagcggatgctgcccgattacttcaaccaccgagtgatcgccaccttctgggtgaaccctcagttcaagatcc

SEQ ID NO: 707532 - DNA, 98 bp, Homo sapiens
gctgcattcatcacaggtgctgcgtaacgccaccgggtgcctaagggatgccagatgatatgaacttcagtgatgtaaagcaaatccatcaaacagac

SEQ ID NO: 707533 - DNA, 89 bp, Homo sapiens
taaaaatgactacttgcagtacttggctgagggtaaaaagctgggattggtaggctgggtccagaacactgaccggggcacagtgcaag

SEQ ID NO: 707534 - DNA, 75 bp, Homo sapiens
atcatccagtggcagacactgaaaataaggaactcaaccctatgtatgaaggatatctacagcatgatgcacagg

SEQ ID NO: 707535 - DNA, 75 bp, Homo sapiens
tacttctgcaatcctggacatgaaatgatgccaacgtccggcggtacctccagctgacacagtcagaactcagca

SEQ ID NO: 707536 - DNA, 115 bp, Homo sapiens
ctcagcccaggacctccaggggaacaatgaggcctacgcagagctcatcgtccttggaactgtggctgcaccatctgtcttcatcttcccgccatctgatgagcagttgaaatct

SEQ ID NO: 707537 - DNA, 75 bp, Homo sapiens
gggccatgctcgccatcttcatcctggtgatggcaaatgtcgtggacatgtttgcccagtatgcggagatcgtcc

SEQ ID NO: 707538 - DNA, 75 bp, Homo sapiens
ggcctcggcctcggcctccgacacgtctgcgctcctcagaccaccggcaggtgaacagcctgatgcagaccgagg

SEQ ID NO: 707539 - DNA, 74 bp, Homo sapiens
ggacaaaacgccaggcggatctcagaaggccagttcaaagaagaagaagatggagtgtgggagaatggactttc

SEQ ID NO: 707540 - DNA, 120 bp, Homo sapiens
cccgggggaatcttttttcactgtctttggggttttcttcccagcggctacaggaagactgtatcgctaggtacaagttgctggttgaactggtccaaaagaaaaaacaagctaaaagct

SEQ ID NO: 707541 - DNA, 87 bp, Homo sapiens
gatgagaaggttcagttggcaaaccagatatatgacttggtggacaatcagctcattggtaccacgcagcccttcatgctctatgtg

SEQ ID NO: 707542 - DNA, 50 bp, Homo sapiens
gaagaaatagttacctatgatcgaacttagtgatttggcccgtgaccctc

SEQ ID NO: 707543 - DNA, 82 bp, Homo sapiens
tgctgaaggccatcgtgcaggggcagatgtgaagttcatttccaatccgccctccatggtggcagcggggagcgtggtggcc

SEQ ID NO: 707544 - DNA, 101 bp, Homo sapiens
aacaactataactacaggattaactctggatgctattaacattctgaaggagatgaaagagaaggatgttcttatcaaagatacaacagccttgtcctttt

SEQ ID NO: 707545 - DNA, 100 bp, Homo sapiens
tgtatgaacagcccccatcttcccatgcttgtcaaaaatcagaggcaactaacactgcggcttcctgagatggaattgtcagccacttgaagaagcaggc

SEQ ID NO: 707546 - DNA, 100 bp, Homo sapiens
cgttgtgcgggcagacgttggtggtgcggggcggcagccgattcctggccacctccatagcaagcaggtgagaagccctaccactgcaactgggacggct

SEQ ID NO: 707547 - DNA, 97 bp, Homo sapiens
aacagcagtcgcgaggacagcctgcaggatgcctgggactacgtgcaggctcaggacctgaaggagaagaaggagaaggtggaggagaaggcaagcc

SEQ ID NO: 707548 - DNA, 75 bp, Homo sapiens
tcccagaaggaaaataaacagctgagtctgaaggtggatgaactggagagtactccaatgtatactgcccaacgc

SEQ ID NO: 707549 - DNA, 100 bp, Homo sapiens
tggctgcaggattggatattcttctccgcttacactctctgaccagctcctgtatcacgtggaagagatagttatggaggtccacctcgaagggaaccgc

SEQ ID NO: 707550 - DNA, 90 bp, Homo sapiens
cgaagattgacgccagtaagaacgaggaggatgaagggaaagaccacagcaagattctttcattcgtctcctcctagcctgggggaccag

SEQ ID NO: 707551 - DNA, 126 bp, Homo sapiens
tcaccctggtcaacaagaagaacgctctcatccggaggcaggaccagctgcagctgctttggagaccttccccagacgcctccaggggctgtcccagacccctctcttgccagtacagactcttca

SEQ ID NO: 707552 - DNA, 90 bp, Homo sapiens
atgatgggaaggtggatcccgccgggaggtactttgctgatggtagcatcgacaaggctccctgtggaccctgccccgccctgcccacgg

SEQ ID NO: 707553 - DNA, 96 bp, Homo sapiens
tttctggggagaagcagcgcatcagccgagaggtgtgctctgaacaagccgagacggggccgtgccgagcaatgatctcccgctggtactttgatg

SEQ ID NO: 707554 - DNA, 87 bp, Homo sapiens
cgcttctcgtagtcctgggagcacagcagaagtaataaacagccattggactcttcaaacaaaaacgctgtctccatcaagtactgc

SEQ ID NO: 707555 - DNA, 83 bp, Homo sapiens
cagcctgcggagcctgtggggcagcaccagcagaaccaaaatcgtgtgtggtggcagatcctcctcttcctgcacaaccttgc

SEQ ID NO: 707556 - DNA, 100 bp, Homo sapiens
ctggtataaaatagatccatcccatactcaaggctacagaactgtacaactcgtgtggaagtggaatgagaccgtggagctttttcgtgctaagatgccg

SEQ ID NO: 707557 - DNA, 90 bp, Homo sapiens
ctccagcctctgcctcccagaaactcagccttacccctcgtgaattcaactcttacggagctcgaagaggtaatgatgctgtaatgacaa

SEQ ID NO: 707558 - DNA, 82 bp, Homo sapiens
gaggacagttcgctacacagcaatgcatcgagaagaagcagactacagtgcctttggtacagacacgctaataaagaagaag

SEQ ID NO: 707559 - DNA, 82 bp, Homo sapiens
gtgatttgctccccctcgtgcagcaacccccacacccagcaccagcctgagacagctgtcttgtgagggactgagatgcagg

SEQ ID NO: 707560 - DNA, 90 bp, Homo sapiens
caccgcccctcctggaagaaggaagaggctgctgacagtgatgatgaagatttggatgacttatttgtgggacctgttgggaactctgac

SEQ ID NO: 707561 - DNA, 75 bp, Homo sapiens
tggcaagtgttcctgcaatgctggctatgaagaaagaggttttatgtgccaaggggagaagcccttcaagtgcga

SEQ ID NO: 707562 - DNA, 100 bp, Homo sapiens
cttttctctacttgtgtcactaacggaccgtttatcatgagcagcaactcggcttctgcaggttcttcccaggagactctgccggccttttccccaccag

SEQ ID NO: 707563 - DNA, 74 bp, Homo sapiens
ccttccctccatccgttccagggacctcaccctcgggggagtcaagaaggttcagattcagaacaagaaagtgg

SEQ ID NO: 707564 - DNA, 100 bp, Homo sapiens
ttcatccccgaggctccacccgaggacggctgggagaacttcatgtgtgagaggctgggtgaggttggcatggattacagaagctgcatcctgagacccg

SEQ ID NO: 707565 - DNA, 100 bp, Homo sapiens
tctggctgcagctctgcggggcgcaggaggcggtgcacagcgccaaggcgcacctatgttggcagcatgcctggtcgcatcatcaacggcttgaagactg

SEQ ID NO: 707566 - DNA, 82 bp, Homo sapiens
acgtctggggcaaagggaccacggtcaccgtctcctcaggatcagttcgaggtgctcgagcgccacacgcagtgggggctgg

SEQ ID NO: 707567 - DNA, 50 bp, Homo sapiens
ggcgagccagagcctgcagtcccacacgctatttccttcgtgctaccatc

SEQ ID NO: 707568 - DNA, 50 bp, Homo sapiens
gcaaactcttcagcggattcgacaatcagaggatgtgagttctgtagagt

SEQ ID NO: 707569 - DNA, 90 bp, Homo sapiens
gtattcttgaaggagagcttgaagcaagggaccttgttatagaagccttaaaggtgctgggactctggtgcccccaaccctgggcatcct

SEQ ID NO: 707570 - DNA, 75 bp, Homo sapiens
cttagtgtacagaagttcatggagtctactcttcatcttgtgttgagacttcgtggtggtgctaagaaaaggaag

SEQ ID NO: 707571 - DNA, 75 bp, Homo sapiens
acagtggcaatgagaccagtggaagcagcaccatcggggagacaagcaagtcctgacttccagtccttgttctca

SEQ ID NO: 707572 - DNA, 90 bp, Homo sapiens
gggggcccgtactgcacatcgtggtggtcggatttcaccacaagaagggctgccaggctgtggaaaatctctgttctcacaaagtctccc

SEQ ID NO: 707573 - DNA, 82 bp, Homo sapiens
gcatttcctcctgacggctgtacttgagcagtcacctggcacagatgctgagggttggaaaagcaaaagcagatgtgtggcc

SEQ ID NO: 707574 - DNA, 96 bp, Homo sapiens
atagaaatgtacaccctcgagagcggcctgattgggaagaaactcttagcgcaatgttaccggtattgtaagaacaagccgtacccaaagtctcgc

SEQ ID NO: 707575 - DNA, 82 bp, Homo sapiens
tgaccagaaaggaactcccaagcgactgcaggcagaagctgagacggctaaggattctgagaaacgaacccctcttcatgtg

SEQ ID NO: 707576 - DNA, 83 bp, Homo sapiens
gaaaagcggcacgacaacattaaaccatcagatgaggtatgcagaatctgtgggagcaaaacattatcatacttcagccaaac

SEQ ID NO: 707577 - DNA, 82 bp, Homo sapiens
tcccagcccgggtccccgcgttcacagccccagcgcagtctctgctttctatccgtcaagatgataaagtcgtgtgcccgag

SEQ ID NO: 707578 - DNA, 75 bp, Homo sapiens
ttctatggaaaacattgagctcgggctgagtgaggcccagatcgatgaagaattggtaacaaattctgggaagtt

SEQ ID NO: 707579 - DNA, 100 bp, Homo sapiens
ctcaggtggactgaaggccgctatgatcgaattggtggaaaggttgaagttcaagagctcagaccctaaagtcattcctgtcccaatcagctgctctact

SEQ ID NO: 707580 - DNA, 51 bp, Homo sapiens
agacctctgtttggggagacgtccgccaagattatcgaatgtctgaaagaa

SEQ ID NO: 707581 - DNA, 50 bp, Homo sapiens
agatgaacctgacaatgctcaactccctgtgctgtcaggaatctacagga

SEQ ID NO: 707582 - DNA, 100 bp, Homo sapiens
gcaagggcgagatcctggcgagcctgcaggatggcgcggccgagtccccgtacggccacccggcggctctgctggccgtccgctctgactaccactgtgc

SEQ ID NO: 707583 - DNA, 111 bp, Homo sapiens
aggctgatggcggaggcttcgagtgacccgggtgccgaggagcgggaagagttgctgggacctcctgccccccgaggtctgcagtctcctgaacccagcagccatctacgc

SEQ ID NO: 707584 - DNA, 82 bp, Homo sapiens
gcctcccgcccgccgcgctccagatgaagtgtgagcactgcacgcgcaaggtttggtgcacctcgatttggaggaagtaggg

SEQ ID NO: 707585 - DNA, 100 bp, Homo sapiens
ggagagggtgctggctgccgcgcggccgaggtgtcccgacccaggctaagcttgagcatggctgagcaggagcccacagccgagcagctggcccagattg

SEQ ID NO: 707586 - DNA, 100 bp, Homo sapiens
ttcttaaaagatggagaaggaagagctctgaaattaccaaatcttgtggacatggcagcacaggggaggaactggacttgcggctcattcggacaaaggg

SEQ ID NO: 707587 - DNA, 100 bp, Homo sapiens
cgagaccctgcctgcctgaggaggcctcggttggatgcgaaggagctgcagcatccagaacaccgaaaatctctcccagcactttagaaaggggaccctg

SEQ ID NO: 707588 - DNA, 96 bp, Homo sapiens
gggcctgcatgcacctggggcacctcaagctctggtcccattttggcagaagaagctgtcctgaagcagaagtgtttactgaccactgagctctga

SEQ ID NO: 707589 - DNA, 78 bp, Homo sapiens
aaacgactctgcgccgccgctgcctccatcctgggcaaacctgcggacatttctccacccaggtgaactcctccctca

SEQ ID NO: 707590 - DNA, 83 bp, Homo sapiens
tgacaatctcctcagggaaggggcagcacaaaaaacgaccctataattgcgagatttgtaataagtctttcaagaggcttgat

SEQ ID NO: 707591 - DNA, 125 bp, Homo sapiens
aaccagcgagatgaatactgctgaggactggggcctcattttggatatctgtgataaagttggtcagtctcgcactggttaccttatcccatatcacacaactggtcctcagccataacaagcta

SEQ ID NO: 707592 - DNA, 50 bp, Homo sapiens
cccccagttccaaagtgtcttaaagaattggcagagggggtcgatttggg

SEQ ID NO: 707593 - DNA, 100 bp, Homo sapiens
aagggaaggaaatcatgtcaagcgaagccttgaaaaagctgccctgagacggtgtcccgccgaaaggatggtgattgctcacaccaaagccttggacccc

SEQ ID NO: 707594 - DNA, 101 bp, Homo sapiens
ggtgcagccccgggccaggccgcggccggggcaggagcgcagattcactgcgtgctgtcctcacttgttctacaatgagtgccaaatctgctatcagcaag

SEQ ID NO: 707595 - DNA, 100 bp, Homo sapiens
ctctgtccttattatcggaccccgaggatcaggaaaaactatgattgaggaagacacatggcagaaatactacttggaaggagtctcaaatgaaatgtac

SEQ ID NO: 707596 - DNA, 82 bp, Homo sapiens
aagactcccagctccgggagttgctgctgcctccaccagacaccaaaccagcagcccctgtcaaagggaacaggaagcagtc

SEQ ID NO: 707597 - DNA, 100 bp, Homo sapiens
gttgatctgtaatgttcaggccatggaagaaatgatgatggaaatgaagtataataccaagaaagccccacttggtgagcccgtggtagcagcagaagca

SEQ ID NO: 707598 - DNA, 75 bp, Homo sapiens
gatcttctgagtaacggaggacaattcaccatagttttctttaaggttgggataattcttcactattccaccctt

SEQ ID NO: 707599 - DNA, 100 bp, Homo sapiens
ggcgaaccctgagtggaggatgttcccgctgcctaaagaatgattgactgctgcagtgcagaaggcaattcctatgtacaaaattgccaccaaaaacgat

SEQ ID NO: 707600 - DNA, 100 bp, Homo sapiens
aatcctcactctgagtacggtctcacagacaacgttgaggatatgctgcaggctgctagtcattatcgccaaaatagaaactctttgtatagaagagaag

SEQ ID NO: 707601 - DNA, 74 bp, Homo sapiens
ttatcagccatccttcgctgcagctgtcggaaaaggtaacagaagatggaactcgaaatcccaatgaaaaacct

SEQ ID NO: 707602 - DNA, 50 bp, Homo sapiens
ctgccttatgggacagatcaagggatggactatttgggttctcggcaata

SEQ ID NO: 707603 - DNA, 75 bp, Homo sapiens
cgccgccgcctctttcatctcttctggggcaggggccagggccagaactgccattggatgtccagaatcccctgt

SEQ ID NO: 707604 - DNA, 82 bp, Homo sapiens
ggtgcagtcagccagcccggacatcagggtgaccaggatggaggaggacaggtcccagaagaggaggccagtcacaatggac

SEQ ID NO: 707605 - DNA, 100 bp, Homo sapiens
gcaaggactacccctttgccaggttcaataagcgtgccctggacttcagggagagcagggaagctgagccccacccgctgtgggagtacccatgccgcag

SEQ ID NO: 707606 - DNA, 100 bp, Homo sapiens
tggcgatgctcttcttggaaaaccagatccagaaactggaggagtcccgctcgaagctagagaggatctgacgaactactctcaggcagtgttctcagta

SEQ ID NO: 707607 - DNA, 80 bp, Homo sapiens
ggccgggtactctacacttgcttccaatccatacaggcccaaaagagttcagagtaccctcacctgagtcccaagtacaa

SEQ ID NO: 707608 - DNA, 76 bp, Homo sapiens
accgcgtcctgagacactcgcagcaggattaccggaaaaatcaggctttaccgccagcacctgttcagaatcacac

SEQ ID NO: 707609 - DNA, 75 bp, Homo sapiens
tcctgtacagcctgcagaactgtttttctatatgagtggagaagacagctgttaccagggaggtcatacaacatt

SEQ ID NO: 707610 - DNA, 100 bp, Homo sapiens
gatcatcctggcgatctacttcctctggcagccggagcggttgcagggcacacattactcggtgcagtcggacatctggagcatgggcctgtccctggtg

SEQ ID NO: 707611 - DNA, 83 bp, Homo sapiens
cgcggcggagacgatgcctgagatcagagtcacgcccttggggggatatgagactttctactcggaatatcctgagtgttgcg

SEQ ID NO: 707612 - DNA, 98 bp, Homo sapiens
ttacgttcacctcggtgtctgcagcaccctccgcttcctctcctaggcgacgagacccagtggctagcatttttgaaacgttggggttgttggagtgg

SEQ ID NO: 707613 - DNA, 75 bp, Homo sapiens
ttcagcaagcacatagtggagcaaatggtggctttcattggatgttgtgactgtgacagactcactggggtttgt

SEQ ID NO: 707614 - DNA, 97 bp, Homo sapiens
gccccgccgctgagccgtcgcggagccgcgcagccctcggagcacggtcagactatgatgactggagaccgtctctggccagtttgcttcaacccat

SEQ ID NO: 707615 - DNA, 80 bp, Homo sapiens
gacttggacacgtcccagctctctctgggcatctggaaagggctttgttcgcgggggtcacagctctcatggctgcagct

SEQ ID NO: 707616 - DNA, 83 bp, Homo sapiens
tacaagagccctgagctgccacggatactgagggtggcccagttgaaatccttcccttcctctaccttggaagtgcctaccat

SEQ ID NO: 707617 - DNA, 97 bp, Homo sapiens
agatcctgtgctttactctgaagactctgtggccatcctgctctacctgacgcgcaaatataaggtccctgactactggtaccctcaggacctgcag

SEQ ID NO: 707618 - DNA, 99 bp, Homo sapiens
tgggatccggttccttggtgtcatccagccttagcaaaccagaggcgaggattaaatccaccacacagggtgaaatctatctccatgacaacattcaca

SEQ ID NO: 707619 - DNA, 97 bp, Homo sapiens
ttcagatgtggtggaatatgccaaggaaaaactggagagcttcatcaaaaatagtgatagctttgataaagaagatggcgaattagaagatggtgaa

SEQ ID NO: 707620 - DNA, 90 bp, Homo sapiens
cttcgagcaccccaacgtggtcaggccggagcctcaacagaaagctcctttagttcctcctcctccaccgccaccaccaccaccaccgcc

SEQ ID NO: 707621 - DNA, 136 bp, Homo sapiens
tcttcagcctatgtagacagccacaaatgggaagcaagagaaaaagaacattactgtcttggagtgtacctcacagccttctaggatctccagagtggacaggaatctcacttggagggaccatggagcagtatac

SEQ ID NO: 707622 - DNA, 101 bp, Homo sapiens
ccgaaaaccacctcagccgcttcgtgtggttcttttctggcatcgtaggaggtggcctgctgatgttccatttaagcagacctcttccatagctgtagctg

SEQ ID NO: 707623 - DNA, 96 bp, Homo sapiens
gaaaaaggtctctgtttatttagaagacacagactaacaattttagatggcctatgttgtccttggccagtttctggtgctaaagaaagatgaaga

SEQ ID NO: 707624 - DNA, 75 bp, Homo sapiens
aacatggtcaacgtcttgaaaggagtgcttatagaatgggagactcatgcatctgtatgccgtgtgcgtggactg

SEQ ID NO: 707625 - DNA, 100 bp, Homo sapiens
ctggaacagagcgagagtatcgttcagtgtggtgcagggctgaccttactttggagccccccagatcacatgtacctgtaccagcatgtcctggccactc

SEQ ID NO: 707626 - DNA, 83 bp, Homo sapiens
cacctacgtcccgctgccgtcgccgccgccaccatgcccaagagaaaggaagtactagccggacatcatgagtggctgtcggg

SEQ ID NO: 707627 - DNA, 98 bp, Homo sapiens
ggcctcccggctcgacaagttcaagcagctgcttgccggccccaacacggaccttgctattgacctgttgtattggcgggacatcaagcagacgggca

SEQ ID NO: 707628 - DNA, 90 bp, Homo sapiens
cagccagtgtggaagaagggactgtgctgtcaaaccatgtcaatctaaactcagagaatatttggaaggcagtaatctcatcacaaaact

SEQ ID NO: 707629 - DNA, 74 bp, Homo sapiens
gggttcggcgctatggaggagctcgatggcgagccaacagtcactgttttgaacgaagaatgtgatcagaactg

SEQ ID NO: 707630 - DNA, 100 bp, Homo sapiens
ccttacgtccccgagtgcggcagtaccgcctccttcccagccgcgcggcttcctccagacctctcggcgcgggttgcatcataaatacaaaggactgaag

SEQ ID NO: 707631 - DNA, 99 bp, Homo sapiens
aaccggctccttgcgtcccgcctccctgggagctccgcacggtgcttagatgagtacgaagatgatgaagcagggcagaaagagcggaaacgagaagat

SEQ ID NO: 707632 - DNA, 51 bp, Homo sapiens
cttacatcttgcatcctcaagcgtttttgaagagccggaagatccaagcaa

SEQ ID NO: 707633 - DNA, 75 bp, Homo sapiens
aaaatggcgccctacagcctactggtgactcggctgcagacaatgcagatcttcgtgaagactctgactggtaag

SEQ ID NO: 707634 - DNA, 75 bp, Homo sapiens
cctcaaggtcgtgcgtctgaagcctacaagaaagtgtgcccagctggctggaaacctggcagtgataccatcaag

SEQ ID NO: 707635 - DNA, 101 bp, Homo sapiens
acctgctggcattgaatgatttatagctaagactccaggacacccctgaagccgagaaatgttttaacttctagtcatggcgaatgatcgcaggagagcac

SEQ ID NO: 707636 - DNA, 100 bp, Homo sapiens
gcacaaagatagctggcttctgggtcccaatgccatttcggtgagcctgtccccaatgggcagatatgtaatggtgggcttggcctcacgaaggatcctg

SEQ ID NO: 707637 - DNA, 75 bp, Homo sapiens
gggggatttggaaatgtcatccgatggcacaatcagggaagatcagttttcctgccatccaggctgctccctcct

SEQ ID NO: 707638 - DNA, 85 bp, Homo sapiens
tccagcagatggcggatgccctgcagtacctgcagaaggtctctggagacatcttcagcaggctaactcaggtgagatggagccg

SEQ ID NO: 707639 - DNA, 98 bp, Homo sapiens
cagccggcactccaactggaccgtcaccaacacccgcttctctgtggatgaaggcccaggcagccgctgaacggctggggtaccctgtgctagtgcgt

SEQ ID NO: 707640 - DNA, 100 bp, Homo sapiens
ggatctttccggatcaatccagatggcagccagtcagtggtggagcaaagtgaaaaggagagcttgttgaaggaaagagatcacattttgtcaactctgg

SEQ ID NO: 707641 - DNA, 97 bp, Homo sapiens
aagaactgaccagagctgatcccgagcagcgtcatgtaccccttatggtttgaagtggtgaacatggatttttctcggcttcacatgtacagtcctc

SEQ ID NO: 707642 - DNA, 100 bp, Homo sapiens
aagaagaaattgaagtaatggcaaagagtattgactttcctttgacgaaggtgtatgttgtggaagcatctgccacctccactgcccagcaaaactccgc

SEQ ID NO: 707643 - DNA, 80 bp, Homo sapiens
ggcgctggcgtccggcctgagcatccttctttaaaagagaaatccacgttagctctccttgaggtctcgagttccctcgg

SEQ ID NO: 707644 - DNA, 100 bp, Homo sapiens
cttactctgagggtcaagaattgccgcttccttttagttactgagctactgctttctggcatgccagaaattgatgtgagtgattggataaaaaatacag

SEQ ID NO: 707645 - DNA, 50 bp, Homo sapiens
ctgcaccaggaggagcgcctggattccggaggagagagcgatggcttttt

SEQ ID NO: 707646 - DNA, 73 bp, Homo sapiens
tcctgtggtttttgattcaagtcctgttctacctactgccaattggaaagtggatatcaaagtattgcagagt

SEQ ID NO: 707647 - DNA, 83 bp, Homo sapiens
acgacgaggaggagacgtaccggctctggaaaatccgcaagaccatcatgcagcacaggaagtcctggagaacctgaaggacc

SEQ ID NO: 707648 - DNA, 87 bp, Homo sapiens
ggcagtgtcggaggccagcggggccggaagcggcggcgcaggtttctccaacaactaacagaagagaattttgagttaattagtaag

SEQ ID NO: 707649 - DNA, 82 bp, Homo sapiens
ctcgcttcgtcctacacttgcgcaaatgtctccgtgttccttgcctgtatctccccttggttcaatagctaccagatttttg

SEQ ID NO: 707650 - DNA, 75 bp, Homo sapiens
tagcctgcctaccactgtagagggacttcagaaggtttttcgttggaatatacgttgcacatttatggcgattct

SEQ ID NO: 707651 - DNA, 100 bp, Homo sapiens
ctgctgagccccggcactgcctggctgcgagcacatgatggcgatacgggagctcaaagtgtgccttctcgggtgtcctgggtcatgaaacttaatccac

SEQ ID NO: 707652 - DNA, 90 bp, Homo sapiens
gcttcaggagtactggcggaggggctggacgttccacgccaaaggtttggtgcacctcgatttggaggaagtagggcagggcccttatct

SEQ ID NO: 707653 - DNA, 90 bp, Homo sapiens
aacaaggagggaaaaaagagcaggtggaaaaggaaagcttggtgctaacagtggtttgcacatcatcatctttgatgaaattgatgccat

SEQ ID NO: 707654 - DNA, 75 bp, Homo sapiens
aattgtgatctgcgatcgagcctcggtcaaggagtgattacagtggcgagatcttgaacaactgctgcgtcatgg

SEQ ID NO: 707655 - DNA, 49 bp, Homo sapiens
aagtccactagcagcttctaagggctctctaggaaacaccagaattatc

SEQ ID NO: 707656 - DNA, 98 bp, Homo sapiens
tcaaaactctctgaaaaatggctccctccgagttaaggtgaatgaaaactttgccattgatttgatagcagagcagcccgtgagcgaggtggagactc

SEQ ID NO: 707657 - DNA, 100 bp, Homo sapiens
caaagaattcttctagaaccctataaatacttacttcagttaccagatacgatgaatggattaaagcagataaaatagtaagacctgctgataaaaatgt

SEQ ID NO: 707658 - DNA, 51 bp, Homo sapiens
cctttggatccgcagaaatcgagaggttggagcaatcactgaagaaactga

SEQ ID NO: 707659 - DNA, 78 bp, Homo sapiens
ggcgcctccactccgtcccccgcgggtctgctctgtgtgccatggacggtaccatggggcgcaagttggaccctacga

SEQ ID NO: 707660 - DNA, 100 bp, Homo sapiens
gaacagaaatcctgggaacatcagagtgcgagcttaaagtcacagctggtggcttctcaggaaaagggtaaacagctgtgtgaagagtgatgagcatgtc

SEQ ID NO: 707661 - DNA, 82 bp, Homo sapiens
ctaaagcagcgtgcgttcagccctggggcatgggcaagaaggacgaccccaagctgatgcaggagtggttcaagctagtgca

SEQ ID NO: 707662 - DNA, 98 bp, Homo sapiens
agacccaaagtttgcaacaatcagtcagaaaattttcgtgctctgagcactggagagaaaggatttggttataagggttcctgctttcacagaattat

SEQ ID NO: 707663 - DNA, 83 bp, Homo sapiens
gcgggctggagcctgacgagctggcggcaaaatgatgcttcaacacccaggccaggtctctgcctcggaagtgagtgcttctg

SEQ ID NO: 707664 - DNA, 101 bp, Homo sapiens
acctgcttggccagcgacagatcctttgctgctctgtctgccggttcttgagatgctgagccagggaggcggcccttccagcagccatgagggaaggacag

SEQ ID NO: 707665 - DNA, 75 bp, Homo sapiens
aagaagagggcggagcggagacgggagtattatgaaaagatcaccacctcctccaccctgaagggtgccatccag

SEQ ID NO: 707666 - DNA, 100 bp, Homo sapiens
ctccaaatggttgaaaacagatatacagacagctttattaaaccgcctggagcgaattttcgaagcatgttttccttccatacttgtccctgatgctgaa

SEQ ID NO: 707667 - DNA, 90 bp, Homo sapiens
agctggacacagcatcggccctcatcagcaatggtggcttgctatccgggaaatggaacaggttatgttcgccacgtggacaaccccaac

SEQ ID NO: 707668 - DNA, 71 bp, Homo sapiens
tcctgctgctcgaggacgctggagcccagcaagatcctacatggctttccaccaacctgggcatcctgacc

SEQ ID NO: 707669 - DNA, 96 bp, Homo sapiens
taacagaaaagaagaggagaatgctaagcagagtatctcttaaatattccaggaccaattgacattccatctcgtttatgtaaagggaattttgat

SEQ ID NO: 707670 - DNA, 82 bp, Homo sapiens
cgcgggacctctccgggccatggggcagcgggtggcatgagacgtgggaacatgggccacctcacacggatcgccaacgcgg

SEQ ID NO: 707671 - DNA, 100 bp, Homo sapiens
ccagatggtcagtttaaagatatcagcctgtctgactacaaaggaaagtggagaatgaggacatgaataaagaccagatcttgctggaaaaagaagctga

SEQ ID NO: 707672 - DNA, 82 bp, Homo sapiens
cggaattatttttgtggaaagaagatacacagcagttgtcttaaacaggaacatcatttacagcgagcaatttcagcacagc

SEQ ID NO: 707673 - DNA, 132 bp, Homo sapiens
cccattaaaaacgttaaagtgtgagagattttatttcaacactgacaagctagttactagagggcctacaaaggtggtatcacggaaaacttgacagaacgatagcagaagaacgcctcaggcaggcaggga

SEQ ID NO: 707674 - DNA, 101 bp, Homo sapiens
cattgcagttgcgtgttgttcagaaaggcaaatgttctgaaaaagactctgcatgggaatggcctgccttacgatgacagaaatggagggaacatccacct

SEQ ID NO: 707675 - DNA, 82 bp, Homo sapiens
caaatgctagaagctatcaaagcccttgaagtcagagttgatctctctaatgtattagatcttcatgcctttgatagtctct

SEQ ID NO: 707676 - DNA, 51 bp, Homo sapiens
tccagtgctactgctacaaataagattcacggcccttccacagtaccttcc

SEQ ID NO: 707677 - DNA, 83 bp, Homo sapiens
ccattgcagcccaggtggataaggaacatctcttcccagcggctcagacaatgcagatcttcgtgaagactctgactggtaag

SEQ ID NO: 707678 - DNA, 96 bp, Homo sapiens
ggatattagaaaaaggattcccaagccagtgccacccagggtttgtgtttagtgaatcagagggatctgcattagaacagtttgaaggtggcccct

SEQ ID NO: 707679 - DNA, 99 bp, Homo sapiens
taggactgatggagaagatcaaagagttgctgcctgactgcagcaaagtggggcaccaaggccctgtgctaagcactcataatcctctgggggtgctac

SEQ ID NO: 707680 - DNA, 100 bp, Homo sapiens
agccgctgagacggtttttcacaagatgcagattgagttcataaaacaaggaagcatgaatttcagattcatccctgtgctcttcccaaatgctaagaag

SEQ ID NO: 707681 - DNA, 83 bp, Homo sapiens
tttgcctgaagaaggtcagtgtgcttgcttggagatcaggacgcaaagttgatattcactgatggactccaaagaatcattaa

SEQ ID NO: 707682 - DNA, 96 bp, Homo sapiens
cgccgcgccgccatcatggacaccagccgtgtgcagcctatcaagctggccagggtgagaagccctaccactgcaactgggacggctgcggctgga

SEQ ID NO: 707683 - DNA, 109 bp, Homo sapiens
gaaaacttctaagatcaataacagatgctcatcctccaggaacagcaatattgcatatcaaggtatttcagaccgaacaaaagaatcttttcaggctggaaatggacat

SEQ ID NO: 707684 - DNA, 51 bp, Homo sapiens
ccctgcctctccctgggctctggacacaactcagatgggaagttcatcgcc

SEQ ID NO: 707685 - DNA, 51 bp, Homo sapiens
taaaagaagatttggatcaagtacaggatggcacatttcctagaggcagaa

SEQ ID NO: 707686 - DNA, 100 bp, Homo sapiens
attgtgtgtattgatcaatggaagaacaaaatctggcctgaaataaaagatgctgaagagtttctggcagaaggtttgcggaatgagaacctcagcgctg

SEQ ID NO: 707687 - DNA, 100 bp, Homo sapiens
tggttgggagagtgcatgccaaagaccctgatgctgccaacagcccgataagcacttcactacgcttagcagatgtcctctggaattcccagattcctct

SEQ ID NO: 707688 - DNA, 131 bp, Homo sapiens
ccggccgggggaagggacccgcacgccgggctttgttgtggaaatcccggttacctgggcgttacctactgcggagaaagttcagcaagcagtcttaccatggcccacgtgccctggcatgaggaagtggt

SEQ ID NO: 707689 - DNA, 83 bp, Homo sapiens
tgcagtttgaggctctgaacaagatcaatgtccgagttaccaccatggatgcagagctggagtttgcaatccagccaaataca

SEQ ID NO: 707690 - DNA, 90 bp, Homo sapiens
acccagcagtgccaacacggaggataaaatggaggtggacctgagtgaacgcatccgtgtcattctggaccttactcccaactaccgggg

SEQ ID NO: 707691 - DNA, 98 bp, Homo sapiens
tatggcgtccgcctcgacccaaccggcggccttgagcgctgagcaagcaaagggtgaaatgacaatggatgctctgttggctcgattgaaacttctga

SEQ ID NO: 707692 - DNA, 78 bp, Homo sapiens
gagacgacagaccgtttgtgtgcaatgccccgggctgtggacaggcttagagacacagtgaaggccctgactcgggaa

SEQ ID NO: 707693 - DNA, 83 bp, Homo sapiens
tcagtgaaaaatgtactctgacctgaatcctgaattttccttgatggtcaaaagattaaggacattcagtcagaagaaggctg

SEQ ID NO: 707694 - DNA, 75 bp, Homo sapiens
gttctacctgggagaatccaccgccatccgccaccatgttacctagaaaagtacgagaaagttcatcattttggg

SEQ ID NO: 707695 - DNA, 75 bp, Homo sapiens
gtcccccaaagatgagatttacctgtgagatgtttcatcccaacaatattgatgatgttaagaagttcaaaccgg

SEQ ID NO: 707696 - DNA, 90 bp, Homo sapiens
gttaaggattccaagtaactcttatttggtcacagtgctgtcgatatcaccaaggtggctagaagacatcgcatgtctccttttcctctg

SEQ ID NO: 707697 - DNA, 100 bp, Homo sapiens
tctccaaggaggaaacccccaagttctgcagccagtgcggagagaggctgcctcctgcagcccccatagcagatctgccagctcggcaacttctccatcc

SEQ ID NO: 707698 - DNA, 100 bp, Homo sapiens
gaatttgctagtaacgtcatggaggatgaacgacagttttcggctttgtgagaaaccttaccatcaaacacgatggccagcaacgttaccaacaagacag

SEQ ID NO: 707699 - DNA, 50 bp, Homo sapiens
gcatgatcggcatgtccaccaaggcagggcagctggtggaatttttgaag

SEQ ID NO: 707700 - DNA, 90 bp, Homo sapiens
ggaggatttgccctgccctggctgtgggcaagccggtatattcggggcccaggagcaaggaaaagtggccttttgcgtgacacagaagtg

SEQ ID NO: 707701 - DNA, 83 bp, Homo sapiens
cggggaccagcagctgtcgccgccgctctcaggcaatactgaacactgcgcagcttgcagaggtctcctggcagccctcatta

SEQ ID NO: 707702 - DNA, 100 bp, Homo sapiens
cgagcaccatgtcgaatctgagcaaaggcacgggcagccggaaggacaccaagatgcggatccgggcctttccggcccagcagcaaagaaacctggataa

SEQ ID NO: 707703 - DNA, 100 bp, Homo sapiens
ggggcaccatctcaagtcgaagagacccaacccctgtgcctacacaccaccttcgctgaaagtgggggacaaagtgcctgctgacctccgcctcatcgag

SEQ ID NO: 707704 - DNA, 108 bp, Homo sapiens
accactttgaggtcactttccagcagtccagcacggccaagtcagccacctggacgctgcggataaccgtctggtccttgtgcacaaaatccgtgtcttacatcaaat

SEQ ID NO: 707705 - DNA, 95 bp, Homo sapiens
aggtgtcgtggtggtcattaagcggagatccggccactcgctctggtgggaccctcgtgcttgtggggctgggctctgagatgaccaccgtaccc

SEQ ID NO: 707706 - DNA, 100 bp, Homo sapiens
tacaccatctgaattgcctgcaaacccaggatcaactcactatcctgaaggtccattctcccaagaagaggggacagaaagacagatctatttgtaagaa

SEQ ID NO: 707707 - DNA, 50 bp, Homo sapiens
tctccgccttccagttcggagaggaatccagacgctctgcagtgtcccat

SEQ ID NO: 707708 - DNA, 110 bp, Homo sapiens
gtggcctggccctggggcgcttggcatctattgttgagcaggctggtgtttggaatgctttatcctgcatattattcatacaaagctgtgaaaacaaaaaacgtgaagga

SEQ ID NO: 707709 - DNA, 100 bp, Homo sapiens
ttatggcggcgctggagagggggcgctgagctgttggggtcttgctcagtgtgcagaactctgctggcagctgagaggggaagccggaaagaggcaagtt

SEQ ID NO: 707710 - DNA, 75 bp, Homo sapiens
cacaaaataaccacttaccccttctcaccgaggaagagcgggagaaagggggactgtgaccctcctgggaatcca

SEQ ID NO: 707711 - DNA, 75 bp, Homo sapiens
ccgggagaaagtactgttgtatctggagggccacatctgccagagcctggagtctgcgaaggccgggacccggtt

SEQ ID NO: 707712 - DNA, 98 bp, Homo sapiens
gcgcggcccctagctttctccttctggtgtggggcccgagacaaggtctcgctgtgttgcccaggctgatcttgaactcctggcctcaggtgatcctc

SEQ ID NO: 707713 - DNA, 100 bp, Homo sapiens
acattgggagagatcgttggttcacagggaagtcgcctggaaaaaccaatagttttcaccagtgatcattaaagaatgggcagcttacaaaggaaagtct

SEQ ID NO: 707714 - DNA, 75 bp, Homo sapiens
tgaacattgtattgagaacaatatagatttgcaggtgtaatggataggtaacagagaagacctcgtcccttccta

SEQ ID NO: 707715 - DNA, 49 bp, Homo sapiens
agaggcagacaaacccatcagccatggatccggatcacctgtttgaaac

SEQ ID NO: 707716 - DNA, 100 bp, Homo sapiens
ggcaaatatgagtgtgtggccaccaacagcgccggcgtgcgctactcctcacctgccaacctctacgtgcgaggtctgcagccaccccagctcatacctc

SEQ ID NO: 707717 - DNA, 100 bp, Homo sapiens
gagcgcttctttaagggctacgggaagatcctggaggtggatctgaagaacgggtccttatgtcgtcagaagatcgagaagctcaggaggatgaattgct

SEQ ID NO: 707718 - DNA, 100 bp, Homo sapiens
gatgagtggacagttgaaacggttgagaaagctgatgtcctgaccactggagctggtaacccagtaggagacaaacttaatgttattacagtagggcccc

SEQ ID NO: 707719 - DNA, 75 bp, Homo sapiens
ctctgaaggcgaacgcttcgctggccatttaggagctctgctcaaagccagacgtctttaacacctctgtgtgaa

SEQ ID NO: 707720 - DNA, 100 bp, Homo sapiens
aatattcaggagaccgtcgttgccttgtatttccagagaacaggataaaagaatcagagtgtctcaacccttgacaagaggaccaagtgcctttattcca

SEQ ID NO: 707721 - DNA, 90 bp, Homo sapiens
gtgctgtcccagagacaacgagatgaactgtgccactgattaatgaacttgaatcagcaatacatcagctgtacaaacagcgagcttccc

SEQ ID NO: 707722 - DNA, 74 bp, Homo sapiens
ctttggaaaagacctattatgagaggcttccatatcgagagcacgttttcaatatcataggagcatttgatatt

SEQ ID NO: 707723 - DNA, 80 bp, Homo sapiens
ggttcttctccagcgccctggcctccctcaccttggacacctcgcttggtctctgctttctatccgtcaagatgataaag

SEQ ID NO: 707724 - DNA, 96 bp, Homo sapiens
gaaacttgctaaagagctgtgctctgctatgttatgccatcatccagtgcaagatgtgctcagtttcctcgagcccaagacaaagttcattactac

SEQ ID NO: 707725 - DNA, 100 bp, Homo sapiens
atcttcgtgaagaccctgactggtaagaccatcactctcgaagtggagctgaagaagggagccactctcaaaatcacgctggataacgcctacatggaaa

SEQ ID NO: 707726 - DNA, 83 bp, Homo sapiens
ccatcagctcggcagtcgcgaagcagcaaccatgccgcggcgagtcctttgcacatgttggcaacacacgcatccgcatcggc

SEQ ID NO: 707727 - DNA, 50 bp, Homo sapiens
cttggcagctgtagcagcagcagtgaatgaaacaaagcttagcaggagag

SEQ ID NO: 707728 - DNA, 115 bp, Homo sapiens
tgcgtcaggaaatcaaaatcaccagcaagtttcgaggcaaatacctctccattatgcccctcggtgctgccatgcttactgagtcccttctctctccttctctatcatcttccat

SEQ ID NO: 707729 - DNA, 83 bp, Homo sapiens
agatgaagaaggaagggaagctgatcatgggcattggtcaccgagtgaagtcgtacctggagtagaacagaaaaattattatg

SEQ ID NO: 707730 - DNA, 100 bp, Homo sapiens
cgccgcggctccggccctggccccgatggctctgtgcaacggagactccaagtatccagagcaggagattgtgaatctcttcatcccaacccaggctgtg

SEQ ID NO: 707731 - DNA, 100 bp, Homo sapiens
tgtcttttgaaaggtgtactgcaaggaacaaaatgtttgtaaattctccttttaccaaggaatccttcaactgctttctaccaagcgttccatttgaaca

SEQ ID NO: 707732 - DNA, 100 bp, Homo sapiens
gacagctccagacatgtggctcttcttcgggatcactggattgctgacggcagccctctcaggtcatcatcagatttgaaatatttaaagtggatacaaa

SEQ ID NO: 707733 - DNA, 51 bp, Homo sapiens
atcaggagccgccgccgccatatcaggtgctggagaatctggtaaaagcac

SEQ ID NO: 707734 - DNA, 113 bp, Homo sapiens
gaggacacgaccttcctgcccttcacgctccaggagctaggtggccggactgtgccatgctgctccagacccaaggtggcagctctcactgcggggaccctgctacttctgac

SEQ ID NO: 707735 - DNA, 75 bp, Homo sapiens
cgcgagtgaggaaaggaggtactgtagtgaattagtgccatcttacgattcagctacttttgttttagagaattt

SEQ ID NO: 707736 - DNA, 80 bp, Homo sapiens
ggcgccggagacgatgccgttatgtgaagttcatttccaatccgccctccatggtggcagcggggagcgtggtggccgca

SEQ ID NO: 707737 - DNA, 100 bp, Homo sapiens
tgcagtcccccaggatacagggtcaaaggagagcacaaccatcgcagttggaagcccatggggcagcttgcagatgccagcaagttacctaacctgaaag

SEQ ID NO: 707738 - DNA, 100 bp, Homo sapiens
ttttccttgacctttaggtgcttttatattcatctcaaaaacaaaattctgaactcaggacttggcaatgtcagcaaagaagccttaaacagtaaaaatc

SEQ ID NO: 707739 - DNA, 126 bp, Homo sapiens
gggctgcaggcgggggtgctgcagaggacacgaggcggcgggctggagacatggaccgcggcgagcaaggtgaaaggtgtagcagtcactcggcctacacccacagcatcgaccttgtgaacccag

SEQ ID NO: 707740 - DNA, 50 bp, Homo sapiens
gtcaccaacgagatcttccgccactacgacttgccttgcgccatggactg

SEQ ID NO: 707741 - DNA, 89 bp, Homo sapiens
tcaggtcctcgggggcggcggccacgccaaggacggggggcttgtacatgacagctggaatagcctccagttgaggggcttggtggtgc

SEQ ID NO: 707742 - DNA, 74 bp, Homo sapiens
tggcgtccaaagtcacagatgctatagtctggtatcaaaagaaggagaatgtactactcatcacctcccacctg

SEQ ID NO: 707743 - DNA, 75 bp, Homo sapiens
cgctgagtggtttttcggatcatgtctggtggctccgcggattataacagaacagtgcccaaacctcgtgttaaa

SEQ ID NO: 707744 - DNA, 50 bp, Homo sapiens
cttggagtccagacatctaaaatttgtttgttgcatattctaaggaccca

SEQ ID NO: 707745 - DNA, 82 bp, Homo sapiens
atttgacggtggagaggaagtacttatttcaggggaattcaacgacctgagaaaggtcacgcatgaagggagcaccgtggag

SEQ ID NO: 707746 - DNA, 96 bp, Homo sapiens
cagtggcacctgcgcgaagctggccaaagcctgcccagacggctcacctgtgcgggatggaacaaaaggatagatcactgcgaccagaggaaattg

SEQ ID NO: 707747 - DNA, 75 bp, Homo sapiens
gtttgtgaaacagagaaagataggcggccatggtccaaccttgaaggagctgctgctcttcctccagaacctgcc

SEQ ID NO: 707748 - DNA, 51 bp, Homo sapiens
agtatggagctcgtaaaattagatttgttaaggattccaagtaactcttat

SEQ ID NO: 707749 - DNA, 100 bp, Homo sapiens
ctcggcgtgctactgtgcgctcgatccagcaccatggggaagcgggacaatcgggtgcatgatgccttcttctgtagagtgggcgctttgcagaatacgt

SEQ ID NO: 707750 - DNA, 50 bp, Homo sapiens
gtgctggaagctcatggacaaggttcttgttaaacctttgggagaccgag

SEQ ID NO: 707751 - DNA, 95 bp, Homo sapiens
aatgaggatgaagattcaccaaataagctatatactttggttacctatgtacctgttaccactttcaaaagggcgagaggtcaatgatcttaaaa

SEQ ID NO: 707752 - DNA, 74 bp, Homo sapiens
tgtgaccaactcagctgaaaacctgcagcacaaaactgtgatcttcatgtttgcccaggagccagaggagcaga

SEQ ID NO: 707753 - DNA, 55 bp, Homo sapiens
aggaaatgaacaaactgctggccaagaggtcattcaagacacagatatgcactta

SEQ ID NO: 707754 - DNA, 90 bp, Homo sapiens
cgtcgctgttgctgccgccatacgcgctctccctgtttagaccttcacggcatggtgcaactcccacctgcggaaggcaggcacacagat

SEQ ID NO: 707755 - DNA, 80 bp, Homo sapiens
gtacaaaaacggcccttggatgatggagggagaccaaattttgaggaaggtggaccaacatcagtagggagaaagcatga

SEQ ID NO: 707756 - DNA, 90 bp, Homo sapiens
gaaagacaaggatgaccaggaatgggaaagccccagtccttccataaaccggcaaaccagcattgaaacggatagagtgtctaaggagtt

SEQ ID NO: 707757 - DNA, 75 bp, Homo sapiens
ggaagagctgcagtctttgtgggacaaggacttctgcacggacctggccgtctccagtgccaacttcattcccac

SEQ ID NO: 707758 - DNA, 99 bp, Homo sapiens
gtttgcataccggatgggagtgacagtgtaatagaaaaacaagcaagaaaccttttaggcagagaaaatcctgaaggagcaagagcggctggcctacat

SEQ ID NO: 707759 - DNA, 90 bp, Homo sapiens
atatatgccatttgtttgacaaagataagaagcagtatcactgtgaaaactgtggaatttgtagagtgttcacattgataaagagacggc

SEQ ID NO: 707760 - DNA, 104 bp, Homo sapiens
aatatccagtatatcacgcgcttctgcaatccaagccgactgatgactggagaggatggctactatttcaccaatctgacaacggtgttggagtcttgggccca

SEQ ID NO: 707761 - DNA, 80 bp, Homo sapiens
cctaggagctgatgacatgtccagaccaggtctcatgcttggtgcctggtgccaggctggagtgcggtggtgtgatctcg

SEQ ID NO: 707762 - DNA, 100 bp, Homo sapiens
ggaggacaaagagcccctcatcgagctcttcgtcaagatgaaggatttgggggcagagcacttggcaggtcatgaaggggtccaacttctcgggttgttg

SEQ ID NO: 707763 - DNA, 100 bp, Homo sapiens
ggaaggaggcaacaccaccatccagctggttggtggagaatttgaactggagatgaactctattatccaggatgctgagagtataatacgcatgacagag

SEQ ID NO: 707764 - DNA, 99 bp, Homo sapiens
agagatatctgcaatgatgtactggcaatacaacaggctgaagatggactcaaagaatttgatgcaggaatcattgaattaaagaggcgtggtgacaag

SEQ ID NO: 707765 - DNA, 100 bp, Homo sapiens
cggagtgcgggcgcgccccaccaccgccctcaccatgtgccatcagacaagatcagttgatcagaacagaaagctagctcggaaaatcctacaagagaaa

SEQ ID NO: 707766 - DNA, 98 bp, Homo sapiens
acaaaatgggttagaattttattgcaaaacaaaagatttaaagaagaaatggctagaacagtttgaaatggctttggaagacatgtaaggaatttgca

SEQ ID NO: 707767 - DNA, 101 bp, Homo sapiens
tcctgccgtccttctccactttcgccagcccgtgccgcgagcgcggcctgcaggagccttatgccagcctggaccatcttggaggcagtgtaggatcatgg

SEQ ID NO: 707768 - DNA, 80 bp, Homo sapiens
gtgggtcagatgcagtacaatccagtactgccaggccaacaggcatttttaaacaaggaggagatgttaaagtaacccat

SEQ ID NO: 707769 - DNA, 100 bp, Homo sapiens
ttggcagccacttcaaaatcagacctctgtggcagcattttttccagaacacaaaaggaaggagatggataaagcagatgtttattggggcattccttat

SEQ ID NO: 707770 - DNA, 100 bp, Homo sapiens
atgatgatgaaattcagtttgatgacattggagatgatgatgaagatattgatgacggtcccaggccataaaacaacggagagctgtacttgcttgtcac

SEQ ID NO: 707771 - DNA, 75 bp, Homo sapiens
ttgtggtcttcatttgtgaatacatagtgccgcagaatggaattcggcattgttcctacacagcttctcggcaac

SEQ ID NO: 707772 - DNA, 101 bp, Homo sapiens
cggcgaagttctgcgctggtcggcggagtagcaagtggccatggggagcctcagcggtctgcgcctggcagcaggtgctggagaatctggtaaaagcacca

SEQ ID NO: 707773 - DNA, 98 bp, Homo sapiens
gggagcgcggggcgacgctggctgcagggacccggtgacagcgtgagaggttcgcagaaccatcatcaaagaggggatgctgaccaaacagaacaatt

SEQ ID NO: 707774 - DNA, 87 bp, Homo sapiens
acaggcattttacccagccgcacgcccaggatttcttgcgtgcagtttgtgaagaaaaaattagcgtatctggtgcaggccgtgaga

SEQ ID NO: 707775 - DNA, 75 bp, Homo sapiens
gctaacaccaatggaggctttacttcagacaagacagcatcgcacagaattattttaaaaaaaagcagtgatcca

SEQ ID NO: 707776 - DNA, 74 bp, Homo sapiens
agacaattcctcaagtggacttggccatgattggttctctttcaccatgcctggatcacttcctttgaatgcag

SEQ ID NO: 707777 - DNA, 101 bp, Homo sapiens
cttcacagcacagttcctgggaaggtggagccaccagcctctccctgatgatgctgtgtatctggacaatgagaaagaaagagaagagtatgtcctgaatg

SEQ ID NO: 707778 - DNA, 101 bp, Homo sapiens
aagaatttgccaaacaattcctggagcggagggccaagcagaaagccagccagcagcggcagcagcagcagcagcagcagcagcagcagcagcagcagcag

SEQ ID NO: 707779 - DNA, 72 bp, Homo sapiens
acgctggtctgggatagttgggcagggagctgatcatcctggccaatggtgggccccaggccctcgtgcaga

SEQ ID NO: 707780 - DNA, 98 bp, Homo sapiens
ggaggtgttcgagaacgaccccgagacggcctttccacgaagagtcctcagccttctccctccagccggaagagccccctgagtctgagccctgcatt

SEQ ID NO: 707781 - DNA, 100 bp, Homo sapiens
ctgacggccaaaggattgcttcgaaaccttcgacttccttcagggtttaggagaagcactgttgttttccacacaggtacgcagattttctgaggcattc

SEQ ID NO: 707782 - DNA, 73 bp, Homo sapiens
aggattccaagtaactcttatttgtgcatttgcacagtataacttggaccagtttactccagtaaaaattgaa

SEQ ID NO: 707783 - DNA, 100 bp, Homo sapiens
ccctttctcctcggcactgtattctttacctgcttcccaatcccactgatgaggatcagcccatgaggatgaggaagatgaggaaatggtggaatctaaa

SEQ ID NO: 707784 - DNA, 98 bp, Homo sapiens
tagcagcagcgggagccaggactaaggacaagcaggagctgggagccccagacctcctgccccccgaggtctgcagtctcctgaacccagcagccatc

SEQ ID NO: 707785 - DNA, 119 bp, Homo sapiens
agagggagagcaagaccatcatgctgcgcggccttcccatcaccatcacagagagcgatcttgtctttaaccgaactgtcacactgaaggaagacccaggaaaggtgtgagctggaagc

SEQ ID NO: 707786 - DNA, 101 bp, Homo sapiens
gtgaagctcaccgacagtgccctgagggccttcgagagctaccgcgccagacaggtttggtgcacctcgatttggaggaagtagggcagggcccttatctg

SEQ ID NO: 707787 - DNA, 50 bp, Homo sapiens
gcattttattggtctacaaagacagcagttggaaaagagactgttcaaac

SEQ ID NO: 707788 - DNA, 75 bp, Homo sapiens
gggcttcctggcccgaaaggagagccttttggcctgtcactgctcctcatcctcctgagccgtggtgaagaccta

SEQ ID NO: 707789 - DNA, 100 bp, Homo sapiens
actgaggaggccgagagatgaggccggagcccaccaagttctgggaaggaactgtacctggggaatgaattgtaggtttatacaccctggagtgaacgac

SEQ ID NO: 707790 - DNA, 75 bp, Homo sapiens
tgcaagatgtggcagaagaacaagaagttgagaccgagaatgtggaaacagcctatatatgcaaacagatttgca

SEQ ID NO: 707791 - DNA, 74 bp, Homo sapiens
gagcacaagaggacgcacactggagaaaagccttttcagtgtgatgtgctatgcttacatttgaaaagatttca

SEQ ID NO: 707792 - DNA, 99 bp, Homo sapiens
ctcaactccttcctggagttaagtgggcgcaagtcccagaagatgtcggagcccatagcagctttaactgagactccgaccagctcagactggcagtcg

SEQ ID NO: 707793 - DNA, 50 bp, Homo sapiens
gcggcggcggcggcggcggcgcaggaaggccaggcccctgaccccagccc

SEQ ID NO: 707794 - DNA, 51 bp, Homo sapiens
gcctgtcttctccttttacttcaacagtgtgaaggtgggcccagggctgac

SEQ ID NO: 707795 - DNA, 100 bp, Homo sapiens
cttgaaggagagcttgaagcaagggaccttgttatagaagccttaaagtagtattattgattccacagaatacagccaacctccaggtttcagtggcagt

SEQ ID NO: 707796 - DNA, 85 bp, Homo sapiens
ctagaaaaatgtcagagagaaaatggatttatgccttgctgtctctaaccctgatctgatctcctgccttgagcaaataaaagag

SEQ ID NO: 707797 - DNA, 98 bp, Homo sapiens
ggtcgagcggtttcttttggctcacaattatcctagagtgaggacttgatatggttatacaagctcttcagaaaactaacaacagaagtatagaagca

SEQ ID NO: 707798 - DNA, 75 bp, Homo sapiens
cccgcgtccgccgattcctcctccttggtcgccgcgtccttggctggcgtggcagcacgctgaggaaacgcaaga

SEQ ID NO: 707799 - DNA, 90 bp, Homo sapiens
gatggggacaatgactgcggagactacagtgatgagacacacgccaactgcaccaaccagggaaggctttgtgatacctgatgaaggggg

SEQ ID NO: 707800 - DNA, 89 bp, Homo sapiens
ccaagaccatcgaggggtctggacgcacagaacacatcaagccgatgtcattgtcaacagcgttcccatgaatcttcagcttggaggag

SEQ ID NO: 707801 - DNA, 100 bp, Homo sapiens
gcgagcctccttcgccgcgccccacttgctcgtgcactttacacacatgagtgtgaatgggaaacgctacttcgaatgccaggccaagtatggcgccttt

SEQ ID NO: 707802 - DNA, 75 bp, Homo sapiens
tttgtgatgatgagctgatcttaatcaaaaagtttctattacaactggttggtattcttttagaagacattgtta

SEQ ID NO: 707803 - DNA, 75 bp, Homo sapiens
atgatgtagccacctcctaaccttcccttcttgaacccccaggttgctgcttttgctcagaggacatccatgacc

SEQ ID NO: 707804 - DNA, 100 bp, Homo sapiens
agcagccattgccaaaactcattgacttctcagcccaggagaactgtgtttatgaaactgtagttttgcctttggatgaaagggcatttgagaagacttt

SEQ ID NO: 707805 - DNA, 83 bp, Homo sapiens
gtggccggcagcgtcccggacgaggaggtggaaatggatattgttgaaaaactggtgaaaatgataccttgtgagcatgaaga

SEQ ID NO: 707806 - DNA, 100 bp, Homo sapiens
gcaaagagaaaggaagcaggcccgttggaagtggttgtgtgttcatgaagtctgtgaagctggagtgggtgcaagacaacatcagggcagcccaagatct

SEQ ID NO: 707807 - DNA, 90 bp, Homo sapiens
gacgccggcggagacgcgggcgagatatgcacttatttggccattacccagcacatgacgacttctatctcgtagtgtgcagtgcctgta

SEQ ID NO: 707808 - DNA, 75 bp, Homo sapiens
aggacttcatgatccagggcggagacttcaccaggggagatggcacaggagctaccactgctaagagccatctcc

SEQ ID NO: 707809 - DNA, 83 bp, Homo sapiens
gctctacgaaatctttcgctccctacacaccctggttggacaggtaccccctgtaccggctgggtggcccacaacttcgggtg

SEQ ID NO: 707810 - DNA, 82 bp, Homo sapiens
ctggttccccaacatgcctcaccctcatctatatcctttggcagctcacagcatgtcctggaattggaagccaaaatggacc

SEQ ID NO: 707811 - DNA, 100 bp, Homo sapiens
aatcatgactgagaaagatatggaattatttcgtgatatccaagaacaagcactgcagggctgtcttcatcggtggaatacaacataatggagttggaac

SEQ ID NO: 707812 - DNA, 100 bp, Homo sapiens
gtgggacccaaaatctgcctggaagataatgtgaatggtcgttggaggtcagaatggaagtttacaatcactccttcaaccactcaagtggttggcatct

SEQ ID NO: 707813 - DNA, 98 bp, Homo sapiens
ttcgccgagccgcaggagagacacgctgggccgaccccagagcggcgctggacaggggtgagcccctccagactccgaataggagatcaagagtttga

SEQ ID NO: 707814 - DNA, 100 bp, Homo sapiens
gacgtactttgtctgactacaatattcaaaagtaatggcatagaggagcctttggaagaatcctctcatgaacctgaacctgagccagaatctgaaacaa

SEQ ID NO: 707815 - DNA, 97 bp, Homo sapiens
gtggtctaaggcgccagactcaagtattggtaaaggttttcaaggtgtcatgaaaagatggggatttaaaggccagcctgctacgcatggtcaaacg

SEQ ID NO: 707816 - DNA, 82 bp, Homo sapiens
ggttcgggtgtctcgtgtgtgaacatcacagccacataaagaagatccctaatagtcatttctcaacaattatatagtcaac

SEQ ID NO: 707817 - DNA, 100 bp, Homo sapiens
aagaagaaaaaagcgtccgcttccagctttgcgcagaacactctggacctggaggaaactggcgaggctgtccagggcaatatcaacgccctcccagatg

SEQ ID NO: 707818 - DNA, 100 bp, Homo sapiens
agatcaaaccttataccctcatgagcatggtggccaacctcttgtatgagaaacgcttgccagcaaagcacggacagagaaggaggagaagctgagccag

SEQ ID NO: 707819 - DNA, 74 bp, Homo sapiens
cggagtttgagccccggaggcagagcggctgccatggtgggtcttcaaacaactctatgataaaggccttgttt

SEQ ID NO: 707820 - DNA, 100 bp, Homo sapiens
ccagaagaggtttagtgccctcctgagtgactgcgtcaggcatctcaatcatgggaatgaaagctactggttgattttaaagtgcctgggcctcacaggt

SEQ ID NO: 707821 - DNA, 100 bp, Homo sapiens
ctgagctaaaatggctgaggagagagtcgcgacgttattttaccaagaaaatggtttgcacgactttgaacatatactatccatgctgatgggacaggat

SEQ ID NO: 707822 - DNA, 100 bp, Homo sapiens
tttcttaatgcaattttcccaacaaagccttctagacaagctcagtggaatctgaagggcccaccccatggaggaatgctgggtgacagagatagccaat

SEQ ID NO: 707823 - DNA, 110 bp, Homo sapiens
ggcatcttggatcctcggccaaccatcatcaaagcaaggatttcatcatgaaaaggaggaagctcaaactgaagtgagttaaaaacttcatctcctagagaggactgtgg

SEQ ID NO: 707824 - DNA, 90 bp, Homo sapiens
cccgccccatcggttgttgtctgggcgggaacaagactgccaatggagactgccgcagagacccccgggagcggagccgcagccccatcg

SEQ ID NO: 707825 - DNA, 100 bp, Homo sapiens
gttggagaactacaggaacctgctttctctcgatgaggataacatccctccagaagatggatatgaattgtctcccacggcagcagctaacttcacacgc

SEQ ID NO: 707826 - DNA, 111 bp, Homo sapiens
tctctccctccttctgcaaggctatcatttcacagctgattcctgggagcacatccatttcattggcaagctaggggtggccgtgtcacagtctggccaaggaaatgaaat

SEQ ID NO: 707827 - DNA, 100 bp, Homo sapiens
cagaccacagtggaccacttctggggacgtggtgggtcctctggtgcgaaattccggatttccttgggtcttccggtaggagctgtaatcaattgtgctg

SEQ ID NO: 707828 - DNA, 98 bp, Homo sapiens
agagatggctccggcaccaggcattcatggccgagctggctcagaataaggagtggctggagaagatcgagcggactaccagtccctgcagatcggag

SEQ ID NO: 707829 - DNA, 100 bp, Homo sapiens
ggctacgttccgggctcggtctctgcagcctttgttacttgccccaacgagaaggtcgccaaggagatcgccaggcccctgtgtccgtctgggatgagga

SEQ ID NO: 707830 - DNA, 109 bp, Homo sapiens
cacagaatttcagcagttctctgatttttatattttattcctcttcctatccaatccctgccttttgagtccaggtggttttgcacactagggaccaagaagccctcgg

SEQ ID NO: 707831 - DNA, 100 bp, Homo sapiens
aataaagtgaatgaggtgctgaatagactgcacctggctatcccaaccaggagggacgataaggccaccatgaagactttgcttagaacttggtcagaat

SEQ ID NO: 707832 - DNA, 100 bp, Homo sapiens
ggcctttgtccgtgttcggtgaccgcagcactggggaaacgatccgctcccaaaacgcaaatgtcctggaaacacttcgaggtgatggaaatgtgttaat

SEQ ID NO: 707833 - DNA, 75 bp, Homo sapiens
atagtttgcggctgagaatgcacttactggctcattcaggtactgcaccaactaaagagacttggaattgtgtgg

SEQ ID NO: 707834 - DNA, 96 bp, Homo sapiens
gaaaattggagatttgataacactggagatcagcaccaaatcccacagaggcatctgaggctaaagaacgtgccaatggaatggagcttgatgggc

SEQ ID NO: 707835 - DNA, 100 bp, Homo sapiens
gttattctcgttcaagttaatccaggtgagactttcacaataagagcagaggatggaacacttcagtgcattcaaggagctgtggccctcaagaatcttc

SEQ ID NO: 707836 - DNA, 90 bp, Homo sapiens
agcggagctgcagcagcgccgccttttgtgctgcggccgcggagcccccgagggcaggtaagccccctcccggtttacatctggatgtag

SEQ ID NO: 707837 - DNA, 82 bp, Homo sapiens
aagaatcaattaccaaaggtgatcttgagagtggcaggcaacacactaccttttcagcagaatcaagtcgaagccttttgat

SEQ ID NO: 707838 - DNA, 101 bp, Homo sapiens
cccgttcctccaccggctgcgccccatgctcagctccgcctttggccaggatcaagtcttccataccagggaccaggccaaaaccagactgccactgcccc

SEQ ID NO: 707839 - DNA, 97 bp, Homo sapiens
accaaaccaatttctcctgcaaaccagggtatcagaggagaataaaggcagccccgttgatgactgaaaatgacaaagcatccacctaacagacgag

SEQ ID NO: 707840 - DNA, 96 bp, Homo sapiens
cctgctcacacttcagaatagagaaggctcagcttgtcaatcggaaacagaaattagagtctgtggaactttctagccaatcagaaattcaacact

SEQ ID NO: 707841 - DNA, 51 bp, Homo sapiens
ccggtacatctgaaagccgggaaatggaggcaagatccaaatggagatgga

SEQ ID NO: 707842 - DNA, 82 bp, Homo sapiens
tccaagtgcgcgccctggcgggtccggaccaaggagcccagcagccggggccgccctattacaccgacccaggaggaccggg

SEQ ID NO: 707843 - DNA, 50 bp, Homo sapiens
ccccggggtgtaataatgttaactgagatgccgctcctacgaggactgct

SEQ ID NO: 707844 - DNA, 50 bp, Homo sapiens
gcggtctggtggagctggagctgcgggaccaatgccaggattcagagact

SEQ ID NO: 707845 - DNA, 96 bp, Homo sapiens
ggggcttctgcctcgccgccgcgggtgccacctcccgggacgctgcccacggcgtccccggtcgcgaaaaaacatcgttgatccggaagatccccg

SEQ ID NO: 707846 - DNA, 75 bp, Homo sapiens
tgtttcctccaacattgatgttcctccagcaagaaactccccaacttttaaatcatttgaagaaaaggtcgaaaa

SEQ ID NO: 707847 - DNA, 75 bp, Homo sapiens
cgaataattattgaaaacctcttttaccctgttaccctggaagttcttcatcagctcttcacagatggaatcaca

SEQ ID NO: 707848 - DNA, 74 bp, Homo sapiens
ggaaccacaagaaaatcaaaagaaacttttgcccttatcagtaacacctgaggaattgactttaaaattaggac

SEQ ID NO: 707849 - DNA, 75 bp, Homo sapiens
gttttcgtgatcttcagaccccaggttctttggcctccggtgtggctgtctctgatggtgtcatcaaggtgttca

SEQ ID NO: 707850 - DNA, 83 bp, Homo sapiens
gtgccgctgagcctggcgcagatcgacctgcctagagctggaacgttacctccagagcgagccctgctatgtttcagcctcag

SEQ ID NO: 707851 - DNA, 100 bp, Homo sapiens
gcaacatctttcctaaccctgaagcgacttttgtcaaggaaatatctacggaatccagaggcagcattgtctccaaccttccgtagtgacagcccagtgc

SEQ ID NO: 707852 - DNA, 83 bp, Homo sapiens
ctggagcctgacgagctggcggatgacctcattccacctatggacttgcttgaaatgattgtcacctggatttttgaggaccc

SEQ ID NO: 707853 - DNA, 98 bp, Homo sapiens
gccatatccgtggtccacgttattcgggacatcacagcttagcagtgtctgcaaaaacgaatcttttcctacaacctgttaactgactggactgttgg

SEQ ID NO: 707854 - DNA, 80 bp, Homo sapiens
gtggaagcaggactgcgccgcgtcttcctcaagaatctggcaatgggggcaggagctgttggagctttgcagctgaccta

SEQ ID NO: 707855 - DNA, 74 bp, Homo sapiens
cgaagtaaaagaattgcaggcaaaaaagtttgcagagaatggagttcagtggtggaggactgcttttgtgaaca

SEQ ID NO: 707856 - DNA, 75 bp, Homo sapiens
tacgggaacagaaagaaaagtccgaaagagctggctggactctgtgaagctgagcaggagcagatgcggaagatc

SEQ ID NO: 707857 - DNA, 83 bp, Homo sapiens
cgccgctctagcggccgggactctgaactatggcgccgcggcgagtcctttgcacatgttggcaacacacgcatccgcatcgg

SEQ ID NO: 707858 - DNA, 98 bp, Homo sapiens
cagggtttctcaatctctgcagatggccgtacgtgtgaaggtctttcacagttctgcagccccaggcgggcattctctgagcagggtccgctccgcct

SEQ ID NO: 707859 - DNA, 98 bp, Homo sapiens
ttcgacctgagctgggaggccactagcagccagttccggcccgaggacaccgactaccagcaggttcccagtagctgcagcagtgaaagacagtgatt

SEQ ID NO: 707860 - DNA, 75 bp, Homo sapiens
aatgggtatctgaaaaatggatcagaggatgtggatccctcagttggtcgattcaggaacatggtgcaaactgca

SEQ ID NO: 707861 - DNA, 83 bp, Homo sapiens
cacagccagccttctcgcggccccttagcgcggtcaggccgccctccttttccagaatccacattcatctcaatggaaggatc

SEQ ID NO: 707862 - DNA, 83 bp, Homo sapiens
gtctcgggggccgctctgggatcccggccaccagcaattgtccgcaagagtgagccatggagctacgtgtggggaacaagtac

SEQ ID NO: 707863 - DNA, 114 bp, Homo sapiens
gccttagctgtgctcgcgctactctctctttctggcctggaggctatccagcatattgatgatgttaagaagttcaaaccgggttacctggaagctactcttaattggtttaga

SEQ ID NO: 707864 - DNA, 95 bp, Homo sapiens
tctatcaattgatttcaaaccttcagaaatagaagttggagtagtgacagttgaaaatcctaaattcaggttgcagtgtaggattttggaagtcc

SEQ ID NO: 707865 - DNA, 101 bp, Homo sapiens
tgcgaatgctgctgcagagctcggaggggcgctgtgtgtacatcacccccatggaggccctggcagagcaggcccgccaagctgccccctgtgtgctattc

SEQ ID NO: 707866 - DNA, 98 bp, Homo sapiens
ggcgccggggccggaggaaaaagctcggagtggatctgattgccgtcaatcaataatacctttgaccaagggactccaatcaattcagcatgctttgc

SEQ ID NO: 707867 - DNA, 100 bp, Homo sapiens
cgcccgcttcaaccccaggggaccagaggaactcagccctgattgcgcttttggaaagaacaaacagtggatttgaagaatcagattctggtgctactaa

SEQ ID NO: 707868 - DNA, 75 bp, Homo sapiens
cttcaggacaacctcttgggcaggacctaatctgggagcctgcaagtgacaacagcctttgcggtccttagacag

SEQ ID NO: 707869 - DNA, 100 bp, Homo sapiens
cttgcgggcctcaggggctgctctgaggaccgatgactcggaaagcgctcagaagaacgcttcgcccgttggtgctataaatgaccatggttgacacaga

SEQ ID NO: 707870 - DNA, 75 bp, Homo sapiens
ttgaaagcgccccggaatgacctgtcgcctgccagctctggtgaggaaaatagcagctgaatactatgacaacct

SEQ ID NO: 707871 - DNA, 82 bp, Homo sapiens
aaaagacaaagaatatgctgaaattattaggctcgcttctcatatgtgcggatgaaatatcttttcttttcctggttagtgg

SEQ ID NO: 707872 - DNA, 75 bp, Homo sapiens
cagctcggggtctggatattcctaaagtccagcatgtcatccattaccaggtctataagggagaattccaactac

SEQ ID NO: 707873 - DNA, 90 bp, Homo sapiens
cgccgcgccgcccgcccgccggggccccgctgtccgccgcccgccgccgctggagctagaggccagaacacaaagcgtgaatccggaaga

SEQ ID NO: 707874 - DNA, 82 bp, Homo sapiens
gggaagaaggcgcgcaagaacgctcaaccgagccccgcgcgggctccagcagaaaaatatccttgtggattatggactccga

SEQ ID NO: 707875 - DNA, 75 bp, Homo sapiens
cgccttgcttatttctgagtcccagaagctggcacattaccaggttacactcctcttcctgggtccaattattca

SEQ ID NO: 707876 - DNA, 100 bp, Homo sapiens
gaagactcatcggagcgtgtggatttgagccgccgcattttttaaccctagatctcggcaggaggaagagcgcaggcgccgtgaagaagagatgcggcgg

SEQ ID NO: 707877 - DNA, 50 bp, Homo sapiens
agcagctggactacctatgtttgtggcttttcttgcctggagaagaggga

SEQ ID NO: 707878 - DNA, 118 bp, Homo sapiens
agacattacatcaggaagatactgcagagatattctactccatctcattcattgtacagaatttcagaatgcatggatagtgaagctgagaccgtcatgcagctccgaaatgagttaa

SEQ ID NO: 707879 - DNA, 100 bp, Homo sapiens
ccagccgcccagctacatgcacatcttcctagcgggctgcaccggggggttcctgcaggtctgaaggggcgtctcgattacctgagctctctgaaggtga

SEQ ID NO: 707880 - DNA, 75 bp, Homo sapiens
gaagactgaaaggcaaggccatttaaatgtttgttgacctcctgtactggagagacattaagaagactggagtgg

SEQ ID NO: 707881 - DNA, 90 bp, Homo sapiens
tcatctttgccagtatgcagaagccagagggattgccacatatcagtgacgtggtgctggacaaggttcaaaccttgtactactcagctg

SEQ ID NO: 707882 - DNA, 75 bp, Homo sapiens
gcccacagtgtttgagaactatgtggcagatatcgaggtggatggaaagcagccagaataaaagctacttggccg

SEQ ID NO: 707883 - DNA, 100 bp, Homo sapiens
tagagaatgtgacacggacaaggatagttttggctgatgtcccacaggaggcgaggagtgctcccctttacctcaggaagtccgatgtccgccccagctg

SEQ ID NO: 707884 - DNA, 98 bp, Homo sapiens
tgcagcttatgttagtgctcctgtcacccaccaactagcacaacctgttgtgcttcaaggagacaacctggaagaaaggacagaagagtcactaccaa

SEQ ID NO: 707885 - DNA, 88 bp, Homo sapiens
ctttagcatttatcacttccttccttactttgtcttggtatactacatggcaaaatgggaaagcctcgtcacgtgttcaatatgctaa

SEQ ID NO: 707886 - DNA, 100 bp, Homo sapiens
caggagggccggcggagcgccatggcctgcatcctgaagtcacgtgaactggaaatttcagtttattggcgtgattggcggtctctgtgtgctgtaaaat

SEQ ID NO: 707887 - DNA, 100 bp, Homo sapiens
tgagaggattgcctgaggccaggagtttgagaccagcctgaacaacataaaatgcactcggtgatggaaagagagccactattctgaagaacacttggcc

SEQ ID NO: 707888 - DNA, 79 bp, Homo sapiens
cagattcgcagtggtcgcttcttctccttggatgaagcctgctgggagcgtgaatgacatggccctggatgccttcgac

SEQ ID NO: 707889 - DNA, 75 bp, Homo sapiens
cggcaacccatccagatcaccatgccgggctgaccccacattggacaccgctgcatccatgtccatcacacaaca

SEQ ID NO: 707890 - DNA, 99 bp, Homo sapiens
cttgggatccaatgttgaaggaaaacaggttttacagaaaacaggtatatgtgttgctgatactgtcaaggcaaaggtgttcaaagatgtcttcctgga

SEQ ID NO: 707891 - DNA, 51 bp, Homo sapiens
aagaatgccggtcacagcccaggagactcacagatgaatgcttctcacccg

SEQ ID NO: 707892 - DNA, 100 bp, Homo sapiens
gtggctgacaccgtagtgttttcaaaactggatatggccaggatgctatagcattgtcagtatacactctggaaatgattaaactagtaccacataatga

SEQ ID NO: 707893 - DNA, 88 bp, Homo sapiens
ttttggatatctgtgataaagttggtcagtctcgcactgggtgacaaacagcatgtttggtgcttcaagaaagaagtttgtagagggg

SEQ ID NO: 707894 - DNA, 100 bp, Homo sapiens
tcaccaaataagctatatactttggttacctatgtacctgttaccactttcaaaactgcgcaaaccatgcaggatgatttactgatggacaaaagcaaaa

SEQ ID NO: 707895 - DNA, 76 bp, Homo sapiens
acggcaagatgtccagtaatgtcccggcggatatggaattggcagcaatgaaacagattctcgttaagatgcatag

SEQ ID NO: 707896 - DNA, 80 bp, Homo sapiens
ttccccgttagaactcgcgtttccacttcagagatctggaatccatgggaaagagctatgatgggagagcttatgtcatc

SEQ ID NO: 707897 - DNA, 82 bp, Homo sapiens
caatgaataaatttggtgaagcacttaagaaatgtcatgagattgagagaccaaagcctgctggagtactaggtgcagtaaa

SEQ ID NO: 707898 - DNA, 50 bp, Homo sapiens
gctgtttcctgtggtaaacactcggctgtgcttcaggcaccgtgtacaca

SEQ ID NO: 707899 - DNA, 98 bp, Homo sapiens
gcctggaatccctacgcgtccctttgggtttagcacgatgagctcaatcggcactgggcagggagaagaggatgatgagcatgccaggcccctggccg

SEQ ID NO: 707900 - DNA, 88 bp, Homo sapiens
tgagatttactcagactttgccctcaagaatccattctattccttagaaatgcctatcagagacccctggcacaagatccctgccctg

SEQ ID NO: 707901 - DNA, 82 bp, Homo sapiens
gtatttcctgtgctctggacgctgtgtccatgaaactgggaggcgaccgtgttagctgccagttcctgacagccacctctca

SEQ ID NO: 707902 - DNA, 49 bp, Homo sapiens
tatgccaccagcatttattaagtgctatacttggtagatcagaaactca

SEQ ID NO: 707903 - DNA, 83 bp, Homo sapiens
tgaagaagattttaatattgcactaggagtttttgctttagctggactaacagatttggttcaaggtgtttgcagactatgaa

SEQ ID NO: 707904 - DNA, 100 bp, Homo sapiens
gttcccgctgcgctaggggaagcgggcagtttgcctgagaatacagatcaacccacagaacaaagcggatttccaaggcatctccccagagcgagccttt

SEQ ID NO: 707905 - DNA, 82 bp, Homo sapiens
gttcagacccttctctcccctccactttctcccggggcttgtcaatgaggcagatcagattcaggttcgacgggcagccaat

SEQ ID NO: 707906 - DNA, 58 bp, Homo sapiens
ccagatgtttataatgagggcacacagcttctgaaagtacagagaagcttaacaactc

SEQ ID NO: 707907 - DNA, 101 bp, Homo sapiens
cagcaagggggttgtccacgaggaacaaattgtacatttgcccattctcaggaagagcttgaaaagtcttcaaagcttcacctttctccaaaggcagatgt

SEQ ID NO: 707908 - DNA, 82 bp, Homo sapiens
ggatgtgaaagatcctaactatgatgatgaccagattctacacagtacagggctggagtttcaacatcaagtcgaggaagcc

SEQ ID NO: 707909 - DNA, 74 bp, Homo sapiens
tttgatcgaactggcagacggatatttacttttctcacccacggataataaatttgctacatgctctgatgacg

SEQ ID NO: 707910 - DNA, 75 bp, Homo sapiens
gtataaaatcaagattctaattgaaggtccccgttctccgtgtcctgctgtccgctgacctgaaggggttccagt

SEQ ID NO: 707911 - DNA, 82 bp, Homo sapiens
cgttgacaaggcactgctttttcatgacggtgactattatatggttaaaaagattttggaggaaaacagttcaggtgacttg

SEQ ID NO: 707912 - DNA, 74 bp, Homo sapiens
tgtcaaccggagattgggctgcctgggccgaggatgagatcgcctctgtcccagtctccttacagacactgaaa

SEQ ID NO: 707913 - DNA, 75 bp, Homo sapiens
gcggccaacctggctggtcagcggagacaggatgtcaacatcactgtggccaagcaattgtatgatggctatgat

SEQ ID NO: 707914 - DNA, 97 bp, Homo sapiens
ctttagcaacgccaaatggagatgttttgatccgagaccttaattttgaagtgaccaagaatatggcccaggtgaccaaagccctggacaaggccct

SEQ ID NO: 707915 - DNA, 75 bp, Homo sapiens
ttggggggatggttccatcatggcgtcaatgcagattcacagaagtcttcaggagcaaacacaagcaaagacaga

SEQ ID NO: 707916 - DNA, 92 bp, Homo sapiens
cctgactgccctgatgattcagacgagtctttagataccttggtgaactatgacaatgtagtggacacaggttctgaaacagatgaggaaga

SEQ ID NO: 707917 - DNA, 123 bp, Homo sapiens
ccgcgcgcccggccggcccggagcaccgagctcgcggcacggtaggaggacactcatgaggaccatgatacttccactgagaatacagacgagtccaaccatgaccctcagtttgagccaata

SEQ ID NO: 707918 - DNA, 100 bp, Homo sapiens
gtttgccttccacaaaggctcctacttgaggaatggctggaatgtcatggactttgtggtggtgctaacgggatttcttcgccaagcgcaagagatcagc

SEQ ID NO: 707919 - DNA, 90 bp, Homo sapiens
aaagacagtaaagcttatgtactacttgtggatgtgtgtatgtgctgaagcggccacatgtggacgagttcctccagaggatggggcagc

SEQ ID NO: 707920 - DNA, 58 bp, Homo sapiens
gcgctggtaaatgctacggaatggggtgtccgcaatgttgccagtgtctgtctgcaga

SEQ ID NO: 707921 - DNA, 82 bp, Homo sapiens
ttttctctgccttgcttgcttgagcttcagcggaattcgaaatggggctttgaccacgacctttgaagagcttcattttgag

SEQ ID NO: 707922 - DNA, 58 bp, Homo sapiens
atttgttaaggattccaagtaactcttatttgagctggactggccattatggaggagg

SEQ ID NO: 707923 - DNA, 110 bp, Homo sapiens
agctgacggagatggtgcagaagatggaggagacacgatgaggcgagtggtacgacagagcaagtttcggcatgtatttgggcaagcggtgaaaaatgaccagtgctatg

SEQ ID NO: 707924 - DNA, 100 bp, Homo sapiens
ggtgtggacgccactacagttcatcaacatcaactacgtccctctgaaggttcatacgttttatgaagctgtggggtacatgattggtgcacaaacagat

SEQ ID NO: 707925 - DNA, 100 bp, Homo sapiens
gtggacgggaagctcccggcccggcgaactaactggagcacggagctgcagccggttgggccggtgtactttcccgcatttttgaaacgttggggttgtt

SEQ ID NO: 707926 - DNA, 90 bp, Homo sapiens
cccgtctaagctggaggcgttgcagaaggccctggagcctacaggccagttctttctacaacttcaacaggctgcactggaggtgtttgc

SEQ ID NO: 707927 - DNA, 82 bp, Homo sapiens
aggaggaagcaggagcagcccaagcgccttccctcacatgtgtatatctcatgattgatatggagaaactagtcatgggcca

SEQ ID NO: 707928 - DNA, 75 bp, Homo sapiens
tctatgagtaccgcgagagcaacaagctatgactttgcagccgtcctggagtggttcgcggagcgtgtggaccgc

SEQ ID NO: 707929 - DNA, 75 bp, Homo sapiens
atgatgatcatgctgggagccatctgtgccatcatcgtggtagttattgtaaggatgcggaaagaaagcggaaag

SEQ ID NO: 707930 - DNA, 90 bp, Homo sapiens
cgcagttgcagaacagggccatctaccaccggtattgttgcagcatctggcagtgagactgaggatgaggacagcatggacattcccttg

SEQ ID NO: 707931 - DNA, 75 bp, Homo sapiens
ttatccgactcctcggaccagcaggacagttggaaaatggatataccttatttgattatgatgttggactgaatg

SEQ ID NO: 707932 - DNA, 100 bp, Homo sapiens
caagaggatggggccctggatgagggggaagggcctcaaagccagaagactgacgacaacagtggagacttggacccaggagtcttgctgacagctcaaa

SEQ ID NO: 707933 - DNA, 98 bp, Homo sapiens
tggcttcatgattcctttgttgaaaatgaagactatgcaggttatatcgcatcatctctttcaacgtataaaatagcagaacaagatttttcttattt

SEQ ID NO: 707934 - DNA, 96 bp, Homo sapiens
ggagcagaaggactcggacacagctccaccgggggacggctacgtgcaggcggacgcccggggccccccggaccacgaggagcacctgtatgtcaa

SEQ ID NO: 707935 - DNA, 100 bp, Homo sapiens
cagtttgccttaacaggaatgagaggtattattctcactaaggttggttactatactattccatctatggatgaccttgctaaaattaccaatgaaaaag

SEQ ID NO: 707936 - DNA, 100 bp, Homo sapiens
tcttcctaaaagaaggttttattgggaggtaaaggtcaatgcgtaggggtagagtaaggttgcccgaagctcagcagagagtcggaggctgctttttaaa

SEQ ID NO: 707937 - DNA, 75 bp, Homo sapiens
gcggagtcccaatgaaacgggcagccatggccctccacagcccgcaggtcaaaatgcagatcttcgtgaaaaccc

SEQ ID NO: 707938 - DNA, 100 bp, Homo sapiens
cccaatgcctgtttattcaccatcaacaaagaagaccacacactgggaaacatcattaaatcgagccaagccgccatggcctaccacagcttcctggtgg

SEQ ID NO: 707939 - DNA, 80 bp, Homo sapiens
cctggttacagctgtttccacgtgcggtgctcgtcgggagtgatcacctaccctacaggactcagcccaggagagtgtta

SEQ ID NO: 707940 - DNA, 75 bp, Homo sapiens
gcctagctggcaaagaagtgaggatagcattgctgaccagatggcatgctacaagtgaaaactgatgagaaactg

SEQ ID NO: 707941 - DNA, 100 bp, Homo sapiens
gtcggactggtctgtctgagggagatggtgacaagctcaaggcctgcgaggaagtggagcgagaaatctcattcagaacagagtgtggcctgtattactc

SEQ ID NO: 707942 - DNA, 100 bp, Homo sapiens
ggctgaagcaggtgtccgcggggcagacgtcggtgtatgccctggatgagaatgttcctctgtgacgagggtgcaggtatctctggggactacatcgatc

SEQ ID NO: 707943 - DNA, 76 bp, Homo sapiens
acttctctctcagatgttgaaaaggccttccggagcagtactacagcctcacctggttcctgagccccatccttgg

SEQ ID NO: 707944 - DNA, 100 bp, Homo sapiens
gtctgtgaagctaaactcaatgctgctgtgtgggaagaagatttgtaaagaaaactcttagggccgttgctccagggagaactgcaaatatcttcatcca

SEQ ID NO: 707945 - DNA, 80 bp, Homo sapiens
aatgacggttataagaccatttatttctttggagacaaaactatgccaagagaacgaggtgctcaaagtccaactgaaga

SEQ ID NO: 707946 - DNA, 95 bp, Homo sapiens
gacaagccgctggcagccgcggatctcaccgccgctcaggagctggaagtcgagtgtgctactcaactcaggagatttggagacaaactgaactt

SEQ ID NO: 707947 - DNA, 74 bp, Homo sapiens
gagaccgcttaccgcatctggctggagccctgcattcgcggcgtgtgcaggagccgtgtaaagccagtggaata

SEQ ID NO: 707948 - DNA, 100 bp, Homo sapiens
aagagaaatgagatgatagccaaaccctcaggccaggtgtggtgtcttacacctgtaatcccagcactgtgggaagccagggcaggtggattgcttgagc

SEQ ID NO: 707949 - DNA, 83 bp, Homo sapiens
ccagcatgtatcagccgaggtggagctgcggggccctggcatgaaaggagtgcctgtgaagaaaacggggtattgccctgagg

SEQ ID NO: 707950 - DNA, 74 bp, Homo sapiens
gtttgacaaaacataccaattcttgaatgacatccgagcgaaagagaaagagctcatgggcctcctgagtgacc

SEQ ID NO: 707951 - DNA, 130 bp, Homo sapiens
attcacaatgaagttgcagtctcccgaattccagtcacttttcacagaaggactgaagagtctgacagatgattccacactgcatggcccgatttttattcaagaaccaagtcctgtaatgttccctttg

SEQ ID NO: 707952 - DNA, 80 bp, Homo sapiens
cggggccgctggattctgaggaccagcagatggccagtcacgagaacccagagtccggcagcgtcttctcttgagggagc

SEQ ID NO: 707953 - DNA, 90 bp, Homo sapiens
cccagatttagtaataacatcattagcactttccagaatttatatcgttgccctggggatgacaaggtggagtgcaactcaaaattggac

SEQ ID NO: 707954 - DNA, 100 bp, Homo sapiens
gtcaggtctggagctcgaccgggccaggaaatgggtcctgatgaatatgaagagatggaagaagaggaggaggaggaagaggaggaagacgaggatgatg

SEQ ID NO: 707955 - DNA, 74 bp, Homo sapiens
tgtgatcactggagctgtggtcgctgccgtgatgtggaggaggaagagctcagaggagaattctgcctaagcca

SEQ ID NO: 707956 - DNA, 51 bp, Homo sapiens
ggaagatggcgcctgttgtgacagggaaagaccacagcaagattctttcat

SEQ ID NO: 707957 - DNA, 100 bp, Homo sapiens
gagagccgcacctttgccgtgtacctcaatagcactggctaccggacaggtactccaaagattcaggtttactcacgtcatccagcagagaatggaaagt

SEQ ID NO: 707958 - DNA, 101 bp, Homo sapiens
tcaccatgggcctgccttctggatcacattgaccacagaccattcctcaagaattttgtatccaaggcccaaaagtttgttacccaagatgatgaatgctg

SEQ ID NO: 707959 - DNA, 100 bp, Homo sapiens
gtcctaccgcacggtgacggtgctggagtggagatgctgccctggcttcaccgggagcaactgtgatgaggaaataccagagatggacagccatctggta

SEQ ID NO: 707960 - DNA, 82 bp, Homo sapiens
gaaaaatctggacgtgtaaaaagaactcttaacggccgatgcagctcttccaaagctaagaacccttaggagaaatcttgag

SEQ ID NO: 707961 - DNA, 80 bp, Homo sapiens
cttttgagttcctgctgaagctcacccccttgttggacaaagctgaccagcgctgcaaccactcatctctgcccagctgc

SEQ ID NO: 707962 - DNA, 82 bp, Homo sapiens
gatcgctgtgatcgtcacttggccagaagcggactcctagaagaggggagcagcaaggatggaatgacagccgtgggccgga

SEQ ID NO: 707963 - DNA, 85 bp, Homo sapiens
agcgccgctgctgaagagtttccaaggagagagtcatctggggaacgtgttagtagatatgaagctcattgacatcaaggacaca

SEQ ID NO: 707964 - DNA, 99 bp, Homo sapiens
gaagcagccaagaaaaaaagacgaaagaagaagaagagcaaagggccttctgcagttttcagatgcttcaagtgttgtgaacagagacttgtttggatt

SEQ ID NO: 707965 - DNA, 100 bp, Homo sapiens
ctcaatttgaagctccttctccatcacacaggtaccaaccaagaagctgaagaaatatgagaaagaatatcagacaatgcgagagagtcagctgcaacag

SEQ ID NO: 707966 - DNA, 100 bp, Homo sapiens
gaactccgaagggagatcagctatgctatcaagaatatccatggcattagaggacagttatgggatggatgggaaggttaatcagccccgtctcactgca

SEQ ID NO: 707967 - DNA, 101 bp, Homo sapiens
gcatccgctacgtatcttttgagcagtacgggagagacgtctctggacctctgactgacactgtgcctgcccaggtccctgtatgcactgccacagtgccc

SEQ ID NO: 707968 - DNA, 90 bp, Homo sapiens
cgaaggatgtgcatgaaggacagcctcttctcaatggtggtgaaaactattggcttgagggaagtttggttctttggtctgcagtaccag

SEQ ID NO: 707969 - DNA, 101 bp, Homo sapiens
gcggaaatgttgtccaaagttcttccagtcctcctaggcatcttattgatcctccagtcgaggtcagaatggcggcagtggagcatcgtcattcttcagga

SEQ ID NO: 707970 - DNA, 75 bp, Homo sapiens
ggcaagacaagctcagaactgagaagctgtcaccacagctcggcttattccaggggtgtgtttcgtcgagatgca

SEQ ID NO: 707971 - DNA, 89 bp, Homo sapiens
gccggagacggtcgggtttgccagggccgggcgggaccgcggggaccatggcggagccgcctcggtggaatgcagtagccctctgggcc

SEQ ID NO: 707972 - DNA, 75 bp, Homo sapiens
cgcagagcaccgaggccgagccagtttaattagacacttcagaattttgatcacctaatgttgatttcagatgta

SEQ ID NO: 707973 - DNA, 50 bp, Homo sapiens
gccatgccaatagagccaggggatatcgggccgcgatgggcctcttggaa

SEQ ID NO: 707974 - DNA, 120 bp, Homo sapiens
gggaaatgtctgccgccgccggctctcgggagcgcaacactgcaggtttttcgttggaatatacgttgcacatttatggcgattctgagtgtgagggcagacttctgccaggctcagcac

SEQ ID NO: 707975 - DNA, 100 bp, Homo sapiens
agttttagatgagtatttcagccgagtgactctgttacggcatggtgcaaatccagatctgagagatgaagatgggaaaactccattagataaagctcga

SEQ ID NO: 707976 - DNA, 98 bp, Homo sapiens
gaggatatcgtgtctggagcagtggagcccaaagacccctggagacatggaggaggcctcggtggtaccagaagaggaggggctgatgtgaacatccg

SEQ ID NO: 707977 - DNA, 83 bp, Homo sapiens
tgttgaaacggggctttgctatgatactcggcttggtacaacggggcaggctggagagtgagggaaatgtggccccagtgcgg

SEQ ID NO: 707978 - DNA, 83 bp, Homo sapiens
ttccagccttgtttttcagcagctttgaggaaaagtatagtttggtgccctggttgtcagatgttggaaagcagtaggacgga

SEQ ID NO: 707979 - DNA, 75 bp, Homo sapiens
ggatcctatttactaatagggaaagatacatctctgcttggaaatggccaggtgcaagtgaaagtgtaggaaaac

SEQ ID NO: 707980 - DNA, 74 bp, Homo sapiens
ctctacggggtggtgctcacgccgcccatgaagatgacagcacccaagaaaacctcatttggctcgctgaagga

SEQ ID NO: 707981 - DNA, 104 bp, Homo sapiens
cgatgtgtgagaagaccaccatcaacaatgagtacaactaccgctgctggaccacaaaccgctgccagaaaagccgagacgcatccagagctttcgtgaccggg

SEQ ID NO: 707982 - DNA, 100 bp, Homo sapiens
tacagttcgagaagttgtgaacagactcgatcgttagggaatggtatctgcccaaactggaacttatgctgtagacatttctttgtggtttatctaaaaa

SEQ ID NO: 707983 - DNA, 83 bp, Homo sapiens
gctggcgggaaggctctggcttgggacgaaagtgtcaaggcattacggctcccattgagaggagaaggcagagcccccccagg

SEQ ID NO: 707984 - DNA, 100 bp, Homo sapiens
acgttgtcctgaatcgcagaagctgtatggcagctaccctgaggatcattgaagagaacatccctgaggagaaaagccatatgtttgtacagttcctggg

SEQ ID NO: 707985 - DNA, 97 bp, Homo sapiens
cggggcagttcgggccggctgtcctggcgcgtgtgtcccggcatggatatccggaacaacctcactaggttgcatgagctggagaattgctctgtca

SEQ ID NO: 707986 - DNA, 100 bp, Homo sapiens
atatcgtatcagatggcagacatacatcatttaaaggatgtggaagatgtcaagtttgtgatcaactatgactatccaaacagctcagaggattatgtgc

SEQ ID NO: 707987 - DNA, 100 bp, Homo sapiens
acacagcagtctaacatctgggtgaatatggaatgagatggttcgggaactagatggccatgtcttgaagtgtgtgaaagatcagaatggcaatcacgtg

SEQ ID NO: 707988 - DNA, 50 bp, Homo sapiens
tatccagaacctccactctttcgcctcgaagcggaggatccctgtgtccc

SEQ ID NO: 707989 - DNA, 98 bp, Homo sapiens
gtgatcgtgcccaaagaggagggcgtcatcagcgtctccgaggacagatttggactgagcaacaaatttgaatctgaattcccttcttcattaactgg

SEQ ID NO: 707990 - DNA, 100 bp, Homo sapiens
ccgtgcgcggctgcgctttcctgtccccaagccgttctagacgcggggacccactactggcgtctggacaccagccgggatggctggcatagctggccca

SEQ ID NO: 707991 - DNA, 82 bp, Homo sapiens
gaaggagcagaacgtgagggtgtaacttacaaaaagacctgcctagagctggaacgttacctccagagcgagccctgctatg

SEQ ID NO: 707992 - DNA, 82 bp, Homo sapiens
ccccaacagcacggcgtggcctctcagcctcggttctccagaagctggggaaggcagatgagaccaaggatgagcagtttga

SEQ ID NO: 707993 - DNA, 98 bp, Homo sapiens
actacaaggacgacacccactactttgtgatgacagccaagaagcagtgcctgctgcggctgggggtgctgcgccagcactctcgagtggaccctgag

SEQ ID NO: 707994 - DNA, 98 bp, Homo sapiens
tttgaatcacaacatgagattttatgctgtcctagctggactgctgcaccttggcaatatccagtttgctgcctccgaggatgaagcccagccctgcc

SEQ ID NO: 707995 - DNA, 90 bp, Homo sapiens
gtcatacaccagtactaccaaggacagcttttttcctgcaaggaatcccttggcaccatgtcctgtgtgcattataaattttcctctaaa

SEQ ID NO: 707996 - DNA, 50 bp, Homo sapiens
ataaggaacatctcttcccagcggctcagaatgaaattaaagctctgtct

SEQ ID NO: 707997 - DNA, 88 bp, Homo sapiens
ctggtttattttgtggctaccgctgttactgcttggagtgcctcaccgagccaggttgaaaggattgttgacaaaaggaaaaataaaa

SEQ ID NO: 707998 - DNA, 100 bp, Homo sapiens
ctcgactgcctcccagaacaaagtgggaaagggaagcttagcccgccgctgccgcctccgagcagcccgccagctgaagaaacacttaaattctggaaat

SEQ ID NO: 707999 - DNA, 100 bp, Homo sapiens
tgatgaacagttgaacatgaagaatactggaaagttgctatgttttggtgtcatggagaaactccagctgggcccagagattctgcagcgggaaaatcca

SEQ ID NO: 708000 - DNA, 75 bp, Homo sapiens
tcgaaatcctgataacttggaagaactactattgaatgcagctgctcagccaggaactgagatctttaatctgcc

SEQ ID NO: 708001 - DNA, 76 bp, Homo sapiens
gcttggagacggacttgcttccgagccctatgagtttgtctctctggaatggctgcaaaagtggttggatgaatca

SEQ ID NO: 708002 - DNA, 100 bp, Homo sapiens
ctcgtcggcagtgaagctcaagttgctactcgggacgctgcacctcccgcgccgcacggtggacgaggtcagcccaaggctgccccctcggtcactctgt

SEQ ID NO: 708003 - DNA, 90 bp, Homo sapiens
caatgagctcccgcatcgccagggcgctcgccttagtcgtcacccttctccacttgaccaggctgggcccttggaagaaaatcctcgctg

SEQ ID NO: 708004 - DNA, 100 bp, Homo sapiens
ggcagagtggaaaaaagagaggatttgcttttgtaacttttgatgatcatgatacagttgataaaattgttgaggcgttggggctgaacctctgctccca

SEQ ID NO: 708005 - DNA, 96 bp, Homo sapiens
tcaagaaagcctcagtgatcttggtgccatagagagtctccgggtccctggaaaggacttttcttggtagagatggaaatccaaataaacggaatg

SEQ ID NO: 708006 - DNA, 75 bp, Homo sapiens
aaactgaagaaaactaatactgaagaaaaaaatactcttccctcaaaggaaagacacattcagctaacgtatttt

SEQ ID NO: 708007 - DNA, 121 bp, Homo sapiens
tttgtgttcgccttgaaccaggaaggaaaattcctctacatctcagagacagtctccatctatctgggtctctcacagatacactgcctctaggactgggacagatagccactgagtacct

SEQ ID NO: 708008 - DNA, 75 bp, Homo sapiens
aaaaacaaccacactgcttcgatcctggacaggatgcaggcagatgagtctactcttcatcttgtgttgagactt

SEQ ID NO: 708009 - DNA, 100 bp, Homo sapiens
ctcggctgcgggaaatcgggctgaagcgactgagtccgcgatggaggccaccagcttgggctccccacggagggcagcaagtgggacttggggaacccgg

SEQ ID NO: 708010 - DNA, 82 bp, Homo sapiens
gggaacagcgcagtacgtttctccagagctgctcacggagaagtccgcctgtaagagtgaaggagtcttcaagtgccctgag

SEQ ID NO: 708011 - DNA, 75 bp, Homo sapiens
tgtgcttggctggaaaaccccaaaagtgtacataaggcgctgaacaacctgcagtccaccttctcaggatttggc

SEQ ID NO: 708012 - DNA, 83 bp, Homo sapiens
gagcactaatatttaagaaagaagatgttaactttcagactccatcaagaatgctggaggaagggtgtttgtccactgccagg

SEQ ID NO: 708013 - DNA, 100 bp, Homo sapiens
tctcccacctgaaaagactggatttgggacatgatcctgtagaacttcggaggtgccaaatctgattccagttttgatgttcaaattgggaagaccactg

SEQ ID NO: 708014 - DNA, 75 bp, Homo sapiens
gtgacggaaacccagagctcctgtcaaccagccagcattgtttacaataaccaagatatgaaatcaacctatgtc

SEQ ID NO: 708015 - DNA, 90 bp, Homo sapiens
acacccctgaagccgagaaatgccattcgttatctatgacatgaattccttaatgatgggagaagataaaatcaagttcaaacacatcac

SEQ ID NO: 708016 - DNA, 75 bp, Homo sapiens
gtggccaggcggatggtgagcaatggtaaacactacacgtgaagagtggtgaaagggaacattgattactgaagt

SEQ ID NO: 708017 - DNA, 75 bp, Homo sapiens
cggcggcggaggatgagcctgcagagcgcgcagtacctccgatctccagcaccctgccggtggcactactgagag

SEQ ID NO: 708018 - DNA, 100 bp, Homo sapiens
ctggagctggagatgaactcggacctcaaggctcagctcagggagctgaatattacggcagctaaggagaagaaggaagttgtggaagaggcagaaaatg

SEQ ID NO: 708019 - DNA, 75 bp, Homo sapiens
cggaacaggccgggcaccaaggcgcagggtggctttgtccactatggtgaagtgaccaatgactttgtcatgctg

SEQ ID NO: 708020 - DNA, 121 bp, Homo sapiens
ggcgaggctagggaggacctcacttccccggggtgtaataatgttaactgaggtcttaggggaaaagccagagcttccagatggaggtgatgatgatgacattatagcagacataagtaac

SEQ ID NO: 708021 - DNA, 100 bp, Homo sapiens
ttcaagtagctatgatggtctctggttgaaccatgattccggtgacagagctccgctactttgcggacacgcagccagcataccggatcctgaagccgtg

SEQ ID NO: 708022 - DNA, 75 bp, Homo sapiens
acaggtgctctcggttgcacaataaaccgacgtttagccaggcgccaagcccatctttgtgtgcttgcatccaac

SEQ ID NO: 708023 - DNA, 82 bp, Homo sapiens
ccaggattaacaggcagcaaaatgagctcttcagaagagggaggaagttttattttgtcttcatcaggaagccaactaattc

SEQ ID NO: 708024 - DNA, 100 bp, Homo sapiens
taaagtaatgaatgagatcaagaaagagaatggagaagtaaagattttgctgaaaaaagccccagggccatcaaaagttaagacagggaagcctgaagaa

SEQ ID NO: 708025 - DNA, 83 bp, Homo sapiens
tcctgtcacaggccatgctctggcaaaaacttcaaatctgaacatcaatgatgtactagggaactactcattgactcttgttg

SEQ ID NO: 708026 - DNA, 100 bp, Homo sapiens
cagagtatgaagccaaactggaagctgtggctctgcggaaggaagaccgccccaagccggacccagcaggacgggatatctccatccgccctctcctgga

SEQ ID NO: 708027 - DNA, 100 bp, Homo sapiens
acaccaaataaaatagccatctcacctttgaaatcgccaaataaggatctaagcctttcccacgttatggttataaaccctccccaccgaatggatgtgg

SEQ ID NO: 708028 - DNA, 100 bp, Homo sapiens
ctcatagaccgcaaggagctagagcctttgacatatgtagagtgtgtcggtcagaaggaacacctgagaaaccgctttatcatccttgtgtatgtactgg

SEQ ID NO: 708029 - DNA, 90 bp, Homo sapiens
tgataaaatggctggagaggttaagattgaagaattagggtctgaaggaaaagtagaagaagcccaggggatgatgaaattagttgagca

SEQ ID NO: 708030 - DNA, 50 bp, Homo sapiens
cagacttaatccttaaaagaagcctgaacacttgcctttgcagactcagt

SEQ ID NO: 708031 - DNA, 82 bp, Homo sapiens
aacaaataccttgcatacatggagtctaaaggagcccatcgtgcgggtcttgcaaagccgcttacaaacacgcagatggcaa

SEQ ID NO: 708032 - DNA, 50 bp, Homo sapiens
ggcgtgcgcggacggtgtgcgggctgcagagactgcaagtctggaagaac

SEQ ID NO: 708033 - DNA, 100 bp, Homo sapiens
tctgccagctcttccacagcatccccaccatcctcctccactgccatctttcagccctctgaaaccgtgtccagcacagcaatactggagtaaccgcttc

SEQ ID NO: 708034 - DNA, 100 bp, Homo sapiens
ctggaggtgggcaaggtgatccagcaaggtcggcagagcaaggggcttacgcagaaggacctggccacggtaaggggcctggataccaagaagtgactgc

SEQ ID NO: 708035 - DNA, 100 bp, Homo sapiens
aatgtgggactgcgggaagctgcccttcacattttctggtacttggattatggagaagagaattggaagaaacagacatctcagtgcttgaagaacctgg

SEQ ID NO: 708036 - DNA, 100 bp, Homo sapiens
ccaaatccaagatggcggccagcaggaggctgatgaagggggccgaaggccagagaccaggatttggctacggaggcagagcgtccgactataaatcggc

SEQ ID NO: 708037 - DNA, 83 bp, Homo sapiens
gtttacttccagaagattggtggagcttgatctgaaggttatcaatactctggctgaccatcatcatcgtgggactgactttg

SEQ ID NO: 708038 - DNA, 83 bp, Homo sapiens
cgatccagcctgcggagcctgtggggcagcctaagaaagctgtcaagataaaacctcacccacctgtagctcctcgaccttct

SEQ ID NO: 708039 - DNA, 74 bp, Homo sapiens
tattgtcttcatactgcctctggatgttagtacggcactgaaaatgaagtatttcagtaatcggccagggccaa

SEQ ID NO: 708040 - DNA, 100 bp, Homo sapiens
gccagccagctggataccactgagtgacctcagtagatgccacgtgggacaggagaattctctaaatggacagcaaattatggatgaacctatgggagag

SEQ ID NO: 708041 - DNA, 99 bp, Homo sapiens
tctcaggtcctcgggggcggcggccacgccaaggacggggttcatagtggcgtcatgcacgcagactcctgcaagttcccctaagttcttagaggactg

SEQ ID NO: 708042 - DNA, 80 bp, Homo sapiens
tggcagccctggcggacgcaggagcgatggcagcgaccgatatagctcgccaggtggttactcctcactgcaggacgagc

SEQ ID NO: 708043 - DNA, 74 bp, Homo sapiens
aactacagaaacctggtctccctaggaattggcagcaatgaaacagattctcgttaagatgcatagtaaacatt

SEQ ID NO: 708044 - DNA, 75 bp, Homo sapiens
tcagaagctatacactcattatctgatacttgtaatcaggctttgatgcggcctggaagaattgatagaatcatc

SEQ ID NO: 708045 - DNA, 96 bp, Homo sapiens
ggcaaggagagacgtcgctgaggggcttgcctgaagcgagggtgtctttctcgagaagcaggtggaaacatgagcattcagtttcttggtacagtg

SEQ ID NO: 708046 - DNA, 101 bp, Homo sapiens
tggcagaacaaggatttgaagctggcagtctggttccaggagaacagtggtgtgtcccatcatcgatgtgatcagtgatgatacttttgagtacatggcag

SEQ ID NO: 708047 - DNA, 75 bp, Homo sapiens
tggtagtagtcaatcagcaggataggaatgatgtcacaggtggaagaagagacccaaatcattctgaaggctcaa

SEQ ID NO: 708048 - DNA, 100 bp, Homo sapiens
atcttgcctgaaaatgaaccaggaagcagtatcatgccaggagagatgaatggagagtatagaggcagaggatttggacgaggaagatttcaaagctgga

SEQ ID NO: 708049 - DNA, 51 bp, Homo sapiens
gtgggggccgccgggctgcggcaaggtaccaaccaagaagctgaagaaata

SEQ ID NO: 708050 - DNA, 100 bp, Homo sapiens
tgccggacacccccacgccctcagcaccctggacaccaaggagaatctggaggggacactgaggagacgttccctaaggcagttatttaggattgaagga

SEQ ID NO: 708051 - DNA, 75 bp, Homo sapiens
cctaacgccacggtgttttccgagatcaagggaaagagctcccagctcctccagcagccgacaggaggcccgtca

SEQ ID NO: 708052 - DNA, 83 bp, Homo sapiens
atgtgaacactcaagtgaagcaaaagccttccatgattacgaatggagctgccagagagttccagctgcctcagatcctccct

SEQ ID NO: 708053 - DNA, 80 bp, Homo sapiens
cggctccaggagtcctgtgactcaggtcacaccgacaaatctgaagcgggtttgccaggggagtgtacccgtctccccag

SEQ ID NO: 708054 - DNA, 75 bp, Homo sapiens
ctgattgtcgtttttacccggccaaagtcactgctgttaacaaggatggtcacctttggctcttcagagatgcag

SEQ ID NO: 708055 - DNA, 100 bp, Homo sapiens
cagagctcgtgcttcgggatggaaacctatggttatctgcagagggagtcatgctttcaaggacctcatgggacggcaaaacagaacagaaaggcggaga

SEQ ID NO: 708056 - DNA, 83 bp, Homo sapiens
aacggcggcgggtacggcggccccgcgcagcccccggccgcagcgcaggcagcccagcaggggaacgcccttttgcttgtgac

SEQ ID NO: 708057 - DNA, 50 bp, Homo sapiens
ctcctggctgtgctcatatacacctggtgttggagcgggccggagagaag

SEQ ID NO: 708058 - DNA, 100 bp, Homo sapiens
atggggcccaactatacccctgggaagaaggaggacctctacctgaagccaatccagagctccccttccaccccccggggaactgaagattgtcctggcc

SEQ ID NO: 708059 - DNA, 75 bp, Homo sapiens
cagctcatgggcacggctcgggacgttttagaaagagcgttttcgctacgtaaagcacattcgataaaggatatg

SEQ ID NO: 708060 - DNA, 98 bp, Homo sapiens
tgggtcctcggtcggtacagtctctgcacctcgcgccccagcagattttaggtgatgggcaagtcagaaagtcagatggatataactgatatcaacac

SEQ ID NO: 708061 - DNA, 90 bp, Homo sapiens
tcagagacctcattggctgtctccagaagctgctgtttggaaaggtggcaaaggatagcagcagaaccgggggcggctggcagacaagag

SEQ ID NO: 708062 - DNA, 90 bp, Homo sapiens
attctggactgcacccctacgggaacccacgaccattatatgctggaatggttccttggaaggtgctgagctactggtgcttcagtcccg

SEQ ID NO: 708063 - DNA, 97 bp, Homo sapiens
cccttagccagcccgagcaagtaaagattgttgtgaaagattttcaagactatatggaacctgaagaaggttgtcaaggttccccacagagaagagg

SEQ ID NO: 708064 - DNA, 100 bp, Homo sapiens
tggagagggattcgtggtgaaggtccggggcttgccctggtcttgctcggccgatgaagtgcagaggtttttttctgatggatgccaattcaaaagacaa

SEQ ID NO: 708065 - DNA, 75 bp, Homo sapiens
attccaagtaactcttatttgacaggggaaaaacttttagaactgaatggacacactcaaaagataacagctatt

SEQ ID NO: 708066 - DNA, 82 bp, Homo sapiens
caacgccagcttcctgcaggcccagagccggcatgaactctcccaacgagtcggaaatcttcccaaggctgcagacaccgac

SEQ ID NO: 708067 - DNA, 100 bp, Homo sapiens
gttaacacaaactgctgcattgcagcaacaagccgcagctgcagcagctgcattacaacagatttcagaagaaagtggtagcttcctttccaagaacagt

SEQ ID NO: 708068 - DNA, 75 bp, Homo sapiens
ggcccttccaaataagcggcataaagcaattgagaattcagaattttgataagctgaatgtaaggacaacacact

SEQ ID NO: 708069 - DNA, 60 bp, Homo sapiens
ctggttcttatttttggtgggcttcaaggaagagagccataagtgtgatccttggtgaca

SEQ ID NO: 708070 - DNA, 49 bp, Homo sapiens
ctggggccgaccaccccctatgggcagctgcaatgactctccgcacggt

SEQ ID NO: 708071 - DNA, 110 bp, Homo sapiens
ggccaggagctgtgccagccgcggtgcgccttctccacgctgggccgggtgttgcgcctggcctacagcgaggctgtgatgaatcaccaacaccagcagcagatggcccc

SEQ ID NO: 708072 - DNA, 100 bp, Homo sapiens
ggaaccctggagccaggagcacacctacctcgacaagcttaaggtcggcagctggagtccgtccgggctgaggcagccgagaaaggcgacgtggggctgg

SEQ ID NO: 708073 - DNA, 87 bp, Homo sapiens
aagctgtaaaatgataacagagaaggagcgatatatagttatcagcaaagtagatgaagaagaacgcaaaagaagagagcagcagaa

SEQ ID NO: 708074 - DNA, 100 bp, Homo sapiens
gaagtttggagcccagaatgaagagatgttacccagtatcttggtgttgctgaagaggcttccagcgtcctgtgtacctgttccacaaggcccgatcccc

SEQ ID NO: 708075 - DNA, 134 bp, Homo sapiens
tttcagcctgcgagccttcttcccggggcgccataaacgcccccaatttcccagctgctaaaggaagaggaagcaaagaatggctcaagaagtactgacacatttaaaggagcatcctgatgcttggacaagag

SEQ ID NO: 708076 - DNA, 100 bp, Homo sapiens
ggctcaaagaaagatgattatttatctccagaagaagaagagaaaaggagaatccgaagggaaaggaataagatggctgcagccaaatgccgcaaccgga

SEQ ID NO: 708077 - DNA, 100 bp, Homo sapiens
gaaggcttcttcctgcacttaaaggaattctacctcactcccaactctcctgcagaaatggctgaccggttccctgatgtgttacctgcttctgctactg

SEQ ID NO: 708078 - DNA, 83 bp, Homo sapiens
ccgagggctacttcggcatgtaccgggctagcaattgactatgggattaaattcttggagacaagcgcaaaatccagtgcaaa

SEQ ID NO: 708079 - DNA, 100 bp, Homo sapiens
ggatccgctgactgatggtggggcgcaagcagggttggagctgcagggttacgggaataaaaccgggaaagccggcgctccaggcccctgcctgtcacga

SEQ ID NO: 708080 - DNA, 116 bp, Homo sapiens
tcgagattattttccaccaggggatttcccaggtccaccacctgctccatttgcaatctggctcttgctgattgaattcctttggtgcagtttagcatgttcctctgtgttctgca

SEQ ID NO: 708081 - DNA, 98 bp, Homo sapiens
tgccaaaaatggagaaatttttggcaaagacatggcagcagtgcagaggaccctgatggctttgggcagcttggcagtgaccaagaatgatgggcact

SEQ ID NO: 708082 - DNA, 78 bp, Homo sapiens
ctccgccgcccagtggccccgaggagcctggggagaagcgccccaagtttgacccagatgatgtggtaccagttggcc

SEQ ID NO: 708083 - DNA, 100 bp, Homo sapiens
ggcggcggacgagggccccgcccgagaggagcaaagacccaagacggagtggccctggaaatccagccactcaacagccaggagggaatcgacaatgagg

SEQ ID NO: 708084 - DNA, 100 bp, Homo sapiens
cccctcacctatttggtcctcttggtcctcggatgtcacagcttttccatagaacaattggaagtggagctaagtattgttacaatcacatttgacgtac

SEQ ID NO: 708085 - DNA, 100 bp, Homo sapiens
attaaacaacgtttcatgtttaacattgcagatggtggttttactgcatatcgcacggatgactgccatccctgggttttgccagtagtgaagaaagtgg

SEQ ID NO: 708086 - DNA, 50 bp, Homo sapiens
caaatacccctttgaattaattatggctttacatccggtgatcaaggctt

SEQ ID NO: 708087 - DNA, 100 bp, Homo sapiens
gctggtcaccactccggcaccagagtgtgaacatggctacgcctcttcattcccgtccatgccgagcccccgactgcagcattcaaagcccccacggagg

SEQ ID NO: 708088 - DNA, 74 bp, Homo sapiens
atggtgccatgcatccaacaaaaccttcccaacacattggaacagttatggattgaggtatatagccaaagtac

SEQ ID NO: 708089 - DNA, 100 bp, Homo sapiens
cagatcatcacagtggagagaagtacactcaaaagggagttctacatcacatttgccaaattatccaagcattaggtgaacatcttaaattaagacaaca

SEQ ID NO: 708090 - DNA, 75 bp, Homo sapiens
atcaacttccagtgagagtgacacaggtcaggaagcagaatattccttatatgctgtgggagccactgcagtgta

SEQ ID NO: 708091 - DNA, 51 bp, Homo sapiens
acgccctctgccttcgaccggatcctgttttcaaatttgctgggtacggtg

SEQ ID NO: 708092 - DNA, 116 bp, Homo sapiens
ccgacggtcacccgaatcgcagggagtcgccgctggagaggggctcggcgcccggcggggactgcagacaatgcagatcttcgtgaagactctgactggtaagaccatcaccctcg

SEQ ID NO: 708093 - DNA, 98 bp, Homo sapiens
tgaagatggacctgttgaactatcagtacttggacaagatgaacaacaatatcggcattctgtgctacgaaggggttggcatctgcacatccttcctg

SEQ ID NO: 708094 - DNA, 75 bp, Homo sapiens
ccttttcaaatctcactggtctatttcccagtgggtttctaaaccaaggcactgaaggctttgtggaactacctg

SEQ ID NO: 708095 - DNA, 98 bp, Homo sapiens
ccgaatccatcatcaaacggcggatccgaaagaaacgcttcgttaagggactcaggcagtacgggaagaacttcttcagaattagaaaggagctgctt

SEQ ID NO: 708096 - DNA, 95 bp, Homo sapiens
gtcctatgataccacaatcctcacagagtcggatatgttgcggtcactatctaacacaaaacctacagtcaatgaacatgacttgttgaaattaa

SEQ ID NO: 708097 - DNA, 74 bp, Homo sapiens
ggaggctgaagtctcacatcagaggtgtcaagcccgcagggccccggaccccggcttccaggagcgcttcttcc

SEQ ID NO: 708098 - DNA, 75 bp, Homo sapiens
ctaaaaagactgcaatggctgctgctaaggaactgtggctgcaccatctgtcttcatcttcccgccatctgatga

SEQ ID NO: 708099 - DNA, 75 bp, Homo sapiens
ctctgcctcggggacgaaagcagaatctctaggactgcgtagtaaagtgctgaggaaaattgaagagctcaggac

SEQ ID NO: 708100 - DNA, 83 bp, Homo sapiens
ggaatcatcatcaactactttatttacaggctccatctactctttgaagcttctgcccagcttgcattgtttctaggagaacc

SEQ ID NO: 708101 - DNA, 83 bp, Homo sapiens
cggcagaagaagacgaagaagcagaagcgtctgctcaggttgcagcaggagagagcggagctggagtttgttcagatcatcat

SEQ ID NO: 708102 - DNA, 98 bp, Homo sapiens
gacatgctgagtgaggctttaattcaggctgaagccgacgtagcttctctgaacagacgcatccagctggttgaggaagagttggatcgtgcccagga

SEQ ID NO: 708103 - DNA, 83 bp, Homo sapiens
aaacactctaggacggggaacgacaattactgcctccggagccagcgtggtggccatagacaacaagatcgaacaggccatgg

SEQ ID NO: 708104 - DNA, 83 bp, Homo sapiens
actacaacgcagtgcatctcgggaggccaactcgactggactgggcccagctgagagccagcctggaggttacccagcagcag

SEQ ID NO: 708105 - DNA, 78 bp, Homo sapiens
ggtcaaagtttagctgctcgagatcgaggagcctaccgtatgtgaacgggagctgtgtgtgtttgcttttcaaaccct

SEQ ID NO: 708106 - DNA, 88 bp, Homo sapiens
cccagaaaggattgtgacatatcgttggacccagaattgaggcgaggcaaacctctctacatttgtaaggaaagatacaaagttcttg

SEQ ID NO: 708107 - DNA, 101 bp, Homo sapiens
tggcactgttgcctatcagaagtcaattcaaaggacctgcccccagagagaaagtgtgagcgcctacttttatttctttactgccatgaaatgagcctggc

SEQ ID NO: 708108 - DNA, 98 bp, Homo sapiens
gcgtgtacgtgggcagcggcggctggcgcttcctgcgcatcgtctgcaagaccgcgaggcgagacctcttagcccccctccatgcgcctgaaggcccg

SEQ ID NO: 708109 - DNA, 101 bp, Homo sapiens
ccgcctctccttccatggccgccaaagctcgtactgttccaatacttttgatgggcctggtctccatcatcaccagttccagtagtgaaaaacagaaccca

SEQ ID NO: 708110 - DNA, 75 bp, Homo sapiens
ctcagggctcgttctggtctgcctagtcctggatctttctcctggcctgccctccatgtcggggagctatcgtcg

SEQ ID NO: 708111 - DNA, 75 bp, Homo sapiens
ggacaaagctgttgtctcagggagcacagaaatgatgattattccccaccttctaagagacaaagaccaacgagc

SEQ ID NO: 708112 - DNA, 100 bp, Homo sapiens
aaggggagccgggagatgccagccttggatttggcatgaggcccaagccagtgacctggaaaaaatccacctggatgagaagtctttccgttggttgcac

SEQ ID NO: 708113 - DNA, 122 bp, Homo sapiens
gatatgacttgctcgggcaaaagttgtgcattggcccgatcaagcctgacttctagccaagttactgtaaaatggggaaaggagaaatttgaaggtgtagaattgaatacagatgaacctcc

SEQ ID NO: 708114 - DNA, 75 bp, Homo sapiens
gcaagtcccctgcctccaccagctcagttgtaaagatggtgaatttaggcgctatcagggtccaaggactaagaa

SEQ ID NO: 708115 - DNA, 100 bp, Homo sapiens
gagctgggcaggagaggcctgttgctgccgtctcgactcgtggatgaattctgcttggtcagaatcgtgatggcattgtgttcagcactgatgactattt

SEQ ID NO: 708116 - DNA, 98 bp, Homo sapiens
caagatggaggcgctgattttggtgatgatgaccaaacggaccaaagacatgggcaagttcagttctgtcaccgtgtctaccattgatgaagaggaag

SEQ ID NO: 708117 - DNA, 82 bp, Homo sapiens
gcctgcagcgggagctggacggcgagcgcgagcggcgcgagaaaactaatagggatgccaaaggaaaaatatgatcctccag

SEQ ID NO: 708118 - DNA, 75 bp, Homo sapiens
ttagctaatgttcaagttttagctttggaagaatgcctaagtacttcacatgactggaggttacggtgtggtgct

SEQ ID NO: 708119 - DNA, 90 bp, Homo sapiens
ggacaacagccctctgctgcaatccatccaccagctggatttcgtgcaagtgaaaggactggaatgtcacgtggaataccagcaaccccg

SEQ ID NO: 708120 - DNA, 82 bp, Homo sapiens
cagtggaaaatgcgctcgggctggaccagcagggcgtctctggccgagcctctttttgtggaaaacgacagcagcagcagtg

SEQ ID NO: 708121 - DNA, 75 bp, Homo sapiens
atcagatgttccacgtaataatgctggcttctccagggaaagtgaccgaggcagtgaaagaggccattgacgcag

SEQ ID NO: 708122 - DNA, 100 bp, Homo sapiens
atccccatttttattgaaagatgtattgagtacattgaagccacagtccacaggtcctggctaccctgggaagagacaagaagtaaatgaagaaagagga

SEQ ID NO: 708123 - DNA, 82 bp, Homo sapiens
gtctctgcccatcaacctctcttctgtatcttgggcgaacagctgtcaataccagcaaatatgcagaaagctatcggatcca

SEQ ID NO: 708124 - DNA, 50 bp, Homo sapiens
agaatagataacaagtgcagtgttttaaaatcaaagatgggaaaatcgga

SEQ ID NO: 708125 - DNA, 100 bp, Homo sapiens
cgccgacaccaacaagcgcaagagagacgaagtggccctgttccagtattggttatgagtcttctgttcatcgcttctgtatttatgttgcacatttggg

SEQ ID NO: 708126 - DNA, 95 bp, Homo sapiens
gctttgcagaaacttcataaatatatgcagtttggtggagaaccattgtcatatacccggttcagcctggctcggcaagtagatggcgataacag

SEQ ID NO: 708127 - DNA, 74 bp, Homo sapiens
gcggtggcggcgtttggatgattgtctctcggcggcggagtcgtgggaccattcaccaaacctgctctgatctc

SEQ ID NO: 708128 - DNA, 76 bp, Homo sapiens
gggagattggacaagtatgctgcaagtgagaacatatttaacagacacctggatttcattagcatcatgacctacg

SEQ ID NO: 708129 - DNA, 82 bp, Homo sapiens
gcagagccgagtgcagaagatctgggtgcccgtggaccacaggccctcgttgcccagatgttgaaatcacaaagattagaca

SEQ ID NO: 708130 - DNA, 75 bp, Homo sapiens
gacattggccaagacgatcaccaaacaggctgtattcatcaccaaagaaaaaacttacaccaatgcagaaatcgg

SEQ ID NO: 708131 - DNA, 75 bp, Homo sapiens
gacgatggagggagacgtgctggacacactggaggcgctgggatgatatcatcaagttgaatcgaaaggaaggga

SEQ ID NO: 708132 - DNA, 99 bp, Homo sapiens
gaaaagatccctggaatatgaagagacacagtatggtagccacacccccaggtcctgcagacattcgctttgtctgggagaagaatgggcgagctctgg

SEQ ID NO: 708133 - DNA, 100 bp, Homo sapiens
ctatgatcgaattggtggaaaggttgaagttcaagagctcagaccctaaagattatgctaaagagagatatggaatatcttcaatgatacaatcacaaga

SEQ ID NO: 708134 - DNA, 83 bp, Homo sapiens
agaacgtccactgcgggccggcgaaagctgtgtgctggatcgaaggggtattttgccactggaggaaagtggaagtcgacctc

SEQ ID NO: 708135 - DNA, 90 bp, Homo sapiens
aaagacattctttctgtgagaaaatactggtgtgaaatatctcagcaacagtggttaggatctgccataataattgcctctccagtccag

SEQ ID NO: 708136 - DNA, 75 bp, Homo sapiens
tgccgctgcagatcctcatgaatgctatgccaaagtgggaaggcttcctatctgtgtggtgatgaatcgcatttc

SEQ ID NO: 708137 - DNA, 75 bp, Homo sapiens
gccgggagatccgagagctcttcaggacttggatgttgtgggtgatggtatgcagtgtcctccttcacctttgct

SEQ ID NO: 708138 - DNA, 80 bp, Homo sapiens
ggcagctgcggccccgaccccaagtgcggggacctccggcgaataaagtctattatcctcccagtccacaacgctgaacc

SEQ ID NO: 708139 - DNA, 83 bp, Homo sapiens
gctcaagatggcgtgcttgttggagaccccaatccgcatgagcgtcctttcggattggagaatccatgttgaccaaatgcacc

SEQ ID NO: 708140 - DNA, 101 bp, Homo sapiens
gcgagaggaggccgtccagcagatggcggatgccctgcagtacctgcagaaggtctctggagacatcttcagcagatatgaatatcgtgtagagatggttc

SEQ ID NO: 708141 - DNA, 75 bp, Homo sapiens
gttggacgacaaagatggcggcagggaccagcagttactgggaagcaatggctgccatccggaagaaactggtga

SEQ ID NO: 708142 - DNA, 82 bp, Homo sapiens
gggagaatccaccgccatccgccaccatggctgaaggtgatgtggccgccctcaaccgacgcatccagctcgttgaggagga

SEQ ID NO: 708143 - DNA, 75 bp, Homo sapiens
ttcagtctagttcctggttgccggctgaaataacctgttttttcaagggggaacatggcaaaggtgttcagtttc

SEQ ID NO: 708144 - DNA, 75 bp, Homo sapiens
gccaggtgggctgcctgaaagtcctgcagcgagatacgaacctaaactttcaaaacctgtcagtgattgggttcc

SEQ ID NO: 708145 - DNA, 74 bp, Homo sapiens
cggtgcggcggcgagcgcggtcgagatcgccatgcctacccgtggtattaaagataatcaaacattatcaagaa

SEQ ID NO: 708146 - DNA, 98 bp, Homo sapiens
ccaaggtcctgcttcaccgaacagcacctcaggagcagtacagaacctgctaaggccatcaaacctattgatcggaagtcagtccatcagatttgctc

SEQ ID NO: 708147 - DNA, 100 bp, Homo sapiens
gcaccaccatcttcacccagctcgccaccatggccgccttcccggggatatgagactttctactcggaatatcctgagtgttgcgtggatgtaaaaccca

SEQ ID NO: 708148 - DNA, 89 bp, Homo sapiens
gccccggcagcgcctgggacaaggttcatcctaagttccactataaacaggctcatgactcgggcacagacacttcttgcgtgactttt

SEQ ID NO: 708149 - DNA, 75 bp, Homo sapiens
ggccaacgagctcaacgccaggcgccgctcctttacagggctcattgtcatccccaagccaggccagttctccag

SEQ ID NO: 708150 - DNA, 83 bp, Homo sapiens
aaacatccagggatctatttgtttttagtccatcccaatgaaatggggtctctaataaattcccttaagccatctgggcctac

SEQ ID NO: 708151 - DNA, 75 bp, Homo sapiens
agaaagcatactgcgagccctgctacattgtgttggggatgtcctttgcactgaccctgaactgccagattgaca

SEQ ID NO: 708152 - DNA, 75 bp, Homo sapiens
gcggcgacggtggtggtgactgagcggagcccggtgacaggatggcggtgcgtctttctacgtgaataggatttt

SEQ ID NO: 708153 - DNA, 100 bp, Homo sapiens
tctcccttgatccgggagtctttccactggatccctgcatgtcactgagtccaccatgctttacagaagaagacagatttagtctggaagctcttcaaac

SEQ ID NO: 708154 - DNA, 83 bp, Homo sapiens
agcgtcagatccttgagtgataaaggagtagaggtcgtgatgtctcgggagtcggatgttgaggctcagcagtctcatggcag

SEQ ID NO: 708155 - DNA, 75 bp, Homo sapiens
aagctacatgacccctaaacgaataatccagaatggctactctgatctatgttgataaggaaaatggagaaccag

SEQ ID NO: 708156 - DNA, 82 bp, Homo sapiens
tctggccatagcgcaatgacataaggatgtttccaagaggaggcaataaagtgcatggtacaaagaggatggtgaagctttg

SEQ ID NO: 708157 - DNA, 100 bp, Homo sapiens
tggccagctgactgcacttcttttttgagaaaggaaggaatatatcctgactgattgaaggcgcaatggcgaggaagttatctgtaatcttgatcctgac

SEQ ID NO: 708158 - DNA, 90 bp, Homo sapiens
ctcagtttggatcctacaagcaagctgaatggaggccagatagtaccatgatagctgtatcagttgaaaggattgttgacaaaaggaaaa

SEQ ID NO: 708159 - DNA, 100 bp, Homo sapiens
ggccactggggtggtggcccatctcagtgacagacactcctgcaacccagttttccagccaccagtgggatgatgaatgtggccccgtcccagagcacca

SEQ ID NO: 708160 - DNA, 77 bp, Homo sapiens
aagaatgaacactgtccttcaaaacgatgcaaggatgatgctgaaaggaataacaaggcttatctctaggatccata

SEQ ID NO: 708161 - DNA, 82 bp, Homo sapiens
acattcctgatgtccccctcctggcagcccagacgtttattcagaggtgtttcccattaaacactaccaggacaaaatcagg

SEQ ID NO: 708162 - DNA, 75 bp, Homo sapiens
tcttgcaacagtggccgcacgcataggtattggtttgccttaaaaaggggttaccatgcagcttttaaatatgac

SEQ ID NO: 708163 - DNA, 100 bp, Homo sapiens
gcgagtttccgatttaaagctgagctgcgaggaaaatggcggcgggaggtcctatggcagcgtatacaaagctattcataaagagaccggccagattgtt

SEQ ID NO: 708164 - DNA, 96 bp, Homo sapiens
ccaggacgaaggccctactgggcaaggttccttgtggagaagcactggtataagcagtgggaggcatacgtgcagggaggggaccaggactccagc

SEQ ID NO: 708165 - DNA, 83 bp, Homo sapiens
cccggacatgatcctctccgcctctcgaggtacggactaagttggcctttaccagagtttgatccaagccagattcgactgat

SEQ ID NO: 708166 - DNA, 98 bp, Homo sapiens
aacggcagctgacttcttacgttggaagtgttcgtccgcttgtcactgaattgggatatcagtatgaacaacattactcagttgccagaagatgcatt

SEQ ID NO: 708167 - DNA, 76 bp, Homo sapiens
agagatcagagaccagggctcctgtggctcctgctggtcttactactttgaccgcgatgatgtggctttgaagaac

SEQ ID NO: 708168 - DNA, 100 bp, Homo sapiens
cgtagatacaaatttttggatgatgatggatccatttctcctattgaggagtcaactgacaatacttgtatggagtttattttgcacatttgcaagtata

SEQ ID NO: 708169 - DNA, 74 bp, Homo sapiens
agaaagacaaagacccagtgaacaaatccgggggcaaggccaaaaagaagatcttcctcagaagaataggcttg

SEQ ID NO: 708170 - DNA, 100 bp, Homo sapiens
gctgagtacgacagcctcaaacaggagctggagcagctcaaagagtgatgactatgactccaagaaacgcaaacagcgggctggtggagagccctggggt

SEQ ID NO: 708171 - DNA, 100 bp, Homo sapiens
ttcgttcccgggtcccgcgcgagctttcccgggataagtagctttagcgatcgggagacagccgggcgctgcaaggatttggagttccatggagtgatga

SEQ ID NO: 708172 - DNA, 100 bp, Homo sapiens
ctggccgccaaaccccagctggaactccggccacagccagcatgcagggcgccctgcgtccggcagaggaggcgagcatcccgctcaggtgatgaggaac

SEQ ID NO: 708173 - DNA, 95 bp, Homo sapiens
aaaggagaaaggaaatgaagctttcaactcaggagattatgaagaagcagtgatgtattataccaggttttggagccctctcttaagtcagaact

SEQ ID NO: 708174 - DNA, 82 bp, Homo sapiens
cgggcggccacgttcccgctgcaggtgaggtcccagcttgaagagaaagaaaacaagaagttccctgtgtttaaggccgtgt

SEQ ID NO: 708175 - DNA, 122 bp, Homo sapiens
cacagagtacttattcattcatttcccagatcatcatgaaggacacttaactggttacacatcattttggaatgactgtatatcatctggattacgtggctgtatgttaattgaattagcat

SEQ ID NO: 708176 - DNA, 100 bp, Homo sapiens
gcctgcagagcgcgcagtacctccgaaaacaaccctttttgctgcacatgtaagtggagctgtgcttacctttggtatgggctcattatatatgtttgtt

SEQ ID NO: 708177 - DNA, 100 bp, Homo sapiens
gaagtgcctcctggaaccacagagtcggttcagtctgtggattactactgtgatattctttccaaatggcaatgcatttgccactggctcagacgacgcc

SEQ ID NO: 708178 - DNA, 96 bp, Homo sapiens
tccaactttgcgacggaaatgtgtcatcgaaagccaggatatagacctgcagctaactggatttgatttataagagagaaatctgcagtcaatgcc

SEQ ID NO: 708179 - DNA, 98 bp, Homo sapiens
ccggaaactccagcgtgtctccagccgtgtttcacctgtgattccctggatggttaccattcttttgaatgcggctccatagatcccctgacaggctc

SEQ ID NO: 708180 - DNA, 74 bp, Homo sapiens
cttccttgtgtttgctggctgcttgatgaaggccagcaggagatggaaccttccagaagtgggcagctgtggtg

SEQ ID NO: 708181 - DNA, 74 bp, Homo sapiens
ctttgacctcttcgatgtgcgagactttggaaaggccctacatcattcgaggaatggcgcccccgacgacgccc

SEQ ID NO: 708182 - DNA, 75 bp, Homo sapiens
ggtgaatttccatgtcaacatagtcctgccaactgggtcctgaagtagctgaaatgcgaaaaaggcagcagtccc

SEQ ID NO: 708183 - DNA, 100 bp, Homo sapiens
atatatgcctgatgttgctaaatgtagacaatggttagagaagaattttccaaatgaatttgcaaaacttactgtagataaaggataggttacagttacg

SEQ ID NO: 708184 - DNA, 132 bp, Homo sapiens
ctctacacatctcttcatctgtatcctctgcagcatccttgatgataaaccagtaaatggaacctcagaacctgttctggatccacagcaaatccaagcatttgatcagctttgccgtctctaccgaggaag

SEQ ID NO: 708185 - DNA, 100 bp, Homo sapiens
gggaggaacactctctgaggaagcccaactcctatgagctcctctctggcagcttataggctttatactgtggtgcctcgcctggtcaagtttgtagata

SEQ ID NO: 708186 - DNA, 74 bp, Homo sapiens
gagaaacccggagggcgccggggattttttatcaagcagaaatgcatcgaacaacgagaatcaagatcactgag

SEQ ID NO: 708187 - DNA, 74 bp, Homo sapiens
acatgtaagcagcatcatggaggtgttctccctcgatgctccccacagcacctacaacctctactgccccttcc

SEQ ID NO: 708188 - DNA, 142 bp, Homo sapiens
tgatgtccgaccagaatgctgccagctggggctatttcaacacgcagagccaaagctggaacgtagagacagtgtgatgtgaaggattatggggacctgccctttgctgacatccctaatgacagtccctttcaaattgtga

SEQ ID NO: 708189 - DNA, 98 bp, Homo sapiens
atgagcaagagcttctgcctgttcagaagcattaccaacttgatgatcaagagggcatttctggttcaatgcacagagaaagacgcaagtttttaaga

SEQ ID NO: 708190 - DNA, 100 bp, Homo sapiens
ggggtttctcagataactgggcccctgcgctcaggaggccttcaccctctgctctgggcaggatgacgcaaaacacggtgattgtgaatggagttgctat

SEQ ID NO: 708191 - DNA, 89 bp, Homo sapiens
atgtcctttcttttctgactttccagttgactgaacctggaaaagagccgacacgagacgacttcctgggccaggtggacgtgcccctt

SEQ ID NO: 708192 - DNA, 106 bp, Homo sapiens
cgctgggtggccaagtctctggtgaaagcagggctctgccggagagtgcttgtccaggtttcttgaaatccagaagcccagactctgtaaggtgattcgtgtcctc

SEQ ID NO: 708193 - DNA, 110 bp, Homo sapiens
caatgaagcagccgatcatggcggatggcccccggtgcaagaggcgcaaacaagccaatcccaggaggaaaaacgatgcctgaggaaacccagacccaagaccaaccgat

SEQ ID NO: 708194 - DNA, 50 bp, Homo sapiens
agcagtacaacggcgtccctctggatgccacaacagaaacactgccgggg

SEQ ID NO: 708195 - DNA, 100 bp, Homo sapiens
tggagagtcgtgcggacagcattgggagcggccgagccatcccaattaaacaggttgccaagagggtgatcctgttgtcgggcacaccagccatgtcccg

SEQ ID NO: 708196 - DNA, 95 bp, Homo sapiens
acccgaacactattgtacatatcccagtgatgctgacgggccctcttggggaagccacggtcgttcccaaggaggccgagcgtggcagcctcggc

SEQ ID NO: 708197 - DNA, 50 bp, Homo sapiens
aacgaggcctacgtggagacgctgaagggcaagtgtccagagaatggctg

SEQ ID NO: 708198 - DNA, 100 bp, Homo sapiens
gtgacagaggccgtggtcgtggtgggcgctttggttccagaggaggcccaggaggaggcaactttattccacagccaattggaaaatgcaagcgtgtatt

SEQ ID NO: 708199 - DNA, 90 bp, Homo sapiens
tcgacagtgccttcggccagagcggcaagttcaagatccacatcccagatctttgccagcattgctccttccatctatggtcatgaagac

SEQ ID NO: 708200 - DNA, 100 bp, Homo sapiens
ctcaataatgttgtcatccatttgcttggagatgaagaccccagggtgcgacatgttgccgcagcatcactaattagtgatgccaattggtggaaaggag

SEQ ID NO: 708201 - DNA, 95 bp, Homo sapiens
cgagagagtcagctgcaacaggaagacccaatggatagatacaaggcgaggaaacgagacctctttcgttccttctagaaggtctggaggacgta

SEQ ID NO: 708202 - DNA, 87 bp, Homo sapiens
agaaattagaccattttcttcgtgagaaagaaatcgacgtgctgttttcatagggcccttcaccttcgtgcctcggggactccctgg

SEQ ID NO: 708203 - DNA, 75 bp, Homo sapiens
gtcatattccacccattactaaggccagaggcattgatgtgcagcaggtttctttagtcatcaactatgaccttc

SEQ ID NO: 708204 - DNA, 98 bp, Homo sapiens
ttcgaggagccgcaccaatggcttccgtgctgtcctacgaaagcctggtccacgccgtggccggagccgtgctccttcgagaactcatagaacggaag

SEQ ID NO: 708205 - DNA, 50 bp, Homo sapiens
acgacagccagtgacgtctggatgttcgatggaggagggagtgagtgccg

SEQ ID NO: 708206 - DNA, 100 bp, Homo sapiens
caactcggcgccttgggaaccgctcgagcctaccagttatttacctcatactctaccatgccatctttgtgttctttacctggacctactggaagtctat

SEQ ID NO: 708207 - DNA, 100 bp, Homo sapiens
gagggaggatgttaaagccccgcgctcctcagtgggtagtgcacttccacgaagacgctgctgtgcatatattaccattggaatgatatgtattttcatt

SEQ ID NO: 708208 - DNA, 75 bp, Homo sapiens
gacaagacacctccaggagcccagctcacagccaccggtaccttcttccagccagcgtcccatgctcggtggccc

SEQ ID NO: 708209 - DNA, 100 bp, Homo sapiens
ggctggtgaactgtgggttaagaatgagaaggtcatgtgtggctacatcagtgaagataccagggtgacagagctgaatgaacctctctccaatgaagat

SEQ ID NO: 708210 - DNA, 51 bp, Homo sapiens
tcactaacaagctgcgtgatcttcgtgggaatgtaagacggacttagatat

SEQ ID NO: 708211 - DNA, 83 bp, Homo sapiens
tttgaattttgatgatccactgaatattgaagctgcagaacatcatttgcgggacaaggtgccttatgcccgctcagaggccc

SEQ ID NO: 708212 - DNA, 97 bp, Homo sapiens
ggagagagacagcgatcgagagagaccggagaggtggagaggaaccacgtgaatgttgagggggcgacacacaagcaggtggtggacctgattcgag

SEQ ID NO: 708213 - DNA, 101 bp, Homo sapiens
tccgcctgtgggctggcgtcccccgcgtggtcgtgactccgtggctgcctccagggcacagggagtaccctgacttctaccggaagctctacggcctcttg

SEQ ID NO: 708214 - DNA, 99 bp, Homo sapiens
ctatagtccggaggacagccccagggcagaggcctctgatgaataatacggcagctagtccaatgtctactgcaacttcaagtagtggaaggagtacag

SEQ ID NO: 708215 - DNA, 95 bp, Homo sapiens
ttgttgcccagttccccagttctggcagattctggaaactgtacattgaagcagagggtgaagttgaacaaattgctatgatgaaaccaaaaggc

SEQ ID NO: 708216 - DNA, 75 bp, Homo sapiens
ggcgagaagccctacgagtgcaacatctgcaaggtccgcttcaccagcctcccgcgacgatgcccctcaacgtta

SEQ ID NO: 708217 - DNA, 50 bp, Homo sapiens
tgaggaatgactggactgtgcagaacccttaggagaaatcttgagagtgg

SEQ ID NO: 708218 - DNA, 75 bp, Homo sapiens
ttttggaccaaaggcctgtgtgctgcagaacccccagaccatcatagccccccaagatgaacccagtggtggagc

SEQ ID NO: 708219 - DNA, 100 bp, Homo sapiens
agcagtccagaaagcggcttatcgaacagagccgggagttcaagaagaacactccagaggtcccgcggcagtgctggtggccatggttcccgtagccaga

SEQ ID NO: 708220 - DNA, 100 bp, Homo sapiens
aataatacaaaacatgcggataattcatctgacacagagatggaagacatgattgctgaagaaactaattctgaagcaagcccttatagttgtgctgcag

SEQ ID NO: 708221 - DNA, 100 bp, Homo sapiens
agaaattagaagctgcagaagaaagacgcaaggttcaatgtggcttaattgtggtggcctacaaagatggatcacctgcccacccacatttcatggatgc

SEQ ID NO: 708222 - DNA, 100 bp, Homo sapiens
agaggaaacagtacagccagagtggcatgtcctcagtgcaatgctgaatacctaatagtttttccaaaattgggagagaaaccttacaagtgtacctggg

SEQ ID NO: 708223 - DNA, 83 bp, Homo sapiens
ccgagcgcaaggacagcgcgaggtccgcgcagcccagcgcagccatgaacttgctactaccagcaccatgccctaccaatatc

SEQ ID NO: 708224 - DNA, 100 bp, Homo sapiens
ttagggtcctttatatagaagggagagtagccgtcatggaaatgatgagtcagaagattcagcagctcacagccctgggggcagctcaggctactgctaa

SEQ ID NO: 708225 - DNA, 90 bp, Homo sapiens
accgtgaagccggaagatgcatatgaagactttattgtgaaacctcccgtgagaaaggtcaagtctggcaccatctttgacaacttcctc

SEQ ID NO: 708226 - DNA, 75 bp, Homo sapiens
ggcgggctcctgcgagaagcaagcggaacttcctgagcaaattgtggctactaatttgccccctgaagatcaaga

SEQ ID NO: 708227 - DNA, 100 bp, Homo sapiens
tcactgtcatcttcttcaccgtctttgtgcaggtacgaagatgccctggtgctcctgctcacagaggtgttgaatcgaatccagttcagatacaaccaag

SEQ ID NO: 708228 - DNA, 100 bp, Homo sapiens
gccacccccgtggatctctggagtgttggctgcatatttgcagaaatgtttcgtagaaacaaagtgtgggatgctgtctcaggagatgaattgatgaccc

SEQ ID NO: 708229 - DNA, 101 bp, Homo sapiens
tggttggtgacgggacagagcggtcggtgacagcctcaagggcttcagcaccgcgcccatggcagagccagaccgattatgttccatggcagcagtccaag

SEQ ID NO: 708230 - DNA, 90 bp, Homo sapiens
acctctgccgcaaacatgctccgccagatcatcggtcaggccaagaagcatccgagcacacgaagatcgattgagaagttattagaatgg

SEQ ID NO: 708231 - DNA, 75 bp, Homo sapiens
atcgccagagagttctgtgtttcatcaccgccgaaaggtatgtcgagagtaccaacgtggcaattgcaaccgagg

SEQ ID NO: 708232 - DNA, 100 bp, Homo sapiens
ggaacttgccctgtctcctcgcagatgagatgccagaattccagaaaagttcagttcgaatcaagaaccctacaagagtagaagaaattatctgtggtct

SEQ ID NO: 708233 - DNA, 100 bp, Homo sapiens
accagctgtgggagaaggcccagcgaagctccatgaacctgcctccagacaaggcccggctcctgcggcagtatgacaatgagaagaaatgggatctgat

SEQ ID NO: 708234 - DNA, 88 bp, Homo sapiens
gcagtatcatgctggccaagaagatcatcattaaggacggaggcacgatgatatcatcaagttgaatcgaaaggaagggaagaagcag

SEQ ID NO: 708235 - DNA, 100 bp, Homo sapiens
aactatgcagtcacagttatgattggtggagaaccatatactcttggactttttgatactgcagagcagttgaagacatctcttcatcgaggactaaccc

SEQ ID NO: 708236 - DNA, 75 bp, Homo sapiens
ggaaaactcgtggcacgttaccataagggcccaatgtaaaggctgttgctactgctgtggaacagatttacccat

SEQ ID NO: 708237 - DNA, 125 bp, Homo sapiens
tggctttggtggatggggtattcttgaaccaggtcatgctccaaatggcatatctggaatctgaagttgctatatctgaggagttggttcagaagtacagtaattctgctcttggtcatgtgaac

SEQ ID NO: 708238 - DNA, 82 bp, Homo sapiens
agactgggcggccggccgacccttcctgtcgctgacggcgactgcgggaggccagtgagaaagatcagtctaaagaaaagga

SEQ ID NO: 708239 - DNA, 74 bp, Homo sapiens
agacgcacagctaagatgtcaggacatcctggaagctgggaaagggaagcatttattcgaagcattttgtcaaa

SEQ ID NO: 708240 - DNA, 75 bp, Homo sapiens
ggatcatgtctgcgagccaggattcccgacaccattcgcttttcacccaagatgatttgatgtcttataaaactc

SEQ ID NO: 708241 - DNA, 82 bp, Homo sapiens
gaatcttcaatcaatcatatttcacaaataacgaaggaggcccaacttcattcaataaggagcctgacggatttatcccaga

SEQ ID NO: 708242 - DNA, 90 bp, Homo sapiens
cgtccggtttctcactgtgatgatgaagcatggtggagccgccaccaaaatgcagattttcgtgaaaacccttacggggaagaccatcac

SEQ ID NO: 708243 - DNA, 76 bp, Homo sapiens
gatgccgtacaagagctgctgcctcagtacaaggagagggaagtgtcctgcctggagacagtgtgggtatcaagag

SEQ ID NO: 708244 - DNA, 100 bp, Homo sapiens
tgggagtctccgcgtcccgctcgctgggagagaggtacctctccttttccctctccctttccctaagatcttcaaggctaaccacttggaagataaaatt

SEQ ID NO: 708245 - DNA, 74 bp, Homo sapiens
gaaatgcgcttcctgagggagtgggtggagagatgggggtctttctgtgttgcccaggctggtttcaaacccct

SEQ ID NO: 708246 - DNA, 100 bp, Homo sapiens
cgggcacctacgcgggacagttcgtgatggagctcttggagcagtcggagtggcagccaacaaacgtggatgggaaggggtacctactcaatgaacctgg

SEQ ID NO: 708247 - DNA, 80 bp, Homo sapiens
tctggcctttgtgggcaccaaaagtggcaagctgaagaagattctttcttgtggagaagttattcatgtgaagatccttg

SEQ ID NO: 708248 - DNA, 82 bp, Homo sapiens
aagctgcgttaatgtttgcaaatgcagaggaagaatttttctatgagagtattgttacaatcacatttgacgtaccaggaaa

SEQ ID NO: 708249 - DNA, 98 bp, Homo sapiens
acactagaccggggctcgcaactcggcagcctccacccaccggcccaccctacatttagcgcatcatgtgatccggaacctaaaggcagacccagaag

SEQ ID NO: 708250 - DNA, 74 bp, Homo sapiens
ttcccttcgctccggcccggtgaaactgaacttataatcgtcactggattgattggatagctttagtcaaagca

SEQ ID NO: 708251 - DNA, 100 bp, Homo sapiens
tggcagccggggagctgcaggaaccagactgggggcgagctgagcacctgtagtcaatcacacgcagtgtcctgggtcatgaaacttaatccacagcaag

SEQ ID NO: 708252 - DNA, 100 bp, Homo sapiens
agacgtggacctgtgggaagccgcacttacctatgaggccagcaagcggagatgtggacgagtgctcactagcagaaaaaacctgtgtgaggaaaaacga

SEQ ID NO: 708253 - DNA, 82 bp, Homo sapiens
gccaacgtgggctcgctcttcgacgacggtggcccagttgaaatccttcccttcctctaccttggaagtgcctaccatgcat

SEQ ID NO: 708254 - DNA, 74 bp, Homo sapiens
ctggctcttgccctcatcctggttctggaatcctcagttcaagtggtgaactatgacaatgtagtggacacagg

SEQ ID NO: 708255 - DNA, 100 bp, Homo sapiens
cggtggaactggcagatgctaaagccaagataagaaggcttaggcaggaattgggcaagattcttgccaagagaattaatgtgcgtattgagcacattaa

SEQ ID NO: 708256 - DNA, 82 bp, Homo sapiens
ttgaaacacaaatggtttttggactgtagaagcggccaggaagaaaaccaccccctcttaaggttgtttttgtgaccgttct

SEQ ID NO: 708257 - DNA, 97 bp, Homo sapiens
ggagccaagatgcatggacccagctcagcgggacgcgccgctggagaatgaagaactctgacagcgtcccacctggctacgagcccatctcgctgct

SEQ ID NO: 708258 - DNA, 75 bp, Homo sapiens
ctggtgcctgtcttggcagaaaactacaataagccctatgagtttgtctctctggaatggctgcaaaagtggttg

SEQ ID NO: 708259 - DNA, 98 bp, Homo sapiens
gaagtacgggcagttgcagtgttggagctaaacaaatgcagccctgaggatttggctactgcatataacaacagggggcaaatcaagtacttcagggt

SEQ ID NO: 708260 - DNA, 74 bp, Homo sapiens
ctctacgaagatgtgatgcaggaaaccatcaggaacctggactgtgtagctaacaacctgagagaagattacaa

SEQ ID NO: 708261 - DNA, 100 bp, Homo sapiens
gttcaaggggaccagcaggcgtggtttgacatatctgaagagatggattaagaatgctttggattaaggattgtggagcacatttcaatcattttaggat

SEQ ID NO: 708262 - DNA, 100 bp, Homo sapiens
tgacgtccatccatttcgtggttcacccgctgccgggcaccgaggaccagctcaatgacagaaagaatcttcaagagggagacatagggaaaaggaagac

SEQ ID NO: 708263 - DNA, 88 bp, Homo sapiens
tcagcaatggggataccattctggaagacttgcccatccaatctgaatcatgtgagggccaaccggggaaggtggagcagatgagcac

SEQ ID NO: 708264 - DNA, 100 bp, Homo sapiens
gaagaaggaagttgtggaagaggcagaaatagttgtctgtgcttccttggttcatgcttctactgtgacacttatctcactgttttataattagtcgggc

SEQ ID NO: 708265 - DNA, 97 bp, Homo sapiens
gcaccagcacttgaaactgactcttcccctccaccatatagtagtattactgtggaagtacctacaacttcaggaggcattgaaacttcagcaggat

SEQ ID NO: 708266 - DNA, 98 bp, Homo sapiens
aaccaaacaccctcagctccacattgagagcaaaatctacaagatgatgcagggaggagcaacctggcaggcaatcggattggcaccctggagttggg

SEQ ID NO: 708267 - DNA, 101 bp, Homo sapiens
ttcaccttcacgatgtttcccttggtcaaaagcgcactaaatcgtctccaaggctgggagtcctccgtcagcatcagctccggctccggtgtcctccttct

SEQ ID NO: 708268 - DNA, 75 bp, Homo sapiens
cggaattcgggaccgactgacggccggccggcttcccggaactggaagggtgaaaggttgagccatgcagtaggc

SEQ ID NO: 708269 - DNA, 100 bp, Homo sapiens
aggatccagtcttctgaggccctgaaaccacatggctggttatgaagaagaaactcaaaataacaggagtggcttatggaactacatggaggtaacagag

SEQ ID NO: 708270 - DNA, 97 bp, Homo sapiens
cggatgtccacttcttccactgcgatgaggtggagggtccaaaactccttcctaaatatcaagtgaagtcatttcttaccccatgctgttccctgga

SEQ ID NO: 708271 - DNA, 100 bp, Homo sapiens
actatggagttctggaacgggactttgcagaaatgtgtgcagactacatggcatctaccatagggcattagtgccagcagtagttcccaagggctgtctc

SEQ ID NO: 708272 - DNA, 90 bp, Homo sapiens
gggacgtctgcggcccgcgtcggcgctggggacaaaggtgtttatacgggagctgatctccaatgccagcgatgccttggaaaaactgcg

SEQ ID NO: 708273 - DNA, 75 bp, Homo sapiens
caaaagatttgtctgccaaacaactgcagaccccttatccctctggacagaatgcaggtccaaccacgctggtat

SEQ ID NO: 708274 - DNA, 100 bp, Homo sapiens
ccacctctgtattcagcatagctattcctgttgatggtgatgaagacagtccggttccagttgttggcaaaggagaggaagaggaagaggaagatggcat

SEQ ID NO: 708275 - DNA, 83 bp, Homo sapiens
cgcggaccagcagcgcgggagagcggactcccctcgccaccgcccgagcccaggagtgcctgtgaagaaaacggggtattgcc

SEQ ID NO: 708276 - DNA, 110 bp, Homo sapiens
gcattctcttcccaaccatcacgaaaatgcttgctggagaaaattgatgttataacaggggaggaaacagaacataatgtgttaaagggagaggtggaagagattgagca

SEQ ID NO: 708277 - DNA, 100 bp, Homo sapiens
gtgccactacccggcttatgaaaggagagatcacactttcccaggaataggactagcaacttcatagacggttgtgaagacaagctagacggcagatgaa

SEQ ID NO: 708278 - DNA, 50 bp, Homo sapiens
ggccggaatccgcgcgcagcccgggaagctcttcgtgggcggtcttgact

SEQ ID NO: 708279 - DNA, 100 bp, Homo sapiens
tctctcctctcctctcttcttgtttgaacatggtgcggactaaagcagacagtgttccaggcacttacagaaaaggctgaccggttccctgatgtgttac

SEQ ID NO: 708280 - DNA, 75 bp, Homo sapiens
cctggtcatcttctatttccaaatagtttatgccaacgtgacttcattcatacagatgaaccaaggatcgggata

SEQ ID NO: 708281 - DNA, 90 bp, Homo sapiens
gccttgttgcccagttccccagttctggcagattctggaaactgtacattgaagcagaggttttgcacactagggaccaagaagccctcg

SEQ ID NO: 708282 - DNA, 82 bp, Homo sapiens
gagaccctaccctcactttccgtctgcttggctcccccagggaatgcctggctgcgcacctaggcggtaacgatggaaatca

SEQ ID NO: 708283 - DNA, 100 bp, Homo sapiens
gcggctgggcctccgggaggcagaagagaagtccctgctggcgggactgtccaactacgggaaccctcgccatggcctgttgctgttcatgatggctggc

SEQ ID NO: 708284 - DNA, 100 bp, Homo sapiens
ccggggggctgtttgcaaactgcgcccattttgtggggctgaatccgcccgggctacgctcctccatcacgtgtgggaatttcagattggaccttgtgaa

SEQ ID NO: 708285 - DNA, 75 bp, Homo sapiens
accatcaaggaggaaggcctggttcttcaagccacagacccctttgcttctgtttttgggaatgaatcatttgga

SEQ ID NO: 708286 - DNA, 124 bp, Homo sapiens
ccaccttctttcttcagccgaggccgccgccgcctctccttgctgcagccatggaacaatgcagatcttcgtgaagactctgactggtaagaccatcaccctcgaggttgagcccagtgacacc

SEQ ID NO: 708287 - DNA, 88 bp, Homo sapiens
atgattgtttatcctaatcccaatgctgaagtaagattgtcttggaaatactaagttggaactattccatggcagtatatcttgtaaa

SEQ ID NO: 708288 - DNA, 76 bp, Homo sapiens
agcagatttacaaactggccaagaagggccttactccttcacagatcgactggaaagctacccttgaggagaatag

SEQ ID NO: 708289 - DNA, 100 bp, Homo sapiens
cttcatatttggcttcaatgtcatattttgggtacttcggccttcaaggggctcctttattgagaatcaatgtcttctcctaggtaattgatcaccctag

SEQ ID NO: 708290 - DNA, 90 bp, Homo sapiens
cctcgccggggacccggccatggcgctggacttcttggctggatgcgcgggggagggagacgtggtgggcggtccttcctgtgacacgac

SEQ ID NO: 708291 - DNA, 75 bp, Homo sapiens
ccttgatgaacttcatcgtaaatatggaacagacttgagccgggttgtgagaactgctttattggatgctgctgg

SEQ ID NO: 708292 - DNA, 75 bp, Homo sapiens
gcaggacatcactttagatgatgagggtgacatgccatgccgtgccaacatcctggtcacagagttgtttgacac

SEQ ID NO: 708293 - DNA, 100 bp, Homo sapiens
tggggtttcctcagacagtgttggaggattcagatacagaatggtctgccgaaaaccgaccgacccggttgattggccaccacttgtcctgggactgctc

SEQ ID NO: 708294 - DNA, 73 bp, Homo sapiens
gttcatctaccacgctttcgtgaacagcatctgttgcagttgcaggtctccttgcagctcttcgaataaccaa

SEQ ID NO: 708295 - DNA, 75 bp, Homo sapiens
catcctgcgggtgcctttgaaaatcaacgacaacttgagcacaggtctactctaatgtgatgctgggattgaatt

SEQ ID NO: 708296 - DNA, 75 bp, Homo sapiens
aaattcagtttgatgacattggagatgatgatgaagatattgatgacaattatatccagatcgagagacagaaga

SEQ ID NO: 708297 - DNA, 101 bp, Homo sapiens
aaatcaagatttaacattccaacacataaaaattatttatccaacagctcctcccagggccggtgcataaacttctcccgagttccatctcagtaaaaggg

SEQ ID NO: 708298 - DNA, 82 bp, Homo sapiens
gcgagcggctcctctgccagagggtcatcgagcagctcggtgggaagcagctggtcatgaaccacatgcatcatgaagacca

SEQ ID NO: 708299 - DNA, 100 bp, Homo sapiens
caccaagtcctctccatctgatcccatgaccacctccagagctaatcaggaatcttcctcttcagtgaatacatccaacaagatgaattttaaaactttt

SEQ ID NO: 708300 - DNA, 75 bp, Homo sapiens
gcggcagcaatggaaacaggagggggtcgtcggttcaggtgttggtgtctgtccagtcccttatattagtagctg

SEQ ID NO: 708301 - DNA, 100 bp, Homo sapiens
gatttgcttttgtaacttttgatgatcatgatacagttgataaaattgttgcttgcagtgagctgcatactccatcgctagatcgaaagccaaatagttt

SEQ ID NO: 708302 - DNA, 75 bp, Homo sapiens
ggagctggtgaggacagcctgccagagtctggagcctcctcaacaagcccaagagtgagatgaccccagaggagc

SEQ ID NO: 708303 - DNA, 101 bp, Homo sapiens
acacgtttaatttttctaaagagtcttgttatttcttctttgagaaaaacctgaaagatgtctcaggtgataaaagaaaatgtggctgaagttacccgaag

SEQ ID NO: 708304 - DNA, 90 bp, Homo sapiens
catcatccagtggcagacactgaaaataagttatcaatagtctggctgtctatcgtcatcgtgagactgactttggtgtaggagttcgag

SEQ ID NO: 708305 - DNA, 90 bp, Homo sapiens
gacggaggcccagcagccgtttgatgattccttagaacacgagaaactcacagtggatgaatggaagcccgagcttggaaaagtcagaca

SEQ ID NO: 708306 - DNA, 100 bp, Homo sapiens
aaaaaagcagagaggagcggggagcaatgcagatgatagtatttctgctgcaagtacttctgatgttcaagatcgcctgtcagctcttgagtcacgagtt

SEQ ID NO: 708307 - DNA, 50 bp, Homo sapiens
acaacccagatgtgcaacaaagtgcgatgatttgcttgtaaatgcatcac

SEQ ID NO: 708308 - DNA, 100 bp, Homo sapiens
ttaccacgacccagatcccagcggaaaggagcgcgcctctttttggcttggggagctgcagcgttcgcttacagggatcttcagaccagggaagacatac

SEQ ID NO: 708309 - DNA, 75 bp, Homo sapiens
aatactgaaaattgtcactggatttaatggtgatgcagtttggcaaagggaagtcgtgttgctaccggtttctga

SEQ ID NO: 708310 - DNA, 78 bp, Homo sapiens
ccacacttccagtgcatcggtgaccagtgttcgttcccgcaccagatggctcccgcaaagaagggtggcgagaagaaa

SEQ ID NO: 708311 - DNA, 96 bp, Homo sapiens
aaccagtcccagcgctgtcgtgctcctctactcggtaagtggaggtatacttcgaatttttccagaaggcaaagcccagtttgctgacattgaacc

SEQ ID NO: 708312 - DNA, 80 bp, Homo sapiens
ggctgggaggcgggatggagtgatagggaagactcgttcaaaacaagccatgactcctcagcaaaacagctccatcaagc

SEQ ID NO: 708313 - DNA, 75 bp, Homo sapiens
cagaaccccaggactgcgcccccgggagcgggcgcccagagatttaatgtgtgccgaccatttccttcagtgctg

SEQ ID NO: 708314 - DNA, 101 bp, Homo sapiens
gtgatgaccagtctgatgagcgcaactgcagtcctggcattgatgtgcctgctccagacatgagcacaggtgagcgggagatgtcctggatcgctgatacc

SEQ ID NO: 708315 - DNA, 98 bp, Homo sapiens
gtccatccatttcgtggttcacccgctgccgggcaccgaggaccagctcaatgacaggtgaaaggtgtagcagtcactcggcctacacccacagcatc

SEQ ID NO: 708316 - DNA, 98 bp, Homo sapiens
aatatttccaggatgctgatggatgtgaattagctgaaaacattacttatctggcactgtgacttctgccgtgttcaccgtgggagacaacgtggttt

SEQ ID NO: 708317 - DNA, 98 bp, Homo sapiens
atttatgaccatgcagttctattcaataagtctgacaagttggatggcttgaggactggtactaaaaggaaacgtgactgggaggccattgccagcag

SEQ ID NO: 708318 - DNA, 75 bp, Homo sapiens
gtcgctcctggtcggcgcgtggctcaagctaggtgttacacataatattgcattacttcgagaggtgataatcaa

SEQ ID NO: 708319 - DNA, 83 bp, Homo sapiens
cccggccacccttcgtcatctgcgtgaagctggttatggaaacaaaggacatgctttacatcgtcactgaatttgctaaaaat

SEQ ID NO: 708320 - DNA, 82 bp, Homo sapiens
cattccttaccagtcaagaaaaagagaagattgataagtgcaaaaagcaggatcaggtctcctgggcatggctaacattgac

SEQ ID NO: 708321 - DNA, 83 bp, Homo sapiens
gccctgcagtacctgcagaaggtctctggagacatcttcagcaggctggggccgggctggcggggccctcccgactgacttcc

SEQ ID NO: 708322 - DNA, 100 bp, Homo sapiens
gctcttttcttgtaccttgcgactcgtgaccaacatgctgtgatgtgtgccgagggaggaattggtacagcagggaagaactggaaactcagagaaagaa

SEQ ID NO: 708323 - DNA, 74 bp, Homo sapiens
tttgaccaggagcccatgagaagcctggtgctatctcagagcaagttttaagacaattatctcctatattgatg

SEQ ID NO: 708324 - DNA, 82 bp, Homo sapiens
ggaggtcctgactttgcccactgtctgctggtgtgtggaggtcattgcaaaggaaggacaaaacctgaaagagctatatttg

SEQ ID NO: 708325 - DNA, 75 bp, Homo sapiens
ctggtggacccgcacagaccttccgggaaagcgcggaattcagaggcagagttaacagccaggtccttgcctgct

SEQ ID NO: 708326 - DNA, 100 bp, Homo sapiens
ggatcgccgcgctcagcgacaaacaaatgcagccgctctctgctccctgccccaatgaacatctgcactaggcccaagccttggagtaatttacctgaag

SEQ ID NO: 708327 - DNA, 100 bp, Homo sapiens
taccctaaatatgggagataagaagtatgaagacatggaagatgttcagaaaatcattggtaaagatgtttgaagataaaggattagactgcattttttt

SEQ ID NO: 708328 - DNA, 82 bp, Homo sapiens
gaggaaactgttgtgcctcttcatattggcgatcctgttgtaaactacatctgaccagagtgatattgaaggtaggatcaga

SEQ ID NO: 708329 - DNA, 75 bp, Homo sapiens
ccgggccagcataggtgctgggttcatttaccctttggtcggaacgatgagcaccatgccaggactgcccacccg

SEQ ID NO: 708330 - DNA, 80 bp, Homo sapiens
agatcatcaaggacttggcctccatggtgtcagagcaaggagaagctgttgatctcctgggaggcccccgtggagaagaa

SEQ ID NO: 708331 - DNA, 50 bp, Homo sapiens
ggcctcgtcggacttcatcagtcaggtggattggcattctgacgttgtat

SEQ ID NO: 708332 - DNA, 82 bp, Homo sapiens
ggcgaagggaatcgcaaggctcttccctgaccattttctactgtccctgcgcgagatcgaaagctgctttgcgtcgcagttg

SEQ ID NO: 708333 - DNA, 83 bp, Homo sapiens
gtggttcatgtctgcgggctggagatgccacctgatgcagtagaagctggtggaggtcccgcagcccccggaagccaatagac

SEQ ID NO: 708334 - DNA, 82 bp, Homo sapiens
gtgaattgcagtgatctttcagagaaagcgcctgttcaactttgtcctctctcaggaacaggagtacagctgtgtagtaaag

SEQ ID NO: 708335 - DNA, 90 bp, Homo sapiens
gcaggaccccgggacaccctggaagccaggaaatgatccaaacgatcaaagatgttgctggagataaataggcagaaggaagaagaggac

SEQ ID NO: 708336 - DNA, 95 bp, Homo sapiens
cgagcggcgagccggagcgcggagcccggctcccgcaccatggaggaggacgacagctacgatgagcgtgaagccgtgcagaagaagaccttcac

SEQ ID NO: 708337 - DNA, 75 bp, Homo sapiens
ctggctgttcctccaccaagatttagaaagcttcttgctatctacctccaccatgatgaaagtgtgttaaccaac

SEQ ID NO: 708338 - DNA, 115 bp, Homo sapiens
aagccagcggcaggaccagcgggcgggggcccacgaaatttctagaaggaggagttggccatgttgaaatgttatttcgctgcaactatttagctttagttggtggtggaaaaaa

SEQ ID NO: 708339 - DNA, 100 bp, Homo sapiens
gcccattgcccccctcctcccctggctggagtgccctgcctggagggagccctcctggctgggggcaaggtgtaggagctgcacgatctgggaacctcac

SEQ ID NO: 708340 - DNA, 100 bp, Homo sapiens
ctcaagatggcggccaatgtgggatcgatgtttcaatattggaagcgctttgatttacagcagctgcaggatgctccaggatgaaacgccataggcctgt

SEQ ID NO: 708341 - DNA, 98 bp, Homo sapiens
ctttcttgaggcttgtcctaaagtggagagtttcagtgccagaatgaattttcttggatacatgtgctgcccttttgttctggacaaagatggagtca

SEQ ID NO: 708342 - DNA, 78 bp, Homo sapiens
ataagtttgatttgccctatgggatgagaacatcaggtcacagtaatgaaaggcagtaatagaaataaggatcattca

SEQ ID NO: 708343 - DNA, 74 bp, Homo sapiens
ggcttcatagcattcgcctactccgtgaagctagtgtcagcagtgggatacctgcgcttgaaggacatcatcca

SEQ ID NO: 708344 - DNA, 100 bp, Homo sapiens
gatttccttccagaaatgatggtggatcattgctctttgaattccagtcccgtggttattttggagctgttggagcactccttgagctgttgaagatccc

SEQ ID NO: 708345 - DNA, 100 bp, Homo sapiens
gagcaaaagaaaaaagaatgggtcaaccaagaacgtcaaacactccaacgattgagagcatttaaagatttttttgctccactcaagcctgttagaatca

SEQ ID NO: 708346 - DNA, 90 bp, Homo sapiens
ctggtattcaacaaataattgagtgctttcgatcaggagatttttcaagagcttgggatgttcttcttgaccatatacagtcagcagcac

SEQ ID NO: 708347 - DNA, 100 bp, Homo sapiens
cctgaagcgcagagtcttttacgaatgcttttcaagcgaaatcctgcaaacagattaggccaagtataaggagcgagggacggtcttggctgaggaccag

SEQ ID NO: 708348 - DNA, 74 bp, Homo sapiens
tcagccattccctcaagtacttggaattccagccaggagagcttgtttcatatccatatcccactgtattcctg

SEQ ID NO: 708349 - DNA, 98 bp, Homo sapiens
aagacccgacatgagggaaaagggacgtaggaagaagggcaggacctgggcggaggccgccaagacgatgcttcctttaaataccaatattcgacttg

SEQ ID NO: 708350 - DNA, 75 bp, Homo sapiens
gcccacagacctcaaattcaaagcatgtgcattccgatacaatgggctctcctttgtctaccttatctacctctt

SEQ ID NO: 708351 - DNA, 100 bp, Homo sapiens
ctgttcaagaaggttcacaatgaaaactgtacttatgttagctgaccagctgagatctgtatctgtggacctgaatgttgatccctcgcttcagattgac

SEQ ID NO: 708352 - DNA, 100 bp, Homo sapiens
gctggagcagttccagaagactgggactcgcaagaagctgcgcctgtaccagttcctgctggggctactgacgcgcggggacatgcgtgagtgcgtgtgg

SEQ ID NO: 708353 - DNA, 87 bp, Homo sapiens
tcaggctggaacttgccctgtctcctcgcagatgagacaggtgatttggcttctgcacagttaggaggagcaccaaaccgatgggag

SEQ ID NO: 708354 - DNA, 75 bp, Homo sapiens
cagcagtcctatgattatggaggaagtggaggaccctatagcaagtggttatcactaggctaaaactggacaaag

SEQ ID NO: 708355 - DNA, 51 bp, Homo sapiens
ggaagcgtcgggattaggtgaaagatcagggagcttccaaggcatttgata

SEQ ID NO: 708356 - DNA, 90 bp, Homo sapiens
ggaattacctgctgcgatttttcttcacagccagtttctgcaatcatgattacttccatgctgaaagacatcaacgctgaagaaaaagac

SEQ ID NO: 708357 - DNA, 87 bp, Homo sapiens
gaacaccaggacatcccagagtctgggaaatgagcaaatttttcagaacataaaacaagaatatagtcgttatcagaggtggagaca

SEQ ID NO: 708358 - DNA, 50 bp, Homo sapiens
taagacttgcccaggaaaatgaagttgatactaacaaagacagattggtg

SEQ ID NO: 708359 - DNA, 75 bp, Homo sapiens
ggctaaagagggctggagtcaggggacttctcttccaccaggggctaacaatggacacccagaaggacgttcaac

SEQ ID NO: 708360 - DNA, 100 bp, Homo sapiens
tgggaagaaaaggctagagaagtcaccctccttcgcctcggagtgggatgagggagaatgtgctacgaaacctagcggataaggcctttgaccggcccat

SEQ ID NO: 708361 - DNA, 100 bp, Homo sapiens
agaaaatctacatgacactctccgcttatatcgagccctgctgcaactgggacgcaaagaagggggagtatgtatttcccgccaagaagaagctgcagga

SEQ ID NO: 708362 - DNA, 100 bp, Homo sapiens
gcagctgttattgctttgaaagcaaggaagtctgttctccgggagatgttgcataaccactccttcgtgggctgtgtgaatcctcagtgggccttggcac

SEQ ID NO: 708363 - DNA, 78 bp, Homo sapiens
gctgaagatggctactctggagttgaggtatgaaaatgaaagtcttcagaatggaaggaagtcaactgaatttccaag

SEQ ID NO: 708364 - DNA, 101 bp, Homo sapiens
tcaggcacagagaaatttcccgagctctgtggtacaggtttgcagattccgccagcagcacagcaagctctacagatgagtggctctttggcatttggtgc

SEQ ID NO: 708365 - DNA, 102 bp, Homo sapiens
tcagagctttacgatgtcacttgggaagactctaaaatagagctcaagcttgagaagagagaaccactaaagggcagagcaaagactccagtaacactcaag

SEQ ID NO: 708366 - DNA, 100 bp, Homo sapiens
cttgacattacagccaagatggtgctgtcccagagacaacgagatgaactggccatgtgaaactttctgactttggtctttgcacaggactgaaaaaagc

SEQ ID NO: 708367 - DNA, 100 bp, Homo sapiens
cgtggctggaagacatggccactccagtcggtgttgagcacggcgagcagtctcaggcctttagtgatgatgggtgagcagggcagcatttccttctccc

SEQ ID NO: 708368 - DNA, 100 bp, Homo sapiens
aagcttccggacgacgaggaaccgcccaacatggcctcggagcttcgtgctctgtctgatgatggagtatctgatcttgaagacccaaccttgactcccc

SEQ ID NO: 708369 - DNA, 74 bp, Homo sapiens
ggcgagaggaggcgagaggcgcaaaggatttttagactctgaggagcagttggagctaatccacattatggaaa

SEQ ID NO: 708370 - DNA, 90 bp, Homo sapiens
cgacggggcggccgggggctcagagatccaagtgcgcgccctggcgggtccggaccaagcctgagaagccaggccccggcagcaaggacc

SEQ ID NO: 708371 - DNA, 75 bp, Homo sapiens
cagattcgcagtggtcgcttcttctccttggctgcgggctgaactaccacaagcgctgtgccttcagcatcccca

SEQ ID NO: 708372 - DNA, 75 bp, Homo sapiens
ggagggccagcgggccccggcgtgggtctcccgccaggccgccgggtactccaaagattcaggtttactcacgtc

SEQ ID NO: 708373 - DNA, 74 bp, Homo sapiens
gtgattttttgcctttgttgattaactggacaaattcaggagcatattaatgaaaagtgccataaactgaaaaa

SEQ ID NO: 708374 - DNA, 75 bp, Homo sapiens
ggcgaacccgcggcgcaataacgagcggttctggtgaggttggaaggatgcagccacccggttgtcatgaaaggc

SEQ ID NO: 708375 - DNA, 100 bp, Homo sapiens
gaagaattatggagagaacccagaagcctacaatgaagaactgaagaagctggagttgctcagacagagttatgcccagccaagtcttcagtatatccag

SEQ ID NO: 708376 - DNA, 101 bp, Homo sapiens
ttccccagctctgcagccacatactatccgtttgttcaggaaccaccagtgacagaagacctacagagttgaaacagtgaaacctggaaagattgtctggc

SEQ ID NO: 708377 - DNA, 98 bp, Homo sapiens
gttgttacccccacctatgccaggggaagctggaagatgggacagagtttgacagcagcctgccccagaaccagccctttgtcttctcccttggcaca

SEQ ID NO: 708378 - DNA, 75 bp, Homo sapiens
caatggcctctggatgaaacgtcaggaatttactacacaggccaatgagtgccaggagcgccctgttgagtgtaa

SEQ ID NO: 708379 - DNA, 76 bp, Homo sapiens
atcatctagaaggacaaatgaacttcaatgcagattctagccaacataaagaaaactttagaaactgttcctttgg

SEQ ID NO: 708380 - DNA, 83 bp, Homo sapiens
cgggaggaaggaacgaggcaaggagctaaagcagcgtgcgttcagccctgggcagtggccggtgtccagctgcctactttctg

SEQ ID NO: 708381 - DNA, 99 bp, Homo sapiens
ccctgttcttccagcggctcctgcggctccactacccccagaaacacatgcgacttttcatccacaaccacgtggaccggtatcggttgaagaatgggc

SEQ ID NO: 708382 - DNA, 83 bp, Homo sapiens
ctgggagcagctggctctgggccttgaacattccgaaactgtcaagattggcaaggctgcctctcccagggagccacttgaac

SEQ ID NO: 708383 - DNA, 90 bp, Homo sapiens
cggcggccgttggaggtggctgcggcagctggtgctgggactgtacaacactctgaaccctgaagcatctgcctcgccttgctgcgtgcc

SEQ ID NO: 708384 - DNA, 83 bp, Homo sapiens
cgaggttcagactcttggagccagaagctacatgacccctaaacggttttaaaatcaaagatgggaaaatcggagaaaattgc

SEQ ID NO: 708385 - DNA, 90 bp, Homo sapiens
gccccagcttgcccacgcaccccactcggcgtcgcgcggcgtgccctgcttgtcacagccatgaagatggacctacagctaaaaaattaa

SEQ ID NO: 708386 - DNA, 82 bp, Homo sapiens
ctacgggagttgggaggacccgggacaccgcacagccgggaaatggaatactcccccagttgcaagaggcgcaggaccgtgg

SEQ ID NO: 708387 - DNA, 108 bp, Homo sapiens
caaggaccaaaagcagaacgcatactcgggcactcaagaagttaagaacctgccacagacaggggagcaggaactagagagcctggtgctgaagctgtcagtgctaaa

SEQ ID NO: 708388 - DNA, 82 bp, Homo sapiens
tgtcgggttattcgagtgaccgagaccgcggccgggaccgagggcctcaggcccaggcccaaggccaagtgagagagcccag

SEQ ID NO: 708389 - DNA, 100 bp, Homo sapiens
caaagatggcggcagggaccagcagttactgggaagatgggaataactgggaacacaagtccatttggacagccctttagtcaagctggagggcagccaa

SEQ ID NO: 708390 - DNA, 90 bp, Homo sapiens
aaaactggctgtgaataatatagctggtattgaagaggttacagtcacggcagtcgcaatcacttttgacaaaaatcaggctttacaaac

SEQ ID NO: 708391 - DNA, 100 bp, Homo sapiens
cgcgggaccaggaccccgacctggagaaggcgaagcccagcttgctcgggtctgcacaacagacccagattgatcactatgttggcatcgcccgagatca

SEQ ID NO: 708392 - DNA, 82 bp, Homo sapiens
tcttgtgctcagtgacatcattcagatctcagtcctggctttctctgtctgcttcatcttcactatcaccattgggatgttt

SEQ ID NO: 708393 - DNA, 75 bp, Homo sapiens
cctgtacagcctgcagaactgtctagggagtgagaacgtgatttctcagccgaatgagtttgaacataccccaca

SEQ ID NO: 708394 - DNA, 115 bp, Homo sapiens
ggcggacaaaacgccaggcggatctcagaaggccagttcaaaggagtacaagcgcaagctagccagagtttccctggtgcgcaaagaactcaggtcccggatccagagcctgcca

SEQ ID NO: 708395 - DNA, 75 bp, Homo sapiens
atctgtgcctgcccccctgcctacgctggtgactcttgtcagtacagaacctgctaaggccatcaaacctattga

SEQ ID NO: 708396 - DNA, 87 bp, Homo sapiens
atggaatttgcaccaaattgaaaacatctcccaatgaagcaacaattgagtcacttcaaaaggagttcattgaaggggaacaccatg

SEQ ID NO: 708397 - DNA, 85 bp, Homo sapiens
caggaactgtgtgtctagatgtaattaatcaaacttggacagctctctatgtcttagagtttgaaagagtctatcttgataatct

SEQ ID NO: 708398 - DNA, 50 bp, Homo sapiens
ggatgctgtcaaactgggtctaccggtacaacagaatagctcgggaatgg

SEQ ID NO: 708399 - DNA, 100 bp, Homo sapiens
ccgccggctactgccgcttcagttctcccggtgtggccacgagtcggatccctgcatgtcactgagtccaccatgctttacagaagaagacagatttagt

SEQ ID NO: 708400 - DNA, 100 bp, Homo sapiens
ggaggaactggagaccccaacccctacccagagaggagatggagaagtaacagcatgtgtttatcctgatggaaagagtccagtagagaggaagagattg

SEQ ID NO: 708401 - DNA, 50 bp, Homo sapiens
ggacggaccctcgccagtgctctgcgcagcttgagaatgccagactgtca

SEQ ID NO: 708402 - DNA, 98 bp, Homo sapiens
cgagcacaccaaggagcgcgtcagtgatcagcagctggactgtgccttggacctaatgaggcgcctgcctccccagcaaatcgagaaaaacctcagcg

SEQ ID NO: 708403 - DNA, 82 bp, Homo sapiens
ggcagtccacccaccgccgccgcctcccaggtgccaggaccattgacaccagaaatggaggcacggcaggctacacggaaaa

SEQ ID NO: 708404 - DNA, 100 bp, Homo sapiens
ttattacaagactacggagcataggaggaaaattcatcatctgccacattctctggcacagaactttggaaactttggggatcacttacttatcttggag

SEQ ID NO: 708405 - DNA, 75 bp, Homo sapiens
gggtcccctccccatacctgagctcgggcaccaatctgaacaaggcgatgacgctgcaggaggccgaggccttcg

SEQ ID NO: 708406 - DNA, 74 bp, Homo sapiens
ctgtggtgcctggggctgaacgcggctttctggtttgaagatcagcttcagcaatggttgtctgaagactcagg

SEQ ID NO: 708407 - DNA, 82 bp, Homo sapiens
cccattttggacttgtgacctccgggacgcttctgcagaaagccgtcattacacctgattttgaaaaaaaccactgtgttcc

SEQ ID NO: 708408 - DNA, 100 bp, Homo sapiens
caacagcgaggaagaagaggacgacgacgacgaggaagaggaggtttctgagaataacaagcctttgtattcatttgaagataatgcagactatgtttat

SEQ ID NO: 708409 - DNA, 100 bp, Homo sapiens
ggggtcacttagactaccccaggaacccgcgccgcgagggctccttccctcagacaatgcagatcttcgtgaagactctgactggtaagaccatcaccct

SEQ ID NO: 708410 - DNA, 96 bp, Homo sapiens
tgcttcgggctgcgccagcaagcggggccggtggcgcccgtgtcggagaccccgcgccggaccctgaggcagcgatggagttcacagggcccccac

SEQ ID NO: 708411 - DNA, 100 bp, Homo sapiens
tggcagtggcaagacagcagccttcctcatccctctgctggtctggatcaccacacttcccaaaattgacaggtggacccaagagccatatcagtgctag

SEQ ID NO: 708412 - DNA, 75 bp, Homo sapiens
cacgaatcgccgcagcccccagccttgcgcgtcgtcgctacctcctcggacagagatcagggaagatgtgccttg

SEQ ID NO: 708413 - DNA, 100 bp, Homo sapiens
cctcggagacatccgactctgagtcagactctaaagacacctcaggtattacaggtaaaatcccagaggaatccaaagccctctctttattggctcctgc

SEQ ID NO: 708414 - DNA, 100 bp, Homo sapiens
cgagttctcgggcagaggcgacctccccgcgttccatgcgcacagggacagggacttaattcagtgcacaaatgagatgaatgtgaacatcccacagttg

SEQ ID NO: 708415 - DNA, 75 bp, Homo sapiens
ctctctcatcgaggcccaaaccgccaagagccactgacaagactttaagcaagagacggagagttaacatctaat

SEQ ID NO: 708416 - DNA, 100 bp, Homo sapiens
acaatcccattattcagagcgcgtatggagtggaaacgcttgtagggtttcaccaggtatttaacatgaagtcgctccagattgtgttacctgcccgagc

SEQ ID NO: 708417 - DNA, 97 bp, Homo sapiens
aaccagacccctgtgtcatcctcaagatgcagtctcatgggcagtggtttgagcaaatggttatgagccttagagtttctgaactccaagtactgtt

SEQ ID NO: 708418 - DNA, 75 bp, Homo sapiens
gggatgtcaaaacttgaacttattgacttactggctagaattctgcttggtcagaatcgtgatggcattgtgttc

SEQ ID NO: 708419 - DNA, 75 bp, Homo sapiens
ggccaagtcagccacctggacgccacttccggctcctgcgtcgctccggaagcctgcgagttccggaagccttgg

SEQ ID NO: 708420 - DNA, 100 bp, Homo sapiens
tattactaaagacttggatttccaactccaggaccctttccttctctacagaaatgccagatgtgcaatggatgagcttcatagtctggatccaagaagg

SEQ ID NO: 708421 - DNA, 75 bp, Homo sapiens
tcagtgcagtgtctgacttgtgacaggatgacccagcagatggctgggatgaacttctatggagccaatggcatg

SEQ ID NO: 708422 - DNA, 90 bp, Homo sapiens
tgggtccttccatcctgcactgccgcgttctacacgtggactacgcactcaagatgaggacggggacttggttgccttttccagtgacga

SEQ ID NO: 708423 - DNA, 50 bp, Homo sapiens
gaggagctgagcgagcgcggaaggcaagaaaattggatgtatattttgaa

SEQ ID NO: 708424 - DNA, 100 bp, Homo sapiens
tctctctcagatggtcttcctgttcacctagcaaacatagcagatgaggtgggatatgagcctcttcctccaacaataggacgaaatatttttgggcggc

SEQ ID NO: 708425 - DNA, 100 bp, Homo sapiens
tggaggcagaggtggcatgggtgagtccatgacagaagaaaccctgaaaagggcaaaggagattgggttctcagataagcagatttcaaaatgccttggg

SEQ ID NO: 708426 - DNA, 96 bp, Homo sapiens
cccagcgtggatgagggcgcctgcagatcccggctagggcacggaccgcctaggccgaggttgaggaagaatttgaaatcattcatcattgttcat

SEQ ID NO: 708427 - DNA, 83 bp, Homo sapiens
tgctgaagtaatgcaatggtctcaatctctggaaaaacttcttgccaaccaaaggaaaccaatgaaaagcgtgctggtggtgg

SEQ ID NO: 708428 - DNA, 80 bp, Homo sapiens
aggagctggcatgacgtgcaggtctctagcgcaggctgggaggcggcagaatgcagccagaggagggcacaggctggctg

SEQ ID NO: 708429 - DNA, 100 bp, Homo sapiens
gcctctcccaggacccgcctggctgcgagatatgtgcactttacaggtccccgatgaaccaagagaaccctccaccatatccaggccctggtccaacggc

SEQ ID NO: 708430 - DNA, 75 bp, Homo sapiens
atctctgttccaaatgctttgctggatgacgtagctttgccaaagacttagaagctaagcagaaaatgagcttaa

SEQ ID NO: 708431 - DNA, 77 bp, Homo sapiens
cctgctggctggctcccactcatcctgagaatctggacgaggctagagaacagaaagaaaagagtcctccagaccag

SEQ ID NO: 708432 - DNA, 96 bp, Homo sapiens
cacggagttccggtacaagctcctgcgggccggcgggtgtactaatggtcacttgatgtgcgctggctgttttatccacctactagcagatgcccg

SEQ ID NO: 708433 - DNA, 100 bp, Homo sapiens
gccaacttagagcctcgtaccaatctctctgtctttaaaagatgaggtgacttggtgattttcctggaaaattataggaaaccactgattgcttgtgtgg

SEQ ID NO: 708434 - DNA, 83 bp, Homo sapiens
cttcccggcgagtccgcgacggtcgccgcccacggcgaggccctggccaacgtcaacattgggagcctcatctgcaatgtagg

SEQ ID NO: 708435 - DNA, 90 bp, Homo sapiens
ccaaccctttggcccccgatggccacgatgtggatgatcctcactccttccaccaaagaggtgtggtggaaaggtcttccagaaccagag

SEQ ID NO: 708436 - DNA, 75 bp, Homo sapiens
agagtgaagatctcgaaggatttcataggaatcattgtagtcaatcattttccagttctcagccgctcagttgtg

SEQ ID NO: 708437 - DNA, 75 bp, Homo sapiens
gcttctctcgtcaaaaatggtgcagaatttacgatcccttcccactggaggcatgtgatgagaggaaatcaccga

SEQ ID NO: 708438 - DNA, 75 bp, Homo sapiens
gcagttgcttagagacaacctaacagtgttggggatgtcctttgcactgaccctgaactgccagattgacaaaac

SEQ ID NO: 708439 - DNA, 107 bp, Homo sapiens
tggtcaatattgtcttaacatgcttcaaataaatcagatttgtattgaacgatgtcttgagaggggaaagagtagtggtaggagtgatgacaacagagagagcttgg

SEQ ID NO: 708440 - DNA, 74 bp, Homo sapiens
gaacagcatgggtgtctcctccaccaaggctgagctccgtgtggactgtgtccctggccagtgtccttccacct

SEQ ID NO: 708441 - DNA, 101 bp, Homo sapiens
gccgagcaagcaaggataagtgaaaccacccctactcctaatcccccgactacagaagaggagaaaacggaatctaatcaggaggttgctaacccagaaca

SEQ ID NO: 708442 - DNA, 50 bp, Homo sapiens
gaggaaccacacgctgatcatggttggtgaaaaccctgtgtccttggaga

SEQ ID NO: 708443 - DNA, 100 bp, Homo sapiens
caatctgatgaaaagtcaatacaaaactaccatccttttgcagagacagggtttcgtcatgttgtccggtctggtcttgaagtcctgggctcaagtgttc

SEQ ID NO: 708444 - DNA, 96 bp, Homo sapiens
ctgactggggttctgagactccctgtcccggaccgcaggtgctggagaatctggtaaaagcaccattgtgaagcagatgaggatcctgcatgttaa

SEQ ID NO: 708445 - DNA, 100 bp, Homo sapiens
cttgtggatgctttttctcatgttgccagagttacactgttagaccttatgatagccaagataacgagtgatgagccactcaccaaggatgacatccctg

SEQ ID NO: 708446 - DNA, 50 bp, Homo sapiens
cacagattcactgtgtaacctgggctttggagtttaacccttctgccaat

SEQ ID NO: 708447 - DNA, 82 bp, Homo sapiens
gtgtgctgacgacctgctacaacagaagaggtgtgattgcctatatcagttcttccagctcagcctcaagccctgcctcttg

SEQ ID NO: 708448 - DNA, 100 bp, Homo sapiens
cccagatgaacgtcacagcccccaccagtccaccagtgcagcagaatatgatgaactcggcttcaggtgggtttgctgagttctctcgttgtttccctgg

SEQ ID NO: 708449 - DNA, 50 bp, Homo sapiens
ccgcggtggagcgggacacgaacgtggcctgcattgatgagaacctggag

SEQ ID NO: 708450 - DNA, 75 bp, Homo sapiens
tgacgtgatggtgaacggcaagagttgcatgctgagaatttgaaaaatgaagatgatgtagacactggactatta

SEQ ID NO: 708451 - DNA, 95 bp, Homo sapiens
ctattccggcgcctccactccgtcccccgcgggtctgctctgtgtgccatggacgggagcaggccgggctctcgccatgggtcactgtcgcctct

SEQ ID NO: 708452 - DNA, 100 bp, Homo sapiens
acacggcagccacgggggcagccgtcgcagtcgccgtcccacacgggctgcggacaccaagggttgctaagtgagtatattgctccatgtgactgtcggc

SEQ ID NO: 708453 - DNA, 88 bp, Homo sapiens
tggcagacctgaacaatgatgggttgttcggaatcctataattgaaaaacagtaaagatggaaaaccagttattgaatatcaagagga

SEQ ID NO: 708454 - DNA, 75 bp, Homo sapiens
acagatgaagacagatgcaccaacgagatctgaaactcagcaccgaggctctgctccccactctgagagtgatct

SEQ ID NO: 708455 - DNA, 98 bp, Homo sapiens
agagtcgctggagcgggcggagctgtgcgagagcctcctcacttgggtttacccaaggtccagcctagcccctaggcaccatgtcggacagtgatcta

SEQ ID NO: 708456 - DNA, 75 bp, Homo sapiens
cgggatttacgtggagatcaagcgcagcgatgatttcctccttcttcacccctgaaaccatatccaaagaagccc

SEQ ID NO: 708457 - DNA, 75 bp, Homo sapiens
aatatttgcgattattgaagctgcttaatgtccatgtgaggaactgtggctgcaccatctgtcttcatcttcccg

SEQ ID NO: 708458 - DNA, 102 bp, Homo sapiens
cccagagtccgcgaatcctccgctccgagcccgtccggactcccccgatcccaggcccttcgtgtatctatggaagagcagcggcagcggcaggaggaggag

SEQ ID NO: 708459 - DNA, 100 bp, Homo sapiens
aagaagctcatgactgtgcgcatcgtcaagcatgccttcgagatcatacacctgctcacaggcgagcccatgcaccttataaatgggattactggcctca

SEQ ID NO: 708460 - DNA, 87 bp, Homo sapiens
ggtgctggccctcagcagtcccggcctctggcagcacttgccccaaaggtactttgaactcaagtaaacaaaagggaagattttctc

SEQ ID NO: 708461 - DNA, 98 bp, Homo sapiens
gatacagcaataccaccttcagtacttggcaagatttgatgctcttgtgctcagtgacatcattcagttcctctgtgacgagggtgcaggtatctctg

SEQ ID NO: 708462 - DNA, 97 bp, Homo sapiens
agctatcctgcgctacagtgagggtttggagaagctgaaggacatgaaagtgctgtacaccaaccgagcccagtggctgccttttctctatcctctt

SEQ ID NO: 708463 - DNA, 88 bp, Homo sapiens
agattcgcagtggtcgcttcttctccttgattgcccccgaggaattagcacttgttcacaacttgaggaaaatgatgaaaaatgattg

SEQ ID NO: 708464 - DNA, 100 bp, Homo sapiens
atgagacccagtggtgggatgccccgagcattgtgggcctcatcatcttcctcctgtgcaccctcttcatcaggtctcagcttgactatgaagttcccag

SEQ ID NO: 708465 - DNA, 98 bp, Homo sapiens
ttacacaggggacaaagcaagtccagatcagaatgcttcaacccacacacctcagtcttcagttaagaatgatatggaacctagcaaagctgttccac

SEQ ID NO: 708466 - DNA, 124 bp, Homo sapiens
atccaagtcccggtggtgtgagatccagtgtggcaaaaaggcgaggattaaatccaccacacagggtgaaatctatctccatgacaacattcacacaacaggaaattgaattcttacaaaaaca

SEQ ID NO: 708467 - DNA, 82 bp, Homo sapiens
gtggaagcggcccccgcagacgctcggcaggctgaaggtgatgtggccgccctcaaccgacgcatccagctcgttgaggagg

SEQ ID NO: 708468 - DNA, 100 bp, Homo sapiens
attactgaaactcagtgcactctaggtttccctaggacttctgcatgcccatgccacacatatcctgtggcccccagagcgctggcagaaattggaatct

SEQ ID NO: 708469 - DNA, 100 bp, Homo sapiens
atggaagatttgatgtgggtcgctatggaggctgaagacttgaagatgctaatcagacacatggagcactgggcacataggctattccctaaactgcagt

SEQ ID NO: 708470 - DNA, 90 bp, Homo sapiens
cgacgggtttgtgagcctggactcgccctcctatgtcctgtacagttaagtgggcagaccaacatccacctcagcaaaaacttcttcctg

SEQ ID NO: 708471 - DNA, 76 bp, Homo sapiens
ggagccgctgtgtgcaaagttcctattgatggtccccccatattatggctgattgtcctcacacaattggtgttga

SEQ ID NO: 708472 - DNA, 101 bp, Homo sapiens
gggctgcgggagccgggctaggacgccgagcggtgactccccgccgctcccgggggccgtgacgatatttggagttcttacaacatggcagacattgacaa

SEQ ID NO: 708473 - DNA, 100 bp, Homo sapiens
ttattttttctcatggatgttcttcttcgagtatttgtagaagggtggagccgccaccaaaatgcagattttcgtgaaaacccttacggggaagaccatc

SEQ ID NO: 708474 - DNA, 75 bp, Homo sapiens
tttctcacgacgggccgagcctgccactcttccatgaggcaggctgaacctgcagatatgcgcccagagatatgg

SEQ ID NO: 708475 - DNA, 50 bp, Homo sapiens
catttggagggtttctcatttggcctggactattagaagacacattagtg

SEQ ID NO: 708476 - DNA, 98 bp, Homo sapiens
ccagcttcttgcaaaaggactgttctttgtggaggagaagatcaagctgtgtgaagacatccgtgttcctggatctcaggacttcgggcttggactga

SEQ ID NO: 708477 - DNA, 90 bp, Homo sapiens
cttcactgggatgatgcgctgcagccagctggcccccagggccctgcagtcatccactccggggactacttcctgtttgagtccgacagt

SEQ ID NO: 708478 - DNA, 98 bp, Homo sapiens
gccaagtgaaaggcactatcgagattggaaccacagaagttctaggcctgattcttcactacctgagacgtctaaaaaggagcacatctcagctgaaa

SEQ ID NO: 708479 - DNA, 90 bp, Homo sapiens
agaagctgaatatgctgcattagacaaacgagaggatggaagttccagctctgatagtgacctaagtctgtcttcaatggtctttcttaa

SEQ ID NO: 708480 - DNA, 83 bp, Homo sapiens
cttggggggcgcctgctgccaagggctgggccagtaataaaggtgaaaattccaaaagataaggatggtaaaccaaagcagtt

SEQ ID NO: 708481 - DNA, 82 bp, Homo sapiens
ctcggcgatggtaggcgtccctggagcggccgccttccagcgctcggttttccgggacgagtttgatctggccattctccag

SEQ ID NO: 708482 - DNA, 74 bp, Homo sapiens
cgggtgtctcgtgtgtgaacatcacagtttgagccccagctacatagatctgactgagtgtccctacatgtggc

SEQ ID NO: 708483 - DNA, 87 bp, Homo sapiens
tggcagcgaccgatatagctcgccaggtgaatttacatagtacatgacgaagttaaggataaagcttttgaactagaactcagctgg

SEQ ID NO: 708484 - DNA, 100 bp, Homo sapiens
tgcacggaggagtcggcctgccgccgcggcggcatctgggtctacttccccagcaggacagcatcattctcctatatcttctagacatcactcatcttcc

SEQ ID NO: 708485 - DNA, 90 bp, Homo sapiens
gaatttcttacattttagagatggaggaagaaacttcagtcctatggccgggctccgaagatgattcacctagagtctaactttgttcaa

SEQ ID NO: 708486 - DNA, 100 bp, Homo sapiens
gccaggtgctggcgccgctgcccctccacggaggttgatgataattagaagcatgctttccactgaacttcccgacaacatttgttatgcagaatgtctc

SEQ ID NO: 708487 - DNA, 100 bp, Homo sapiens
tgaccacctgctctcacccacgaaaggcatctgtcccaagcaggagaacattgcaggacttcctgatccatttgctaaggtggtggttgatggatctggg

SEQ ID NO: 708488 - DNA, 83 bp, Homo sapiens
tccgctcctcccagttcctaagagaaataatgcaaaaggtgtcccaaggctcctgaccagtgaacaaagatttgagaaagaca

SEQ ID NO: 708489 - DNA, 82 bp, Homo sapiens
gccagagtttgtagcctattggaggaaaacacaccaagccaagaagtatgatgcgtttttggcctcagagtctctgatcaag

SEQ ID NO: 708490 - DNA, 97 bp, Homo sapiens
tatgatatgctaagaaagaatcttgtcactttagccactgctactacagggatcgcccggagcccacacccgtcctccgctctgcatttccctacga

SEQ ID NO: 708491 - DNA, 100 bp, Homo sapiens
tcaccactttagcacagaagaacccagaagagtttaaaacctccgtgtctctggctgtctctaggctaagcagacaaatagctgaagagagccagattcg

SEQ ID NO: 708492 - DNA, 75 bp, Homo sapiens
ccaccatcttcgacttgagcgaagttttatgcaaggtggctgaatccacagaggagcctgctggttctaatcggg

SEQ ID NO: 708493 - DNA, 101 bp, Homo sapiens
cagaagtaccacaacagggacacctggttccagctgcagcacgtggacgctgactcggaagtgcagatgctcctggagaggtggtaccctctggggaatca

SEQ ID NO: 708494 - DNA, 98 bp, Homo sapiens
ggtggaagacttgcagaaagaacctggaagacagaggctggagttcacagaaggctccttattggatgggctgtactggaagatgcagcccagcaacc

SEQ ID NO: 708495 - DNA, 83 bp, Homo sapiens
ccaggcctgcgtccgagtctccgccgctgcgggcccgctccgacgcggaagaaagaagatgctgatatgctacaacacggatg

SEQ ID NO: 708496 - DNA, 95 bp, Homo sapiens
gatgaagcttctgaaccatccacacatcataaagctttaccagggttaccttggctttcattgggatcagtttgctggttataggaactacactg

SEQ ID NO: 708497 - DNA, 96 bp, Homo sapiens
gagaactttgcacatgtaacatccctgggtgtcatggagaaactccagctgggcccagagattctgcagcgggaaaatccaaggcttatttatgcc

SEQ ID NO: 708498 - DNA, 100 bp, Homo sapiens
aaaaagagtaacggaaatccttgggtttgaagatgatgttgtgattgagtttatattcaaccagctggaagtgaagttgaatgcaatgataacagaaagc

SEQ ID NO: 708499 - DNA, 100 bp, Homo sapiens
atggcctcctccgcctcctcctctcccgcgggcaccgaggactccgctcctgcccagacggagtctcagtggcgtgatcctggttcactgcaacctctgg

SEQ ID NO: 708500 - DNA, 54 bp, Homo sapiens
tggagagaggccgcgtcctgggcagaggatggccatttggaaacacgatgtgca

SEQ ID NO: 708501 - DNA, 83 bp, Homo sapiens
cctgcagcgggagctggacggcgagcgcgagcggcgcgagaaaggaccatcccgcggtcatcaagcgacgcttcaccagcgtc

SEQ ID NO: 708502 - DNA, 104 bp, Homo sapiens
ccgcgaggaggcgcgggaggtgttcgagaacgaccccgagacggtgctggagaatctggtaaaagcaccattgtgaagcagatgaggatcctgcatgttaatgg

SEQ ID NO: 708503 - DNA, 111 bp, Homo sapiens
aaccaccaccttcaagggagtcgaccccaacagcaggaatagctcccggttttgaacgaagaatgtgatcagaactggtacaaggcagagcttaatggaaaagacggcttc

SEQ ID NO: 708504 - DNA, 74 bp, Homo sapiens
cagtcattttactgtcaagacatttcttcggcattctgcaacaggcttatgcaagcaaagatctggaggagcag

SEQ ID NO: 708505 - DNA, 101 bp, Homo sapiens
cgcgagcggcgagccggagcgcggagcccggctcccgcaccatggaggaggacgacagctacggctatttgggggcttggtgctggacatcaagcggaagg

SEQ ID NO: 708506 - DNA, 90 bp, Homo sapiens
ggatggcaatgtccacgtatcacagaggagaatctgtgttacacagagcaatgaaagaatcttcaagagggagacatagggaaaaggaag

SEQ ID NO: 708507 - DNA, 76 bp, Homo sapiens
ttttgattaccactgacctgctgaggaagaagaggtggataagatgatggaacagaagatgaaggaagaacaggag

SEQ ID NO: 708508 - DNA, 100 bp, Homo sapiens
gccagtgagcgccgcggccgccgcagccatgaccgtggagttcgaggagtgcgtcaaggactccccgcgcttcagaggatgcggctgtgaaggggcggct

SEQ ID NO: 708509 - DNA, 100 bp, Homo sapiens
cggcatggtgccaagcttctctacgcatttgctgaggcaactgtacccaaagtcacagtcatcaccaggaagggttatgtggtccgaatcagtggtggga

SEQ ID NO: 708510 - DNA, 72 bp, Homo sapiens
gatccagaagctcttagccagcactcgctatccacctccaggactcaacgatgactctgaataatgtcacca

SEQ ID NO: 708511 - DNA, 82 bp, Homo sapiens
cagccgaggccgccgccgcctctccttgctgcagccatggagtcactatcatatgacaaaggctttgccgcagttcatcttc

SEQ ID NO: 708512 - DNA, 99 bp, Homo sapiens
atcatacagagtttacttgtggtttagacttcagtcttcagagccccactcagatgtgcactgggaactacacctttgttccttacatgataactccac

SEQ ID NO: 708513 - DNA, 50 bp, Homo sapiens
ccagtgctactgcgtccatactctctgctgccgcccacccctcgtcttct

SEQ ID NO: 708514 - DNA, 50 bp, Homo sapiens
ctgctgcataagaccttgtcagagcccaccttgggacaccttgactccaa

SEQ ID NO: 708515 - DNA, 83 bp, Homo sapiens
gtgaaatcagaggagatgtaactatcggtataccatacttttcacgatgaggtggatgagtatcggcgacactggtggcgctg

SEQ ID NO: 708516 - DNA, 50 bp, Homo sapiens
cgtttgttcaggaaccaccagtgacagaggatgccaaggcctgcgtagta

SEQ ID NO: 708517 - DNA, 75 bp, Homo sapiens
ggaaagaagagggggaaatgcggcggcggccccaatcgagggccaattcctgtccccccagcagcatggcatcgt

SEQ ID NO: 708518 - DNA, 80 bp, Homo sapiens
cccaccgaagacgaccatgacgagctctagctggatgggcgcagaggaacaggcctttgagagcagccagaagtacaaag

SEQ ID NO: 708519 - DNA, 100 bp, Homo sapiens
gagtctggggctgtcgctgtgctctcaattctgtggtgttcttggtcacacatttatggagtttctgaagggcagtggagattactgccaggcacagcac

SEQ ID NO: 708520 - DNA, 87 bp, Homo sapiens
tccgccatgcaaggctggcgcgtctccatggaggtcttagaaaaataccccaatacacccatgagtcataaagaaattcttcaagtt

SEQ ID NO: 708521 - DNA, 79 bp, Homo sapiens
ccggcttcctcatcgtggccgagatcctccagaaacatgacaaggaggactttcctgcctcttggagatcagaggagga

SEQ ID NO: 708522 - DNA, 100 bp, Homo sapiens
cccggcgccaggccacccggccgtcagcagcatgcagggtccagcctgatgagtgaagaggctaagcgaggagcacccaacccttggctctttgaggagc

SEQ ID NO: 708523 - DNA, 110 bp, Homo sapiens
ttcagcctggactcattcagaaaaggcagttgcagtggtgcagaatggctgacctcagtcttgcagatgcattaacagaaccatctccagacattgagggagagataaag

SEQ ID NO: 708524 - DNA, 100 bp, Homo sapiens
cagtagttaggattcaggccaaactggtaaatgacgaaggggcttcttccagagccaaggaggaagggttgtccggtgaaaccaatccgtaatctaaatg

SEQ ID NO: 708525 - DNA, 90 bp, Homo sapiens
gttcaaggaggccttccagctgtttgaccgaacagctcctggaatgaggccgcccatgggaggccatatgccaatgatgcctgggccccc

SEQ ID NO: 708526 - DNA, 82 bp, Homo sapiens
tcgcagcccccgcgggcgcagccctttgcgcagccgccgggaccctggcccctgtcgagggccaattcctgtccccccagca

SEQ ID NO: 708527 - DNA, 50 bp, Homo sapiens
tcgcagtggtcgcttcttctccttgccggcccaggcctttgtggtgaagc

SEQ ID NO: 708528 - DNA, 75 bp, Homo sapiens
cgacatcaagagctgcgagatccaacagatggatcacgacccgaggaaccccgcgtacatcgccacccagggacc

SEQ ID NO: 708529 - DNA, 75 bp, Homo sapiens
cctgctgcggctgggggtgctgcgccagaacctccggaacccgaagctggagaaagcggagatattggagttcgc

SEQ ID NO: 708530 - DNA, 50 bp, Homo sapiens
aattgatctatgttggatcagttttaaaatcaaagatgggaaaatcggag

SEQ ID NO: 708531 - DNA, 88 bp, Homo sapiens
tatctgcgccccctgctggttgtgcgaaccccgggcagcccgggaaatctccaagtcagaaagagacgagttgtactgctgtcacagg

SEQ ID NO: 708532 - DNA, 91 bp, Homo sapiens
tcgagaagtccggaagcttgtggcgctgaaaacgaacgtgtaaacaggaacatcgataagtagtgtaaaaacttgcacaatgaaatccgaa

SEQ ID NO: 708533 - DNA, 100 bp, Homo sapiens
ctctgacccagtttccacttcccaagaaccttctggccaaggtgattcagattgcaacgtcatcctccacagctaagtgtggcaaaggagcagagaactt

SEQ ID NO: 708534 - DNA, 83 bp, Homo sapiens
cagcgatccgcgggctggcgacgtagaggaggacgcctcacagctcatctttcctaaagaagaagaaaggagggcgcgggcta

SEQ ID NO: 708535 - DNA, 73 bp, Homo sapiens
ccagcaagcccctgcacgtcatcaagggtgagaaggactggcagaaatacgagactgctcggcggctgaaaaa

SEQ ID NO: 708536 - DNA, 87 bp, Homo sapiens
cctggcggtggacgagcaggaagctgcggctgagtcggactgggcgttcatcaacaccaacatctttgccaggaccaagatagaccc

SEQ ID NO: 708537 - DNA, 75 bp, Homo sapiens
tcaagaatgaagctgcggaccctcgcgaataatcatgggccagactgggaagaaatctgagaagggaccagtttg

SEQ ID NO: 708538 - DNA, 100 bp, Homo sapiens
taatactcctcctctaacatgtcagcgttattgtaatgcaagtgacaacatccgggaattcttgctgagcctcagatactttcgaatcttcatcgccctg

SEQ ID NO: 708539 - DNA, 50 bp, Homo sapiens
acatggaggagaaggtccgcttcaatgagaaagatcagtctaaagaaaag

SEQ ID NO: 708540 - DNA, 98 bp, Homo sapiens
cggtggcctcaccagcctccagcagcagaagcagcgcctgatcgagtccctccggaactcacactccaggctcctggatttggatttggaattgcaat

SEQ ID NO: 708541 - DNA, 82 bp, Homo sapiens
tgggaagttaatgtttacggcgaagtctactcaacgtttccaagggctttgttcgcgggggtcacagctctcatggctgcag

SEQ ID NO: 708542 - DNA, 75 bp, Homo sapiens
ccagaaacaactgcgggcccacctggaacaagtggacaagaccatgtctgcaaaggagaagtcgaagtttgaaga

SEQ ID NO: 708543 - DNA, 73 bp, Homo sapiens
gaccgatccgtatactgcagcaggattggctgcagcagctacattagcagtgcccttggtttctagaatatgc

SEQ ID NO: 708544 - DNA, 98 bp, Homo sapiens
cccttgtggaattacaagagatttcgactgtggaagccccgtcgcagaatttagtctcaaaggaaacttcaaccacagcactgcaggcctctgttgcc

SEQ ID NO: 708545 - DNA, 50 bp, Homo sapiens
ttccaccaggccgggaagcccatcgggccctgggaggagcggggacactg

SEQ ID NO: 708546 - DNA, 75 bp, Homo sapiens
agatggtgccagcaatatcttcaggtgtaacgtctttaaatccaagaagaagctacgagttccagggagctctgt

SEQ ID NO: 708547 - DNA, 80 bp, Homo sapiens
ccagcctcggcaccgtcctttcctttctccctcgcgttagtttggtgccctggttgtcagatgttggaaagcagtaggac

SEQ ID NO: 708548 - DNA, 132 bp, Homo sapiens
cggggaacgactgcggcgcgctgctggacgaagagctctcctccttcttcctcaactatctcgctgacacgcagacaatgcagatcttcgtgaagactctgactggtaagaccatcaccctcgaggttgagc

SEQ ID NO: 708549 - DNA, 100 bp, Homo sapiens
attgtccggagatacctactcaggcggcagctcgggcagggggacagtgtggcactgaaggggggccgtggcagtgcttccatggtccagaagtgcaagc

SEQ ID NO: 708550 - DNA, 98 bp, Homo sapiens
gcagggcggagcctcccctcgcagttcaaaaggtgatgacctatcaacagccattctcaaacagaagaaccgtcccaatcggttaattgttgatgaag

SEQ ID NO: 708551 - DNA, 75 bp, Homo sapiens
gatcccaatttccacgacccggagaccggaggcgtccgagctgggccacagcctgaacgagaacgtcctcaagcc

SEQ ID NO: 708552 - DNA, 100 bp, Homo sapiens
tctgggagccttcctgatccgggagagtgagagctccccaggggagttctctgtgtctgtgaaggactttgaacatgtcggggatcgccctcagcagact

SEQ ID NO: 708553 - DNA, 100 bp, Homo sapiens
cttgccacattagagtcggtcctaacaaaatcttgaggagctccaccacagtcaaggtttttggtgcgtataatttgctctgcgtcgactcctatatcaa

SEQ ID NO: 708554 - DNA, 90 bp, Homo sapiens
tataaagccccagtctctcagtattgcctcaaatgctgctcatggaagatccaaatccggtctggaggcggctggtggaaatccaattcc

SEQ ID NO: 708555 - DNA, 100 bp, Homo sapiens
ccggcctagcgtcctggaattacttcaatcaatgataaacaagcaactttgattcctgatgaggtgtttgatgcagtaaaaagcaacatcgtcacttcta

SEQ ID NO: 708556 - DNA, 100 bp, Homo sapiens
cagcggaggtgggtcttcgtgctgctcgacgtgctgtgcttactggtcggggtggcctggaggccaagcagatgtggcagttctgcagcagaagcatctg

SEQ ID NO: 708557 - DNA, 74 bp, Homo sapiens
ctggtgcttcagaatatgatcaggattggtcttgatttgagcaatggtaaacctcgagacaacaaacaagcagg

SEQ ID NO: 708558 - DNA, 98 bp, Homo sapiens
gagagacctaaacatcgttgtccacgtccagcattatgagaacatggacacgagaacccccataaataatcttcctgtcccctttcctccaacccaac

SEQ ID NO: 708559 - DNA, 100 bp, Homo sapiens
ctccccgcgttccatgcgcacagggacaggggctggccagctaaactatgtggatccagctactggctatgtggtgctcacacagattgcccacttgcaa

SEQ ID NO: 708560 - DNA, 102 bp, Homo sapiens
cgagcgtcgccgccgccgccgccatgaacaactcgggcgccgacgagatcgggccaagactaaggggctgcagagcggggtggacattggcgtcaagtactc

SEQ ID NO: 708561 - DNA, 97 bp, Homo sapiens
agaaagacgcagagttaaaggcggttacagtatagccaggatatacccagtcacttggccgatgagcatgcgctgatagcctcctatgtggcccgtc

SEQ ID NO: 708562 - DNA, 96 bp, Homo sapiens
tggggaggagccaagatgcatggacccagctcagcgggacgcgccgctggagaatgaaggttgaaatcacaaagattagacacctttttagatagg

SEQ ID NO: 708563 - DNA, 92 bp, Homo sapiens
cagaaaggagccccgcgagtggcgcgccggggatacaatgcagatcttcgtgaagactctgactggtaagaccatcaccctcgaggttgagc

SEQ ID NO: 708564 - DNA, 75 bp, Homo sapiens
tggctctcacgtggaggcggggaaatttcgcccaccggatcatcctgaacatggggtcctgtttcttgttcgaga

SEQ ID NO: 708565 - DNA, 98 bp, Homo sapiens
agtaacaacaagctcatgtgcaggggccagtgagaaaaagaaatttttggatcgaggaaataacaatgtaatgagcaattatgaggcctacaagcctt

SEQ ID NO: 708566 - DNA, 80 bp, Homo sapiens
tgcatacggcctcaggacatcaaggagcgccgagcagtcatcatcctcaggaataattcgccaaaatgacgaacacaaag

SEQ ID NO: 708567 - DNA, 73 bp, Homo sapiens
cggtgccgagccggggcgaagctggatcccctagggagaaacaaaggcagcgctgccctcgggggagcattgg

SEQ ID NO: 708568 - DNA, 75 bp, Homo sapiens
ctggccaaagaattgcagttagaagaagaagctgccgtttttcctgaagttgcacggatcaacgtgggctcccgg

SEQ ID NO: 708569 - DNA, 98 bp, Homo sapiens
gggaaggggacagaagatggccaagaagagaaagccccccagcatcaaggcgcttctctgaagtagctttggaaagtagagaagaaaatccagtttgc

SEQ ID NO: 708570 - DNA, 50 bp, Homo sapiens
agcctcctgagtagctgacattacagggaccactgacatttagggatgtg

SEQ ID NO: 708571 - DNA, 89 bp, Homo sapiens
gattcgttacagccagagattgctaacccactcctagaagcctttggaaatgcgaagactgttcgcaacaataatagcagtcgatttgg

SEQ ID NO: 708572 - DNA, 83 bp, Homo sapiens
gaggaaacagcatcatcctcagaggatgaggaggtcataagtcaagatccagaacacatattacataatggagccgggagaca

SEQ ID NO: 708573 - DNA, 74 bp, Homo sapiens
aatggcgtggtgcctgttgttaaggaattaatgggggagtccgggaccatgtctggagaactaccaccaaacat

SEQ ID NO: 708574 - DNA, 83 bp, Homo sapiens
cacacctccattggatttaaaagacagtcctcgtcagcactgactttcagctatggaatcgctgagaaagtggaactccagag

SEQ ID NO: 708575 - DNA, 75 bp, Homo sapiens
cgcgaatatcgtcatcgttagaaggtggctgtagctaccttctgcatatggatatccagttttcccagcaccact

SEQ ID NO: 708576 - DNA, 90 bp, Homo sapiens
gtgaagtgtcctgccaacaatatggagtacctgggtaccggaagctggtgaaggacatggaggacggcctgatcacatcgggggactcgt

SEQ ID NO: 708577 - DNA, 50 bp, Homo sapiens
gacaatatcatgcaagtgtggcaaatggctggggtgcaatggtgcgatct

SEQ ID NO: 708578 - DNA, 100 bp, Homo sapiens
gtgggtgtggaggaggaagactggatgccaatgatcctattgctcgctgtaagcagctcatctgtgaccccagctacgtaaaagatcgggtagaaaaagt

SEQ ID NO: 708579 - DNA, 100 bp, Homo sapiens
atgacttcgtctctcctgccctggagctgagtggggcgctccgcttctacgacagatccgacatcgacgcagtctacgatatatcccctggggcagctgg

SEQ ID NO: 708580 - DNA, 98 bp, Homo sapiens
cctgctttgccctgggaaatagtaaccctgccaaatacatcagcttgtaggagacagagcattccatattggaagaagagatttctacacatgaaaaa

SEQ ID NO: 708581 - DNA, 83 bp, Homo sapiens
aaagtctaccatacaaaccagaccaccttcataattggagaaacaccaaaaggaatccgcagttaataaaggtatccatggag

SEQ ID NO: 708582 - DNA, 98 bp, Homo sapiens
ctaaaagactgaaatgggggcgaccattcttagttagagatgtttatgattacttccgagctgtcctgcagcgtgatgaaagaagtgaacgagctttt

SEQ ID NO: 708583 - DNA, 100 bp, Homo sapiens
aaaggagacgtcagaacgtggcttatgagtacctttgtcatttggaagaagcgaagagtgtaaggagaggatgaggcccgtgaaaaaggcactgaaacag

SEQ ID NO: 708584 - DNA, 75 bp, Homo sapiens
atacctactagtcagtttcctccagctgtcggaaaaggtaacagaagatggaactcgaaatcccaatgaaaaacc

SEQ ID NO: 708585 - DNA, 83 bp, Homo sapiens
cctggaccaaccacgtcttcctgggctgcagcaatcatcctcttccagtggtagcgtgtttgggtctggaaacactggaagag

SEQ ID NO: 708586 - DNA, 100 bp, Homo sapiens
ggaacttgtgattgagcagtttgaagacttgctagttaggattttattactggcagcatgtatatcttttgtggaaaaggattattcatacctgaaggag

SEQ ID NO: 708587 - DNA, 100 bp, Homo sapiens
agcagccactcttcagcttggtggactttgaacaggtggtggatcgcattcgcagcactgtggctgaggccctgaagcagagaccacgatttgtagcttt

SEQ ID NO: 708588 - DNA, 74 bp, Homo sapiens
aaatgcgcagagcaaacatctttcaaagggatttcttgtggctctcctccgcctatcctaaatggccggattag

SEQ ID NO: 708589 - DNA, 82 bp, Homo sapiens
ggactcctgacacttccccttccccaccgaaccgcgggacagcatcgtggccgagctggaccgagagatgagcaggagcgtg

SEQ ID NO: 708590 - DNA, 100 bp, Homo sapiens
ctgtcagagggaaagactgtgcagtaattgtcacacagaagaaagtacctgtggcgacatgtctaagaatgtgagccagtcacagatggcaaaattgaac

SEQ ID NO: 708591 - DNA, 82 bp, Homo sapiens
gctcctggttcaacgaggccattgacttcataggattttttatcaagcagaaatgcatcgaacaacgagaatcaagatcact

SEQ ID NO: 708592 - DNA, 101 bp, Homo sapiens
ggcggcgtgaaagtcgtgatatcatcgttgaactgtggccctggtacagtggacggaaagtgtgggcttaaccctggtgggccgagaccagtcttccatgc

SEQ ID NO: 708593 - DNA, 83 bp, Homo sapiens
ttgagattgacgcggtgaactctgtccagttttcaaaccacacaggttatggaaacaaaggacatgctttacatcgtcactga

SEQ ID NO: 708594 - DNA, 75 bp, Homo sapiens
catttttttctgcattgtgttcctactgagcaacccaagatggccagggtgcgcttctccgagaaggtcactgtc

SEQ ID NO: 708595 - DNA, 90 bp, Homo sapiens
agttttctagtccctcttacttgaagcatgtctttcagagcccggcaccacccatcttgagtatctgccgccgccatgtctgcgcatctg

SEQ ID NO: 708596 - DNA, 101 bp, Homo sapiens
ttaaagccatattggagtagcgaggaatctgattccaagcaaaaaccaggaagcgagcagctgcaaagcatctaatagaacgctactaccaccagttaact

SEQ ID NO: 708597 - DNA, 100 bp, Homo sapiens
cagcgctgctggcgggcgttagggcaaggtgcccggcgacgactgcccgctggtgtggggccagtgctcccactgcttccacatgcattgcatcctcaag

SEQ ID NO: 708598 - DNA, 100 bp, Homo sapiens
ggagacccatctggactaccaaggagaagctatagactacttctactccaccaggaaggtcatcatcagatttgaaatatttaaagtggatacaaaacta

SEQ ID NO: 708599 - DNA, 100 bp, Homo sapiens
ctgaagaagtaagacaactattagagaccatggcgaggaatgaagtgattgctgacattaattgcaaaggtcgaaaatttaaaaagttcaataaagtcag

SEQ ID NO: 708600 - DNA, 75 bp, Homo sapiens
gatatcgacgtcgtgatccagaagtccagagctgaggactgcctgtttgcagctcagcgatgagttgaaccagca

SEQ ID NO: 708601 - DNA, 100 bp, Homo sapiens
cttgaatttcagattctggaaattcagttataggtgcacagcgaaggagaagccccagtgcactagccattgaagtatttgaagcacatttgggaagcca

SEQ ID NO: 708602 - DNA, 82 bp, Homo sapiens
ccatcgtcatcctgctgctgaagatctggaagacgcgctcctgcgccgggtggactccattatgctggtggaagagggcttc

SEQ ID NO: 708603 - DNA, 83 bp, Homo sapiens
aggccaaaaatgtgcatactcacagagttagagagagggatggtgcactggaagatcaattcttttatcatccatactttaga

SEQ ID NO: 708604 - DNA, 82 bp, Homo sapiens
agaggtcccaatcccccactctttccgccctaatggaggtctccagtttcgggccatgaagcccccaggaggagaatcgagc

SEQ ID NO: 708605 - DNA, 75 bp, Homo sapiens
gtgaaaaataccacgacaaaaccaccctagctcctctgctgaacagcccctgggcgggagactcaggaagctgag

SEQ ID NO: 708606 - DNA, 100 bp, Homo sapiens
agcggagtaacacacagctgggtgggggcacagccacataaagaagatccctaatagtcatttctcaacaattatatagtcaactgatgtaacaatggta

SEQ ID NO: 708607 - DNA, 100 bp, Homo sapiens
cacggcgccccgggggtcatccacatgctcatgcaggcgtacaagtttgccaaggcacgagtaacaagctcacgcagttgggcacttttgaagatcattt

SEQ ID NO: 708608 - DNA, 120 bp, Homo sapiens
gcgaacgagtgacattggctgacatcacagttgtctgcaccctgttgtggctctataagcaggttcgttccaccagtcataaaccagatgaaatctatggcatgattgaaagactatctc

SEQ ID NO: 708609 - DNA, 101 bp, Homo sapiens
gcagagccccaattcctacttcatggatgtgaaatgcccaggatgccgaggaatgtgacagggctgggagtgtggccacctgccaggccgtcatgcgtgcc

SEQ ID NO: 708610 - DNA, 100 bp, Homo sapiens
caggacccacctcgccttcctcccggcgtggcagatgctccagccaggcgggcaccacggcaggggctgagctaccctcatggaagggagaggaccgtac

SEQ ID NO: 708611 - DNA, 75 bp, Homo sapiens
cactaactgccaagagagaatccagcattgagatgtggtatggtgtattcctgtgggcactggtgtcttctctct

SEQ ID NO: 708612 - DNA, 82 bp, Homo sapiens
aggtcaaagaaaaagttcaaaaactgaaggactctgaagctgaggccgtttgagcaaggaagacattgaacgtatggtccag

SEQ ID NO: 708613 - DNA, 75 bp, Homo sapiens
cacgagggcaggttcagagaagcaccgtctgcgtcctgctgtccttccccttcatcttcagcccctgcctgggct

SEQ ID NO: 708614 - DNA, 99 bp, Homo sapiens
acgaacctggacattgaggagctcaagagagtattatgagggaggccgaggacttcatgctccggacagagaaacggcgctgggattagggattgccac

SEQ ID NO: 708615 - DNA, 100 bp, Homo sapiens
gtccaccatcttcctcttgctgccagtggtagcgctcgtctggcggagctggggaaaggggcgtattcgtcgaggaaactatccaggtccatcgtctcct

SEQ ID NO: 708616 - DNA, 82 bp, Homo sapiens
ggtggactccttcggcagtccacccaccgccgccgcctcccagctatgacatggtgcattacggccactccaaccagctgcg

SEQ ID NO: 708617 - DNA, 90 bp, Homo sapiens
gcgacggaaatgtgtcatcgaaagccagagcagttgaagacatctcttcatcgaggactaacccctacagttatgcaatgagtactgaag

SEQ ID NO: 708618 - DNA, 80 bp, Homo sapiens
gaactttctaagatggatccagagggaagcaaattgttggatgatcgctggccgcgcgccgaacccgagtccggcggcac

SEQ ID NO: 708619 - DNA, 75 bp, Homo sapiens
gacgtcatcacttgaggcagcaggacacattcagctaacgtattttagcaggtggagtgaggttgaagattcctg

SEQ ID NO: 708620 - DNA, 100 bp, Homo sapiens
cagcgctacctggctgacggcaggctgtaccatcgccactgcttccggccagaggcattgatgtgcagcaggtttctttagtcatcaactatgaccttcc

SEQ ID NO: 708621 - DNA, 83 bp, Homo sapiens
gttctgtcaatggtctgtgctgaccctgtctacaaagtgtacgttgctgctttacaagcttgggcaacagatgatgtagctca

SEQ ID NO: 708622 - DNA, 98 bp, Homo sapiens
ggcagccttttcaatgccaactatgacgtccagaggagccggtgaaacctgaagaaggcagagatatggcaaacaggattggcgcttttgggtacatg

SEQ ID NO: 708623 - DNA, 50 bp, Homo sapiens
cagaacccgccatctcctggttcagataactcagcctctccagagtgcag

SEQ ID NO: 708624 - DNA, 100 bp, Homo sapiens
ccaatgatgtatggaaagcagcagagtttctacaaatgctagaagctatcaaagcccttgaagtcagggatccagattagatgatcaaagatgtgctcca

SEQ ID NO: 708625 - DNA, 71 bp, Homo sapiens
agaaggtggacgtgctggtgtctgagtggatggggacctgcctgctgcctaaatgcgatggccaggtatta

SEQ ID NO: 708626 - DNA, 110 bp, Homo sapiens
gaccaatatttggtatactgggcacaatccatctggtggcaggtgctggagaatctggtaaaagcaccattgtgaagcagatgaggatcctgcatgttaatgggtttaat

SEQ ID NO: 708627 - DNA, 50 bp, Homo sapiens
cttggattcagcaaggaaccttccggtggattggactctaaatattggag

SEQ ID NO: 708628 - DNA, 90 bp, Homo sapiens
gcctttatttctcgtcggcggcgccctgcaccgcgcctcgcaaagaaagcggagggaaaggccacttccaccactgagctgccccccgag

SEQ ID NO: 708629 - DNA, 90 bp, Homo sapiens
gttaaaggcaagatcgacaccatgaaggttgtcccagttttggtgcatctcctgtctgctatcagcagtgttaggctttacattcctaaa

SEQ ID NO: 708630 - DNA, 100 bp, Homo sapiens
ttggctccagaacttagacctttgcttatgcaaatcagaaaaacagaatggactaggactcagttaatctatgccagcaattatgacaatgttagcagac

SEQ ID NO: 708631 - DNA, 100 bp, Homo sapiens
ttcctgtacagcctgcagaactgccgtaagttcatcatcgccaacgctcgggtggagaactgcgccgtcatctactgcaacgacggcttctgcgagctgt

SEQ ID NO: 708632 - DNA, 95 bp, Homo sapiens
gccatggtcactgcattaggaaaaaggttcccctccagactctttgcaccaaagctccctctgaggaagattctttgtcctcagttcccatttct

SEQ ID NO: 708633 - DNA, 118 bp, Homo sapiens
tgaattcctgtccttactccctctttaagattgcgtacccactgcagagtgctgaagacggggtagccacgaggtcatcatcagatttgaaatatttaaagtggatacaaaactattt

SEQ ID NO: 708634 - DNA, 82 bp, Homo sapiens
ttcgccttcgccctttccacctcgcggcagttcggaaaaatatattcagggggaagagatgtaatagatttcacattatggc

SEQ ID NO: 708635 - DNA, 75 bp, Homo sapiens
gaaacccagcttgatatgttggttccattacagcttatagaaagtgttgaatgccgagatatatttcagcttcat

SEQ ID NO: 708636 - DNA, 100 bp, Homo sapiens
cctgccgcctcccgggagtgccgtgcgccgcagcccgggcccaggccccggcagcgcctgggacaagttacttacacgccaagtcaatcatccacagaga

SEQ ID NO: 708637 - DNA, 50 bp, Homo sapiens
attgtgttgaagagattctgaaggaggaattttgttgtcagagaataaaa

SEQ ID NO: 708638 - DNA, 75 bp, Homo sapiens
tgctatgaggatgacaaactctggagtaattggagccaagaaatgagtatagatattgatgatgttaagaagttc

SEQ ID NO: 708639 - DNA, 98 bp, Homo sapiens
aaaggtagctggatccgtagaggttctttcagagcacggcttcggccccatcactaccgacatccgggagggacagactttctactatgcggaagact

SEQ ID NO: 708640 - DNA, 98 bp, Homo sapiens
tgatggcctctggctccaacaatgcagtcatttacgtgcacaacctgaagactgtcataggttatccggtgttggctcctgctgcttactatgaccaa

SEQ ID NO: 708641 - DNA, 82 bp, Homo sapiens
tcaagtacatcataatcggcgacacaggaccttaaaggctttgatccaggagagaaatactttcataacacatcatggggtg

SEQ ID NO: 708642 - DNA, 50 bp, Homo sapiens
ggggaaaaaatcccaaggtctgcaaagattgaccgactcatcagtcacgg

SEQ ID NO: 708643 - DNA, 74 bp, Homo sapiens
ccacagttactttatcccttcatctgtggatgggcagcctcagcctgaagccctcggaggcccctgaactggat

SEQ ID NO: 708644 - DNA, 80 bp, Homo sapiens
gctccggctccggcttctgctgttgctcttctccgccgcggcactgatccccacaggctttaccgccagcacctgttcag

SEQ ID NO: 708645 - DNA, 51 bp, Homo sapiens
tcgcagtggtcgcttcttctccttggtgatggagaggtgattgaacaaatt

SEQ ID NO: 708646 - DNA, 100 bp, Homo sapiens
tctaaaggagcccatcgtgcgggtcttgcaaaggcctggcaacctcattctttaacgagaggaacataaatattactaaggatttgttggatcttcttgt

SEQ ID NO: 708647 - DNA, 82 bp, Homo sapiens
ctggtgaccaacttgctgcggtttttgttcctggggctgagtgccctcggttgtgaccgagattcccgacgagagagactga

SEQ ID NO: 708648 - DNA, 75 bp, Homo sapiens
cgagtggctgtgctggaccagcagatccacttggaaaagataaacattgacgatcttgaggatgaccctgtggtg

SEQ ID NO: 708649 - DNA, 90 bp, Homo sapiens
acagcacgtaccagaggtggaagtccaagtcaaacgcagaaggactgcctcactgagcaaccaagacggaaatgagaaagcagagggagt

SEQ ID NO: 708650 - DNA, 110 bp, Homo sapiens
cctgagtccaaccccatccagcccaggcagtccttgtagtcctctcttggcctttcacttttggagggttttgacccaccacatcagagtgacacaagaaccatctacgt

SEQ ID NO: 708651 - DNA, 90 bp, Homo sapiens
taggattttatatcttactatgtttctcagcagtgtaggaatcagtgtctgtccctgaagggtcattaaatcagctatgttcttcagaag

SEQ ID NO: 708652 - DNA, 83 bp, Homo sapiens
aagcgcactaaatcgtctccaaggatatgctgcaggctgctagtcattatcgccaaaatagaaactctttgtatagaagagaa

SEQ ID NO: 708653 - DNA, 114 bp, Homo sapiens
cggcgccgcggcccgcctggcctgcagcgctcccacccccggcggcggcacgatgccctttgacttcaggagctgggctcaaaatgcagagaactcaaagatattcatttcggc

SEQ ID NO: 708654 - DNA, 50 bp, Homo sapiens
ggctgcgggcgctgaagaagatggggcagagcggcttgggtaaatccacc

SEQ ID NO: 708655 - DNA, 80 bp, Homo sapiens
atgggtaccgcttgccaactttggagggttttggccaaattgggcgagggcacaaaataaccacttaccccttctcaccg

SEQ ID NO: 708656 - DNA, 75 bp, Homo sapiens
tgggaaaatcatggaagttgattactcagtctctaaaaagctaaggctttccttaaagtttcccatgtctcaatg

SEQ ID NO: 708657 - DNA, 90 bp, Homo sapiens
gtgagcgccaatgtccaaaacgtgaccactgaggatgtggagaaggccacagcgccatcatgaccgggtcctataacaacttcttcagga

SEQ ID NO: 708658 - DNA, 75 bp, Homo sapiens
tcaacgtgaggccggaggtggtgcagggggaagacgttttcatcccgctaatcttgggaataagaggaggaagcg

SEQ ID NO: 708659 - DNA, 90 bp, Homo sapiens
ttcagttctctggagccccagattcaacccgtgtacgtgcctgtgcctaaagtacttgaactggcaggaaatgcatcaaaagacttaaag

SEQ ID NO: 708660 - DNA, 83 bp, Homo sapiens
ctctggctgtgcgcgctggcgctgagcctgcagccggccctgccggcgcctccggcatggcggcggccgaggggcccggctac

SEQ ID NO: 708661 - DNA, 74 bp, Homo sapiens
tcacctgcgctgtgatgcctgcagagctgtggcttaccaggtttggaaacgatgtgcagcacttcaaggtgctc

SEQ ID NO: 708662 - DNA, 100 bp, Homo sapiens
gtcggcaaggagagacgtcgctgaggggcttgcctgaagcgagggctgacaatactatgaatgacactgatgttcctttggaaacaactgaatgcatcca

SEQ ID NO: 708663 - DNA, 104 bp, Homo sapiens
cgaaggcaccgacgtcatcatgctgaccaccaatcagatccgtaaggagcacgtgaattgcctctgcttacgttcaggccctgtcctaaacccagccgtctagc

SEQ ID NO: 708664 - DNA, 100 bp, Homo sapiens
tgaaagtgaaaatgttagaagaactcgtgagccggattgatgtgcacagccagagaacaacacatcacacacaggaaacagttgtgctcatgtgatgggg

SEQ ID NO: 708665 - DNA, 75 bp, Homo sapiens
ataccatctcaaagggtaatcttccagttccagtgtctcgccccatcctcaccctcagggttcccagggcccagg

SEQ ID NO: 708666 - DNA, 100 bp, Homo sapiens
caggaacaagacccggacattccaggccacagtcctgggaagtcagatgggattgaaaggggcgtgaggtcccaggaagtggccaaaagctagacagatc

SEQ ID NO: 708667 - DNA, 100 bp, Homo sapiens
cttggagttaatggtctaatttatgatagaggttggaaagaaccatgactgtattcaggaaggcacatgaactgaagcttctgtcagaatgccaatacaa

SEQ ID NO: 708668 - DNA, 87 bp, Homo sapiens
tgcacgtgagggaagcctttggccagaagatcggccacttccagttatgcaaagggtgacctggacatatcttacatcacatccaga

SEQ ID NO: 708669 - DNA, 78 bp, Homo sapiens
gattatggacccggccgaggcggtgctgcaagagaaggcactcaagtttatgaactatttgtcaatgaagattgtaaa

SEQ ID NO: 708670 - DNA, 82 bp, Homo sapiens
catgctgaagcggaggcggccgctgctcgagacctgcctagagctggaacgttacctccagagcgagccctgctatgtttca

SEQ ID NO: 708671 - DNA, 75 bp, Homo sapiens
ttgctggtatttcgaaggactctatccaacctattatatagggttctcgtggcaaccttttactacctttgcctt

SEQ ID NO: 708672 - DNA, 78 bp, Homo sapiens
cccagacaagatggacaccgcggaggaaggaccaagaatcgccttcagccctgtctggtgcatccttggcagaaagtg

SEQ ID NO: 708673 - DNA, 100 bp, Homo sapiens
tgatgaggagcaagaggaccctgcggactactgcaaagggtttgtggatgcacttagatgtttgcaatgagcactgtggctggcatgccccagtgttttg

SEQ ID NO: 708674 - DNA, 96 bp, Homo sapiens
ggagccgtggccctgatccagacctgggcagagacgtgtacagtggccccccgtgaaagacagaattgtggttttcctggtgtcacgccctcccag

SEQ ID NO: 708675 - DNA, 100 bp, Homo sapiens
caaccatgaccaagtgcagaagaaattccgggtagatatgcctggctcaggcagtgcattcatccccaccatcaacgccatcacgaccagccaggacctg

SEQ ID NO: 708676 - DNA, 75 bp, Homo sapiens
aattcgggaacaaatactactacatcccgcagtacaagaactggagaggacccagatgatgtggtaccagttggc

SEQ ID NO: 708677 - DNA, 100 bp, Homo sapiens
gtcgctttccggccaacacagaggtgcctgaaggctggttggggtggtgaggcccgaggcaggtgcacatgaacttgaacagatgcagctgattttagaa

SEQ ID NO: 708678 - DNA, 90 bp, Homo sapiens
tcatatgacaaaggctttgccgcagttcatcttcctccctgtgtactttccatttgccttcctgggatgtcacatgtacttcagtttgag

SEQ ID NO: 708679 - DNA, 105 bp, Homo sapiens
atttatgttgctattggtcaaaagagatccactgttgcccagttggtgaagagacttacagatgcagaatccgtctcttgctcaagtgaaaattgaagaagcaaa

SEQ ID NO: 708680 - DNA, 74 bp, Homo sapiens
ccagcacactcctcgcgagcaaggaggaatgccagctcctgagcaggcctcattggtggaggaggggcaaccac

SEQ ID NO: 708681 - DNA, 87 bp, Homo sapiens
gacagagtggagccatggctagaggacgtggcccagtggaacatcgggagcctccggaccatcctggacatggtggagcgcgagtgc

SEQ ID NO: 708682 - DNA, 100 bp, Homo sapiens
taatcctgatattaagccatcaaatgtggaacctatggaaaaggttggccgttgtccaatgtgttgctgttatctggaactcctacctgtcctggaaggc

SEQ ID NO: 708683 - DNA, 75 bp, Homo sapiens
gcgccgccgctgcagctgccgcgcgtaactctactacgatcgcgggaaccaccatgagtttgtgtccctggtgaa

SEQ ID NO: 708684 - DNA, 82 bp, Homo sapiens
aaaagtttcttaaacttgtggcctcagaacagttgcgtccgtctccaagagagtatgaagagagtgcgtctgtagggcaggg

SEQ ID NO: 708685 - DNA, 87 bp, Homo sapiens
gcccctgagccggccgagcggcgacggaccgcgagatgcgtctgttactagagtggagagtctaccttcgtctcacatgtgccacaa

SEQ ID NO: 708686 - DNA, 50 bp, Homo sapiens
tgatcctccacttcagagaacagggtgagctcttctgcccagcagcctcc

SEQ ID NO: 708687 - DNA, 50 bp, Homo sapiens
agccccgagacatcggactgcagaatcaggaaacccaggcccaacggcag

SEQ ID NO: 708688 - DNA, 51 bp, Homo sapiens
gggctgtgttgacatcaaggatctaccaggactcagaattcatgattgaag

SEQ ID NO: 708689 - DNA, 75 bp, Homo sapiens
ctccccaggaaacttacgatgtgtattgttatgtggatcatctggatgctgctgtaagtaaagatgattccatta

SEQ ID NO: 708690 - DNA, 98 bp, Homo sapiens
tccccagctggtggctggagcgaccccttgttctttggtggcgctggtaacagttaacctcttccacatgcagcatctgcaggctgcttcccttgcag

SEQ ID NO: 708691 - DNA, 100 bp, Homo sapiens
agcgagggtctgaagttcacgactactagaaggggaggggagtggaaaggctctcagtgaaaaagatagttctgccccagagacaagtatgaataccaca

SEQ ID NO: 708692 - DNA, 49 bp, Homo sapiens
ccgggacctcaagtccagcaacaagagatgcaggtcagctcctccagta

SEQ ID NO: 708693 - DNA, 100 bp, Homo sapiens
ctcccaccttctttcttcagccgaggccgccgccgcctctccttgctgcagccatggacggggatctgatgagcttctttcttctggcatcattaacgga

SEQ ID NO: 708694 - DNA, 74 bp, Homo sapiens
ggataatatcttggctgctgtacatgacgtgcttaatgaaagggacacggccaacacggtgaaggaaaagttcg

SEQ ID NO: 708695 - DNA, 99 bp, Homo sapiens
caggccttccaggaatgcccggtgctgacggacccccgctgcaccacctcgtgagcgatgacgtctgcctgaaggtggtggagctctacctgaacgaga

SEQ ID NO: 708696 - DNA, 100 bp, Homo sapiens
tgtgtgtgattatacaagtacaacatatgttggtgtcagaaaccacaggcgaatccataactctgataagccgtacagtcgtcttatgagcatagtgtca

SEQ ID NO: 708697 - DNA, 100 bp, Homo sapiens
gcatccttggagcgagctgagagctcgagaaaaatatgtcgtaactgcaagtgtggccaagaagagcatgatgtcctcttgagcaatgaagaggatcgaa

SEQ ID NO: 708698 - DNA, 100 bp, Homo sapiens
agaacttcctgatctctctcgctgtgagacatgtctgagactcctgctcagtgtagcattaagatcagtgtgcgtgtgaccaccatggatgcagagctgg

SEQ ID NO: 708699 - DNA, 76 bp, Homo sapiens
ctcctcagaaatcactaaatactactctgaggggcttagaaattaacaggggagaccaaattttgaggaaggtgga

SEQ ID NO: 708700 - DNA, 100 bp, Homo sapiens
cttgggaatgaaatgatgtccccaaggactaggccacgcaggggcataaggaaatggtggcaggcacttcctcctaacaagaaggaagtagttaaagaaa

SEQ ID NO: 708701 - DNA, 100 bp, Homo sapiens
agcccggactccatcgactcccccggctcttagactagtatgtccagagcctcctggacatcatggagttcctggacaaggatcccgaggaccatcgcac

SEQ ID NO: 708702 - DNA, 118 bp, Homo sapiens
tttcctcagatttgcagggaacaaactccagaaggccaaatgatggcgttcaggaagtggcttatattcactcaaaccagaatgtaattggatcgagcaaagctgaaaatcacatgag

SEQ ID NO: 708703 - DNA, 98 bp, Homo sapiens
gctcgaggccttcggcaacgccaagactgtgcgcaacaacaattccagccgctttattccaactccacagagtgaccagagagaggacgtggctgaag

SEQ ID NO: 708704 - DNA, 100 bp, Homo sapiens
acggcaagctcggccggggaggcagcgatggctgtaaagtgcctatgaagagtggaatcgatggaagccctgcccatactgagccgtaacccaagcagga

SEQ ID NO: 708705 - DNA, 75 bp, Homo sapiens
agagggcattgtgacatatcactggtccctgcacccagaggctgaggggatctggcggtggagcgctaggatcag

SEQ ID NO: 708706 - DNA, 75 bp, Homo sapiens
tacattgtgaagctcctgggagcctactatcacgacgggaagctgtgggtcgatgaaacaggtgtagaagttaag

SEQ ID NO: 708707 - DNA, 100 bp, Homo sapiens
atagagacgttttccggagggattccatcatagctccccgcagccaccgccacccattggaatggccaacaggggacctgcatatggcctgagccgggag

SEQ ID NO: 708708 - DNA, 100 bp, Homo sapiens
cctgaatgcagtactgaagaactgctttcaattctaagtgtcccacacttacagggaaagcatcacccgaaagtgagaatgcctagaggcaggaatcatg

SEQ ID NO: 708709 - DNA, 105 bp, Homo sapiens
ataaatcagacagaacagttaatcctcaatttaagcctgatctaacccctagaaacagaataactgaagtgaagtgatggactccgatttggagagtagtaagac

SEQ ID NO: 708710 - DNA, 75 bp, Homo sapiens
ctggccgtctccagagccatcggacagagcgggatgccaccagcttgtccaaagggaagttccaggagctcctgg

SEQ ID NO: 708711 - DNA, 87 bp, Homo sapiens
tcctgtgcaggacaaaactcctctctatagtcaactccttcaagcatataagtggtcaaacaaggtggtggtgaagtttattaagaa

SEQ ID NO: 708712 - DNA, 82 bp, Homo sapiens
gggaactgaaactgctcctgcagcgagagctcacggaattcctctcgcgacgagtagaacagcccctctatggtttagatgg

SEQ ID NO: 708713 - DNA, 89 bp, Homo sapiens
cccggtgtggccacgagtcgggttctggcctataggaacaagacattttcagtaatggaagaaggagcttccaggctggggaagatcat

SEQ ID NO: 708714 - DNA, 89 bp, Homo sapiens
cccaccagcatcctccaaagcactgaacgcccggcccaggtgaagaccttcacggcatggtgcaactcccacctgcggaaggcaggcac

SEQ ID NO: 708715 - DNA, 49 bp, Homo sapiens
tggagatatggcgcaactgcggcgcgaaagatgaatgggagggctgatt

SEQ ID NO: 708716 - DNA, 107 bp, Homo sapiens
cgccccgcgaccctcccgcagcctgcctttccttccccctcggaaaatggttcccactgccgggcgaggtactccaaagattcaggtttactcacgtcatccagcag

SEQ ID NO: 708717 - DNA, 118 bp, Homo sapiens
ggctgcccggctctcgcaggcccccccgcgccgaccgcgttcctatggacagacgcacagacacctgcagccatacacactgctgctatggatatgctgggaggacctggtatcgaaa

SEQ ID NO: 708718 - DNA, 98 bp, Homo sapiens
aaaaaggagagcctctgagctcaacggaggattgtgcctgagaagaacccacagagacaagttggatggcttgaggactggtactaaaaggaaacgtg

SEQ ID NO: 708719 - DNA, 75 bp, Homo sapiens
ttcatcctgagttgccaatcattatcacaggttcagaagatggaactgtggctgcaccatctgtcttcatcttcc

SEQ ID NO: 708720 - DNA, 100 bp, Homo sapiens
tgccttatgggacagatcaagttcctgggtggagctacccatgaacagcagcaatggcaatgataatggcaatgggaaaaatggggggctggaacacgta

SEQ ID NO: 708721 - DNA, 80 bp, Homo sapiens
agctccagagcccagacttgcagacaatgcagatcttcgtgaagactctgactggtaagaccatcaccctcgaggttgag

SEQ ID NO: 708722 - DNA, 50 bp, Homo sapiens
tgactttcagctatggaatcgggcgatgccagtccctccactccagagga

SEQ ID NO: 708723 - DNA, 101 bp, Homo sapiens
gccgccgccgccgccgccgccgccaccaccaccgccgctgccccggctgcctcctccctgaggaatcccgttctgcttccagaagtggaagtgctcacgga

SEQ ID NO: 708724 - DNA, 88 bp, Homo sapiens
ctcctaagcctgcacagccgcggcggcagcagcagtgagagatacacaatcatcatcttactagttctctgtgttgctcgctaaccag

SEQ ID NO: 708725 - DNA, 90 bp, Homo sapiens
gcccagacctgcagggttcgtggataataaactcaagcagcgagtcatccagccatgtgaagatgtgcttgcttcccctttgccttctgc

SEQ ID NO: 708726 - DNA, 99 bp, Homo sapiens
catttctgtacaacacaagctggccttggcagtttcggtgcatagaaaatcagaggccagctccaccagggcaagggtttttccctgcctgccactgta

SEQ ID NO: 708727 - DNA, 51 bp, Homo sapiens
gtgaggcctccccagccacgtggaactggactttgaacatgtcggggatcg

SEQ ID NO: 708728 - DNA, 100 bp, Homo sapiens
aaggggcttcacagttcatgggaaatgtataccacccacctacataccatgacatgcttcctgctttttactcccctgccctcaacaagatgttttgcca

SEQ ID NO: 708729 - DNA, 83 bp, Homo sapiens
gcctccacacctaccactacccgtgtgccagcgatgcaggtcaaaatgcagatcttcgtgaaaacccttaccggcaagaccat

SEQ ID NO: 708730 - DNA, 100 bp, Homo sapiens
gagagacctggagaaacagtataacaatgatgacccccacctcagcgagataggaccctgcttcctagagcacgtgatagaaattgaagatgcttcaccc

SEQ ID NO: 708731 - DNA, 120 bp, Homo sapiens
caaaatctgttcccatgcaaaccaatgagggagaagtatcggaagaaagcagttccaaggtctaattggtagctgcaccaattcaagctatgaagatatggggcgctcagcagctgtggc

SEQ ID NO: 708732 - DNA, 50 bp, Homo sapiens
atataattggcagtgatattgagctaatgctgctggaacccaatgtgaat

SEQ ID NO: 708733 - DNA, 75 bp, Homo sapiens
tgttctcgggagccgtggccctgatccagacctgggcaggcgcattggagtgactgtctggcatcaccaagatga

SEQ ID NO: 708734 - DNA, 100 bp, Homo sapiens
gcagctgccttcttggacgcctttcagaaagtggctgacatggccaccaacacacgtgtggctggaatggctggtactgcacatatcgatggagaccata

SEQ ID NO: 708735 - DNA, 75 bp, Homo sapiens
aaggattccaagtaactcttatttgtgtaatgaacaagtctggggtgaatcgtgtagtttggaaacgacctcgac

SEQ ID NO: 708736 - DNA, 75 bp, Homo sapiens
cggaaactaggaagaggaaattaactatctgtacttataaggtgtttgagaagctgcagctgctcaaccctgaaa

SEQ ID NO: 708737 - DNA, 50 bp, Homo sapiens
acctgacacttggcatgacagtgggaatcgtggcttcatcgacatcatgg

SEQ ID NO: 708738 - DNA, 74 bp, Homo sapiens
gaggatgaacactatgattaccaccaggagattgcaaggggcaagattcttgccaagagaattaatgtgcgtat

SEQ ID NO: 708739 - DNA, 74 bp, Homo sapiens
cgggaggtgaatttccatgtcaacatagtcctgatggagcagctatcagatgaagaaattgatcatggtgctga

SEQ ID NO: 708740 - DNA, 100 bp, Homo sapiens
ttgagaaagacaaagatgatgatgaggtttttgagaagaagcaaaaagagatggatgaagctgctacgacagcacccaagaaaacctcatttggctcgct

SEQ ID NO: 708741 - DNA, 98 bp, Homo sapiens
tataatggatttggtaatgatgtgtaaacaggaacatcgataagtagtgtaaaaacttgcacaatgaaatccgaagccaaggatggagaggaggagag

SEQ ID NO: 708742 - DNA, 82 bp, Homo sapiens
cgctgccgctgccgctgccgcacctccgtagctgactcgatgtggacgagtgctcactagcagaaaaaacctgtgtgaggaa

SEQ ID NO: 708743 - DNA, 82 bp, Homo sapiens
cttgcaatctgccaggacaaagacaatacactacgtgagactgaggctgatgtgaatccaaaggcctatccccttgccgatg

SEQ ID NO: 708744 - DNA, 73 bp, Homo sapiens
agtttcaaagcaggatgatgtggttcagcttgaattacccgttacagaggtgacattaattaccaagaatttg

SEQ ID NO: 708745 - DNA, 100 bp, Homo sapiens
gcagttcagaagagccaaggaataaacatgcaatgaacccaaaagggttcctggacatcagtcagtttttatgaatgaaccaaggctgtcagacttcaag

SEQ ID NO: 708746 - DNA, 98 bp, Homo sapiens
ggaaggtctgcattggtctggagtggctctggaaattcacagtttgacaagtatgcgcccaagctggacagcccctacttccgacattccagcgtgag

SEQ ID NO: 708747 - DNA, 100 bp, Homo sapiens
atgatgatccacttccacttaatgaataggttgaaaggaggagcaggaggtactgatggacaaggaggtaccttccggtacacctttcatggcgatcctc

SEQ ID NO: 708748 - DNA, 90 bp, Homo sapiens
catcccggtggccacggccgccgcgctgctggtcggctccagcaccctcttcttcgtgttcacgatgataatgaagataattcaaatgat

SEQ ID NO: 708749 - DNA, 100 bp, Homo sapiens
ctactaaccagagccggctctttctcggacggagagagatgcttcaaattggtccacggataagctgaaaacactgttcctggcagtgcaggttcaaaat

SEQ ID NO: 708750 - DNA, 75 bp, Homo sapiens
agatggacaagcccatgctgaagcaggccggctctggcgtccacgcagtagaagactcagaaagtggtgtttaca

SEQ ID NO: 708751 - DNA, 100 bp, Homo sapiens
agagaaattcaagcaaattcagagattcagccaccaaggggttcagcttattgacttctcaccttgtgaaaggtgtcagttgtacccgaggcgttctcag

SEQ ID NO: 708752 - DNA, 100 bp, Homo sapiens
gaaagaggccttcaagttgttccagatccagttcaaccggagttacctgagcccagaaggcctagttccccgagagcgttcagacagtgggggctcaagc

SEQ ID NO: 708753 - DNA, 106 bp, Homo sapiens
tggagccggagctgggcgcggattcgccgaggcaccgaggcactcagaggaggagagagcaagccacatcagtgctcctggcagatccctgcttccagctacgctc

SEQ ID NO: 708754 - DNA, 82 bp, Homo sapiens
cagacaaacagcccgcccgaccccgtcccgaccctggccgccccgagcggagcctggagggccgagaactactggtggcgtg

SEQ ID NO: 708755 - DNA, 96 bp, Homo sapiens
ccgccatcaaccgccagatcaacctggagctctacgcctcctacgtttacctgtccatgatttatcagcgatgctggttagtattcaagaaagctt

SEQ ID NO: 708756 - DNA, 76 bp, Homo sapiens
ttcaaaaactaatcgtcagacgtctacaaaaggccagcttctttttcgggaagtccaccctcccgttcatggccac

SEQ ID NO: 708757 - DNA, 96 bp, Homo sapiens
gagccccagagctcaatgggggaccacagcatgcacttccttccagcagctacacagggtgattctgggggtccacttgtctgtaatggtgtgctt

SEQ ID NO: 708758 - DNA, 82 bp, Homo sapiens
ccacattctccttccttgagatgatgtggaggatttgccctgccctggctgtggtgtactaatggtcacttgatgtgcgctg

SEQ ID NO: 708759 - DNA, 83 bp, Homo sapiens
cagctatgcaaatatagaacactaaagtgttacatgacagatgtatgagtactatactggcaattgctggagaagattttgca

SEQ ID NO: 708760 - DNA, 100 bp, Homo sapiens
cgaggaggttgggatcttcttcactgcctctggcatggatgaggtcaagagcaatctgaatccaaatgcaaaggagtttgttcctggggtgaagtacgga

SEQ ID NO: 708761 - DNA, 99 bp, Homo sapiens
agaattaattacagggctcgtccaactggtccctcagtcacacatgccagagattgctcaggaagcaatggagtttggtaactctcattcgacatccat

SEQ ID NO: 708762 - DNA, 100 bp, Homo sapiens
gaactttacgtggacatcccatttaattctcagaagccgatcacaaggtgagaagccttataagtgctcatgggagggatgtgagtggcgttttgcacga

SEQ ID NO: 708763 - DNA, 100 bp, Homo sapiens
aatctcactggtctatttcccagtgggtttctaaaccaaggatagtaaagctctgaaggatgaaaatctacctcctgtcatctgccaggatgttgaaaat

SEQ ID NO: 708764 - DNA, 75 bp, Homo sapiens
ctcttcccaaggcttacatacaggagtccttgctggtgcagacgaagcggcgggctctggagaagattgacctta

SEQ ID NO: 708765 - DNA, 95 bp, Homo sapiens
tgcttttggaaaatgagaacaaaaatttaaagaaagatttgaagcactacaaacaagcagctgagcgaggattaaatccaccacacagggtgaaa

SEQ ID NO: 708766 - DNA, 100 bp, Homo sapiens
tagggcgggagtttgtgaggcaatattatactttgctgaataaagctccggaatatttacacagcttcgaaaggcaaggaggaagcttatctatgaaaaa

SEQ ID NO: 708767 - DNA, 98 bp, Homo sapiens
aaaatacaaactggaaaataaagattacagagaaaaaaccaacaccttcctgtgcagtcctgttggaatttttcagacttggttccttcaacctagag

SEQ ID NO: 708768 - DNA, 87 bp, Homo sapiens
cagtttgaggcctttcacgtttttaaggaattacatgaacgacagccttcgcaccgacgtcttcgtgcggttccagccagagagcat

SEQ ID NO: 708769 - DNA, 75 bp, Homo sapiens
cggcgggcagaagccgcccgctctccggagccataagtgtgatccttggtgacaggtggaagaaaatgaagaatg

SEQ ID NO: 708770 - DNA, 75 bp, Homo sapiens
tccgcctatggcacgggactcgaagggggcaccacagggacaatgaagcctttgaagtgccagtctatgaagagg

SEQ ID NO: 708771 - DNA, 97 bp, Homo sapiens
gaggcatctggagctgcagcatggaccagcgagagcccctgcctcccgctcctgcagagctcttcagaaaccaggctgctttcaggaacattgctgt

SEQ ID NO: 708772 - DNA, 82 bp, Homo sapiens
ctctcaccgcgcatgtttggagggaaccatggaagataagatttatgatcggcaagtaactaagcagtcactgtcttttcga

SEQ ID NO: 708773 - DNA, 75 bp, Homo sapiens
aaagcaaagaagaaagcttctaatggggtgtcagcttcctctggtgcaaccagcaagtcttccagtatgaatccc

SEQ ID NO: 708774 - DNA, 100 bp, Homo sapiens
gagtggagtttctggtggtccctgtgggaggcctctcatttttagttaatcacgatttctctcctcttgagtgtatcggatctgtcgttctggaaagaag

SEQ ID NO: 708775 - DNA, 75 bp, Homo sapiens
aaatgatgcaaccctgcagcatgttttaatgagtgactgcattggaggcgttgtactggtaaacctggcagggtc

SEQ ID NO: 708776 - DNA, 88 bp, Homo sapiens
tgccggtgccggcctagcgtcctggaattacttcaatcaagacacagccagtgtgaagtcctctagtagtcttgaacccaatcttttt

SEQ ID NO: 708777 - DNA, 106 bp, Homo sapiens
aatcgcctcgttgcgaagggaccagcgcagccaatcaggcgtcgttgctacctgtagtgaagcgcgcagtggcgagccagccagactctgtggatgcagccgagag

SEQ ID NO: 708778 - DNA, 98 bp, Homo sapiens
tggtattcaacaaataattgagtgctttcgatcagatacctcaaatcagctatgcatccacagccccagagctaagtgataacaccaggtatgacttt

SEQ ID NO: 708779 - DNA, 100 bp, Homo sapiens
ctcaataccttgggcccagtcatgaagatggaacctctgaataacctccaggttgggcccatgagatgtgtgctctgtatattccggaggtacaatttgc

SEQ ID NO: 708780 - DNA, 60 bp, Homo sapiens
cggctgtgtggatgtcggcgaagccgcgggcgagtgccggtggtggtgtgcacattgagc

SEQ ID NO: 708781 - DNA, 98 bp, Homo sapiens
acgtcggggacggctgcgcgggacggctctgtaggaaggaacttggttccccctccctcagcttccgccccaaaagcaataatgacgatgaggacctg

SEQ ID NO: 708782 - DNA, 50 bp, Homo sapiens
aagacatctaatttcattgctcggcaggcaaagccaaagctaattgagcc

SEQ ID NO: 708783 - DNA, 100 bp, Homo sapiens
ctcagcactgcccgacagtcctagctaaacttcgccaactccgctgcctttgccgccaccatgcccaaaacgggctacaggggaagaattgaaagtgaag

SEQ ID NO: 708784 - DNA, 75 bp, Homo sapiens
cgagccggcggggctgcggagggccagtggactcaggctgcctgctgtttcccggggagatcatgaaacgaggtc

SEQ ID NO: 708785 - DNA, 100 bp, Homo sapiens
gctgagtgaaggccgggggctgccccctccccccagcccattgcagatgcaaaggctcctgagaagcgggcctcaccatccaagccagcttctgccccag

SEQ ID NO: 708786 - DNA, 88 bp, Homo sapiens
gccaaagaagttgagaaaatgggagcagttttcatggatgcccctgtttctggtggttaattatagaaaatgccaagtaggaaatttg

SEQ ID NO: 708787 - DNA, 50 bp, Homo sapiens
aatggctttatacaagaagattatggtccttatgtcgtcagaagatcgag

SEQ ID NO: 708788 - DNA, 83 bp, Homo sapiens
cgaagaagcagaagcgtctgctcaggttgcagcaggagagagggcttgtcaatgaggcagatcagattcaggttcgacgggca

SEQ ID NO: 708789 - DNA, 90 bp, Homo sapiens
gtcaaaacagagcttttggaatctgaacaagggatgggcggaagccatttccaattaaccatggtgaaactagtgatgaaactttattag

SEQ ID NO: 708790 - DNA, 100 bp, Homo sapiens
tatggaggtggtgaaattcgtgaactttttgttggtaaatggcttccaaactgcaacgacggacataagaaagctcgaaatgcttatctcaataattcca

SEQ ID NO: 708791 - DNA, 98 bp, Homo sapiens
ttgtgcctgtcattgcaaaagctgacactctcaccctgaaggaacgggagcggctgaagaaaaggtagagacggggtttcgccatgttggccaggatg

SEQ ID NO: 708792 - DNA, 96 bp, Homo sapiens
cccagacctgcagggttcgtggataataaactcaagcagcgagtcatccagcagacggttgatgatgaagcgccggccgtgtaaatgaagatcggg

SEQ ID NO: 708793 - DNA, 75 bp, Homo sapiens
taccttgttcccattctagcgcctagaatttttggctccaataaatggacttatcaaactggtttcaaagcacag

SEQ ID NO: 708794 - DNA, 74 bp, Homo sapiens
gattctggacaatgatggagatcgactttttgccaaggtctggagggtgagcgacctgcgagactcacaagagg

SEQ ID NO: 708795 - DNA, 75 bp, Homo sapiens
ggatgaagtggctccggagatacaggtgatttggcttctgcacagttaggaggagcaccaaaccgatgggaggtt

SEQ ID NO: 708796 - DNA, 51 bp, Homo sapiens
tcgcctggggaggccacaggacacagggctgatcattggcttcatcagcaa

SEQ ID NO: 708797 - DNA, 75 bp, Homo sapiens
gggattgtcaacattcttgtcacactgaaatttccttctactgatctccaaacagagtctttctctgtcacccag

SEQ ID NO: 708798 - DNA, 100 bp, Homo sapiens
gatggcctggagattcatgacaaaatcatggaggatgatgatgctgaagctatccttgctgcagacttcgaaattggtcactttttacgtgagcgtataa

SEQ ID NO: 708799 - DNA, 102 bp, Homo sapiens
catgtggtttggcacccaagtcaggagcaagacactaagggcgactaccagaaagcgctgctgtacctgtgtggtggagatgactgaagcccgacacggcct

SEQ ID NO: 708800 - DNA, 49 bp, Homo sapiens
atgaaccaagcactccttaccataggcaatttgaatcaacccatagaag

SEQ ID NO: 708801 - DNA, 82 bp, Homo sapiens
acaaataatgaaaaagttgttgttaaaattctcaagttggttgaatctggcgatgtggaacccatggatatggagggctgac

SEQ ID NO: 708802 - DNA, 83 bp, Homo sapiens
tttcattgtctcggacgtgcggggcctgggcctcccggtccgcaagcagaaagaagatgctgatatgctacaacacggatgaa

SEQ ID NO: 708803 - DNA, 50 bp, Homo sapiens
cgggaggtgtggaagagccggttgttgaatgttgggtcacgaagatctca

SEQ ID NO: 708804 - DNA, 78 bp, Homo sapiens
ctggctgaagatggctactctggagttgagaaagggataaacagcacttccagggggagaaaaaaaatcatgttatca

SEQ ID NO: 708805 - DNA, 100 bp, Homo sapiens
cagagttccaggcctgcccacagacggtggtgcctcaaaacacctacccaggtggaggcctgaattttgatctatgttctacctacatccagctggctga

SEQ ID NO: 708806 - DNA, 74 bp, Homo sapiens
tgttcttcttcgagtatttgtagaagggttaccatcccaccatttcatgaccctttgaaaaaagcacaatatga

SEQ ID NO: 708807 - DNA, 100 bp, Homo sapiens
cgtgtggtgtgcgcggtggccactgcgctgcggaacatggccttggacgtcagaaataaggagctcatcggaaaacaatgaagagtcgttatatggaact

SEQ ID NO: 708808 - DNA, 75 bp, Homo sapiens
ccgtcatgggcgcctcggccgccatggtcttcagcggtgagaagccctaccactgcaactgggacggctgcggct

SEQ ID NO: 708809 - DNA, 101 bp, Homo sapiens
gaggactacagagccggtgatatgatctgtcctgaatgtggcttggttgtagtctatccagaagttaaaggagagattgctcgtaaagatgaaaagctgct

SEQ ID NO: 708810 - DNA, 82 bp, Homo sapiens
ttaaatcttgcacttcttctgagtgagtacgagctcaactggaggcagtcctgtgcggaaatctgaagaaaaaacagataca

SEQ ID NO: 708811 - DNA, 75 bp, Homo sapiens
gtgttggccgagcagatggccttgaacaagaagttcgctgtcggtggcgctccaaccccctttgaccggaactat

SEQ ID NO: 708812 - DNA, 87 bp, Homo sapiens
cactcggagttatatatgcaggtggatttgggctgtaacttcttcgttgacacagtggtaaacctgctcctccaaagccagagccca

SEQ ID NO: 708813 - DNA, 90 bp, Homo sapiens
aggttcatggagcaagtggtttttaaatatcttcgagctgaacctgaggaccattattttttaatggtggagtttcgctcttgtcgccca

SEQ ID NO: 708814 - DNA, 115 bp, Homo sapiens
aaatgcccaggaggaagcaggagcagcccaagcgccttccctcacgattgttaaaatgagtcttcggaagcaaacccctagtgacttcttaaagcaaatcatcggacgaccagtt

SEQ ID NO: 708815 - DNA, 100 bp, Homo sapiens
ggccaagactatgctgaaccgaatcccacttggcaagtttgctgggaagctggacatgctggtggcttcagtgggcacgggcggcaccatcacgggcatt

SEQ ID NO: 708816 - DNA, 75 bp, Homo sapiens
gccacgatgtgaagcggggcagagccgggggagcccagcccagccagcctccagtgcacgtgccggaaggacatg

SEQ ID NO: 708817 - DNA, 102 bp, Homo sapiens
gggtcttcctcctccgccgttgacaggatgtgatggagctgcttgaagaagatctcacatgccctatttgttgtagtctgtttgatgatccacgggttttgc

SEQ ID NO: 708818 - DNA, 75 bp, Homo sapiens
cgacgctccccaagtaagcctacacttgcctatccagaaagcaacagcagaggcgtggtgaccaagatgaagatg

SEQ ID NO: 708819 - DNA, 100 bp, Homo sapiens
agccatttaccagaaagtgcgtcaccgcatgaacgatgactgggcttacgggaatggtgaccaagaatatggcccaggtgaccaaagccctggacaaggc

SEQ ID NO: 708820 - DNA, 75 bp, Homo sapiens
cagcagcaaattgaagactttcgacaaggaagtgaaacaccaatgcagattcatctgaaaactacattaagatga

SEQ ID NO: 708821 - DNA, 80 bp, Homo sapiens
aggccgggaggccgtgcccggagcaacatggccaacgccctggccagcgccacttgcgagcgctgcaagggcggctttgc

SEQ ID NO: 708822 - DNA, 73 bp, Homo sapiens
actttgactttgatggggctcagaaaaagctgagggaatgtgaatcaccaatggagatcttcgtggatgatga

SEQ ID NO: 708823 - DNA, 48 bp, Homo sapiens
caacattgatgttcctccagcaagggtctcactgtgccacccagctgg

SEQ ID NO: 708824 - DNA, 101 bp, Homo sapiens
tttgggagcctcatcattggttatgccagagatggatttataaaagctattggtcctgctgatgttattcaaagacagttttctggagaaacttttgaaga

SEQ ID NO: 708825 - DNA, 75 bp, Homo sapiens
cagagtaaacctcagcccccgcagccaagcacagtgaaaatgcctcgtgtaaaagcagctcaagctggaagacag

SEQ ID NO: 708826 - DNA, 75 bp, Homo sapiens
gaagaccaggagatcctgcatagccttcacagagagtccagttgccaaggaagagagaagggcacagttacctaa

SEQ ID NO: 708827 - DNA, 85 bp, Homo sapiens
gtagcggtgttgctgttgaaacaggaacagtctcttcaagtgatgagatggccacatgaacacagacacgcagggagaaggcagc

SEQ ID NO: 708828 - DNA, 50 bp, Homo sapiens
ttggtcgaagacagaggttcagctcatcaccctgcggggctccatcctgg

SEQ ID NO: 708829 - DNA, 82 bp, Homo sapiens
cacacagctgcttccattggccagtatgaagtggtgaaggagtgtgtgcagcgctaacaacctgagagaagattacaaattt

SEQ ID NO: 708830 - DNA, 100 bp, Homo sapiens
ggacttcccaacctccagaccggaaggccatggtaaaatttcagtatttgctgtcaaaatggctttagccacattgtgtggagggaagatcatggacaaa

SEQ ID NO: 708831 - DNA, 74 bp, Homo sapiens
gttggagtgctgaaggctgtgcactgtggagagtggagaaatggcatgattcacgacgctggcagctctctgtg

SEQ ID NO: 708832 - DNA, 82 bp, Homo sapiens
tcttccccaggcctgcgtccgagtctccgccgctgcgggcccgctccgacgcggaaggctccaccgaggacaccgcgtccag

SEQ ID NO: 708833 - DNA, 83 bp, Homo sapiens
ttatttgaaggaacgtatattagagggaatctcggaggaaaacaccggtgatcgtgaccctgaaagaaaatgaaagattcttt

SEQ ID NO: 708834 - DNA, 100 bp, Homo sapiens
catggtgcattgcagttgcgtgttgttcagaaagacttgtcagcttgtgggaaagtgacatcagcgtccacccgctaaccctgccctctgcaacctgctt

SEQ ID NO: 708835 - DNA, 90 bp, Homo sapiens
aacggaggcagtggggatgctgtccccagtggaaatgaagtttcggaaaacatggaggaggagaagatgcaagtggaccaggaggaacca

SEQ ID NO: 708836 - DNA, 101 bp, Homo sapiens
atcccgttctctgatttgcagcaggattggatagctttagtcaaagcagctgctgcagctgcagccaagaacaaaacagggagtaaacctcgaaccagcgc

SEQ ID NO: 708837 - DNA, 50 bp, Homo sapiens
cttggtttggacatactacatggatcagggaagagtgacccattttgctt

SEQ ID NO: 708838 - DNA, 75 bp, Homo sapiens
cgtttcaagcatctggccacggggcattacttggcagcagaggcctccccaaagccagtcctgtgtcaccaatca

SEQ ID NO: 708839 - DNA, 74 bp, Homo sapiens
gttattgatctcgacaccaagaagccctgcacccggtctttgacatgcaaggttgcagctgctccctggtggtt

SEQ ID NO: 708840 - DNA, 75 bp, Homo sapiens
gccaggcggcggcggcgactggcaatgtttggcctcaaaagaaacgcgtttggtgccctggttgtcagatgttgg

SEQ ID NO: 708841 - DNA, 51 bp, Homo sapiens
ttgctcatcggatcacccctaagtggccagtgttcgggctgtggaaaaacc

SEQ ID NO: 708842 - DNA, 97 bp, Homo sapiens
ttcggagcctcccctgcagcgactcggaagattcgaggcggcgggggacaagtcggcgccccagagcggacgagtttcgctattcaaattggcttga

SEQ ID NO: 708843 - DNA, 51 bp, Homo sapiens
cagtgatatcattaagtccagatctgggctctgccagcagacagccttggc

SEQ ID NO: 708844 - DNA, 100 bp, Homo sapiens
gaacgccaagcgcttcgccatcgacatagattctttccaccatggccagacgcccccggaacagcagggcctggcacttcgtcctgagtgcagcccgccg

SEQ ID NO: 708845 - DNA, 95 bp, Homo sapiens
aagaccgcgcgcagggcctgcagcgggagctggacggcgagcgcgagcggcgcgagaaactcctggccactctgaatccacttcctggctctgga

SEQ ID NO: 708846 - DNA, 82 bp, Homo sapiens
actccaggacacccctgaagccgagaaatgcccaagaagatgaaaggattgttcttgttgacaacaaatgtaagtgtgcccg

SEQ ID NO: 708847 - DNA, 74 bp, Homo sapiens
gtcaggacatattcgatgccatcgtgatggcggatgagaggaagaaggagagacgaccatcttgcaactagaaa

SEQ ID NO: 708848 - DNA, 90 bp, Homo sapiens
cctgctaacagaactggaccttttcggtttgtgttgctagttaagctagcttgtattgttgtggcttccttcgttctctgctggctgcca

SEQ ID NO: 708849 - DNA, 120 bp, Homo sapiens
ccgcaagtacccgtccatcatagtcaactgcgtggaagagaagttcactgagacttttttgacggagagggacaaacaatccaagtggagtggaattcctcagctgctcctcaagctgca

SEQ ID NO: 708850 - DNA, 100 bp, Homo sapiens
gcattttggaagaggaaccacaagaaaatcaaaagaaacttttgcccttatcagtaacacctgagcttcttggacacttaatgattgttggcaagaaatg

SEQ ID NO: 708851 - DNA, 95 bp, Homo sapiens
ggaggattcagggaataggagctggggagcccttctgcgccacaggtaagaatgattgatgttggctgatattggagtgctcattcacatgaagt

SEQ ID NO: 708852 - DNA, 75 bp, Homo sapiens
ggaactgccaccatcatcagtgagaacttgaacaatgaggtcatgatgaagacgctgcatccaggtagtacacaa

SEQ ID NO: 708853 - DNA, 100 bp, Homo sapiens
cttcatgcagtctctcattggcttctttgagactgaaatggcaggaatggcggcgctagatagtaaggcatcagggaagatgggaatgcgagctgtagtc

SEQ ID NO: 708854 - DNA, 98 bp, Homo sapiens
acttgtggctacacttctggccagtttgacctgggatcagtttgacaacttagaaaaacacacacagtggggaattgatattcttgagaaatatatca

SEQ ID NO: 708855 - DNA, 73 bp, Homo sapiens
aatggcttcagcgcagtatattactgcagacattcaacgtctgcagttggatctgcagaaaatggagcttcta

SEQ ID NO: 708856 - DNA, 100 bp, Homo sapiens
ggggacttggggccgcagggagagctgaagaagcaggtggagagtgccgagctgaagaaccagcggctcaaggaggttttccagaccaagatccaggagt

SEQ ID NO: 708857 - DNA, 100 bp, Homo sapiens
gaagattcgatggacatggacatgagccccctgaggccccagaactatcttttcgttgctctaggtcgtaaccagcctttgaaaaaggagaaaccaaaat

SEQ ID NO: 708858 - DNA, 119 bp, Homo sapiens
aaatcattgcagacattaagaagatggccaagcaaggccagatgggtgtgggccgaagatatgctcatgtggtgttgaggaaagcagacattgacctcaccaagagggcgggagaactc

SEQ ID NO: 708859 - DNA, 75 bp, Homo sapiens
aagagcaggaaggagcgcgagaatgcagttccgcggcagaaggccagcttggagaacagcctgagggaggtggag

SEQ ID NO: 708860 - DNA, 100 bp, Homo sapiens
aacagataagaagcagaaagttgagcgcattgcatcacatgattttgaccccacagcctctccacaaaggagtgtcgatcagagaagtacttcagctccc

SEQ ID NO: 708861 - DNA, 46 bp, Homo sapiens
cttccagctgtttgaccgaacagggaaacaaaggacccatcgcaaa

SEQ ID NO: 708862 - DNA, 101 bp, Homo sapiens
ggacggctgcgtcgcccgaggcgaggaggagcgctggcgtatctggagtccatctttcaccatcttctcctgagattgtactggaccgtgaccactcttct

SEQ ID NO: 708863 - DNA, 50 bp, Homo sapiens
ttctcgaatacctagaatgggtactatactggcaattgctggagaagatt

SEQ ID NO: 708864 - DNA, 74 bp, Homo sapiens
tcactgcagaggtgctggagctggcagcccgagcgggaagaagttccgcagcaagccgcagctggcgcgctacc

SEQ ID NO: 708865 - DNA, 75 bp, Homo sapiens
ctgacctcggtttcctggacccattccgactcaggtgaatcagctcccggccgactttaggattcttctggattt

SEQ ID NO: 708866 - DNA, 75 bp, Homo sapiens
gatcagatctgtttgtaccatatccggaaaagttgtagctttcaaggtgcatgtgagggaaccctggcttgttca

SEQ ID NO: 708867 - DNA, 100 bp, Homo sapiens
cttttggccaggtcttactttgatcctcgtgaggtttgtgaaatggctgctgacatttctgaatccagcggggctgactgcaaaggagacccaaggaaca

SEQ ID NO: 708868 - DNA, 100 bp, Homo sapiens
gctcatgagcagcctgcccaacttctgcgggatcttcaaccacctcgagcggctgctggacgaaggctggcctgccactcctcctgctatgatgcctggg

SEQ ID NO: 708869 - DNA, 83 bp, Homo sapiens
accttctttgcagactttggttggtggaggctgtggcaatggaacaggcttgagaaacaggtcagatgtaccaacagtaccag

SEQ ID NO: 708870 - DNA, 100 bp, Homo sapiens
gcgaggaggctgccggcaagaccaacccggggagggactccagactggtcttaggcaaacccctgggagagggctgctttgggcaggtggtgttggcaga

SEQ ID NO: 708871 - DNA, 100 bp, Homo sapiens
tgcggaggctgcctcggcggagcagaggaaccacacgctgatcatgctaaaagatggcggcaaggcagcccaggcaaatgtaagaataggcgatgtggtt

SEQ ID NO: 708872 - DNA, 96 bp, Homo sapiens
acgctggtggggactcgctctcggcttgaccgcattcttcctcccaggatgtagtaactggagttagtcccctgctcttcaggaaactcagtaatc

SEQ ID NO: 708873 - DNA, 73 bp, Homo sapiens
ttgagcctttttggcctggcttgtttgcaaaggagctcaaaaagtgggatgagtttgaagatattttagaaga

SEQ ID NO: 708874 - DNA, 75 bp, Homo sapiens
tggagatgctactgatgtcaggcatcttcatgatacagttaagaggaatcttgacagcgccacttcccctcagaa

SEQ ID NO: 708875 - DNA, 75 bp, Homo sapiens
cacgttacgctattcgttgtggtccaaaacagtttacctcttatctaacagaggtccagttccggccgtaccgca

SEQ ID NO: 708876 - DNA, 100 bp, Homo sapiens
ttgatctggagaaaaactggatgttggtagaaaaagcaagagtttgttatatagcactatctcccctggttcgaggtattttataagctgcttaacatcc

SEQ ID NO: 708877 - DNA, 75 bp, Homo sapiens
gtgaccatgtggattcaacagcttttaggactcagcccaaacgtgcagaatgccccacaagattggatttgtagt

SEQ ID NO: 708878 - DNA, 82 bp, Homo sapiens
atagactgcacaaggtgaagactgtctgcagcaagttcagagaagccgaactgggattaccatgcagaaatacaagcttttg

SEQ ID NO: 708879 - DNA, 95 bp, Homo sapiens
cgtgaggtggcgcagatgctcaagtccaaacatggaggcaactacctgggaccaaagcagtatccttacaataatctgtacctggaacgaggcgg

SEQ ID NO: 708880 - DNA, 74 bp, Homo sapiens
ccggacccaggatgaagaggttggagatgggaccacatcagtaattattcttgctaccagagattcactgactg

SEQ ID NO: 708881 - DNA, 83 bp, Homo sapiens
attgaacagtaccgcctgcagagggagaaagaattcaaggccaaggaagctgcgcataagcagtactataatggatgtagaca

SEQ ID NO: 708882 - DNA, 82 bp, Homo sapiens
gaggaagtgagagcagcggcagccggcggtgcagcagccggccgacccagagttgtgccgtgcaggtgaagctggagctggg

SEQ ID NO: 708883 - DNA, 75 bp, Homo sapiens
gggctgctgtttctcttcgccgacggatgagttccacccgttcatcgaggccctgctgcctcacgtccgcgcctt

SEQ ID NO: 708884 - DNA, 100 bp, Homo sapiens
ggatgacgaggaatggaagccaacaaaattagttaaggtgtccaggaagaacatccaagggtttcagcacccatttggactttcacaatcagagatggca

SEQ ID NO: 708885 - DNA, 100 bp, Homo sapiens
agatcattcacaatatctgtgtcgttcttggcagaaattatattttccagcccgtgtctgcagtgagtgatggattggaactgagaccgaaatataatgg

SEQ ID NO: 708886 - DNA, 98 bp, Homo sapiens
cggactcccgcggcgggaggagcctgttcccctgagtgaaaatgcctcgtgtaaaagcagctcaagctggaagacagagctctgcaaagagacatctt

SEQ ID NO: 708887 - DNA, 75 bp, Homo sapiens
gagcggagggagccccagacacgactgcttttcaggaagccttggacgctgcaggtgataaacttgtagtagttg

SEQ ID NO: 708888 - DNA, 75 bp, Homo sapiens
gctggtggggactcgctctcggcttgaccgcattcttcctcccaggtactccaaagattcaggtttactcacgtc

SEQ ID NO: 708889 - DNA, 76 bp, Homo sapiens
aactggatatggccaggatgctatagcattgtcagtacggcctttcttagcatcttgatgagatcattaggaaata

SEQ ID NO: 708890 - DNA, 83 bp, Homo sapiens
ggcttctcgactcggtcctgtttcgacagcgaacatgtcgcggcctgtcagaaactaattctgaagcaagcccttatagttgt

SEQ ID NO: 708891 - DNA, 95 bp, Homo sapiens
aatctaaaaagccctcagtaccagagacagaagcagatggattcgtccttttagcctttctgagaaaagtctacagcattctttctctgcaggtt

SEQ ID NO: 708892 - DNA, 125 bp, Homo sapiens
cctcgacctctggttctacttcacactgcagaactgggttctggactttgggcgtcccattgccatggtcatcatcagatttgaaatatttaaagtggatacaaaactatttcagcaatgcagac

SEQ ID NO: 708893 - DNA, 123 bp, Homo sapiens
gttttggagagcaccccttttaccactgcctggttgcagaagtgccgaaagagcactggactccggaaggtggatgagcttttagaaaagtacatggactcttatgatattgttttagtacaa

SEQ ID NO: 708894 - DNA, 73 bp, Homo sapiens
gggaagggccggcccgcctccctggccggggcgcagttcggaggttcagtggaatgcagtagccctctgggcc

SEQ ID NO: 708895 - DNA, 50 bp, Homo sapiens
gcccgtggtccggccatggacgacctcgcttcccacatcacaaactttga

SEQ ID NO: 708896 - DNA, 100 bp, Homo sapiens
ccacaatgaagcagtcggacgcgtctccccaagaaagccacacccactcgcccgggtctatggccacggtcggagagtggtcctgtgtgcgctgcacctt

SEQ ID NO: 708897 - DNA, 82 bp, Homo sapiens
caagttccggcacaccgaggctcggccgccccgccgcgagaatgaaaaaggcaggcattgacctccctctgaggcagtttcc

SEQ ID NO: 708898 - DNA, 100 bp, Homo sapiens
gtttgagccaatagtttctcttcctgagcaagaaattaaaacactggaagaagatgaagaggaactttttaaaataatgtggccccgtcccagagcacca

SEQ ID NO: 708899 - DNA, 100 bp, Homo sapiens
ggaaatgctaccactctcatcagaggttctcccatgggcaggtggtctctctggatgagctgcgccccttccaggacccagacctgagctccctgcaggc

SEQ ID NO: 708900 - DNA, 90 bp, Homo sapiens
accagatatcttgaaaagctgccagaaagtccaatggatgggaccccaatgaaatgttcaagttcaatgaggagaactacggtgtgaaga

SEQ ID NO: 708901 - DNA, 90 bp, Homo sapiens
cagtgatgaagaaagtgttagaaacagtagtggagaatcaaggagtggagtcaacatatcaatggagcaagtcacagtcgtcgatgccag

SEQ ID NO: 708902 - DNA, 82 bp, Homo sapiens
tctcactgcggagaggtgtttggtgcagaagacttatgcagagatggaccccaccacagcagccttggagaaggagcatgag

SEQ ID NO: 708903 - DNA, 98 bp, Homo sapiens
agcggccggtactgttgaaagcgacaagtggaggcgccgctctagcggccgggactctgaactatggcgtctgcgggccaggcatcgacatccgcaac

SEQ ID NO: 708904 - DNA, 58 bp, Homo sapiens
catgagcaaggaggaggccgaccagccccctgaacccggaaaaagcactcgctgcgcg

SEQ ID NO: 708905 - DNA, 108 bp, Homo sapiens
ctgcgctgttcgtgctgctgggattcgcgctgctgggcacccacggagcctccggggctgctgccgcagcgggaaccgcaagagcttggtggtaggaacgccctcccc

SEQ ID NO: 708906 - DNA, 74 bp, Homo sapiens
ggccccctggagggggcagtcccgggagaacctgcggcggccggagcggaatatattcatcgtgtgggtagaac

SEQ ID NO: 708907 - DNA, 100 bp, Homo sapiens
ggagctggtcgcagatcctgagacccggacagtggcagtgaaacaggccaccctggagaaatgtgccacgtgctcccagcccatcctggaccggatcctg

SEQ ID NO: 708908 - DNA, 100 bp, Homo sapiens
ctcgtcatgctctttgtagcgtggtgcttctgttgctcacaggtgactctgttttgagaagtgcaaccagatctctcctggaattcaacacaacagtgag

SEQ ID NO: 708909 - DNA, 82 bp, Homo sapiens
cgggacttccagacactggaaaactggatgctgcagacactgaacgaggagccagtgggattaatgaaaatcaagttccatc

SEQ ID NO: 708910 - DNA, 76 bp, Homo sapiens
agaggtccctggagtttctgcttcctccagagccaggacacacacctcctctacgtactggcagctgccaacctgt

SEQ ID NO: 708911 - DNA, 95 bp, Homo sapiens
gagcatgacccagcgtccacacacaaatccacacgccctgtgaagaaggtctccaccctggtacctgacagtgtaaagaaggagctcctacaaag

SEQ ID NO: 708912 - DNA, 101 bp, Homo sapiens
ccgcaggcagagaagccgggagcgggcgaggcggcggcggcagcagcgatgaatcctcactatggatgggctcattgaggacattaagcatcggcggtatt

SEQ ID NO: 708913 - DNA, 100 bp, Homo sapiens
atccattcaggatgggaaaccacgcaggcaaacgagaattaaatgccgagaaggccagtacgattggctcacagtggttgattgatcaaccccattggac

SEQ ID NO: 708914 - DNA, 100 bp, Homo sapiens
gtgtggcaaggccttcatcagggactaccatctgagccgccacattctgactcacacaggagaaaagccgtttgtagacaagaggagcagcagcggcacc

SEQ ID NO: 708915 - DNA, 51 bp, Homo sapiens
gaagtttctaggaaaggccggacaccagggccgcgatgggcctcttggaac

SEQ ID NO: 708916 - DNA, 100 bp, Homo sapiens
tgtgcccagtggccccaggtgacgtgtcttcaagaagaggctgagctgcggtgcttgtaagatgcagtggcagaacgtggagcacgttggtgaccagagc

SEQ ID NO: 708917 - DNA, 76 bp, Homo sapiens
ttgagaaattggatcttacacttgaaatacagactgttggggaacaagaggtatttgaagaattattgcttgatgc

SEQ ID NO: 708918 - DNA, 82 bp, Homo sapiens
actgactttcagctatggaatcggaagccatcttcgacaagagcacagggaaggttgttttgaagacgttcagcctctacaa

SEQ ID NO: 708919 - DNA, 74 bp, Homo sapiens
ctccttatgtctccaacatggaccgcctgggggactcggaactgctgttttggagtcagcggaagatcaccaag

SEQ ID NO: 708920 - DNA, 100 bp, Homo sapiens
cgcagcccctcggagccagaggagaggcgcccccgccggccgccgcgccgcccggcagcctcggcaggtgctggagaatctggtaaaagcaccattgtga

SEQ ID NO: 708921 - DNA, 83 bp, Homo sapiens
ctctgttaaagctggtctgttctaactgaggccttcatggtgaaacacctcttggagtatacccaggcaacagagtctaacct

SEQ ID NO: 708922 - DNA, 74 bp, Homo sapiens
tggatttaaaagacagtcctcgtcagcactgactttcagctatggaatcgacatgcgtcgggatgtccaggaaa

SEQ ID NO: 708923 - DNA, 90 bp, Homo sapiens
ctcccgccgacatggagctcgattcaggatttcaaatatgcgtgcattagagaatgattttttcaattctcccccaagaaaaactgttcg

SEQ ID NO: 708924 - DNA, 100 bp, Homo sapiens
tgctaagcatggaaacatccaagtcagctgtgtggagtgttctaaccaacaaggaagagtggcagatatgctgttggagctctgtgtcaccgagttggag

SEQ ID NO: 708925 - DNA, 51 bp, Homo sapiens
catgaactcagggccggttgtggccatggactccaacctgtctgtgcacac

SEQ ID NO: 708926 - DNA, 90 bp, Homo sapiens
gaagtagccttagtaataaccctcttttccagtataagtatttggctcttaatatgcattatgtaggtttttcgttggaatatacgttgc

SEQ ID NO: 708927 - DNA, 75 bp, Homo sapiens
gattcgcagtggtcgcttcttctccttgaatcattgaaaaatggctctgctacaggtggtggaaataaagtttat

SEQ ID NO: 708928 - DNA, 75 bp, Homo sapiens
gtaccagtccctctgccccacatcctgggctgagtatgagtttatcagctctggtctctacctagtggtgttatt

SEQ ID NO: 708929 - DNA, 106 bp, Homo sapiens
gcccgcgctgaccggggcccgggccggatgggcgctgcgggccggggcgcggaccgcggagcggccgaccccaccaatttggacaagttcaatgtctctaacttct

SEQ ID NO: 708930 - DNA, 90 bp, Homo sapiens
ggggaacaagtaccgcctgggacggaagatcgggagcgggtccttcggagatatctacctggccttggtcatctataatttcctgagcct

SEQ ID NO: 708931 - DNA, 100 bp, Homo sapiens
ctctgccagtacaactagacccggcgtctggcgtccccggtgcccagcattctgcggggcaggcggctactgcagcactggggtgtcagttgttggtccg

SEQ ID NO: 708932 - DNA, 100 bp, Homo sapiens
caaacatttcagtaatgcagagtcctcttgttggagttacatctactcctggaacagtgctgggcctaaaggagataacatttatgaatggagatcaact

SEQ ID NO: 708933 - DNA, 130 bp, Homo sapiens
actgtttctcttctgcagaaaaagaggctcttcctcctcctcccgcgacgcctagtgtgttaattgtaacctacaaggagcctgcaaaatcatctactcagtttggatcctacaagcaagctgaatggag

SEQ ID NO: 708934 - DNA, 82 bp, Homo sapiens
cctggatccatcttttgtgcatgcgtcgcgccttttggcagaagacaatgcagatcttcgtgaagactctgactggtaagac

SEQ ID NO: 708935 - DNA, 82 bp, Homo sapiens
acggccgacttcgtcttcatgtttctcttcgggggcgtccttatgacccatgggcaaagcctggccttacaccacttccagc

SEQ ID NO: 708936 - DNA, 80 bp, Homo sapiens
gccgagcccggagcccggagcccgggcaagagctggcctccagggtcgtatagacctccccctcctatgggcaaaccacc

SEQ ID NO: 708937 - DNA, 100 bp, Homo sapiens
cagaagtccagagctgaggactgcctgtttgcaggggttgagcattcatgatggtacctggaagtcagcaatttatggttttggagatcagagtaatttg

SEQ ID NO: 708938 - DNA, 74 bp, Homo sapiens
tccacgcaggagatccatgagaagatgggggctccggaggtggcgcccaggctctgagctaccctaggtctgca

SEQ ID NO: 708939 - DNA, 75 bp, Homo sapiens
gtacacatatgagcctcgggatttacccctatgcaaaatggcaatacctgtgctttggaagtttctggagaagta

SEQ ID NO: 708940 - DNA, 100 bp, Homo sapiens
agtcttccagtgctttggaggttcacaagaaatatggtgactcaactggaaccacattagaggagttagaaatggagtcaatatatcttcaaaagcacct

SEQ ID NO: 708941 - DNA, 75 bp, Homo sapiens
tgacagtgaggaggaacaagaggagtgtctgtcacctgcaaatccggggacttcagctgtgggggccgtgtcaac

SEQ ID NO: 708942 - DNA, 100 bp, Homo sapiens
accgaacccagcattttcggcaaccgctgctggcagttttgccaggtgtttgttaccttggggcgacctatctactgctcttgaggtcgccattgactgc

SEQ ID NO: 708943 - DNA, 80 bp, Homo sapiens
ggcgatggtcttcctgctggggctcatgtttgagcaaaatcaccaggacagccaatacaagtggtttatgtaccatccca

SEQ ID NO: 708944 - DNA, 76 bp, Homo sapiens
gttcgtctcttacgtctgcggaagtgcagctgcctcagttcttagcgcagatcctttgcacatggcctgctatcaa

SEQ ID NO: 708945 - DNA, 100 bp, Homo sapiens
gcggagagaggctgcctcctgcagcccccatagcaggtgttggagcgggccggagagaagtagagtgggctgcgaggagaaggaaacaggcctttcggag

SEQ ID NO: 708946 - DNA, 98 bp, Homo sapiens
ggaaggcgtcgtcttctcttaaaattgagaaagatcagtctaaagaaaaggagaagaaagtgaaaaaaacaattccttcctgggctaccctttctgcc

SEQ ID NO: 708947 - DNA, 75 bp, Homo sapiens
aagtgtcaaaatccatagatggaaaagatgctttaaggaagcctcctatttcagtttctcaacatgaaagtcatc

SEQ ID NO: 708948 - DNA, 132 bp, Homo sapiens
caccacctggaattagaaaatgtgtcatatccaccaatatttctgcaacgtctttgacaatagatggaatcagctctgcaagatttgaagggtcccttaatatggaccttaatgaaatcagcatgaatttag

SEQ ID NO: 708949 - DNA, 50 bp, Homo sapiens
gccgggagcggagcccctgtggtgtctttggtgcaacactaacaaggctt

SEQ ID NO: 708950 - DNA, 90 bp, Homo sapiens
ccttaacacagtagcagctggaaccatgacaggcatgttgtataaatgtacagtttcttgcagaacataaattattaggaaacattaaaa

SEQ ID NO: 708951 - DNA, 100 bp, Homo sapiens
cgccgctgctgctgctgctgtgctcaggcctggccggacagattaaagaggatattcctgaaacaaagatgaaattcttatcagttgaaactcctgagaa

SEQ ID NO: 708952 - DNA, 83 bp, Homo sapiens
gacggattcatttagagctgcggaacaggacgccctctgattccctgaagaggaaggagaaggaatatgagcatgaaatggag

SEQ ID NO: 708953 - DNA, 82 bp, Homo sapiens
aagtcctaaaatatctacgaagcaagatcaaaggcatgctgcgaaggaaggtagaagtggtaacacgggttttcgaggatta

SEQ ID NO: 708954 - DNA, 100 bp, Homo sapiens
agctgtggaaagaagttgcaaaacactgggcacacaagccatgccccctcttttctctttgggataccaccagtgccgctggaactatgaagatgagcag

SEQ ID NO: 708955 - DNA, 98 bp, Homo sapiens
taattaaagagtaaagttgtgctcaacgcaccctgttgtccgcaatgccctgttttgcctggagtcagcctggaagacagcacaagaaggggaccatg

SEQ ID NO: 708956 - DNA, 101 bp, Homo sapiens
gaagaagataaaccacattatggattgagagcaatcaagacttcctcggttgtgctgttttactgaggttgggtggagtcaacacatcatggataaagaag

SEQ ID NO: 708957 - DNA, 101 bp, Homo sapiens
ctggtcttgaacactgtgtctcagacatgccaatatttggtttctgtccagcccatgatgatttctacttggtggtgtgtaacgactgtaatcaggttgtc

SEQ ID NO: 708958 - DNA, 100 bp, Homo sapiens
ctcgaagtgcgcaaacttgacactcaccctgaccggttttatgaatgaagctatggctacagattccccaagaagacccagtcgttgtactggtggagtt

SEQ ID NO: 708959 - DNA, 98 bp, Homo sapiens
tcagttctcccggtgtggccacgagtcgggatgaggatgggacagaagaggataacagtcgtgttgaacctgttggacatgctgacacgggtttggag

SEQ ID NO: 708960 - DNA, 101 bp, Homo sapiens
ggctggaggggctgctgctgggaacacctggagtctccgcgggcagcttctttatgaaaaaggcatcagcctcagggcctccttcatcttcatctctgtct

SEQ ID NO: 708961 - DNA, 58 bp, Homo sapiens
ggaagagctgggtcgactcaagtctgttcggcacttgaagtactccttgtttaagaaa

SEQ ID NO: 708962 - DNA, 75 bp, Homo sapiens
gcttggaaaaacgtgtgggtacgaccttggttactcaaatgagtcgtccagacttgattctctttctgatgaaat

SEQ ID NO: 708963 - DNA, 80 bp, Homo sapiens
tggaaggagaactaaatgggagaagaggaatgttccctgacaatttcgttaagtgggtaattccagaattgattggccat

SEQ ID NO: 708964 - DNA, 87 bp, Homo sapiens
atcccattcagcaaagtagagttccccatggtagaatgtcaaagaaatggcagatgtccttaacccattaatcactgcagtatttct

SEQ ID NO: 708965 - DNA, 51 bp, Homo sapiens
gtttccttcagtctcacctcaagtgacatcctataccccaaggactcgtcc

SEQ ID NO: 708966 - DNA, 49 bp, Homo sapiens
gcagctgtactaggactgggaacgggttgtgaactaaaggccgacaaag

SEQ ID NO: 708967 - DNA, 100 bp, Homo sapiens
gaattgtacggcacttggcgtaaagccgcttccctcaagagtaactacaattccatgccattgcagtgtcaactaggcctcagttacttttcagtttgcc

SEQ ID NO: 708968 - DNA, 100 bp, Homo sapiens
ctcaagagaagctgcaagagcaacatctttcctcaccccaagcagcaaagtggggcaccaaggccctgtgctaagcactcataatcctctgggggtgcta

SEQ ID NO: 708969 - DNA, 87 bp, Homo sapiens
tcgaggctctccctgcacagcatcgcgcagaacaaagggatcaggctgaccccgcactacatctacccaccagccatcgtgcagccc

SEQ ID NO: 708970 - DNA, 98 bp, Homo sapiens
cctgttcgcagcgtggattttaaccgaggcacggacaacatcaccgtgaggcagggggacacagccatcctcagaattgatgaattgcaagtttgtgc

SEQ ID NO: 708971 - DNA, 75 bp, Homo sapiens
gacatcaccaagctggaggtggacgccatcgtcaacgccgaatctccgccacctccctactctcggctgtctcct

SEQ ID NO: 708972 - DNA, 75 bp, Homo sapiens
tacaaggccaagttcatctcctccgtcaccagccacatctaccaggacgccaacaaggagagcagcaagacctcc

SEQ ID NO: 708973 - DNA, 75 bp, Homo sapiens
gagcttccgggagggcggctcgcagcttccccgggcgctgcctggacaggcctgcctgcgtgctgggacatgtct

SEQ ID NO: 708974 - DNA, 100 bp, Homo sapiens
cttcgacccaagcaacatgccacctggcattgaggccagtcctgacaaaatgcttcaggttcacgcctacatcatcagctccctcaagaaagagatgccc

SEQ ID NO: 708975 - DNA, 75 bp, Homo sapiens
ctgaacctggtgttttagaggataccttggtcccagagtcatcatgaaggactacaggaatatgtggaagctgtc

SEQ ID NO: 708976 - DNA, 51 bp, Homo sapiens
ggatgaaggagcagatttactagaggcatttcatccttcatgaagccattc

SEQ ID NO: 708977 - DNA, 87 bp, Homo sapiens
caggctgatggcggaggcttcgagtgacccgggtgccgaggagcgggaagagttgctggggaaggaacaccagccagccgtggaacc

SEQ ID NO: 708978 - DNA, 98 bp, Homo sapiens
ctttcttgagcccctccaaggttctcctatttggactctgctgcagatcccttgccctgactactgtcagaggatgtaggaatggacatcccctttga

SEQ ID NO: 708979 - DNA, 121 bp, Homo sapiens
cgcagggctgcgggactacaatcttcgcatgaaatggaagagagggtggtgcggatagcttgaggaagaataatccagaatggctactctgatctatgttgataaggaaaatggagaacca

SEQ ID NO: 708980 - DNA, 83 bp, Homo sapiens
cacacaatgtcggggatggacctccagatttccttactggaactgtggctgcaccatctgtcttcatcttcccgccatctgat

SEQ ID NO: 708981 - DNA, 100 bp, Homo sapiens
ccacgatgtgaagcggggcagagccgggggagcccagcccagccagcctccaggtgaaaggtgtagcagtcactcggcctacacccacagcatcgacctt

SEQ ID NO: 708982 - DNA, 50 bp, Homo sapiens
caagaagtcagcttccctttcaaaagcgagctctgctccagaaggcgcgg

SEQ ID NO: 708983 - DNA, 137 bp, Homo sapiens
gtgcgctactgcgcgcgcttctcctacctctggctcaagttttcacttatcatctattccaccgtgttctgggcaaatttagcgatcaacccagcggccttgctgcccacagcggcttcccagatctctgaagtaaa

SEQ ID NO: 708984 - DNA, 100 bp, Homo sapiens
agaactgggcgacggagcctttgggaaagtgtacaaggcctgacctctcgggacacacccagccctgtggacccagacaccgtggaggtgttgatgacct

SEQ ID NO: 708985 - DNA, 83 bp, Homo sapiens
gggactccccgtgaacaacatcttccagcagatctcccccgtgggcttgggcactgtttaaaggaaagttccgagaaggcatc

SEQ ID NO: 708986 - DNA, 100 bp, Homo sapiens
aatgagagtacttctgaatcagcattgttagaactaccattgattacatgtgaatctgtacagcaaaactgttcattgtagaatcaaactcttcatcatc

SEQ ID NO: 708987 - DNA, 83 bp, Homo sapiens
gcgggaggtgttcgagaacgaccccgagacgggccagacgggcccagccagcaccaagatgagtgccacgtcctggttcctgg

SEQ ID NO: 708988 - DNA, 99 bp, Homo sapiens
ctcaagcgaaaacaccgctttatcctgctgcgatccccagggaacaaggggtcttcacggcttctctgcccaggggccagaaccgaggaggccaggagg

SEQ ID NO: 708989 - DNA, 50 bp, Homo sapiens
ccagttgactgaacctggaaaagagccggagttcatgatcaagtgttgcc

SEQ ID NO: 708990 - DNA, 76 bp, Homo sapiens
taaacatgcaatgaacccaaaaggtgatcagaatcatccagataatcaacagctgaagaatgaacaagaagaaagt

SEQ ID NO: 708991 - DNA, 100 bp, Homo sapiens
gccatgtcgtccttgatcagaagggtgatcagcaccgcgaaagccccaggggccattggaccctacagacatgtgcattgccattgcgatttctcttctc

SEQ ID NO: 708992 - DNA, 82 bp, Homo sapiens
tgttcttaggatcctcctcccgtccttctcatccttcgttttaaaatcaaagatgggaaaatcggagaaaattgcccttccc

SEQ ID NO: 708993 - DNA, 82 bp, Homo sapiens
gtccacgcggggagagcactggggaccgagacccggcaccacctcccggtccgccctccagaacgtactcaggaaaagtggg

SEQ ID NO: 708994 - DNA, 98 bp, Homo sapiens
ggaaagcagatccgtggttccctgcagactggcaggagcagattccaaaggcacaggaagaagcttgcaggtaaaataccatgaagattttgaaaaaa

SEQ ID NO: 708995 - DNA, 100 bp, Homo sapiens
tttataccaggagacttacatcgatgaccttggacacctccatgttatggacacggtctttcttattcaggttatctaccttgcctgctcctatgccaca

SEQ ID NO: 708996 - DNA, 50 bp, Homo sapiens
ggttcactctaggaggaacaaatacaggttcaggcatggctcctccaagc

SEQ ID NO: 708997 - DNA, 76 bp, Homo sapiens
gaaacaagccgtggaataggtgtatcaagtaatggtgcaaagcctgaaacaaatttacatgtattggagaccagac

SEQ ID NO: 708998 - DNA, 87 bp, Homo sapiens
cgtgacaactttcgtttccctctgagggaattgggaggtcggcggccccaaaaccgagccacatcgctcagacaccatggggaaggt

SEQ ID NO: 708999 - DNA, 80 bp, Homo sapiens
ggagaaaacgtgtcatcagtgcatttctaaaatcgccagcaatggacccagatgatgtggtaccagttggccaaagaaga

SEQ ID NO: 709000 - DNA, 98 bp, Homo sapiens
tcctctgctacccatgatgaggcggtgcaggtcctcaagaagacaggcaaggaggtggtgctggagggcctccccatggccacccatggaccagtcgg

SEQ ID NO: 709001 - DNA, 75 bp, Homo sapiens
cttcggcgcgggactcaagtacaactcccggcacgaggattttttatcaagcagaaatgcatcgaacaacgagaa

SEQ ID NO: 709002 - DNA, 128 bp, Homo sapiens
ccaactgtaagcaaagggacagtggaaggaaactatgtatctttaactagaatcctgaaatgttcagagcagaggaatttgctgattcccttggaattccgtttttggaaaccagtgctaagaatgca

SEQ ID NO: 709003 - DNA, 75 bp, Homo sapiens
tgctgccagcattagcctggctcaatatctaatcaatgtcaggctttttctcctccgtgacagccagagtaatcc

SEQ ID NO: 709004 - DNA, 82 bp, Homo sapiens
tccgagtcctggtggtgtcggccaagttcgaggggaaaccgctgcttcagagacacaggcgtcacaatgtagcagggacccc

SEQ ID NO: 709005 - DNA, 75 bp, Homo sapiens
agctcatctctgagacccggaggaggttcgaagctgagtatgtgacagttttctggatatgccgcagaaggatcc

SEQ ID NO: 709006 - DNA, 100 bp, Homo sapiens
ctcaagatggcgtgcttgttggagaccccaatccgcatgagcgtcctttcgaaacgggtatgcaggagattagaagccagtgggcatgagcgtggctgcc

SEQ ID NO: 709007 - DNA, 75 bp, Homo sapiens
tgtcctctgaaaactcgggaatttgtcactgaaatggtgacaggaggctcaggctgcacgaagaaaaggttatta

SEQ ID NO: 709008 - DNA, 75 bp, Homo sapiens
tacctcggggcagatccggaccaaggccagaggcattgatgtgcagcaggtttctttagtcatcaactatgacct

SEQ ID NO: 709009 - DNA, 100 bp, Homo sapiens
tatctagaggatataccagaccctggagtgaactggattccatgtagagacccctggagtattgaatttgaccgggattgtgactattttgcgattgctg

SEQ ID NO: 709010 - DNA, 87 bp, Homo sapiens
tcgctgtggcatggcggacgaggggaagtcgtacagcgagaaagcttcttgctatctacctccaccatgatgaaagtgtgttaacca

SEQ ID NO: 709011 - DNA, 119 bp, Homo sapiens
aaggccatgtacattgacactgagggtacctttaggccagaacggctgctggcagtggctgagagagttcacagttaccagccaagaaaacttgaaaatgagcagccgacggaaacgtg

SEQ ID NO: 709012 - DNA, 82 bp, Homo sapiens
acggggaccccaagaggaaggaattcctggatgacttgttcagcttcatgcagaagcgagatctctgttgaggagctggcgc

SEQ ID NO: 709013 - DNA, 88 bp, Homo sapiens
cgcgccggcggcatcgagactatcgctaatgagtatagcgaccgctgcacgcctcacatcgatcagacaacaacatggcaggacccca

SEQ ID NO: 709014 - DNA, 50 bp, Homo sapiens
actgtcatcttcttcatcgttagtcaggctatcgccccattccagcggag

SEQ ID NO: 709015 - DNA, 80 bp, Homo sapiens
ggacttaaatttaaggactgggtatcaagtaaacgaaggcaacagatcccctaatttgtggctgaaagatgttctcaagg

SEQ ID NO: 709016 - DNA, 100 bp, Homo sapiens
gcctgtcactctgtgcatgatcgtggtggtagccaccatcaagtctgtgcgcttctacacagagaagaatggacagctttctttatcaacaagactgaga

SEQ ID NO: 709017 - DNA, 76 bp, Homo sapiens
gctgaatggaggccagatagtaccatgatagctgtatcagcttcgggagcaggaaagaaaagaagcagaagaagct

SEQ ID NO: 709018 - DNA, 75 bp, Homo sapiens
ctcggacgccagcggacacgcgggcgagggggatatgagactttctactcggaatatcctgagtgttgcgtggat

SEQ ID NO: 709019 - DNA, 75 bp, Homo sapiens
cgggggcaagcggaaggtgatgcccaagatggaccagagaggtggagaagagcgagtacttgagaaagaagagga

SEQ ID NO: 709020 - DNA, 82 bp, Homo sapiens
tcctgatctctctcgctgtgagacatgtctgagactcctgctcagtgtagcattaaggtggggaagaaaacatgacagaaac

SEQ ID NO: 709021 - DNA, 100 bp, Homo sapiens
attgactggagtgagagaagaaatgctgtggcatctgttgtcgcaggtatattggattacaaggcagaggaagacccagcaaaatttaaatctatcaaaa

SEQ ID NO: 709022 - DNA, 83 bp, Homo sapiens
aacgcggctgaccctgatggaggaagtgctcctgctgggcctcaaggaccgcgaggtactccaaagattcaggtttactcacg

SEQ ID NO: 709023 - DNA, 132 bp, Homo sapiens
caccctgcccctgccgaggcaggcgcccaccgccggcggtgatgcggctgtgaagccctagtcgatcagggagcagagaaacatgaaggcacaggtcagtcctctgggatcactgatcaagagaaggagtta

SEQ ID NO: 709024 - DNA, 100 bp, Homo sapiens
ggcagctgaactgagcgtatgtgccacgccgcccaggagacccctctgctgcaccacttcatggctttctgcctccgagatgtggcaccatagtgcggtg

SEQ ID NO: 709025 - DNA, 83 bp, Homo sapiens
cagctgtggaaagaagttgcaaaacactggatgccactgccgccaggagccctgtaacatcagccatcgtcaaccccaccgtg

SEQ ID NO: 709026 - DNA, 100 bp, Homo sapiens
cgacgcggggccatgtgcaggaccctaacgacaggcgcctccggcccatttacggtgatcatggagctcagcttggtctccatggggctggtggtgatgg

SEQ ID NO: 709027 - DNA, 100 bp, Homo sapiens
cttttctctctctcctctggcaggatgaggcgtgcaggcctgggagtaccaagaggacaggaatgaccttgtgatttcagagactgagctgaaacaagtg

SEQ ID NO: 709028 - DNA, 76 bp, Homo sapiens
gcacctgtagtcaatcacacgcaggtaaatattgcagattttcaagagaatcagtgggtgacttgtttccaggagt

SEQ ID NO: 709029 - DNA, 50 bp, Homo sapiens
gtgttaaacgaatactggaaaacccacagtcgttccccatcaggaagtcc

SEQ ID NO: 709030 - DNA, 74 bp, Homo sapiens
gatggccagctttcccccgagggtcaacgagaaagagatcgggctaggggcaaggtaaagcattgtcgcatcaa

SEQ ID NO: 709031 - DNA, 98 bp, Homo sapiens
tccattgtctggcaggaggtttttgatgataaagcaaagatccttcatggatttaaaaatcaagttggcgatgaaaattggaggcgtttctctgacca

SEQ ID NO: 709032 - DNA, 109 bp, Homo sapiens
tcaaaggaacttgtttcttcaagctcttctggcagtgattctgacagtgaggttgacaaaaaggctatggagttactagtagagaaagcaatcagcagtgcttctagcc

SEQ ID NO: 709033 - DNA, 80 bp, Homo sapiens
cgtcccatttcgcccctcgcgtccggagtccccgtggccaggtaattttttctgcaggatgaattaagagaagagacact

SEQ ID NO: 709034 - DNA, 50 bp, Homo sapiens
gggcactatggaggtgaagagcaaggttcccaaaggtgggggcctaccca

SEQ ID NO: 709035 - DNA, 100 bp, Homo sapiens
ctcctttgcggagagctgcaagccggtgcagcagccttcagcttttggcagcatgaaagttagcagaattactcaaggtgatgaggacaattgatgacag

SEQ ID NO: 709036 - DNA, 82 bp, Homo sapiens
agctggagcagatcccccagccggctgagacaggaactgtggctgcaccatctgtcttcatcttcccgccatctgatgagca

SEQ ID NO: 709037 - DNA, 73 bp, Homo sapiens
ccgcaacaggcgttttgcaatgcagatgtagttatacatgggaagctgttgataccaaaaataatgtacttta

SEQ ID NO: 709038 - DNA, 75 bp, Homo sapiens
gagaagagtgttcaaaattcaattacacaagcctgccttctggtacaagatgcctgtggaatgttcggtgaagtg

SEQ ID NO: 709039 - DNA, 100 bp, Homo sapiens
ctggagtccaaaagaaatgtaagcgagagtgcaccaccatcctttcaaactcctgtgaatacaggatgtggagagcatcttgtgcgcaccatactggcta

SEQ ID NO: 709040 - DNA, 123 bp, Homo sapiens
ccgtgccctcggaggcggcgtgggcggcagagagcggggcggcggcagcttcgagagctgtgcccaggagtgaacaaccagccctacctctgtgagagtggtcactgctgcggggagactggc

SEQ ID NO: 709041 - DNA, 100 bp, Homo sapiens
acggcgtacgccctcatggggaaaatctccccggtgactttcaggagatctataaggacaggcagaaattctcagaacaggttttcaaagtggcctcctc

SEQ ID NO: 709042 - DNA, 80 bp, Homo sapiens
ccacgcaccccactcggcgtcgcgcggcgtgccctgcttgtcacagatcatcaatgctgtggtactgttgattttattga

SEQ ID NO: 709043 - DNA, 100 bp, Homo sapiens
cgttggaataccggctctcagcggctgacatagagacactgcatattttaccaaggctttgactggaatggcatgctttcaaatataaacagacggcttt

SEQ ID NO: 709044 - DNA, 90 bp, Homo sapiens
cggaccctggtcctgccctgggtgctgctgaccttgtgtgtcactgcggaacccttaggagaaatcttgagagtggacagcaattgtgaa

SEQ ID NO: 709045 - DNA, 75 bp, Homo sapiens
gagactgacatcggaaccagagggggactggttttgtcctgaatgtgaggttcatgtgtgcccagctgcccaacc

SEQ ID NO: 709046 - DNA, 98 bp, Homo sapiens
gagactgcttttctccagaaccagacgagctccagctcccaggctaggacgagattgaggagctgcgggccgagatgctggagatgcgggacgtctat

SEQ ID NO: 709047 - DNA, 95 bp, Homo sapiens
ccgcagtcggcaaggagagacgtcgctgaggggcttgcctgaagcgagggtgaaaatgcctcgtgtaaaagcagctcaagctggaagacagagct

SEQ ID NO: 709048 - DNA, 100 bp, Homo sapiens
gcgatggcaggttcgccgggtgtgaggcttcacagcggtccggtgaccaagtcgaggcctatatgaacccaatagcaatggcgagatcaaggggtccaat

SEQ ID NO: 709049 - DNA, 155 bp, Homo sapiens
tgctcatggggctcctggagggctactttgtgcccctgcacagcttcttcctgaccccggacagctttgaacagaagccataaccagcagaccacagcattcaggcatcctgtgacgggacagttttctccagaaaatagtgaattcattcttca

SEQ ID NO: 709050 - DNA, 82 bp, Homo sapiens
ccgaggagcgggaagagttgctgggtgtgtgctgacttgataagaggcgcaaaagaaaagaatctcaaagtgaaaggaccag

SEQ ID NO: 709051 - DNA, 74 bp, Homo sapiens
gagtactcaacatattgactgtatttgggctgcagcacagggagatgcagttaaagacttgatgcttcgctttc

SEQ ID NO: 709052 - DNA, 100 bp, Homo sapiens
agctggatgaatggaaagcaaagaagaaagcttctaatggggtcttcaaagcttcacctttctccaaaggcagatgtgaagaacttgatgtcttatgtgg

SEQ ID NO: 709053 - DNA, 97 bp, Homo sapiens
accaccgtgaacggacagtcccccccaggtaaccaggtgagtttctccaaatccacggatgcttttgcctttgaagaggacagcagcagcgatgggc

SEQ ID NO: 709054 - DNA, 100 bp, Homo sapiens
gcagctccggccgcctggctccccatactagtcgccggtacttaaagctttcaccaaaacacccagaatcaaatactgctggaatggacatctttgccaa

SEQ ID NO: 709055 - DNA, 74 bp, Homo sapiens
cgactcttttcctcggcacactggataccattttcctcttctcctatgctgtgctgtgttggagtagaagaaca

SEQ ID NO: 709056 - DNA, 97 bp, Homo sapiens
ctcgtcgtggtgtggccactgcatcggctacgcgcccacttggcgggccctggctggggatgtgcgagatcttcaacttgctgctgagcttgggaag

SEQ ID NO: 709057 - DNA, 101 bp, Homo sapiens
ttgaagctcaagcagagcttacagtgcaaggatgtttgcacacttgctcacgctaccacttcttctgtgacgatggctgctgcattgacatcacgctcgcc

SEQ ID NO: 709058 - DNA, 108 bp, Homo sapiens
tgcgacaggctgcatgcaaacagcagagtgagatacttgtggtgtcagaaggatcatgtgccacagggcagaagagatgaaagtctgaaagtggatgagcatctggcc

SEQ ID NO: 709059 - DNA, 87 bp, Homo sapiens
tggccagctgactgcacttcttttttgagaaaggaaggaatatatcctgactgattgtatgttcgcaattcgtgctgatcatgattt

SEQ ID NO: 709060 - DNA, 100 bp, Homo sapiens
ccgctgccccgtccctggattcggggctggacgcagcaagcggggcgctgtgtccccaagctccccgtcctcgggtttggacatatttgactcttttccc

SEQ ID NO: 709061 - DNA, 74 bp, Homo sapiens
ggaaaatcgcttggttaaaacctgacacttttaacagtgtgaagcctcagtttaggtcatctggtggttcagaa

SEQ ID NO: 709062 - DNA, 100 bp, Homo sapiens
gggagattcagccgtgaagcaagtgcagatagatggccttgtaccttaacatggggaatcttcttaaagttttgacatgcacagaccttgagcaggggcc

SEQ ID NO: 709063 - DNA, 83 bp, Homo sapiens
cgggagcagctgccccgctacctcatgggggagacgcagctgtgcaccacaaggatttttagactctgaggagcagttggagc

SEQ ID NO: 709064 - DNA, 75 bp, Homo sapiens
cgaatcatccacgcacctgcagctctgctgagagagtgcaagccgtggggtccagtggcattgcagagcacggat

SEQ ID NO: 709065 - DNA, 76 bp, Homo sapiens
cttctcagagagcatgaaaggctgctaaaacacaagctgaagcttggatttacactgggcaacgtggttggaatgt

SEQ ID NO: 709066 - DNA, 78 bp, Homo sapiens
tgtcaacggcaggggcaggcctagtttgactctgacagtcctcccactaaggagaaccaggtgcatcagcgcattgcg

SEQ ID NO: 709067 - DNA, 99 bp, Homo sapiens
ctggcactgccgctccggcctcgggctgcccgtggcgcccgcaggcggcaggaatcctcctccggcgataggtatattcgaattgttgggactcacaac

SEQ ID NO: 709068 - DNA, 75 bp, Homo sapiens
gcgggagcgggtaccgggcgcgggcagagcgcggcggcgcgggaagcagacacctctcactcccgacaggacatg

SEQ ID NO: 709069 - DNA, 83 bp, Homo sapiens
ctggctacagctgcacctgccccgccgggatctccggcgccaactgccagacaatgcagatcttcgtgaagactctgactggt

SEQ ID NO: 709070 - DNA, 88 bp, Homo sapiens
cgcatccgacgcaaccggcagcagcgctgccgccgcgtcctcagccaccgctccctcttcccacgacatatctgaagagatggattaa

SEQ ID NO: 709071 - DNA, 100 bp, Homo sapiens
gcacagtcacagaattgagtgatttcctgcaggctatggaacacactgaagttcttcagcttctcagccccccagatacagatccacgggttttagaaaa

SEQ ID NO: 709072 - DNA, 80 bp, Homo sapiens
gaaagtgacttcctggccttcccttctttactgatcagatgaagttgcggagaataatgaacatgatgtcacttctactg

SEQ ID NO: 709073 - DNA, 75 bp, Homo sapiens
atggatgttcttcttcgagtatttgtagaaggcaaagaacagtctgaacttgatcaagatttggatgatgttgaa

SEQ ID NO: 709074 - DNA, 82 bp, Homo sapiens
ctttcgcaagtcaggggccacctgtggacgctcagacacctattaccagagaccatcgggaaggtgctgatgcagtatgcag

SEQ ID NO: 709075 - DNA, 74 bp, Homo sapiens
ttttagggtcctttatatagaagggagagtaggcatttcagaagatggacacaaagaagaaggaggaacagttg

SEQ ID NO: 709076 - DNA, 99 bp, Homo sapiens
agaccctgaaagcaaccaggaggcagtaaattcttcagctgctcggacagatgaagctccccaaggagctgcaggttgatctcctatcaagagtttttg

SEQ ID NO: 709077 - DNA, 79 bp, Homo sapiens
gacagtacgggctcccttcgccaaactcttcattttctctgagacacacggacatcgggaacggacggaggaaggatgt

SEQ ID NO: 709078 - DNA, 100 bp, Homo sapiens
ggacataccattcaggttatcctgaagtcaaaatcagaatgtgaaggctgtgtctgagactcctgcagtgccaccagtttcagaagatgaggatgatgat

SEQ ID NO: 709079 - DNA, 100 bp, Homo sapiens
tgacgtgtttggagggaaatgggaatgtacacgataattaaagagtaaagttgtgctcaacgtccggttccagttgttggcaaaggagaggaagaggaag

SEQ ID NO: 709080 - DNA, 88 bp, Homo sapiens
cggcgatccggggtctgggcgcggcgagtgagaaagatcagtctaaagaaaaggagaagaaagtgaaaaaaacaattccttcctgggc

SEQ ID NO: 709081 - DNA, 82 bp, Homo sapiens
gggtgttcgactgctagagccgagcgaagcatcttcgtgaagactctgactggtaagaccatcaccctcgaggttgagccca

SEQ ID NO: 709082 - DNA, 75 bp, Homo sapiens
cacagcacagttcctgggaaggtggagccaccagcctctccctgcaacatggccaacgccctggccagcgccact

SEQ ID NO: 709083 - DNA, 74 bp, Homo sapiens
tgtaaatgcaccaatcagcatgctgtgtctagctcaagccacatgaaatgaagatcacctctgcctatctacag

SEQ ID NO: 709084 - DNA, 80 bp, Homo sapiens
gctccagccgaaggagaaggggggtgtgcttcccgcacagctgcagccatggggtctgaggaccacggcgcccagaaccc

SEQ ID NO: 709085 - DNA, 98 bp, Homo sapiens
caggatttggtttcagcatgtccttctctgaatgatgaatacttttactactgtgacaacattaacgtcattgaaattatgagactatcattcaaatg

SEQ ID NO: 709086 - DNA, 83 bp, Homo sapiens
ctgctcctggccgcctgcatgcacagtggctttaagatcctcaactgccaaaaggcaatggctcgtgtcctcggtctcttgcc

SEQ ID NO: 709087 - DNA, 105 bp, Homo sapiens
aggtcattgaggataagaggaaggcaaagaaaatcattgactctgaggtatgggcactaggaaaagacttcttccatcaagcttaattgttttgttattcattta

SEQ ID NO: 709088 - DNA, 50 bp, Homo sapiens
cgcgaaaccaagttggacttacagagagtttcccaggtatgctgaaattg

SEQ ID NO: 709089 - DNA, 75 bp, Homo sapiens
cggtgtgtggcgcgcccagagccccgcgtttcagccctagggaagggttgtgagtcccggcccagcccctccacc

SEQ ID NO: 709090 - DNA, 50 bp, Homo sapiens
gagttgttcatccagggagacagcgttgcaccgtccaggtgaggttagag

SEQ ID NO: 709091 - DNA, 90 bp, Homo sapiens
agggattagatcttgtcattcagtggtgtcgaatgctcaagtgcaatgtcaagagctttctgggtggagttggcatgaacttaacagcag

SEQ ID NO: 709092 - DNA, 98 bp, Homo sapiens
ctctttccccgtcagcatcccagccgtgctcacgagaggtggagaagagcgagtacttgagaaagaagaggaagaagatgatgatgaagatgaagatg

SEQ ID NO: 709093 - DNA, 101 bp, Homo sapiens
gcaggccttgcttttatcgaacttgtcaatgaaggaaggaaaatgtttataggaggccttagctgggacactacaaagaaagatctgaaggactacttttc

SEQ ID NO: 709094 - DNA, 50 bp, Homo sapiens
gagttgtacttaaatgcagacacaagtgtgtgcaggaacggagaataaac

SEQ ID NO: 709095 - DNA, 97 bp, Homo sapiens
cagaaacgtgtgtacagttgatgacccaacatgagtgaagtttcctgcaagaaacgggacgactatttggaatggccagagtattttatggctgtgg

SEQ ID NO: 709096 - DNA, 83 bp, Homo sapiens
gttgggactaacagctggagagaacagttcattgaagctatcactgtcagtgctggtgatggcatcagctgagaagggaagga

SEQ ID NO: 709097 - DNA, 75 bp, Homo sapiens
ctggacagcatgtcagattggtgtaaggagcatcacgggaagatgaggcctgcctgtgttaatacacctagtgag

SEQ ID NO: 709098 - DNA, 101 bp, Homo sapiens
gttggccgcggcctctgagctgggatgagccgtgctcccggtggaagcaagggagcccagccggagccatggaattggtggtaaagaccctgattgtagca

SEQ ID NO: 709099 - DNA, 100 bp, Homo sapiens
ctcagcacctcacctacctggagttccggtccttccaggctatcacgggtgctgtgccgttcctggtcagtgccacctctggcaccactgtgctaggggc

SEQ ID NO: 709100 - DNA, 82 bp, Homo sapiens
gcaggagcccggcaccccccgccgacaaggaggatctggtggctggacccagagctgacctatggctgcgccaagcccttcg

SEQ ID NO: 709101 - DNA, 80 bp, Homo sapiens
cggtagcggcagtggcggcgcgtaggaggcggtcctgaacgaggctgtgggggccctgatgtaccacaccatcactctca

SEQ ID NO: 709102 - DNA, 50 bp, Homo sapiens
agggatcgtgtggcatgaaacagaagaagagatggggtctcactatgttg

SEQ ID NO: 709103 - DNA, 101 bp, Homo sapiens
accagatgctcctcagggtgcagcgatccgacgcaggaatctccttttccaacacgataacgaaggaggcccaacttcattcaataaggagcctgacggat

SEQ ID NO: 709104 - DNA, 83 bp, Homo sapiens
gggaaccctggtcaccgtctcctcaggtttccctaggacttctgcatgcccatgccacacatatcctgtggcccccagagcgc

SEQ ID NO: 709105 - DNA, 96 bp, Homo sapiens
ctttcccccgagggtcaacgagaaagagatcgcttccccgggcgctgcctggacaggcctgcctgcgtgctgggacatgtctggcctccaaggacc

SEQ ID NO: 709106 - DNA, 50 bp, Homo sapiens
ccggaggacaccccatcgtgcagcaagctgaacagctgggaagagaagac

SEQ ID NO: 709107 - DNA, 100 bp, Homo sapiens
ttagctgtgctcgcgctactctctctttctggcctggaggctatccagctgcacagccagagaacaacacatcacacacaggaaacagttgtgctcatgt

SEQ ID NO: 709108 - DNA, 100 bp, Homo sapiens
ctctgctcttccaacaccagtggaagatgatcacatcccagcggatactctgttttcaaggaagctgaatgggaaatacagacttgagcgacttgttcca

SEQ ID NO: 709109 - DNA, 50 bp, Homo sapiens
cctgcgccggccttgcctcggggcttcagataacagggagcgtgcttatg

SEQ ID NO: 709110 - DNA, 90 bp, Homo sapiens
ggaggagggccactgggctcccagcagcccaggttcaggtactgggcctaatcgctacgtgcctctttggctatgatgcctatgtcacct

SEQ ID NO: 709111 - DNA, 83 bp, Homo sapiens
cgggttcatcctacatttttgtgcaagagccttggaagtggagtttactctccccttgaggaagctgaaggtcagaaagggag

SEQ ID NO: 709112 - DNA, 90 bp, Homo sapiens
gattcaccaagaggaaggagaattcaaccttttttgataagaaaatatatcactgatgtccattcgaatgacctgtctacaccacagatc

SEQ ID NO: 709113 - DNA, 74 bp, Homo sapiens
ttttgcacttgtgcagaccgggcgagcagagtaagaagcagatcaacatgtacctgttgtcacgcgtcctgttt

SEQ ID NO: 709114 - DNA, 100 bp, Homo sapiens
tgaacaacttccttcttatcggttcaatcctaacaaccaccagtcagaacagactttatattattacgatggggacatgatttgtaaagttcaaggcaag

SEQ ID NO: 709115 - DNA, 75 bp, Homo sapiens
cgtggatgccctgcaccgggtccggcaggtgaccttgggaaaggtgttgaaagtgatcgtcgtcatgcggagcct

SEQ ID NO: 709116 - DNA, 88 bp, Homo sapiens
agccacgcagaggacgccggaacaccctggaagccgagaaatggtatgagtcgtcatccgaggactccagcacagcagagaacatctc

SEQ ID NO: 709117 - DNA, 49 bp, Homo sapiens
aaatcacctgtacttggtcatgcagctacctggaatggccaaatatcaa

SEQ ID NO: 709118 - DNA, 82 bp, Homo sapiens
aaggagagacacttgtgaacattcaagtgaagcaaaagcctttcatgattatgattttttatcaagcagaaatgcatcgaac

SEQ ID NO: 709119 - DNA, 118 bp, Homo sapiens
ggctgcagccccaagacagagcgctactcctggcagtgcgtcaatcagagcgtcctgtgcgggccaattcctgtccccccagcagcatggcatcgtgtgctgaaccctctgagccctc

SEQ ID NO: 709120 - DNA, 82 bp, Homo sapiens
gctctgccgcgaggcgcgcgccgcgcaagtcttcttcctcaaaggtcaaaatgcagatcttcgtgaaaacccttaccggcaa

SEQ ID NO: 709121 - DNA, 100 bp, Homo sapiens
ccctgccccacgcgctcctcgccgtgctcagtgcctgttacttgggcaccccgagggaacgtgatgttctcttcccggggtacacccatttgcagagggc

SEQ ID NO: 709122 - DNA, 86 bp, Homo sapiens
tactctcagcctactatctgtctggagaagagcaattctgtggtgttcttggtcacacatttatggagtttctgaagggcagtgga

SEQ ID NO: 709123 - DNA, 107 bp, Homo sapiens
ctcagacctgccaatttaccagagataattgataacaccctgtaacagctgagactttttttatgaagacatggagtccttgacgcagatgcttagggccttggcaa

SEQ ID NO: 709124 - DNA, 98 bp, Homo sapiens
gtttgcgactcgcggaccggcgtccccggcgcgaagaggctggactcggattcgttgcctgaggactttccttatcccagttgattgtgcagaataca

SEQ ID NO: 709125 - DNA, 98 bp, Homo sapiens
agaatatcatgcttccagtctactgtaaagcggaagatccatccaaaagctatgtgaaattacgagactttgtgcttgtgaagctttgtcaagatttg

SEQ ID NO: 709126 - DNA, 76 bp, Homo sapiens
agacccgcgccgccgggacccccaggacgacgtgtacctggacatcaccgatggaatcagtgtgagtggctttccc

SEQ ID NO: 709127 - DNA, 100 bp, Homo sapiens
cctgtaaaaccagccttagactatttttcaaacagtgagacatggaatccattaaaattgcattatcagttaagaaatgtacgggaacgattagctaaaa

SEQ ID NO: 709128 - DNA, 101 bp, Homo sapiens
gggaagcctcctgccgagataaagccaccacgtctggtggttgggatccatatgcagggacttgggtgtgatgaaatgctgcagggttttgctgttgcagt

SEQ ID NO: 709129 - DNA, 75 bp, Homo sapiens
atgaggagccgagacctccaactcgagcctcccatcttgctcctgcggtccctccttccctgtctctctcacccc

SEQ ID NO: 709130 - DNA, 100 bp, Homo sapiens
ctgaacttccctggtcgaacagttttttctaatggctattcaaggcaagaaataccgcccacgaatggatcaggaagtctctgaccaagccattagcaga

SEQ ID NO: 709131 - DNA, 48 bp, Homo sapiens
gcggcagatgagagcatccaacgggtctttttggagttcctgagctga

SEQ ID NO: 709132 - DNA, 125 bp, Homo sapiens
gtgaggagactctcctctctcatccgcacgcacaatatcgggcagaaagataatcacggcctgttgattgcatactgtagaagatttgatgttcagactggttcttcttacatatactatgtttc

SEQ ID NO: 709133 - DNA, 90 bp, Homo sapiens
acgaggaggataaacccaggcagggcatcgccgaatggaggctgtgcgactgcgaaaagagaaccagatctacagtgctgatgagaagag

SEQ ID NO: 709134 - DNA, 75 bp, Homo sapiens
ccgggctccgggaaaactacactggccagaaaaacacaccttgactttagtcagatacatcactgtctgttaaag

SEQ ID NO: 709135 - DNA, 87 bp, Homo sapiens
tctacctacttggagagaagctcaaccactggaaatggggataaaagaatcagagtgtctcaacccttgacaagaggaccaagtgcc

SEQ ID NO: 709136 - DNA, 74 bp, Homo sapiens
gatcatgtctggtggctccgcggattataacagggtgtgtccgcagccggccaggtggtatccctgaaggtgtg

SEQ ID NO: 709137 - DNA, 100 bp, Homo sapiens
gtggcctaccaggaggccaggggtgtcgccatgggactaccgcgccatcccagagctggacgcctatgaggccgagggactggctctggatgatgaggac

SEQ ID NO: 709138 - DNA, 87 bp, Homo sapiens
aaatgctttatttttgtggcaggcatctgtgggatctgtaatagaaatccaacaagtcccaaatttggaaaagctgactcatatgaa

SEQ ID NO: 709139 - DNA, 100 bp, Homo sapiens
gtggggggggtcagccccccgcccggccagccgccccgtccgggagagtcagaggttccggttgagatcaagttgggagacacacccttgttcattctcc

SEQ ID NO: 709140 - DNA, 75 bp, Homo sapiens
ctcagattggagtaaggcattgctgtcccttgcaggctctacaagtttcacgctgtttaagtcatgaacctacaa

SEQ ID NO: 709141 - DNA, 100 bp, Homo sapiens
gggtgctattgtgaggcggttgtagaagaatgaaatgaatgatgtgcctttctttgatatccaactgccttacgaattggcaatcaatatatttcagtat

SEQ ID NO: 709142 - DNA, 83 bp, Homo sapiens
ggaaggacaaggaattacataacatcaaacgtgggaatatcgttcagaaaaatctcttgaagaattgagtaaacttgtgccac

SEQ ID NO: 709143 - DNA, 75 bp, Homo sapiens
gggatacctgggagctgtcatcagcgccgtctccattgctattgttgatccatttcagatacttgtggcagcaaa

SEQ ID NO: 709144 - DNA, 90 bp, Homo sapiens
cagaaaggaagtgggatccgcaagatgatggatgagtttgagccgagttcctgttctgggcttcgctgtgcatgacccatctcagcagga

SEQ ID NO: 709145 - DNA, 88 bp, Homo sapiens
cgcccatgaagccagatttctcccaggccattacagccatgggcttcaagcagcccaccccgatccagaaggcgtgcatacctgtggg

SEQ ID NO: 709146 - DNA, 75 bp, Homo sapiens
gtgtatcaagtaatggtgcaaagcctgaatggccaatccgccatggtatagttgaagattgggacttaatggaaa

SEQ ID NO: 709147 - DNA, 82 bp, Homo sapiens
gctcaagttgctactcgggacgctgcacctcccgcgccgcacggtggacgaggctgatcagctgaccgaagaacagattgct

SEQ ID NO: 709148 - DNA, 83 bp, Homo sapiens
acaagatcccccgtctgaggactgacctttttccgcaccacactgtaactcgaggcatcaccaaaggcgtgaaggaggacttt

SEQ ID NO: 709149 - DNA, 100 bp, Homo sapiens
cgaagctctagccaaattcctgagggattcgggttgactagtggtggatccaactactcgctggccagacatacttccaaaactggacaagccaaggcat

SEQ ID NO: 709150 - DNA, 97 bp, Homo sapiens
cccatccagtggaatgcaccacagccatctcacatttccaagtacattctcaggtggagacctgctccatgacaattcaaaaggtgaagggattgct

SEQ ID NO: 709151 - DNA, 100 bp, Homo sapiens
ggaaaatcatattatagatggagtaaaggtgaggagcaaaagaagggatccacctattcagttccaaaatctaaggagaagttgatggagaagcattccc

SEQ ID NO: 709152 - DNA, 97 bp, Homo sapiens
cagccttcagcttttggcagcatgaaagttagcagttgattcttcaccacactgaaaccattaggaaaaatccttgtggttaacagcagaggcttca

SEQ ID NO: 709153 - DNA, 82 bp, Homo sapiens
gatcatgtctgcgagccaggattcccgatctggtggctggacccagagctgacctatggctgcgccaagcccttcgtcttca

SEQ ID NO: 709154 - DNA, 82 bp, Homo sapiens
ctgcttgccggccccaacacggaccttggctttatcctgtggataaacgcagagtgaacgagtttggggagtcctacgagga

SEQ ID NO: 709155 - DNA, 50 bp, Homo sapiens
ggcgccgaaggcctgcacgacccgagcctcttgaagccattcttacagat

SEQ ID NO: 709156 - DNA, 51 bp, Homo sapiens
caatgttgcacttaactgatattcagcgaagtctgagtaatactgaagatg

SEQ ID NO: 709157 - DNA, 82 bp, Homo sapiens
ccggatctcctggaagtgttggcggaggaagctgaccctctggtgggcagcatcgccacacagtacatgaccaacagagcag

SEQ ID NO: 709158 - DNA, 98 bp, Homo sapiens
agaacgtcccgctggatctgacccgaggcgaggattaaatccaccacacagggtgaaatctatctccatgacaacattcacacaacaggaaattgaat

SEQ ID NO: 709159 - DNA, 51 bp, Homo sapiens
agatttgcagatggctctgctgtagtacagattcaagatggaaaaggtgat

SEQ ID NO: 709160 - DNA, 100 bp, Homo sapiens
gagcagtccagaaagcggcttatcgaacagagccgggagttcaagaagaacactccagagtaagtacaaggtggactgtgcatgcctcaaagaaaaccca

SEQ ID NO: 709161 - DNA, 71 bp, Homo sapiens
gctgttgacatctcataaacggctggttatgaaagacagtgcactggaaaacctcatgctggacaaagatg

SEQ ID NO: 709162 - DNA, 82 bp, Homo sapiens
ctgggaatcggtcgcctggaggaccagtatttcccatggaggttcacggcgaagcagctggagaagctggccaagaaggcgg

SEQ ID NO: 709163 - DNA, 114 bp, Homo sapiens
cttgcagactgtggcgcaactggtcttggtagcggaggcacccgaatgctgcccgggtgagacaagttggatggcttgaggactggtactaaaaggaaacgtgactgggaggcc

SEQ ID NO: 709164 - DNA, 76 bp, Homo sapiens
aaagcagtaaaatggtcacagcagtttgtgaagtgtggatatgcaggctctaactttccagaacacatcttcccag

SEQ ID NO: 709165 - DNA, 98 bp, Homo sapiens
gcccctggcttctggcatccaacacatgggggataatgatgctaccagtcgtttcctgactcgggacgaacacccagagacagggtttcgccatgttg

SEQ ID NO: 709166 - DNA, 90 bp, Homo sapiens
cagatggagaatatatggctggacagctagctgcttatggctataaaattacagattgcctgtttggtacctgtggaccagtttcaactt

SEQ ID NO: 709167 - DNA, 100 bp, Homo sapiens
ggacaacttgcgagccatggggctggcggatgcgtcggggtttcccggtcctctggcgaggatcctccaaggcgtctcacatgaaccggctcagaaacgc

SEQ ID NO: 709168 - DNA, 100 bp, Homo sapiens
gggcgagaacccagacttccaccgcagccccgcaatctgcagacctcagcggcagcgcaggtggcagttttcggctttgtgagaaaccttaccatcaaac

SEQ ID NO: 709169 - DNA, 75 bp, Homo sapiens
tatcagagcgcggcggtcttcaagctctcaggtctctggacaccagctcttccatcaccagccagcctgaggcct

SEQ ID NO: 709170 - DNA, 127 bp, Homo sapiens
agaagcataaacctatcttctttcattatggagggaggtttggcagatggagaacctgatcgaacttcggatgatgatgctgaagctatccttgctgcagacttcgaaattggtcactttttacgtg

SEQ ID NO: 709171 - DNA, 75 bp, Homo sapiens
tcgcccgcccctcctcaccgaggaaggccgaagaggactgtcagaaggacgtagaaggcacggttttactgtgag

SEQ ID NO: 709172 - DNA, 75 bp, Homo sapiens
gagattttgatgtggatgatgccaaagttttattagactgtcaagaacaagtatgccacatcgaagcatgctaag

SEQ ID NO: 709173 - DNA, 98 bp, Homo sapiens
cgttaagggaacgctgaggtcccgcgctccccgaccgaggtctttaagtggagtggagaaaattcatactttatcaatggagacataagttctttaga

SEQ ID NO: 709174 - DNA, 104 bp, Homo sapiens
cagagcgctgagagccaccttggcggcctcccggaagacgtcctccacattctcccgaaacttggcggaacattccagggcctgagcgcctgcgaacagatccg

SEQ ID NO: 709175 - DNA, 97 bp, Homo sapiens
gggacggtaggagcctccgtgcggagaccactgttcaaggccacagcatcaagatggtgctcatgtggaccagtggtgacgccttcaagacggccta

SEQ ID NO: 709176 - DNA, 85 bp, Homo sapiens
cagctgggatctccaccaaccccttcatggtgtgatccctcacatccacaaatctctgattggaaagaagggacagcagaaaact

SEQ ID NO: 709177 - DNA, 100 bp, Homo sapiens
gggtggaggacatcgacatccaggcgaactcggcctatcgctaccctccgaagtccggtcttgggcgtctttggtactggcttttttaggggtctgcctg

SEQ ID NO: 709178 - DNA, 100 bp, Homo sapiens
gtggctgtgatgtgcaaaccccacagatgtccacacatcagttttacaggaaatatatgtgtgctgttaaaagacataatctgactaaaagatggcttat

SEQ ID NO: 709179 - DNA, 82 bp, Homo sapiens
caaggcctgagtagccggtaacaaacgagggttcccgggattggaccgacgcagccatgtagagacggggtttcaccgtgtt

SEQ ID NO: 709180 - DNA, 82 bp, Homo sapiens
ttctgccactgctgctccgtggagatcgtcccgcgcctgccggagtccaaaactacttacctggaagaccttccaccacccc

SEQ ID NO: 709181 - DNA, 75 bp, Homo sapiens
tcgagcgcgagagtatcagccgcctcatgcagaactatgaaaaggcctgggcagtttttaaagggaagtttaaag

SEQ ID NO: 709182 - DNA, 75 bp, Homo sapiens
ttacgggaggacggggaaaaagcggccaaagaagtgaagctgctgctactcggatgttgagaaagagaaggaaac

SEQ ID NO: 709183 - DNA, 99 bp, Homo sapiens
aaattaaagatgcatgctgatggcgataagtcattaccacaggtagctacagcaagctgggtagcaggcagatccaaaggatatcatgaagtttccagg

SEQ ID NO: 709184 - DNA, 100 bp, Homo sapiens
gttttgccattgccagtgggacgtctgagactttctccttcaagtacttggcagatcactctcttagcagttctccctggtctataacaggaatgcccct

SEQ ID NO: 709185 - DNA, 75 bp, Homo sapiens
gggctgtgaagacgcacggtgccaggaccaagtatctggggattcaaaccgatgacaagggtcatatcatcgtag

SEQ ID NO: 709186 - DNA, 82 bp, Homo sapiens
ctggctaaggaaaccctattacctccaggttttaaaatcaaagatgggaaaatcggagaaaattgcccttccccatggccag

SEQ ID NO: 709187 - DNA, 83 bp, Homo sapiens
ggatcttgctcagtctctgtcagaggaagatcccttgcaggaggccactgtctgcagctcccgtgaagatgtccactccagac

SEQ ID NO: 709188 - DNA, 100 bp, Homo sapiens
tgctgtttaccttggcgaggcctttcaccaagtccatgatagtgtgtgtaccatatcagtggcgtgtaactatgctcatcattgttcttgtcaatgcctt

SEQ ID NO: 709189 - DNA, 100 bp, Homo sapiens
cgggaggatataagtagcaagcttgacaggaacctaggagattctctccatcgacaggagatacaggaaccacgtgaatgttgagggggcgacacacaag

SEQ ID NO: 709190 - DNA, 82 bp, Homo sapiens
cctttcttggcccttgttcccccaaatgtctgactctgactctcggactgagaaacgcaagtgtcggagatgtatgcagtgt

SEQ ID NO: 709191 - DNA, 75 bp, Homo sapiens
ctacatttagcgcatcatgtgatccgggatgaagatgagctggattcccacaccatggtgaagactagtgtggag

SEQ ID NO: 709192 - DNA, 83 bp, Homo sapiens
atgtccgacttattcgagagcagcatccaaccaaaatcccgggggctgttgtggttccgactataaacagtacgtgtttggcg

SEQ ID NO: 709193 - DNA, 90 bp, Homo sapiens
gctcacactgccgtgagaacctgcttatatccaggaccaaggagtgagtaggaaagtctagacagtgacttgtatgctgaactccgctgc

SEQ ID NO: 709194 - DNA, 96 bp, Homo sapiens
gaaggagatcactgccctggcacccagcacaatgaagatcaagcccacctcgctcgcagacaccacaagataccaacagagcttctgaaacagata

SEQ ID NO: 709195 - DNA, 98 bp, Homo sapiens
gtccgtgtggccaacgagctcaacgccaggcgccgctcctttacagagccagccccagtgcctgctgagccgtttgacaacactacctacaagaacct

SEQ ID NO: 709196 - DNA, 101 bp, Homo sapiens
atctcctcagggaaggggcagcacactaaaagatggcggcaaggcagcccaggcaaatgtaagaataggcgatgtggttctcagcattgatggaataaatg

SEQ ID NO: 709197 - DNA, 100 bp, Homo sapiens
cgcttacccgtcgggcgagtactcgaggttgaagacggcgccgtgggtgcgggtgctgaggttgtctgcattcaaaagagcattctattaaagctacctt

SEQ ID NO: 709198 - DNA, 74 bp, Homo sapiens
ctgtggcaggagagacaacaaagcgctattatcctaaggtctttgaaggaaatcgcccaaccaactctattgtg

SEQ ID NO: 709199 - DNA, 80 bp, Homo sapiens
ggatgttggcggtccctgtgacctgtggagacacggccagatctgccctccactgacagcagccatggcgagcggcagtg

SEQ ID NO: 709200 - DNA, 100 bp, Homo sapiens
ggtcactatgttcatgctgggaacatcattgcaacacagcgccatttccgctggcacccaggtgcccatgctgatcagctgaccgaagaacagattgctg

SEQ ID NO: 709201 - DNA, 74 bp, Homo sapiens
gaaacatcagcatatgcatgaccgagatgacctctatgctgagcagggcaattgaaggaacagactaaaaatcg

SEQ ID NO: 709202 - DNA, 100 bp, Homo sapiens
tcctcactctgagtacggtctcacagacaacgttgagatgagaaatattcgattatctgacttcactgaatccttgaaaaaaataaaacgcagcgtcagc

SEQ ID NO: 709203 - DNA, 82 bp, Homo sapiens
agctgagccagtaccgggaccagcacttccgggaaaggacttagaagccttacaaatacatctgtgcattcttgcttcagac

SEQ ID NO: 709204 - DNA, 95 bp, Homo sapiens
caaagctgcacggcagtctgtttatgagggttatgtattaagctctattgaaggccgagtggcagttgagtatttggacccaagccctgaggtac

SEQ ID NO: 709205 - DNA, 83 bp, Homo sapiens
aaaacttcttgccaaccaaacaccagtctctaacaaccttgaatgctactgcttggagagaggagagtaacaaatacattatc

SEQ ID NO: 709206 - DNA, 100 bp, Homo sapiens
cctcccccggcgccctctggggctccgagcccggcgggaccatgttcaccagcaccggctccagtgggctctcttcaaacatacccatatagataaacca

SEQ ID NO: 709207 - DNA, 50 bp, Homo sapiens
tggagttggcaccccaaaagaaagttacgccccatggtgtccatcctgcc

SEQ ID NO: 709208 - DNA, 51 bp, Homo sapiens
gatcagttgaaggcacactgtaaaggacctgaaggagaagaaggagaaggt

SEQ ID NO: 709209 - DNA, 75 bp, Homo sapiens
cgcacgactgcatctctctctgcatccaggcgcaggtggatctcgagccagaggggaaagtatttgtggtaataa

SEQ ID NO: 709210 - DNA, 119 bp, Homo sapiens
aactcccaggctcaagcaatcctaccatgtcagccttcccagtagctggaactacagattcgggaactggagcctctcctctgtcacagtgacaatccatctcagctcatctggacatc

SEQ ID NO: 709211 - DNA, 100 bp, Homo sapiens
ttatcagcgccgtagagaagtccagaaaacacataaacacctgggtagctgaaaagacagaagatcaggtatttggatccaatctcgctaatctgtgtca

SEQ ID NO: 709212 - DNA, 98 bp, Homo sapiens
aggtgggcagatcctcagatcagtgccaacaatatgcccaagcaggtggaagtgcgaatgcacgacagtcatcttggctcagaggaacccaagcaccg

SEQ ID NO: 709213 - DNA, 83 bp, Homo sapiens
ctccaccgtagcccttgccaaagcttcctgcctgacacagctcacttcaagaagtgcacaatgtcagaacgtggaattaagtg

SEQ ID NO: 709214 - DNA, 98 bp, Homo sapiens
attctttactcagctgagtgtgccacacaggtagccctggacggcattcagtgttttggaaatctgaaatagagtactatgctatgttggctaaaact

SEQ ID NO: 709215 - DNA, 101 bp, Homo sapiens
gacaagaccatcgagctcatggtgacagagctgaatgaacctctctccaatgaagatcgaaatctcctctctgtggcctacaagaatgtggttggtgccag

SEQ ID NO: 709216 - DNA, 50 bp, Homo sapiens
ccccggtctatgccaggcgcatctcagaaagaatcttcaagagggagaca

SEQ ID NO: 709217 - DNA, 75 bp, Homo sapiens
gcagctggaggtccagattcaaactgtcactcaagccaaggaagtaatccaagtgggctcgggatgagtttgaag

SEQ ID NO: 709218 - DNA, 75 bp, Homo sapiens
cgtcctcttgtcctcctcagcctcgtgtcggagatgtatgcagtgtgacgccaagtttgactttctcaccagaaa

SEQ ID NO: 709219 - DNA, 106 bp, Homo sapiens
ctgggccgcggccgaggaggcagcgcgacctccgcacggctgcagaagatgtcaatgttactttcgaagatcaacaaaagataaacaaatttgcacggaatacaag

SEQ ID NO: 709220 - DNA, 90 bp, Homo sapiens
gcgggccggggcgcggaccgcggagcggccgcccactattccacagggaaggtcagcgcttccttcacctccaccgcgatggtcccggag

SEQ ID NO: 709221 - DNA, 87 bp, Homo sapiens
aatagtgagtcttccaaccagagcttgtgtagcgtcagatccttgagtgataaaggagtagagggcagaggagagagaccagtgaag

SEQ ID NO: 709222 - DNA, 75 bp, Homo sapiens
tctaccacacccttaataagctggctttgatgcggcctggaagaattgatagaatcatctatgtgcctttaccgg

SEQ ID NO: 709223 - DNA, 75 bp, Homo sapiens
tggacgtctggggcaaagggaccacggtcaccgtctcctcagcttgtaacacttcaagaagcaaaactgctgcta

SEQ ID NO: 709224 - DNA, 102 bp, Homo sapiens
aggatcatgtctgcgagccaggattcccgacaatgcagatcttcgtgaagactctgactggtaagaccatcaccctcgaggttgagcccagtgacaccatcg

SEQ ID NO: 709225 - DNA, 100 bp, Homo sapiens
ggaatctaaagcctcctcagccttctgagtcagcctgaaaggaacaggccgaactgctgtatgggctctactgctgggtttcaagacattctgaccgagg

SEQ ID NO: 709226 - DNA, 100 bp, Homo sapiens
ccaaaaccccggctgtcagcgactgcgggcacctgcacgccgacgagaccggcgggcggacagcgactccggagaacaaggggtctgtggaaatcatgag

SEQ ID NO: 709227 - DNA, 75 bp, Homo sapiens
ctttcgaagccattcagtcctcaatctccttttccttggctacccgatcagtgaatgcttgtgaaaagacctcat

SEQ ID NO: 709228 - DNA, 75 bp, Homo sapiens
ccgcatcgcaaccaccgccctggccatctaccatgtgcagcccctgtcaaagggaacaggaagcagtccacggag

SEQ ID NO: 709229 - DNA, 100 bp, Homo sapiens
ctttacgtctcattcaagaaaccgaagtgatttccagaggatttacactgctagtgaaaactttagtggctgacactcctctaactgcggtagatttcat

SEQ ID NO: 709230 - DNA, 80 bp, Homo sapiens
aacttccctggtcgaacagttttttctaatggctattcaagaaaaaggagaagcgggctctagggaactggaagttgctg

SEQ ID NO: 709231 - DNA, 80 bp, Homo sapiens
gctggagattgctgcaaacttggactgagcagggggaggaacatttaagctgatggaagtggaagtggaagttgctgtac

SEQ ID NO: 709232 - DNA, 100 bp, Homo sapiens
cagagaggcgctgctgacaccgccgccacaccgccgccacaccgccgctgcctcagtcatgccgactgcccggagagcgcgctctgcctgccgcctgcct

SEQ ID NO: 709233 - DNA, 75 bp, Homo sapiens
cccagaggtcgtggaggtggccgtggaggcagaggtggcatgggatcagtgtactgttacccggacatacctatt

SEQ ID NO: 709234 - DNA, 100 bp, Homo sapiens
ctaaaatatggcatcctaatattagttccgtcacaggggctatttgtttggatatcctgaaagatcaatggtgtgatgaatgcagactctgctaccattt

SEQ ID NO: 709235 - DNA, 88 bp, Homo sapiens
cttcagtgcccgggagctcatgatccacgcgccaactgtcagtgggtggcggtcacctaggtgctgatgttgctaatgtctgtaatga

SEQ ID NO: 709236 - DNA, 88 bp, Homo sapiens
tgccattagatatgctgtcaacgctgctttgactctcccgcgaagacctttccttcactgttctactgtgattcccgttgtggttctg

SEQ ID NO: 709237 - DNA, 128 bp, Homo sapiens
ctaataggggtaccaggccctcttcctcgttagaagaaatcaggataacaaaggcatattgggcacccctacaaaaggtattgttatgacagcagagggtgatgctccagagctgccagaagaaaggg

SEQ ID NO: 709238 - DNA, 75 bp, Homo sapiens
caacggcttcatcagcaccttgggggccatcactgtgcatgtccccatgccctcagcaggagtcgtggacatccc

SEQ ID NO: 709239 - DNA, 90 bp, Homo sapiens
ccggcgcctccactccgtcccccgcgggtctgctctgtgtgccatggacggatcatgatgctgccgccaccgccgccaccacggagcgag

SEQ ID NO: 709240 - DNA, 133 bp, Homo sapiens
tgggaccgaaccagcatggggagtcggaaggggacaaatccgcgatcccagtcatgcattaatctatgccagcaattatgacaatgttagcagaccatgcagctcgtcagctgcttgatttcagccaaaaact

SEQ ID NO: 709241 - DNA, 50 bp, Homo sapiens
ccagaggggtgacagcaaaacttaagtgggcagaccaacatccacctcag

SEQ ID NO: 709242 - DNA, 75 bp, Homo sapiens
gagagaaaattgagacggagctaagagatatctgcaatgatgtactgactttccatttcaacacggttgaagagg

SEQ ID NO: 709243 - DNA, 90 bp, Homo sapiens
cccacctccagcacagtcttcattactggccatggcagggaggagtacagggaccggtcagcggcaaccacctatttctgcaagcaggcc

SEQ ID NO: 709244 - DNA, 100 bp, Homo sapiens
tgtgcattcacggaaagatgaaatataaacgcaataagatcttcatggagttccgcaaattgcaaaggccaaggcagaggcttcctcaggagaccatccc

SEQ ID NO: 709245 - DNA, 156 bp, Homo sapiens
ttctacagtcctcttaaatgaatctttagaacttggcaagtctcactagataccttcaatcatcattttgagctcaaagactcgagaacaggaagaactggaagaagctttagaagtggaacgacaggaaaatgaacaaagaagattatttataca

SEQ ID NO: 709246 - DNA, 130 bp, Homo sapiens
tttgagggtccgcttgctctcactagtgccaacctcagctcccaggccagttctctgaatgtcgagatggaggagatgtataagaaagctcatgctgctatacgagagaatccagtctatgaaaagaagc

SEQ ID NO: 709247 - DNA, 75 bp, Homo sapiens
cgagagaatccaagtgaagaggcacaaaatgacccagcagatggctgggatgaacttctatggagccaatggcat

SEQ ID NO: 709248 - DNA, 82 bp, Homo sapiens
gtgggactctgcacactcttcggcctgacgcccaccctcaatggcggggttgtgagtcccggcccagcccctccacccccct

SEQ ID NO: 709249 - DNA, 88 bp, Homo sapiens
gcctacgtggggatgagtgacggaaacccagagctcctgtcaaccagccagatgcagacaatctctttgaacatgaattgggggctct

SEQ ID NO: 709250 - DNA, 82 bp, Homo sapiens
ggagaagctggagctcacggagaagaaggcctccgaccccgatggcaccagcaaggagtgtgtgttcatcgagaaggttctg

SEQ ID NO: 709251 - DNA, 100 bp, Homo sapiens
atcatgtaccagcccagccggggtgcggcccggcgtctcggcccttgcctgcgcgcctaccaggctcgaccccagaaagaagatgctgatatgctacaac

SEQ ID NO: 709252 - DNA, 75 bp, Homo sapiens
tgtgggccacctcaaggcccacctgagccgcgtctaccccgagcgtccgctgagatctgtatctgtggacctgaa

SEQ ID NO: 709253 - DNA, 73 bp, Homo sapiens
cagcactgactttcagctatggaatcggctgccctgaggatctgtgtttggtgaaaaggagccaaattcacct

SEQ ID NO: 709254 - DNA, 125 bp, Homo sapiens
aaagcaatgagtgggctaaagtgaaacattcagcatccctgtctggtatgccttctcggctttttctcctccgtgacagccagagtaatccaaaggcatttgtactcacactgtgtcatcaccag

SEQ ID NO: 709255 - DNA, 74 bp, Homo sapiens
tcatgtatacaactgtagatgcaaatgggtatctgaaaaatggatcaggcggcttacagggagaacacagttgg

SEQ ID NO: 709256 - DNA, 74 bp, Homo sapiens
agataacgcggccttgggctctggtattctctactgccgctgatggtcaaacgcaagtggaaattaaagtgtgt

SEQ ID NO: 709257 - DNA, 75 bp, Homo sapiens
tcccgcggcgggaggagcctgttcccctgaggggctttgaccacgacctttgaagagcttcattttgagatcaag

SEQ ID NO: 709258 - DNA, 51 bp, Homo sapiens
ggattcagagcatacccgccgcaaggccaagtataaggagcgagggacggt

SEQ ID NO: 709259 - DNA, 88 bp, Homo sapiens
aaaaagttcaaaataaagcagcatcacttattcaggtggagccgccaccaaaatgcagattttcgtgaaaacccttacggggaagacc

SEQ ID NO: 709260 - DNA, 90 bp, Homo sapiens
gatgaagattgaggagtatatcagcaagcaagccaaagcttcagaagtgttcgcgggagcgccgcacctacaccagccaacccagatccc

SEQ ID NO: 709261 - DNA, 74 bp, Homo sapiens
gagaagaagaggagcgttggagaatggaaatgaggaaagattctgaagcttggcggagaggggtgtgtgagtgg

SEQ ID NO: 709262 - DNA, 82 bp, Homo sapiens
cctcccgctcggccccgccagcagcactgtggaggccgtcctcgagatgccctgtatccaagcccaatatgggacaccagca

SEQ ID NO: 709263 - DNA, 82 bp, Homo sapiens
gcaagtattgctgtgggtgctgggacttcccgtccgcggcgtggagggagaagatggtataaactggtccatcagtgacaaa

SEQ ID NO: 709264 - DNA, 82 bp, Homo sapiens
tgctgccagtcccctgccccgggcaaagcccatctggtccgccgagcagtaagactttgaccccgacgcaggcttcagtgat

SEQ ID NO: 709265 - DNA, 60 bp, Homo sapiens
attcctccatgactcaaggcacagactctccaggtgaatcaaaaactctggttttaagca

SEQ ID NO: 709266 - DNA, 100 bp, Homo sapiens
gtgaacaacctgaacgtcaccgaggagaagtaccaggaggcgttggccaaggttcaaggagcagggacaagttacaggaatgttctccaagcagcaatcc

SEQ ID NO: 709267 - DNA, 98 bp, Homo sapiens
gtatccgccaacacagaggaaagggtttgactgccgatgtggaaatttgttttgtggacttcaccgttactctgacaagcacaactgtccgtatgatt

SEQ ID NO: 709268 - DNA, 100 bp, Homo sapiens
caggaagatgtcgaatgaacttgatggtctcggaaagagggtcgtggtcccgcacggatgcgcttgttgggagaaaccttggagattcacggcaaggcgt

SEQ ID NO: 709269 - DNA, 74 bp, Homo sapiens
cattacagccaagatggtgctgtcccagagacaacgagatgaactattgtgaatcggcacggtcctgaggcaga

SEQ ID NO: 709270 - DNA, 82 bp, Homo sapiens
agacgctttacccgactctttgggccgttatctcacgtctcggcgcggaagatggccggcggcgtggacggccccatcggga

SEQ ID NO: 709271 - DNA, 100 bp, Homo sapiens
ggcacagtggagcagctctgaagatgcaaagaggccccacagtatcaaatatccgcctggctggattagagtatgttctgcacttcactgcactgaatgg

SEQ ID NO: 709272 - DNA, 100 bp, Homo sapiens
ttttacacggcagagaggaaggacgcggccgccatggaccccatgggagattactacaaggggatccggcagatggtgcaggtcagcgaccaggacatga

SEQ ID NO: 709273 - DNA, 80 bp, Homo sapiens
cttccggatcctgcgcgcagacttaaagcttttcaagccaggccaagaagctgtgaagtaccagggtcctcgggacttcc

SEQ ID NO: 709274 - DNA, 82 bp, Homo sapiens
cagccaccctcgctccctctgctcttcctcccttcgctcgcaccatgacggccgaagccctgcagcccacgctacagccgga

SEQ ID NO: 709275 - DNA, 82 bp, Homo sapiens
ctggcgtgcactccgcacctcggggacattattgcgcgtggaacggctgcttttggaaggctgatcagctgaccgaagaaca

SEQ ID NO: 709276 - DNA, 83 bp, Homo sapiens
ctgacgtggagcggtacatcgcctcggtgcagggctccaccccgtcgcctcgacagcctggtccgacccccagtggcactaac

SEQ ID NO: 709277 - DNA, 100 bp, Homo sapiens
cacaacttcattgctgggaaaagggacttgccatgaggtgttgaagccttgtttcactgagttggagagactggacctaaatggcgcagcatgactttgc

SEQ ID NO: 709278 - DNA, 75 bp, Homo sapiens
tggtgttagactgggattcagtcagagccaggaggacgggcagggtgcgggcagcagaattccacatggcccagc

SEQ ID NO: 709279 - DNA, 97 bp, Homo sapiens
ttttgaagaccacttttaaggtgtctagtaagacagcaggaacctggccctgggaggaggcctgttgctgctcctagcagaatcccgttctgaaggg

SEQ ID NO: 709280 - DNA, 101 bp, Homo sapiens
cgaggaaagccgcccagctctataccttgtgggtcaccttccagcttctgcagaaagccgtcattacacctgattttgaaaaaaaccactgtgttccacca

SEQ ID NO: 709281 - DNA, 87 bp, Homo sapiens
ccggctggggtgtgtgctcctggacatggatttgattgacatactttggaggcaagatatagatcttggagtaagtcgagaagtatt

SEQ ID NO: 709282 - DNA, 104 bp, Homo sapiens
ctcgaggtgcgcgccggcccggactcggcgggcatcgccctctacagcccaactgaccaaccacatccgggagtcgctgccggccctacgtagcaaactacaga

SEQ ID NO: 709283 - DNA, 90 bp, Homo sapiens
cacagtgatgaagaaagtgttagaaacagtagtggagaatcaagatcggcttcagctccccaggaatatgattgaaaacagcatgtttga

SEQ ID NO: 709284 - DNA, 75 bp, Homo sapiens
ctgaaaccaccgtggaagtcgcctggtgtgaactgcaggcctcattgctacgatttcagagtaccctggtaatag

SEQ ID NO: 709285 - DNA, 98 bp, Homo sapiens
ttgctcaagaaggaatataaagaagatcttgaaaaatcgaagattaagacagaactcaactcatcagctgaaacttggatttacactgggcaacgtgg

SEQ ID NO: 709286 - DNA, 75 bp, Homo sapiens
cgaccacgtctccaaaatgagtcgcatcttcaacccccatctcttccacagcgcggcacctgtacctccggggtg

SEQ ID NO: 709287 - DNA, 82 bp, Homo sapiens
ctaccggtctgtcagtgagatggcttctaacaaggcttgttttcctgctcagaacaaagtgacttccctgaacacatcttca

SEQ ID NO: 709288 - DNA, 76 bp, Homo sapiens
ggcacatggcccaggcagaccttgcagtcaaactcttttggtacaccagaaggccagaatggaacgacttcaaaga

SEQ ID NO: 709289 - DNA, 83 bp, Homo sapiens
catgatggcgatacgggagctcaaagtgtgccttctcgggtggaaagttcgacgaactctagcattctccatccacgagcttg

SEQ ID NO: 709290 - DNA, 101 bp, Homo sapiens
agtgatgaggaaagctgtgaaagttctcaagtgccgcagaatggaattcggcattgttcctacacagcttctcggcaacatctctatgttgataaaaatac

SEQ ID NO: 709291 - DNA, 50 bp, Homo sapiens
ccggacccaaagtgccatgtctttaatactacacttgctgctttgaagga

SEQ ID NO: 709292 - DNA, 87 bp, Homo sapiens
tcgaattcggagttccactaaaaagtgtgatccagctttgcttcctgagcccaatcacgtcatgctgaaccacctatacgcgctgtc

SEQ ID NO: 709293 - DNA, 83 bp, Homo sapiens
gcaggactcagaggcgagagtggccccagccgggccagaagcagtacctggagtagaacagaaaaattattatgtctgtgttc

SEQ ID NO: 709294 - DNA, 100 bp, Homo sapiens
agacatccttcgcttcatttattcagagccctctccccagaagtagagtggtgaaaaatgacagacggtgatggagtaagaaaatctcaccctgcagcac

SEQ ID NO: 709295 - DNA, 98 bp, Homo sapiens
aggggaggaggaggaggattcagggaataggagctggggagcccttctgcgccacagggccgttgctccagggagaactgcaaatatcttcatccacc

SEQ ID NO: 709296 - DNA, 75 bp, Homo sapiens
agacctccagaactacctgtaaattatgtgaaacctccaaatgtgggaaccataaatccatggctaaccttgaca

SEQ ID NO: 709297 - DNA, 97 bp, Homo sapiens
gtggaagtggtgaaacccaaacaacatctcctgctattccttgggctgcctttcctgcagtatgagcccagaggacctggtcggcccttgtaccaaa

SEQ ID NO: 709298 - DNA, 51 bp, Homo sapiens
agcccgggaccgtttaaaaaactgagccctatgagtttgtctctctggaat

SEQ ID NO: 709299 - DNA, 75 bp, Homo sapiens
agaagaaggcggaaggcggcggaggcggcggtcgccccggggctccggcggcggattcatgttacatgtaaagct

SEQ ID NO: 709300 - DNA, 100 bp, Homo sapiens
caatggaatctggtccaaacaatcatgggaatttccaaggggattcaaacttcaacagaatgtggcaaccagctttgaaagccaacacatcctcctgaga

SEQ ID NO: 709301 - DNA, 100 bp, Homo sapiens
gaggggtggtagttgggttcgaggcagaagggagagggctgctaaggaagcaaaaaaggctaagcaagcatctaaaaagactgcaatggctgctgctaag

SEQ ID NO: 709302 - DNA, 87 bp, Homo sapiens
tccctgaagagggaagacacgcggaaacaggtttgtgaaatggctgctgacatttctgaatccagcggggctgactgcaaaggagac

SEQ ID NO: 709303 - DNA, 98 bp, Homo sapiens
tgatcctttcatctcagcctcctcagtagctgagactacagatccctatgccatcgtctccttcctgcaccagagccagaagacggtggtggtgaaga

SEQ ID NO: 709304 - DNA, 130 bp, Homo sapiens
gcctagatggctttggtcacggtccagcggtcacctacccccagcaccacctccagcccctgcgcctcgggagtatatgttgctgcagtacgggaattttacttgtctgtttattttttcaaaaagaaaa

SEQ ID NO: 709305 - DNA, 75 bp, Homo sapiens
gcgctactctctctttctggcctggaggctatccagcgtttctctccatggaagaggagaagaccagaggcatct

SEQ ID NO: 709306 - DNA, 90 bp, Homo sapiens
gctcctactatccatttcaactacagatactttgaagtagaagaagctgatggggcggtgtgcccactggaagagctgtgtgatgtggcc

SEQ ID NO: 709307 - DNA, 114 bp, Homo sapiens
cggcggaggacgcgcccggcgcccctgagccggccgagcggcgacggaccgcgagacaatgcagatcttcgtgaagactctgactggtaagaccatcaccctcgaggttgagcc

SEQ ID NO: 709308 - DNA, 75 bp, Homo sapiens
cggaagtgctgttgtcacacctcagttacctcagggaaagctttccttaaagtttcccatgtctcaatggactcc

SEQ ID NO: 709309 - DNA, 82 bp, Homo sapiens
agaatgcgctcttcaagcggatcttgaaggagcgatatatagttatcagcaaagtagatgaagaagaacgcaaaagaagaga

SEQ ID NO: 709310 - DNA, 75 bp, Homo sapiens
aaagctctgaaggacttgctgaaatgggtcttagaggttgaaacaagagagagagctggtgttaagtgagctgag

SEQ ID NO: 709311 - DNA, 48 bp, Homo sapiens
acatctcagtgaatttgcaagtgggaaattggattccaagatccatca

SEQ ID NO: 709312 - DNA, 96 bp, Homo sapiens
ctgacactgcctcctgtcagccagtgcagtgagcttagacattccattgggaagctctccactgggcccttttcagcatgcaagccacgggccacg

SEQ ID NO: 709313 - DNA, 90 bp, Homo sapiens
gtgaacatttgtagcattgatttcccggatctggtaacatggcaaaagatgtcatattgaacattccagatacctatcattactcgatgc

SEQ ID NO: 709314 - DNA, 101 bp, Homo sapiens
agaacccccggccgtcccacgagctcacagagctatgaacagaatatcaaacagattggcacctttgcctctaaccaagagccactgagagaggaagactc

SEQ ID NO: 709315 - DNA, 139 bp, Homo sapiens
cgcggccccgcccccgccggttcgcgtctctctgctgcggcgcggggaccgctgtgctctcggatgaccggaaagaagggatgaccgcgtttgtggaaaagagaaaggccaacttcaaagaccagtgagaaccagctgc

SEQ ID NO: 709316 - DNA, 101 bp, Homo sapiens
gaggaaaggcggcctcgccggggacccggccatggcgctggacttcttggctggatgcgcggggggtggtttggctttgaatgacagcaagaactctgtct

SEQ ID NO: 709317 - DNA, 85 bp, Homo sapiens
cgatcctcgcgtgagacagatcaagatcaagaccggcgtggtgaagcgatatgttgatgatgtgatcagccgcattgacaggatg

SEQ ID NO: 709318 - DNA, 50 bp, Homo sapiens
ctcctgagtagctgagattacagatcattaaaatccgtgcccagacggaa

SEQ ID NO: 709319 - DNA, 75 bp, Homo sapiens
cacctgggactcttggaactgggcttggtgcaggatttggaacaggaaaatgtttcaacgtgcgcaagagttgcg

SEQ ID NO: 709320 - DNA, 75 bp, Homo sapiens
accggcacctgcacacctggatccaggataacggaggctgggccctgacaagccaattgacagatgaagagctag

SEQ ID NO: 709321 - DNA, 75 bp, Homo sapiens
gggcaataagagcctggtggtggcccacgcgcagagacagagtcttaccctgtcacccaggctggagtacaatgg

SEQ ID NO: 709322 - DNA, 100 bp, Homo sapiens
gagaacgtccactgcgggccggcgaaagctggtagtgggcagcagtcagtgacaggtgtaacctctgtggatgacagcaacagttactggaggatacggg

SEQ ID NO: 709323 - DNA, 114 bp, Homo sapiens
cgaccaagagggtgttcgactgctagagccgagcgaagcgtactccaaagattcaggtttactcacgtcatccagcagagaatggaaagtcaaatttcctgaattgctatgtgt

SEQ ID NO: 709324 - DNA, 74 bp, Homo sapiens
tggccctctaccaaaccgtggttgctctaggtcgtaaccagcctttgaaaaaggagaaaccaaaatggaaaagc

SEQ ID NO: 709325 - DNA, 101 bp, Homo sapiens
cgcccccgcccgcactccagagccggctgagaacggcagcggcgagggctccacgtgcagcgtctctccggatgctgttgatggagtaatgaatggtgaat

SEQ ID NO: 709326 - DNA, 100 bp, Homo sapiens
ggaacatactctccgaatccctgaagttggtgtcagtaaggcagagatcctacaagaatccaggatgatgatcccagattgccagcgcaggttggaagcc

SEQ ID NO: 709327 - DNA, 90 bp, Homo sapiens
ggtctcctctcaagaaatctcaagatattaaagttactgctgttaaaaagggctctgcctgccacaattcatgagctggccagaggtctt

SEQ ID NO: 709328 - DNA, 100 bp, Homo sapiens
gttaatgaagacatcccagaagtgtctgatacggtgttgaaggcaatcacagttggcagatgacttgatctccgacattttcaccactattggctcagtg

SEQ ID NO: 709329 - DNA, 75 bp, Homo sapiens
aacacagcaaggaaatgtgagccccaggctgcagaaggcagttcaattaacctccagaagatggctgaacctgca

SEQ ID NO: 709330 - DNA, 98 bp, Homo sapiens
cagaagaaaatcattagcctatgagcgagatgcgagaacacttttggctaaaaatctcccttacaaagtcactcaggatgaattgaaagaagtgtttg

SEQ ID NO: 709331 - DNA, 98 bp, Homo sapiens
aggagcgggactgagagcgcctggaggctcgagcggaggaatgatatggaacctagcaaagctgttccactgaatgcatctaagcaagatggacctat

SEQ ID NO: 709332 - DNA, 100 bp, Homo sapiens
agcatcgcttgtcagcgaccagtaggactggtccttatggaaggagtgacagatactaagccagtgaccaaagacttgaccactcaaagtccagctcccc

SEQ ID NO: 709333 - DNA, 83 bp, Homo sapiens
gcttcattcatctgctgcgctctgaggaccctgaccagcagtacttgggtgctggtatagaaatctaccctgggagtcagtgc

SEQ ID NO: 709334 - DNA, 82 bp, Homo sapiens
ggaggagaaggaaggcatggaaagttccagccggttcgagagctagatactcaggagaaggaagtcagagcgatggtaggca

SEQ ID NO: 709335 - DNA, 75 bp, Homo sapiens
gccgtcatgggcgcctcggccgccatggtcttcagcgtaagactttgaccccgacgcaggcttcagtgattgccg

SEQ ID NO: 709336 - DNA, 83 bp, Homo sapiens
gctggtttattgcgacgggcacggctgcagcgtcgcggtgcatcaaggatctctctaggagctgacactcgaaccttcacgac

SEQ ID NO: 709337 - DNA, 83 bp, Homo sapiens
atgacattgtggacagtgacagcgatgctgaggatcgaggaacgttgtctgagcccaaatcttgtgacaaaactcacacatgc

SEQ ID NO: 709338 - DNA, 101 bp, Homo sapiens
gggactcatgatctttgggatagcagattgtttgcctactccaggttaaagctcgagctactactcgagaggtaatggctacttatactattgaggacata

SEQ ID NO: 709339 - DNA, 90 bp, Homo sapiens
aagatgtctgacatggaggatgatttcatgtgcgatgatgaggaggactacgacctggccccaggcatggaagagctgatatgggaacag

SEQ ID NO: 709340 - DNA, 75 bp, Homo sapiens
gcccccggggggccgcaccaggacctgagggtcaaggcaaggctgcagctctaccggacgcgggacatgggctgg

SEQ ID NO: 709341 - DNA, 83 bp, Homo sapiens
gcctagcgctatgcctgcggcggagactgcatcaggctctcggactgagcagggggaggaacatttaagctgatggaagtgga

SEQ ID NO: 709342 - DNA, 97 bp, Homo sapiens
ttgatcaccattggctgggaaggaaaaacagaatcagctgttccctgcgaaaggctttcttagaaatggcttctgaggaagctgccgttactatggt

SEQ ID NO: 709343 - DNA, 98 bp, Homo sapiens
aattcttgaatgacatccgagcgaaagagaaagaggtcccaggtgtgacaccttcagcaggtctcagggaagatggcagccctaggggacattcagga

SEQ ID NO: 709344 - DNA, 76 bp, Homo sapiens
ccttctatgatcggttccactggttcaaacttgtggggagggccgcgatgggcctcttggaacattggtgtgttca

SEQ ID NO: 709345 - DNA, 80 bp, Homo sapiens
cagtccatgacggtgaagaagggagagaatgttgtaccatctttgggtaggcagacttccctgacgacatcagtgatacc

SEQ ID NO: 709346 - DNA, 86 bp, Homo sapiens
ggacctcactgagaagcttgaggccctggaatccctgcggctacaggagcaggcggccctggagacagaggatggagaggggctac

SEQ ID NO: 709347 - DNA, 90 bp, Homo sapiens
ccctaatgtgctggagatctggaaccttgtgttcatccagtataacagaagaggtgtggtggaaaggtcttccagaaccagaggctaagc

SEQ ID NO: 709348 - DNA, 98 bp, Homo sapiens
ggcacgcggacctccagtggccggctccggaggcttggtgactccagtggcccaggtgaaaggtgtagcagtcactcggcctacacccacagcatcga

SEQ ID NO: 709349 - DNA, 100 bp, Homo sapiens
ccacgaaggatccctcacagcccagctcgggaagtggacagactgggcgtcatgacccttgtatttacatgaggaatttccagagtcctggtcagttccc

SEQ ID NO: 709350 - DNA, 97 bp, Homo sapiens
ggaaatcatgtcaagcgaagccttgaaaaagctgccctgagacggtgtcccgccgaaagggactttgaacatgtcggggatcgccctcagcagactc

SEQ ID NO: 709351 - DNA, 50 bp, Homo sapiens
gaggaaagctgtgaaagttctcaagctacagcctccgcttggcgtcccga

SEQ ID NO: 709352 - DNA, 75 bp, Homo sapiens
gagccagaacctgagcctgttaaagaagaaaaactttcgcctgagcctattttgaaagtttcctacactactgag

SEQ ID NO: 709353 - DNA, 98 bp, Homo sapiens
cggccccggcctggtcctggccccggagctgttgctggacccctggcagggtttcattgaaaacagatcctgcaaaagttccaggtgcccacactgga

SEQ ID NO: 709354 - DNA, 82 bp, Homo sapiens
ctcggccctgtgcgacagacactccaagtgatgaatttttagatgtgatctactggttccgacagatcattgctgtggtcct

SEQ ID NO: 709355 - DNA, 50 bp, Homo sapiens
tcgggcctagcggagccgggactggaggtctgccatcatggatgttctcg

SEQ ID NO: 709356 - DNA, 82 bp, Homo sapiens
tccagagagttgggtccaaactcttctttgacaagagagacaactctgactttggtttttcacgactgaaaacaacatagca

SEQ ID NO: 709357 - DNA, 88 bp, Homo sapiens
tgtccacgtcgggtcagatccgacagaagaatagctctccagacccccagctggccatgtggtgagttcagggcccaaatcaagtagt

SEQ ID NO: 709358 - DNA, 100 bp, Homo sapiens
atcgtcgccacctggatgctggagcttccccgggcgctgcctggacaggcctgcctgcgtgctgggacatgtctggcctccaaggaccgtcggtgggcga

SEQ ID NO: 709359 - DNA, 74 bp, Homo sapiens
ccagacctagaactacccagagcaagaccacagctggtgaacagtccagtggctgccaattctcttaaatgaac

SEQ ID NO: 709360 - DNA, 88 bp, Homo sapiens
caagccgctggcagccgcggatctcaccgccgctcagggtatcatgatattagctggtttgacatcaagtcatttgtgagtcatcaga

SEQ ID NO: 709361 - DNA, 82 bp, Homo sapiens
tgggcgctgctggcgctctggctgtgctgcgcgacccccgcgcatggaccatggccaacctggagcgcaccttcatcgccat

SEQ ID NO: 709362 - DNA, 100 bp, Homo sapiens
actgctgctacttcctcgtttgacaccttcctggtattggtaaaggttttcaaggtgtcatgaaaagatggggatttaaaggccagcctgctacgcatgg

SEQ ID NO: 709363 - DNA, 73 bp, Homo sapiens
ttccttacctgtttttccagctcacccactgccagcagagatcatggaagggaagtggttgctgtgtatgtta

SEQ ID NO: 709364 - DNA, 74 bp, Homo sapiens
ccctctgaagcctcctcgccgccgtttctgagaagacgaagggaacgtcatcgtttggaaagcgtcgcaataag

SEQ ID NO: 709365 - DNA, 100 bp, Homo sapiens
gatgatccttacggaaaaggaacagattgttcctaaaccagaagaggaggttgcccagaagaaaaaggttcattaaagaagcggaagcagaatgaggctg

SEQ ID NO: 709366 - DNA, 101 bp, Homo sapiens
ttctaggattctgctggactagttcaactgaaattgtcttcataacagatcaaggaatcgaattttaccagacaattccagggctttcgaatcgtgcttca

SEQ ID NO: 709367 - DNA, 100 bp, Homo sapiens
atctgtggtggaagcagacctcgtggaagcgctggaaaaatttgggacaatatgctacacagtctcaccagtggtattcttggggcccacctaatatgca

SEQ ID NO: 709368 - DNA, 75 bp, Homo sapiens
ctggagtggtttgtctgtgatggctggaagttcctctgtaccaggtactccttccaggatgaggaggacatgttc

SEQ ID NO: 709369 - DNA, 75 bp, Homo sapiens
ccgcctcacctggggtatggagaggaaggaagagcatttgccgaatacattctgatggatcccagtcccgagtat

SEQ ID NO: 709370 - DNA, 100 bp, Homo sapiens
acttcaagaaagagacagaatggtccgagcatgcattgccattatctgtgaactaggttcaccaggctggtttaacctgcgattattcagaacttcctca

SEQ ID NO: 709371 - DNA, 75 bp, Homo sapiens
caacgaaggtgaagccacggaagataagggggggccctcagcctcttggccttgaacgggctgttcatcttgatt

SEQ ID NO: 709372 - DNA, 100 bp, Homo sapiens
tctaacaccacagttcttggtggtgaagtggaacaccttattgagaaatgggagttacagagaaatcgcatgtgtgagtgcccctagtgtttaccagaaa

SEQ ID NO: 709373 - DNA, 74 bp, Homo sapiens
agtacttggcaagatttgatgctcttgtgctcagtgacatcattcagtcccaggacatcaaagctctgcagaaa

SEQ ID NO: 709374 - DNA, 50 bp, Homo sapiens
ctggagtagagtcttttttcactgagggtttaccgacaagactgtgaaac

SEQ ID NO: 709375 - DNA, 82 bp, Homo sapiens
ccgcccttcgccttcgttgagttcgaggacccgcgggaacggcaggagcagctgatgggatatcggaagagagggccgaagc

SEQ ID NO: 709376 - DNA, 100 bp, Homo sapiens
ttcctccctcctccgagagaccgccgaggtgcgggctgtgagagggggagcgtggagcctccgaggccgaggagacttgaatgaaaattctgtggagaat

SEQ ID NO: 709377 - DNA, 91 bp, Homo sapiens
gtatctggtgaaatggagaggctggtcgcccaagtgagaagccctaccactgcaactgggacggctgcggctggaagtttgcgcgctcaga

SEQ ID NO: 709378 - DNA, 90 bp, Homo sapiens
gctcggggtgactcttctcaaatgccttctcatccccacatagtgtctgatgatttgtgagcctcaagtgactactctgtggaatcatct

SEQ ID NO: 709379 - DNA, 96 bp, Homo sapiens
gctgggcgccgccgcgggcgccgggagcgagctgggagggagccgcgcgcctttgtgcgcgcgccgaggacagaatctggatagtatgcttcatgg

SEQ ID NO: 709380 - DNA, 110 bp, Homo sapiens
gtggttcctgtgatctgtgtcctctttgcagaaggtactccaaagattcaggtttactcacgtcatccagcagagaatggaaagtcaaatttcctgaattgctatgtgtc

SEQ ID NO: 709381 - DNA, 98 bp, Homo sapiens
gccaatgtcctggtgtggcacgctctcctcctacccgtaaaataccatgaagattttgaaaaaacaaaggggagaggctttactcccgtcgtggacga

SEQ ID NO: 709382 - DNA, 99 bp, Homo sapiens
agtgcgcaaattcaccaagagagacgtcttcctggagcgggcagaggaacgaggacgcctgaaggaagagctggaagaggctcgggacatagcccggcg

SEQ ID NO: 709383 - DNA, 51 bp, Homo sapiens
ttctgccggaatttgaaaagtgcctacatggcagctactgcatcttcatgt

SEQ ID NO: 709384 - DNA, 104 bp, Homo sapiens
cgaattcagaaggatatcgacgtcgtgatccagaagtccagagctgaggactgcctgtttgcagctacagcctccgcttggcgtcccgatgctctccaccagcg

SEQ ID NO: 709385 - DNA, 50 bp, Homo sapiens
accaagtacaccagctcgaagtgtatactcttgatgtaccagatgcattc

SEQ ID NO: 709386 - DNA, 74 bp, Homo sapiens
ggcggctgaggaaagcaggaggaggtggcggcggcgggaagatacccagccgatgcccaatcctgtggcgtact

SEQ ID NO: 709387 - DNA, 83 bp, Homo sapiens
ctgggatggcctctttatcctggtgcttcagaatatgatcaggagatgacttacagtctcttctgtttcactttttggatgaa

SEQ ID NO: 709388 - DNA, 99 bp, Homo sapiens
tttcccgttgaaggtgctaccgctgacgacacccctggtggatggcgaggatgagaggagtccatagaggccactgtattctattgaagaacatgtcta

SEQ ID NO: 709389 - DNA, 88 bp, Homo sapiens
gacatttcttttgtgcaagatgagcctcaagtgcttctgcattacaaggttggagcaatcactgaagaaactgaagcctgtgattggt

SEQ ID NO: 709390 - DNA, 74 bp, Homo sapiens
ggagacccctcttccgctcctgttttatactgcttccatatttacaatttttcggaattaacactaaacggtag

SEQ ID NO: 709391 - DNA, 75 bp, Homo sapiens
tccgtgtctctggattcaagtcccaggagtcctgaccagagagcagcattagtgaccagaaggatcccaaggatc

SEQ ID NO: 709392 - DNA, 82 bp, Homo sapiens
gcgggagccgctaggcggagagagaccaggcgaccactttatcaagttcttcgctccgtggtgtggtcactgcaaagccctg

SEQ ID NO: 709393 - DNA, 74 bp, Homo sapiens
gatcattctgcaagcaggcaacctgaatacagtgtggaagccagctctccaggccacggaagtcctctgagcag

SEQ ID NO: 709394 - DNA, 100 bp, Homo sapiens
gtgggccgtgccgaggatgccatcattgccctttccaattacagacttcacatcaagttcaaggagtctcttgttaattactatactggcaattgctgga

SEQ ID NO: 709395 - DNA, 101 bp, Homo sapiens
tggtgatcgcattgacttgcgtttccaccccaagcccagtgaccttcacctgcagaccggctataaggggctgcttgctctcggtgactacatgaatgtcc

SEQ ID NO: 709396 - DNA, 100 bp, Homo sapiens
ggaacaaagcccacagcaccgagcagcccgacggccatggaggctgaagagacgatggaatgccttcaggagttccctgaacatcataaaatgatcctcg

SEQ ID NO: 709397 - DNA, 74 bp, Homo sapiens
cttctcgctggccatgcactggcaactgcagcccgaggacaagcggctgtactccaaagattcaggtttactca

SEQ ID NO: 709398 - DNA, 98 bp, Homo sapiens
atcggtcaaggtggccgtgagggtccggcccatgaatcgcagcttctatatacctttgagaaagacttgcaagttttcagttgctctgtcaacagtga

SEQ ID NO: 709399 - DNA, 100 bp, Homo sapiens
gctcattttgcagttgttgaaattgtccccgcagttttcaatcatgagagaccaggagcactacagagaatttccagaggcaaattttgaattgagtgcc

SEQ ID NO: 709400 - DNA, 111 bp, Homo sapiens
ggactgcgccgcgtcttcctcaaggtggggttcggggggccaccgaatcgctgtcacgccggcaggtgctggagaatctggtaaaagcaccattgtgaagcagatgaggat

SEQ ID NO: 709401 - DNA, 51 bp, Homo sapiens
ccccgtcgtcctggtgctgcagcgtgcaccgtccaggtgaggttagagctg

SEQ ID NO: 709402 - DNA, 83 bp, Homo sapiens
ggcctcttcctgaagcatgtggagtatgaggtttccagccagaccacactccagacagatgaggtgaagaatgtaccttgtgg

SEQ ID NO: 709403 - DNA, 75 bp, Homo sapiens
agagatatctgtggatgctatgcatgtcttcattgatgaacatggtgaaggaaatactcatgaccagccagatgt

SEQ ID NO: 709404 - DNA, 82 bp, Homo sapiens
cggcggcggcggcagcgggtcttgggtcctccgagagcagcagcggcactgccgccctgcactgtagcagatgcctaaataa

SEQ ID NO: 709405 - DNA, 58 bp, Homo sapiens
cccgaagaaagccagggcctatggcagagatgacttgcagggtgcacagtcagaaatt

SEQ ID NO: 709406 - DNA, 50 bp, Homo sapiens
ctattacctttgccttggaatacaggaggccctcgggaccaaggatcacg

SEQ ID NO: 709407 - DNA, 100 bp, Homo sapiens
gggcaggagcctggcgaggatgcaccttcccctgccttggaaagtataaggatgcatttatgaaagcaaatcctggctacaaatggtgtcctaccacaaa

SEQ ID NO: 709408 - DNA, 128 bp, Homo sapiens
gtgaaccactactactgcaagcgccccatctatgagttcaagatcacatggtgcttcgagagctgtgcccaggagtgaacaaccagccctacctctgtgagagtggtcactgctgcggggagactggc

SEQ ID NO: 709409 - DNA, 75 bp, Homo sapiens
aaagccggctacgcgctgcgagttccagtgtctcgccccatcctcaccctcagggttcccagggcccaggctgtg

SEQ ID NO: 709410 - DNA, 96 bp, Homo sapiens
gtcgccagcgtcgggtgggctttcgcccgcggctcctgagggatcggtctcagccgcgcgggaggcaggtggaagtcatcataaagtttctgtttc

SEQ ID NO: 709411 - DNA, 111 bp, Homo sapiens
ggagctagggctggagcctctccagcctcccgcgaagtattggtaaaggttttcaaggtgtcatgaaaagatggggatttaaaggccagcctgctacgcatggtcaaacga

SEQ ID NO: 709412 - DNA, 97 bp, Homo sapiens
aatgcagacaagacggatgtgatgctggtagttgaactaaaattcggtgggaaagacatccctgtcaccagcgccaaccggattgcgtacatccact

SEQ ID NO: 709413 - DNA, 74 bp, Homo sapiens
atagacaagcagacaaacctgagcaagtgttttgaaatggaatctagttcatcagactactataataaagacaa

SEQ ID NO: 709414 - DNA, 50 bp, Homo sapiens
ggccatcccagagcccgtggtgaggtccagaaagcagcccaggcctttaa

SEQ ID NO: 709415 - DNA, 100 bp, Homo sapiens
cgccgctgagccgtcgcggagccgcgcagccctcggagcacggttccgtggggaccccactgcctggagtacaggtgcgcattgtctcagaaaacccaca

SEQ ID NO: 709416 - DNA, 75 bp, Homo sapiens
ccgcgtccgaggctcgcgggcggcgggcccggggctcaagggttcttgttgatgcacgagataagcttggcattc

SEQ ID NO: 709417 - DNA, 90 bp, Homo sapiens
aagggaggaaatagtggcaggtgacagtctgcatgtgcagttttcagcggatgaccaccaggctctcatctgggacatccagcaaatgcc

SEQ ID NO: 709418 - DNA, 82 bp, Homo sapiens
ccagaccctggagcctcagttggaagcagccgatccagcctgcggagcctgtggggcaggttttacctcacaaaaactacta

SEQ ID NO: 709419 - DNA, 75 bp, Homo sapiens
gcctacggcaggatgcacagcaggaggatttcggaatcttccagagtacaggggctcaggtccaggtggcagggg

SEQ ID NO: 709420 - DNA, 83 bp, Homo sapiens
tggacggcgagcgcgagcggcgcgagaaaatgtacgatcgggcgatcagtgcccctaccagccccacccgcctgagccattcg

SEQ ID NO: 709421 - DNA, 83 bp, Homo sapiens
agaaaatccacaagaacgcactttcctcccagcccgacggccatggaggctgaagagacgatggaatgccttcaggagttccc

SEQ ID NO: 709422 - DNA, 82 bp, Homo sapiens
cgcctgggtggttgttggcgtgtccctgcagcgaaggatcctggtctcggcgcggaagatggccggcggcgtggacggcccc

SEQ ID NO: 709423 - DNA, 100 bp, Homo sapiens
aaagcagggaggttatgaggcttaataaagaaggatttgtataagtccttgaaaacactatctgcagaactggtaccttggcttaatttgaagaagcagg

SEQ ID NO: 709424 - DNA, 80 bp, Homo sapiens
aaacattccaccattcaacaaaaggagtcctttgcaagagcaaaaaattgggttaaagaacttcagaggcaagcaagtcc

SEQ ID NO: 709425 - DNA, 75 bp, Homo sapiens
tggttgccatggcaccagggacggtgactgtggttaagcagctgagatctgtatctgtggacctgaatgttgatc

SEQ ID NO: 709426 - DNA, 90 bp, Homo sapiens
attttgacacagaaattcctttcctgctagaactttcagaatctcaggcgggtgagatgcttgctctgtcaaggcacagcctattgtctc

SEQ ID NO: 709427 - DNA, 75 bp, Homo sapiens
cccagaatgctattaagaaaaaaattgtcaaccgactggaggagcagatggaggacatgcggaagaaggaggacc

SEQ ID NO: 709428 - DNA, 100 bp, Homo sapiens
tcgaagcggatttccgattgaatgttgctgatatgtgttcaagatgagtgggatgggagaaaatacctctgacccctccagggcagagacaagaaagcgc

SEQ ID NO: 709429 - DNA, 98 bp, Homo sapiens
catgtcatctttgccaggactgatgcagatgcccctcctccaccagaggactgggaggagcatgtcaacaggctctgcggctaccctcctttttatga

SEQ ID NO: 709430 - DNA, 95 bp, Homo sapiens
gtcactcataagcgcgctcaagatcgtgagatggagaataaagaaactctcaaagggttgcacaagatggatgatcgtccagaggaacgaatgat

SEQ ID NO: 709431 - DNA, 100 bp, Homo sapiens
agaattcattgaaaacagctggtggacaaaattttgtggcgctctgcgtcccctgaagtggctagtattcagaagcttcctgcagcctctgttctaacag

SEQ ID NO: 709432 - DNA, 50 bp, Homo sapiens
aatcagtatgtcatatggatggtcctatggcagcgtatacaaagctattc

SEQ ID NO: 709433 - DNA, 100 bp, Homo sapiens
agggactgctgcaacctacggggtgtacttgggaacgaggggtgaagcggcccaggtgagggaggcagccttctgtgctgtgattcttgccctgctgctt

SEQ ID NO: 709434 - DNA, 98 bp, Homo sapiens
attcattctggattggtggatctgaagtacaaaatattttccagctgactttggtgtgtctgccaagaatctgaagactctacagaaacgagattcct

SEQ ID NO: 709435 - DNA, 101 bp, Homo sapiens
gagaggagccggtagcggagcacccgcaccggcggcggccggagagcggggccatggtaggggaggagtgtgtaggtgccatcgtttgcaagttggatatg

SEQ ID NO: 709436 - DNA, 100 bp, Homo sapiens
cgccgccaagatgatgtgcggggcgccctccgccacgcagccggccaccgccgagacccagcacatcgccgaccaggctagcttgtcactttctgcaaag

SEQ ID NO: 709437 - DNA, 82 bp, Homo sapiens
ctccggatctcttcgtctttgcagcgtagcccgagtcggtcagcgccggaggtatgacctggacgcgtgtgacattcaagaa

SEQ ID NO: 709438 - DNA, 75 bp, Homo sapiens
gactctactttgaccttccgaagatcatgcagagaaggactattagaagacacattagtgcagaagcttccaggc

SEQ ID NO: 709439 - DNA, 90 bp, Homo sapiens
cttacatcagtaaggtagagatgatgaccccccactacagcaaactcattattacattgggtaagaaacaaaaaagaaagaatgagtctt

SEQ ID NO: 709440 - DNA, 82 bp, Homo sapiens
gtatttcaccagtagcaaatgagatgaaccatcttcctgcacacagccacgatttgcaaagctgccagagggatgctaacac

SEQ ID NO: 709441 - DNA, 100 bp, Homo sapiens
ctgacagcatatttttttagtcacaagcttattgaattgatcggccacatcaggctgtattcatcaccaaagaaaaaacttacaccaatgcagaaatcgg

SEQ ID NO: 709442 - DNA, 90 bp, Homo sapiens
ggacccgcgtgggcaccctgcaggtggtcagacatgtcatcaactcagctggggacggcaaaacagaacagaaaggcggagataaaaaga

SEQ ID NO: 709443 - DNA, 75 bp, Homo sapiens
cgctgtgtgtctcgggcgttcagccgctcgctctccgccttccagaaggttccccctaaaggactcaaaacgtct

SEQ ID NO: 709444 - DNA, 101 bp, Homo sapiens
gtgaaggttggcctgacaaattatgctgcagcatattgtactggcctgctgctggcccgcagggaaatctgaaatagagtactatgctatgttggctaaaa

SEQ ID NO: 709445 - DNA, 102 bp, Homo sapiens
ctgttcagtcaggtggggccggtgaagcagtgcttcgtggtgactgaaaaaggtatgtgaaagcaagaacagagctaacatgggattatggctatgaagctg

SEQ ID NO: 709446 - DNA, 83 bp, Homo sapiens
ggaagccccagcccgcagccctcgggggcaccatgactcctgtgaggatgcagcactccctggcaggtcagacctatgccgtg

SEQ ID NO: 709447 - DNA, 75 bp, Homo sapiens
gccgcttcgaggggcagttcagcatcaacaagttgatattcactgatggactccaaagaatcattaactcctggt

SEQ ID NO: 709448 - DNA, 83 bp, Homo sapiens
ccgtgtcttacatcagttcagagagtacctggagtagaacagaaaaattattatgtctgtgttcccttgggactcattggaaa

SEQ ID NO: 709449 - DNA, 120 bp, Homo sapiens
ctgaatagactgcacctggctatcccaaccaggagggacgataagctgactggaaataccggcatgcaggattgatggccttatctgccattggtgaagggtgccaccagcaaatggaag

SEQ ID NO: 709450 - DNA, 100 bp, Homo sapiens
gtcttgaatgactggaaactgattggaaactctttgggaaagccactcgaaaagatacagatccacgggttttagaaaaacaagaattacagcagccaac

SEQ ID NO: 709451 - DNA, 75 bp, Homo sapiens
cttaaacctcctctggattcaagttaaagatgtgtggtttttaacaacagaggagtggcgggggagaatctcttg

SEQ ID NO: 709452 - DNA, 100 bp, Homo sapiens
cttgaatggcgactagatgtacaggagtctccccaggacagtgctatcacccgggatattaaccgaacattcccagcccatgactactttaaggacacag

SEQ ID NO: 709453 - DNA, 105 bp, Homo sapiens
gagagcgtgaccgagagcgcgaatatcgtcatcgttagaagcccaaacaaattcgaatatcttctaaaacaggaatacctctcaatgtcttaccaaagaaaggac

SEQ ID NO: 709454 - DNA, 75 bp, Homo sapiens
aaggttgaagtctgggatgtagtagacaaagatgagggaatctcgctgggaagctgacaccctggacaaagaggg

SEQ ID NO: 709455 - DNA, 96 bp, Homo sapiens
agcggccagaagcgcggccaccttcccctgctgaagcgttcactttaattttggccgacggaatcagtccccaatgcctggaaattcctcattgga

SEQ ID NO: 709456 - DNA, 123 bp, Homo sapiens
gccatccagagctgtgcctcccagcaccacagtccttctgcagtccctcgtccagccacccccaggttacttcttgctgcagattctgcgcaggatcggagctgtgggccaggctgtgtccag

SEQ ID NO: 709457 - DNA, 98 bp, Homo sapiens
aagattttggatccgatctacttttttgcattagttgataccaaggctgtgtggttcaaaaagtggatggtccggggttacccagagccccaggtgac

SEQ ID NO: 709458 - DNA, 75 bp, Homo sapiens
tggattttttaccattgtttcatcaacgtctaagaaacttggagaactccagagccacccgtcccacaaggaagt

SEQ ID NO: 709459 - DNA, 101 bp, Homo sapiens
ccagctgtctgattaatgagaaacataatgtattttgcttagaccatgctcagcctccaagcagccttgtcatcgacaaagaatctgaagtttacaagatg

SEQ ID NO: 709460 - DNA, 75 bp, Homo sapiens
gagcgccgaggaggctttcctgctggtggcaaccgcctacgagacactcaaggtagatatagttgtaggtactcc

SEQ ID NO: 709461 - DNA, 83 bp, Homo sapiens
taaacttgatgtcatcaaagccctaggatattgggttgactatagtcaatggggccaatggagccaagtgtatggaaacccac

SEQ ID NO: 709462 - DNA, 82 bp, Homo sapiens
cgtgggcctgtggactgcagcctcggcggtcagcagggggatatgagactttctactcggaatatcctgagtgttgcgtgga

SEQ ID NO: 709463 - DNA, 75 bp, Homo sapiens
cagaatggcagatggcttatgaaccacagggcaagtgtccagagaatggctgggatgaaagtacacttgaactct

SEQ ID NO: 709464 - DNA, 100 bp, Homo sapiens
cgacaaccttcccagaaagtccaagctcgtgatgccgtagggccaggtgagctgctgtgaaggactcattcttggtagccggcagttactggcaacttgt

SEQ ID NO: 709465 - DNA, 101 bp, Homo sapiens
aaccgacaaccttcccagaaagtccaagctcgtgtttcggagcaacatcccctgtcacctggttgatatctcttgcggattaccctgcagtgccacgctac

SEQ ID NO: 709466 - DNA, 75 bp, Homo sapiens
gaggaggggtgccggccgggattcgcggcccggagctcgggaccgtttaaaaggatgcttaatcgggagctcacc

SEQ ID NO: 709467 - DNA, 82 bp, Homo sapiens
cgagatcttccgccactacgagctgaaggtgatgtggccgccctcaaccgacgcatccagctcgttgaggaggagttggaca

SEQ ID NO: 709468 - DNA, 75 bp, Homo sapiens
tgaaactggggaaaagtgcaatgcagatgaatggaccaggtagtttgtttgcttcagagaatttcctgggaattt

SEQ ID NO: 709469 - DNA, 50 bp, Homo sapiens
tgacaaggcactgctttttcatgacggtatgcctgtgtcaagatgaggtc

SEQ ID NO: 709470 - DNA, 100 bp, Homo sapiens
tctgaaccatccacacatcataaagctttaccagaacaccttccaccatgaccacctcagcaagttcccacttaaataaaggcatcaagcaggtgtacat

SEQ ID NO: 709471 - DNA, 102 bp, Homo sapiens
tgaggacactgaaattcagagaggggaagtgatttgcctcagcttgtactgtggccactaacacggacaccagccgaaatgccggaaatgcggtcctgtttg

SEQ ID NO: 709472 - DNA, 88 bp, Homo sapiens
gcctcccgagtagctggaactacagggaggcagcagatggctgaaattctgatccgatgtggctggttaatgcatgatctgaaaaccc

SEQ ID NO: 709473 - DNA, 75 bp, Homo sapiens
aaggttcctgaagatggtcggatggctgcctcagttggttgaatctggcgatgtggaacccatggatatggaggg

SEQ ID NO: 709474 - DNA, 50 bp, Homo sapiens
ggaagatggcgcctgttgtgacaggccagagactgctgctactttgaaac

SEQ ID NO: 709475 - DNA, 100 bp, Homo sapiens
gtcaaacatccatatcataagtggaattttggagatattcaaaggtagttgatgtcacttggcgatattcctgcaaacatgaagaggtgattgccagaag

SEQ ID NO: 709476 - DNA, 96 bp, Homo sapiens
cttcgaaccatggaccaggccctcaagtccctgatggcctcagaggaggagaaaatgacaccatctactgggtggacatgggcctgagcacgatca

SEQ ID NO: 709477 - DNA, 100 bp, Homo sapiens
ggaatagtcctctccaaactttgacctgaggtgtgactattgacaatgcagatcttcgtgaagactctgactggtaagaccatcaccctcgaggttgagc

SEQ ID NO: 709478 - DNA, 74 bp, Homo sapiens
ttaatggtggtcctcctgctgagacggacttcgggggagacgaacttgctactaccagcaccatgccctaccaa

SEQ ID NO: 709479 - DNA, 50 bp, Homo sapiens
ggacgtgtaccctgtctaccagcctgtggaataaaattgaagggtgtttt

SEQ ID NO: 709480 - DNA, 51 bp, Homo sapiens
cgcggcgggagtggcgtggcgcagtgagaaagatcagtctaaagaaaagga

SEQ ID NO: 709481 - DNA, 75 bp, Homo sapiens
gaacggatcaagtgcttattacaggtgaagcctgatggcacatacgtgaaaccgctgagtaacaagctgacttac

SEQ ID NO: 709482 - DNA, 90 bp, Homo sapiens
agccagggcaggaaggtggtggtgtgcgacaacggcaccgggctttggaggaattttttacatcacttgtgaagcaagaaatggtgaata

SEQ ID NO: 709483 - DNA, 101 bp, Homo sapiens
aggaagccaagggagattataccagtgatgtttatccatgcatcgttgagacttcggaacctcaagaacaaactggagaataaaatggaaggaataggttt

SEQ ID NO: 709484 - DNA, 100 bp, Homo sapiens
agtcttgtattgatggttttgcactatttacaaatcacaaacataacaatggtcagcccatttggtttaccctgggcatcctggaggctctcaaaggttg

SEQ ID NO: 709485 - DNA, 100 bp, Homo sapiens
atgggagtcttggcagactttgggacgtgctcaacttggtttaggagagataatcctggcaggcaatccatggaccttgtggaacttgtgtctctttttc

SEQ ID NO: 709486 - DNA, 96 bp, Homo sapiens
aacgtgtcccggggccgacccggcccgtagtgtggaagcagcttcaggaagatggatgttttgaaagctaccgcagaacaaatttcttctcaaact

SEQ ID NO: 709487 - DNA, 100 bp, Homo sapiens
ggcggcgagacagcggcggcgacggcgcggaggccccgggcgcggcgcagaatgctgtccagtttcaacgagtggttttggcaggacaggttctggttac

SEQ ID NO: 709488 - DNA, 100 bp, Homo sapiens
tggctgccgcgtgcttctcttgaccctgtagaaataatggaaattggacgcccgcggaaagacacctggaagcgacaaggtgctggggcaaccaatggaa

SEQ ID NO: 709489 - DNA, 100 bp, Homo sapiens
ggctgccggtcgcaagacacagagcagtgggcctgggctgcagaagaatagctacaaagtttggatcccaagcgagtcagaaggtaacagaggagaagct

SEQ ID NO: 709490 - DNA, 100 bp, Homo sapiens
gaagctcagcgcagccctgcaggccaagcgcagcctccaccaggacatggatttgattgacatactttggaggcaagatatagatcttggagtaagtcga

SEQ ID NO: 709491 - DNA, 82 bp, Homo sapiens
ctgctgggccagtaccatgacatcaagcagtgcctccggagccagcgtggtggccatagacaacaagatcgaacaggccatg

SEQ ID NO: 709492 - DNA, 98 bp, Homo sapiens
cagttggagtcttgctgatgttggaatatctttctgttcaactctcaaatgctttgttaaggtgactctgacatcattagaagcatgccagaacagac

SEQ ID NO: 709493 - DNA, 103 bp, Homo sapiens
tgcaggagctattcttgaagtttgtggatgaaaattgggaaggttccctcaagtccaaggtgaccaagaatatggcccaggtgaccaaagccctggacaaggc

SEQ ID NO: 709494 - DNA, 101 bp, Homo sapiens
tgggattcagagtgcgaagcaaattgcaagttgttcatttcccccggcatggaatccaaaaatccttgtggagtgtcttactcctgattttcgaggtgatc

SEQ ID NO: 709495 - DNA, 50 bp, Homo sapiens
agtcccctcacacctttataagatatgaggccccaggattcctggcgagg

SEQ ID NO: 709496 - DNA, 75 bp, Homo sapiens
gggttcgagtaattctcctgcctcagcctcccaagcagctgggtctacaggtcatactactagatattacactgg

SEQ ID NO: 709497 - DNA, 74 bp, Homo sapiens
acagaggaacgagctgagctggcagagtcagagtttgaggagacaatggatgcactccaggctgacatcgacca

SEQ ID NO: 709498 - DNA, 96 bp, Homo sapiens
gactgtagtccacatggagctctcagcataccgtgcaacaggtcttcagataatctttcctcagtatctgcaagagaagtttgtccagtcggcctt

SEQ ID NO: 709499 - DNA, 100 bp, Homo sapiens
gactcggagctgagaggagctgctgctcggaccagcgcggtagctttgcagtttggggagggctgttttccatgattgactgtagtatggttcaagtcag

SEQ ID NO: 709500 - DNA, 108 bp, Homo sapiens
cgcgagtcctagcgtctttctactcatggtcaacgggcaggtggagagcgcccaggatttccctagagattatgacgttgcagccccgctgcgaggacgtagagacgg

SEQ ID NO: 709501 - DNA, 83 bp, Homo sapiens
ggttcgagcgctgttctcgctccggagccgctgcacatttcgaacacaccacagccatcagcactggaatgcaaagaccagaa

SEQ ID NO: 709502 - DNA, 90 bp, Homo sapiens
ccttggaactgtggtccatggtaaagttttacagatgtctttggtggacttgggaaagaggttgctagaagcagcaagaaaaggccaaga

SEQ ID NO: 709503 - DNA, 96 bp, Homo sapiens
agcccaacatgaactccagtgacccagacctggctgtggtcaaacccacccggcccaactcactatccctgccagaaccaccactgcaaacacggc

SEQ ID NO: 709504 - DNA, 75 bp, Homo sapiens
tttggcttcaatgtcatattttgggtattgttgcagcatctggcagtgagactgaggatgaggacagcatggaca

SEQ ID NO: 709505 - DNA, 82 bp, Homo sapiens
atcaccttccatacattgactacttacacactggtgctgactgcatttgatgtccagctcgccgctgtccaagaaacgtcgc

SEQ ID NO: 709506 - DNA, 100 bp, Homo sapiens
agaagacaagctaaaaatgattcgggaatatcggcaaatgaatgaacaggcatttgaagaagttttccagaatgccaacttccgatctttcatattcaga

SEQ ID NO: 709507 - DNA, 120 bp, Homo sapiens
tcccattttaattacttaaaacaccacgatgaaaagaaatacctgtgatttgctttctcggagcaaaagtgcatttaaacttccctcttagaactgcttttgtggcatcccataagtttt

SEQ ID NO: 709508 - DNA, 74 bp, Homo sapiens
tccatttgatagcctagaagaaagcagggtatacccgaaatcttgtggatcaaggaaatggaaaatttaatctg

SEQ ID NO: 709509 - DNA, 83 bp, Homo sapiens
ggccgagcaggctgagcgatacgacggacgtagacaagtttggcaacgagatcacccagctggcccggcccctgcctgtggag

SEQ ID NO: 709510 - DNA, 90 bp, Homo sapiens
attatacctagaagtctactaatggacagttagtcacccacctacatgttgagaccagcatctcagacatgtcgaaaaagatgttttgat

SEQ ID NO: 709511 - DNA, 75 bp, Homo sapiens
ccggatcctggagaacatctcgctgtcggtgaagaagattgccaaggaatcatcgaggacgtcatcctgctgggt

SEQ ID NO: 709512 - DNA, 100 bp, Homo sapiens
acaccctgatatcagtggattatgaaatttttgggaaggtgcaaggggtgtttttccgtaagcatactcagaaaggaggtgtggcatcaggattcaagca

SEQ ID NO: 709513 - DNA, 100 bp, Homo sapiens
agcagagcagcctccgtcgctgtcgctgagagcctcacgagtcgaggtcctgcaggtggagctccggcagccgccctgatgatgattattctccaccgtc

SEQ ID NO: 709514 - DNA, 100 bp, Homo sapiens
gaagtgtgagggagagaaccagcacttctgggacgcacagagaccgtgaagattccaagttcaggagaactcgaccgtggacgtgatgctgaatccaggc

SEQ ID NO: 709515 - DNA, 71 bp, Homo sapiens
agttgaatcatctgttgaaatagaatgacattggctctgtttctcagtactttgaagttataactaatctg

SEQ ID NO: 709516 - DNA, 100 bp, Homo sapiens
gcttttgtgaagcacagcacggtactggagaacacggatggttgcccccaagtttcctggcagtgtgtgatactgaggaggtgagcttgtttctggagct

SEQ ID NO: 709517 - DNA, 101 bp, Homo sapiens
ccctggtgtcacctatcagtaaaaggtcagaagagatcaattctacagaaatttccagtggttctgttgaggctttatggaattcagcatgtcaaaattca

SEQ ID NO: 709518 - DNA, 98 bp, Homo sapiens
gtcgtggccggagcggcccgcgcctgggctgccggcacttcgcggcaggtaactaggatttctacctcaaccgcgagacctatgcaaggacggtgtgg

SEQ ID NO: 709519 - DNA, 75 bp, Homo sapiens
ccctcagccctgtggctgggggcagagctcagctctcaaaggtctatggccctgtgttcactctgtattttggcc

SEQ ID NO: 709520 - DNA, 74 bp, Homo sapiens
gggattctcgacctgctaacagaactggaccttttcgtcttggacagtaaagcaccaaaaccagaagacattga

SEQ ID NO: 709521 - DNA, 100 bp, Homo sapiens
gtctctgcactgccgcccctcctcacaggagacggacacctcagcctagatcccttggtgctctccacgctgttcagagtatctgactgtcttctctcag

SEQ ID NO: 709522 - DNA, 98 bp, Homo sapiens
taaggatgtattgtggcttttgtttggattgcagcatgcagaattacagcttacaaaacactacacagcaaaataatgatctgctagactgctaaccc

SEQ ID NO: 709523 - DNA, 80 bp, Homo sapiens
aggcacctagccatctccaatatgccattgcctttgcaaaatgttagcacagtgctgcagaagcctaatcctctctataa

SEQ ID NO: 709524 - DNA, 100 bp, Homo sapiens
gagtagctgccagtgcgggaagtagcggagagaacaagaaagccaaacccgttccctgggtggaaaaatatggactaaagaggatggacatagaacttcc

SEQ ID NO: 709525 - DNA, 90 bp, Homo sapiens
cgcgggcgagcggggctttggacgccggtggagacgcaggcgagtgcctccagaaagagtcgagaagataatggatcagattgaaaagta

SEQ ID NO: 709526 - DNA, 111 bp, Homo sapiens
tgttctgaagagtgttactgtgaacattcatgcacaaatttttatgtggaggatcttacacatttgttccatggcttctcagctttaaaaggggaagtgccctagaagaaa

SEQ ID NO: 709527 - DNA, 75 bp, Homo sapiens
ccacaatagtttcacctgctattgtttcccccacccagaaacgctccagaggacaagtgctgtttgataaagtgt

SEQ ID NO: 709528 - DNA, 88 bp, Homo sapiens
aagtttttatcagaaaaggatcggaaaagaattttggaggaggaagccaagaatctggtgagcgaagccatcgcagctggcatcttca

SEQ ID NO: 709529 - DNA, 96 bp, Homo sapiens
tccaatgctgccattcggaaagtgcctactcatgaaggttacttctcttgtttggatatctggacgctgtttttggactatctgacaagtaaaatt

SEQ ID NO: 709530 - DNA, 50 bp, Homo sapiens
acaggaggcagtagccaaacacccagaattttccagttcatatgaagagg

SEQ ID NO: 709531 - DNA, 121 bp, Homo sapiens
cggaagaccgcgcgcagggcctgcagcgggagctggacggcgagcgcgagcggcgcgagaaacaggaggccactgtctgcagctcccgtgaagatgtccactccagacccacccctgggcg

SEQ ID NO: 709532 - DNA, 127 bp, Homo sapiens
cagcgctcatcgagtccattgagggcaagcagggcaagccccgcctgaagccccccttccccgcagacgtgggtatgaacgctgccgtccgtgccgtggtgcgcatgggtatctacgtgggggccaa

SEQ ID NO: 709533 - DNA, 100 bp, Homo sapiens
agtgtgagaatgtcagccctcaactggaagccgtttgtgtacggggggctggcctccatcactgctgagtgcgcaggggaaatgctgtctgtagctgagc

SEQ ID NO: 709534 - DNA, 75 bp, Homo sapiens
tgggtatcgaggcggacgacgaccggctcaagcacggacatcagtgaggactgggagaaagactttgacttggac

SEQ ID NO: 709535 - DNA, 97 bp, Homo sapiens
tcagacctcccggctcgacaggcggcgcgggcggcgggcttgagcaattcagtttccctgcctgagtgttggtgacctgtgctgtgaaatagagaga

SEQ ID NO: 709536 - DNA, 80 bp, Homo sapiens
tacttccctctgctccttcccagcaaaatgatgcttcaacacccaggccaggtctctgcctcggaagtgagtgcttctgc

SEQ ID NO: 709537 - DNA, 102 bp, Homo sapiens
ccccaaaacagcctaagaaaggccagggaacggcagcaacagcatcagaagagctaacaattgctggaatgacctttacaacttttgatcttggtgggcacg

SEQ ID NO: 709538 - DNA, 95 bp, Homo sapiens
ctgacggacaccacccgggcggactaagaaaaatggctttgtcagcccaacagatacccagatggtttaactcagttaagttgaggagcctcatt

SEQ ID NO: 709539 - DNA, 90 bp, Homo sapiens
tgatgggcatgtccgcttcgaccttcccccacaagctctggattaatcgaattacagctgctagccaggaacatggactgaagtatccag

SEQ ID NO: 709540 - DNA, 100 bp, Homo sapiens
gtgttcaagatgctctctctggaccgatcccactcccacacatcttgctgacttcactcaagtgcaaaccattcagtattcaaacagtgaagacaaggac

SEQ ID NO: 709541 - DNA, 100 bp, Homo sapiens
gcgacggcggggtccgcgcggccaggagtgcgccggtctcggggaaatgcccggttccttcgtgcccacggtcaccgcgatcacaaccagccaggacctc

SEQ ID NO: 709542 - DNA, 101 bp, Homo sapiens
tacaaatacccctttgaattaattatggctctattgacctgaaaagtggttctggaaaagtgtaccaaggccctgcaaaaggtgctgctgatacaacaatc

SEQ ID NO: 709543 - DNA, 90 bp, Homo sapiens
cttggaatctcgagcgggaaaagctcatggaatgctgtgtaaatgccctggtgacatcatttaaagagactatcttagctgagtgccaag

SEQ ID NO: 709544 - DNA, 75 bp, Homo sapiens
ttttggtctgagtaaggagtttgtggctgatgaagttaaacactttaagatgagaaaaattgatctctgtctgag

SEQ ID NO: 709545 - DNA, 82 bp, Homo sapiens
cttaaaatggtctatggtctgtctctgtacgaccccgaccacgtgtgcaatgcctccgacaacaccggccgctacgcgtaca

SEQ ID NO: 709546 - DNA, 75 bp, Homo sapiens
ctctaacgttttagaaaatcataacaagcggttctctaccctgtaaaggccttctccacagtaggcactcctgac

SEQ ID NO: 709547 - DNA, 74 bp, Homo sapiens
cggaccatgataatttccccagagcgtcttgatccttttgcagatgatgcccagcctacagagtctgagaagga

SEQ ID NO: 709548 - DNA, 101 bp, Homo sapiens
cagaggaaaatgcaagaagactgatggagcaggcttgcaatattaaaattgatgaggacatgactgcccgaattagcatggctgatgtcaagttctctttc

SEQ ID NO: 709549 - DNA, 82 bp, Homo sapiens
atcgaactcgatgactgcgtgcagactgatgaggaaaagcgtggatacccatcaacgaagttttgatattggaattcagatt

SEQ ID NO: 709550 - DNA, 82 bp, Homo sapiens
tgaatttgacatctttacccgactctttcagcggcctcccagccaacatccagctggacattgatggggaccgtgagacgga

SEQ ID NO: 709551 - DNA, 75 bp, Homo sapiens
gcaattgaagctgactactaaggagaataagcttggagatttccttgattaagaagaatgaaggactgacctggc

SEQ ID NO: 709552 - DNA, 75 bp, Homo sapiens
atgaagtgcagaggtttttttctgttccatgccattgcagtgtcaactaggcctcagttacttttcagtttgccc

SEQ ID NO: 709553 - DNA, 75 bp, Homo sapiens
cgggatatcgggtggcggctcgggacggaggacgcgctagtatcaggatcctcatgaccagccaaagagaagaag

SEQ ID NO: 709554 - DNA, 50 bp, Homo sapiens
cgggcccaacagcaacaggtctcaattggtcgggtgtgctgacagccggc

SEQ ID NO: 709555 - DNA, 100 bp, Homo sapiens
atgtcctggccatcatgaacattgtggtggaggtggatacagcagtcggagaacatctggcagagacaaatacggaccacctgttcgtacagaatacagg

SEQ ID NO: 709556 - DNA, 101 bp, Homo sapiens
acctggttccagctgcagcacgtggacgctgactcggaagtgcagcgtttagtgggctacagatggcatggcatctaaaaccttacaatgcttgattttca

SEQ ID NO: 709557 - DNA, 100 bp, Homo sapiens
ccaggcccagctgctgagcacacacgacccgcctgcggcccagcacttgtcagaggcgacttgcatcacggagatgtcggtgatgatggcttgctggaag

SEQ ID NO: 709558 - DNA, 75 bp, Homo sapiens
gaacctctgcaggagattccatttgttatcccacgacccatccttgaagaagttcacacaaaagatgttggacaa

SEQ ID NO: 709559 - DNA, 75 bp, Homo sapiens
ctgccgtcttcctatccttacccgacctcagatgctcccttctgctcctgaggaaatatcattctgcaaaagaag

SEQ ID NO: 709560 - DNA, 87 bp, Homo sapiens
cctctccagaaggcaccaccacagccgcccacttctggaaggttccatcccctgcaggcgcggcgggaggctgaggctgacaagccc

SEQ ID NO: 709561 - DNA, 75 bp, Homo sapiens
cagcaatcagatttatcattcggctcttgcaagcttaggatatgaaaagagctgtgtgttgttcaattgtgcagc

SEQ ID NO: 709562 - DNA, 75 bp, Homo sapiens
ggtgtgcagctgcaggacaacggcaggacgtgtaaggcaggagacgttctcttccagatggctgaagtccacagg

SEQ ID NO: 709563 - DNA, 122 bp, Homo sapiens
caagtaccaagtgaagactttgaacgcactcctcagagtccgactctcccacctgctaagacgcaaaatgatttcatggttatctgcaatgttgcaaaaatcctagagctagttgtaccact

SEQ ID NO: 709564 - DNA, 100 bp, Homo sapiens
tttacacttgtcaacttcctcttcagtcatcagtttatgccccgtggtgccctgcttgtcaaaatcttcaaccggaatgggaaagttttgctgaatgggg

SEQ ID NO: 709565 - DNA, 74 bp, Homo sapiens
tcccgaagccccctgcaggaactctacaacccaatccagcttcctgcctgacacagctcacttcaagaagtgca

SEQ ID NO: 709566 - DNA, 75 bp, Homo sapiens
ttgaaaaaggaaccccaaaggagtcgattcttaaaaactctgcttctgttgaaaaccagtctatccaagaccagg

SEQ ID NO: 709567 - DNA, 74 bp, Homo sapiens
cgagcggcagctggctctctggaatccggcagcctggcatcctcgctacaacctcattgttgtgggccgatacc

SEQ ID NO: 709568 - DNA, 90 bp, Homo sapiens
caggagaagatggcggtctccacaggtctttcaaacatgatgtcagatggtgaatttttaagaacaagttgtggctcacccaactatgct

SEQ ID NO: 709569 - DNA, 90 bp, Homo sapiens
tcgggtgggagtgacccgattttccaggtgagccgtctcctgattttgggaggggccaacgtgaactacaggacagaagtgttaaataat

SEQ ID NO: 709570 - DNA, 75 bp, Homo sapiens
caccaagtatggcaacatgacagaggaccatgtgatgcacctgctccagaaggaccctctattgtcccaggcctg

SEQ ID NO: 709571 - DNA, 75 bp, Homo sapiens
cgggcaaggcggagagtgacggagtcggcgagcccccgcggcgacaggtgaacatgattaaagatgatgggacag

SEQ ID NO: 709572 - DNA, 76 bp, Homo sapiens
aagcttgatcttggaggcctcaccgtgagaccttacaaagccgggcacagagcagatgctgtcccatggcaccgct

SEQ ID NO: 709573 - DNA, 110 bp, Homo sapiens
tgatgacacacagtcctatgtactcaacttccatgggcgcgtcacacaggcctccgtgaagaacttccagatcatccatggcaatgaccaccctgtggtgaaggagcagt

SEQ ID NO: 709574 - DNA, 100 bp, Homo sapiens
atgggccaaaccgggattcacgtgccagagtcttctgcagaaagccgtcattacacctgattttgaaaaaaaccactgtgttccaccatatagtgaatca

SEQ ID NO: 709575 - DNA, 115 bp, Homo sapiens
ttccgggaagacacggtgaccagctgaatcgtgtggtctcggactggttgaccttccaaaagagaattttgaagcatcttacaatgctatcacattgccagaagaatttcatgat

SEQ ID NO: 709576 - DNA, 50 bp, Homo sapiens
ggcggctgggcgggagccccagaggctcctgggtgtggacaaggtgctgg

SEQ ID NO: 709577 - DNA, 75 bp, Homo sapiens
cggagcccggcgctttccccgcaagatggacggtttcgccggcagtctcgaaaatgtcactgaaattcacaaatg

SEQ ID NO: 709578 - DNA, 90 bp, Homo sapiens
gagaagtctggtgtaatacaagatgctttaaagaaggccagaaatgtacacacaggagagctggctgcagtaaaaatcattaaattggag

SEQ ID NO: 709579 - DNA, 74 bp, Homo sapiens
ggagaaaggtctctacaggtccctcctcgttagtatagtggcggcacttcacaattgatgactttgagattggg

SEQ ID NO: 709580 - DNA, 97 bp, Homo sapiens
ataaaaataaacaaaaagtccttgaagctttacagttaatttagggatagctgggagtatggccaccctgctccacgatgcggtaatgaatccagca

SEQ ID NO: 709581 - DNA, 100 bp, Homo sapiens
gcttttgcggcaccgagggctcaggccattaagtgggcagaccaacatccacctcagcaaaaacttcttcctgacgaatcgcgccagggagcgctcagac

SEQ ID NO: 709582 - DNA, 80 bp, Homo sapiens
gctgtggtcgctgctgtgatgtgtaggaggaagagttcaggttgtacgtggacactataaaggtcagcaaattggcaaag

SEQ ID NO: 709583 - DNA, 117 bp, Homo sapiens
aagtttgaggaactactacgaacaatggggaaagcttacagactgtgtgataatgctaagtttgcaacagagagcacagaaacgtgcaagttacatcttgcgtcttgaagaaatcag

SEQ ID NO: 709584 - DNA, 75 bp, Homo sapiens
gaaccggaagctctttgaccttctggatgtccttgagttcaaccagttccagattgtgaagggttcctgagtaag

SEQ ID NO: 709585 - DNA, 50 bp, Homo sapiens
cggtgcagctagaagtccatatcggtgttggggatgtcctttgcactgac

SEQ ID NO: 709586 - DNA, 100 bp, Homo sapiens
cgggtcatctccagatgctagggttatgggcaaatacgccatgcgagacctagtccacaggcttccaggagggaacaacagcaacaacactgcaagcaag

SEQ ID NO: 709587 - DNA, 50 bp, Homo sapiens
cgccgccgctgccgcttccaccacaggcctacaggatgatgaggatctac

SEQ ID NO: 709588 - DNA, 75 bp, Homo sapiens
aatgtaaaggccaagatccaggataaggaagagttttactacccttggatgctgctgttgacatggaaaagattg

SEQ ID NO: 709589 - DNA, 104 bp, Homo sapiens
cgtgccctacttcaaggataagggcgacagcaacagctctgccggctggaagaccatggtgaatccgggcagcagctcgcagccgcccccggtgacggccggct

SEQ ID NO: 709590 - DNA, 100 bp, Homo sapiens
cctggtctacttcaccgtctccctgcagctctgccagcagctcaaggacaagggtgaatcgaaacgcatcaccctggtcctccagcagccacagtctgga

SEQ ID NO: 709591 - DNA, 50 bp, Homo sapiens
cctcctccttctcctcttgctaggctccttcctcagagaagcttcctgtt

SEQ ID NO: 709592 - DNA, 100 bp, Homo sapiens
attcagatgggatctttccggatcaatccagatggcagccagtcagtggtggaggtgtcttacaagtatcaagaacttactatatgtggttgaataaaca

SEQ ID NO: 709593 - DNA, 75 bp, Homo sapiens
gagaattacgttttaattgactatgacaccaaaaggaagctcttcgtgggcggtcttgactggagcacgacccaa

SEQ ID NO: 709594 - DNA, 100 bp, Homo sapiens
cggctcccatgttcagcagaagcgacttcagcgtgtggaccatcctgaagaagtgtgttggcctgggttgagtggagaagaccaggtgacgcagagtccc

SEQ ID NO: 709595 - DNA, 100 bp, Homo sapiens
acttctactggctgcgctcctttctggccggaggtgactctgacatcattagaagcatgccagaacagactggtgaaaagtaaaccttttcacctacaaa

SEQ ID NO: 709596 - DNA, 82 bp, Homo sapiens
gaggccccatcccgccaggtttctttcaggaggagctgacaagcacaagtgtggaacacatcattgtcaatcctaatgctgc

SEQ ID NO: 709597 - DNA, 50 bp, Homo sapiens
gtcggaggctgatcgcgcccagaagagactggctccagctttccttgaaa

SEQ ID NO: 709598 - DNA, 96 bp, Homo sapiens
gaacatgttacctgccttctgcaggcatgttatttgaaagcaattgagacgcaaccgaactttgcagtagcttggagtaatcttggctgtgttttc

SEQ ID NO: 709599 - DNA, 97 bp, Homo sapiens
acaaataaaactcgctgacttcggccttgcccgcatctatagtttccagatggctctaacctcagtgaaaccaatagagccatggcgactccctctg

SEQ ID NO: 709600 - DNA, 83 bp, Homo sapiens
taaagatttagttggaaaagtagtggatgattcaacagccacacaaagcagcaacattttttggatgcattgggatagataaa

SEQ ID NO: 709601 - DNA, 100 bp, Homo sapiens
ctacatttgactatgagatgatcttccggggaacaggagcactgatatttgtcattgactcacaggcagaagtcaattcatctggaaagactatctctga

SEQ ID NO: 709602 - DNA, 96 bp, Homo sapiens
gggaggcctggctgagctgtcatcccccagaatatgcttttaaggctattaaccagggtggccttacatcagtagctgtcagagggaaagactgtg

SEQ ID NO: 709603 - DNA, 75 bp, Homo sapiens
tgctgatgtagcccagtcgacccatgttctcctttctacaccagcattagacggtcggtcagagctgacgatgaa

SEQ ID NO: 709604 - DNA, 51 bp, Homo sapiens
ctgggaaacatcattaaatcgtggagccgccaccaaaatgcagattttcgt

SEQ ID NO: 709605 - DNA, 98 bp, Homo sapiens
gcaggagctggggccacgctggtctgggatagttgggcagggaggtggcgacatgtctaagaatgtgagccagtcacagatggcaaaattgaaccaac

SEQ ID NO: 709606 - DNA, 82 bp, Homo sapiens
cttccacttcaaggagacaacggccacacactgtggggagcttgaagaaatccgcaaatgtgggatgaaaaacttccgtaac

SEQ ID NO: 709607 - DNA, 96 bp, Homo sapiens
tactgccctacagctacagagcaggagtcacagatgctgggaagtatggcccgaaagaaacctcgaaatacctcaaggttgcccctggctttaaac

SEQ ID NO: 709608 - DNA, 82 bp, Homo sapiens
tgcagtcacgtctccaacaaccaagatgaggtttatataactttccaagacaaggaagttgtgcaaagcctcacagctacta

SEQ ID NO: 709609 - DNA, 115 bp, Homo sapiens
tggcatttgtcaagcctgccatcaacaacatctctctgatgaccctgggagttccttgcactgcactgctcatcgcagagctaaagagaaagtgagtgagaaggttggaggagct

SEQ ID NO: 709610 - DNA, 100 bp, Homo sapiens
ttgaacaaaaaagtggtgcagtttttgatgaaattgtagagaactgtcagcccaaggccaaccccactgtcactctgttcccgccctcctctgaggagct

SEQ ID NO: 709611 - DNA, 98 bp, Homo sapiens
attgcctactgtttggtgccattgtatcagcaactgatccaggtccctccagctacaaggtgggcaccatggcggagaagtttgactgccactactgc

SEQ ID NO: 709612 - DNA, 74 bp, Homo sapiens
gcaggcccaaccgccgccagcaccatggccagcaccatttccgtgttctaagaacggaagcatctgggctggat

SEQ ID NO: 709613 - DNA, 98 bp, Homo sapiens
tggccatccagcaactggctgagggactcacagctgatgacctgctgctcgtgctgatctcagtgtcttgggacaaggtgcgcattcctggtgtgctg

SEQ ID NO: 709614 - DNA, 118 bp, Homo sapiens
aactgagtgccactcgtaagaatgccagcaacatggagtacaggacctcagcagccatgtcgaagccccatagtgaagccgggactgccttcattcagacccagcagctgcacgcagc

SEQ ID NO: 709615 - DNA, 50 bp, Homo sapiens
ggggcggactccagaacaaccactggctgtcctggataatgaaagactta

SEQ ID NO: 709616 - DNA, 100 bp, Homo sapiens
cagcaggctattgtcactgccatgcctggtggcctgcctgtacccacgagccctaacatccagccgtccccagctcacgtgaagctgtggtctaccaatc

SEQ ID NO: 709617 - DNA, 98 bp, Homo sapiens
caagaaagacctggatgacatcagcaccaaaacaggcatcaccctcaagagctgccggagacaggctcagacgtgcagcttctggaatacgaggcgtc

SEQ ID NO: 709618 - DNA, 82 bp, Homo sapiens
ggcgcggcagcggagggacggcagtctcgcgcgatgatatcatcaagttgaatcgaaaggaagggaagaagcagaattttcc

SEQ ID NO: 709619 - DNA, 90 bp, Homo sapiens
ctcgggggcggcggccacgccaaggacgggatgcatcatctgcagacatcagaaaagcatatcgtaagctttcactaactttacatccag

SEQ ID NO: 709620 - DNA, 120 bp, Homo sapiens
agaaaatatgatttcctcataatagaagatgatccttactattttctccagtttaacaaggtggaaatggatattgttgaaaaactggtgaaaatgataccttgtgagcatgaagacctg

SEQ ID NO: 709621 - DNA, 110 bp, Homo sapiens
ggggccggccagaagcgggcggcgcgggggagatgattactacagcccggccatgctgggcctgaagaccgaccaggaggtcctcggggagctggtgcgggcgaagctgc

SEQ ID NO: 709622 - DNA, 76 bp, Homo sapiens
acttcctcaccctgcctcagtttcccctttctgagatgaaggatttgggggcagagcacttggcaggtcatgaagg

SEQ ID NO: 709623 - DNA, 75 bp, Homo sapiens
ctgtaccgggcgatgctgagagagagcaagcgtttcagcgcctacaattacagatggagtctccctctgtcgccc

SEQ ID NO: 709624 - DNA, 100 bp, Homo sapiens
tcaccatgctttttcagaaagttgctggtgaataaaagcattcggcagcgtcgtcgcttcactgtggctcatacatggtgactcctgcacctgcgccggc

SEQ ID NO: 709625 - DNA, 75 bp, Homo sapiens
cttaaaactggcaaagaatcaaattctattgaacaccgtagtcagtgagtatcttcccagtcttgttattctctt

SEQ ID NO: 709626 - DNA, 75 bp, Homo sapiens
tcaagtgttggcggatggaagggaggagactcctgaccctcagaatgtggtgcctgtggagaggtaaagctggct

SEQ ID NO: 709627 - DNA, 99 bp, Homo sapiens
cctgacacttccccttccccaccgaaccgcggttactcctggatggagcacctctgatagcaatccacaaagccaggtattacaagaggaaagatggct

SEQ ID NO: 709628 - DNA, 75 bp, Homo sapiens
cagggacctgcccgcctgcggctgctccggctgacatgggttttgccagattattcaattctcctctaaagccac

SEQ ID NO: 709629 - DNA, 99 bp, Homo sapiens
gaggaatcagctttgaagtgggagcccagttggaagcccgggaccgtttaaaaaactgggtgtacaactatgagcctttgacacagctcaagaatgtca

SEQ ID NO: 709630 - DNA, 82 bp, Homo sapiens
ctcccctcggaactcgggcatcatggcctcagggattgtgtgcacactctgcattccagggacacgtggctgaagaaagcaa

SEQ ID NO: 709631 - DNA, 75 bp, Homo sapiens
ggaccaaactctgctgctaaagatcatggatcaagctgctaatccccagagcaaacgaggcccctgagagctcca

SEQ ID NO: 709632 - DNA, 83 bp, Homo sapiens
agaagatctgggtgcccgtggaccacaggccctcgttgcccagatatggtcatcatgggccagtgctactacaacgagaccat

SEQ ID NO: 709633 - DNA, 98 bp, Homo sapiens
cgccctgaccccaagattccagatgttcctgtggaccccagtccaggtggccagcatcgaaatgttcagccttttagtgatgaagatgcatcaattga

SEQ ID NO: 709634 - DNA, 75 bp, Homo sapiens
ctcctggtgaatataagagaaagagaagacaaagtgtaggagaataccaagctgctattttacacttgaagaggg

SEQ ID NO: 709635 - DNA, 100 bp, Homo sapiens
ttaaatcctctttacatcatagactttcagctacttgaagatagccatcagccgctacgtgactcttttctccaggattgcacctctgcctccacctccc

SEQ ID NO: 709636 - DNA, 95 bp, Homo sapiens
ttggtgataaagattttcggacaggtttagaaaatggaatcctcctctgcgactggatagaacttatactggcttgcagactcttggagcagaga

SEQ ID NO: 709637 - DNA, 90 bp, Homo sapiens
gagcaagaaaaaaaggaagacgatgacttcagctgttaagaagaaatcctgaacggcgccttggggctagcgagaaagatgcagaggatg

SEQ ID NO: 709638 - DNA, 82 bp, Homo sapiens
atgagtatgacatgaccaagatgcccgagtgctacttctactccaagttcgtcagagcaccataacatggtgtgggaagtga

SEQ ID NO: 709639 - DNA, 100 bp, Homo sapiens
ttatttcgggcactccacagattctgttgcgaaggcagccatctttagttcgtctttcctagagagaaccactcacgaattcttgtttggtgcccttgct

SEQ ID NO: 709640 - DNA, 75 bp, Homo sapiens
atttgcgccatcatcctcatcatcatcatagccatgaagtcggggggcacgcagctgaagctcatcatgaccttc

SEQ ID NO: 709641 - DNA, 100 bp, Homo sapiens
gaaagatggagatgaacctctaacacagtggaaaggaaccgttctggatcagcttctgatcaagaatctgaagaatgagatcaccaaaaaggtacaggtg

SEQ ID NO: 709642 - DNA, 75 bp, Homo sapiens
gggtcccaggaagggcggcccaggaatactcccccagttgcaagaggcgcaggaccgtggaagacttcaacaaat

SEQ ID NO: 709643 - DNA, 98 bp, Homo sapiens
agtcagagatgagctgaagagggccagtgtgtcccaagctgtctttgcaagagtggcattcaaccgcacacagatgaagaggaagatgatgatgtagt

SEQ ID NO: 709644 - DNA, 75 bp, Homo sapiens
caagaactggttatacttgaaaccataatgctacaaactctagtccctgcactaggtcagacaatcccctttggg

SEQ ID NO: 709645 - DNA, 75 bp, Homo sapiens
ggctcgggccaggccaccggacaggaccttcttcagattcgatcgtatgtgtacgcagaagagccaaatattgac

SEQ ID NO: 709646 - DNA, 99 bp, Homo sapiens
tgttggactcaatttcaactctaactttaactttgcattggttggacaccttttaaaagttatggctgcagcttcgattgccaatattgtaaaaagttc

SEQ ID NO: 709647 - DNA, 87 bp, Homo sapiens
aagagcagcctaagcttggcagaagcagggaggatatgacagagtttgcagtgttgatgtgggtatttacctatgttggtgccttgt

SEQ ID NO: 709648 - DNA, 100 bp, Homo sapiens
ccgctcctaagcctgcacagccgcggcggcagcagcagtgagagcttcaaggaagtgtaacagagtatgaattctcccaggaggagtttcgaaatttaca

SEQ ID NO: 709649 - DNA, 98 bp, Homo sapiens
gtgaacccgtggactaagaacgcattgccgccggtcctgaccaccgtgaacggacagtcccccccaggagctcttggagtccaggctgagggtcttga

SEQ ID NO: 709650 - DNA, 100 bp, Homo sapiens
ccataccgttgaccgctcctccaactaaccattactccacaggatccgctgaacataggatgttgccacaaaatctacctcgtgtatttttctctttcac

SEQ ID NO: 709651 - DNA, 101 bp, Homo sapiens
gtcagatccatctgaagatgaggatgaaagaagttctcagaagggcaaacttgaagataaatcttttgactccagctctttagaggatctaaagtgacctt

SEQ ID NO: 709652 - DNA, 100 bp, Homo sapiens
gtttgatgttcgtgactttggaaagtttccgttactatggcaatgacggcagggactacaacaacctttcctatgagcaaccatacccgggaaagagtga

SEQ ID NO: 709653 - DNA, 83 bp, Homo sapiens
ccaaagtactggatgcatatggactcttaggtgttctgcggttaaatcttgggggatatgagactttctactcggaatatcct

SEQ ID NO: 709654 - DNA, 82 bp, Homo sapiens
cctcagttggaagcagccgatccagcctgcggagcctgtggggcagagggagacgctgttgcggcagctggagacgaaccag

SEQ ID NO: 709655 - DNA, 74 bp, Homo sapiens
gagcacatccatttcattggcaaggcagcacaacaagattcgcagcgtggaggggagccagctgaaggcctacc

SEQ ID NO: 709656 - DNA, 90 bp, Homo sapiens
cgcgaggcacctgtccccagcctgcacctcaagctcctcagcgtggtgcccgtccctgaaggcgatggatgactacagtgtgatcggccg

SEQ ID NO: 709657 - DNA, 75 bp, Homo sapiens
taaaatagaaaatctagccaaagccaatccccagcgctggctgacagagcagagagctcaatgtcctcattgccg

SEQ ID NO: 709658 - DNA, 115 bp, Homo sapiens
ggaggacctgagccccgaggaggcagagcacaaggagatggaaaaccagcctggacaccaagtctgtgtcagaaggccacctcaagaggaacatcgtggtgaagaccgtggagat

SEQ ID NO: 709659 - DNA, 100 bp, Homo sapiens
tgatgccccagcgggtgaggctgcaacacgaggctgccgttcagcacccgtcgagcgttttgaacgaagaatgtgatcagaactggtacaaggcagagct

SEQ ID NO: 709660 - DNA, 88 bp, Homo sapiens
caccaaagattgtctctggcaaaggttctccaaatgtcaactgtcaaggagcagctaattgagaagctaattgaggatgatgaaaact

SEQ ID NO: 709661 - DNA, 84 bp, Homo sapiens
ctggaacgccaaccggctggacctgttcgagatcagccagccgaccgagatgccttcaattaagttgcagagttctgatggaga

SEQ ID NO: 709662 - DNA, 98 bp, Homo sapiens
gtttggctcatgatgaaatgaaaagtccccgggaacctggctacaaggcatgttatttgaaagcaattgagacgcaaccgaactttgcagtagcttgg

SEQ ID NO: 709663 - DNA, 100 bp, Homo sapiens
ttttctcaggagaatatcactgtcaagaaacaaaattgcagatctgtgccatactttcatcaaagatggagcgccaatggagatcttcgtggatgatgag

SEQ ID NO: 709664 - DNA, 100 bp, Homo sapiens
cgaagaagagaccatccatatttccaggagttgaactgaatgaccgactcttgggcagccaacttttggcctgtaccctctcccataacactctttttgg

SEQ ID NO: 709665 - DNA, 98 bp, Homo sapiens
ggcggcttgcctggaacagatacgggagatggaaaagcagcacagcctatgcccctgaggccaccgactacgatgtgcgggtgctactgcgcttcccc

SEQ ID NO: 709666 - DNA, 90 bp, Homo sapiens
gaccgagaccgtgaccgagagcgtgaccgagagcgcgaatatcgtcatcgttagaaggtgagagaacgccgagccgtcgccgcagcctcc

SEQ ID NO: 709667 - DNA, 100 bp, Homo sapiens
ctgcacttcgcattttggcattgacatttaattttagggtcctttatatagaagggagagtaggtgcttatgggcaacgttccagaccgggggggccgcc

SEQ ID NO: 709668 - DNA, 90 bp, Homo sapiens
caggaattaaatcaattgtaaagtcatcgttgggaaagaccacagcaagattctttcattcgtctcctcctagcctgggggaccaggctc

SEQ ID NO: 709669 - DNA, 100 bp, Homo sapiens
cgcagcaacagcaagctcccgggcaggtatattgaaaagtctgattcagttacaatcagtgtatggaatcacaagaagatccataagaaacaaggtgctg

SEQ ID NO: 709670 - DNA, 50 bp, Homo sapiens
gcagcacaggacctggaaaaattacatagctggagataagatgggtagac

SEQ ID NO: 709671 - DNA, 75 bp, Homo sapiens
cagggacatgcagagcatcctctatcacgggcttatccgtgaccaggctaaagaacgtgccaatggaatggagct

SEQ ID NO: 709672 - DNA, 100 bp, Homo sapiens
ctgtacaccaaagaggagcgggaaatctgaaatagagtactatgctatgttggctaaaactggtgtccatcactacagtggcaataatattgaactgggc

SEQ ID NO: 709673 - DNA, 74 bp, Homo sapiens
agttcaggcagctggccaacagtggcaaatgatgctgaataatcccctatttgctggaaatcctcagcttcaag

SEQ ID NO: 709674 - DNA, 97 bp, Homo sapiens
aggaagctggtggtgttgatcactcctcaggtgtccagcctgctcagccccgcagcgcctccaccccagagacccggaccaagttcacacaggacaa

SEQ ID NO: 709675 - DNA, 90 bp, Homo sapiens
ggatgccctgcagtacctgcagaaggtctctggagacatcttcagcaggcttccgtccaagtctcttcctcatttgcctggcacacccag

SEQ ID NO: 709676 - DNA, 89 bp, Homo sapiens
tccctgcgctctccgcaccgcggcttaaatgatgtattttgtgatcgcagcgatgaaagtgcacctatgatatgtgttttagaaatagc

SEQ ID NO: 709677 - DNA, 60 bp, Homo sapiens
gttttccttcttacagagatgtgactctgtttgagttaattggccttggtcctcacagct

SEQ ID NO: 709678 - DNA, 90 bp, Homo sapiens
ccttgtttaatgactttggtgccctcaacatctctcagagacgaaaggaccgccgggagagcctgcccacctccccaccctggacgccgg

SEQ ID NO: 709679 - DNA, 100 bp, Homo sapiens
tgctataggctcagccctcagtggatttggttcatcagatgagaactggactgatgaccaactgcttggttttaaaccatgcaatgaaaaccttattgct

SEQ ID NO: 709680 - DNA, 100 bp, Homo sapiens
ttgctaatacccatctttactggcatcctaaaggtcagaacaaaatctgcttcatcccaggcatggtaggacctatattagagatgacacttatccctga

SEQ ID NO: 709681 - DNA, 75 bp, Homo sapiens
agactggtgacttcacttttgagtgcaactgccttccagattattcagagctgggagagcttcccccacgatctc

SEQ ID NO: 709682 - DNA, 90 bp, Homo sapiens
cttgagtagaaatatgactttacagagaacaatgaagctatacagacttccagatatatctattgaaatcgaggctcctacccagatatc

SEQ ID NO: 709683 - DNA, 75 bp, Homo sapiens
agctctggggccctccgtggggtctgctcctgcgtggaagattgtccgcaccttcaggattgagacccggaaggc

SEQ ID NO: 709684 - DNA, 100 bp, Homo sapiens
actgttccttcagccaaagaaacaagccgtggaataggtgtatcaagtaatggtgcaaagcctgaagttcaacagaatccctcaatcctagaccacagac

SEQ ID NO: 709685 - DNA, 100 bp, Homo sapiens
caggagccggcagatttgacaggtgtcactgtacagtccccaggggaggcacagtgtctgctgaacctgaatatccaggtggaggacattcggattcgag

SEQ ID NO: 709686 - DNA, 80 bp, Homo sapiens
tatctgtcttcggtggactccttcggcagtccacccaccgccgccgcctcccagaatgagtctgcaggtcttaaacgaca

SEQ ID NO: 709687 - DNA, 99 bp, Homo sapiens
tcacgccggctccgcctcaccagcaagcgcattcccaggtgctaagagatgccgtttgcaggcctcatctctgcttgagaatcgggggctccaggcact

SEQ ID NO: 709688 - DNA, 50 bp, Homo sapiens
ggaacttgtgagcctgcggtgaaagacccaacatgagtgaagtttcctgc

SEQ ID NO: 709689 - DNA, 50 bp, Homo sapiens
gtcgtcgctacctcctcggacagagttgccatggagaaaattccagtgtc

SEQ ID NO: 709690 - DNA, 76 bp, Homo sapiens
gcggcagcgctggactaggtggcaggaagcatgagtgggaaaagcatgggacctgcgccgcccaggtggatgcgct

SEQ ID NO: 709691 - DNA, 83 bp, Homo sapiens
agcgcgccgccctctcgtcccactttccagtacagaacctgctaaggccatcaaacctattgatcggaagtcagtccatcaga

SEQ ID NO: 709692 - DNA, 90 bp, Homo sapiens
tgtcaatctttcaacaaacttgaacggccggtttgtgggcgatgctgaccttgaaagacagaaattttcagatttgaaactcaacggacc

SEQ ID NO: 709693 - DNA, 82 bp, Homo sapiens
gcagcagctgccggagcccgagtggatcggggacggagagaacacgagcccatcagattatgatgacatttccaatcagata

SEQ ID NO: 709694 - DNA, 100 bp, Homo sapiens
cgagatgtacacgaagacaggagtcaatggagattctcgatacttcctgtggccactccaggtggttaagctgaaaggccaagtcctgtcggtcatgtat

SEQ ID NO: 709695 - DNA, 50 bp, Homo sapiens
ctcctcggcccctggctcctgctcctgggatgataaggatgccttctatg

SEQ ID NO: 709696 - DNA, 75 bp, Homo sapiens
aagaatggcagtgctcaaactcaccgaccaggatttctataattggcctgatgaatcctttgatgaaatggacag

SEQ ID NO: 709697 - DNA, 100 bp, Homo sapiens
gcccaccccgacacccactcccgcctggccctgcccgaacgatgggctcccgggccttaggcgtctcgggctatgactttgcagccgtcctggagtggtt

SEQ ID NO: 709698 - DNA, 83 bp, Homo sapiens
ttgtgggcaagcaccattgttgcatcagggttggttctggacattacacagcatacgcaactcacgaaggccgctggttccac

SEQ ID NO: 709699 - DNA, 83 bp, Homo sapiens
ctgggcatcatcgacagtgccttcggccagagcggcaagttcaagatccacatcccaggcttagtaaaatcaccaaccgcctg

SEQ ID NO: 709700 - DNA, 95 bp, Homo sapiens
atgccaaggaaaaactggagagcttcatcaaaaatagtgatagctttgataacaggagcgagaacccgagcagcgccatgagcaacactaccgtc

SEQ ID NO: 709701 - DNA, 83 bp, Homo sapiens
gggacctttgactgtttccggaagactctttttagagagaataatgcatatactgccatgtcagattcctacttacccagtta

SEQ ID NO: 709702 - DNA, 100 bp, Homo sapiens
cccgcgtccgccgattcctcctccttggtcgccgcgtccttggctggcgtagacgtctcccacaacctgctccgggcgctggacgttgggctcctggcga

SEQ ID NO: 709703 - DNA, 75 bp, Homo sapiens
cttctcccaccccctcacgcagagtgcagtcatgggccaccgcagcgggctgacgcacgaggcacacaggaagga

SEQ ID NO: 709704 - DNA, 95 bp, Homo sapiens
tgctccccggtggcccaggcctcggactccgcggccggcccggcgcggcccagcgccctcaggtgagaagccctaccactgcaactgggacggct

SEQ ID NO: 709705 - DNA, 100 bp, Homo sapiens
tgctagtaacgtcatggaggatgaacgacaggtggatctccttacgtagcagccaaaataaatgaagcaaaagacttgctagaaacaaccaccaaacatt

SEQ ID NO: 709706 - DNA, 75 bp, Homo sapiens
ccggggccatggccggaatgcagtaccctcagcagcaggtgctactcgtgagcagtagtcgccatccagacagat

SEQ ID NO: 709707 - DNA, 100 bp, Homo sapiens
ggtcaaaagcgcactaaatcgtctccaaggattaaggctgctgtcccaagcatcaaattctgcttggacaatggagccaagtcggtagtccttatgagcc

SEQ ID NO: 709708 - DNA, 75 bp, Homo sapiens
agggaaccaacccactttctcggcgccgcggctcttttctaaaagtagtctcactctgttgtcacccaggctgga

SEQ ID NO: 709709 - DNA, 75 bp, Homo sapiens
tgagatacaaggctacacagagacagatcaaagcagctcgcagagatcctacaagaatccaggatgatgatccca

SEQ ID NO: 709710 - DNA, 83 bp, Homo sapiens
cggaaaccagtggccacagcatctttgtctagccccagtgcagaatgagatggttcgggaactagatggccatgtcttgaagt

SEQ ID NO: 709711 - DNA, 101 bp, Homo sapiens
ccggccgcgggagcctcgtggctgcgtcaccgccgcccccccagacaagatggacaccgcggaggaagctctgtgcagtgtgcctagaagacttcaagcct

SEQ ID NO: 709712 - DNA, 82 bp, Homo sapiens
gggaacctactgtggggccgcggccggaccgagcgcctcgacctcggtctgagatgatatcatcaagttgaatcgaaaggaa

SEQ ID NO: 709713 - DNA, 82 bp, Homo sapiens
tgcagtcggcactgctactgcgaagacagctggcagatgccatggacaatattaccaggcagaaccaattctacgataccca

SEQ ID NO: 709714 - DNA, 100 bp, Homo sapiens
tcgtttccagcctcaggaatttatggtcgcctttttgaatgagaccagattacaatgaaatggttggagaatgctggctgcagagtgccagggtagctag

SEQ ID NO: 709715 - DNA, 78 bp, Homo sapiens
ggcaaccagggtgggggctacggaggtggttatgacaactatggaggaggaggatgaagaaggttataacgatggaga

SEQ ID NO: 709716 - DNA, 83 bp, Homo sapiens
gaggtgcccagcccgtgcaggacacgaagctgcatgtgtttgacgcaagcagcctgcttctgcaaagtggtacgatcgaaggg

SEQ ID NO: 709717 - DNA, 80 bp, Homo sapiens
gcgggacagagcgcctgcgaccccagtcggtgctccggggaggtcacctgacgaggaggcagcggaggaggagaaagaga

SEQ ID NO: 709718 - DNA, 83 bp, Homo sapiens
gttccgggggtgaagcctcctgcgccggccttgcctcgggagtcgttcacgcctactgaggagcatgtgttggtggtgcgcct

SEQ ID NO: 709719 - DNA, 100 bp, Homo sapiens
ggaagatttactttcgaagctataagttggtgttcgaggaagagacattgttgttcttggtgtggagaagaagtcagtggccaaactgcaggatgaaaga

SEQ ID NO: 709720 - DNA, 100 bp, Homo sapiens
aatgagcaacactccggatcagacactggaagtgtagaacgtcattcagagtaggccaaccttgtctatccagcatcctccatctgcagcaatcagtatt

SEQ ID NO: 709721 - DNA, 90 bp, Homo sapiens
gcaggagttgtggtcagtatgtctcctgcacagctgggaaccacgatctacaagatcccagatgcagtgactggttactacctgaaccgt

SEQ ID NO: 709722 - DNA, 83 bp, Homo sapiens
ccttggagggccttccccctagcacctcctcaggccagccacccctgcaggacatgctagatgaattacttactgagccaaag

SEQ ID NO: 709723 - DNA, 83 bp, Homo sapiens
agcctcagttggaagcagccgatccagcctgcggagcctgtggggcagaaatacactttcgggaaatggcctctaaatcctgg

SEQ ID NO: 709724 - DNA, 76 bp, Homo sapiens
tgggactctccggccctgtgcagttaattagtgaatgccaaaggcagcaactggaggctgtgagctactcctctcg

SEQ ID NO: 709725 - DNA, 90 bp, Homo sapiens
gtttgagaggaagctcaacgactccattgccgaggagctgaacaagaagttggccaacaagcgctgccactggagtgacatgttcacggg

SEQ ID NO: 709726 - DNA, 99 bp, Homo sapiens
tagaggcttcgtgtttggaggcagatatcgaaacttcagcgagagggaagcatcgagactctgagtaacagctcaggctccaccagcggcagcatacca

SEQ ID NO: 709727 - DNA, 75 bp, Homo sapiens
atgtggaaaggagattgacagtcacaattttgtaataagggtgttgatgatgccttctatacattagttcgagaa

SEQ ID NO: 709728 - DNA, 71 bp, Homo sapiens
tcgtctttgccttctcctgcaagcaggcaggggtccccacggagtctggaccatggaggagcgaggtctgg

SEQ ID NO: 709729 - DNA, 103 bp, Homo sapiens
gtgacatcaagctctgtgagggtttcaatgaggtgctgaaacagtgccgacttgcaaacgcaatggctgccatccggaagaaactggtgattgttggtgatgg

SEQ ID NO: 709730 - DNA, 82 bp, Homo sapiens
gccacaaatgggaagcaagagaaaaagaacattactgtcttggaaatgacttaatcgtctttttggcagaccagaatgcacc

SEQ ID NO: 709731 - DNA, 74 bp, Homo sapiens
cgagctgagcttcaaaaggggggacatcctcaaggtgcccctgggcgctgggattgctctagcctgtaagtata

SEQ ID NO: 709732 - DNA, 80 bp, Homo sapiens
aaagaaggcaaggagagaatgtatgaagaacagtcacaggacagcaaaatctagtgaattcattttccttgaactacaca

SEQ ID NO: 709733 - DNA, 75 bp, Homo sapiens
caactcccgcaatgagttttggtgcgccctagtggagaaggcctatgccaattacgttatgatgatgaagtgaag

SEQ ID NO: 709734 - DNA, 89 bp, Homo sapiens
caggactgcgccgcgtcttcctcaaggagcaggccgggctctcgccatgggtcactgtcgcctctgccacgggaagttttcctcgagaa

SEQ ID NO: 709735 - DNA, 100 bp, Homo sapiens
ctcgaggtcgtatgaacgcacaggccgtcgctatgagcgggaccaccctgggcacagcaggcatcggaggttttgtagtgcatccctgagcatgagcaca

SEQ ID NO: 709736 - DNA, 82 bp, Homo sapiens
caggccacagtaccctattcacgctctgtgcttgtgccaagagagacaagagagacacctccaacttcgacaaagagttcac

SEQ ID NO: 709737 - DNA, 75 bp, Homo sapiens
agacagtggctggcggtgcctggacgtacaaatgaaagccttgagggaattagacagattttctgttttgaatag

SEQ ID NO: 709738 - DNA, 95 bp, Homo sapiens
ggacggcgtggaccacatagacatttacgcggatgtcggcgaagagttcaaccaggccacagacctccaccagcacgaagtggacatcgttgtgt

SEQ ID NO: 709739 - DNA, 101 bp, Homo sapiens
ccgcgatcgtggggcccgcgaggcgggcagccggggcgtccaggcatgtaatgaatttactacacatgtgatgaaccttctccgagaacagagtagaacac

SEQ ID NO: 709740 - DNA, 83 bp, Homo sapiens
tgaaaccacagtagaccctaatgatgaagagagtgagtctttgcggcaactgaaaacaaaagaacaagaagatgatctaacaa

SEQ ID NO: 709741 - DNA, 83 bp, Homo sapiens
gttacgacaagaagaaaaacggcaacgtgtaatcagaaggcacagattagaggaaggaagagaactgataaatttcaaacgga

SEQ ID NO: 709742 - DNA, 98 bp, Homo sapiens
aaatcagcttctgttgtatcatcagattccatttcaacttctgccgacaacttttctcctgatttgagggctaggcagctggaagagaaagaccgagt

SEQ ID NO: 709743 - DNA, 98 bp, Homo sapiens
gcctccgtgcagccgtggcgtgcaggactcgggtggctctgaggtcgcctggggaccccagaagactttcaaaattgtggactatgaagatgagttag

SEQ ID NO: 709744 - DNA, 80 bp, Homo sapiens
cggcagcagcccgacgcaaaccaaggatctggggatcttcgcactatcccaaggtggtgatgatgtccagcaactctgtg

SEQ ID NO: 709745 - DNA, 75 bp, Homo sapiens
gaagtctataagctttgcaacagaattacagagtatgatcttgatgattccctgaatcagatccgtaagctccag

SEQ ID NO: 709746 - DNA, 90 bp, Homo sapiens
agccttctttttctatgggaaatcacttctggagttggcaagaccagaagcccctggtccctctgtctccctttcccctatgccaccctc

SEQ ID NO: 709747 - DNA, 95 bp, Homo sapiens
tcttcctcccttcgctcgcaccatggagaacatattgtgatgttcgtgcctcagagctaaaactatgagtgaatttcggattcaccatgacgtca

SEQ ID NO: 709748 - DNA, 90 bp, Homo sapiens
gcctggcaggccctgcgcaccagggtctcggtgactgagctgcagactcacccggagctggacacagatggggatggggcgttgtcagaa

SEQ ID NO: 709749 - DNA, 100 bp, Homo sapiens
cagaagaaggggaactcctgctgcccactcagatcaagtcccagcagagcgaggtgacccgaatcctggatgggaagcgcatccaataccagctagtgga

SEQ ID NO: 709750 - DNA, 100 bp, Homo sapiens
gtgatcctttcatctcagcctcctcagtagctgagactacagggggagtttgttgcttgtctcctgtccctattacgacaaatgacagatagacattatc

SEQ ID NO: 709751 - DNA, 75 bp, Homo sapiens
cgctttgctgcgtacttccagcagcaggttcaggagaagtggcacctggtggaggacctgtcgcgactgctgccg

SEQ ID NO: 709752 - DNA, 100 bp, Homo sapiens
ctaaatctttctgggaaaacaattgcaaggctcttgcagccaatgccggaacaggatttgctgttgctgagcctcaaatcgcaatgttttgtgggaagtt

SEQ ID NO: 709753 - DNA, 75 bp, Homo sapiens
ccaagatgccagtaattctattgaccaccgaattccaaattctcagagggtcacgagaagagaatgccttctaga

SEQ ID NO: 709754 - DNA, 100 bp, Homo sapiens
ggagcacagtaacatacagcactttgtggagaaagtcgtcttccacttgcacgaaagctttcctaggccaaaaagagctctcctacaagcttgtgtgccc

SEQ ID NO: 709755 - DNA, 74 bp, Homo sapiens
ccgaagagcacaagcccgggcttcagaggatttggtctgggaggggctgaacgtggtgaagacaggccgagtga

SEQ ID NO: 709756 - DNA, 98 bp, Homo sapiens
gcgggccgggcgggccgcgggagccgcacgcggcgatatggaagaggagggcaagaagggcaagaaggtattcaaaacctttgaccacatggcccgtc

SEQ ID NO: 709757 - DNA, 105 bp, Homo sapiens
ctacctcatctagaaggagagcaattagtgagacagcttatggtgctgctatctggagtaatagctttcatggtgaacttatcaatttattggatcattgggaac

SEQ ID NO: 709758 - DNA, 100 bp, Homo sapiens
caaatttacatgtattggagaccagaccagaagcccttctgaattaaggttagagccacagctgaaacaactacaaacaaaatatgatgaacttaaagag

SEQ ID NO: 709759 - DNA, 114 bp, Homo sapiens
cggacttcgacacctacgacgatcgggcctacagcagcttcggcggcggcagagggagcctgaacgaactgcgggtgttgctgctggaggccaatcgtcactccccagggccgg

SEQ ID NO: 709760 - DNA, 78 bp, Homo sapiens
gacgcgcgcagcccgcccgcccggcgaccagcaaggttattcacatcgaactcctttgatgtgatcagtgatgatgct

SEQ ID NO: 709761 - DNA, 82 bp, Homo sapiens
ctgcggcgcctgggactgcaccgcaccgagggcgagctccaggtttgttgataagccggggcccttcgtgggaccctgcggt

SEQ ID NO: 709762 - DNA, 83 bp, Homo sapiens
cccggctccctaggcgtcccatctcggttttaaaatcaaagatgggaaaatcggagaaaattgcccttccccatggccagctt

SEQ ID NO: 709763 - DNA, 90 bp, Homo sapiens
ctttcatggagcccttcggtgacacacttggggtctttcagtgcaaaatatacctccttctcttcgcctggatttgtggtatcatttcta

SEQ ID NO: 709764 - DNA, 83 bp, Homo sapiens
tgtcagaattacaaggtgagatcagccgcccggccaagctatcttctcgctagcagaccatggtgaatccgggcagcagctcg

SEQ ID NO: 709765 - DNA, 108 bp, Homo sapiens
ccgggaggaaggaacgaggcaaggagctaaagcagcgtgcgttcagccctggggactggagactgatgcatgagggggctacggaggcgcaggagcggtggtgatggt

SEQ ID NO: 709766 - DNA, 96 bp, Homo sapiens
gccttgtcagtggagaagaccagcaagcgtggcggcaagatcatcgtgggcgacgccacagagaaagggaggagtctgctactagtcttatcagct

SEQ ID NO: 709767 - DNA, 76 bp, Homo sapiens
cgacgcgatgttccgccggagcttgaatcgttttggtctagacagtttcaaagtgaaacagaagttcttcgctggc

SEQ ID NO: 709768 - DNA, 100 bp, Homo sapiens
accacttgataaaaagaagggcttctccatgccgggattcctgtttaagaacagtatcaagctgcgcgcccgggacccggccagccgtggagacaggtac

SEQ ID NO: 709769 - DNA, 83 bp, Homo sapiens
ctgggctcgaaaccgaaagtcccgtccggaccctccaagtggagaccctgctctctggaccttcctgtggtttgttggtttct

SEQ ID NO: 709770 - DNA, 101 bp, Homo sapiens
tgcccagcgccctggccctctcgctgttgctggtctctggctccctcctcccagggccaggcgccgctcagaacgaaaagaggcacagttagatgaagaag

SEQ ID NO: 709771 - DNA, 75 bp, Homo sapiens
gatgtcagctcagtgctgtgcgggccagctgcagaaccttggcctgaaaatgctacattatatcagcaattgaaa

SEQ ID NO: 709772 - DNA, 75 bp, Homo sapiens
cgacgctgctgggtccgctgagcggggcgacccgagattttggatttagtaaaggggacacattaccaggtagcc

SEQ ID NO: 709773 - DNA, 100 bp, Homo sapiens
tttcaaagtaaaaactgtattcaaaaatgaaaagagaatcaagcttcagatttggggaggtgttgtagcaggaaatgtggctcatattctggactcaaat

SEQ ID NO: 709774 - DNA, 100 bp, Homo sapiens
ttcttcgaggtggagtcggagctgggacgggctcaaaatctccttcgccaagaccaaacatgcctgttcgatacttcataatgaagagtagcaatttgag

SEQ ID NO: 709775 - DNA, 75 bp, Homo sapiens
cttggactgagtcctgcaggacacaggacacattcagctaacgtattttagcaggtggagtgaggttgaagattc

SEQ ID NO: 709776 - DNA, 100 bp, Homo sapiens
ggcatcgacggcatgactactggctgctagccggcattataaacctcgtggtggaacatcggacccattcaagaggaaggatgaaagctctatataggaa

SEQ ID NO: 709777 - DNA, 75 bp, Homo sapiens
acacaaattaagtactgcttacaatgagtttgttcatctggcaaagagactggttagtgatcctgcattagaaaa

SEQ ID NO: 709778 - DNA, 100 bp, Homo sapiens
aaaaattcaagaagttgaaaaacgcttttcacgtcacctggagagatgcacaggccccacatcaagaccatcttccaaggcattgctgcaaaagtgggaa

SEQ ID NO: 709779 - DNA, 75 bp, Homo sapiens
gatgcagccaaggtcttagcagaagatgatccatgaccagaactgtcctttggcaaatgtcatctgtgaatactg

SEQ ID NO: 709780 - DNA, 98 bp, Homo sapiens
caagcgcttcacaccctggtggccagagtctgaaactggttgttccagttagcatggcctcattgaaagaactagatcaaagactctttgaaaattac

SEQ ID NO: 709781 - DNA, 100 bp, Homo sapiens
tgaagattggtattgtcagacggattttgctaactttaggagcatcacagaaagaagtgaatgcccaaagcagtggtgagatttgagagcacattatacc

SEQ ID NO: 709782 - DNA, 100 bp, Homo sapiens
atttgaagagatgctggaacatgcagagtctgcacaagctgaccggttccctgatgtgttacctgcttctgctactgatccaaactgcagaacttctcat

SEQ ID NO: 709783 - DNA, 96 bp, Homo sapiens
agaaccaggcttgccacacagtccccgcctgccatggccggctcttcctggagtgttgtttcgttggataccactagctgggaatatccagatgtc

SEQ ID NO: 709784 - DNA, 83 bp, Homo sapiens
ctggcatgtcagagaacccctccgtctatgtgcctgaaagaagatgctgatatgctacaacacggatgaacctggaggacgtg

SEQ ID NO: 709785 - DNA, 100 bp, Homo sapiens
acgacgcgctcgacacgcgggtgcggggcgacctcggtggcccgcagtattccatccaaagaagtgcatttgatcgctgtgctaccttgtcacagtccgg

SEQ ID NO: 709786 - DNA, 100 bp, Homo sapiens
cgagattccggttgagtaccaaacagtccagagactcatccccgccctgtgggagaagcacagtccacaggtcgtccacactggtgagaaaccctactgc

SEQ ID NO: 709787 - DNA, 100 bp, Homo sapiens
ccgcggtggcggcgctgccgcctgaagtgcgggcgcagctggcggagctggagctggagctctcggagggcaaggattactgcaaagtaatatttccata

SEQ ID NO: 709788 - DNA, 74 bp, Homo sapiens
ggaagaagcagctggacccgctcaccatctacggcatccggtacccaacatgagtgaagtttcctgcaagaaac

SEQ ID NO: 709789 - DNA, 90 bp, Homo sapiens
ggcggcgtgagggctccgggtcgctggcggcgtggacacctgagtcccggggtaggggtctcccgcgagcccgaaaatctcttgtactac

SEQ ID NO: 709790 - DNA, 80 bp, Homo sapiens
cagtacgcgaaggatatcggtttcattaaggctttcaacaccttcattgatgacgtctttgccttcatcatcaccatgcc

SEQ ID NO: 709791 - DNA, 82 bp, Homo sapiens
ccggtacatctgaaagccgggaaatggatttttagactctgaggagcagttggagctaatccacattatggaaatggaaacc

SEQ ID NO: 709792 - DNA, 50 bp, Homo sapiens
ttccactctggaaaacttcaagcatttggacatgtctcaggaaggctatg

SEQ ID NO: 709793 - DNA, 100 bp, Homo sapiens
gaaagcatttaaccagcatggctacttcatattttggaaagcagtttttaagacaagtggaagttgatgggtcgaaactaaatgtgaccagcacgtggaa

SEQ ID NO: 709794 - DNA, 75 bp, Homo sapiens
ggagtctcccgtcactcaggacatcatctgcgacgtggggatgaccaaactcttacccaggatctactggagcag

SEQ ID NO: 709795 - DNA, 74 bp, Homo sapiens
gctcaaggaaacctttccaacacagatgtccaagctgccaagaggcaagtgaggcctatctggttggccttttt

SEQ ID NO: 709796 - DNA, 100 bp, Homo sapiens
ctacaacgagtactgtgggcctggagccaagcccctcttcaggagtaaggtcctagctggactgctgcaccttggcaatatccagtttgctgcctccgag

SEQ ID NO: 709797 - DNA, 75 bp, Homo sapiens
tttaaacagcttctccgggtctcagcatgattaactgctgaagtactgatcgagttctgcatttcttcaatgagg

SEQ ID NO: 709798 - DNA, 100 bp, Homo sapiens
cctgacatcccagctccacatcaccccagggacagcatatcagagctttgaacagaatgatatggaacctagcaaagctgttccactgaatgcatctaag

SEQ ID NO: 709799 - DNA, 97 bp, Homo sapiens
agctcgtccagctgcgtgcctaggtcctggctataagtcaccatggcacagcaagctgccgataagtatctctatgtggataaaaacttcatcaaca

SEQ ID NO: 709800 - DNA, 83 bp, Homo sapiens
ggttctgacaagatggccgggctgccccgcaggatcatcaaggttaaacccatccagagtaatggctgcggccttacccagga

SEQ ID NO: 709801 - DNA, 100 bp, Homo sapiens
gcagcagtcagggacatttctgaagcgagcgtcttcgatgctcgatgacttgtacttgatcgccatctgccatcgccggggcatcagatccctacgcgac

SEQ ID NO: 709802 - DNA, 87 bp, Homo sapiens
ccggtcacctccgcgcggacaccagtgtggacgaatgtggaacctcgctctgtggctgtgttcccttggcactccttagtccccttc

SEQ ID NO: 709803 - DNA, 90 bp, Homo sapiens
gcacagtgccgaggtagctggctaccagtcacccacaaaagctgtatataatgccagacattggaatcatccagattcagaagaactgcc

SEQ ID NO: 709804 - DNA, 83 bp, Homo sapiens
gacatgttcacgcacgggatccagagcgccgcgcacttcgtcatgttcttcgcgccctgctccttccgcttccagccgttcga

SEQ ID NO: 709805 - DNA, 82 bp, Homo sapiens
ttcatgacaacccccttacagatgagaataaagaacacgaagctgatacagaaattgcatctgatggtctcaagggtcgtgt

SEQ ID NO: 709806 - DNA, 100 bp, Homo sapiens
tctgtctttaaggacagactgtatgaactggacatctcgttccctcccagatatgagccccagactgacatcccgcctgacgtggatactgaacaggacc

SEQ ID NO: 709807 - DNA, 110 bp, Homo sapiens
acccacaagtttcggttgcacgtcacagctctggattaccttgcaccttatgccaaggcagctacggaatcctccaaccaccattggaatgatgactctgaaagcagctt

SEQ ID NO: 709808 - DNA, 75 bp, Homo sapiens
ttccctggacaacctgcagactctctgcacagtctgtcacaaagaggtacccagaagctattactgaccctgcct

SEQ ID NO: 709809 - DNA, 100 bp, Homo sapiens
cggggacaaggacaaagaacaggagctggcatggatgagttgatggaggtgtctttctcgcccctggcggccacaggcaagcccctctcacgctgtggga

SEQ ID NO: 709810 - DNA, 100 bp, Homo sapiens
aggattagaggatggaagggagtcaccttcttttggcagtggagctactgctgtggttcaggcagccctatgcaaacccaggcaagaacgtgtagcaata

SEQ ID NO: 709811 - DNA, 75 bp, Homo sapiens
gcacatagtggagcaaatggtggctttcattggtactggagaaaatgaaactgggattgacccatcaagatgctt

SEQ ID NO: 709812 - DNA, 75 bp, Homo sapiens
gggggatggttccatcatggcgtcaatgcagatcccagtcacccaggcctgcctcatggaggacatcgagcagtg

SEQ ID NO: 709813 - DNA, 50 bp, Homo sapiens
ctcgcctcccggccgagctgacggaggaagagttcatcgattggtggagc

SEQ ID NO: 709814 - DNA, 100 bp, Homo sapiens
ctcctagccagcatgctagtgaaacgactagcagcgatgctatgcaaaaggcgctgatactggaaggcttgaacaccttcgggaccgagtgagatcgaag

SEQ ID NO: 709815 - DNA, 97 bp, Homo sapiens
taatatttaagaaagaagatgttaactttcaggtttaagaattgtttaagctgcatcaatggagcacatacagggagcttggaagacgatcagcaat

SEQ ID NO: 709816 - DNA, 83 bp, Homo sapiens
gccgccgctgcctccatcctgggcaaacctgcggacgtttatttatgaaacagagcatcataatggcatagcagagttactgg

SEQ ID NO: 709817 - DNA, 101 bp, Homo sapiens
tgatgtatacacgtttaatttttctaaagagtcttgttatttcttctttgagaaaaacctgaaagatgtctcagttgaagcactggacaatgccacatact

SEQ ID NO: 709818 - DNA, 113 bp, Homo sapiens
tctacaacctggtgcgcttccggatcgggggcaagcggaaggtgatgcccaagatggaccaggttcgagaacttgtcttggacaattgcaaatcaaatgatggaaaaattgag

SEQ ID NO: 709819 - DNA, 100 bp, Homo sapiens
ctcctgcggcagaagagggcggcgctgcggcgcagggggtgcagcttcgagagcccaaggtgcatctgcagacgcagcaggaggtgaagctgcgcatgac

SEQ ID NO: 709820 - DNA, 100 bp, Homo sapiens
gactgtcattcacaaccccctgaaagcaccctcaaactgacacaagacctacagagaaaaccctttgccaaatctgctctcagcaagtggacagtgatac

SEQ ID NO: 709821 - DNA, 74 bp, Homo sapiens
ctggcgcggcctccgctcccgccgactggcctgagaacgaggagggagccatggatttgctgcgggagctgaag

SEQ ID NO: 709822 - DNA, 98 bp, Homo sapiens
ccaatcctaagaacgctgaaggctttggaatatgtgttcaagttcattgttcggtcgaggacattattttcacatactatactggcaattgctggaga

SEQ ID NO: 709823 - DNA, 50 bp, Homo sapiens
ttataaaatgtcagcttttaaggaacacccatctcggctttctcgcaaga

SEQ ID NO: 709824 - DNA, 75 bp, Homo sapiens
cgagcggctctcataaagatctggctggcaaaatgaccaggttcttcagggcttctcggtggacaaaggagaatt

SEQ ID NO: 709825 - DNA, 100 bp, Homo sapiens
gaagaagatcgccaagagatcaaagataaaatcttttgtgaaagtgtataactacaatcacctaatgcccacaagtgctgatgggcccgtgcaacagttg

SEQ ID NO: 709826 - DNA, 89 bp, Homo sapiens
tgcaagaccactttgggctggaaatatgtaacaaatatactctggagactagaccaaaccaagaaggcattgatgtaagacaagagcta

SEQ ID NO: 709827 - DNA, 100 bp, Homo sapiens
ttcatccttgtttaatgactttggtgccctcaacatctctcagagacgaaaggcctcctcgaaagatgttgtcagacagctgtgtcaagaaagcttttcc

SEQ ID NO: 709828 - DNA, 140 bp, Homo sapiens
ggaagatggtgccgggggtcgctggctctgctgctgccgccggcgaaggaggaggcgttgccggggagaactaatgccgacgtgatgaccgccctgtcccagggctacaggatgccccgtgtggagaactgcccagatga

SEQ ID NO: 709829 - DNA, 75 bp, Homo sapiens
gttgaactcaacggaaatcagcccatggagatcaaagtcctggatgagcttccatatctcaagtgccctctgcac

SEQ ID NO: 709830 - DNA, 74 bp, Homo sapiens
cattctgcacgacgatgaggtgacagtcacggtgggcaaacgcagaggcgggaacaaactagccctcaagacgg

SEQ ID NO: 709831 - DNA, 75 bp, Homo sapiens
ggcacgggcagccggaaggacaccaagatgcggatccgggcctttccggcagtagcaggtttgttggcagatgct

SEQ ID NO: 709832 - DNA, 98 bp, Homo sapiens
ttactacttatctgtgtttctggagctctcagctggcttgcctgaaacttctaaagatgacctgatcagagccatcaagaaactaaaggcacttggca

SEQ ID NO: 709833 - DNA, 75 bp, Homo sapiens
cagcaactgaggcagcggcaggctcaggtgcagccgctggattgacgtgtctcagaatgaccttccttgggaatt

SEQ ID NO: 709834 - DNA, 97 bp, Homo sapiens
aaaaacgacagctaaccacagggcaggccatgggcaagatatctcagtgttctccgctctcataggtcagctcccattgctatcacatgttttacca

SEQ ID NO: 709835 - DNA, 75 bp, Homo sapiens
ctctaccctctgcagatctcccccgtgtcttcctatgcagcgggtccatatggaatatttgctggtagggatgcc

SEQ ID NO: 709836 - DNA, 74 bp, Homo sapiens
ttgcctcggattccgacagcaggaggagctgaatgatgctgtgggattttctagagtcattcacgccattgcta

SEQ ID NO: 709837 - DNA, 75 bp, Homo sapiens
gcagcacgggatcccagcctcaggcctgcacggacggtgttggttggggaaaaggggaagatagtgatgtactca

SEQ ID NO: 709838 - DNA, 100 bp, Homo sapiens
gcatgacctctggctataatagcagcccagccttgtcaggccagctccagttcccagagaatatggtctcagccaatttcttctccagtcatcctccagt

SEQ ID NO: 709839 - DNA, 50 bp, Homo sapiens
gggcaagccccgctccggccaacaatctgaagatgatgagaaactgaaaa

SEQ ID NO: 709840 - DNA, 74 bp, Homo sapiens
tcaaactgccaactgaacttcatcgctcctgacaagcatgaggagtctccccaggacagtgctatcacccggga

SEQ ID NO: 709841 - DNA, 96 bp, Homo sapiens
cctctcccacttcttgccccagaaagccccagacggaaagagctacttgctgagagttcatgatcaagtgttgcccacaccaaatgcttcatccag

SEQ ID NO: 709842 - DNA, 90 bp, Homo sapiens
cagggaacggggcatcgcggttccaacgcagaagatggctgtgccacccacgtatgccgatcttggcaaatctgccagggatgtcttcac

SEQ ID NO: 709843 - DNA, 90 bp, Homo sapiens
gagctgaagagaggagggggaggccgatgacctgggctctgggcctctgaaggataccatacttgcagagctccttcagatacataaaga

SEQ ID NO: 709844 - DNA, 83 bp, Homo sapiens
ctctgcgtgagtgtggtctacgagctgtttctcatctttatactcttccagctacgagttccagggagctctgtcctggtgac

SEQ ID NO: 709845 - DNA, 98 bp, Homo sapiens
gacggaggagcttgtaccaccgtcattgaagtcaacaagagagacatagtcttcctggtggatggctcatctgcactgggactggccaacttcaatgc

SEQ ID NO: 709846 - DNA, 99 bp, Homo sapiens
cacagggccacagcgacaccactgagaacggagaccaacctgggctgaagaaagaagattaaatgctgaaacatttggaatcccacttcgtccaaaccg

SEQ ID NO: 709847 - DNA, 75 bp, Homo sapiens
cgagtccgcgggaagatggcggcgccgctcatccccctctcccagcagcccctggcgaagcggtgctgcctccag

SEQ ID NO: 709848 - DNA, 90 bp, Homo sapiens
gcgggaaggcggcgccccggccgaggtggcggcggctcctcaggttaatttggagtggcccctggagtcagtttcctacaccatccgagg

SEQ ID NO: 709849 - DNA, 90 bp, Homo sapiens
tgcatctcctcaaggctcccctcacaaaggacgtgttcctcatgatccggcgccacaagaccaccatcttcacggacgccaaggagtcca

SEQ ID NO: 709850 - DNA, 96 bp, Homo sapiens
ctccggatggccatcggctatctgcactcccacaggcacctctaccccgagggcattggtgcccgtcagcagcagaaactgcttggaaactccctg

SEQ ID NO: 709851 - DNA, 144 bp, Homo sapiens
ccgccctgcgccccgctctgctgtgggcgctgctggcgctctggctgtgctgcgcgacccccgcgcatgacctttccagctcacccccagggccttatggtcaagaaatgtatgcgtttcgatctgaggaaagattcaaatccc

SEQ ID NO: 709852 - DNA, 100 bp, Homo sapiens
gacgctgctgcagctccgggacacctggggccgccgaggcaaagcacaaatggtcaatatgtaaagcagggcaaatttggtgctgcagttctggggaacc

SEQ ID NO: 709853 - DNA, 90 bp, Homo sapiens
tgaagaggaaataaaaacagaacaggaggtggtagagggcatggatatctctactcgctccaaaggatccacctctgatgttcagtgaag

SEQ ID NO: 709854 - DNA, 80 bp, Homo sapiens
cctaacaagcctagaaaccacgtcagaaatggaagcaggaagtcctggtaacccaggcctgcacagtcccatgttggatc

SEQ ID NO: 709855 - DNA, 111 bp, Homo sapiens
gttctacaacctggtgcgcttccggatcgggggcaagcggaaggtgatgcccaagatggaccagatcaggatcctcatgaccagccaaagagaagaagaattaggaagcat

SEQ ID NO: 709856 - DNA, 90 bp, Homo sapiens
cttcagactggtggactgttcatcattctgttgaagaaacgcttaacccagacaaagtgatggcatctccccttcagatcacaccacaga

SEQ ID NO: 709857 - DNA, 90 bp, Homo sapiens
cgtggatgaggctctgcggctggtccaggccttccagtacacagacgagcatggggaagggaaatgtttcaacgtgcgcaagcgttgcgg

SEQ ID NO: 709858 - DNA, 82 bp, Homo sapiens
ggctggtgcagctgctggccgtggcgggtgccgagggcccggacgagggtggccgtctgcccggcccagcaccatgcacacg

SEQ ID NO: 709859 - DNA, 97 bp, Homo sapiens
cgccgccaaggcggcgcgcgagctggagcactcgcgtacatgtcccagagcaagcacacggaggcccgggagctcatgtactcgggagccctgctct

SEQ ID NO: 709860 - DNA, 100 bp, Homo sapiens
cctgaccaccgtgaacggacagtcccccccaggttgaattgaccaaagcaatggtgatggagaagcctagtcccctgctggtcgggcgggaatttgtgag

SEQ ID NO: 709861 - DNA, 100 bp, Homo sapiens
gaggacaaagaaaaagattcctttcttggcaactggaggtcaaggcgaatatttaacttatatctgcctgtcagctattgacctgaaaagtggttctgga

SEQ ID NO: 709862 - DNA, 100 bp, Homo sapiens
agccgctgggaagcccctagacgcgccgaggggccgggctacgagcggctgagaagccacgttacgagatccgatggaaggtgattgagtctgtgagctc

SEQ ID NO: 709863 - DNA, 74 bp, Homo sapiens
acccacgctgaacgagagggacacggagcagatcttaccaatatatttgagtccttcctgcctcagttattggc

SEQ ID NO: 709864 - DNA, 106 bp, Homo sapiens
agaagtcgcgtgtctaggtgagtcgcggtgggtcctcgcttgcagttcagcgaccacggcttgggcactgtttaaaggaaagttccgagaaggcatcgacaagccg

SEQ ID NO: 709865 - DNA, 76 bp, Homo sapiens
tgagcgtgtcggcgcgggcccggagcagatttgcatctgctggtgatgatggaattgtagttgtgtggaatgccca

SEQ ID NO: 709866 - DNA, 100 bp, Homo sapiens
agtctgaattctgtggattttcgtctaaaaataacaagaatgggaggagaaggagttttactacccttggatgctgctgttgacatggaaaagattgagg

SEQ ID NO: 709867 - DNA, 100 bp, Homo sapiens
ccgaacccgggaaaagaggaactaaggcggaggaactgagacgtttcgaattccaggttggtcaaagaaaaagtgatgtatgaaaaagaggcaaaacaac

SEQ ID NO: 709868 - DNA, 100 bp, Homo sapiens
ctctgggacacacctccattggatttaaaagacagtcctcgtcagcactgactttcagctatggaatcggaaaatatatgcagatgatgaacattcttaa

SEQ ID NO: 709869 - DNA, 75 bp, Homo sapiens
tttaatccagctactctacctctaacacagtacctgttaacaacttccgatgaagttaaattccgtcaagattta

SEQ ID NO: 709870 - DNA, 97 bp, Homo sapiens
ccggcgctgatctacaagaaaatccacaagaacgcactttcctcccagagtccggcagcgtcttctcttgagggagcaatttggagaagagctggaa

SEQ ID NO: 709871 - DNA, 75 bp, Homo sapiens
tgctgaaaaaatggttctcaaatttggaaaaaaggctccttctcctgaaaaagccgaggaggagagtgagaggct

SEQ ID NO: 709872 - DNA, 71 bp, Homo sapiens
ccttttccctaatacgtacctcattgtgggaggctctcaccacacacttgttcatgggcgcagcaaagaag

SEQ ID NO: 709873 - DNA, 100 bp, Homo sapiens
aaagtcagaaaagtggcaacagcaccacctgctccagcatataaagatgccattctaaatatggtgaatattgctgctaatattctgggagcaaaaactg

SEQ ID NO: 709874 - DNA, 100 bp, Homo sapiens
ccggggcttgccctggtcttgctcggccgatgaagtgcagaggtttttttctgttgccatctgcacgaggtcagagctggaggatttcctgagtgaagcg

SEQ ID NO: 709875 - DNA, 75 bp, Homo sapiens
aacgaatcatccacgcacctgcagctctgctgagagagtgcaagccgtggggaatacggttggacagaatgaact

SEQ ID NO: 709876 - DNA, 74 bp, Homo sapiens
cagacggattcatttagagctgcggaacaggacgccctctgatgtgctttgcaagatatcaccttgtcacagca

SEQ ID NO: 709877 - DNA, 110 bp, Homo sapiens
cgccgcggcggcgtgtgcgcccctcagttcagaatgaccgaagaagcatgccgaacacggagtcagaaacgagcgcttgaacgggacccaacagaggacgatgtggagag

SEQ ID NO: 709878 - DNA, 82 bp, Homo sapiens
cctctctttgcagagccatacaaagttctttagcgtcacctccctcactgggcagcatgggggagaagtcagagaactgtgg

SEQ ID NO: 709879 - DNA, 100 bp, Homo sapiens
tggcaagtggacattttactggctcaacctctgaagagccaatccattcaggatgggaaaccacgcaggcaaacgagaattaaatgccgagaaggccagt

SEQ ID NO: 709880 - DNA, 71 bp, Homo sapiens
cgggcccggcatggcagcatccgctctccgctctggcgaggaggcttccgaggaggcagaggaggaggagg

SEQ ID NO: 709881 - DNA, 100 bp, Homo sapiens
cttcagtgtggtcttccaggaggccgaggacacaccgctggatcagtgtaagggccctcctccccagttcagaatgcagcccacagccaccatggccaca

SEQ ID NO: 709882 - DNA, 75 bp, Homo sapiens
atggcaacagaggatgtcaacaattttttggaggtacaagaaaattccccaggacacagagctggtttggagcct

SEQ ID NO: 709883 - DNA, 75 bp, Homo sapiens
cagaatggcagattcaggagagagtttgtgccaggagcgagaacccgagcagcgccatgagcaacactaccgtcg

SEQ ID NO: 709884 - DNA, 100 bp, Homo sapiens
tcctggaatatataaatgtgttgtttgtggaactccattgtttaagtatgtgggcaaagactattctgctgctcaggaattaatggaagatgagatgaag

SEQ ID NO: 709885 - DNA, 100 bp, Homo sapiens
gagacgtattacaacttttagctgcagtggagctgtacatacctatgtcaacactacaggtgtgcaagaagagcggaaaaaccgcacaagtgtgcatgtt

SEQ ID NO: 709886 - DNA, 100 bp, Homo sapiens
acctcgagaccaacgtggaggagctgtgggtggaaggcgcatattaaatttcctattgactacccctattcaccacctaccttcagattcttgaccaaaa

SEQ ID NO: 709887 - DNA, 100 bp, Homo sapiens
tcgggctcatctgctggcagtatacaagcgaaggacgggagccgaagctcaagacccagatgatgtggtaccagttggccaaagaagagcctggtgttgg

SEQ ID NO: 709888 - DNA, 82 bp, Homo sapiens
tacaagtccaacctcaagatagcggagctgaagctgcgggaggcccccagccccgtgagaagccctaccactgcaactggga

SEQ ID NO: 709889 - DNA, 82 bp, Homo sapiens
ttcacgggacctttagagaggacgccagaatacctggaagccaggaaatggaatagctattcagtcagacagaaccacttat

SEQ ID NO: 709890 - DNA, 75 bp, Homo sapiens
aaagacagagaaactatgggacacagatatgttgaagggtgatcagcccatgacctaaacctccagacaaaataa

SEQ ID NO: 709891 - DNA, 100 bp, Homo sapiens
agaaggaaggatggcctctggacatccgagtggtgctgggctttgacaaacttcctctgtggggtaccatcctcatctcggtgggatgtgcagttttctg

SEQ ID NO: 709892 - DNA, 90 bp, Homo sapiens
tgctggatgccgaagtatacaatgtaccattggactctcagtttcctgggagttactgatcatcttctttgaagaaacatgaagttacac

SEQ ID NO: 709893 - DNA, 90 bp, Homo sapiens
tctctggagcaccggggccaccaggagggagaagaaggacccagcccagttcctgcaggtacatggccgagcttgcaaggtgcacctgga

SEQ ID NO: 709894 - DNA, 100 bp, Homo sapiens
cattcctcccagggaccccagacctctgtctctctcgggggctcccacaggatcagaggctggggccaactggaaccattggcagctgcacgctcattac

SEQ ID NO: 709895 - DNA, 74 bp, Homo sapiens
ttttaatgggaacatacgatgatggagcaaccaaaaaacactttcctggataaaaaagaaaacattccagatgc

SEQ ID NO: 709896 - DNA, 110 bp, Homo sapiens
cagagctattccagcaccagcagagatgtgtgcaacagcaccgatcttccggaagtcgagatcattagcctgctggaggagcagctgccccattataagttaagagccga

SEQ ID NO: 709897 - DNA, 50 bp, Homo sapiens
cgccgaggcaccgaggcactcagaggaggattctttctactaatccagat

SEQ ID NO: 709898 - DNA, 75 bp, Homo sapiens
atcgaggtcaacacccgccgagcacaggctgacctggcctatcagcttcaggggaggatactgaggcacacagag

SEQ ID NO: 709899 - DNA, 74 bp, Homo sapiens
gtgcaacatggggcttgagaaaggcctgtgacattctggccattgataagtccctgacaccagtcaccctggtc

SEQ ID NO: 709900 - DNA, 82 bp, Homo sapiens
gccagagacctggcaaatgacatcatgacactgatccagcacacggaagacatggagaacgagatcgacgagctgctgcagg

SEQ ID NO: 709901 - DNA, 100 bp, Homo sapiens
cggacttcaatgcccagtccccagctcgccagcgtccttcgggagggggctgagagcctcgagcagcacctggggctggaggcactgatgtcctctgggc

SEQ ID NO: 709902 - DNA, 100 bp, Homo sapiens
gccgcggagccggcgctgagaggggctgcggccggagcgggcggctgagacaaaggcgacggtccgtggcactcaggtagttggttctgacatgactgtg

SEQ ID NO: 709903 - DNA, 104 bp, Homo sapiens
ggcagcgcgagataaatcacgagaggaagcttaaatctgtcgtttgaatttaggaccacctcggattgtgcagactggtgcttaaaatggaagtcgatattaat

SEQ ID NO: 709904 - DNA, 90 bp, Homo sapiens
ggcagtggaaaatgcgctcgggctggaccagcagatttgtccaatatgtgcagcgttacctggaggcgatcctaatcatgtcacggatga

SEQ ID NO: 709905 - DNA, 80 bp, Homo sapiens
ccaaaatgaaggatgtacaaacatccacaccaggtcagcaatctgaagatggtcttacggagcctagtagagtactccca

SEQ ID NO: 709906 - DNA, 88 bp, Homo sapiens
gatggtgtagcgctttaggggaagaaaaagcttgtggtgaaggggggcaaaaaaaagaagcaagttctgaagttcactcttgattgca

SEQ ID NO: 709907 - DNA, 82 bp, Homo sapiens
caggaacatcgtctgcttcatggaggaatgccagctcctgagcaggcctcattggtggaggaggggcaaccacagacccgcc

SEQ ID NO: 709908 - DNA, 106 bp, Homo sapiens
gacgccaggactccctggaagcctagaaatgctaataatcacaagaagttgtcagaatttggaattagaaatggcagccggcttcaagcagatgacttcctccagg

SEQ ID NO: 709909 - DNA, 100 bp, Homo sapiens
tccagagaagccaggagcacccggcgtcccagacaaaggccatgtggaagtgttacatcaccttttgcttggaaagatttactaagaagtcaaatagtgg

SEQ ID NO: 709910 - DNA, 97 bp, Homo sapiens
ctggttgttccgttgcgagctgcagctgcgatctctgtggtaggcccagttgactatattgtggagtatgactatgatgctgtacatgatgatgaat

SEQ ID NO: 709911 - DNA, 96 bp, Homo sapiens
cttctcgtcggattgcccatgcacttgttgcagaaacagccaaggctcaggcccttttgtgagaagcagaccagcctgggggctggcggcaggaca

SEQ ID NO: 709912 - DNA, 128 bp, Homo sapiens
gtgcactccgcacctcggggacattattgcgcgtggaacggctgcttttggaagaattctccactttaccaatacttacaggatctgggacacacagactttgaaatatgttcttctttgtcaccaaa

SEQ ID NO: 709913 - DNA, 75 bp, Homo sapiens
agggacagccgcccctggtgcacacaccctcgtattctcctgcccttccccagggtcttgctgtctcacccaggc

SEQ ID NO: 709914 - DNA, 75 bp, Homo sapiens
tggatttcgaggagtgtctcaaggactcaccccgtttccgaccaggatggagcagagcccagcgccaattccgtg

SEQ ID NO: 709915 - DNA, 98 bp, Homo sapiens
aagtgtgcttgcagtagatgaaaatggtttttagaacttcagccataaaaatgggcagaattttccttgatcatatcggtggtacccgtctgttttct

SEQ ID NO: 709916 - DNA, 100 bp, Homo sapiens
ctactcccctgctatccccaacaagaggaaagacacacctaccaagaagccagtcaagcggccagcatgatgccttcttctgtagagtgggcgctttgca

SEQ ID NO: 709917 - DNA, 99 bp, Homo sapiens
cagcaaaaaaattttgttctataatgacgaacaagataaggagcaatccaatccatctatggtattggacatagatgcacagccagagaacaacacatc

SEQ ID NO: 709918 - DNA, 75 bp, Homo sapiens
gtgcctgccacccctgtcctcacccggggcgctggcccccagctctgcaagacagagcgggatgccaccagcttg

SEQ ID NO: 709919 - DNA, 100 bp, Homo sapiens
gagaatattgaggacatgctggagtgggcaggattagaatggctgaacacagaagaacctatttctgtctacaaggatctatgtggaaaaatagtcgtcc

SEQ ID NO: 709920 - DNA, 84 bp, Homo sapiens
caagccttcccagttatcataaccttgaatggcgactagatgtacaggaaattgaacttgaatgtggaacccagctttgtcttc

SEQ ID NO: 709921 - DNA, 100 bp, Homo sapiens
agaccaccgaagactgcatcgccaagatcatgaccagagttggagccacccaggggaatgatctctgatgacctaacctaagcaaaaccactgagcttct

SEQ ID NO: 709922 - DNA, 100 bp, Homo sapiens
cgcctggcctttgctacgcatggcacggcctttgacaagaggcttcagcaaccaggagggattgactgagatcttaacaacagcagcaacgatacatcag

SEQ ID NO: 709923 - DNA, 83 bp, Homo sapiens
gcgacaagccgctggcagccgcggatctcaccgccgctcagggctcttcgactaccggggccgtctgtcgcccgtgccagtgc

SEQ ID NO: 709924 - DNA, 90 bp, Homo sapiens
aagaaacgggccgcgaaccgcagtatcatgctggccaagaagatcatcattaaggacggaggcacggagagattaaacagattctagaaa

SEQ ID NO: 709925 - DNA, 91 bp, Homo sapiens
cagcatgtcggtggcggggctgaagaagcagttctacaaggcgagccagaagaacatgagctgcctgtggacatggaaaccatcaacctgg

SEQ ID NO: 709926 - DNA, 83 bp, Homo sapiens
tcttcgtctttgcagcgtagcccgagtcggtcagcgccggaggtcacggaggtagtcatgatctatgacgccgagaagcagag

SEQ ID NO: 709927 - DNA, 95 bp, Homo sapiens
cgaagagaacaagacgtgtgaagactcagtctgaagatgatgagaaactgaaaaagaggaaggagcgatttgggattgtcacaagttcagctgga

SEQ ID NO: 709928 - DNA, 82 bp, Homo sapiens
gccttgcttgcttgagcttcagcggaattcgaaatggtggtggagattgtgaagaagctggagtctcgccagcggggctggg

SEQ ID NO: 709929 - DNA, 141 bp, Homo sapiens
tcgagaacagaaggatctctccttaacgcctttcaccattaagaggaaagcgatggaggagctgagcgctgatgagattctgctcagcaatcctcagatgtggtggttaaatgattccaatcctgaaaccgacaaccgtca

SEQ ID NO: 709930 - DNA, 50 bp, Homo sapiens
ctactatcctcattatctccaaaccaagacttaattcagtgcacaaatga

SEQ ID NO: 709931 - DNA, 75 bp, Homo sapiens
gtttttagtccattgactatgcagcctaatgatgcggaaaacgccatgcggtacataaatgggacgcgtctggat

SEQ ID NO: 709932 - DNA, 100 bp, Homo sapiens
caatcctcagacgcctcacttaggacaagggctatttttggagcattacaagatatacttgggagccgttctgtttcaaaggaatattataatcagacgg

SEQ ID NO: 709933 - DNA, 90 bp, Homo sapiens
aaacatccacaatcctcacagtgagcctttacagaaatgtgcctgtggctgccttgcctgtaactcagcaaatgacagaaatgagcattt

SEQ ID NO: 709934 - DNA, 100 bp, Homo sapiens
tcgctgacggcgactgcgggaggccagtacgaggatgtcgtccaggaaagattgtgcagatgactgaagcagaagttcgaggcttatgtatcaagtctcg

SEQ ID NO: 709935 - DNA, 75 bp, Homo sapiens
cgtattggagacgagtttaacgcttactatgcaaggaggcctgtggacatctctacagcaatgagtgaacgggca

SEQ ID NO: 709936 - DNA, 101 bp, Homo sapiens
gagacccagtcgctacgggagcagccagagccctcatccagctgcccccctacatctctcagtgtgatgaggtgctgcagttctttgagacaagacctgag

SEQ ID NO: 709937 - DNA, 75 bp, Homo sapiens
gaacagtacgcagtgaatgttgaaggagctcattgccaagttagatcaggcagaaaaggagaaggtggatgctgc

SEQ ID NO: 709938 - DNA, 96 bp, Homo sapiens
ggaatttttccagctcaactacctccaacacctatcactcagtcggtgctatgatataatacctgaaactttactagatgctgttcagttaaatgt

SEQ ID NO: 709939 - DNA, 75 bp, Homo sapiens
tgctggattgctgcaaggctgagggacgagaacgaggatcgcaacaatgcaaggcaaattcatgaaggtgcaagt

SEQ ID NO: 709940 - DNA, 100 bp, Homo sapiens
ggtgtggagtgggacagaagtcacggccccccagggagccacagacagagcctggagaaagttcttgtggaattcagtcacaaggagttgtttgatttct

SEQ ID NO: 709941 - DNA, 100 bp, Homo sapiens
gggtgcccagcagggtcttctacagtggctgttgaagaggctgaagcacacagcaagaaggaggccatcagcaaactgggaagaggaccctcaccaggaa

SEQ ID NO: 709942 - DNA, 90 bp, Homo sapiens
aagggatgtcgtctcagcagtgctcgggcgcaggtgatgtgtccaatctagatcccaacttctcatttgaaggcaccaaactggatgtgg

SEQ ID NO: 709943 - DNA, 75 bp, Homo sapiens
ggcgaaaggaacggctgaaggccctacgggagaaaaccgggcgcaagcttaggcttgatttccgactcttttcac

SEQ ID NO: 709944 - DNA, 74 bp, Homo sapiens
gctgaagatctggaagacgcgctcctgcgccgtacctgttcctgacttttccacggattgtcttcatgctgggc

SEQ ID NO: 709945 - DNA, 99 bp, Homo sapiens
ggttccttcagtggtgttggtagtaaaatgggtggttctcttcccaaagtggaagccaaattcatcaattatgtgaagaattgcttccggatgactgac

SEQ ID NO: 709946 - DNA, 100 bp, Homo sapiens
acaccttctcccagagcgtcagcagcctgttcggcgaggacaacgtgcgcgccgctcagaagaaaacttggaatataacgtggagcctcaagaaatctca

SEQ ID NO: 709947 - DNA, 100 bp, Homo sapiens
tggctctgaaggcgaacgcttcgctggccatttaggagctctgctcaaagccagacgggatggttgcagaagagtacaatgcctttttctactcactggt

SEQ ID NO: 709948 - DNA, 97 bp, Homo sapiens
cagcttctctagctggccttgctgttggatcactactcttggaatcaaagataaatccaaatactgcatatcagaaacaacaggcaagtagttgttt

SEQ ID NO: 709949 - DNA, 75 bp, Homo sapiens
cctagtgggtgtaatacatcatgaactgcagggtatgttgaagaaagtacgcacatcttatcttctgaacatttt

SEQ ID NO: 709950 - DNA, 51 bp, Homo sapiens
gtccgcgagccaccgaggcccagctggcataaccttgacaacagattgcct

SEQ ID NO: 709951 - DNA, 75 bp, Homo sapiens
tggctcggagcagcagcctctgagaacatgaaaggctcccggagcagcgctgactcctccaggaaacactgaggc

SEQ ID NO: 709952 - DNA, 96 bp, Homo sapiens
aaacaagacagttctgtctgcagaagcccattatggctgtaactggagatgacacagcatgcagccagtaaagatcccagagaagttcgagaagct

SEQ ID NO: 709953 - DNA, 75 bp, Homo sapiens
gaagcagccgatccagcctgcggagcctgtggggcaggactgcaatgtgccgatcttagctgctgcctgagagga

SEQ ID NO: 709954 - DNA, 96 bp, Homo sapiens
ttttgaattcacgcttatggtagtggcaatcagaaacggagactgttcatctgtttatcccagctctatcagtcggtgccatcatcggcaagcagg

SEQ ID NO: 709955 - DNA, 100 bp, Homo sapiens
tggagactacaatatggatggctatccagacgctctggtcatactaaagaacacatctggaaggccatccggctgtccttagagcaagccctgcctcctg

SEQ ID NO: 709956 - DNA, 75 bp, Homo sapiens
gaagagcatatcaatgcaggacgtacagttcagtagtggccacagaagaagtagttactgcagaatctgtggatg

SEQ ID NO: 709957 - DNA, 90 bp, Homo sapiens
tggcccaacggtttccccagcagtagcctctgcgaccaggctacatccagaagatcaagtcgggagaggaggactttgagtctctggcct

SEQ ID NO: 709958 - DNA, 83 bp, Homo sapiens
cggatgccctgcagtacctgcagaaggtctctggagacatcttcagcagacatgcaagaaagcacttcagccaagcagaaggg

SEQ ID NO: 709959 - DNA, 100 bp, Homo sapiens
ggaggatcagagaggactccgggaacgccaccgactgcaagccaccagtcacaggaaaacctccctgccctgcccaggctgttgataatcaggtgtatgt

SEQ ID NO: 709960 - DNA, 80 bp, Homo sapiens
attgttcctaaaccagaagaggaggttgcccagaagaaaaagggacaagaatccttcaagaaacaggaaaaaactcctaa

SEQ ID NO: 709961 - DNA, 103 bp, Homo sapiens
gaagcgtcgagtctgcagtcgcccgggcgacggcggggtccgcgcggccagagacacctatggctgccgatgaaggctcagcagagaaacaggcaggagaggc

SEQ ID NO: 709962 - DNA, 96 bp, Homo sapiens
accaattgatagagtgtttactagacttggtgcctcagacagaataatgtcagatttgataatgggctgcattaaaagtaaagaaaacaaaagtcc

SEQ ID NO: 709963 - DNA, 82 bp, Homo sapiens
tgcttcctgcttcatagataagaggctgcagccacaggtccgcacggaaaaccaggagctccaagactgccgcacactcaac

SEQ ID NO: 709964 - DNA, 100 bp, Homo sapiens
cgccgcggtgcctcggtcaacagccgcaaccactacggctggagcgcgctcatgcaggcggccagtttgcagatggcgtgtacctggttctgctcatggg

SEQ ID NO: 709965 - DNA, 100 bp, Homo sapiens
aaagtattggccaagaagagagatcctgtttctcacatttgtttcattgaagaaatagttaagttgaaacattgtagtcggtatatacatgacttatttc

SEQ ID NO: 709966 - DNA, 100 bp, Homo sapiens
aaaaaaccctcccctcaagaagtctcagaactccaggctacatatcgtcttcttcgtgggaaaggaaaaattccggaactgttggcttcgggcatggttg

SEQ ID NO: 709967 - DNA, 98 bp, Homo sapiens
ccccttgcaacaaaggcagactgagcgccagagaggacgtttccaactcaaattaatgaagatgctgtttgaatgttcagatgaacgaattgacttgg

SEQ ID NO: 709968 - DNA, 90 bp, Homo sapiens
gaaaccaaaaaacttcttcatgatcatgaacttcttttggccaagctcaagctgccgggccgcaagtacagccctgggtacaacaccgag

SEQ ID NO: 709969 - DNA, 98 bp, Homo sapiens
tgaggctatccgcagcgagatggagcagctcaaggaggttgcacagagcattgaggatcaccatcaggaagtgattggtttctgcagagagaatggtt

SEQ ID NO: 709970 - DNA, 73 bp, Homo sapiens
accctcttagatggcaccgaatacagctgtgacctggagggttctgatgactgtcttgtgaaaatatgggcaa

SEQ ID NO: 709971 - DNA, 100 bp, Homo sapiens
tgaaaggagagcaagaatctcatagagccagccccagtgcctgctgagccgtttgacaacactacctacaagaacctgcagcatcatgactacagcacgt

SEQ ID NO: 709972 - DNA, 75 bp, Homo sapiens
cagtatgaagtggtgaaggagtgtgtgcagcggtctatgaaaattatcctacttatgatttaactgaaagaaaag

SEQ ID NO: 709973 - DNA, 100 bp, Homo sapiens
ctatggcagtggcagaagattttaattaggttcaatgaaagatcacccacagcagcagccaggcatgttgtcccgtgtgactgggggtatcttcagtgtt

SEQ ID NO: 709974 - DNA, 82 bp, Homo sapiens
tcggccgaacccctccgcagcaggaggaacagcacagcatgctgggctctggatttaaagctgagcgcttaagagtgaattt

SEQ ID NO: 709975 - DNA, 83 bp, Homo sapiens
cgacgactccgtcgcagactacggacctgtctgggtctcagccgccaaagaccccgtccggagccttcacgtaaatgggtcca

SEQ ID NO: 709976 - DNA, 98 bp, Homo sapiens
cgcgtcccgctcgctgggagagaggtacctctccttttccctctccctttccctaagctaaaagatggcggcaaggcagcccaggcaaatgtaagaat

SEQ ID NO: 709977 - DNA, 51 bp, Homo sapiens
gaagtgaagaaattattggtacctgcaatgcctttgaagatgagaaacccc

SEQ ID NO: 709978 - DNA, 75 bp, Homo sapiens
cagttctattttgggacagggacaagtttgacggtcattccaaatccctgcatgtcactgagtccaccatgcttt

SEQ ID NO: 709979 - DNA, 100 bp, Homo sapiens
ctcttcttcttcgagaattacaccggggtccagtgatgtcttggcattgcccattttcaagcaggaagattccagccttccattggatggtgaaacagag

SEQ ID NO: 709980 - DNA, 75 bp, Homo sapiens
gtcaccagcacccccgaatgaaggcaccaagatgataccctgtgacttcctcatcccggtccagacccagcaccc

SEQ ID NO: 709981 - DNA, 83 bp, Homo sapiens
gagccagtccttcgcaggcgtcctcggcagccacgagcgggggcccagatatggctcgtggacagcagaaaattcagtctcag

SEQ ID NO: 709982 - DNA, 75 bp, Homo sapiens
aagaaccttgacaagctcatccggctggtaaatgcgcaggtgggagatgccatcccagcagtggaggtgtttgaa

SEQ ID NO: 709983 - DNA, 100 bp, Homo sapiens
gccctcgcgcctcgccggcccctcccccggtcgccgcggctgccgcgccgccgctgcaggaggaattcatggatgctgtttgtgatggtgtaggcttagg

SEQ ID NO: 709984 - DNA, 105 bp, Homo sapiens
gtacttgccgccgtcccggctcacctggcggtgcccgaggagtagtcgctggagtccgcgcctccctggaacaaaatccagtctcatagcagaggagaatataat

SEQ ID NO: 709985 - DNA, 73 bp, Homo sapiens
caaatttggaaagaaaaagaatggcgtccgtttcagctcttcacagatggaatcacaaataaacttattggct

SEQ ID NO: 709986 - DNA, 75 bp, Homo sapiens
acgcggacagcgggctggagcctgacgagctggcggaaacctgtttccctccaatcttgtggttgcagctttccg

SEQ ID NO: 709987 - DNA, 75 bp, Homo sapiens
cgctgctcaagttccagatttgatctctgttgaggagctggcgcggaatctggtcatcaaggtcaacagggatgc

SEQ ID NO: 709988 - DNA, 89 bp, Homo sapiens
actatcaccagctacttgagaaggttcgaaagaggcatctgtgaaattccatgtgctgctgacatcctatgaattgatcaccattgaca

SEQ ID NO: 709989 - DNA, 75 bp, Homo sapiens
aagagtattcttggatcttgcacaggaaggaattaaaggagtgtttctcaggagctatcagaaactatcctcacc

SEQ ID NO: 709990 - DNA, 100 bp, Homo sapiens
ctgcatcaatgcgccggccatagggctccaaacgaatcctgcggtcccatgagattgtgctgccccccagtggacaagtggagacagacctggccctgac

SEQ ID NO: 709991 - DNA, 101 bp, Homo sapiens
ccaccagcattgccaccaccaccaccaccaccacagagtctgtggaagaggtggttcgagagatcatgatgcagccgtccttttggatttctttttaataa

SEQ ID NO: 709992 - DNA, 74 bp, Homo sapiens
agagatatgaagatcttcctataaatagcaatccaggtctagtgacggagcccgcgcgcggcgccaccatgcgg

SEQ ID NO: 709993 - DNA, 116 bp, Homo sapiens
ggcgccctttcttggcccttgttcccccaaatgtctgactctgactctcggactgagaaacgcaagtaatctatgccagcaattatgacaatgttagcagaccatgcagctcgtca

SEQ ID NO: 709994 - DNA, 83 bp, Homo sapiens
cttgctcgtgcactttacacacatgagctgtcaataccagcaaatatgcagaaagctatcggatccaaacctatgctgaatat

SEQ ID NO: 709995 - DNA, 75 bp, Homo sapiens
gtccgtgcgcccagcgtcccagggcccaggccgagcaggaagcggggagaggtggtgagagatgacccctgttga

SEQ ID NO: 709996 - DNA, 80 bp, Homo sapiens
gggacccggtgacagcgtgagagacaaggcgaccagccagctcctgttggagacagattgggagtccattttgcagatct

SEQ ID NO: 709997 - DNA, 83 bp, Homo sapiens
ccgctcccaagatgtcgcagacggccatgtccgaaacctacgtattgctgacagacagaacgccttggaggctgagtggagga

SEQ ID NO: 709998 - DNA, 75 bp, Homo sapiens
cagccagaaaactgaaggtcagagagggcctatatgaacccaatagcaatggcgagatcaaggggtccaatccag

SEQ ID NO: 709999 - DNA, 100 bp, Homo sapiens
gttttgtgactcacaagatgctgatcttgctcaggttgaaagcttccaggaactgttgctgatgtatattcaagatgagtggattaggagaaaacttgga

SEQ ID NO: 710000 - DNA, 75 bp, Homo sapiens
cggctcccttgcggtggtgttgggatcaccgcacagcagatcaccacccctggcgcgcagcagaaggttgcctac

SEQ ID NO: 710001 - DNA, 80 bp, Homo sapiens
tgtttatataactcaagttgtttggctaaattcttcagggaaagaatcatgtgatgtacagctttatataaagagacaat

SEQ ID NO: 710002 - DNA, 98 bp, Homo sapiens
ttgaactactgccggagcttctgccagctcctgtcttcgttcctggctagaacaagacacctcctgtccaacatgcagaatgtctcttaatattgccg

SEQ ID NO: 710003 - DNA, 75 bp, Homo sapiens
cagaaaaaagatcacaagcaactctggatgggattgcaaaatggcactacctggcagcaccatctaaacctgtat

SEQ ID NO: 710004 - DNA, 75 bp, Homo sapiens
gcggccttcgaggaggtcatgaaggacctgagcctgacgcgggccgcgcggctatcaagcccagagagagacgtg

SEQ ID NO: 710005 - DNA, 50 bp, Homo sapiens
gcggcgcccaccttcgggaggatcagaggctgaggggatctggcggtgga

SEQ ID NO: 710006 - DNA, 101 bp, Homo sapiens
ctctttccgccctaatggaggtctccagtttcggacttggatgttgtgggtgatggtatgcagtgtcctccttcacctttgctttttgatccttcactaac

SEQ ID NO: 710007 - DNA, 80 bp, Homo sapiens
ccatccggcgcctgaatatgtataggcaaaaggagcgcaggggaaactggaattggaaaatcaacactgattgacacatt

SEQ ID NO: 710008 - DNA, 126 bp, Homo sapiens
ccagctgcccggtgcccgaggaggcagccaagctcatggcctgccactgcgtgccgggagatacagatgacccaccaagaattactcagaaccctgtgatcaatgggaatgtggccctgagtgatg

SEQ ID NO: 710009 - DNA, 100 bp, Homo sapiens
atgtctctggatcctccttgcttaccacacacccccaggagttttttgagaaccctgcttttcgtcccgatgggctgaaactctatcctaccctggtgat

SEQ ID NO: 710010 - DNA, 100 bp, Homo sapiens
cccagttgcaatccaggcaggaagattgctggctcagaggctctatgcaggttccactgtcaagattttcggacaagcaaacaccacgctgaagcgatgg

SEQ ID NO: 710011 - DNA, 75 bp, Homo sapiens
ccacagacctgcgctgcttcctacacagcctcctgtcgtggtttctgacgtagaagagcttacccctccagagca

SEQ ID NO: 710012 - DNA, 98 bp, Homo sapiens
aagcagaagataattttgaagacatcataactaaaccacctgttcgaaaggatggacactccacagctgaccttgactgaactccgggtccttcttga

SEQ ID NO: 710013 - DNA, 90 bp, Homo sapiens
actcgcccgccaccctgcgctgccgccgctctgaggagttaaaggaacttgacaagaggagtcggaagatttagagagcttctcagagca

SEQ ID NO: 710014 - DNA, 75 bp, Homo sapiens
tgggggcagtccgcgagccccgcactctctcgatgagtcggagaagtccctttgccagggtttggatacctgatc

SEQ ID NO: 710015 - DNA, 100 bp, Homo sapiens
agagcaaggctgcagccagtgccactcgtgagtggacagaacaggaaaccctgcttctcctggagctgcccctgagcctggacctgcccagcccccggcc

SEQ ID NO: 710016 - DNA, 51 bp, Homo sapiens
cgggagtttgaggaggttgtgatgccttcaattaagttgcagagttctgat

SEQ ID NO: 710017 - DNA, 83 bp, Homo sapiens
ctcggggtgtgtcggccgccgctgctgcttgggcctggtgacaaccaaagccaagcaactgaaggattcagtgacctgctccc

SEQ ID NO: 710018 - DNA, 50 bp, Homo sapiens
gcaccccccgccgacaaggagggagttgtaagacgttcatcgccgtgtta

SEQ ID NO: 710019 - DNA, 98 bp, Homo sapiens
gcagctggagatgtccgagcccaaggcaattgatcccaagttgtcgacgaccgacagggtggtgaaaggaatcattaaccaatggcaacaggaatcca

SEQ ID NO: 710020 - DNA, 100 bp, Homo sapiens
ggaggtggtggagctggtgaagcaccatctgtgggctctggaaggacccagccgccgcctccatctctgacggagactgtgacgcccgggagggtgagtc

SEQ ID NO: 710021 - DNA, 75 bp, Homo sapiens
agcaggttgcaggtgaacatggccttgagtaaagaatttcgtgaaggaggacgtattctagtacagaaattacag

SEQ ID NO: 710022 - DNA, 101 bp, Homo sapiens
ccccgcgtgcgccttgctcgcccgcagccccgagaccgcaggacactggggttgggaaatcaagcatcgtgtgtcgatttgtccaggatcactttgaccac

SEQ ID NO: 710023 - DNA, 90 bp, Homo sapiens
cctgctcttgaggttcacagatgatacctttgatccagaacttgcagcaacaataggaaagaaaccttgactggttccccaggatgagag

SEQ ID NO: 710024 - DNA, 100 bp, Homo sapiens
ggccagcgctgctggcgggcgttagggtatcttggagatggccgcttccatctggagtctgtcatgattgccaaccccaatgtccccgcttaccggtatg

SEQ ID NO: 710025 - DNA, 100 bp, Homo sapiens
gacagctgcaaggagttactgaaggagattacctggggcaattgatgttatcggtcagactataactatcagccgagtagaaggcaggcgacgggcaaat

SEQ ID NO: 710026 - DNA, 100 bp, Homo sapiens
gcggcgactacgacggcgttgatatcggtggtaacgacggcctcagcaggcggggaagatgaaagggtcaaaatgcagatcttcgtgaaaacccttaccg

SEQ ID NO: 710027 - DNA, 90 bp, Homo sapiens
cgacgtgaaggagcagatttacaaactggccaagaagggccttactccttcacagatcggttgttgaagattggaaattcatagcccagg

SEQ ID NO: 710028 - DNA, 75 bp, Homo sapiens
tctgtcgtctgccggccggcccggaccctggacaccatccagctggctttcaagtattatgcggagtgtcacggc

SEQ ID NO: 710029 - DNA, 87 bp, Homo sapiens
cgggccgcgggctgcggacgctcggtcccgcgctgcgcatccccgcggacgccacagcgcttgtggacgaatgtggaacctcgctct

SEQ ID NO: 710030 - DNA, 51 bp, Homo sapiens
ccaggcccagccaactcctgcagaattcttccatctctatgacaacaagcc

SEQ ID NO: 710031 - DNA, 98 bp, Homo sapiens
accagagtcgagttccctcctcctgcaccaaagggagccgccaccgtctggtgtctaaaccgcctcggctttcccatggtttggcatggacattgggg

SEQ ID NO: 710032 - DNA, 50 bp, Homo sapiens
gcagccttagccctagtgtagagtgcaatgcgtgttttactatctaaatt

SEQ ID NO: 710033 - DNA, 75 bp, Homo sapiens
ccgtggcccggatgcaggacagacccctcagactctcagcgttctcatctctcttccttcaccatgaagctgatg

SEQ ID NO: 710034 - DNA, 129 bp, Homo sapiens
ccgggactagtggaccagctggtgaaggcagacagcgagtggcgacgatccacaatggtgcgcatgaatgtcctggcagatgctctcaagagtatcaacaatgccgaaaagagaggcaaacgccaggtg

SEQ ID NO: 710035 - DNA, 100 bp, Homo sapiens
gctgcttggattccagttcgtctgcccacagccctccactcaacacaggaagcaggatgtgcgctttcattccaaatacttcacagaagagctaagaaga

SEQ ID NO: 710036 - DNA, 98 bp, Homo sapiens
cgaccccctcatccgctgggactcctacgacaacttcagtgggcatcgagatgacggcatggaggtcattgaagtcaacaagagagacatagtcttcc

SEQ ID NO: 710037 - DNA, 98 bp, Homo sapiens
gcggcgtaaagtggtttttgcggtcttagagtttgaaagagtctatcttgataatctccccagtgcatccatgtatgagcgcagttacatgcatagag

SEQ ID NO: 710038 - DNA, 90 bp, Homo sapiens
tcttctggctcataaagattgccctgtaaccgccatgcagaagaaatctggctatcataataaaccacataatcctatggtaaatgctgg

SEQ ID NO: 710039 - DNA, 75 bp, Homo sapiens
aactgccaaacccaagttggttggagatgtggattttgaaggagaccctttaaagagatcatccttcatcattta

SEQ ID NO: 710040 - DNA, 100 bp, Homo sapiens
ccaggtgtttgaatcgctgagcgatatcacagaacacaagattaatcaatgtcaactgacagccaaaccaaacaggaagcttacttttctctacctagcc

SEQ ID NO: 710041 - DNA, 82 bp, Homo sapiens
cgacgcctcggaccgggctgcgccgcgggagttcgaggttttaaaatcaaagatgggaaaatcggagaaaattgcccttccc

SEQ ID NO: 710042 - DNA, 100 bp, Homo sapiens
ggaccacctggcagtgcagtcgctcatcagggcatatcagcccctggaggaacgcgcatagatgatggtgacaagaccaagatgaccaaccactgtgtgt

SEQ ID NO: 710043 - DNA, 89 bp, Homo sapiens
cggcccacagtgggggtgtgcaaacccgagagaactgggatatcttaaatacgatcataaggcactgtccaccccgctttttctccctg

SEQ ID NO: 710044 - DNA, 119 bp, Homo sapiens
atggcaaccttgtccctggcccggccctccttcagtttagttgaggataccacattagagccagaagatttgatccaggctaccaacgagaccaatgttaatattcctcagatggccga

SEQ ID NO: 710045 - DNA, 100 bp, Homo sapiens
gtgtggaattaccttcactctgggaaaaggcactgaagttgggcacgaccataataacatccctgacttctgtgctgcacaatgacaaagaattccccaa

SEQ ID NO: 710046 - DNA, 100 bp, Homo sapiens
ccgggatcgtgaccgagaccgtgaccgagagcgtgaccgagagcgcgaatatcgtcatcgttagaaggggaactgatcacagccgcacatgagcttggag

SEQ ID NO: 710047 - DNA, 75 bp, Homo sapiens
tgtgggcctgggagctgcctctgaggaacacgccgcaggttgtgaccgagattcccgacgagagagactgagggg

SEQ ID NO: 710048 - DNA, 90 bp, Homo sapiens
taaggacaaaagccaagaggaggacagttcgctacacagcaatgcatcgagatcctgtgccccagaaaccgtgagatgtctcaattccca

SEQ ID NO: 710049 - DNA, 90 bp, Homo sapiens
cacggggctcagtggcagcggccccgcctacgttcgttccaccagtcataaaccagatgaaatctatggcatgattgaaagactatctcc

SEQ ID NO: 710050 - DNA, 100 bp, Homo sapiens
gatcgggccgtgtccgccgcggccctgcgaggtccgagggggatgatggcgccacttcctcagtttcggcactcaagcgcctggaacggagtcagtggac

SEQ ID NO: 710051 - DNA, 90 bp, Homo sapiens
ggctgctgcctactacagcggagggtacagccaaagaccggagctttggagagatgaagtttaaacagtgtcctacagagaacatggctc

SEQ ID NO: 710052 - DNA, 98 bp, Homo sapiens
gctgagaggtgcaggaagaacaacgggaagacagaaatatggaatgagtccctggaacgccagatgcgtgaaatggaagagaactttgccgttgaagc

SEQ ID NO: 710053 - DNA, 97 bp, Homo sapiens
gcccacggcccacaggggtgtagcccgagacccacctgcagcccccagcccttgccaggaaagggaagacaaaggcgctttggctaagctggtggaa

SEQ ID NO: 710054 - DNA, 75 bp, Homo sapiens
tttgtctctgatgagctgagaaacaaagccacccagccaatgaaggttacgggtaaattccggggaggtgtgaac

SEQ ID NO: 710055 - DNA, 100 bp, Homo sapiens
gtaacatttgggctggaagcgaaaatacaagtaaacatatgtcaaatggtctgaagtcacctgccctatctggacattccatagactaccacttttaccc

SEQ ID NO: 710056 - DNA, 100 bp, Homo sapiens
ggccgcgggagccgcacgcggcgatatggaagaggagggcaagaagggcaagaagggctaccagggcatggtggacggaggctcaaacatcgcagaggcc

SEQ ID NO: 710057 - DNA, 50 bp, Homo sapiens
atgcttagatacatgtataacaaggtcattgctagaatcgtggatggaag

SEQ ID NO: 710058 - DNA, 75 bp, Homo sapiens
ttcttttctctcttcagcccccaacccagtggaggttggtcaaagaaaaagtgatgtatgaaaaagaggcaaaac

SEQ ID NO: 710059 - DNA, 90 bp, Homo sapiens
gaggagcgggccgggcggggggcctcggaagggcagagcggcttgggtaaatccaccttaatcaacaccctcttcaaatccaaaatcagc

SEQ ID NO: 710060 - DNA, 74 bp, Homo sapiens
ttcgcgtctctctgctgcggcgcggggaccgctgtgctctcggggaagttggttaaccacccgtgtccacccta

SEQ ID NO: 710061 - DNA, 99 bp, Homo sapiens
gctcaccccagttgcaatccaggcaggaagattgctggctcagaggctctatgcaggttccactgtcaaggtggacccccaaaagtacaagggcatatt

SEQ ID NO: 710062 - DNA, 134 bp, Homo sapiens
aacccagcttgtcaatgggagaggtgtgaccatccagccacttaaaagggattatggtgtccagctggttgaggaggctggagcattggatttgctaaaggagcttaagaatattcctatgaccctggaattac

SEQ ID NO: 710063 - DNA, 90 bp, Homo sapiens
cctgaaatacatccaggaaagacatggagattctcttaaaaagatcatggaagggaagtggttgctgtgtatgttactggtgcttggaac

SEQ ID NO: 710064 - DNA, 75 bp, Homo sapiens
ccaaagccaaggagaagttctcccagctggcagaagcctatgaggtcagtttaggggctggtgcaaaggatgagt

SEQ ID NO: 710065 - DNA, 100 bp, Homo sapiens
cttttgtccctttgcctcatcccaggttgccttggaaaatgccaacgccgtgtctgaaggtagatcatggcaaccatagaagaaattgcacatcaaatta

SEQ ID NO: 710066 - DNA, 90 bp, Homo sapiens
tcgcttggttaaaacctgacacttttaacaggaatccctttgcccacgtccagctgaagccgacagtgaccaacgacaggtctgcccccc

SEQ ID NO: 710067 - DNA, 90 bp, Homo sapiens
gtgcgatcacaactgaaactcagggaggccacggagaagatggtatctatgaagccaccaggtttccaggcatccctggctagagacggg

SEQ ID NO: 710068 - DNA, 95 bp, Homo sapiens
cggggctgctggtgggccgcgtcgaagacatggaccagggctacggagctgagctgactgctgcccactttggaggaggcggtgggctccttcac

SEQ ID NO: 710069 - DNA, 82 bp, Homo sapiens
gagacgcacagccaggacatcctggaacctgggaaagggtgtggacactgccagcggctgcagccgacttggaatgacctgg

SEQ ID NO: 710070 - DNA, 74 bp, Homo sapiens
taaattgccgcgatacccaaggcagacattcaacacctttacatttagcagtttcagccttttatgctgagtgt

SEQ ID NO: 710071 - DNA, 98 bp, Homo sapiens
gccggcagccccgggacacccccgcaagcgagcaggtgttgaagcacaacgggtcatccgagattctcaacaaactgtatgacacggccatggacaag

SEQ ID NO: 710072 - DNA, 100 bp, Homo sapiens
caagtgctgggcggcccggccgaggcggaccgcgtggcggcggcgcacgggtacctcaacttgggccaggaagacagtgacccgcccattcatgaaagtc

SEQ ID NO: 710073 - DNA, 83 bp, Homo sapiens
tatcaaggatggcatcctctaccagcagcatgtcaagtttggcaagcatccggtgaaagacagagatcacatttcaactagat

SEQ ID NO: 710074 - DNA, 74 bp, Homo sapiens
ggacccctggttcgccggctcctccaatgtgggcatcaacaggtggcgagagaacgaggtgctcaaagtccaac

SEQ ID NO: 710075 - DNA, 75 bp, Homo sapiens
ggacgccaaccagctccgcgagctgcccgagacagtgagaccgtgcactaccactatggccctaaggacctggtc

SEQ ID NO: 710076 - DNA, 97 bp, Homo sapiens
ctgctgctgctgctggcgctgtgcggctgcccggcccccgccgcgggagagaacattgaaagtattctctaagctatttgaagagagtgactaaatg

SEQ ID NO: 710077 - DNA, 83 bp, Homo sapiens
tatgagccacacatccccgaccacttgcggcctgagtatggcgagaaccactgtctctgatcaacgtgcggaagaggaacgtg

SEQ ID NO: 710078 - DNA, 90 bp, Homo sapiens
ccggtttggttgaagttggagaagtatccaatagggatattgtagaaactgtctttaacctggtttcctatcctgggagcaggagagtgt

SEQ ID NO: 710079 - DNA, 137 bp, Homo sapiens
ctttcaaaggagggactgatagagagaactgaacgaatgaagaagactatggcatcacaagtgtcgcctggtactgtggcgctccgtgaaattagacgttatcagaagtccactgaacttctgattcgcaaacttcc

SEQ ID NO: 710080 - DNA, 73 bp, Homo sapiens
aagcatctgggccatcttcaatgaaacggtggacatgctcaagagtcacattaaagaggaactgatgcacggg

SEQ ID NO: 710081 - DNA, 79 bp, Homo sapiens
aaggcaccgtgacaggccaagtgcaggggccagaagacaaagtcaattccattactatactggcaattgctggagaaga

SEQ ID NO: 710082 - DNA, 101 bp, Homo sapiens
ccgggcccactatgagacagaaggcagccgaggggctgtcaaagctccaactggaggccaccctgtggttcagctttggcagcatgtaagcagctgtttgc

SEQ ID NO: 710083 - DNA, 100 bp, Homo sapiens
ccagcgcccggagcaagcggagctcccccaagagccggaaaggatattggtgctggaaaaggcaaatactatgctgtcaattttccaatgagagatggta

SEQ ID NO: 710084 - DNA, 83 bp, Homo sapiens
gaggggtgcacggcggccacctgagtggcgcggcggtgtcagtttgaataggttggtgatgctgtgtatgcagtagattcttg

SEQ ID NO: 710085 - DNA, 75 bp, Homo sapiens
ataccctcaatggaagcaagctttggatcaggttattaacacggggatcaaagtctggtgtagaaataacagcgg

SEQ ID NO: 710086 - DNA, 101 bp, Homo sapiens
cgccgcccccgccgccggggacatgtctaaccccggaggccggaggaacgggcccgtcaagctgcgcctgacagatgggactgtgtagttgcaggaaaaca

SEQ ID NO: 710087 - DNA, 100 bp, Homo sapiens
ggaaacaatcgtggctacaaaaatcaatctcagggctacaaccagtggcagcagggtgtgactgggtacctggatatgtgatcgagtattcttctgggtg

SEQ ID NO: 710088 - DNA, 100 bp, Homo sapiens
ccatgagtgtggctgggtcacgacaaggctgaggccctgacgtggatgggcaaactgcaggcctgggaaggcagcaagccgggccgtccgtgttccatcc

SEQ ID NO: 710089 - DNA, 82 bp, Homo sapiens
tgtgtgctgcgttcacaggtgtttctgcggcagctgaagaaacacttaaattctggaaatagcgactcagtatcatggccag

SEQ ID NO: 710090 - DNA, 75 bp, Homo sapiens
aaagaaggcatttctatcaactgtggacttgagtccttcaataatgttaaacagtggctgcaggaaatagatcgt

SEQ ID NO: 710091 - DNA, 100 bp, Homo sapiens
cgcgggtggggaacatgtctgagtcggagctcggcaggaagtgggaccggtgtctggcggatgcggtcgtgaagatagatggaggaacattgggaggctc

SEQ ID NO: 710092 - DNA, 100 bp, Homo sapiens
tcaaggacagcttaacaagtctgattctaaccagtatattggggaactgaaagatcagatagcagagctgaatcatgagaactttcacgatggccgtaaa

SEQ ID NO: 710093 - DNA, 100 bp, Homo sapiens
aactcttttgctgtggtattggaatggaaaatgcagtgggattggagataacccaggcattgctctcaccagaagatttagtgaatgcgtgcaagatgct

SEQ ID NO: 710094 - DNA, 75 bp, Homo sapiens
gctcaagcagtcctcctgcctcagtctcccaaagtgctggaattacaggggaacccacttccagcgggtgatccc

SEQ ID NO: 710095 - DNA, 75 bp, Homo sapiens
ccaccatgtgggaggaggaaaatcatcttatcagacgaaggcaaaatgtatgatgatctcaatgccacccaccaa

SEQ ID NO: 710096 - DNA, 83 bp, Homo sapiens
cgggaaatcgggctgaagcgactgagtccgcgatggagacacacgatagtaaggagcatttagcaatgatggaaaggattctt

SEQ ID NO: 710097 - DNA, 83 bp, Homo sapiens
aaaaagagaagacgctttacccgactctttgggccgttatctcacactaatagggatgccaaaggaaaaatatgatcctccag

SEQ ID NO: 710098 - DNA, 75 bp, Homo sapiens
tcgcgctgctgggcacccacggagcctccggggctggaaactactttgcttcgcactttttcatgggaggagaga

SEQ ID NO: 710099 - DNA, 100 bp, Homo sapiens
tggcggccatggtgttgctgctgtactccttctccggctctgccaaggctgagaatgacaaacatctaagtgtagggcctggccaggggccagggtctgc

SEQ ID NO: 710100 - DNA, 88 bp, Homo sapiens
tcgggcaacctcagcagtgcgcagggctgcactgtctccgtctgcggcctgcagtaagcgggaatgtatcctgtcaggtataatgtca

SEQ ID NO: 710101 - DNA, 100 bp, Homo sapiens
ggattcgccgaggcaccgaggcactcagaggaggggaacgcccttttgcttgtgactggcagggctgcgacaagaagttcgcccgctccgacgagctggc

SEQ ID NO: 710102 - DNA, 87 bp, Homo sapiens
gaaactaaaaacgcatctatctaacgtttaccctagcaaaccagcaatggatcacttggagtcctttattgctgaatgtgatcggag

SEQ ID NO: 710103 - DNA, 100 bp, Homo sapiens
cagatactaattaagtgccctaatcaaattgtgagacagggtttggattcaggatttgttcctagtgtccaagattttgataagaaacttacagaagctg

SEQ ID NO: 710104 - DNA, 90 bp, Homo sapiens
ggctcctgctcttcctggactcctgagcagagcctaatgcatggaaagctaacaggatggagcacaagtcaggatccctttcctctagcc

SEQ ID NO: 710105 - DNA, 75 bp, Homo sapiens
aacacctctacaaggatctgcagccatttatattgcttaggctactgcactgccagtgaaagatgtagaagataa

SEQ ID NO: 710106 - DNA, 83 bp, Homo sapiens
tttgaacatgctggtgccgctagccaagctgtcctgcctggggcttccgttacaagatgaggtctgtgtatgctcacttcccc

SEQ ID NO: 710107 - DNA, 75 bp, Homo sapiens
tttgactttaatgagttctttaaccttgataaggtgccatgcttggcttcgtctctgctggatgaaccgaatcct

SEQ ID NO: 710108 - DNA, 97 bp, Homo sapiens
gtttcccgcaacccgataccatcggacaggatttctccgcctcagcccaacggggaggcttgggcactgtttaaaggaaagttccgagaaggcatcg

SEQ ID NO: 710109 - DNA, 100 bp, Homo sapiens
ggaaggaagagatggagctgacgctcgtggggctgcagtactcgggcaagaccaccttcgtcaatgtcatcgcggagccaccacccctgaccatgtagat

SEQ ID NO: 710110 - DNA, 110 bp, Homo sapiens
atgatcaaggcgatcctaatcttcaacaaccacgggaagccgcggctctccaagttctaccagccctacgtatacccgaaatcttgtggatcaaggaaatggaaaattta

SEQ ID NO: 710111 - DNA, 83 bp, Homo sapiens
cgacgagctgaccctgggagacatcgacggtgtctcccagtctgctaaagccctaaggccatcaccatggacttccagcatcg

SEQ ID NO: 710112 - DNA, 87 bp, Homo sapiens
gagatagcacagatggaccaaaggttatgcacaggttgggtatctacagccattggttgctgttcaggtcagctttgctcctaacaa

SEQ ID NO: 710113 - DNA, 75 bp, Homo sapiens
tttccgtcagtacgcgaaggatatcggtttcattaaggaatgatgagaagacagcagctgattacaagattttag

SEQ ID NO: 710114 - DNA, 100 bp, Homo sapiens
cagagcggtcggtgacagcctcaagggcttcagcaccgcgcccatggcagagccagaccgacctgaaggccaatgagtcacggttgaaggacattaacaa

SEQ ID NO: 710115 - DNA, 95 bp, Homo sapiens
cccacagtgccaaatatggccctggaacagctgcatatccccaccgtttgaatctcttttaccttgccaatgatgtcatacagaactgtaaaagg

SEQ ID NO: 710116 - DNA, 75 bp, Homo sapiens
gccgaccgcgttcctatggacagacgcacagacacctgcagattctggacaatcaggaagtccaagccacaatga

SEQ ID NO: 710117 - DNA, 99 bp, Homo sapiens
gaagctgcagccgcacctggccaagggcatttataagacgctgtttggcatatcgaaaagaagatcgatttgatgtgcaccagctggcaaatgacccat

SEQ ID NO: 710118 - DNA, 95 bp, Homo sapiens
agacatctggaccagttattaatgtgtgccatttatgtgatggcaaaggagagtccaagtacctttgctcagtttgtggaaagtcttttcatagg

SEQ ID NO: 710119 - DNA, 75 bp, Homo sapiens
gagcggctgtgtggatgtcggcgaagccgcgggcgagtgtgatccagctttgcttcctgagcccaatcacgtcat

SEQ ID NO: 710120 - DNA, 97 bp, Homo sapiens
ggaatatttgcttcatcacaagatcttggaaacattatataccttggggaaagctgatgttatcaatactctggctgaccatcatcatcgtgggact

SEQ ID NO: 710121 - DNA, 101 bp, Homo sapiens
gatgaacccacgagcaaaaagggatttctactcaagagcctcctgatctagcagccaagactccccctgacctttggccatgtaccccaaccctctcatct

SEQ ID NO: 710122 - DNA, 96 bp, Homo sapiens
actaaccatttctaaagtcctcctttctatctgctcacttcttacagactgtaatcctggaagctgaaaccccacgtagtgttcttgaagaaattg

SEQ ID NO: 710123 - DNA, 100 bp, Homo sapiens
aatccacgaactgctggacgacctcggcgaggtgcccaccatcgagtccctgataggtgagacaggcattggcaaatccacgttaatggacactttgttc

SEQ ID NO: 710124 - DNA, 75 bp, Homo sapiens
acaggtgtgcgcatctacaacgtggagcccttgatggagaaggggcatctgggacaagacttaaaacctgtcttg

SEQ ID NO: 710125 - DNA, 80 bp, Homo sapiens
taagaaaatcagataacttgtactggagagaaatcctacaagtgtggtacccagcgtgccaatgcccgggctccagcccc

SEQ ID NO: 710126 - DNA, 74 bp, Homo sapiens
gatcattgacaagactcaactgaactcctccagcctccagaaagccaatgagtgccaggagcgccctgttgagt

SEQ ID NO: 710127 - DNA, 75 bp, Homo sapiens
acttctagacgacaaaatgcaaaaaaggaggccaaagactttgaaagtcgtttggaaaccccaggccaacaggac

SEQ ID NO: 710128 - DNA, 100 bp, Homo sapiens
aagtgccctgtaatgtcacctatcccaacagtattaaaggtggaagaaggtccatatctttttctgtgggtgcttcaagtgttgttggaagtggaggcag

SEQ ID NO: 710129 - DNA, 100 bp, Homo sapiens
tgtaagaccaccaaatatcggaacccctccttgaagctgatggtgaatgtgtgcggacacactcttgaatggtagtgtctagaaagggtatgtcccttca

SEQ ID NO: 710130 - DNA, 100 bp, Homo sapiens
gggaaaatggcggacgggaaggcgggagacgagaagcctgaaaagtcgcagcgagctggagccgccggagatccaagagttgaagattggctcctcatgt

SEQ ID NO: 710131 - DNA, 74 bp, Homo sapiens
gaaaggagagcaagaatctcataggcacgtgacacaagctgacctcaagagctccacgttttggcttcgagcaa

SEQ ID NO: 710132 - DNA, 98 bp, Homo sapiens
agggggcgctgagctgttgggatgagctctctccggaacagcacaacctttctttatactccatggagctcgtgctgaagaaaagcactgggcacagc

SEQ ID NO: 710133 - DNA, 98 bp, Homo sapiens
tttccagtatttgtctttctatgtttatgataagaatgttttacaaagagatctccgtatagcttctacgcagattttggaccactcaatctggcaat

SEQ ID NO: 710134 - DNA, 75 bp, Homo sapiens
gcgataaccaactctcagaggtggccaataagttcgccaaagcgacaggagctacggagtctcgctctgtcgccc

SEQ ID NO: 710135 - DNA, 74 bp, Homo sapiens
ctttggggcaccacagagatgcgggatattcttggtgatcttggaagtgtccgtatcatggaatcaatctctat

SEQ ID NO: 710136 - DNA, 51 bp, Homo sapiens
ctgggaacaactttcttcaaactgtgaccaagaatatggcccaggtgacca

SEQ ID NO: 710137 - DNA, 100 bp, Homo sapiens
atttgattaactcattcaaggttacccagttggttatcaatagtctggctgtctatcgtcatcgtgagactgactttggtgtaggagttcgagaccaccc

SEQ ID NO: 710138 - DNA, 99 bp, Homo sapiens
caataactcagtcactggctgcaacaggaccacagtcaagacgatcatagtcactggtgagaattatgaagatgatgacctagtaaattctgatgaggt

SEQ ID NO: 710139 - DNA, 98 bp, Homo sapiens
ccgggtccctaaggctggagaccgggtccacaaagacgagtgcgccttctccttcgacacgccggtgaggccgcagcgtttgatgacgagtggcggcg

SEQ ID NO: 710140 - DNA, 100 bp, Homo sapiens
gtgatgtgagcaaatgcctcattcagatcatcagaaaagcccttactgaggaaaaacgtgtctcaacaaaaacatcagctgcagatcttgtgacagaaac

SEQ ID NO: 710141 - DNA, 100 bp, Homo sapiens
tgtgggtctggttccaagacactgtcactgagctcccagccccattgccaataccttcctccactatcgaaccagcaaggtgagggtgctgagggcagcg

SEQ ID NO: 710142 - DNA, 107 bp, Homo sapiens
tgaaaacagaaggaaattgaaggaacttggagttaatggtctaatttatgatagctgagatctgtatctgtggacctgaatgttgatccctcgcttcagattgacat

SEQ ID NO: 710143 - DNA, 75 bp, Homo sapiens
tggaatcatctccagccgcctagcaggcaaggttttgatggtacagtccaggtctatgatgccacatcttgggat

SEQ ID NO: 710144 - DNA, 100 bp, Homo sapiens
ccttgtcgaaatccacctgtcaggacgcctaggggtgggaatgatggttagatgctgccgaacatacgaagaagtgtgcgaaggtgatgtgatgttggca

SEQ ID NO: 710145 - DNA, 75 bp, Homo sapiens
tgttgatatatccagaaaaattaaccagcttccagaagcagaaagacatcagcatatttaattgaagaagaacta

SEQ ID NO: 710146 - DNA, 73 bp, Homo sapiens
gatttggcactctacttaaaaccactaagtggaggtaaagaactaaagaatattctggacatgttgcaacttg

SEQ ID NO: 710147 - DNA, 76 bp, Homo sapiens
aatcactcagcactttggaaaggtgagagcacagtaaggactattgctatggatggtacagaaggcttggttagag

SEQ ID NO: 710148 - DNA, 82 bp, Homo sapiens
aagatgccccgtctgattgccaagtttttcagaagaagtgaagtcaagatgaagaaccatttgcttttctggggagtcctgg

SEQ ID NO: 710149 - DNA, 83 bp, Homo sapiens
gaacgcgctcctccgcctgctgcccgggctgggggccaaaccagtgctcctgccacctctctggctgccccctagagcctgcc

SEQ ID NO: 710150 - DNA, 100 bp, Homo sapiens
ggcagaacgaattcagtgatatcattaagtccagatctggacatgtctcaggaaggctatggaactagatctcaacctcctctggcccccggaaaaccta

SEQ ID NO: 710151 - DNA, 82 bp, Homo sapiens
ccgtggcccctgcagcggaaccggacccagtccctgagccgcccctacacccacagatttttggaagtaccagcacagtgac

SEQ ID NO: 710152 - DNA, 96 bp, Homo sapiens
aacttcctcaattgctttgcctcactcttctatattgcctttgtcttgaaagatatgaagcttttgcgccaggttaatcatgttatcagccctctg

SEQ ID NO: 710153 - DNA, 90 bp, Homo sapiens
gcgaactgaagaggttctacacaattggtatgcttcagaagtgtccttctgttgatgacttcgtaagtgccctcgtttccgacttggatc

SEQ ID NO: 710154 - DNA, 90 bp, Homo sapiens
agaagcagcgcctgatcgagtccctccggaactcacactccagatcagtgtactgttacccggacatacctattccttcacaagttctgg

SEQ ID NO: 710155 - DNA, 100 bp, Homo sapiens
atcggcagtatactgatagcacattccgtgttccagtggagagaaaagctgaagaagaacatctgggaattctagtgatgaatcaccaacaccagcagca

SEQ ID NO: 710156 - DNA, 90 bp, Homo sapiens
atctcgccctggctgtgaagaacagcaaatcaatctctgaggttggatacttggatgatattgatgatgagatggacccagagatagaag

SEQ ID NO: 710157 - DNA, 50 bp, Homo sapiens
ggaaacatcacaatggctatttgggtatacggatccgggtctcagacaag

SEQ ID NO: 710158 - DNA, 90 bp, Homo sapiens
cgagctggacccggaccggttttggcccccaaatacatcaagatgtttgtactggatgaagctgacgaaatgttaagccgtggattcaag

SEQ ID NO: 710159 - DNA, 88 bp, Homo sapiens
aagagtaagggccagagctccttggccctccacaagagatgcccgagtggtaaaagacatggcaacaggaaagtctaagggatatggc

SEQ ID NO: 710160 - DNA, 100 bp, Homo sapiens
gtcggaggtctcatctttgaactactgccggagcttctgccaggtttttagaacttcagccataaaaatgggcagaattttccttgatcatatcggtggt

SEQ ID NO: 710161 - DNA, 77 bp, Homo sapiens
cttggactgagtcctgcaggacacagataacaacgaacttgatgcaagtgataggtttgccaaggtcagacctctca

SEQ ID NO: 710162 - DNA, 96 bp, Homo sapiens
ccagtactctatatgaacaatccgtctggatcacggatgtaggaagtgggcctcactctggagctcctgcgtggtgctgcccctgctggcgctcac

SEQ ID NO: 710163 - DNA, 75 bp, Homo sapiens
cagaattatttcttggatggccgctctacccaggagccttggagtatgatcagatgatgattattctccaccgtc

SEQ ID NO: 710164 - DNA, 140 bp, Homo sapiens
cgggctcagacagttggcaagaaaaccccgaggagccctgttccaaagcctcctggaccgtccaagaactgagatctgtatctgtggacctgaatgttgatccctcgcttcagattgacatacctgatgcgctcagtgag

SEQ ID NO: 710165 - DNA, 100 bp, Homo sapiens
gctgtcgggcttgctgccccccgacaccgctatcctacaggtgatttggcttctgcacagttaggaggagcaccaaaccgatgggaggttttgtcagcca

SEQ ID NO: 710166 - DNA, 82 bp, Homo sapiens
tgcctcagcctcccgagtggctgggattacagctcaactataaatttccagcaacagtgcacatggcgcatcaaaaacccac

SEQ ID NO: 710167 - DNA, 101 bp, Homo sapiens
atcttatctatggaagataaagcatggagttggctaatggatgctggacccagatgatgtggtaccagttggccaaagaagagcctggtgttggtgcatgt

SEQ ID NO: 710168 - DNA, 75 bp, Homo sapiens
tagcaaactttttaatgaggaatttggtaactctcattcgacatccatctgaactaatgaatgttcctcttcagc

SEQ ID NO: 710169 - DNA, 100 bp, Homo sapiens
ggaagcctggggaaatcccagcagcccgtattcagcaggagccaaaaacctgtatatcatctccgtgaaggggatcaagggacggctgaacagacttccc

SEQ ID NO: 710170 - DNA, 75 bp, Homo sapiens
tggagagctgtgtctgaggagccttggaacattcacccaggaggatttgttggtattgaggaaaacggtgaaatc

SEQ ID NO: 710171 - DNA, 100 bp, Homo sapiens
gacatcacattgatacatgctggaggtctggctcagctacgagacaatgtgattacacctcgagacacaacaatgaccttcacatgctttgtgttttttg

SEQ ID NO: 710172 - DNA, 98 bp, Homo sapiens
acagacaacagtggaacttctgatttccacatggaagaggcactggattggcctggagtatacttgttaccaggccaggtttctggggtggctctaga

SEQ ID NO: 710173 - DNA, 51 bp, Homo sapiens
cgtcacactacgacagtgagaaaggagatctcagtggttcaatagcatccc

SEQ ID NO: 710174 - DNA, 100 bp, Homo sapiens
atcttcagtgactggtacaacacttctgttatgagaaaagtgaagttttatgatgaaaacacaagctctggcagtttggccgctggatggacgtcgtggt

SEQ ID NO: 710175 - DNA, 109 bp, Homo sapiens
cggcgggagctggacgcgggaggaggcggcggcggcgggtaacgccatcctctgaaaatcctaatggtgctacttctagtgtcagccaaggaaaaccctctttaagacg

SEQ ID NO: 710176 - DNA, 75 bp, Homo sapiens
ctcggggactcccccaaagacaagggagaagagaagtttacctttattgagaaatgtaacaaccctcgttctgtc

SEQ ID NO: 710177 - DNA, 80 bp, Homo sapiens
aagaatttcctgcggttcctctaggaaaattcctttgtgcagatcaggcccgtggattgcagaaaaatatggctcaggag

SEQ ID NO: 710178 - DNA, 103 bp, Homo sapiens
acgcaggcgactgaagacgatgggacccactgccctgcattcggacatagagacactgcatattttaccaaggctttgactggaatggcatgctttcaaatat

SEQ ID NO: 710179 - DNA, 94 bp, Homo sapiens
accggacacggctggggccggcgatgcctgagagggggtcggagagtcttcttcaagatcaaaagccgaaatgcacacatgaaaactcacaggc

SEQ ID NO: 710180 - DNA, 75 bp, Homo sapiens
ctgctgtgtgggaagaagatttgtaaagaaaactcttagagtatctttagaagatctgtataatggcaagacaac

SEQ ID NO: 710181 - DNA, 100 bp, Homo sapiens
agcacaggacctggaaaaattacattttgtcccatgaggagcacccccatagccatcctctctatggacatggtgtatgcaagtggccaggctgtgaagc

SEQ ID NO: 710182 - DNA, 75 bp, Homo sapiens
caaaggccggaggtatccagatatggacactgagcaaaccagtccagctacgggggcccagccagccagcagctg

SEQ ID NO: 710183 - DNA, 100 bp, Homo sapiens
gaagaaacataaattaaaagaagaattgcggcaagattacagacgttatcttactcagggttcagcaccacccccttctccaacacctaacaaagagatg

SEQ ID NO: 710184 - DNA, 71 bp, Homo sapiens
ttctgggaaagaccgagtgaagaaaggtggatcctacatgtgccataggactatgaaaatgatgttagaca

SEQ ID NO: 710185 - DNA, 83 bp, Homo sapiens
cacatcaccagtttaaagaatctgattgctccccgcagccaccgccacccattggaatggccaacaggggacctgcatatggc

SEQ ID NO: 710186 - DNA, 100 bp, Homo sapiens
caccgaggaattctatgatgcccctgaagatgtgcacctagggggcggctaccccgtggggtactccaaagattcaggtttactcacgtcatccagcaga

SEQ ID NO: 710187 - DNA, 75 bp, Homo sapiens
cagcgtcccagggcccaggccgagcaggtgtcgtgaaaactacccctaaaagccaaaatgggaaaggaaaagact

SEQ ID NO: 710188 - DNA, 50 bp, Homo sapiens
actgcaatgtttttgtggaacatgcctcctttggaaaatctggcaactgt

SEQ ID NO: 710189 - DNA, 100 bp, Homo sapiens
tccagacagcctgcaaacatataagatctggagacccaatgtattgatgaagatgaccctactgctgatgataccagtgctgctgtaactgaagaaatgc

SEQ ID NO: 710190 - DNA, 97 bp, Homo sapiens
gcccctgcagtccggatactcacgccagaaggcctctctggactcttcgacactggcctccaccacgcgggctcagcagggcccgacgcctccgtca

SEQ ID NO: 710191 - DNA, 100 bp, Homo sapiens
ccggaatgctgcccgatggccctgggtcctcgctgtggggcaatccgggcttgcagacgagatcaggatcctcatgaccagccaaagagaagaagaatta

SEQ ID NO: 710192 - DNA, 75 bp, Homo sapiens
accattcccaccaggtccgggtgaaagcctactaccgcgggctgccaggatatcgcagatgaattcagagcacag

SEQ ID NO: 710193 - DNA, 80 bp, Homo sapiens
atgtctccagaaacaacctgaaggtgtttccagatccctgggcctgccctttgagtggtgaaaccagaacaatatctcac

SEQ ID NO: 710194 - DNA, 74 bp, Homo sapiens
agatattgaacggaccatcactgaactgggagagaaggatgactcactggttgtgtggaaggaagtcgatttga

SEQ ID NO: 710195 - DNA, 90 bp, Homo sapiens
cgcagagtggataaagaactgggagaaatcagggagaggcgaattgagttgtcacagcagaaatgtttagacatatgcagaactctgaga

SEQ ID NO: 710196 - DNA, 83 bp, Homo sapiens
tgctcagtgtggtggatcatttcaaccggtcacaccgacaaatctgaagcgggtttgccaggggagtgtacccgtctccccag

SEQ ID NO: 710197 - DNA, 82 bp, Homo sapiens
tcgccgccgccccgagtcccgtacgctacttcctgaagaataaggtcagccctgatttgtgcaatgaggacggactcacagc

SEQ ID NO: 710198 - DNA, 100 bp, Homo sapiens
accggttcgtcgcctccttgcccgtgaccgtcgctagaactcagttgtgcgttgcggccagtcgccactgctatgagggttactaccagggtggaaaatt

SEQ ID NO: 710199 - DNA, 100 bp, Homo sapiens
caatttcatacagaaccttgtgttttacattgaagctgcatataaaactgctgtatctgtgcctaggtttgctgtggggattgtaataggaagaaacggg

SEQ ID NO: 710200 - DNA, 100 bp, Homo sapiens
gacgctactggaggcggcccgcttcctggaatggcaagcgcagcaacaacagagagcacgtggaggacgaatccatgaaccaaccaggaccaatcaaaac

SEQ ID NO: 710201 - DNA, 87 bp, Homo sapiens
atggaggagacgtattacaacttttagctgcagtggagcttgtatttgcatgcccgagtctttgagccgtgctataccagtttgtcc

SEQ ID NO: 710202 - DNA, 100 bp, Homo sapiens
ctagattctgctcagagggacttatacaaggatgtgatggtccagaattatgagaacctggtctctgtagttgcaggaattgtgccttggatccatccat

SEQ ID NO: 710203 - DNA, 75 bp, Homo sapiens
ttggcaagtggacattttactggctcaacatcacaatggggttgcctctgagcccagcagctgactcggcccgct

SEQ ID NO: 710204 - DNA, 75 bp, Homo sapiens
gtggatgatgccaaagttttattagagattcgtcagcgaactgcagctcaaagaaacctttctccaacaccagca

SEQ ID NO: 710205 - DNA, 50 bp, Homo sapiens
tggctgcacaggagtcttgctgatgttgcagagcttgaagtgaaaaccag

SEQ ID NO: 710206 - DNA, 87 bp, Homo sapiens
ctgccattccccaggcgctggcctatgctgaagtggctggactcccgccccagaaatgaagctgttgtcatttctggaaggaaactg

SEQ ID NO: 710207 - DNA, 74 bp, Homo sapiens
tagaggtcgtcaagtcattgcaggtctgggaggggctgaacgtggtgaagacaggccgagtgatgcttggggag

SEQ ID NO: 710208 - DNA, 100 bp, Homo sapiens
ttttggtacaccattgtcaccatgaccacactgggctttgtgcccggggtgctgagcccttccccgtcagccgggccgcgggaggagggagccgtcaccg

SEQ ID NO: 710209 - DNA, 50 bp, Homo sapiens
tgaagctgagcaatatttctcgctccttgctcggattgaacgtatggaaa

SEQ ID NO: 710210 - DNA, 98 bp, Homo sapiens
ataaacgaattcttggacacttgtcatctgtgtactgtgtaacttttgatcgaactggcagacggatatttactggaacctcagaacctgttctggat

SEQ ID NO: 710211 - DNA, 100 bp, Homo sapiens
gtggagtctagacttccccaaggcgtgtacccagtggctggatctctgctctggtggtgccgaagggcaacacagcagtatccgtgctcatgctgctggt

SEQ ID NO: 710212 - DNA, 75 bp, Homo sapiens
agggaaggcgcgagtgaggaaaggaggtactgtagtattggtaaaggttttcaaggtgtcatgaaaagatgggga

SEQ ID NO: 710213 - DNA, 100 bp, Homo sapiens
tgactactcttacagtgtgtggaagggtggaagtgctagcacttgatcttcagtttagatcttggaggcatatcaactgtggttctaaatggctatgatg

SEQ ID NO: 710214 - DNA, 83 bp, Homo sapiens
caagcttctgagggaggaggacaacaagtactgcgccgactgcgaggccaaagacaatgcagatcttcgtgaagactctgact

SEQ ID NO: 710215 - DNA, 100 bp, Homo sapiens
ctttgaagaccagtcctgtttgcagggaagccccacttgaaggaagaagtctaagagtgaaatgagctacttttacctcatatgaaaaaaatagatggca

SEQ ID NO: 710216 - DNA, 90 bp, Homo sapiens
aaatgtgtgcagactacatggcatctaccataggggcgcattggagtgactgtctggcatcaccaagatgacactccacgccacccgggg

SEQ ID NO: 710217 - DNA, 95 bp, Homo sapiens
ctgcggcagacggcgacagtggcggcggcgccatggcagggcttgcaggccccttcacagatgtagtcactacaaatcttaaattgcgaaatcca

SEQ ID NO: 710218 - DNA, 100 bp, Homo sapiens
gaaaggattggcgagttatctttgaaactgtttcagaagcgaggtagaacagaatttgaaaaggagcccaggacaggggaggagccccagccccgcgacg

SEQ ID NO: 710219 - DNA, 100 bp, Homo sapiens
ggacgatctggaccccgctgagaggaactgcttttgagtgagatggtcccagaggcctggaggagcggactgggaaagaatatggcaaagctgatgcaag

SEQ ID NO: 710220 - DNA, 103 bp, Homo sapiens
cgccatcgttgctgccttcttcgtcaagtctgggttctgcccgcacacattcctcgccaccttcttggtgtctgagaacctccagcttcacctccttttctgg

SEQ ID NO: 710221 - DNA, 75 bp, Homo sapiens
cagagttgttatttttcagcgtgaacaagagctgcaacattattcctctgcaaagatgattgtccctggggaaca

SEQ ID NO: 710222 - DNA, 100 bp, Homo sapiens
gatgcgatgcgggggctgctgcaatgacgagggcctggagtgtgtgcccactgaggagtccaacatcaccatgcaggtctcggcgcggaagatggccggc

SEQ ID NO: 710223 - DNA, 90 bp, Homo sapiens
agacccctggctctataagctgaattatggcagcccagtcaaggttgaagccatccttgtcaatatatttggtggtatcgtcaactgtgc

SEQ ID NO: 710224 - DNA, 85 bp, Homo sapiens
ttgtcctgcggaattgttcacaaatacacgttctgatcttgggtcctggtcctggacaaaggagtagtagctgaatttgattctc

SEQ ID NO: 710225 - DNA, 82 bp, Homo sapiens
gtcatgctagcactgcattaagtgatgcatacagaaactaattctgaagcaagcccttatagttgtgctgcagtggtgtttc

SEQ ID NO: 710226 - DNA, 100 bp, Homo sapiens
tggtgcagctaaaggcccaggagctggaacacagtgactctgttaagcagctgaagggacagctcaaaaagtttccaagaagacaggaccccggtgttcc

SEQ ID NO: 710227 - DNA, 51 bp, Homo sapiens
gctttgatagtcgtaccatatgcagaaggaatctctgtcagcagcctgagc

SEQ ID NO: 710228 - DNA, 90 bp, Homo sapiens
ctcaagctacaaatttaccaattccacaaggcatgtcccagccaaatttgtatcctactgtggggcttcaaacaccaggagaagtggtcg

SEQ ID NO: 710229 - DNA, 75 bp, Homo sapiens
gaacagcgtttcagttttggtcatcggaagtggtgccttcagcacaggtgaccctcttcgagagctgggcagtga

SEQ ID NO: 710230 - DNA, 73 bp, Homo sapiens
ggcccgtggcgccgacaggatgggctgagaagaaagccaaggtcattgcaggaatgaatgctgtggaagaaaa

SEQ ID NO: 710231 - DNA, 75 bp, Homo sapiens
tgcctccccagtttatttccccccaggtggactttcactgctggatgtgtgggaaaaactgcaacagtgagaagc

SEQ ID NO: 710232 - DNA, 143 bp, Homo sapiens
gcgggcagtgccggacaggatgtgcagacacaactacgagctgggcgggcccatgaccctgcagcgccgaggtgacaaaatatctgaacagaagaggacttaggagagatctgaactccagctgccctacaaactccatctca

SEQ ID NO: 710233 - DNA, 75 bp, Homo sapiens
gctgaacttaaaaagcagtctaaacctgtgaccacccctgaagaaattgcacagatgtctcagagcatgtcttca

SEQ ID NO: 710234 - DNA, 83 bp, Homo sapiens
gccccgcgggacccggacggcgacgacgggggaatgtggcgctggatccggcagcagctgggactggtgattgcagctggaag

SEQ ID NO: 710235 - DNA, 100 bp, Homo sapiens
ctggagagcatgcagattggagacaccattgagttccggggccccagtgggctgctggtctaccagggcaaaggtatgctgccccacaaaaccaagcgag

SEQ ID NO: 710236 - DNA, 100 bp, Homo sapiens
aaaaccaaagacgggcgcaaagattgcttgaagaaatccatgccatgaaggttgccaggatacatccaggcaacaaagactgcggttcctgttactcagc

SEQ ID NO: 710237 - DNA, 87 bp, Homo sapiens
ccgcgctgctgctggccgcacgcggggctgctgcccaagcccgagcgggaagaagttccgcagcaagccgcagctggcgcgctacct

SEQ ID NO: 710238 - DNA, 97 bp, Homo sapiens
ctgcatctttttaccttttgtgctgagccaactcgagccaggctgcaaaaagagcgggaagctgagccgagagctggactttgtcagccaccacgtc

SEQ ID NO: 710239 - DNA, 82 bp, Homo sapiens
ctgcgggccgacctgctggaggcgcaggccctcaagctggtggaggggccggacgtccggacaatgcagatcttcgtgaaga

SEQ ID NO: 710240 - DNA, 75 bp, Homo sapiens
acaattctgtgctcttctgtgagttcagccgatatttaaataaggcttttcatatctggtccaagaaagaaaaat

SEQ ID NO: 710241 - DNA, 100 bp, Homo sapiens
atacaggctgtgaaggtccagtcattccaaatgaagagatgcctgctcagagagtggcaacagtgtgaaaagactgaaaccggaccctgagccagatgac

SEQ ID NO: 710242 - DNA, 82 bp, Homo sapiens
aagctttgtctccttcgacttggagtctttgtccaggacggggatttgggagcagcttgtcttacacaaggacgaaggaaaa

SEQ ID NO: 710243 - DNA, 75 bp, Homo sapiens
cggcccctcagggccacggctttagcggtgtcttttgcgctgtgaaagttgtgtagatttactgtttgtgagagg

SEQ ID NO: 710244 - DNA, 97 bp, Homo sapiens
gaaaccccgttgacaaggcactgctttttcatgacgatcaatgtccgagttaccaccatggatgcagagctggagtttgcaatccagccaaatacaa

SEQ ID NO: 710245 - DNA, 96 bp, Homo sapiens
gcccgattgaagacagtgaagtttaatgccaaacctggagtgattgattcgaaaggggaattcattgaagagttgctgtctcccccttttgggggt

SEQ ID NO: 710246 - DNA, 75 bp, Homo sapiens
tgatggagggttggagtcagccttacacgcagccattactgcagagatccaggttcagcagactgtacaggatct

SEQ ID NO: 710247 - DNA, 51 bp, Homo sapiens
gccctggtgtcacctatcagtaaaaggttagcatggcctcattgaaagaac

SEQ ID NO: 710248 - DNA, 96 bp, Homo sapiens
ggcctttgtccgtgttcggtgaccgcagcactggggaaacgatccgctcccaaaacgactgaaactgttgaggagcccatggaggaagaagaagca

SEQ ID NO: 710249 - DNA, 96 bp, Homo sapiens
ccgcacgcagtatgaggcaatggcgtccagcaacatgcatgaagccgaagagtggtaccgctccaagggccatggagttggggagagaatgtctaa

SEQ ID NO: 710250 - DNA, 87 bp, Homo sapiens
tgtggcctgtgagccactgcctgacagatacacggtgtcggaggaaagtcctgagtatgggatgccctcagtgacctttggcagtgt

SEQ ID NO: 710251 - DNA, 83 bp, Homo sapiens
tgggagtcacaggaagaattgtagataaggtgtccatctatgcatccccagacaaacggaatcaaacacattatgctttgcag

SEQ ID NO: 710252 - DNA, 100 bp, Homo sapiens
tatgtttcacccgtctgaaaagattcctcatttgtgggcagatttgtccttcccattctgcaaccatggcaagcgttccaccatgaaaacagtattgaag

SEQ ID NO: 710253 - DNA, 87 bp, Homo sapiens
aggacatcacgtggaggcggccccagatgcctgctctgtgcctgtatctgagatcatcgccgttgaggaaacagacgttcacgggaa

SEQ ID NO: 710254 - DNA, 100 bp, Homo sapiens
atgaaagaacaacatcacagggacatatgttgcctcagactggagctcgaagataaaaggactacactgaaacattcaaatgtgtggcgaaaacataatt

SEQ ID NO: 710255 - DNA, 75 bp, Homo sapiens
ggtgaatcccctgtttgagaaaaggcctaagaattttggcattgttaaacacagtgggaatatcacttttgatga

SEQ ID NO: 710256 - DNA, 75 bp, Homo sapiens
gcgggctcctggcaaggcattcgctcctgagcggaatcctgcaaagcttctccaggcagccaccaactaccacaa

SEQ ID NO: 710257 - DNA, 114 bp, Homo sapiens
cacgtacctcatggagcacaaacgcatcaatgggcccttcctcatcatcgtgcctctctcaatccggacaatcagatagttcaaaccagcaaggagatgcggacatcaaaccac

SEQ ID NO: 710258 - DNA, 75 bp, Homo sapiens
aaagaaaaatattgctgtacctaaattcaagtcctccaaaagctggggaaagctgatgagacaaaagacgaacag

SEQ ID NO: 710259 - DNA, 82 bp, Homo sapiens
cgcagatccgctgtacttgcgtccgctacagtatgtcaatcgcttgccccagcacaggcaacatgagtgagaatgaggaaga

SEQ ID NO: 710260 - DNA, 100 bp, Homo sapiens
actgaggacttaaatgaagccactgattagcaatttaaagatcctctccaagtcaggatggctaaaggtgaccccaagaaaccaaagggcaagatgtccg

SEQ ID NO: 710261 - DNA, 100 bp, Homo sapiens
tgctgtctatgagggtcatgtttcctgtgtgaaattgcttctgtcaaagatgctattaactgagtacttggatatgaaaaatactcgtacggcctctgaa

SEQ ID NO: 710262 - DNA, 76 bp, Homo sapiens
ttggtagatgaactaagtggaatgcagctgattcttggtgccaccattgagaactccaggattgtcctgcagatcg

SEQ ID NO: 710263 - DNA, 74 bp, Homo sapiens
aagaatacaaagaagctttgaaacactgtaaggctgctttgtaccgcctcagtggagactggaatcccttacac

SEQ ID NO: 710264 - DNA, 101 bp, Homo sapiens
gggttccggggcccggtagaggcgcgccaagaggaaaggaaagtgcggcggccctggaacctggatatcgcgcgaggtccgtggcactcaggtagttggtt

SEQ ID NO: 710265 - DNA, 100 bp, Homo sapiens
cggcgcgagaggcccgggagccgccggccaggacgcccccgagggtgtagaccgcgcccctggagaccatggtgaatccgggcagcagctcgcagccgcc

SEQ ID NO: 710266 - DNA, 75 bp, Homo sapiens
acctctgtgcccctggctactatggctttggccccacaggctgtcaagatggcagtggcagcaccatgatgcaaa

SEQ ID NO: 710267 - DNA, 75 bp, Homo sapiens
gcgcactcttcctgctggagcaccaggcagatataaatgtcagtgattacagtggcgagatcttgaacaactgct

SEQ ID NO: 710268 - DNA, 98 bp, Homo sapiens
agaactttttgagaaaatcaatgacaactgtaatgaagaaatgtcttactctgtagagcgggacgaccctgggacagtctccactggggcagatccag

SEQ ID NO: 710269 - DNA, 74 bp, Homo sapiens
ctagactttgtgttccaagatcagagcctatgtgcttcccaagctgtatgtgaagctacattactgtgtgagtt

SEQ ID NO: 710270 - DNA, 100 bp, Homo sapiens
caaatggaaaggactagacattgcttcagtgtcatttgaggacgtgactgtggacttcagcaaggaggagtggcagcacttggaccctgcccagagacgc

SEQ ID NO: 710271 - DNA, 75 bp, Homo sapiens
agtactccagagagcagggatatgtcaccaggactcctgacaaccaggaaggagcgtactgagcgctttgggcag

SEQ ID NO: 710272 - DNA, 83 bp, Homo sapiens
ccgaagttggaagtgtctcttagcagcgcgcggagaagaacggggagccagcaaacggggattcagcgtccgatcctttggaa

SEQ ID NO: 710273 - DNA, 80 bp, Homo sapiens
ggcatgtctctgaccatctggacggtgtgtggggtcctgtcactatttgggaagatggagagttggaagaaggtgaattg

SEQ ID NO: 710274 - DNA, 100 bp, Homo sapiens
aattctagaccacactgccttttctacagatacccataatatctgccgaacatctgactagccacaagtatgttacccagatgtagaattttcatcacta

SEQ ID NO: 710275 - DNA, 82 bp, Homo sapiens
attgctcactttttggaaaaattggcattttcgtttgaacgccatgaccctgtggatgggagaattactgagaggcagtttg

SEQ ID NO: 710276 - DNA, 100 bp, Homo sapiens
cttggtgggcggtggtagtagtcccaagttctcagagatctcaggcatagaatgtcaagctaaccaggcgtccgctacttcagaagagtgtactgtcgca

SEQ ID NO: 710277 - DNA, 83 bp, Homo sapiens
aaagattgcctgcagtttattgaactctcttgatagagcccaagcagccaagaataaaggcaataaatattttaaagcaggaa

SEQ ID NO: 710278 - DNA, 96 bp, Homo sapiens
gaactgagaacccaaacagagccttaaggcttttctgatgtggatcacacctatgctcaaagaactcagctctttgacaccttagtaaatttcttt

SEQ ID NO: 710279 - DNA, 75 bp, Homo sapiens
acctcagatgctcccttctgctcctgatcacagattctgctggccatattctctactccaaagaggatgcaacca

SEQ ID NO: 710280 - DNA, 75 bp, Homo sapiens
tgacatttaattttagggtcctttatatagaagggagagtagttgaaaacaccacacactgtgagtttgcctacc

SEQ ID NO: 710281 - DNA, 100 bp, Homo sapiens
ggtatctgggcctttgaccttacctcagactagaggcgatggaaagaaaatagttagttaccagtctcagaccagtatccttcaggggttctcttactct

SEQ ID NO: 710282 - DNA, 75 bp, Homo sapiens
ctacattatcgtcactacattggaataatgggtaagggactgttctgaagaacctttccatttagtgatcaagat

SEQ ID NO: 710283 - DNA, 100 bp, Homo sapiens
ggaagtgcggggctccaatggcgctttctacaaggacttcctccgtcaggcagctggcaggacctgaaggatcacatgcgagaagctggggatgtctgtt

SEQ ID NO: 710284 - DNA, 83 bp, Homo sapiens
ctgctgtgtgtgcttctgcgccccaggtgtcgtgaaaactacccctaaaagccaaaatgggaaaggaaaagactcatatcaac

SEQ ID NO: 710285 - DNA, 100 bp, Homo sapiens
ctggggtcggcgccgagtgggaggatggcggaagacatggcaaccacagagagagcagcccttttctttcccccttggaggcttccagaggaattgacta

SEQ ID NO: 710286 - DNA, 100 bp, Homo sapiens
tctcagaagactggagggatccaaacatcgaggctctgaatggcaactgctctgacactgagatatggaatgtgcagatgtcccactattaactccaagc

SEQ ID NO: 710287 - DNA, 100 bp, Homo sapiens
agttgactttggctactactggttccatcgtatggctcatgtgctgaagctgctgaaagatggcagaagaagtggtggtagtagccaaatttgattatgt

SEQ ID NO: 710288 - DNA, 89 bp, Homo sapiens
ctttgctgcaaaaaattacggcttacaagagcagtgattcccaggctttctcagcaatgtaccccatttcctgacatttacagctgaag

SEQ ID NO: 710289 - DNA, 82 bp, Homo sapiens
tgacacctacgaagatctgaaggtctcctctgagcctccggcctccataagacccaaaacagatgacacctcttcccagtcc

SEQ ID NO: 710290 - DNA, 82 bp, Homo sapiens
ctggcgctgagcctgcagccggccctgccgcgtgaagcctctgcgggccttcttttcgtcttatttgaagtcattgccggat

SEQ ID NO: 710291 - DNA, 141 bp, Homo sapiens
ctggaaaggactccggaaaggccaagacaaaggcggtttcccgctcgcagagagccggcttgcaggtttttcgttggaatatacgttgcacatttatggcgattctgagtgtgagggcagacttctgccaggctcagcaca

SEQ ID NO: 710292 - DNA, 120 bp, Homo sapiens
ctcttcggacctacgacatcgcggcttctctggcgttggccagtcagccacagtgaccatgcagcaggtggccaggacagtggctaaagtggagctctcagaccacgtgtgtgatgtggt

SEQ ID NO: 710293 - DNA, 75 bp, Homo sapiens
gttggaaggctgctatggagaaagcaatgtctacttcgatctgaagtctagaggagacaagtatggcaaattggt

SEQ ID NO: 710294 - DNA, 82 bp, Homo sapiens
tactctgcctcggggacgaaagcagaaggaccctctattgtcccaggcctgtgttggctgcctggaggccttgcttgactac

SEQ ID NO: 710295 - DNA, 100 bp, Homo sapiens
tgaagctttagagaagtatggtctggaaaaagaaaaccctaaggattactgcatcgcccggcatcggtgtgtggctatttttaaagacaaacagaacaag

SEQ ID NO: 710296 - DNA, 75 bp, Homo sapiens
ttccagggaagttatacgtaatgatccaagagtcgaagctaaaccagaagttcaatctcagccacctcgtgtgcg

SEQ ID NO: 710297 - DNA, 100 bp, Homo sapiens
tgaaagacaaacaccccagcttgttccaggcattgctggagatggatctgctgaccgtaccttctccaggcaaattccgttcccctgcagcaccatctcc

SEQ ID NO: 710298 - DNA, 100 bp, Homo sapiens
aagttctccatcttgggaaagtctggaatgtgaaagatgttgcagaagtgttccagaagtggctgaagatagaaggaaaaaagtgccactgcctatcaga

SEQ ID NO: 710299 - DNA, 90 bp, Homo sapiens
ttctgcccgactcagtgcggaactacataggcatcagcttcagtgagacagcagcagccgatgccgcccttggctacatcattgccttcc

SEQ ID NO: 710300 - DNA, 82 bp, Homo sapiens
caaaggcagcgcaaaaaacagccaccgattttgctatgtctctgagctgcgaggtccttctatatgatccactctttgactg

SEQ ID NO: 710301 - DNA, 49 bp, Homo sapiens
gctgtttaaaaagtatccctgtgtgactacctgtttaagctgcttttga

SEQ ID NO: 710302 - DNA, 83 bp, Homo sapiens
ctccgagcgagcgagcggcgcccagcccagcgcctcggccgaacccctccgcagcagcaattctgtggtgttcttggtcacac

SEQ ID NO: 710303 - DNA, 100 bp, Homo sapiens
ctgccggttgcgccttcttcctggacatgaccaactgatgaccaaaatgttagacttgcttgaggacttcttagactatgaaggctacaagtatgagcgc

SEQ ID NO: 710304 - DNA, 75 bp, Homo sapiens
ctgttgtggtgacaatgacccaattgatgtgtgtgaaattggaagcaagattgcttatgcccgtatagaggggga

SEQ ID NO: 710305 - DNA, 96 bp, Homo sapiens
tacttcacattttccccaatatatgacaagttggatggcttgaggactggtactaaaaggaaacgtgactgggaggccattgccagcagaatggag

SEQ ID NO: 710306 - DNA, 80 bp, Homo sapiens
ggccgccgccgcctctccttgctgcagccatggagtcttgccccagaagctgcgggcacatccacgcctgaaatgcggcg

SEQ ID NO: 710307 - DNA, 100 bp, Homo sapiens
gaggtggaaagaacagtcagaaagcctctccagtggatgatgaacagctgtcagtctgtctttctgttatttcaagtaccattggaagaggaaggacaac

SEQ ID NO: 710308 - DNA, 115 bp, Homo sapiens
tgggctgggcgctgggttcgcggcgcgccctcctgctgcctccccggagctcccgggccagtaggagaccaagacacattccaccccagtggggggtcccataccactcatggat

SEQ ID NO: 710309 - DNA, 76 bp, Homo sapiens
tttaggaatgacaccagggtttggagataaaacatttgttgttcagggtgtccgcaatgttgccagtgtctgtctg

SEQ ID NO: 710310 - DNA, 100 bp, Homo sapiens
aagtgattttttgcctttgttgattaactggacaaattcagataacagtcttcactcctatgctgatttttctggtgccactgaagttattttggaagca

SEQ ID NO: 710311 - DNA, 75 bp, Homo sapiens
gacaacattggctacattacctttggtggataatattaatgcagctgtgatggatttgaaaaaaaagaagatccg

SEQ ID NO: 710312 - DNA, 99 bp, Homo sapiens
tcacagctgcccattgcctaaagaagtgactctgacatcattagaagcatgccagaacagactggtgaaaagtaaaccttttcacctacaaaatttcac

SEQ ID NO: 710313 - DNA, 74 bp, Homo sapiens
agttaaacctactcaaactattgataaagagttctatctgtcttctacgcgggaaaatctatgatgctctagat

SEQ ID NO: 710314 - DNA, 95 bp, Homo sapiens
cactgcacctggaaaggagccagaaatgtgaagtgctagctgaaggatgagcagcagctagccaggcaaagggttccaaaaggtcccaggtgtcc

SEQ ID NO: 710315 - DNA, 90 bp, Homo sapiens
actttctcctgcacaaagtgttggctggaagcatggttcttcacacacccccattcggcgtagtacccagagagctcaagatgtgtggca

SEQ ID NO: 710316 - DNA, 74 bp, Homo sapiens
caaagtccagcacagaccctcgggcctcatcatggccaggaagctgggacctggaagacccctgcccaccttcc

SEQ ID NO: 710317 - DNA, 90 bp, Homo sapiens
gatcctccaggcatgccccgctacgagctggctttaatcctgaaagccatgcagcggggggagctgatcaccttctattactattggaag

SEQ ID NO: 710318 - DNA, 88 bp, Homo sapiens
agctgtgcacgaccacaccgctgatgaagacaaggactcacagtggctgcaaggtgggccatgcacagacacagctcatgtctcatta

SEQ ID NO: 710319 - DNA, 101 bp, Homo sapiens
cgagagcgtgaccgagagcgcgaatatcgtcatcgttagaaggtcagagatgtcatcatcgctgcaagcgttgcaggaatgggcttggcagccatgagcct

SEQ ID NO: 710320 - DNA, 83 bp, Homo sapiens
cttggaggaagcaaccatttcagtctgcaggtcattagacagacagtctagcagtgcttccttggagaccctgttagcacttc

SEQ ID NO: 710321 - DNA, 75 bp, Homo sapiens
gcagacacggtggctactctgcctcggggacgaaagcagtaacaatttggacaagacagcaaatgctattgtcga

SEQ ID NO: 710322 - DNA, 76 bp, Homo sapiens
acgctggcaagtctcaaagtcgccacaggtgaccattgtgaggtagatattttgttctaattttccagatgaggaa

SEQ ID NO: 710323 - DNA, 82 bp, Homo sapiens
cccggaatcccgcgcgctgcccacgattcgcttctgagtctctgctttctatccgtcaagatgataaagtcgtgtgcccgag

SEQ ID NO: 710324 - DNA, 82 bp, Homo sapiens
ccccgcagccccccaacatcctgctcctgctcatggacgacagcctggcccaggccccccactgcctgcagctcccttccgg

SEQ ID NO: 710325 - DNA, 75 bp, Homo sapiens
cgaggaggaacgcgctaaggcaaagcacctggcaagctttgttgcttctgaaaacaggacagatatttctttgga

SEQ ID NO: 710326 - DNA, 50 bp, Homo sapiens
ggggtgccaggtggaaggagaagaaaggaaaccttctggcgaattccagc

SEQ ID NO: 710327 - DNA, 58 bp, Homo sapiens
ccaagctcgtagcctgccactccgtgcgccctcgggaccaaggatcacgtcatgactc

SEQ ID NO: 710328 - DNA, 75 bp, Homo sapiens
aaactacagttctgtcactcacttacacagtattgggaaatctgtgaaaggtgaccaagaatatggcccaggtga

SEQ ID NO: 710329 - DNA, 100 bp, Homo sapiens
tgctgaaaaagaagaatcagcaaatactactgaaagtgcaatatttgagtatcactgcgagcatgttggaacaggattccaggagaatgaaccctagtgt

SEQ ID NO: 710330 - DNA, 75 bp, Homo sapiens
gggcaatgagcttcccctcagcctaaggacccagatcaacttcactgtggccattgatttcactgcctccaatgg

SEQ ID NO: 710331 - DNA, 100 bp, Homo sapiens
ctgggaacctgaatgcctacttgcaacagggttgcaaactgtcttccaggtggattctgaccaggaattacaaggctcttgccaaaggaacaagaggcag

SEQ ID NO: 710332 - DNA, 112 bp, Homo sapiens
attccggagttgccatgaaatatggaaacgactcctcggccgagctgagtgagatgccttcaattaagttgcagagttctgatggagagatatttgaagttgatgtggaaat

SEQ ID NO: 710333 - DNA, 90 bp, Homo sapiens
gaaacacttttcccgtgtcgtttgagtgcatcttctcaacaaccctaggagactctggatgggcacatggtggtgcgtagccatgcccgt

SEQ ID NO: 710334 - DNA, 102 bp, Homo sapiens
tgtcattcttctctacagaagagcttctcctcatcaactggggatgattacagttcttcctaaaaaagggtgtatgtacaaagacttttgaagaggtgtggg

SEQ ID NO: 710335 - DNA, 82 bp, Homo sapiens
ctcaccgagacggcgatccgggcgctcgagacttaccagagccacaaggccgggctctcgccatgggtcactgtcgcctctg

SEQ ID NO: 710336 - DNA, 100 bp, Homo sapiens
agggaatccctccaagtgtgagaggcaaagtctggagcttagccattggcaacgagttaaatatcacccacgtacatcaaggccttttacaatgagtcat

SEQ ID NO: 710337 - DNA, 82 bp, Homo sapiens
accggggcgaggcggcccccgccgccgccatggaggcgctgggacccgggaagtaccactgcccagtgctgtttaccgtgtt

SEQ ID NO: 710338 - DNA, 100 bp, Homo sapiens
gcggccctggcgcggggaagcagtgggaaaatcgcaaggaagccgggtgaaatgacaatggatgctctgttggctcgattgaaacttctgaatccagatg

SEQ ID NO: 710339 - DNA, 73 bp, Homo sapiens
ccacgaatctgcccacccctcctgtaacccagcctgtttcacttcttgactcctgaaacagactactctttgc

SEQ ID NO: 710340 - DNA, 74 bp, Homo sapiens
tggatatggagtgaagacacagtctattaatgtactgagtggagtgtactccaaagattcaggtttactcacgt

SEQ ID NO: 710341 - DNA, 100 bp, Homo sapiens
cagcgtcaaatcgctcagccaggagatgagatgcaccatccggctgctggacgactcggagatctcctgccacatccagctttctgtatgagcccaatag

SEQ ID NO: 710342 - DNA, 90 bp, Homo sapiens
cttacttgtcctgctcctgctgctcgaggacgctggagcccagcaaggcctccggtgtggctgtctctgatggtgtcatcaaggtgttca

SEQ ID NO: 710343 - DNA, 100 bp, Homo sapiens
gactcacacaggagaaaagccgtttgtgcgcagttgtgtagcagttgagtaatgctggttagctgttaaggtggcgtgttgcagtgcagagtgcttggct

SEQ ID NO: 710344 - DNA, 75 bp, Homo sapiens
actactatcctcattatctccaaaccaagaagaagcgcacgctgaaggggtccattgagctctcccgaatcaaat

SEQ ID NO: 710345 - DNA, 98 bp, Homo sapiens
tgccgtggcatgtcgatttgtccttcactacaggaacattaatcctgatgttctttttgaagtacacaactataatataaccacagtggaaaactttc

SEQ ID NO: 710346 - DNA, 83 bp, Homo sapiens
ctgacttccagttccagcgtacgagatgagagtccggagtgttgtcatgtgaagcctgccatccaggaacctccaatagttat

SEQ ID NO: 710347 - DNA, 75 bp, Homo sapiens
acaccccctccgtgggtgtgtgatgagcagcaccagcagtaagagggctccgaccacggcaacccagaggctgaa

SEQ ID NO: 710348 - DNA, 100 bp, Homo sapiens
gccgtggagggcctcgccatgtcctgctgcccgagaaacagcacccaggactatcttccaaagagttctggatatcctaaagaaatcttctcatgctgtt

SEQ ID NO: 710349 - DNA, 49 bp, Homo sapiens
ccgcgccatcgagaccctctcgggacagaggtgttccgggaggagctgg

SEQ ID NO: 710350 - DNA, 101 bp, Homo sapiens
tgcggtgctgggagccaccatggagagtaggtgctacggctgcgctgtcaagttcaccctcttcaagaaggagagcctgtcatagggaactgcatggatag

SEQ ID NO: 710351 - DNA, 101 bp, Homo sapiens
aaggtgaagccacggaagataagggccgttgctccagggagaactgcaaatatcttcatccacccccacatttaaaaacgcagttggagataaatggacgc

SEQ ID NO: 710352 - DNA, 100 bp, Homo sapiens
atgtgcagctgttgttggattttttgctgttctcttttttttgtggagaagttttagatcgattcttacaaccagtacagaaaatagacatgaatctcac

SEQ ID NO: 710353 - DNA, 101 bp, Homo sapiens
gtttaagactctgacattcctggctgtcatgctcattgttctgaactccacgagacggtgccgagacctcaaggccaagggaattttatttgtggggagcg

SEQ ID NO: 710354 - DNA, 75 bp, Homo sapiens
gggcactgttgctgctgcgggagagggctttaaggaagcagcggagaagtttcgaatggaatctggaatcgaacc

SEQ ID NO: 710355 - DNA, 75 bp, Homo sapiens
tgaacaatgacctgggagaggcgcagaatagcctaacatggcagaccagagacagcgctcactgtctacctctgg

SEQ ID NO: 710356 - DNA, 100 bp, Homo sapiens
caaccagaggcaacagcaattaaatgacgtggtaaaaaattcatctactattatccaggtatttttgcagtgttgaaggaaaagtgcggacaaattcata

SEQ ID NO: 710357 - DNA, 98 bp, Homo sapiens
cgtcgtctccggacggggccctgacacggccaccctactgcctggaggccggggagccgacgcctggaagaggaggtagaacgggaaatcattaaaca

SEQ ID NO: 710358 - DNA, 74 bp, Homo sapiens
gcgacgtgcgcctcgggagtcggcctgtgaggtgaaaggtgtagcagtcactcggcctacacccacagcatcga

SEQ ID NO: 710359 - DNA, 74 bp, Homo sapiens
aaacccaccttcaggtcctacctcctgccaccgccccagcttccaattgaagacttgtgcagtttaacatccca

SEQ ID NO: 710360 - DNA, 51 bp, Homo sapiens
gaagaggaggttgcccagaagaaaaagattgactggggcgactttggggta

SEQ ID NO: 710361 - DNA, 74 bp, Homo sapiens
aaaaagtggttctggaaaagcggggaaaggttggatggcaagcatgtggtgtttggcaaagtgaaagaaggcat

SEQ ID NO: 710362 - DNA, 83 bp, Homo sapiens
aggctcatcgagggcaaggcgcccatcatctcaggggtgacgttcatgcgggagatggcaggggctggcacatgacagtggag

SEQ ID NO: 710363 - DNA, 97 bp, Homo sapiens
aaagtaagaccagtagcactaattccaaccgaggcctgcctggagccccagatcaccccttcctactacaccacttctgacgctgtcatttccactg

SEQ ID NO: 710364 - DNA, 100 bp, Homo sapiens
taacaagagtgatgaccggatttgggtgacagagcatttttcagcatttgatgaatacagaaatatcagccaaaaggacattgtggacagcataaaagga

SEQ ID NO: 710365 - DNA, 100 bp, Homo sapiens
cgcaaagatattcaaactctaaaccatctgaattggctcaatgatgagagtgtgaacatggctacgcctcttcattcccgtccatgccgagcccccgact

SEQ ID NO: 710366 - DNA, 90 bp, Homo sapiens
gggcgggcggtgagcgcccatatgggggttctggagagcggggtgtggggcactatgtcgtccgaggcccagagatgaccccttatgaag

SEQ ID NO: 710367 - DNA, 75 bp, Homo sapiens
gaggaccaagcacgcctcttcaaagacgaggtacttgatgaagaagcagaagtttttatagtcaaaatgtggaga

SEQ ID NO: 710368 - DNA, 90 bp, Homo sapiens
gtgtgaccaccccaaaatcaaaccttcctcatctgccaatgccatttattctctggctgccagtatgaagtgtaacagaacagactttac

SEQ ID NO: 710369 - DNA, 93 bp, Homo sapiens
agggcctgcagcgggagctggacggcgagcgcgagcggcgcgagaaacgctgataaagcagtttgtgtccgacgtggcctggggggagctgga

SEQ ID NO: 710370 - DNA, 75 bp, Homo sapiens
aaaaattgttttttctacctgttgacgtgtcaagcactaactattggaggtggacacaaaggaagaggcagccag

SEQ ID NO: 710371 - DNA, 75 bp, Homo sapiens
aactggtggagaccaaattttgaacctcctcaggtgtctggggaagccaatgaaactcagattgcagaagcactg

SEQ ID NO: 710372 - DNA, 124 bp, Homo sapiens
ggggagacaagttcatccccattttccaaggggacgacagcgtcgttattggggtccagtgggcttgttgctccagacctcatgccttctggacccagacatctctgcaatctcggaactggaa

SEQ ID NO: 710373 - DNA, 100 bp, Homo sapiens
gttaaggattccaagtaactcttatttgtgtaaacaggaacatcgataagtagtgtaaaaacttgcacaatgaaatccgaagccaaggatggagaggagg

SEQ ID NO: 710374 - DNA, 75 bp, Homo sapiens
gctggacagacaccacaagagcgagtggaagaagtccttagtggcaagtcctattttgtaacggattatgatcca

SEQ ID NO: 710375 - DNA, 82 bp, Homo sapiens
ctcgtacacttcttggcagtcatggacaagagctattgatagaaggacacattcagctaacgtattttagcaggtggagtga

SEQ ID NO: 710376 - DNA, 100 bp, Homo sapiens
gagaagagcaaggccacgccggccgcgcgcgccagcaagaagatcctgctgcccgagcccagtccccacagagaccacctatcacacgctggaggagggc

SEQ ID NO: 710377 - DNA, 102 bp, Homo sapiens
cctgaagtcagttgttgcatcaaatacttcatatttggcttcaatgtcatattttggggcaccatgccggtggaaaggatgcgcatgcgcccgtggctggag

SEQ ID NO: 710378 - DNA, 75 bp, Homo sapiens
agtctgttaaaaatctttgcggtattctgagagaagcctcacaaagtgtattggaattactattgaaaccagacc

SEQ ID NO: 710379 - DNA, 96 bp, Homo sapiens
tttcacttggaggatggtgaaccctactgtgagactggttgaggaacaggttagcaccactgagagagtgtttcaggatagacaatatcagattga

SEQ ID NO: 710380 - DNA, 98 bp, Homo sapiens
ccgcggggggcgatgaccgtgcgctgaccctgactcactccagttaatatgatcctctgttgaagcaagaagacaaactgtatggtggagaaagaagt

SEQ ID NO: 710381 - DNA, 101 bp, Homo sapiens
gcggtcccagcccggccactgcggatccctgaaaccaaggtgccgtgttaactccctcaatggagcacaccatgtcactacagcccgcatcaatgatcagc

SEQ ID NO: 710382 - DNA, 83 bp, Homo sapiens
gaggaggctttcctgctggtggcaaccgcctacgagacactcaagcagaaaaatatggctcaggagactaaccagaccccggg

SEQ ID NO: 710383 - DNA, 87 bp, Homo sapiens
agcgcgaatatcgtcatcgttagaagctagatgctggtgtgccagaaaaaataagcctgatttccagagatgagaagagtgtacttg

SEQ ID NO: 710384 - DNA, 80 bp, Homo sapiens
caaccccttcctggtcggattacactcctgcttccagacgacaagtcggaagcggggagaggtggtgagagatgacccct

SEQ ID NO: 710385 - DNA, 82 bp, Homo sapiens
gggatgtctacctggtaatagaggacttgaagcagaaagcaagtgaatacgagtcagaagcattaaagggcagtatttaaag

SEQ ID NO: 710386 - DNA, 100 bp, Homo sapiens
ctatttacatcccattccctgaagatgattctaattcaacaaatcataacttggccgagcaggagctccgcgtggcccagacagagtttgaccggcaagc

SEQ ID NO: 710387 - DNA, 76 bp, Homo sapiens
ggcatcgagactatcgctaatgagtatagcgaccgctgcacgccttgtatcacggactgattcaccgagcccaacc

SEQ ID NO: 710388 - DNA, 100 bp, Homo sapiens
gcaatgcacagccaatttcatgctccactatagacttgtgtatgcggatacctgcttcagtaccatcaagttaaaagcagaagatgcttctggtagagag

SEQ ID NO: 710389 - DNA, 100 bp, Homo sapiens
ggcccggcggcggctgagccgcgctgcgcagccgacgcgggaatgaagcgggcgctgggcaggcctcatgcattgtgcgtcagcagcaatgtttatggtg

SEQ ID NO: 710390 - DNA, 75 bp, Homo sapiens
actcagctctgaagcaaagaccaaatcagaatccacttcagagcctcagcttaagggtatagttaccaagctata

SEQ ID NO: 710391 - DNA, 100 bp, Homo sapiens
caaccgtacccggctgtaccggcagatcctcaggggcaagtacagttactctggggaggagcatctttccttgaagaagtacattattgacattgtggtt

SEQ ID NO: 710392 - DNA, 74 bp, Homo sapiens
ctatcagtgcccgctttgttcagctgcagcatggagagatagataaacgggtgtgtctgacttgctgctccagg

SEQ ID NO: 710393 - DNA, 83 bp, Homo sapiens
gcgacaagccgctggcagccgcggatctcaccgccgctcaggatgtgacaagccgaggcggtgagccgggcaggaggaaggag

SEQ ID NO: 710394 - DNA, 75 bp, Homo sapiens
ctacctgtccaccgtcgtgaccgaggatggtgattgctcacaccaaagccttggacccctcccagcctgtgacct

SEQ ID NO: 710395 - DNA, 75 bp, Homo sapiens
tcattccatcttcattcatgactccagacagacctggtcctgtagacgggaaggagcctggacacagtgacacat

SEQ ID NO: 710396 - DNA, 125 bp, Homo sapiens
ggggcggccaggtcaactccagccgctacaagacggagctgtgccgcccctttgaggaaaacggtgcctgctgaggccctgacgtggatgggcaaactgcaggcctgggaaggcagcaagccggg

SEQ ID NO: 710397 - DNA, 90 bp, Homo sapiens
cgggacaagaaaattcatgcggtagattttcgttccgtcacccaggctggagtgcagtggtgtgaccttggcttgctgcaaccctttgcc

SEQ ID NO: 710398 - DNA, 96 bp, Homo sapiens
caggtctctgtcgagcagcggacgccggtctctgttccgcaggatgatgagtcagatgaagccccatgtgtatgatctgccagtagaaggcaatga

SEQ ID NO: 710399 - DNA, 75 bp, Homo sapiens
acttcaaacattcgtctcggaaaccccgcctcttacagtcacgagcatgctcatgcacattcatctggatacttc

SEQ ID NO: 710400 - DNA, 80 bp, Homo sapiens
ctacgaaaaacagatctttttaaggctttatttcaggctggagaacttaaatgggggacagatgaagaaaagtttatcac

SEQ ID NO: 710401 - DNA, 100 bp, Homo sapiens
gtgaggcctccccagccacgtggaactgcttgcagatgggtcaagggttgtggagagtggtcagaaaccagcagctgcaacaagaaggctacagtgagca

SEQ ID NO: 710402 - DNA, 90 bp, Homo sapiens
tctgttagaggaagacgacgagtttgaagagttccctgccgaaggtgtggaatatcaaacaaatgattaagttgacacaggaacatatag

SEQ ID NO: 710403 - DNA, 90 bp, Homo sapiens
acgctggacaagctggacgttaaagggaagcgggtcgttatgaggtcagtttaggggctggtgcaaaggatgagttgcacattgttgaag

SEQ ID NO: 710404 - DNA, 101 bp, Homo sapiens
gacattaccactattaaacttctcaatgaaactagagacatgttggaaagaatttcttcaggttgaattacctagaagtttgtcactgacttgtgttcctg

SEQ ID NO: 710405 - DNA, 98 bp, Homo sapiens
gagaggagttccgcatggagaagttgaaccagctgtgggagaaggcccagcgaatctgggcacgaaagcttctctctgtcccttggcttctgtgtggt

SEQ ID NO: 710406 - DNA, 82 bp, Homo sapiens
gcgggagtgttcgttgtgccagcgactaaaaagaggaaattatggaagtggaaattacaatgattttggaaattataaccag

SEQ ID NO: 710407 - DNA, 75 bp, Homo sapiens
gttcaaggacaaaggtggcccagaattttccagtgccctgaaaaatactggttttcccatgggctatgcagcagc

SEQ ID NO: 710408 - DNA, 84 bp, Homo sapiens
caggctggtcagtgtggcaaccagatcggtgccaaggttgtgaccgagattcccgacgagagagactgaggggaagagaggaag

SEQ ID NO: 710409 - DNA, 75 bp, Homo sapiens
ctctgctggtcttcatcctcatattcctggagtctcagatcaccacgtaccagcaacttcaaggtttctgccagc

SEQ ID NO: 710410 - DNA, 83 bp, Homo sapiens
ggaagggcctcaaagccagaagatctcctttctgtgaagaaataatctgttgccgtggagaccaagtgcgactggcagttcgt

SEQ ID NO: 710411 - DNA, 83 bp, Homo sapiens
ccctgtccccgaggaggggaccatgacacagtttacccaaggtccagcctagcccctaggcaccatgtcggacagtgatctag

SEQ ID NO: 710412 - DNA, 100 bp, Homo sapiens
tgctgccggatgacattgaggacgagtccacgggcctgaagaaggcacagcagtgaccaccacctcagcggctgtagtgtcccagagtcctcagctgtat

SEQ ID NO: 710413 - DNA, 89 bp, Homo sapiens
gccaaatggccggggcaggtggcacagatgaatgccgggcagaggagcctgcagcaatggacaacctgcaggagagagctctgcacatc

SEQ ID NO: 710414 - DNA, 75 bp, Homo sapiens
tggagatgaagcctaagaatatgatcagcccgagacagtgatggagctgaggaggatgtagcattaacttcatat

SEQ ID NO: 710415 - DNA, 75 bp, Homo sapiens
ctgagggcacgtgtttgcggttcagccctttgatgaccgcagcagacccctctgtgcccctggatccaatctcag

SEQ ID NO: 710416 - DNA, 100 bp, Homo sapiens
cacccgctgtgaagttcagtgtttttctattcatgattggacatgtcctagacatcacttagaggaggcgatcccgcgccctgggtgcggtgaggccgct

SEQ ID NO: 710417 - DNA, 100 bp, Homo sapiens
ttctccaatgtggacaacgctgagcatatgatctttcggtgtctatctgcactttctttgacctcattagtgaccagaaggatcccaaggatcgaatggt

SEQ ID NO: 710418 - DNA, 51 bp, Homo sapiens
tcttgaatttctctctgtaaaggaggttggccgttgtccaatgtgttgctg

SEQ ID NO: 710419 - DNA, 89 bp, Homo sapiens
ctgagatcccaggaggatggccacatccccccgggctacatctcacagacatatctgaagagatggattaagaatgctttggattaagg

SEQ ID NO: 710420 - DNA, 101 bp, Homo sapiens
ttaatcaacttttttatccagtgttcaggatgtcgaggtgacagagctgaatgaacctctctccaatgaagatcgaaatctcctctctgtggcctacaaga

SEQ ID NO: 710421 - DNA, 88 bp, Homo sapiens
aagaaaggcaaagaaaatgatatggaaatggaaattaaatgggttccaggttcacctttccttgccagtgaagatggcgtgcttggcg

SEQ ID NO: 710422 - DNA, 100 bp, Homo sapiens
catgaattcacctttgattccagtgtgaactgtcaatcataaggcaacaagtttttacagccttcacagaggagtttctggcagcaccttttacagatca

SEQ ID NO: 710423 - DNA, 98 bp, Homo sapiens
gtcggcgcaggcccagatgcgcgcgatgctggaccagttgatgggcacctcccgggacgggtatttgaagtataccatacaactgttttgaaaatcca

SEQ ID NO: 710424 - DNA, 83 bp, Homo sapiens
ccagattctgcgcgtcaacgacaaatccctggcccgggtgacccacgcggaggccgtcaaggacatggatttgattgacatac

SEQ ID NO: 710425 - DNA, 95 bp, Homo sapiens
tcattatgaccagagtattgccgcggtggaaatggaggaaaagaagcccatctgtgtccagagatcagaatagaagatacgaccaaagggaagaa

SEQ ID NO: 710426 - DNA, 75 bp, Homo sapiens
caatgtgacctttaaaacctatgaaggtatgatgcacagttcgtgtcaacagaccccaccaacaactgaacgctt

SEQ ID NO: 710427 - DNA, 98 bp, Homo sapiens
attgagcggcgacagcaagaagtggagacagagcttaaaatgttggccctcatggagcacagcaactgctcgtcggagcccggcttctgggcacaccc

SEQ ID NO: 710428 - DNA, 99 bp, Homo sapiens
atcggaagcccgtgtttgacggcaggaagaatctatacacagccatgccccttccgattgggagggacaaggttgtacggctctccaggtgacattgac

SEQ ID NO: 710429 - DNA, 75 bp, Homo sapiens
ccggcagccgacggcaaaggtgtcgtggtggtcattaagcggagatccggtgagaagccctaccactgcaactgg

SEQ ID NO: 710430 - DNA, 100 bp, Homo sapiens
tttgggtctgaaacactggcagtcgttggaaacaggactcaggaaggaatcgtgtctcctagtgacctggaccttgtcatgtcagaagggttgggcatgc

SEQ ID NO: 710431 - DNA, 82 bp, Homo sapiens
ggaccagcagatggccagtcacgagaacccaggttttgtagtgcatccctgagcatgagcacagaatgaagcggcgtttgga

SEQ ID NO: 710432 - DNA, 111 bp, Homo sapiens
tcagcatggccaactccgggcccaacagcaacaggtctcaattgttgacctgacagttcaagaaaaggagaaatatcttaatgtgtctcgctggttttgtcacattcagca

SEQ ID NO: 710433 - DNA, 108 bp, Homo sapiens
tctgggaagctacctgcattaagtcaggactgaggttgaagatgaaatccactgaggagggaagtccagcaccctgtgtgccagtccagaactggcccatctgtagac

SEQ ID NO: 710434 - DNA, 100 bp, Homo sapiens
ataggaagtatcacaccacacgtaaggaaatttctcctcttctctccatggaggctatggcatttgttactgaagagaggaaacttacccaagaaaccac

SEQ ID NO: 710435 - DNA, 101 bp, Homo sapiens
tcagtgttaaaggaacctctacaacgaaggtgaagccacggaagataagcaaaagctggcaggctgacagaggcggcctcaggacggaccttctggctact

SEQ ID NO: 710436 - DNA, 100 bp, Homo sapiens
tgttctctatgccttggacagagacccaacagcttatgcattagctgaacatctttcagagttgtatccacaattggcgggcaacgacctttcttttatc

SEQ ID NO: 710437 - DNA, 100 bp, Homo sapiens
gtttcggaatagtctcaagatgctgcttactggtgggaaatcaagtcgtaaaaacaggtcaagtgttaacccagtatccactccagttgcacttcccaca

SEQ ID NO: 710438 - DNA, 90 bp, Homo sapiens
gaatggagtgggcaggaaagcagcgggactttcaggttacttgtctgcaagacttttttggtgatgacgatgtttttattgcatgtggac

SEQ ID NO: 710439 - DNA, 75 bp, Homo sapiens
tggctgctggagagttgaatgccagccaccagccatgggtgcatgctattatgatgctaatcagtctatgtatgt

SEQ ID NO: 710440 - DNA, 100 bp, Homo sapiens
gcggcgcgggcggcggcacggccatcgccggctcggtggaggcggtggccaggtgccgtgagcgatgtggagatgcaggaacactatgatgagttttttg

SEQ ID NO: 710441 - DNA, 75 bp, Homo sapiens
gccgggcccaggagcctcagccccgccggcagccctaagggcaaggctcaaaactgaaggagatctttgacaaga

SEQ ID NO: 710442 - DNA, 100 bp, Homo sapiens
gcagcgcggagtgggcgatgccagcgtgccagggcggcgactggcggcgcgatggacctgaccgggctcctgctggacgaagaaggcaccttctccctcg

SEQ ID NO: 710443 - DNA, 82 bp, Homo sapiens
gcgtgctcagcacagaaggctcagcctgtgggtacctgcccagggcctcatctttgtggtggacagtaatgaccgggagcgg

SEQ ID NO: 710444 - DNA, 83 bp, Homo sapiens
agccgatccagcctgcggagcctgtggggcaggtgcccgtggttgacacgagctgtgtccccagctgttcccgtctacaatgg

SEQ ID NO: 710445 - DNA, 82 bp, Homo sapiens
cctttctggggagaagcagcgcatcagccgaggattatctgaaccttcttctattgcaaaacatgaagatagtttgcttaag

SEQ ID NO: 710446 - DNA, 108 bp, Homo sapiens
ccttgattgaagacctacagtgtggcagtccatggcctggggactggttttaaaatcaaagatgggaaaatcggagaaaattgcccttccccatggccagcttgttca

SEQ ID NO: 710447 - DNA, 75 bp, Homo sapiens
gattctctacgggatctcatagcagattcaaatccaatggacagagcgggatgccaccagcttgtccaaagggaa

SEQ ID NO: 710448 - DNA, 89 bp, Homo sapiens
gaacataagagagcagctgcccatgccaaatagttacctcttttaaactcattctactggagcaaatgtttataggcaagcaataaaca

SEQ ID NO: 710449 - DNA, 50 bp, Homo sapiens
agccagtgcatgaccttactattggacacttcacggccatggtatggaag

SEQ ID NO: 710450 - DNA, 75 bp, Homo sapiens
cagaaagccaacatgctggaccagcatcacaccgacctgatcttaaaggctctgaaaatggctcatgtgggcatc

SEQ ID NO: 710451 - DNA, 83 bp, Homo sapiens
catggccaggcagagtcagcagctgcagtgtggaagtgccccaggtgctaaagagctgtgcagaatttgtggaggagtatgga

SEQ ID NO: 710452 - DNA, 50 bp, Homo sapiens
tccctccacgggcggctgcagggtggagaacactgatatttgcatttaat

SEQ ID NO: 710453 - DNA, 100 bp, Homo sapiens
tgcaatttatgtttccaggaacaccacttcatccagtggtgaaatgacaatggatgctctgttggctcgattgaaacttctgaatccagatgaccttaga

SEQ ID NO: 710454 - DNA, 90 bp, Homo sapiens
acgatcaataaacttgatcgcattatggccagcactattaagccagagactgctgctactttgaaacgtacgatagaggccctgatggac

SEQ ID NO: 710455 - DNA, 96 bp, Homo sapiens
cgcagatgtggacttgaaagaagctgcagcggaggaaggcgagtgcaaattggagttccatgcttgttctactggcaaaagcctcgccaccctctg

SEQ ID NO: 710456 - DNA, 96 bp, Homo sapiens
ctgtcgaccgttgccttctgcaggaagaaaatgtactgttcatgctgacacagatatttcagtctgcatggtaaaagttctaaatcttactacaaa

SEQ ID NO: 710457 - DNA, 82 bp, Homo sapiens
cccaaactcatggaaattgatcaggacattggctccctggattatcaagagtttgtagttgacattgaatccaggctgagga

SEQ ID NO: 710458 - DNA, 75 bp, Homo sapiens
gaaggggccagtctggagacagtcaagtttcttgcagaacataaattattaggaaacattaaaaatgtggccaag

SEQ ID NO: 710459 - DNA, 100 bp, Homo sapiens
cagatcgctactaccccgcagttcccggacatgatcctctccgcctctcgagggaccagtccaacgtcaggcggatgcacacggctgtgaagctcaatgg

SEQ ID NO: 710460 - DNA, 75 bp, Homo sapiens
cccgcgtgtgagcgagcagccgtgggcagcggtggagcatgagtctggctggcgccaagcccatctttgtgtgct

SEQ ID NO: 710461 - DNA, 83 bp, Homo sapiens
ctcccgggctccgggaaaactacactggccagccaaaacctattgatgtacaagtcattacacaccacatgcagcgatatgca

SEQ ID NO: 710462 - DNA, 83 bp, Homo sapiens
gccatgtcgggttattcgagtgaccgagaccgcggccgggaccgagggaggatttgatgaagatgttaaagcgaaagtggaga

SEQ ID NO: 710463 - DNA, 75 bp, Homo sapiens
aacacgacaggtgtgtccattggacaacagagagtgggaattccaaaaatggccctctacctgacccaagtatga

SEQ ID NO: 710464 - DNA, 100 bp, Homo sapiens
aggagccactgtggaagcagagcaatcgccatggagtttgtgatgaagcaggctctaggaggtgctcttacagcctgttccaagtgtggcttaatccgtc

SEQ ID NO: 710465 - DNA, 100 bp, Homo sapiens
agggtcaactggagacaactctgaaggagcttcagaccctgaggaacatgcagaaggaagctattgctgctcacaaggctggtgagcaaatccatgtcag

SEQ ID NO: 710466 - DNA, 90 bp, Homo sapiens
cacacctccattggatttaaaagacagtcctcgtcagcactgactttcagctatggaatcgtatcagatgtagaaggtggtgatggactg

SEQ ID NO: 710467 - DNA, 50 bp, Homo sapiens
ctgtaatcaattgtgctgacaacacaggtcctcttcctgatggatgggaa

SEQ ID NO: 710468 - DNA, 73 bp, Homo sapiens
aacgggtggccgattactgcgagaacaactacatacaggtgcttttgaagatgatgatatcacgcacgttgaa

SEQ ID NO: 710469 - DNA, 80 bp, Homo sapiens
cggtaccaggcagacatcaccgacttgttaaaagaagattcttcgctgctgctgccttaccgccgagaaccaccacccgc

SEQ ID NO: 710470 - DNA, 100 bp, Homo sapiens
tgagctggtcagcacagcctgcggtttccggctgcaccgcggcatgaatgtgcccttcaagcgcctgtctgtttggtgccctggttgtcagatgttggaa

SEQ ID NO: 710471 - DNA, 96 bp, Homo sapiens
aggcaagcaggacttccgggaggaccaggatgctgccttcttcaaggctgaccggttccctgatgtgttacctgcttctgctactgatccaaactg

SEQ ID NO: 710472 - DNA, 74 bp, Homo sapiens
taaggactcagcatcatgtagaagcacttgtggagcatcagaatggcaagggcaacaaaccatggatttctctt

SEQ ID NO: 710473 - DNA, 100 bp, Homo sapiens
ccagcatggtagcagccaagccagtggactgggaagagagtcccctcttcaacagcctgatgaagcctgctgggagcgtgaatgacatggccctggatgc

SEQ ID NO: 710474 - DNA, 100 bp, Homo sapiens
caagctgctggacaaggaccctgacctgcctgtcgtcgtggtggccaacaagcagggtgactatgaccagagcaggaccaaagtgctgcacatgagcctg

SEQ ID NO: 710475 - DNA, 80 bp, Homo sapiens
gccatcttggatccgcgggacaagaaaattcatgcggaggagaacatttgcctgcactgggcggcgttctccggctgcgt

SEQ ID NO: 710476 - DNA, 74 bp, Homo sapiens
tgatactgacctgtaaatcatcctttaggttcttgggtgtctctggggagtccctgggccagaccttcctccag

SEQ ID NO: 710477 - DNA, 96 bp, Homo sapiens
cggaagtgccccttagcgggtgggggaagctggtaggcacgggcggctccgcagtgaccggactcgggggaggtcggtggccacacaatgctgccc

SEQ ID NO: 710478 - DNA, 75 bp, Homo sapiens
tcgggctgggagcgtgctttccacgacggtgacacgcttccctggattggacggcaccgaaagcgaaggaagctc

SEQ ID NO: 710479 - DNA, 50 bp, Homo sapiens
atcaacttaaaagatgccacctctaagtccctcaacaccttacactaagt

SEQ ID NO: 710480 - DNA, 80 bp, Homo sapiens
ggaacagccagacgagagcttcagccatcacgaggatgatttcggaacctggagaaaattttttcagaagaagtgaagtc

SEQ ID NO: 710481 - DNA, 82 bp, Homo sapiens
gggccttctggtcaacctggccgtccggggcccccaggccccccacctgcagcttcacgagaagtttgaccttctaaagcgg

SEQ ID NO: 710482 - DNA, 90 bp, Homo sapiens
gctgctgctgctgcccgcgtccgaggctcgcgggcggcgggcccggcttcctgcctgacacagctcacttcaagaagtgcacaatgtcag

SEQ ID NO: 710483 - DNA, 98 bp, Homo sapiens
agcttcattcagatgtggtggaatatgccaaggaaaaactggagagcttcatcaaaaatagtgatagctttgataaagaagtcattcagaattcaaaa

SEQ ID NO: 710484 - DNA, 90 bp, Homo sapiens
gatgtcgtggctgtctgcctggtgctgctccacaccgcgtccgccttcccgctgcccgccggtgtggtggctggaggtggccgaattgac

SEQ ID NO: 710485 - DNA, 98 bp, Homo sapiens
gagcgtctcctgaagatgcaaaaccagcgtggcggccgcgctctcttccaggacatcaaggtaagaatgattgatgttggctgatattggagtgctca

SEQ ID NO: 710486 - DNA, 100 bp, Homo sapiens
ctcaaaagcaagatatactactaactttgaaatggaataaggtgcccctgggcgctgggattgctctagcctgtaagtataatggaaaagatgaggtctg

SEQ ID NO: 710487 - DNA, 98 bp, Homo sapiens
aagaatattaatggccagatctagaaatgatgaccgggaaattttattggagtgtcagaaaagagggccatcatttaaaacatttgcatatttagccg

SEQ ID NO: 710488 - DNA, 97 bp, Homo sapiens
cggcggctgaggaaagcaggaggaggtggcggcggcgggaagatggtcctatccttcccccaaagctggagcaactctggtcgtgtacaaggacttg

SEQ ID NO: 710489 - DNA, 74 bp, Homo sapiens
tcccatgaaggagactatttagagtccatagactatgtgaaagggtttggaggaaaatttggtgtgcagacaga

SEQ ID NO: 710490 - DNA, 100 bp, Homo sapiens
tttcatgatattccaatttatgcagataagctttgggcagatctgcggagttacttgggctggacccaacacagctcacagatgctttgacccagagatc

SEQ ID NO: 710491 - DNA, 98 bp, Homo sapiens
cctggcacaaatgtcacttccactatgaagtcccactgacttccatatacaagtttctaataagtgaccgtgacccacagtgcaacctccactgctcc

SEQ ID NO: 710492 - DNA, 50 bp, Homo sapiens
ccctgactttgatgggaaattaaaaggattcactccttctccagttgcac

SEQ ID NO: 710493 - DNA, 82 bp, Homo sapiens
tcctgcgggatgccttgaaccaggccacgagccaggtggagagcaagccttctctgactaccagatccagcagatgacagcc

SEQ ID NO: 710494 - DNA, 97 bp, Homo sapiens
gagaagaaccagcaggctctgtggttcaggactcccgacttgacacgatattttttgctaagcagggtgtccgcaatgttgccagtgtctgtctgca

SEQ ID NO: 710495 - DNA, 100 bp, Homo sapiens
ctgcgaaggccgggacccggttccccggcccacagtgggggtgtgcaaacccgagagaactgggatgccggctccaggagcagcagtggaggtcgggaac

SEQ ID NO: 710496 - DNA, 100 bp, Homo sapiens
cggtggtgttcgtcttctctctcctcgattgttgcgcgctcatcttcctctcggtctacttctcggacgggagtggcaagctggggctgaaggagttcta

SEQ ID NO: 710497 - DNA, 74 bp, Homo sapiens
gagaccacgctctcagctgctgagcctcggagcttaccaggtatgtgcactgcgcgtgaccagccgggcccgca

SEQ ID NO: 710498 - DNA, 100 bp, Homo sapiens
tgaagattttgtggtttatacttacaacaaggaagggactttaatcactgaccatcccaatatacaggatcgagatttagagagacttcgtagaaaatgg

SEQ ID NO: 710499 - DNA, 51 bp, Homo sapiens
cgcgtggagtgacggtcacaccgcggcgagatcgagatggtgatcatggag

SEQ ID NO: 710500 - DNA, 101 bp, Homo sapiens
cagcgcgagggccctgggcaaggcccgacagggaagaaggagaaagggccaacccctgaagaagcaatacagaaactgaaggagacagagaagatactgat

SEQ ID NO: 710501 - DNA, 90 bp, Homo sapiens
cttatctggagcagtacatgaccggttacttaatgtctggttgtaggtggcctagatatccacaaaaagatggtggtagatgtgtgactc

SEQ ID NO: 710502 - DNA, 90 bp, Homo sapiens
ctatgaatgctacttggatgcctcttaagatgagctcacagtgcctgcactttaccccagtagccctgaagtgtgggccccgtaccctct

SEQ ID NO: 710503 - DNA, 75 bp, Homo sapiens
gccaccgtcaccaaggcgcccaagaaggaatgtttacccttgcggaagttgcatcacttaatgacattcagccaa

SEQ ID NO: 710504 - DNA, 83 bp, Homo sapiens
cacggagatggtagagtgcagcctggagcggcagctcagcttggagcaggaggtccaggacatttcattaccatccagaagtg

SEQ ID NO: 710505 - DNA, 75 bp, Homo sapiens
ctgtgctcccttcttcaaaagcttggaaagcaacctttttattagaggaagtaacacaaggggatatgagtgcag

SEQ ID NO: 710506 - DNA, 51 bp, Homo sapiens
cctacgcacacgagaacatgcctgctatggctttgtggaattcttgagtga

SEQ ID NO: 710507 - DNA, 99 bp, Homo sapiens
aacctgccccatgacatgtattctcgcgatgctaccacctaatagttttcaaggaaaagtggcattcattactgggggaggtactggccttggtaaagg

SEQ ID NO: 710508 - DNA, 97 bp, Homo sapiens
ctgtgtggctgtaacttacgtgtactttaccaacgagctgaagcaggtcccctcttgctgttggctgcacatcaggaaggctgtgatgggaatgaag

SEQ ID NO: 710509 - DNA, 82 bp, Homo sapiens
ctgactggcacaggtgttgggttcttctcaccactaaatccaatacgagttcatattgatattggagctgatggcagagcca

SEQ ID NO: 710510 - DNA, 90 bp, Homo sapiens
ctgcctccaactgatgcttattacaagctgcgccacattgtggatgaggtcaatggattaataagactgctggagttaataccaccgaca

SEQ ID NO: 710511 - DNA, 84 bp, Homo sapiens
ctgtcaagacatttcttcggcattctgcaacaggataccagaaggccctattgatcaggggccagctataggaagagtacgcgt

SEQ ID NO: 710512 - DNA, 100 bp, Homo sapiens
cccttgaaaagatgatagctttagttgctcttttggttgaacagtctcgatcagaaaggaggaagaacgtgcaaaacgtgaggagctagagcgaatactg

SEQ ID NO: 710513 - DNA, 100 bp, Homo sapiens
tttgaacttcacacagctgtttgaagtccaagacaactttgacaagattgaattcaataggatgtgttggaccctctgtgtcaaaaaaaacctcacaaag

SEQ ID NO: 710514 - DNA, 102 bp, Homo sapiens
ctcagcctcctgagtagttgggactacagattttgaagccagcttcataaggctattggacaaaataacgaatggttctcgaattgaaataaaccaaacagg

SEQ ID NO: 710515 - DNA, 83 bp, Homo sapiens
ctctgagcgtgctgccgggcagccgggcgctgcggccgggcgactgcgaagctcagggagccaatggtactctggagaaccca

SEQ ID NO: 710516 - DNA, 88 bp, Homo sapiens
agtcattgatcccaggaaacaagagattgttgctgtgaaggttgtcatcctgggacaggatccatatcatggacctaatcaagctcac

SEQ ID NO: 710517 - DNA, 100 bp, Homo sapiens
ggaggtctacgcagatgccgacgaaatcctccaggaggagatcaaggagtacaagagcacgaacttccaggagccggtgcagccgctgacacagcagcag

SEQ ID NO: 710518 - DNA, 97 bp, Homo sapiens
atgaggatgaagaggaggaccagaacttggtcctgatgtctgaccatggagatgtgagcctcccgcccgaagaccgggtgagggctctctcccagct

SEQ ID NO: 710519 - DNA, 96 bp, Homo sapiens
catttctgggatgggaagggatgtgagatgatctgttactgcaacttcagcgaattgctctgctgcccaaagctggagtgcagtggcgcgatctcg

SEQ ID NO: 710520 - DNA, 75 bp, Homo sapiens
cggcgagagtgggcgagaacgtccactgcgggccggcgaaagctgcccagctcaacattggcaatgtgctccctg

SEQ ID NO: 710521 - DNA, 75 bp, Homo sapiens
cgacgcgtgcttcgtggcccggcaccgttccgcggacgtgctcgagttcaaggcccaagctacaagcagcttgct

SEQ ID NO: 710522 - DNA, 95 bp, Homo sapiens
actcgcggaccggcgtccccggcgcgaagaggctggactcggattcgttgcctgaggtactgctataaccagaatttggtagaaaaaggatttac

SEQ ID NO: 710523 - DNA, 74 bp, Homo sapiens
cgcaagcccggctcggcccggccctgctctgttctgcccggaggagccgcccagctgtaggtaaaacttgccta

SEQ ID NO: 710524 - DNA, 100 bp, Homo sapiens
gaccgcgtccgccccgcgagcacagagcctcgcctttgccgatccgccgcccgtccacacccgccgccagggaacggcaggagcagctgatgggatatcg

SEQ ID NO: 710525 - DNA, 50 bp, Homo sapiens
gcccgaagccaagcggtctctgaaaccaaagcccaaaccccggccatcca

SEQ ID NO: 710526 - DNA, 98 bp, Homo sapiens
aagaatggagctggattacacacagcaagttcctgcttctgggacagctctactgacggtaaaaaagctccagttttatttaataaagaaatgattga

SEQ ID NO: 710527 - DNA, 100 bp, Homo sapiens
tggagcccatcacctacatgcagaatggagatttacagacagtcatctgggtggaggacacccttttgggatcagcactgaaagtgacgccatatcccac

SEQ ID NO: 710528 - DNA, 95 bp, Homo sapiens
agaagaatgatgtctacaagcagaagaagatcagtgagctcttcaccctggagggcaggagacagccaagacaatgcaaactccagtgaacattc

SEQ ID NO: 710529 - DNA, 102 bp, Homo sapiens
gaaaaagaagaagaaaacaaagggaccagatgctgccagcaaactgccactgggttggatggcaagcatgtggtgtttggcaaagtgaaagaaggcatgaat

SEQ ID NO: 710530 - DNA, 96 bp, Homo sapiens
gtgtgatgctcgagcaattggctctgcttcagagggtgcccagagctccttgcaagaagtttaccacaaggcagggtccctgggctgccctcttcg

SEQ ID NO: 710531 - DNA, 100 bp, Homo sapiens
gaagacatgaattcagcagagggtgctattagtgccaagttggtacccagggggcttggtactgtgaaatgagtaacttaatcctgacaaccgtagtgca

SEQ ID NO: 710532 - DNA, 75 bp, Homo sapiens
gaaaaacctactcttgatacacaatctaaaaagaattaggaaggtccttcagggccgttgctccagggagaactg

SEQ ID NO: 710533 - DNA, 100 bp, Homo sapiens
aagtgcgcgccctggcgggtccggaccaagaataaaagccagggatccatctttgtccggatacacgccccgtggcaggtgctggccagagaggcagaat

SEQ ID NO: 710534 - DNA, 100 bp, Homo sapiens
acacctacagccccgacgaacatttctgggtgacactcaacaggattcccgtgctgcttttgacacaaaaacggggttacgtgtggcagtgaagaagctc

SEQ ID NO: 710535 - DNA, 98 bp, Homo sapiens
gggatgtttcggaatgggcattgtcgccaattttcaggttctgccgccagaccttccactgccatcggcctctgcaggaggagccagacgcccggcgc

SEQ ID NO: 710536 - DNA, 100 bp, Homo sapiens
cttgaccacttacttggataaagttccagagcctggagtgcccactgaaaccataaaggagaaaatgcagaagtctccatggacgtttccctggcttacc

SEQ ID NO: 710537 - DNA, 97 bp, Homo sapiens
aagtgttatgatgcccttcgaaaaatgatcaactattgaccatataggcaaccggtgaccaaaaacactttcaggcagtatcgagtgctaggaaaag

SEQ ID NO: 710538 - DNA, 83 bp, Homo sapiens
aagtatcgtcgagaagcctatcatcgacccggatgcagagtctacagcctgacccagctgcccgctatcgcaatgtgttggag

SEQ ID NO: 710539 - DNA, 76 bp, Homo sapiens
aaggttgtcatcattcccccgcatgatgactgcaccccgcggagctgggttaacaactttggccatgaaggtcttg

SEQ ID NO: 710540 - DNA, 75 bp, Homo sapiens
tggctccgggctgagcttcctggagaagaggaagatgaaggatttgggggcagagcacttggcaggtcatgaagg

SEQ ID NO: 710541 - DNA, 75 bp, Homo sapiens
atcgcatcctatggctcaaagaaagatgattatgctcaggctgcacgaagaaaaggttattaaagatagacgtca

SEQ ID NO: 710542 - DNA, 100 bp, Homo sapiens
ttgcctgctctcagtttgttcccgaaatgagacttggtgcactctatacctactgggttcccctggtcaaaatgcagatcttcgtgaaaacccttaccgg

SEQ ID NO: 710543 - DNA, 100 bp, Homo sapiens
ctcaagatctggactactgttgaaaaaatttccagtgaggttcgtttcaagcagttggcttgtgggactctgagagatgctgctgcccatgacatgcggg

SEQ ID NO: 710544 - DNA, 100 bp, Homo sapiens
agctactgtactggctattggaaggaggagattctgaagataaggagatcttctggtgaccccacttctcgctgctcatgccgctgggactggggcggcg

SEQ ID NO: 710545 - DNA, 99 bp, Homo sapiens
cttcgtttagttgcgctccatggacagatcaacgaacctggacattgaggagctcaaggcagaagacaaggcagatgtgttgaataaagagctcctttt

SEQ ID NO: 710546 - DNA, 100 bp, Homo sapiens
tgatatgcatgcatgtaccgaccttctgaacaaggccaacacctatgcagggtcgacaagtgcccccaatgatttatggtacaacttcattgaactgccc

SEQ ID NO: 710547 - DNA, 96 bp, Homo sapiens
gcgttggtggcgacggccgagtcagtttcatgatcaacatgggagactcccacgtggacaccagctccaccgtgtccgaggcggtggccgaagaag

SEQ ID NO: 710548 - DNA, 90 bp, Homo sapiens
tggacatgtgtggaatttctaatctcattcctggactttcctgcagcaggctctccccggaggctcagccccctctgctccccatgggca

SEQ ID NO: 710549 - DNA, 100 bp, Homo sapiens
atgggcatgtccgcttcgaccttcccccacaagctgagctcctgtgacggccacgacgggctgcggaggcaggactccagccgcaagccccgcgccttca

SEQ ID NO: 710550 - DNA, 59 bp, Homo sapiens
aaaaagacattaacatatctcagagccttgcacccagatataaaccacagtacttcagg

SEQ ID NO: 710551 - DNA, 100 bp, Homo sapiens
ttgcgcgctcatcttcctctcggtctacttcgaggtaggaaaagtaattggaattgctattatgaaacactttggatggaaagcagacttgaggaatcca

SEQ ID NO: 710552 - DNA, 50 bp, Homo sapiens
gaaaggattcgttacagccagagattgcatccgcagtgtcatgcagaagt

SEQ ID NO: 710553 - DNA, 75 bp, Homo sapiens
atgagggaggtgcccctgcgttgtaccatccgcctgtgggacacctaccagatggcgtcccatgtagagtgccgt

SEQ ID NO: 710554 - DNA, 100 bp, Homo sapiens
tgccttacaactacaaccagctggaaggcagattcaagcagctgcaagctcctgatgataattcattattgctgctgcgggcggagttatatttgaccat

SEQ ID NO: 710555 - DNA, 96 bp, Homo sapiens
atggacagttgcacacactaggagatctcctcaaagaagtttgtccttctgctattgatcctgaaggtgagccgttctccaaccctttggcccccg

SEQ ID NO: 710556 - DNA, 87 bp, Homo sapiens
tttctaggaaacctaccctatgatgttacagaagagtcaattaaggaattctttcgaggattaaatagattgctttgcataaatcca

SEQ ID NO: 710557 - DNA, 83 bp, Homo sapiens
ggatcgccgacctgctgtcaaacggtcgcatgaggcggttcctgcggatggtggatgcctgtgccagcttcctcactgaagcc

SEQ ID NO: 710558 - DNA, 51 bp, Homo sapiens
gccatcagaaccgccaccatggagtgtgctggactttgactttgagaaact

SEQ ID NO: 710559 - DNA, 74 bp, Homo sapiens
agcgcgccaaaaccgggacggacaagaccctggtgaaggaggtcgtacaggcccagatgaaggactgcatgcgc

SEQ ID NO: 710560 - DNA, 119 bp, Homo sapiens
atggtgctcttgcagaacattctgaaaatgtgcatatttcaggagtgtcaactggaaactgttaaggcagcaataatagaagagcagaaacgaagtgaaaaggctgtggaagaggcagt

SEQ ID NO: 710561 - DNA, 50 bp, Homo sapiens
gtgttctcgacttcgtcgctgatattcaagagaagcttatgtggagttag

SEQ ID NO: 710562 - DNA, 82 bp, Homo sapiens
cctactgagcgtgctcccctctgagactggagtgagagggtcttctgatccagacatttaatgtggatgcaccatgccagac

SEQ ID NO: 710563 - DNA, 83 bp, Homo sapiens
gaaagacttgaaggcgtatacaggaacaatattgatgatgtagtaaggtgaatgaaaactttgccattgatttgatagcagag

SEQ ID NO: 710564 - DNA, 90 bp, Homo sapiens
atttgaacaagcaaagaaggtgataaccatgtttgtacagcgacagggcatctatgtacttcaggacaacaaatttcgcctgcttactca

SEQ ID NO: 710565 - DNA, 75 bp, Homo sapiens
gaaccatgctcaccgaccctgataaggaagcctgtgtgggtaccaacaatcaaagctacatctgtgacacaggac

SEQ ID NO: 710566 - DNA, 75 bp, Homo sapiens
ccggagctggcgctttctcagcactagatctggactccgacccggcgccaggatgaaactgttgcttgcatggct

SEQ ID NO: 710567 - DNA, 88 bp, Homo sapiens
agagtagatctggagaaaccaacagctgtgttgaagaaataatccggatggagcaaagacagtgactgtgctgagaacatgtatattg

SEQ ID NO: 710568 - DNA, 74 bp, Homo sapiens
gcagatggagtactcctagcagaaatcatccagattattgggttgaaaggaggagcaggaggtactgatggaca

SEQ ID NO: 710569 - DNA, 101 bp, Homo sapiens
tcagaaacgtcacctccttcccaccaccaggtgtcccgcatgagatgtctgcagaatgagacttacagtgcgctgagccctggcaaaagtgaggacgttgt

SEQ ID NO: 710570 - DNA, 75 bp, Homo sapiens
ctggatcctgactctatccctagcccaggaataaccagcaagtacctgtcaagaatgaagtagatcattgtgaaa

SEQ ID NO: 710571 - DNA, 100 bp, Homo sapiens
gtcaggccagaacttcagcaccctggctgagaagggcttcctgaggctgcggtggtcacgcttcgcccgtgtcctcctcacccgctcctgcgccatcctg

SEQ ID NO: 710572 - DNA, 110 bp, Homo sapiens
ttctataggattttattgcacaaaggcaacggtgactttcaaagatgaagatgagctggattcccacaccatggtgaagactagtgtggagagtgtgggcaccatgcggg

SEQ ID NO: 710573 - DNA, 82 bp, Homo sapiens
cttgcttgggatcctttatcctggtcatcttctatttccaaagatcttttgccagaaatgagggcatactggcctgacgtaa

SEQ ID NO: 710574 - DNA, 74 bp, Homo sapiens
agatcccttcagttcaaaacataatgtgattgatcctgaaggacacagccctgcagaaagtgaagcgtggccag

SEQ ID NO: 710575 - DNA, 85 bp, Homo sapiens
acgacgcccacccgctgtggaagtggatgaagatccaacccaagggcaagggcatcctgggaaaagatgctgggacccagaagga

SEQ ID NO: 710576 - DNA, 101 bp, Homo sapiens
cctcggcgctgatctccggcgcgggcactgctttccactcggctcctgtcgtccgttctctcaggctcccgttcaggaagagccaggacttctgaatttac

SEQ ID NO: 710577 - DNA, 76 bp, Homo sapiens
gccgcctgaggaggcgagctagccgggagttacaccgccaccgccagacgcaaacatgcagatctttgtgaagacc

SEQ ID NO: 710578 - DNA, 101 bp, Homo sapiens
acgtcagctgcgctcccctaggagtgctgagcccgcggaaccgcagccatgaacccagtgacttgattgtaaaaatttacagagcggaatcatatgctggt

SEQ ID NO: 710579 - DNA, 101 bp, Homo sapiens
cactgagcactgctctcagtgagaagcgcacgctggagggcgagctgcatgatctgcggggccaggtggccaaggtctcctcctctcacaatgcttttcct

SEQ ID NO: 710580 - DNA, 75 bp, Homo sapiens
ggaaaatacacctgttgttgagtgccaggccgggcacctggtgtgtaaccaatgccgccagaagttgagctgctg

SEQ ID NO: 710581 - DNA, 102 bp, Homo sapiens
caaccagcggaaccgggagtggaacattgtagagtctgagaaggcccttgtggcaaccaagttgttaaaagccttgaaaggctacattaaacatgaggcaag

SEQ ID NO: 710582 - DNA, 50 bp, Homo sapiens
ggtttcccatttcatggggtctctcaggtggtttcaccccaacatcagca

SEQ ID NO: 710583 - DNA, 100 bp, Homo sapiens
aaagcaggtgcctctggatttccagtgtttctacacctgtgggttatgacaaagacaactgccaaagaatcttcaagaaggaggactgcaagtatatcgt

SEQ ID NO: 710584 - DNA, 101 bp, Homo sapiens
aagttttgaagatgaacaccaagatgaaagcagcagttttcatcatctaagtgaaagatccatttttcctatccatccctccttcagaatcattgccttgg

SEQ ID NO: 710585 - DNA, 82 bp, Homo sapiens
cgctgtggagacgcggagggtcgaggcggcgcggcctgagtgctccatgtgcatccctcttgaagcttcgcactctgttgaa

SEQ ID NO: 710586 - DNA, 75 bp, Homo sapiens
cagaggtcgtggaggtggccgtggaggcagaggtggcatgggctttggaaacatgatgagcaaggagaagcgaga

SEQ ID NO: 710587 - DNA, 82 bp, Homo sapiens
gggatggagaaggaggaggaatcgaaaccaaggtgtatgttggtaacctgggaactggcgctggcaaaggagagttagaaag

SEQ ID NO: 710588 - DNA, 96 bp, Homo sapiens
ttctgattcagcaggtgtggagtagtgccccaggattgtgcagactggtgcttaaaatggaagtcgatattaatggagagtctagaagtaccctga

SEQ ID NO: 710589 - DNA, 75 bp, Homo sapiens
cttagctgtgctcgcgctactctctctttctggcctggaggctatccagctggtggtcctgctccatgatgtccg

SEQ ID NO: 710590 - DNA, 100 bp, Homo sapiens
tcggcagtcaccggagtgcccgagggggaagcacgatttacggaaggtgtttgctgactagcactttggagagtgtatgcttatctgccatgtccataac

SEQ ID NO: 710591 - DNA, 80 bp, Homo sapiens
aggccgatccgctccgctcacgctctactgagatgaagaaagaaaaagaatacctgctcagctccagagacacgtaaagg

SEQ ID NO: 710592 - DNA, 83 bp, Homo sapiens
cgagagcggtatctgcgtgtcgggacgtgcggaggctctcactttccgtcatggcgctgaagacttcccaagtaagaagcgga

SEQ ID NO: 710593 - DNA, 100 bp, Homo sapiens
cccatcattgggagaaatccccactcctccaagaaccaacccccaaattggctgggacagtcgtgagatggagaataaagaaactctcaaagggttgcac

SEQ ID NO: 710594 - DNA, 75 bp, Homo sapiens
ctgggtcctcggtcggtacagtctctgcacctcgcgccccagcaggttcctattactgtaaccatgccagaaatg

SEQ ID NO: 710595 - DNA, 50 bp, Homo sapiens
tgtcgacctgacgctctacacggagatggtcatcacaaacttgcagcctg

SEQ ID NO: 710596 - DNA, 75 bp, Homo sapiens
cccggaccccctacccaggtccagggccagccgccatgacgaacggctactgggaacgttatttggaaacattcc

SEQ ID NO: 710597 - DNA, 75 bp, Homo sapiens
agtggttggaaatggcacctatggacaagtctataaggtagctttggatatgttaaatcctcatgttactttgcc

SEQ ID NO: 710598 - DNA, 83 bp, Homo sapiens
gcggacctagacctggaatcgcccaagtccctctactcgcgaggtcccttcaccgatgttgtcaccaccaacctaaagcttgg

SEQ ID NO: 710599 - DNA, 100 bp, Homo sapiens
ccaagtcttccactgcagcccaggaggtaaagactctggatggcattttctcagagcaggtcttgggcgtctttggtactggcttttttaggggtctgcc

SEQ ID NO: 710600 - DNA, 142 bp, Homo sapiens
ctgaaggtgaaaatcgtggccgggcgccatttgccagtgatggaccgtgctagtgacctgactgatgccttcgtggaggcacagtctcactctcttacccaatctggagtgcagtggtgtgatctcggctcactgcaacctc

SEQ ID NO: 710601 - DNA, 98 bp, Homo sapiens
cgcccgctcgtactgctgctgcacctgctgcaacttgggccccttttcaggagattacctggggcaattgatgttatcggtcagactataactatcag

SEQ ID NO: 710602 - DNA, 75 bp, Homo sapiens
tcgcgcttttcgccgtcgccgctctccatcaaacaattcctggacttcggtggaggtggaggaagcgtccctggg

SEQ ID NO: 710603 - DNA, 75 bp, Homo sapiens
tccaagatgatgtctttaatgaaaagggatggaactacattcttgaggttcctgggctatataagtccagttctg

SEQ ID NO: 710604 - DNA, 80 bp, Homo sapiens
cggcgggaggagcctgttcccctgagccactgaggcggctcccagctgcgttggcgacatggccgacacccccagagatg

SEQ ID NO: 710605 - DNA, 75 bp, Homo sapiens
ttctcagaggacgccttcaacaccaccttcatctccaccatcgttccatgccattgcagtgtcaactaggcctca

SEQ ID NO: 710606 - DNA, 101 bp, Homo sapiens
gaggagccaaagcctcggcgctcacctaagccgcagggagatacacccaactgggagacattcacggaaacgctgggaaaactttatccatagtgagaaca

SEQ ID NO: 710607 - DNA, 90 bp, Homo sapiens
cgctcccggagatgccccgcggcagccgcgctcggggctctaagtctgatgtcatacatcagagtgtatatgaacttatccataccgaag

SEQ ID NO: 710608 - DNA, 100 bp, Homo sapiens
cgcggggtccggacagccgcgcgctgagggtctcggggcgggcgccgcgggacctctccgggccatgggcgaggccttcttgggcagctttgtggccagc

SEQ ID NO: 710609 - DNA, 83 bp, Homo sapiens
gttggctgccgtccccgctgctgtgcattgggttgtgaccgagattcccgacgagagagactgaggggaagagaggaaggagg

SEQ ID NO: 710610 - DNA, 100 bp, Homo sapiens
tgataactcaggatttacttgaaacaaaaggagaccctaatcttcaggaatcagtgtctgtccctgaagggtcattaaatcagctatgttcttcagaaga

SEQ ID NO: 710611 - DNA, 75 bp, Homo sapiens
cctggagaagagaggctgtatctccatgccagagcaggacactcatgaggaccatgatacttccactgagaatac

SEQ ID NO: 710612 - DNA, 76 bp, Homo sapiens
gcacatcccttaatagtcatctacataggttcaaaccttgtactactcagctgatcacaagctgcttgatgggaac

SEQ ID NO: 710613 - DNA, 75 bp, Homo sapiens
gggtggaggttcgagcgctgttctcgctccggagccgctgcacatttcgaatgagatgctggaggaaggacatga

SEQ ID NO: 710614 - DNA, 81 bp, Homo sapiens
gctcggctgcagacttggccaaatggacgggactattaagagtttatgtggccgaggcagacaagtggaattaggccttgc

SEQ ID NO: 710615 - DNA, 75 bp, Homo sapiens
ttcccctgagcctcagcacctgcttgtttggaagggttatgagagaatttacaatgaaattccggacattaatct

SEQ ID NO: 710616 - DNA, 75 bp, Homo sapiens
ctttcaacgggactattatgatagaaactggtccacaatgtgcataaccacatcaccaatgacaagagattcaat

SEQ ID NO: 710617 - DNA, 82 bp, Homo sapiens
ggccaaccacgccgccgcgcgctccccggctaggacccacctgctgcagacaatgcagatcttcgtgaagactctgactggt

SEQ ID NO: 710618 - DNA, 100 bp, Homo sapiens
caaagatcctggagcagaagacaagttcattcaaatcagtaaggcttacgagggctgaaaacacagttaaatcactttcaaagttaaaagactattaaga

SEQ ID NO: 710619 - DNA, 50 bp, Homo sapiens
cgtcaaccccttcctcccgtatatcaggttcttcagatagatcctgaagt

SEQ ID NO: 710620 - DNA, 75 bp, Homo sapiens
atcttctaggagatttgtttggcgtgccaagcttctctgtgaaagagcacagatacgtaggtaacctttccagag

SEQ ID NO: 710621 - DNA, 90 bp, Homo sapiens
cctgtaaccgccatgcagaagaaatctggctatcataccttcaacaattggatccatggctttgacagaaggggcattgtgtcagcatga

SEQ ID NO: 710622 - DNA, 83 bp, Homo sapiens
ccgttgggtccggccgctctgcgggactctgaggaaaagctcgcaccaggcccgaatggaagtggatgcagatggaaatggtg

SEQ ID NO: 710623 - DNA, 75 bp, Homo sapiens
cagggtggctgtggacaaccagccccgagacatcggactgcagttttcggctttgtgagaaaccttaccatcaaa

SEQ ID NO: 710624 - DNA, 100 bp, Homo sapiens
agggcatcctgggcaccatcaactccatcgtgatggcctttttaggagttcaggactgtggtctggagctcaatgatgaagatggccaccgctgttatcc

SEQ ID NO: 710625 - DNA, 100 bp, Homo sapiens
caagagtgagcgagcggacccgcgatggttccagccaaagaggaagctaatgctgtgcctctctgtagagcaaaaccctcccccagctatattaatcttc

SEQ ID NO: 710626 - DNA, 120 bp, Homo sapiens
gcggctgcaggactgggcacagcatgagatccaaaggcagggcaaggaaactggccacaaaacttaaggcatacagaacgatggagtatatggcagaatccaccgaccgcagccctggac

SEQ ID NO: 710627 - DNA, 75 bp, Homo sapiens
cctccaggcccagaacggagccgccttggcctcggggtctccctacaccaacgtaagactttgaccccgacgcag

SEQ ID NO: 710628 - DNA, 87 bp, Homo sapiens
agacgctagtgtgagcccccatggcagatacgaccccgaacggcccccaaggggcgggcgctgtgtgccaaacccaagtctgaaatc

SEQ ID NO: 710629 - DNA, 74 bp, Homo sapiens
ccgaggaggaggaagaggaggaggtgaatgaaaactttgccattgatttgatagcagagcagcccgtgagcgag

SEQ ID NO: 710630 - DNA, 80 bp, Homo sapiens
atgcaggtgcggaagctggtgggcactcagcaccctctgcttaccacagccaggttctaaatggcttctaagaagttggg

SEQ ID NO: 710631 - DNA, 75 bp, Homo sapiens
gggaaaagtggcactgaggctctggaacttctgcccagctctccttgttgctgattgttggaggttcttttggtc

SEQ ID NO: 710632 - DNA, 89 bp, Homo sapiens
aagagctcgaggagatcaagaaggagaccggctcctcctgacaaggtgatccgggcgggccccgcaggaattttatcccctcaccggcc

SEQ ID NO: 710633 - DNA, 100 bp, Homo sapiens
cggcaccggcccgacctgcttgttccctaggcacagtaaccttggaagttggaagaatcaaagctggtccattccattcagagaggaggccatctcaaag

SEQ ID NO: 710634 - DNA, 90 bp, Homo sapiens
tgaagatggagaaacaagtgaccaacagttgaatcaaagtatggacacagtgtttcctgaggttataggcgggtgtttgaggagtacatg

SEQ ID NO: 710635 - DNA, 119 bp, Homo sapiens
gtctacctggtaatagaggacttgaagcagaaagcaagtgaatacgagtcagaagatttacagccagttacttactcagaacctgcattttggtgttcgatagcatattatgaattaaa

SEQ ID NO: 710636 - DNA, 127 bp, Homo sapiens
ctgcagggaaacagaagcttactttgctgacctgataatgaagaattattttgcaccactggatgttgtttactggaggcaggtggaagtcatcataaagtttctgtttcacccgtcgtccatgttc

SEQ ID NO: 710637 - DNA, 82 bp, Homo sapiens
agaaaggagagcgcgacatcctctccaacggccagcaggcctacccgttccatcccgggctatcccagttccccactgccag

SEQ ID NO: 710638 - DNA, 82 bp, Homo sapiens
agctccgggaccggccgaaaggcgaggaaccgtttgaaggatgacctctaggaagaaagtgttgctgaaggttatcatcctg

SEQ ID NO: 710639 - DNA, 100 bp, Homo sapiens
ccacacttcatcctcaccactgactggatttggtactggagtgatgagtttggttcttggcaggaatatggaagacagctctgcatggtctctctgagtc

SEQ ID NO: 710640 - DNA, 100 bp, Homo sapiens
gaaaaacgaccgtggccacagtaccacaaagtctctgtgcaaaatggcaactcttaaggaaaaactcattgcaccagttgcggaagaagaggcaacagtt

SEQ ID NO: 710641 - DNA, 90 bp, Homo sapiens
gtggctcataagtggtttcttcagcaattttgactggagcacccgttggacttggaaatcctagctctctaggggtgggtcaacagtctg

SEQ ID NO: 710642 - DNA, 101 bp, Homo sapiens
cagatgacaatagtttattattcatggagacatccgctaaaacatcaatgaatgtaaatgaaatattcatggcaatagtagagacgggggttcaccatgtt

SEQ ID NO: 710643 - DNA, 97 bp, Homo sapiens
ctgggagccatctgtgccatcatcgtggtagttattgtaattcattctgaatctagacttgctcagcctaatcaagttcctgtacaaccagaagcga

SEQ ID NO: 710644 - DNA, 100 bp, Homo sapiens
cagggcgacccgcgtgggcatcctcaggacgactcacatcaacaccgtctcctcctatcctgttcctacaacagcagccagtacccctgatgccgttgac

SEQ ID NO: 710645 - DNA, 98 bp, Homo sapiens
cagatggtggaggaatacacttatttatgaaatcagaccaaacattgtctggcttgcactgtaaaactagttagctgaagacgacttctcaggtttct

SEQ ID NO: 710646 - DNA, 75 bp, Homo sapiens
atatctgagggagaagcacaagatcatgcacagagtgatcactctgagatctatggtacagttcattggcagaga

SEQ ID NO: 710647 - DNA, 114 bp, Homo sapiens
aaacatgacgtctccagccaaattcaaaaaggataaggagatcatagcagagtacgatactcaggtcaaaggatctgtctggctccattgatgacctccccacgggaacggaag

SEQ ID NO: 710648 - DNA, 75 bp, Homo sapiens
gcacggacggtgttggttgggcctcctacgtgatcacagacctgacccagctgcggaagatcaagtccatggagc

SEQ ID NO: 710649 - DNA, 90 bp, Homo sapiens
gctcgtttccgggagcagacttcctaccgggagcactgcagtcacttctgaacagatttggagcaagaggtggtggtggccttcccccga

SEQ ID NO: 710650 - DNA, 50 bp, Homo sapiens
ccttgataacacagagtttcaagcattgcagtgtcgagatggctatgaac

SEQ ID NO: 710651 - DNA, 100 bp, Homo sapiens
aacgatccagacggcagggagtgcatcaaaggtgtgaacacagagcagcccgacggccatggaggctgaagagacgatggaatgccttcaggagttccct

SEQ ID NO: 710652 - DNA, 101 bp, Homo sapiens
ggaatttatggtcgcctttttgaatgagactgcttttcaggaagccttggacgctgcaggtgataaacttgtagtagttgacttctcagccacgtggtgtg

SEQ ID NO: 710653 - DNA, 50 bp, Homo sapiens
cttttttggaactcatgagacttcccatttcatcagaaccaccagaggaa

SEQ ID NO: 710654 - DNA, 98 bp, Homo sapiens
ggagcgcaggcctcgtgccgttacggccatcacggcggccgcagtggcgtcctggagccctcctcaggtgtggtatctgtgcgctttgaagaagatga

SEQ ID NO: 710655 - DNA, 90 bp, Homo sapiens
tctaaaacgaacagccaaaagatatgaagaaatccttgatgcatcaagcatgatggaaccatgtgtgatacctgccgccagcaaccaatc

SEQ ID NO: 710656 - DNA, 106 bp, Homo sapiens
cgctgcgcgagctgtctcggtcccacgtgtgcggatctgcaggcccaagaccgagctcaccgcatcgggcagcagaacgaggtccgggtactgaggctctgtaccg

SEQ ID NO: 710657 - DNA, 100 bp, Homo sapiens
cccagatagtgcggttgctcatccatcaagggccttcacacaccagagtcaatgaacagaacttaacactacaagcggaagccttccttcaacaacaccg

SEQ ID NO: 710658 - DNA, 85 bp, Homo sapiens
tttctgccatggttctcactaaaatgaaagaaaccgctgaggcttatttgggaaagaagaacgatgccaacgggactgcaaagcc

SEQ ID NO: 710659 - DNA, 102 bp, Homo sapiens
gtcctccagaaaggaagtgttggtctggtcatatgtgacgagtctcttcaagaaaatgaggaggaggagattgggaacctagagcttgcctgggatatgctg

SEQ ID NO: 710660 - DNA, 100 bp, Homo sapiens
agaggaatctatacaaagaagtgatgctggagaattacaggaatcttctctcattggttatttcaagtaccattggaagaggaaggacaacgtggtggac

SEQ ID NO: 710661 - DNA, 100 bp, Homo sapiens
acagtatggctcagcagactcctgtaggtaatgctgctgtatcctcagttgactcattcactcaggattcactccttctccagttgcacagccacaccct

SEQ ID NO: 710662 - DNA, 50 bp, Homo sapiens
agtttctggataatgagcaggcacacagatcaggatcctcatgaccagcc

SEQ ID NO: 710663 - DNA, 75 bp, Homo sapiens
caggaatcatgggctatcaaagaaactatgttccaacttcctgtcaacaatcttggcagtttaagaaaagcccgg

SEQ ID NO: 710664 - DNA, 107 bp, Homo sapiens
acaggactatactgacctggaggtcagggtgccagtacccaagcacgtggtgaagggaaagcagatcaccagaagctggagagagaggctcggatctgccgccttct

SEQ ID NO: 710665 - DNA, 119 bp, Homo sapiens
atttgctttggctctctgcttatcttttttgccaaatactgatgccaaaccaaacaggaagcttacttttctctacctagccaatgatgtcatacagaacagcaagaggaaggggccag

SEQ ID NO: 710666 - DNA, 74 bp, Homo sapiens
agacaagaaagcgcaaggaatgtcctgaccaacttggacccagatatgtcatttcagcaccaaaaatattccgt

SEQ ID NO: 710667 - DNA, 100 bp, Homo sapiens
tacggcagctacatggaggagaagcacatgccacccccaaacatgaccacgaacgagcgcagagttatcgtgccagcagaaatgcactcggtgatggaaa

SEQ ID NO: 710668 - DNA, 100 bp, Homo sapiens
cctgggcccccaggtgggctcagccaagaccaaggcgggtcgttaaccaagctggcctactattcaacggtacagcacaaagtcgccaaggtgcggtctt

SEQ ID NO: 710669 - DNA, 101 bp, Homo sapiens
tttgaatccttccttgatgatgaagaggtgtaccttcagttgaatttttagaatctcccattacggcagtagacagcccattcctaaaagcatttcaagca

SEQ ID NO: 710670 - DNA, 50 bp, Homo sapiens
tgcagaaggttgtgactttagtatacagctttacaggaagtatggtgctg

SEQ ID NO: 710671 - DNA, 100 bp, Homo sapiens
ggaacaaagactgttgagtatgctccatgtagatcacgacatggatttgattgacatactttggaggcaagatatagatcttggagtaagtcgagaagta

SEQ ID NO: 710672 - DNA, 100 bp, Homo sapiens
gtcatcatcagcgccctcaagacctacctggtgtcgggggtgtccgcaatgttgccagtgtctgtctgcagattggctacccaactgttgcatcagtacc

SEQ ID NO: 710673 - DNA, 50 bp, Homo sapiens
aagtttcatctgtggatggagtattggatgataatgaagataattcaaat

SEQ ID NO: 710674 - DNA, 119 bp, Homo sapiens
ggtgacctccttgctgggctgggagaagttgcctaagaaaggcttccctctcatcttccatggtgtgcggaggaacccatttactgttacaccccgcacaacttcacgcgcgaccaggc

SEQ ID NO: 710675 - DNA, 82 bp, Homo sapiens
caacctctgtggtccgtaggagccactatgaggagggccctgggaagaacgtggtgtagtatgggaagaaactattattttg

SEQ ID NO: 710676 - DNA, 100 bp, Homo sapiens
caagatcatgggcaaaggacagatccagccaaagaagcctaaagccccagacaatccatttcatggcattgtttccaagtgttttgagcctcatctctac

SEQ ID NO: 710677 - DNA, 50 bp, Homo sapiens
gtttgtgtattgcggcaagaagggtggtgtgtgccaggtgctccgactac

SEQ ID NO: 710678 - DNA, 80 bp, Homo sapiens
atcaactgagagagatgcttaaaaatcaccagttactttaatgacaaattgttttctcaagcaaaaccccatttgtggca

SEQ ID NO: 710679 - DNA, 100 bp, Homo sapiens
gccgagtatgaaagtcaagtcaaagttacctagaaaagtacgagaaagttcatcattttggggaggatgatgatgaggtaccaccaggcaatccaaagcc

SEQ ID NO: 710680 - DNA, 89 bp, Homo sapiens
ccagtccagacaccgttccacagccttctctcagatgccatggacaatattaccaggcagaaccaattctacgatacccaagtcatcaa

SEQ ID NO: 710681 - DNA, 82 bp, Homo sapiens
gcctgtgtcccacttgttcgcggcctatagatttggtgttgtactgcgaggcattcctgaccacctacaggaccttcatctc

SEQ ID NO: 710682 - DNA, 82 bp, Homo sapiens
ccggttcgcgtctctctgctgcggcgcggggaccgctgtgctctcgggcgaccattgacgaggtggagacggacgtggtgga

SEQ ID NO: 710683 - DNA, 50 bp, Homo sapiens
ggggtgagaccctcacttcatccgtttcaccagtgatcattaaagaatgg

SEQ ID NO: 710684 - DNA, 82 bp, Homo sapiens
cgcggcaggacttggctggacggcgcggccacggagaagggcgcgggactggtgattgcagctggaagtgcccatgaccgag

SEQ ID NO: 710685 - DNA, 74 bp, Homo sapiens
ctgtgctgaagctgtctctcgggtcctcaataagcttggagggttcccagcaccatgagggcctggatcttctt

SEQ ID NO: 710686 - DNA, 125 bp, Homo sapiens
tgagaaacttcggtctcagttggagttattaattagcccaacctgttcttgcaaacaagcagatatttgtgtggtggttcgagatcagatctctcactgcacagtgaaattgcgccagaccacag

SEQ ID NO: 710687 - DNA, 75 bp, Homo sapiens
caacagtggccttctgatgaatactttaaatcacttaggaaaatggctgttggtatgatcctagcatgcctggca

SEQ ID NO: 710688 - DNA, 98 bp, Homo sapiens
caggaaaacgtggatgattactacgacaccggcgaggaacttggcaggtttgccatctgcaaatctggccgcacctaacctcactgtggaggaaggaa

SEQ ID NO: 710689 - DNA, 82 bp, Homo sapiens
agagctccagcagccttgttagggcgtggcctgaggcttggataagtgggaagctccaccatgaggcgaggtggatggagga

SEQ ID NO: 710690 - DNA, 75 bp, Homo sapiens
tctccaaagcctgcgcgagaggagccgggacacgcctagcgcgggctccagataaggagtcaggccagggcggga

SEQ ID NO: 710691 - DNA, 80 bp, Homo sapiens
cgccaaccgctccgctgcgcgcaggctgggctgcaggctctcggctgcagcgctggcacggggtcactctggtgcccatt

SEQ ID NO: 710692 - DNA, 100 bp, Homo sapiens
agtcccgcctgcgtcccagaagtgcctgcagttcagacccttctctcccctccactttctcccggggatccaggtccggcacgatcaagacccaggctac

SEQ ID NO: 710693 - DNA, 83 bp, Homo sapiens
gtaaagatggaaaaccagttattgaatatcaagaggaggagttgttggtgcctcgagtctttattggtaaagattgtataggc

SEQ ID NO: 710694 - DNA, 95 bp, Homo sapiens
tgtgtggcagccatggacaggtacagcatggaggagctgattcagctgggccaagtgtgcaccggcacagacatgaagctgcggctccctgccag

SEQ ID NO: 710695 - DNA, 75 bp, Homo sapiens
gcagctgaaccccctgttcgggccccagctgaagaatgagaccatctggagcgagactcctccagtacctccccc

SEQ ID NO: 710696 - DNA, 76 bp, Homo sapiens
ctgggccggaagatcggcagcggctccttcggagacatctatctcggaggtgctcctgtaccctggccacagccca

SEQ ID NO: 710697 - DNA, 100 bp, Homo sapiens
tggagatctaggaacctatgtgatcaacaagcagacgccaaacaagcaaatctggctatcttctccatccaggtggctttctagaagatgaccatagagg

SEQ ID NO: 710698 - DNA, 75 bp, Homo sapiens
aaagaatcttgggattgttgcagacatattttcgagaagatcgatatttggatgtttcgagctcgacttgtgaaa

SEQ ID NO: 710699 - DNA, 101 bp, Homo sapiens
atggcagctatgtgtcttggattggctcacagcgctatcatagagcacaccaaccgggtcatcttcctggaggacgatgacatcgccgcagtggctgatgg

SEQ ID NO: 710700 - DNA, 75 bp, Homo sapiens
gcgggatgcggcgcgccgcgcgactgcaaaattcaaaatggggctcaaggtattcgtttcatctacaccagagaa

SEQ ID NO: 710701 - DNA, 75 bp, Homo sapiens
gacttcttagacttggaggaggtatgcctggactgggccaggacaaaactttcggtttgaagaataagaaaggag

SEQ ID NO: 710702 - DNA, 102 bp, Homo sapiens
ggccgggacccggttccccggcccacagtgggggtgtgcaaacccgagagaactgggtgcagtacagaaggtttctaaaaaattagaaatgcacgtttacag

SEQ ID NO: 710703 - DNA, 83 bp, Homo sapiens
ctgaattctgactcagccatttactaactgtgtgaccttaggtgtgggcagaagaaaaagctagtgatcaacagtggcaatgg

SEQ ID NO: 710704 - DNA, 100 bp, Homo sapiens
cgagaggatgcggagcccgcagaacctccacagtcaagaggacggtatcgagaaccttccctgcgaacttcagaggaacttccagctgatgcgagagctg

SEQ ID NO: 710705 - DNA, 100 bp, Homo sapiens
ttttcgaggtaggagtcgactcctgtgagatggtgaggtctacagctttgggactcttccctggagaagtggaccagtggagatttgtccaagtagcccc

SEQ ID NO: 710706 - DNA, 51 bp, Homo sapiens
gagtccagcccaggaaaatggagaggcaagaggaggaacgacgtagaagag

SEQ ID NO: 710707 - DNA, 82 bp, Homo sapiens
tcttgataaaaagagatgtggggggattctcgacctgctaacagaactggaccttttcgggtgatcagcccatgacctaaac

SEQ ID NO: 710708 - DNA, 74 bp, Homo sapiens
gcaagcccagacaatgccggtggaggaatttgtggctggctggatctctggtcgggtcacaaatcttcgaagag

SEQ ID NO: 710709 - DNA, 90 bp, Homo sapiens
cagagacctacgtggcagctgtgaaaaaagccatttccgaaggtggaaaacgaagctcattcccaacgtgcaaagccaaggcagcgaccc

SEQ ID NO: 710710 - DNA, 100 bp, Homo sapiens
tttcattttattaaggatccaaagaatttaacattagaaagacatcaactcactgaagtagtcactcctgaagccattggcttcttgtctgctgttgggg

SEQ ID NO: 710711 - DNA, 82 bp, Homo sapiens
gaagaggtgaagctcaaggcacaggtggcccgatcccagcaggacattgaaaggcctccaggcccaaggtcagcatcccact

SEQ ID NO: 710712 - DNA, 98 bp, Homo sapiens
aataagctatatactttggttacctatgtacctgttaccactttcaaaagtcaggttgccaaaaaggaagatctcatcagtgcgtttggaacagatga

SEQ ID NO: 710713 - DNA, 75 bp, Homo sapiens
cgtggggcgcgcgtgcggaggaccaggcgcggcgcggctgcggctgagaaatgcactcggtgatggaaagagagc

SEQ ID NO: 710714 - DNA, 98 bp, Homo sapiens
tccagtttctcttaagtgccctgtacatattgctggctcacagttggaccaacgcttacaaatagcaactacaatgcagaaacatatgcatcctattt

SEQ ID NO: 710715 - DNA, 73 bp, Homo sapiens
cggactcatacagagattgaaatgttccttagaaaggagcagcagaaaatgatgcatcctgttgccagcagta

SEQ ID NO: 710716 - DNA, 88 bp, Homo sapiens
ggactcctacgacaacttcagtgggcatcgagatgacggcatggagggctcactcagtaacttgatggattttgtgaagaaaacaggc

SEQ ID NO: 710717 - DNA, 100 bp, Homo sapiens
tgaccactgggcacccattcattatgcatgctggtaaagagtgtgtacaacagttagctgaaaacaccaggtatttcaggagacgcctgaaagagatggg

SEQ ID NO: 710718 - DNA, 50 bp, Homo sapiens
ctcccctcaacaacttctctgtggcgcatctgggcggaccccggcaaata

SEQ ID NO: 710719 - DNA, 90 bp, Homo sapiens
gtggcaatcatcctgaatgaatttagagccaaactgtccaaggctttggcaggtttgaacatcctcatccctgtgttagaccggatccga

SEQ ID NO: 710720 - DNA, 100 bp, Homo sapiens
tccgaatttgcaaagaggaggaaggagggacttcttggcttctcccagcatagccccaggatattggtatggtatagagcttgaaaaaccccatggcaag

SEQ ID NO: 710721 - DNA, 89 bp, Homo sapiens
ccctggagcgcaccatcaacctgaaaacatttaaagttgatgatatgttatcaaaagtagagaaaatgaaaggagagcaagaatctcat

SEQ ID NO: 710722 - DNA, 95 bp, Homo sapiens
gtgatggtggtcgccgcggcggcgtgtgcgcccctcagatgagattgtggggaacctgggtgaaggcacctttggcaaggtggtggagtgcttgg

SEQ ID NO: 710723 - DNA, 100 bp, Homo sapiens
aagagagggacagaagaacggacgatctccttgaacttacagaggttcttccaggttggaaagagaatatgctggagagctgtctcccacgtgcattttc

SEQ ID NO: 710724 - DNA, 51 bp, Homo sapiens
ggcctgccatgtccgggagaagacagtgatttgatgaaggctgctgcagga

SEQ ID NO: 710725 - DNA, 74 bp, Homo sapiens
gaggttcaatgcagacaagacggatgtgatgctgtgcctgaagacctctcattagaagagagagaagaacttct

SEQ ID NO: 710726 - DNA, 84 bp, Homo sapiens
gcgacaagccgctggcagccgcggatctcaccgccgctcagggcacccaggcatgtggaatatgctcatagtggcgatgtgctt

SEQ ID NO: 710727 - DNA, 96 bp, Homo sapiens
ggcggaccgtcccgcgcggggcacgatgttgaacatgtggaaggtgcgcgagctggtggacaaagcgtgattgtagagaaggctccaaaagccagg

SEQ ID NO: 710728 - DNA, 50 bp, Homo sapiens
aatcccagtactttgggaggccaagagagcccgagcccagcacattgtgc

SEQ ID NO: 710729 - DNA, 100 bp, Homo sapiens
gcaatttggagcggtaagcccccaatatgtgaaaatctgtcttctaaggcagcaggtacaccaaagaagaaagctgttgtccaggctaagttgacaacca

SEQ ID NO: 710730 - DNA, 51 bp, Homo sapiens
gagaggagcggggagcaatgcaggactccctggaggaaaagcggaagcggc

SEQ ID NO: 710731 - DNA, 100 bp, Homo sapiens
taggagactcagaatcgaatctcttctccctccccttcttggaggaggtgcgccagtctgtaactcctgccgagccagtccagtactatttcacgctggc

SEQ ID NO: 710732 - DNA, 100 bp, Homo sapiens
atgaccatattaatgcagatgaggcgttctttggtgaaaggtgtagcagtcactcggcctacacccacagcatcgaccttgtgaacccagcgacctgact

SEQ ID NO: 710733 - DNA, 96 bp, Homo sapiens
cacaggccaggatgggtggaagtgaaggacccattgcagatgcaaaggctcctgagaagcgggcctcaccatccaagccagcttctgccccagcct

SEQ ID NO: 710734 - DNA, 75 bp, Homo sapiens
cctgcgtccagccataacccaggagtaacatcagaactcccccactggaaaggattctgaaagaaatgaagtcag

SEQ ID NO: 710735 - DNA, 98 bp, Homo sapiens
caataccaggatagctgttgtttcagagaaaggaggacagtcagtgacccacaccggcctgcccatcatggcctccctggccaacacagctatctcct

SEQ ID NO: 710736 - DNA, 75 bp, Homo sapiens
gcggggttcgtcgggcctgtggaagaagcgccgcgcacggacttcggcagagttctcccaggagaaagccatgtt

SEQ ID NO: 710737 - DNA, 87 bp, Homo sapiens
gccatggacacgcactttgcaaacatgagatcgttgatccagaatgatgccaatgggtggaatgatgccacctggaccaggaatacc

SEQ ID NO: 710738 - DNA, 100 bp, Homo sapiens
cgcgcgccggcggcaccatgaagtcagcggaggaagggggatatgagactttctactcggaatatcctgagtgttgcgtggatgtaaaacccatttcaca

SEQ ID NO: 710739 - DNA, 100 bp, Homo sapiens
aaacagagtatggctgcagaggatccatctgtcttagcaaggctgtcatcacagtggatcttcttgttccaaccaaagtgactggcatcattacacaagg

SEQ ID NO: 710740 - DNA, 75 bp, Homo sapiens
gcttcatcctcggcggcggtggccgctagctccaaggaaggcgaggccttcttgggcagctttgtggccagcggg

SEQ ID NO: 710741 - DNA, 80 bp, Homo sapiens
agtccagagctgaggactgcctgtttgcagggattcttcagcaagcgcctgaaaggctccatcaagaggaccaaaagcca

SEQ ID NO: 710742 - DNA, 50 bp, Homo sapiens
ccgacagccttgctgactatttcaagaagagtgggttcagatggctccaa

SEQ ID NO: 710743 - DNA, 100 bp, Homo sapiens
gctcttcacatcctttcaagaacaggtcctgctgtactagccaccaaagcagctgctggtactaagaaatatgatcttagtaaatggaaatatgcagaac

SEQ ID NO: 710744 - DNA, 75 bp, Homo sapiens
aatcactactttgctacagacaacgtttggatgcaggttttctgtctcaactggtctctgacaagcctctgactg

SEQ ID NO: 710745 - DNA, 83 bp, Homo sapiens
aacaagttcatcaaggagctcattaaggacggctctctgctcattggggcgttgaggagatcaacactctgtggtaggccaga

SEQ ID NO: 710746 - DNA, 75 bp, Homo sapiens
gcctgggaatcggtcgcctggaggaccagtatttcccatggaggggaccatcccgcggtcatcaagcgacgcttc

SEQ ID NO: 710747 - DNA, 100 bp, Homo sapiens
cgctggcaactggagtctctcaaatctcaggaatttgttgaaacggggctttgctatgatactcgggttcgagaaatggctgctactaccttaagcggtc

SEQ ID NO: 710748 - DNA, 100 bp, Homo sapiens
gtcgtgtcagcttttggactccctattgtatttgccagagcacatctgctcttggagcagtcggagtggcagccaacaaacgtggatgggaaggggtacc

SEQ ID NO: 710749 - DNA, 82 bp, Homo sapiens
cagaagtcgcgtgtctaggtgagtcgcggtgggtcctcgcttgcagttcagcgaccacgctatgctaagaaggaatctgatc

SEQ ID NO: 710750 - DNA, 90 bp, Homo sapiens
ggcagaagaaagaagaggagaaggagcagtccgtgctcaagcccacccttcctccattctgagcacataaaaaccccacactcagccaga

SEQ ID NO: 710751 - DNA, 74 bp, Homo sapiens
caagtagatcacagcaccatacattctcagagtcacttatttcagcaattcaaggtgatattgaagaagctaag

SEQ ID NO: 710752 - DNA, 75 bp, Homo sapiens
gcccggacatcctggaagctgggaaatggtgaaatgacaatggatgctctgttggctcgattgaaacttctgaat

SEQ ID NO: 710753 - DNA, 98 bp, Homo sapiens
acagaagccaaaaagcattgctggtatttcgaaggactctatccaacctattatatcaaattcaacacccaacagcttccttaatagcaaaggtagca

SEQ ID NO: 710754 - DNA, 100 bp, Homo sapiens
tccttggcagcaatggctgtatttgaagataagtttaggccagacatggagtgtgctcatgggagcttagaagatcccaaaagtataacccatcataaat

SEQ ID NO: 710755 - DNA, 100 bp, Homo sapiens
ccggtgggcgggagccccggcgggccgcgcctggtgatcggctccttaccagctcacctctcaccgcgcatgtttggagaaaacaccagtttgatcatgg

SEQ ID NO: 710756 - DNA, 75 bp, Homo sapiens
agagtttaaacagccaaaacagttcattcatattcagctgtctgccccaagcaagtctcttgggaggaggaggcg

SEQ ID NO: 710757 - DNA, 74 bp, Homo sapiens
tttaagcagcagaggagcacgaggatcgtgggagctaagaagagttttgagagcaaaatgacaacacccagaaa

SEQ ID NO: 710758 - DNA, 75 bp, Homo sapiens
agcgattcttccacctcagcctcccaagtagctgggatcacaggcacggcgcagaagaacacggtctgtgagccg

SEQ ID NO: 710759 - DNA, 90 bp, Homo sapiens
tgagcgccttaaggatctctttggcaagtttgacagcaactctggaaagtggcttctaactcggcgcattttcttagtggatgcagtaag

SEQ ID NO: 710760 - DNA, 100 bp, Homo sapiens
cataaactcgtcacaattgaatgtgggcggcattctttgccacagtgctgaagctgctgaaagatggcagaagaagtggtggtagtagccaaatttgatt

SEQ ID NO: 710761 - DNA, 51 bp, Homo sapiens
ctggacgccggaagccgggaaatgatggggagactgaggccgtggctgtgt

SEQ ID NO: 710762 - DNA, 83 bp, Homo sapiens
gtttcctactctttaagctctgttagcttggcctctgtccctgaagaaagcccgttttggcctgagtgcggctgaggacatca

SEQ ID NO: 710763 - DNA, 73 bp, Homo sapiens
cctttcaaccctgggtggattttctccagcctccaagccatgggtgatccattcatgttgcagcagtctacaa

SEQ ID NO: 710764 - DNA, 100 bp, Homo sapiens
gaagaacttcttcagaattagaaaggagctgcttcccaataaggaaacattaacaagcacaagccctggctggagcccacctaccacggcatagtcacag

SEQ ID NO: 710765 - DNA, 98 bp, Homo sapiens
gagaagctgctgctacagatcaaccccgagcgggagctggggagcatgagctacaaactcggccaggtctctgcaatgaaatgtggcctcttgccaat

SEQ ID NO: 710766 - DNA, 75 bp, Homo sapiens
caggcgtgagccaccacgcctggcctcactcaaacagtaaacgaggacaatgaaggccaaacagctctacattat

SEQ ID NO: 710767 - DNA, 100 bp, Homo sapiens
ctgtctcctggactcacatgatcctcccacgtcagcctcctaaatagctgggattacaggtcaatgagctgaaggagaaaggcaacaaggccctgagcgt

SEQ ID NO: 710768 - DNA, 83 bp, Homo sapiens
aaactttccaaatggcagaatacctgaaactggagtttatcaagctggacctaccatgaaagacttctgaatccaggaagaga

SEQ ID NO: 710769 - DNA, 100 bp, Homo sapiens
cggctgtcccctgccggggccgccctactctggggcttcctgctccagctgatctcacattcttgaaggtggcattgaagagcactaagatcggaagatg

SEQ ID NO: 710770 - DNA, 82 bp, Homo sapiens
ggccagctttcccccgagggtcaacgagaaagagatcgtgcctccggagccagcgtggtggccatagacaacaagatcgaac

SEQ ID NO: 710771 - DNA, 87 bp, Homo sapiens
ccaaatgatgacactttggatgaaggagtaggacttgtgcattcaaacatagcaactgagtgcacagccagagaacaacacatcaca

SEQ ID NO: 710772 - DNA, 88 bp, Homo sapiens
aaaatggggtgaggaagattttgaagacaatcgtcacttatacagggcggcgactggcggcgcgatggacctgaccgggctcctgctg

SEQ ID NO: 710773 - DNA, 80 bp, Homo sapiens
gccaaagaactggctaggcaaataagctttaagggtgatatcaaggaacatcccctgttggcatcatgtgagagtgaaga

SEQ ID NO: 710774 - DNA, 96 bp, Homo sapiens
caaatactctgaggctctcaaagatgcccaggagaagctggagctggcagagaaaaaggccaccgatactactccaaaggattcggcgggaagtat

SEQ ID NO: 710775 - DNA, 80 bp, Homo sapiens
tcagtcagtctcttggtttggtctctaaaagtaaagggtctgtcagtttgtcgtctctgtcaacgggctcaatgtcctgc

SEQ ID NO: 710776 - DNA, 90 bp, Homo sapiens
aacttagaatgcagcttcagcagaggctgcagggccagcagcctgggttactaggtgtctttcagaagctgattgcatccaaagcaaatg

SEQ ID NO: 710777 - DNA, 152 bp, Homo sapiens
tgcggcgcagcggccgctgtcgggctggccatggcgaggggtgcacggcggccacctgagtggcgcggcggtgtcaggtactccaaagattcaggtttactcacgtcatccagcagagaatggaaagtcaaatttcctgaattgctatgtgt

SEQ ID NO: 710778 - DNA, 50 bp, Homo sapiens
caaaaactaaaactgcaggtccaggtcaaggtcagcatctcctcgacgat

SEQ ID NO: 710779 - DNA, 74 bp, Homo sapiens
cggctggaaggaaccgctctcgcttcgtcctacacttgcgcaaatgtctccgtctgaagttgcagccggagtga

SEQ ID NO: 710780 - DNA, 51 bp, Homo sapiens
tacatgggaatgcactctattctgacgccgaagtcgcgggcgctcatggcg

SEQ ID NO: 710781 - DNA, 114 bp, Homo sapiens
gtccgtcccccgcggccggcagctcccggggcgtctgggccggagcctcaacagaaagctcctttagttcctcctcctccaccgccaccaccaccaccaccgccacctttgcca

SEQ ID NO: 710782 - DNA, 90 bp, Homo sapiens
agacgcagatgtggacttgaaagaagctgcagcggaggaaggcgaggatcaacactctgtggtaggccagaacacaggccccagtccaag

SEQ ID NO: 710783 - DNA, 100 bp, Homo sapiens
gactgcctcactgagcaaccaagacttaacagagcgttccaaaaagaggactctccagctactttttattgcatcagtatgcagtggtttagagaatggg

SEQ ID NO: 710784 - DNA, 82 bp, Homo sapiens
ctactccaaagcggccgggagtcgcgcttcttccccactcccgagacagaaccgtattgctgttaataagaattatccttga

SEQ ID NO: 710785 - DNA, 99 bp, Homo sapiens
cagcaggaacgggaggaagaccaggatggaacttggagcgtgatgcccagaagtgtgtgaactggtctgtgaccacaaagatgagaaccgcatgctgag

SEQ ID NO: 710786 - DNA, 85 bp, Homo sapiens
gtgatacaatgatggggcagcaagtggccaaggcaattgaaggaacagactaaaaatcgtgtcctggaaggaaactacaggtact

SEQ ID NO: 710787 - DNA, 49 bp, Homo sapiens
gatgcggatccgggcctttccgtgtgggactacaatactggcagagtgg

SEQ ID NO: 710788 - DNA, 75 bp, Homo sapiens
gatcatgatacagttgataaaattgttgagccctgaggatgatgacaggaaggtccgaaggagagaaaaaaaccg

SEQ ID NO: 710789 - DNA, 76 bp, Homo sapiens
tatcaatgcgaatgatcctgaagcctcaaagtttcatggaacctggcttctgtatttaccatgtacctggagcatt

SEQ ID NO: 710790 - DNA, 75 bp, Homo sapiens
tgaggggaagggtccaacagtcctggtcattcagactgcagttccccagtaagactttgaccccgacgcaggctt

SEQ ID NO: 710791 - DNA, 75 bp, Homo sapiens
aatatgctccagattatcaaagcttttggactagtccttataggacagttcttcgagataatgcaataccaacaa

SEQ ID NO: 710792 - DNA, 73 bp, Homo sapiens
gccacggaggagccaggtccctgtctgagccaatgacagcatattaaagtgagtgaccctgcgacccactctt

SEQ ID NO: 710793 - DNA, 87 bp, Homo sapiens
tgtactgtgcttggctggaaaaccccaaaagtgtacataagatgcagaaactgaggcccagcagagattgagtaacttatgcgagtt

SEQ ID NO: 710794 - DNA, 75 bp, Homo sapiens
ctgcaagcgccccatctatgagttcaagatcacatggtgggggtccactggacggggcctgagctacaacttcac

SEQ ID NO: 710795 - DNA, 100 bp, Homo sapiens
ggggattctcgacctgctaacagaactggaccttttcggaacatccgctatggactataccactcactcttagagtggttccatccactctatctacttg

SEQ ID NO: 710796 - DNA, 83 bp, Homo sapiens
cgaaaattggatgtgaaaatgaagccagaccgagcctggtctgccacctcagaacttttcaatgtctgtcacagttccagtga

SEQ ID NO: 710797 - DNA, 82 bp, Homo sapiens
cgggacccggtgtctgctcctgtcgccttcgcctcctaatccctagccactatgctgtcgcctggttgggcccggaaatggg

SEQ ID NO: 710798 - DNA, 82 bp, Homo sapiens
cgctggattctgaggaccagcagatggccagtcacgagaacccagtttctccttggaccaagatgactgatggaaaactctc

SEQ ID NO: 710799 - DNA, 135 bp, Homo sapiens
tcaagcaccaacacattttctggtgatacccaagaaacatatatcccagatttctgtggcagaagatgatgatgaaagtatgtcaaaatccacaggcaacttcctcactttgacccaagctattgacaaattttc

SEQ ID NO: 710800 - DNA, 95 bp, Homo sapiens
tcagcatcggaagatcattttattgacattgctgaagtggagacagggcaaatccagacagaacctttgacttggtgttgaaagtgaaatgtcat

SEQ ID NO: 710801 - DNA, 90 bp, Homo sapiens
gccgagaaccccagcttggagaaccaccgcatcaagagcttcaagaacaagggccgcgatgtggaagtcacagaattttccacactcctt

SEQ ID NO: 710802 - DNA, 96 bp, Homo sapiens
cccaccgatgctgcaagagatcagtaacttgttcttgattctgctcatgatggaaaccagcctggacaccaagtctgtgtcagaaggccacctcaa

SEQ ID NO: 710803 - DNA, 75 bp, Homo sapiens
tgccttggaaaccatctcaatgttgactttggcagaatatcatgaacaggaagaaattttcaaacttagactagg

SEQ ID NO: 710804 - DNA, 82 bp, Homo sapiens
tgacaacaccgttcccccagccgggctgccctgggcgctgcctatggcacagccaagagcggtaccggcattgcggccatgt

SEQ ID NO: 710805 - DNA, 100 bp, Homo sapiens
ggatgggcacactgtgggggtgtcctggtgcacccccagtgggtgctcacagctgcccattgcctaaagaagcgcttcgcgcttctgcgcatcgtgaacg

SEQ ID NO: 710806 - DNA, 50 bp, Homo sapiens
cagcgccggcacgcgcgaggcccgtggggaagaaaacatgacagaaacag

SEQ ID NO: 710807 - DNA, 75 bp, Homo sapiens
aggaacagggcagacgttagcgtgagtgatcactctcaatcccggaattcagtaattggatcataacgagacttc

SEQ ID NO: 710808 - DNA, 88 bp, Homo sapiens
gccagctgtacttgaactggagggcaagaagtggagagtggagccagatgaccaagatgctccagatgaacatgagtcgcctccacct

SEQ ID NO: 710809 - DNA, 98 bp, Homo sapiens
tcacctgggatcatgtcgttgcactatcaaatgaatctacagtgacgggatataagttttccacctatttccctggatattttgatggtcagtactgg

SEQ ID NO: 710810 - DNA, 100 bp, Homo sapiens
cccctgcagcccgagccgccccccgagcccgccttctccgaggcgcagaagtggattgagggagttctgtccaacatctcttccatcaccgatctcggcg

SEQ ID NO: 710811 - DNA, 75 bp, Homo sapiens
cttttacttttattgggttgtgcagttcagggaagtttggttggcttagtggattatccagatgatgaagaggaa

SEQ ID NO: 710812 - DNA, 75 bp, Homo sapiens
gactgctgaagagatggcggccaatctaacaggttggcttatttggacgtctaggcagttttccagttagaggga

SEQ ID NO: 710813 - DNA, 50 bp, Homo sapiens
cagtgatagtgctaatgtgtcaattgagaggatccagaatccagatctct

SEQ ID NO: 710814 - DNA, 98 bp, Homo sapiens
ggaacccacgaccattatatgctggaatggttccttagctagcaacatggaccacagatatactggtgactccgctctcctctggccaagctacaaat

SEQ ID NO: 710815 - DNA, 88 bp, Homo sapiens
tgatgaccctcttccaggttacatacagcttacatcttgcatcctcaagcgcaacccagactactacggactcatctaacaaaacagc

SEQ ID NO: 710816 - DNA, 88 bp, Homo sapiens
ggtgtccagatggacagagttgatcaggtgagagagcgattacgagtagcacttgaaagatgtagtttgttagaagaggaattaggtg

SEQ ID NO: 710817 - DNA, 100 bp, Homo sapiens
tccccggcggcagcacgaaagtaccatctgggttttggaaagagcatgcctacaaactgcgtgtggctagatgggctttcttcgaatgtgtcagatcagt

SEQ ID NO: 710818 - DNA, 100 bp, Homo sapiens
ccaacccccaaattggctgggacagtgattcgcctttgccagtctcatctcgtgtctgctttgttaagttccatgatccagactcagcagttgtggcaca

SEQ ID NO: 710819 - DNA, 74 bp, Homo sapiens
gcagcaagacaatcactgcagagataccagaccttgccaccatggaagaaagagtacaaagacgatattatgaa

SEQ ID NO: 710820 - DNA, 100 bp, Homo sapiens
gaggacagcgcgtcggctgcggttctctctcgaccccttctgcccggcgcttcggcccgggccgctcaggtgcagggaggtaccttcttccaaacccggt

SEQ ID NO: 710821 - DNA, 100 bp, Homo sapiens
ctgtcatcttctaaacagagcagcagcagcagagatgataacatgtttcagatgctgggctcttgcactgtttggtggaaatggtgagacaggatttgag

SEQ ID NO: 710822 - DNA, 83 bp, Homo sapiens
tttggacactctagtagctgtaatagaatgccagcaaccagaagcagacttatacaggcctggagaatgggaagacctggctt

SEQ ID NO: 710823 - DNA, 82 bp, Homo sapiens
gtgggaatcaaatgcttcactcaccacagaacctgcctagagctggaacgttacctccagagcgagccctgctatgtttcag

SEQ ID NO: 710824 - DNA, 75 bp, Homo sapiens
atcaagtctctgtgtgcctggagagagatgtggtatggtgtattcctgtgggcactggtgtcttctctcttcttt

SEQ ID NO: 710825 - DNA, 96 bp, Homo sapiens
gacaattggtcaaaagatgcaaatggagggactcagaggctgccccgttgtctgggggtggccctggcgaaggagctcatcttcacgggccgacga

SEQ ID NO: 710826 - DNA, 96 bp, Homo sapiens
ctctgccacctcgcagagctacacgcggagcagcgcatttgtagccatgaagtgccatcttgcccaatatgcctctatccacctactgcagccaag

SEQ ID NO: 710827 - DNA, 90 bp, Homo sapiens
cggaccttgggctgaccggtctgtctggcttcaggccaggtcagagcagcccaccatgggatggggagggggtggaggctgcaccccgcg

SEQ ID NO: 710828 - DNA, 100 bp, Homo sapiens
tgcgttgaggatctttgctcttccatccgcctttgatcgtcttcctcttcagccatccagcatcatggcagaacaggatgtggaaaacgatcttttggat

SEQ ID NO: 710829 - DNA, 98 bp, Homo sapiens
tcgatccgcccacagacctcaaattcaaaggtccaatgatgcatcagcagcctccttctcagcaatacaatatgccacagggaggcggacagcattac

SEQ ID NO: 710830 - DNA, 100 bp, Homo sapiens
cgggaagatggcggcgccgctcatccccctctcccagcagaatccggacaatcagatagttcaaaccagcaaggagatgcggacatcaaaccactgccca

SEQ ID NO: 710831 - DNA, 74 bp, Homo sapiens
atgacctttccacaacttggaccagttcagcctattccttgttgttgggggccgtcccgctcctaaggcaggaa

SEQ ID NO: 710832 - DNA, 80 bp, Homo sapiens
ggcgccactgcagagcctgtccgtcagtccctaggtatccgcactgctcagggtgttatgtgccaagaaccttgcaaaga

SEQ ID NO: 710833 - DNA, 100 bp, Homo sapiens
ttcaaattcacattcttctaatccaagcaataacccaagcaaaacttcagatgcacttctcacctggggcgggtgggttctgcaccaccctcccaccctc

SEQ ID NO: 710834 - DNA, 98 bp, Homo sapiens
catcatctggggttccaatgcagattcatgatgttgctatcaaaagttgagaaattgtcagaagaaatcatggagataatgcaaaatttaagtagtat

SEQ ID NO: 710835 - DNA, 75 bp, Homo sapiens
ttgagacttattcatgctgtcagaggctcaatggttattcgggacttaaccttacgcagtgctgctagctttggc

SEQ ID NO: 710836 - DNA, 97 bp, Homo sapiens
ttctaatcctatggatgacaatttaatttgtgcagtaaaattgttaaagccttttgtggagatctgcatgaaacaacataacaaatacgaagccaag

SEQ ID NO: 710837 - DNA, 100 bp, Homo sapiens
cacaatcctagaatttgctcagttaattaaaaaccttgttggcaccaccaagtctgaagatcgtgctgctttgctgaagaaattcaatgaacctggatcc

SEQ ID NO: 710838 - DNA, 80 bp, Homo sapiens
cccagctcggcccgcgggggagccccgggagccgcacgggtggaatggaagttaaggagcctcaggtccgtttaggccgt

SEQ ID NO: 710839 - DNA, 97 bp, Homo sapiens
gagaactcagcgaggattctgagttaaaacagagccaatgagcagcagtgaaacagcttcaacgacagccgacgggtctttaaacaatttctcaggt

SEQ ID NO: 710840 - DNA, 101 bp, Homo sapiens
tccctctccgcccagttacaaggtctgacctacgagaaacatggcaaccagcgccgtccccagtgacaacctccccacatacaagctggtggtggtggggg

SEQ ID NO: 710841 - DNA, 100 bp, Homo sapiens
acgcgggtggagaggcgcatgtggacgtgcacgggatccacttccgcaaggaccctttggaaggccgggtgggccgaggaacagaaattcttggcaagtc

SEQ ID NO: 710842 - DNA, 82 bp, Homo sapiens
ctgttgaaagcgacaagtggaggcgccgctctagcggccgggactctgaactatggcgcgccggcatcggccgcacaggcac

SEQ ID NO: 710843 - DNA, 100 bp, Homo sapiens
ctctagctattgccttattttttctcatggatgttcttcttcgagtatttgtagaaggatcggcttcaccaccgaccctcggatggcccgctcctccccc

SEQ ID NO: 710844 - DNA, 100 bp, Homo sapiens
ccccacccaggcattcacgcactacaacatcaaccagagcagattccagcctccacatgtacatatacttaattcagtgcacaaatgagatgaatgtgaa

SEQ ID NO: 710845 - DNA, 100 bp, Homo sapiens
cagtggacatggtagctggggaaagaggaacaagtggggacataagccttttaacaaggaactctttttacaggccaatttggaccccaatgaccagaag

SEQ ID NO: 710846 - DNA, 97 bp, Homo sapiens
gacgtcagaacgtggcttatgagtacctttgtcatttggaagaagcgaagagccgcctgtcttggttagatggctctggattaggattctcactgga

SEQ ID NO: 710847 - DNA, 74 bp, Homo sapiens
agaggaatgttccctgacaatttcgttaaggtactgctgatgcagcaaatgtcacaagcactcttgaaaatgaa

SEQ ID NO: 710848 - DNA, 50 bp, Homo sapiens
gaagaaacgacaccattgtttttaggaggactgacaaatggtagtggtcg

SEQ ID NO: 710849 - DNA, 107 bp, Homo sapiens
caaagtgaaggagtttggaattgaccctcaaaacatgttcgagttctgggatgcatttgcatcaagtgtgggcttggcatctacggagcccagcaggcgtgccaggc

SEQ ID NO: 710850 - DNA, 100 bp, Homo sapiens
tagttgttggttttccagatctcatggcttgagtttgaagaaacagaagaacctgattttactgcattatgtcagaaattaaagataccagatcatgtca

SEQ ID NO: 710851 - DNA, 50 bp, Homo sapiens
ctttctgggatccagcgagcgacatgctgtcaccactgactaaagaagag

SEQ ID NO: 710852 - DNA, 119 bp, Homo sapiens
ggaaaaactggagagcttcatcaaaaatagtgatagctttgataagtgtctgatgatttgtgagcctcaagtgactactctgtggaatcatctgtccttgcctttgaattagctttccc

SEQ ID NO: 710853 - DNA, 100 bp, Homo sapiens
cttcagccctgtctggtgcatccttggcagaaagtgaggaggaaaacacccccattgcaccaccttccatggtcaataatgaacaacgccagcatgcaga

SEQ ID NO: 710854 - DNA, 100 bp, Homo sapiens
cccacgactgcctgggacctggccaagggctccacacaccaagaccaaggcagatcgggagcggtgccgagaaaaatttccttactagatgacatttcat

SEQ ID NO: 710855 - DNA, 98 bp, Homo sapiens
cgtgggctgggcgctgggttcgcggcgcgccctcctgctgcctccccggagctcccgggccagtaggaatggcatcaccagctgccggatgcggactg

SEQ ID NO: 710856 - DNA, 100 bp, Homo sapiens
ctcaacttcggtgcctctctccagcagactgcggctgagcagtccaaagtcctgagcgccgtggaggaccgcatggacgagctgggtgctggcattgcac

SEQ ID NO: 710857 - DNA, 100 bp, Homo sapiens
gctcaagccgctcttccccacctgcccggtgcccgaggaggcagccaagctcgtggcctgcctctgcgtgcatgacgcactctggtgcagggtcaccaag

SEQ ID NO: 710858 - DNA, 75 bp, Homo sapiens
cagattcgcagtggtcgcttcttctccttgcttttagaggaacttgataaaacaccatggcagtatcctccagag

SEQ ID NO: 710859 - DNA, 50 bp, Homo sapiens
ttcacaggctggatgaagattggggtttgtaaaagaatggacttggtctg

SEQ ID NO: 710860 - DNA, 97 bp, Homo sapiens
ctgtgaagaggtcggcggcccctgcgggcgccagtcagtaataaaagactagtggccttagtgcccatgcccagtgaccctccattcaatacccgaa

SEQ ID NO: 710861 - DNA, 100 bp, Homo sapiens
ggaacagacagctccttctttattggtgtgataaagcggaattgggaatatatatgtagccatgataaagaaaaaacgaagatcctaggagacaaaaatg

SEQ ID NO: 710862 - DNA, 100 bp, Homo sapiens
gcgttttgacccccgacggcggggctgcagcgagagtgcatgagcccgaggaggcagggtctgatgggaatctgtgcggagaccctgggagaagaacagc

SEQ ID NO: 710863 - DNA, 82 bp, Homo sapiens
agggaaccctggtcaccgtctcctcagactgattcttgctattccaaatcctcttccacgttgacagcccttcagatatttc

SEQ ID NO: 710864 - DNA, 80 bp, Homo sapiens
ccggagccgaggcgagcgccgcgcgcaccactgatttgacaagatcaaagctgcaggaaaatggacagtgaggttcagag

SEQ ID NO: 710865 - DNA, 80 bp, Homo sapiens
cctggtacttgttccattggaggcttcagcggctagtttctgctctgggcacaagagactatagtccccggcagatggca

SEQ ID NO: 710866 - DNA, 90 bp, Homo sapiens
ccgcatcctagccgccgactcacacaaggcagaaggccagggatgtaccgcctacgacgtagctgtcaacagcgacttctaccggaggat

SEQ ID NO: 710867 - DNA, 100 bp, Homo sapiens
tgtccgtgtgggactacgcccaccagcacggcatccctgacgagacctgcaacaactaccaggccaaggaccagggttgtacgtggacactataaaggtc

SEQ ID NO: 710868 - DNA, 73 bp, Homo sapiens
aaggatctggggatcttcgcactatcccaagctgctggaaacgcgttctgccaggctgcacagctgcacctgc

SEQ ID NO: 710869 - DNA, 101 bp, Homo sapiens
ctggtcattaagggatccatcctacagaatactatactggcaattgctggagaagattttgcaattgttgcttctgatactcgattgagtgaagggttttc

SEQ ID NO: 710870 - DNA, 100 bp, Homo sapiens
ccggacgggcactgggcgactctgtgcctcgctgagggaagtgtggaactggtctcaatcggttgaccaccttaaggaaataggatttacactgtggaca

SEQ ID NO: 710871 - DNA, 99 bp, Homo sapiens
ggggggagtcctcatcatcatcgcctcctgcgtcatcaacttaggcggcatcagaacacaccatgatggctgtgacctaagaccctcaggaagccccgg

SEQ ID NO: 710872 - DNA, 75 bp, Homo sapiens
cagaggacggcaccacctccaaatactttgctgctacaggagctgagagaccctaccctcactttccgtctgctt

SEQ ID NO: 710873 - DNA, 100 bp, Homo sapiens
tactgcacatgttttgttcaccttgagttcacagtccgtttattaatggttagtcgaatggctaaaccagaggaagtattggttgtagagaatgatcaag

SEQ ID NO: 710874 - DNA, 100 bp, Homo sapiens
gtgggagcaaaaccaacgcctggctcggagcagcagcctctgagatctcactctgttgcccaggctggagtgcagtggcacaatcacagctgaccgcaac

SEQ ID NO: 710875 - DNA, 100 bp, Homo sapiens
tgtgatgcagtgggtgtctacacacttctgatgacacctttattttaaaagctgatgttccaagattttatggaaagaactcttcttatgtccatggggg

SEQ ID NO: 710876 - DNA, 82 bp, Homo sapiens
gacgtcactggccctggtggggattgacagccacgggaagggactggtgattgcagctggaagtgcccatgaccgagctggc

SEQ ID NO: 710877 - DNA, 51 bp, Homo sapiens
caccatgttcctctccgcggtcttctttgttgacctcctgtactggagaga

SEQ ID NO: 710878 - DNA, 75 bp, Homo sapiens
ctgtaaatgggaaggacaggcagagctaaacaaggtactaggttttgacaagcttgcatcatgcgtgagtataag

SEQ ID NO: 710879 - DNA, 125 bp, Homo sapiens
attttggggctccctcgggcacctccggtaccgctgcagccaccgcggcccccgcggctgaaagtacccatggcagacaagcctggtaacacagtgaatttccggaagctgctactgaaccgttg

SEQ ID NO: 710880 - DNA, 82 bp, Homo sapiens
cctgaaccccaaggccaacagagagaagatgactcagatgtggcaaaatctggcaaaggcagagaccaaacttcatacctca

SEQ ID NO: 710881 - DNA, 101 bp, Homo sapiens
ttgataatgaaggcattgctatttttgcacttcagttcacatactatttatggaactttacagactagcatggcaaagcttctctccgatcttagtgtgga

SEQ ID NO: 710882 - DNA, 90 bp, Homo sapiens
gctacgctaacctatcgggttctctctccgcgcgttcagaacagagagtacctgattgagaagctgcttacaagaacaccagacatagcc

SEQ ID NO: 710883 - DNA, 75 bp, Homo sapiens
agaaatggagatgctgctgaatgagaaagggtgggtcatgataactgggtacgtggagttctgttccattctggg

SEQ ID NO: 710884 - DNA, 82 bp, Homo sapiens
cgcaaacatgctccgccagatcatcggtcaggccaagaagcatccgagcggggacagccgcgccgctgctgcttttccgaag

SEQ ID NO: 710885 - DNA, 75 bp, Homo sapiens
agagagttaacttctgtttacatggaactcagacatctgcaaatcatggccatcatgcagaagggggatacaaac

SEQ ID NO: 710886 - DNA, 98 bp, Homo sapiens
atttgcagccattgacaatgacctgcaaccttcctggcaggaggcaagagcaccagggaaatgtttcaacgtgcgcaagcgttgcggcggcgggcaga

SEQ ID NO: 710887 - DNA, 75 bp, Homo sapiens
tatccgtcattgagacttattcatgctgtcagaggatgctgagatgaatcgtcacctgtgtgtttggctttttag

SEQ ID NO: 710888 - DNA, 96 bp, Homo sapiens
gggtctcggcctcgcggtgcagatcccaactgggccagtttgaacttgggagccctcatgtgcatcgaatgctcagggatccaccggaatcttggc

SEQ ID NO: 710889 - DNA, 75 bp, Homo sapiens
gttcctgtttcggccaaattagggcattttgtcagtgatgctgatctttgccttcttccaggaacttgtaatagc

SEQ ID NO: 710890 - DNA, 100 bp, Homo sapiens
gcaagatccagatcgggatttacgtggagatcaagcgcagcgatgttaaaagaagatggatgcacagtgttcagccaaggtcaatgcaaggaagaggaga

SEQ ID NO: 710891 - DNA, 98 bp, Homo sapiens
agtaatttttgattgcttcttcttcccaagaggtgacttcaggtggaacattcattggcattggacggaaaacaccagattgccaagggaacaccaag

SEQ ID NO: 710892 - DNA, 75 bp, Homo sapiens
cacctacgcagcagacaagggggtgagacatggaatccattaaaattgcattatcagttaagaaatgtacgggaa

SEQ ID NO: 710893 - DNA, 100 bp, Homo sapiens
cctactcagaagaacttgtacagagatgtgatgttggagaactatagcaatctggttttcttgggctttatcctgtggataaacgcagagtgaacgagtt

SEQ ID NO: 710894 - DNA, 100 bp, Homo sapiens
agcacagcatgattcttgttcccatgaacacacctggagtaaaaataataaggcctttgtcagtttttggctacacagcacacagcatgcctctgcaatg

SEQ ID NO: 710895 - DNA, 98 bp, Homo sapiens
ggcaaggggacccagtgcgcccgcatcgtcgagacctggagtggaagatcatttatgttggctcggctgagagtgaggaatttgatcagatcctagac

SEQ ID NO: 710896 - DNA, 100 bp, Homo sapiens
ctgaggtgtcggccggatccctccttctcccggcgcctcaagcggaagatcctgggtttgagcagtttaaaatgtcagaaagattgcatgggaactggat

SEQ ID NO: 710897 - DNA, 82 bp, Homo sapiens
gtctgcggctggtgttggcgcatctctaggttggttttaagaacatgcagaatgtggagcatgttccgctgtccttggacag

SEQ ID NO: 710898 - DNA, 100 bp, Homo sapiens
catgaccactgtggagaacaaatccaagattagcacagttcctggtccagaactttacacagaaaaggtgctcaaaggatatttgtttaatgaatgtggt

SEQ ID NO: 710899 - DNA, 74 bp, Homo sapiens
tgcaatcttcatgcccatcagtttcttgtgagaagaaaacaagagcccagcagccggggccgccctattacacc

SEQ ID NO: 710900 - DNA, 97 bp, Homo sapiens
caggatgcctctcagctgccacctgcctttgacctttttgaagcctttgcaaaaatgttgatcttgtctcagaatattgcccaactggaggcccagg

SEQ ID NO: 710901 - DNA, 100 bp, Homo sapiens
cattttatacatctgatggtgttcctttcactgcagctgatccagatacaccgaggagttaaaggatttgtccgagaccttcaaggtaacccaattgcga

SEQ ID NO: 710902 - DNA, 100 bp, Homo sapiens
gaagtgcagaggtttttttctgacacccatcatactgactccaagccccttgctctccagtatccacttctggagtactctcagtcctgttgctccccta

SEQ ID NO: 710903 - DNA, 98 bp, Homo sapiens
atcccagggtacagaaggacatcctgactcagctgaagattctcagacctcaggtatcctgtctacctttcatgaccaactacagttttcattgcaac

SEQ ID NO: 710904 - DNA, 99 bp, Homo sapiens
ggcaggcagcggactccgccaatattatctgtccaagattgaagaactccagatgtgttcagagcaacattgttttgttgacacaagcatttagaagaa

SEQ ID NO: 710905 - DNA, 100 bp, Homo sapiens
actgtgtcaaggagatcggcctcttgaaggaagcagagcaagccatccagtgtctcaatggcaagttggccctgtccaagaagctggtggtgcgatgggc

SEQ ID NO: 710906 - DNA, 99 bp, Homo sapiens
ctactaccaggattacttcgtgggcaaagttgctgagagatggatgttaaaaatcaacaccaggactacagtaaggctgaaatcattgaagtgcttgga

SEQ ID NO: 710907 - DNA, 50 bp, Homo sapiens
tggatgtcggcgaagccgcgggcgagcaattctgtggtgttcttggtcac

SEQ ID NO: 710908 - DNA, 100 bp, Homo sapiens
tggaactggaggaaaaatgtcagggctcagcccagaaattgctgcaggtagagttggctttgtgggacacagctgggcaggaagattatgatcgcctgag

SEQ ID NO: 710909 - DNA, 98 bp, Homo sapiens
cggcagcgggtcttgggtcctccgagagcagcagcgctgcagtcgacttcggcaggttcagagcatcctgacccagagcagcaagtctcggccggatg

SEQ ID NO: 710910 - DNA, 50 bp, Homo sapiens
agccttccgagtagctgggactacagcctccagggtcgtatagacctccc

SEQ ID NO: 710911 - DNA, 100 bp, Homo sapiens
aaaggagcagccctggtgtcacctatcagtaaaaggcctgtatccggtgtccgaggcgaactcagtaagatgatgttaagaggaaacctgaagcaagtgc

SEQ ID NO: 710912 - DNA, 90 bp, Homo sapiens
tccgggagttcaacaaataccttgcatacatggagtctaaaggagcccatcgtgcgggtcttgcaaaggcgggagacactatattcaatc

SEQ ID NO: 710913 - DNA, 100 bp, Homo sapiens
tggatgattatgaatgacaggcttactgaatatcctcttataattaatgcaataaaacgcttccatctttatccagagggaaagtgtggagagcctgatt

SEQ ID NO: 710914 - DNA, 50 bp, Homo sapiens
ctgcctcgccgcgtctcgccacgccacacacagcaccttgacttgcatga

SEQ ID NO: 710915 - DNA, 100 bp, Homo sapiens
ttggtgtggacatctgctgccggaaggggtcccgaagccccctgcaggaactctacaacccaatccaggtgtttctagctgtgtacagggactgattggc

SEQ ID NO: 710916 - DNA, 80 bp, Homo sapiens
actgtcaaaaggcaccatggatgatattagtcaggaagagcttaaagcttttcaagccaggccaagaagctgtgaagtac

SEQ ID NO: 710917 - DNA, 97 bp, Homo sapiens
agaaaacggacggaagaaaaggtctggccgatgcttcaggactgccccaaggcccgcagggaggtggagctgcactggcgggcctcccagtgcccgc

SEQ ID NO: 710918 - DNA, 100 bp, Homo sapiens
tgccgacctcttgcaatccaagtgacatgagccatgggtacgtgacagtaaagatagaatgagtccatttaagtcccaggacggtggaaactagctagta

SEQ ID NO: 710919 - DNA, 100 bp, Homo sapiens
cagcttctgctgtccttctttgtggagagcaaggtgtctgacttccagcaactgctggcctgtgccagggtgcaagctgagcactggagtggagttttcc

SEQ ID NO: 710920 - DNA, 90 bp, Homo sapiens
gagagcttggttaacttgggagaaagtttcatctgtggatggagtattgctctcaaaggtctatggccctgtgttcactctgtattttgg

SEQ ID NO: 710921 - DNA, 90 bp, Homo sapiens
cgtgacggtcatcggcggcgggctgatgggcgccggcattgcccagtcaagagaatccatcccattaaatgacctgaagtcagaagtatc

SEQ ID NO: 710922 - DNA, 100 bp, Homo sapiens
cctttctctcaccgtatcaggaacacaaaactgcggcccttgtctgcaaacagtggtatcgacttatcaaagggagagtcccgtattctcagagtaaaag

SEQ ID NO: 710923 - DNA, 100 bp, Homo sapiens
cagactcggacgtggacgcctttttccggacaggcagttatacttaagcatgaacattgacgacaaactggaaggattgtttcttaaatgtggcggcata

SEQ ID NO: 710924 - DNA, 100 bp, Homo sapiens
cgttgtgtttgtgaaacagagaaagataggcggccatggtccaaccttgaagagtgtgaacatggctacgcctcttcattcccgtccatgccgagccccc

SEQ ID NO: 710925 - DNA, 76 bp, Homo sapiens
caatgccgctggtgcttattatcagatgagctccccacacaagaactctgtgccatcatccctaaatgagtatgag

SEQ ID NO: 710926 - DNA, 100 bp, Homo sapiens
tgggattcgcgctgctgggcacccacggagcctccggggctgtcaggatggctaaaggtgaccccaagaaaccaaagggcaagatgtccgcttatgcctt

SEQ ID NO: 710927 - DNA, 51 bp, Homo sapiens
ccacaggctcagctggcttcaatatgatgctgttgatggagtaatgaatgg

SEQ ID NO: 710928 - DNA, 83 bp, Homo sapiens
agaggatctggtgtaccaggcgaagctggccgagcaggctgagcgatacgacgtacgagctcaactggaggcagtcctgtgcg

SEQ ID NO: 710929 - DNA, 75 bp, Homo sapiens
atcatcccattcagatgaaacctgcagatagtgaaaagtccaacggctcttgtcaggatggtgaagctgttcatc

SEQ ID NO: 710930 - DNA, 75 bp, Homo sapiens
aggaaagtggcctccggggaagccagagctgactgaagggagaaattggctttacgatgaacatgttagacattg

SEQ ID NO: 710931 - DNA, 74 bp, Homo sapiens
tcccagagcacgacgagcgcggaggaccgggaggctcccgggcttgcgtgggagtacttcttgcaagcagagct

SEQ ID NO: 710932 - DNA, 100 bp, Homo sapiens
accaataattttcaaggaagaaaatcttaggccgtttccctggggagatggtaaccatactctattccataaccctcatgtgaatccacttccaactggc

SEQ ID NO: 710933 - DNA, 82 bp, Homo sapiens
cctctctccacgaggctgccggcttaggacccccagctccgacgctggagcggctcaggcggcctcggtgcgaaggagcaag

SEQ ID NO: 710934 - DNA, 100 bp, Homo sapiens
tagtgggcgttgcctttagacccagctctacattaatcatactcctccaccactgtccaagagtaaggagagagaaatggacaagaaagatttggacaag

SEQ ID NO: 710935 - DNA, 83 bp, Homo sapiens
cctcggggacattattgcgcgtggaacggctgcttttggaaggtgagaagccctaccactgcaactgggacggctgcggctgg

SEQ ID NO: 710936 - DNA, 83 bp, Homo sapiens
tataaagcatttgtgcattcagatgctgctaaacaaaccatgcatggaattttggagagaagcaaattttgcaaagatatgac

SEQ ID NO: 710937 - DNA, 85 bp, Homo sapiens
tccggcttcggagcgggagtgttcgttgtgccagcgactaaaaagagacatgaagagtatttctggagaagaatcatcccatgga

SEQ ID NO: 710938 - DNA, 76 bp, Homo sapiens
gaagaatggaacgaagcttaagtagctacaggggaaaatattctgagttcctctgtgacgagggtgcaggtatctc

SEQ ID NO: 710939 - DNA, 98 bp, Homo sapiens
tcccagaaagtccaagctcgtgggtcttgctctatcgcccaagctggagagcagaggcatgatcacatctcactgcagccttgtcctcctaggctcag

SEQ ID NO: 710940 - DNA, 100 bp, Homo sapiens
aattgggcgagggcacaaaataaccacttaccccttctcaccgaggaagagcgggagaaaggatgcggtggtgctagaatttgttatattttccatgaga

SEQ ID NO: 710941 - DNA, 50 bp, Homo sapiens
ttggaagtatcagagccacaggacatggaacctcagggcatcatagcttg

SEQ ID NO: 710942 - DNA, 100 bp, Homo sapiens
tcctcatcttcatctatgatgaggtccgaaagctcatcctgcggcggtatcctggtgctctacctgagcatcgtactgtccgtcgtggtcatcgtcactg

SEQ ID NO: 710943 - DNA, 100 bp, Homo sapiens
atcacgtgccacatttgcttggggaaggatggcttctggaaacttacaccagaactgggacttatattaaatcttaatacaaatggtttgcacagctttc

SEQ ID NO: 710944 - DNA, 101 bp, Homo sapiens
cgcgaccatggcggacaaggaggccggcggcagcgacgggccccgaggtctcatcatccatgaaggaccctcggtgtaccgcatctttaaacggtggcagg

SEQ ID NO: 710945 - DNA, 101 bp, Homo sapiens
ccctggtcctgggcaggggacccctgacccaggttacggaccggaagtgctccagaactcaaggctgaggccctgacgtggatgggcaaactgcaggcctg

SEQ ID NO: 710946 - DNA, 75 bp, Homo sapiens
aagaaactagagcaaataaccgttttgaaattgttgctgttgaagaaatctggttgcagaacaccacggattgaa

SEQ ID NO: 710947 - DNA, 98 bp, Homo sapiens
tttaatattcctgccatcacaaaagctggacaagcgaaggaggagcaaatacgacatcctcatggagaagctttcggtcatgctgagcacacggacta

SEQ ID NO: 710948 - DNA, 88 bp, Homo sapiens
gaggacgagggccagctgacggagatggtgcagaagatggaggagcaatattttggtgtttaagcttggaggaacatccttatctctc

SEQ ID NO: 710949 - DNA, 51 bp, Homo sapiens
gaaggaggagattctgaagataaggaggcccgccaagctgccccctgtgtg

SEQ ID NO: 710950 - DNA, 75 bp, Homo sapiens
attggccctggcaaaccaaggttattctggatggaaatagccttgaaaaggaacagattatggcctttgcaagca

SEQ ID NO: 710951 - DNA, 97 bp, Homo sapiens
aagacagacgtcccccaaaacccctcgcctggctcggacccacggagccggcagcccagcactccggctccaggaggccagagctctactgaagcgg

SEQ ID NO: 710952 - DNA, 100 bp, Homo sapiens
tgcagttgttgaacctgtttgcctatgggacatacccagattacataggtccaagaatgcctcaggatggatcagatgacgaggacgaggagtggcccac

SEQ ID NO: 710953 - DNA, 98 bp, Homo sapiens
gtttcccacttgattacccgttaagtcccccaaagatgagatttacctgtgagatgtttcatcccaacagaatgggtaccacagaccatgtcatcgtc

SEQ ID NO: 710954 - DNA, 83 bp, Homo sapiens
ctgctggctgctgcctgcatttaggctgaggctgcagtggccacccaggagacatccaccgtcaggctaaaggtcagctccac

SEQ ID NO: 710955 - DNA, 76 bp, Homo sapiens
ccggagtttgacgaagaggtggtttttgagagtgattctcatcagttccgtgtaatggcagctgtccttcgtcatt

SEQ ID NO: 710956 - DNA, 80 bp, Homo sapiens
cctcatcagaaatgttacacacggagtatcaaactctgctgccaaggattatatgcgtcaggcaggagaagtgacttatg

SEQ ID NO: 710957 - DNA, 90 bp, Homo sapiens
ggaagcaggcccgttggaagtggttgtagagagtctacagggagattgaacaggtgattggcccacatcgccctccagagcttcatgacc

SEQ ID NO: 710958 - DNA, 82 bp, Homo sapiens
gacgatgtcctccatcgtgatgaaggcagagagcagagacatcccgatctggggaaattattttcgaaataccagtatttcg

SEQ ID NO: 710959 - DNA, 74 bp, Homo sapiens
attcaatttctcagtttcaatccagaatgatcagaaaatttgaagccattacttccagctggtatacaggataa

SEQ ID NO: 710960 - DNA, 83 bp, Homo sapiens
ctactacaagtcctcgcacctaaagtcgcacctgcggacgcacacaggattatatctgtccaagatgcgagtctggttttatc

SEQ ID NO: 710961 - DNA, 100 bp, Homo sapiens
ggatcccggagcctgactgctgtctacagtggcctgaagggtgagaagcacggccgcggaagcagataccagatgggcactgtgccccgactgcggcctc

SEQ ID NO: 710962 - DNA, 95 bp, Homo sapiens
agcggttgacgttgcctctcggcggcgcggcggcggtggacgagtacctggagtaccggagatagtgtgtgtaccatatcagtggcgtgtaacta

SEQ ID NO: 710963 - DNA, 100 bp, Homo sapiens
cttgcactcgtttcagagcccgaatcctcatctttaatattgaaattcctatcactaaaggatttcctgtgctagtgcttggaaacaagagagatcttcc

SEQ ID NO: 710964 - DNA, 95 bp, Homo sapiens
agggaggctccaagacctcatcaacaattaagctggttcgatgcccagaactgaatgctgtgctccagctgtggcctcaccggtgctgaatagag

SEQ ID NO: 710965 - DNA, 75 bp, Homo sapiens
gacagtgtactgccccgttacttatttttacaaatagctgatcagcttccttgggttttgctgatgacacaagag

SEQ ID NO: 710966 - DNA, 73 bp, Homo sapiens
cccaccccgctggagagcaggctgggttacatgtctgccagaatgcagcagtccggcgcctggcccaggaaaa

SEQ ID NO: 710967 - DNA, 75 bp, Homo sapiens
tctttaagggctacgggaagatcctggaggtggatctgaagaacgggaagagcattaagaagttggttttgaaga

SEQ ID NO: 710968 - DNA, 100 bp, Homo sapiens
aggagcggggaggtgggtactacacaaccgtctccagccttggtctgagtggactgtcctgcagacaatgcagatcttcgtgaagactctgactggtaag

SEQ ID NO: 710969 - DNA, 88 bp, Homo sapiens
ctccagaaagtgaagaagaaaatgtagaatgggaaactaatagagatggcccagaggcagagctacacaaccatggaatccaaattaa

SEQ ID NO: 710970 - DNA, 100 bp, Homo sapiens
cagatgacccttacattgcagacctccttcaagtggctgataacagggtcatgatcagagttcgactcttgcccaacactctgttgaactgactttaccc

SEQ ID NO: 710971 - DNA, 82 bp, Homo sapiens
cgcgacgacgagtacgactacctctttaaaggtgcctcaggaaccctgaagctgggctgagccatgatgctgctgccagaac

SEQ ID NO: 710972 - DNA, 96 bp, Homo sapiens
ggcggtgaccggatattcagttgcacatccccacatcaatgcactgccaatgctgacctgaataatgtcagattctcagcttataggactgccatg

SEQ ID NO: 710973 - DNA, 100 bp, Homo sapiens
ccaggacatcctggaacctgggaaaggtgattcgcctttgccagtctcatctcgtgtctgctttgttaagttccatgatccagactcagcagttgtggca

SEQ ID NO: 710974 - DNA, 50 bp, Homo sapiens
caggacgaagtgctcggcggcatggttgcagattttaaagatgcccttgc

SEQ ID NO: 710975 - DNA, 80 bp, Homo sapiens
tacagatgggacttcacctatagatcatttaccatggtttgggaccacagagatcacgtcaacaacagcctgttccaaat

SEQ ID NO: 710976 - DNA, 75 bp, Homo sapiens
atcggggatgtggacgaaggggccgacctcctagcaaacggggattcagcgtccgatcctttggaacagggactc

SEQ ID NO: 710977 - DNA, 51 bp, Homo sapiens
gaagaattcatgctcatccgggtaatggtaactcgggatttgaaggacaga

SEQ ID NO: 710978 - DNA, 98 bp, Homo sapiens
aatcctgagcctgctcctgggaactgcctacaggatattcaccttgcgaaacgtttttatgacatggcagctgaagccagcccagatgcacaagttcc

SEQ ID NO: 710979 - DNA, 97 bp, Homo sapiens
gtaactacctggcattgccttttgttgagtttttccaggggcattgttatttgtgaccacaatgaaaaatgtagacagtgatgatctggtaactggc

SEQ ID NO: 710980 - DNA, 104 bp, Homo sapiens
ctttcattgtcttttccgcccgcttcgatcgcctcgcgccggctgctctttccggaaatgagccgtcagactgctacagcattacctaccggtacctcgaagtg

SEQ ID NO: 710981 - DNA, 100 bp, Homo sapiens
caaaactgagaggctctgggaaactcagcctgtgaccccagcgtgggtgaagataggatcaagatggccatgtggcaggacaaatttacatgtattggag

SEQ ID NO: 710982 - DNA, 100 bp, Homo sapiens
acatttttcacaaaagagcccttgcggtgctggtgtccgtggcgtgcctgggttgcaaaagcttctcatttcagagagatgccaggatcctaagtgcctg

SEQ ID NO: 710983 - DNA, 75 bp, Homo sapiens
atggacaggaactgtggacagtgaagagaggcctctcccaaagcacctgcgcagtaatccttcccctctaccacc

SEQ ID NO: 710984 - DNA, 97 bp, Homo sapiens
gtcgctttgctgtacatcgtattacacctgaggaggccaagatgggaaagggctccttcaagtatgcctgggtcttggataaactgaaagctgagcg

SEQ ID NO: 710985 - DNA, 98 bp, Homo sapiens
aacatcttctggttcttccgagaggccttccttgtcccagcctacacagaacagagccaaatcaaaggctggacaagaatccttcaagaaacaggaaa

SEQ ID NO: 710986 - DNA, 75 bp, Homo sapiens
tagcaacatctataagtgaaaccttggaagagaagatgatttatctggctcgtaatgccaaggatgtttcagtct

SEQ ID NO: 710987 - DNA, 100 bp, Homo sapiens
tggcggtggaaatttcggaccaggaccaggaagtaactttagaggaggatctggggatgtggagacgctggtagcggggccaggaaggctccggacggag

SEQ ID NO: 710988 - DNA, 100 bp, Homo sapiens
tacagcctccggcagcgcatggacatcctggatgtactggtgtggcatactcggacagagaagcccaagatgaagcaggaggagcagctgcagcggcagg

SEQ ID NO: 710989 - DNA, 75 bp, Homo sapiens
agtcatgttgtataaccccgggaagatgagaatgtgcctactgctcctgatcctccaagtcaacatttacgtggg

SEQ ID NO: 710990 - DNA, 100 bp, Homo sapiens
tctaaatttgggccaggggaccaagtcagagcatctgcccaaagttcaggttactggagttggctataatcaatttggggaagtgattgttgatggtgat

SEQ ID NO: 710991 - DNA, 74 bp, Homo sapiens
ggagatcccaggcggtgacagagtggagccatggctagagatccagacatttaatgtggatgcaccatgccaga

SEQ ID NO: 710992 - DNA, 75 bp, Homo sapiens
ggaggtccctgatcaagctgaacttttccaagaacagtgaggtgcaccaattccagctggacatcactgtgaaaa

SEQ ID NO: 710993 - DNA, 75 bp, Homo sapiens
aaggaagatggcggatctggaggagcagttgtctgatgaagagaaggtctttaaggaggagaagtacttgaaaga

SEQ ID NO: 710994 - DNA, 98 bp, Homo sapiens
tagaggagacaagtatggcaaattggtcggcgtggtccctggtccagtcggagagccaggtgctggagaatctggtaaaagcaccattgtgaagcaga

SEQ ID NO: 710995 - DNA, 74 bp, Homo sapiens
ctgtgtggttgcaacggagataaattcccggaaccgcgattcggcgtgtcagaagctgcacacatacatgtaag

SEQ ID NO: 710996 - DNA, 100 bp, Homo sapiens
atctgctccagtgtctccagtaccagttctaccaggccatctggctgctgtgcacaggcgctcgtgaggctgccttccggaacattaagaccattgctga

SEQ ID NO: 710997 - DNA, 98 bp, Homo sapiens
tccgcttctccggcctccctgctcttaccgggagctccagaggtcctgaacaaccagaggtacggcctgagccccgactactggggccttggctgcct

SEQ ID NO: 710998 - DNA, 100 bp, Homo sapiens
aatggtggaatattgtatacctctgcagcaaaaaattattcctgatcaggaccaactgatggcaatagcactagagtgcatctatacctgtgaacgaaat

SEQ ID NO: 710999 - DNA, 100 bp, Homo sapiens
gaagcagcctggcctcatctacagccatctccagattcatttttaatccagacctcaggtccccatcagtcagtagtttactcatccacctcccctccca

SEQ ID NO: 711000 - DNA, 52 bp, Homo sapiens
tgggaggccaaggcaggcggatcacgaggtcaggagatcgagaccatcctgg

SEQ ID NO: 711001 - DNA, 74 bp, Homo sapiens
acgcaggcaaacgagaattaaatgccgagaaggccagtacggctactgcagcactggggtgtcagttgttggtc

SEQ ID NO: 711002 - DNA, 100 bp, Homo sapiens
tgtaccgtgatgtgatgctagagaacctggctctcatatcctcgctgggcctccccatggccacccatggaccagtcggcattcacttcctcccttctgc

SEQ ID NO: 711003 - DNA, 75 bp, Homo sapiens
gaaatcagaaaaacatttgggaggtgtctagcccagtggaccttctgaaggtctcctaaaaacccagaacagaag

SEQ ID NO: 711004 - DNA, 98 bp, Homo sapiens
gaacgaccggctcctgctcaagatctcagagaaggaggaggtgaccacgcgcgaggctccccacaggtgcaggaagccgccgcccagccatggacggg

SEQ ID NO: 711005 - DNA, 51 bp, Homo sapiens
tccagcgctttggagaaattgtgtccccagaagaccatgtctgtgttgagc

SEQ ID NO: 711006 - DNA, 75 bp, Homo sapiens
ggaagtcgcctctgtgctcgtgagtccagggatctaagtattctaccttgtaaatactgttatttgtatatactg

SEQ ID NO: 711007 - DNA, 118 bp, Homo sapiens
gacattgtttctctccctctgcccccccttccccacgcaaccccagatccatttacactttacaccttatgccagcctggaccatcttggaggcagtgtaggatcatggaagaacttt

SEQ ID NO: 711008 - DNA, 82 bp, Homo sapiens
cgcgggtctgctctgtgtgccatggacgggaaaaccaattctgtgtcctcggaggaccacagcccagttgggccccaggcga

SEQ ID NO: 711009 - DNA, 98 bp, Homo sapiens
caataaaactgaactttacagatgaatggttttgcacactagggaccaagaagccctcggggacactgctgagaaaagactgccgaagggaagaccag

SEQ ID NO: 711010 - DNA, 87 bp, Homo sapiens
tgaaatccattggggagagggacctcatctttcacaaaggccttcacaacgcagcctggcatcctcgctacaacctcattgttgtgg

SEQ ID NO: 711011 - DNA, 75 bp, Homo sapiens
ctcggcctgtctgaggaccacttctcccgccctgtgccttggaccgcagttgccggccaggaatcccagtgtcac

SEQ ID NO: 711012 - DNA, 89 bp, Homo sapiens
caatatcaggaaaggccccatcttcccttcacacctgaagtaaaatgcccattcccatcaagaccagacaatggatttgtgaactatcc

SEQ ID NO: 711013 - DNA, 82 bp, Homo sapiens
cagaccctgagcctgaaggggaggcggaggacagacaatgcagatcttcgtgaagactctgactggtaagaccatcaccctc

SEQ ID NO: 711014 - DNA, 136 bp, Homo sapiens
catcccctcttcagtgcaggaatatgttagcgttgtatcttgggagaaagacacagtctccatcatcccaggtactactgagcgagtgtgcttgatccagggaacggttgaagcactgaatgcagttcatggattc

SEQ ID NO: 711015 - DNA, 50 bp, Homo sapiens
tatcagagcaaggcccggaggattgccttgggtccccagtgtttactccc

SEQ ID NO: 711016 - DNA, 50 bp, Homo sapiens
tctatgtgccgacggaggatggtagttgatgtcacttggcgatattcctg

SEQ ID NO: 711017 - DNA, 74 bp, Homo sapiens
ccccagcttactccagggatgatgtcagaaaatgaggaggccagatgctccagtgcctgatggcgaaagtgaga

SEQ ID NO: 711018 - DNA, 83 bp, Homo sapiens
gaaagtttcaaggagtttgggaaaaaccgcgaagtcatggggctctgtcgggaaggttgctccttgagggcaggacagttctt

SEQ ID NO: 711019 - DNA, 100 bp, Homo sapiens
ccacaccaccgaccaggacctggtgaagctctgtcaaccgctgcacatggtccgtctaatgctgttggagagattactgcagaccctgcctcaattacga

SEQ ID NO: 711020 - DNA, 88 bp, Homo sapiens
gaagaagcaaggtgaagataactctactgcacagggatttagtgcaagaagaagaacagttgatggaagaaaagaaaaagaaaaaaga

SEQ ID NO: 711021 - DNA, 100 bp, Homo sapiens
aagcagcccttacaagttgcaaaggtatcctggtcagatataggaggactggaaagtatcaaactgaagttggaacaggctgtggaatggcccttaaaac

SEQ ID NO: 711022 - DNA, 75 bp, Homo sapiens
actcctcccagtgacgggtctggagtgcgtgggggaccggctgttggcgggaatggtcctcgtccgaagtgagaa

SEQ ID NO: 711023 - DNA, 90 bp, Homo sapiens
agttacaatgatgaaatgctcagctatctgcccggaggcaccacaggactgcagctccccagcacggtatatcaatttttcagctgcctc

SEQ ID NO: 711024 - DNA, 106 bp, Homo sapiens
aaggtgaagagttgtcccagctcggcccgcgggggagccccgggagccgcacgagccaaatctcctcagccacctgttgaagaagaagatgaacacttcgatgaca

SEQ ID NO: 711025 - DNA, 75 bp, Homo sapiens
ggaaatctgaatgctgttatcacgtcagcaatctgaagatggtcttacggagcctagtagagtactcccaggatg

SEQ ID NO: 711026 - DNA, 80 bp, Homo sapiens
cacaagatcaaccacctgggctgcctggtcttcagcagactcggtgaaatacctggagtgctcagctctcacccagagag

SEQ ID NO: 711027 - DNA, 75 bp, Homo sapiens
ggtgcatgtgaagttatcaaaaacagttgcctgagagcttagaggacgtggcaatgtacatctcccaggaggagt

SEQ ID NO: 711028 - DNA, 82 bp, Homo sapiens
tcgacctgctaacagaactggaccttttcggtttgccaagatggtggataagaatatttacatcattcaaggggagattaac

SEQ ID NO: 711029 - DNA, 76 bp, Homo sapiens
gcatacctgcttccaggatgaatctgccaagcaacagcctctgctgcgagaagttctggagaagcagccagtgcta

SEQ ID NO: 711030 - DNA, 75 bp, Homo sapiens
gacgcacccgtccatcttcgggatcttcgacgggcacgggggagagctgtcaataccagcaaatatgcagaaagc

SEQ ID NO: 711031 - DNA, 82 bp, Homo sapiens
ctctcggcgtgcggtgatagccaagccatgggagacaagaagagccccaccagaccatggtgaatccgggcagcagctcgca

SEQ ID NO: 711032 - DNA, 100 bp, Homo sapiens
atcaaagtgaaaactgaacccacagaagattctggtggagctgatcagaataatgttcagcatcaaccccctggagaacctgaaggtgtacatcagcagt

SEQ ID NO: 711033 - DNA, 75 bp, Homo sapiens
atcagggcatacatctttcttcgacaaagggaaactactttgcttcgcactttttcatgggaggagagaaattcg

SEQ ID NO: 711034 - DNA, 100 bp, Homo sapiens
aaggacggggcctggcccccgggactccctgtgccttgcttggagctgacgccgacggctcctcttttgacttggactatgactttcaacgggactatta

SEQ ID NO: 711035 - DNA, 100 bp, Homo sapiens
gcaagagcgagccgcctgccccggtgcgcagacagagctattccagcaccagcagaggtggacgacatccttggagaaggcagcgacgacagcgacagcg

SEQ ID NO: 711036 - DNA, 88 bp, Homo sapiens
acgtttgatgcatttgacctctgaagaactggttttgattcccaccatggccatcacccagtttcggttatttaaattttgtacctgc

SEQ ID NO: 711037 - DNA, 73 bp, Homo sapiens
ttacgtctctgctcttcagtacaatcctgtccagtggcattgcagagcacggatggttgcaggagccaacttt

SEQ ID NO: 711038 - DNA, 100 bp, Homo sapiens
gccgctgtcctccccgccaccaccggtgccgggcaccagtcttcagttcacgatcttctagttgcagcgatgagtgcacgagtgagatcaagatccagag

SEQ ID NO: 711039 - DNA, 75 bp, Homo sapiens
ctgcagcggccggggaacgcgcgctgcgcggactgcggcgccccgggtaaatggagtagatttagtgggcaaatc

SEQ ID NO: 711040 - DNA, 100 bp, Homo sapiens
tgtgcacctatttttccaacaacttgggagactaagagaatggtcaagaacctggagaaggaactagcactactcaagcaggagctggctatccatgaca

SEQ ID NO: 711041 - DNA, 137 bp, Homo sapiens
gcgagtcacggtcctgcctgcgaagaactcccagggcgaccttggggctgaggagtggagattcacggatccatccgggtggtccgggcaccactggcgcccctctgcggctattccccagttccattttctgaagc

SEQ ID NO: 711042 - DNA, 100 bp, Homo sapiens
ctcctaccacttgccccaacttggactatagcgttagggaacaaagggattgtttccattgccaccctaaccgtgctggcctatgaacgttacattcgcg

SEQ ID NO: 711043 - DNA, 73 bp, Homo sapiens
ggcttcagcaccgcgcccatggcagagccagaccaaatcttcccaaggctgcagacaccgacggatttgcttt

SEQ ID NO: 711044 - DNA, 87 bp, Homo sapiens
agcagctgctggcctgtgccggggtggaagctgagcgcgtggtggagttttcctgtgatccactccttataccgccgcacaggtgcc

SEQ ID NO: 711045 - DNA, 87 bp, Homo sapiens
aaacaccactgaagcattgccaagctggctgcaataaaacttggccgatatggtgaagaccttctcttctatctctattacatgaat

SEQ ID NO: 711046 - DNA, 75 bp, Homo sapiens
acggagccagggctgtagcagagaggctagtccatctaggctttcagtggtctgcagatctccaggggagcccac

SEQ ID NO: 711047 - DNA, 98 bp, Homo sapiens
ttaaatgagaagagtgttcaaaattcaattacacagaaatctgaaatagagtactatgctatgttggctaaaactggtgtccatcactacagtggcaa

SEQ ID NO: 711048 - DNA, 75 bp, Homo sapiens
caagctccgggcagccctggcctgcagcaaagagttgtggatcctgaacaggaggtcacaagccccaaagtggac

SEQ ID NO: 711049 - DNA, 75 bp, Homo sapiens
ttttatactcaaggcaaatgaacttcttcatgctggtcaagatgtccaaggaacaagtgtgattgcaaatctccc

SEQ ID NO: 711050 - DNA, 100 bp, Homo sapiens
cttgtcaggtctgaagaaaacatctcaggccacccagtgctcctgcagaagatcgttcaggaacacccgacagcattgcttcctcctcctcagcagctca

SEQ ID NO: 711051 - DNA, 74 bp, Homo sapiens
agactgactacgtgctcaacaatgactcccaagacagctgggctgcgaccaatggaaacaaaggacattccagt

SEQ ID NO: 711052 - DNA, 103 bp, Homo sapiens
gaaggcgcgagtgaggaaaggaggtactgtaggtgtcatggagaaactccagctgggcccagagattctgcagcgggaaaatccaaggcttatttatgccagg

SEQ ID NO: 711053 - DNA, 88 bp, Homo sapiens
caggaggaagagcatgaccttgttgacgatgacatcaccactgggacagtatggaaattaccagcagtgaaaaagtacttacattcca

SEQ ID NO: 711054 - DNA, 74 bp, Homo sapiens
cagctatcgccgctgactgtgcccctgtggaaggagctggtggcgcggtggcgttctcccccggaaacctcagc

SEQ ID NO: 711055 - DNA, 75 bp, Homo sapiens
atgctttaacatacagccactagctctacattaatcatactcctccaccactgtccaagagtaaggagagagaaa

SEQ ID NO: 711056 - DNA, 100 bp, Homo sapiens
ataccatagaagatgttcctccctggtacctgtgtatatttctggggctacagatgagaacggtccagaggagaagcaaagtgtggaagaaatggaagag

SEQ ID NO: 711057 - DNA, 83 bp, Homo sapiens
cccctccggccagggccgggagccgggccggcctagccagcaaaatgatgcttcaacacccaggccaggtctctgcctcggaa

SEQ ID NO: 711058 - DNA, 106 bp, Homo sapiens
gcaggccctgagcacgctgctgtgtgagcagcagatgtcacacaccaagccctacatcaggaagaaggctgtgctgatcatgtacaaggtgttcctgaagtacccc

SEQ ID NO: 711059 - DNA, 74 bp, Homo sapiens
atggggaacgctcacggactgtgtggctggctgaaggcggtgcaggtcctcatggtgctctccctcattctctg

SEQ ID NO: 711060 - DNA, 75 bp, Homo sapiens
gcagctcaaccgcgggcctggtgacatcaacctgcaggatgagccagcttaccaaaacctgaggcagaaagtgga

SEQ ID NO: 711061 - DNA, 75 bp, Homo sapiens
cagtttcctgcttactgcttcattatggattatacagatgactccggaattgatgataaaagcctgtagctttta

SEQ ID NO: 711062 - DNA, 100 bp, Homo sapiens
gttcctgccgcccgtctgcatggcccactgcatccgcctggcgctcatccgcttccacgtcaagagtgcagcagctgccccgagccccgtgcttggcaac

SEQ ID NO: 711063 - DNA, 100 bp, Homo sapiens
agccactgaaggagtcccgcaggaaggaggccttcttggtctggaacagaatctgacagtgatgaatcagtaccagagcttgaagaacaggattccaccc

SEQ ID NO: 711064 - DNA, 100 bp, Homo sapiens
agcaggagctgcgtccggcaggagacgaagagcccgggcggcgctcgtacttctggccactgggcgagcgtctggcagctgggctcaaaatgcagagaac

SEQ ID NO: 711065 - DNA, 75 bp, Homo sapiens
ggcagaacatgctagtcatggagatcgagaggaaataatgagccggagaattttcatccttgggccttctcatca

SEQ ID NO: 711066 - DNA, 100 bp, Homo sapiens
ccagggcccgcgggccaggagagcgctcggcgggagctacagggagctggccgactgcacctggcacatggcggagaagctgggctgcttctggcccaat

SEQ ID NO: 711067 - DNA, 101 bp, Homo sapiens
caccagcatccctgcagccttctggtataccatcgtcaccatgacaacactaggatgtgtccgtgaccctcagagatcctttgccctgggaatccagtgga

SEQ ID NO: 711068 - DNA, 76 bp, Homo sapiens
gaggaggttttcaggaccaaaattgtggaaaagtcactctgctgagctgactgctgcccactttggaggaggcggt

SEQ ID NO: 711069 - DNA, 75 bp, Homo sapiens
cgcgcgacgagcaggtggcggcggctgcaggggtccctgtgaaggtgaccaacgtcaaggatggcaccacccacc

SEQ ID NO: 711070 - DNA, 78 bp, Homo sapiens
aatctgcctcggagacgttgataacgatacgcacatcctcatggcccagaggcaggtccaggtggcagaggaaggcct

SEQ ID NO: 711071 - DNA, 100 bp, Homo sapiens
atcgcgggacagggaaaatgaaagactttggaagtcgtcaggaatttgactcttttccacagagtgaaatagcctgtctttcaagccaagaaagccttct

SEQ ID NO: 711072 - DNA, 100 bp, Homo sapiens
ctggtctcgtcttcgcccttctgtgtcctctgctcgtagaggcccagcctctgtggccctgtgacctgcaggttgtggttcaccttgaaactattctagg

SEQ ID NO: 711073 - DNA, 100 bp, Homo sapiens
gcgaagaagctgcagccgcacctggccaaggatgtccaacatcacagtcacatacagagatggccgagtggcacagctggagcaggtatacatccgtggc

SEQ ID NO: 711074 - DNA, 50 bp, Homo sapiens
ggacttctagcctccagaactatacttggagatgaagttcaacttttttc

SEQ ID NO: 711075 - DNA, 82 bp, Homo sapiens
cccggcggcgggccgaggagccgggcgcaatggagcggaagaggcctccggtgtggctgtctctgatggtgtcatcaaggtg

SEQ ID NO: 711076 - DNA, 80 bp, Homo sapiens
cgtgcctcagcctcctgagtagccgggactacagacgggctcatcttcgcttgtgcctggagaagttgaaggggctggtg

SEQ ID NO: 711077 - DNA, 75 bp, Homo sapiens
gaactcggagtggtttaaatttgaggctaatagctcgtcagcttgctaaaatccatgctattcatgcacacaatg

SEQ ID NO: 711078 - DNA, 100 bp, Homo sapiens
tcacagctgcccaatgcctgattgacggaatgtgcaaagtagcaattaactggtctggagggtggcatcatgcaaagaattaatcagctgtgttcagcga

SEQ ID NO: 711079 - DNA, 83 bp, Homo sapiens
ctcagtaatgctggggaccctgagatcgtcaagtctcccagcgaccccaagcaataccggttcatctgcagaagccagcggac

SEQ ID NO: 711080 - DNA, 100 bp, Homo sapiens
aaagaacaagagaagacctcagatgtgaagtccattaaagggagatgaacagcgactgtacgagtttattgttcgccatttcctggcttgctgctcccag

SEQ ID NO: 711081 - DNA, 95 bp, Homo sapiens
cgtgtatgagggattcatctcggctcagggcatcctaaagttcctctggaatgcattgggtgggagagaaagttctatgtcaactcttctggcag

SEQ ID NO: 711082 - DNA, 82 bp, Homo sapiens
ccttccccacgcaaccccagatccatttacactttacactgccccagagcacatcagctatgtgccccagctctcaaacgac

SEQ ID NO: 711083 - DNA, 83 bp, Homo sapiens
cggagctggaggaccttttgtgggatgcctcacggctgctgaggggctgcagcgggtgaaatgacaatggatgctctgttggc

SEQ ID NO: 711084 - DNA, 98 bp, Homo sapiens
ttatcaggacatacttccaacaatatttacgaggcagtcaagtctcagctgagtctgctctgatcacccaacaagacctagctccccagcagagagcg

SEQ ID NO: 711085 - DNA, 98 bp, Homo sapiens
aagccagagaagcccagtcttccgaaatgcggtgctcaggttggtgttcgaggaagagacattgttgttcttggtgtggagaagaagtcagtggccaa

SEQ ID NO: 711086 - DNA, 96 bp, Homo sapiens
ctgagggtcaagaattgccgcttccttttagttactatttcagatgcagaactccaggaagttgtaaaagtaggccaagcgagtgaaattgcacgt

SEQ ID NO: 711087 - DNA, 74 bp, Homo sapiens
agctcctgcccctgtccgggggatgactgattctcctccgccaggatgatctgtctgctgtgcgtccggaccgc

SEQ ID NO: 711088 - DNA, 100 bp, Homo sapiens
ctggaagacatggccactccagtcggtgttgagcacggcgagcagtctcaggcctttagtgatgatgtgcaccaattccagctggacatcactgtgaaaa

SEQ ID NO: 711089 - DNA, 75 bp, Homo sapiens
aaaggagcaacagtttacagcccttccagatacagctaccagctgaaggaagaggatcaccttccaagacaaaac

SEQ ID NO: 711090 - DNA, 90 bp, Homo sapiens
cccagcgaagcccagataagaagacgtgccccatgaagtagatctctggcttcctgctctgtttgttctggttgccctggaaagcctgct

SEQ ID NO: 711091 - DNA, 97 bp, Homo sapiens
tgggtcagtccgccgctcaccccgcggccgcaccttcccgccttctcaggagtctcgctgtgtcacccaggctggagtgcagtggtgtgatcttggc

SEQ ID NO: 711092 - DNA, 100 bp, Homo sapiens
ttgaacttaatacagcaagaaagaccatcaagtttaccagctagacagcaacaagcagaattggcccaacaggaatggcttcaaatgcagcaagctgccc

SEQ ID NO: 711093 - DNA, 146 bp, Homo sapiens
cctccggaggcaggttcggctggaaggaaccgctctcgcttcgtcctacacttgcgcaaatgtctccggtacaatgttagctgttctaaaaaatttgcacttagtcgttggaatcgtaagcctgataatcaaagtcttgggcatcg

SEQ ID NO: 711094 - DNA, 78 bp, Homo sapiens
tgcaagcaagcctagccttccagggagaaagagcaacaaggcgtgcaggtattttgatgaaggacgtgggagctgccc

SEQ ID NO: 711095 - DNA, 144 bp, Homo sapiens
gacgaagacaacgacagcgacggctacgccgaagcactcgttccgggggtgaagcctcctgcgccggccttgcctcggggaagacatgtaaggaatttgcataagacagttatgcaaaatggagctggaggagctttatttgtg

SEQ ID NO: 711096 - DNA, 51 bp, Homo sapiens
cgaggagcgcctgcctgaggagagcaggtatcactcctccttgcttcaatc

SEQ ID NO: 711097 - DNA, 98 bp, Homo sapiens
tggaatacagctgcacctaaattctctgttccagaatctgtcatgaaggaaactctatatccaaaatatgagacttcacagagaatgcagttgtcttg

SEQ ID NO: 711098 - DNA, 100 bp, Homo sapiens
ccggcggccgcggtaatgctggtggtctgcatcaccaccggatcaacttcgacaaatagtcacgagaagagaatgccttctagatgcaaaatcacctcca

SEQ ID NO: 711099 - DNA, 83 bp, Homo sapiens
gatttatagctaagactccaggacacccctgaagccgagaaatggtgaccaagaatatggcccaggtgaccaaagccctggac

SEQ ID NO: 711100 - DNA, 75 bp, Homo sapiens
ccgcctgccccggtgcgcagacagagctattccagcaccagcagagcactggagaggggtctcctgaaaaccctg

SEQ ID NO: 711101 - DNA, 89 bp, Homo sapiens
tctgatgtctacaggcgctgacggccacccctccagggaaagcgctctagcgagtgctgatttagaagaagaaattcaccagaaacaag

SEQ ID NO: 711102 - DNA, 96 bp, Homo sapiens
caccgtttggcatcccgactgtaagcaatctacgaagaccgaggaaaagctgcgggggtgttgctgtctggtggtacagagaaggatccggcaggt

SEQ ID NO: 711103 - DNA, 120 bp, Homo sapiens
cctgatgttgctaaatgtagacaatggttagagaagaattttccaaatgaatttgcaaaacttactgtagggtgttgaagatgctttttacacactggtaagagaaatacgccagtaccg

SEQ ID NO: 711104 - DNA, 100 bp, Homo sapiens
cagatgacaaaacttcaagccaaacatcaagcagaatgtgatttgcttgaagatatgaggtactaggttttgacaagcttgcatcatgcgtgagtataag

SEQ ID NO: 711105 - DNA, 95 bp, Homo sapiens
cttcaagacattgcttcgggaagccatccatttagccaggcttctttgctaaagaatgatgagactaaggccctcactccagcttccttgcagaa

SEQ ID NO: 711106 - DNA, 74 bp, Homo sapiens
atcatgggcaaaggacagatccagatgtgaagttcatttccaatccgccctccatggtggcagcggggagcgtg

SEQ ID NO: 711107 - DNA, 119 bp, Homo sapiens
aacttctgggaggactcggtccctgcctcgcagcagatgttccctgtcactcagtagttgacggactggacaaagcttctatagcaaactcagatggccccacagcaggttcccaaaca

SEQ ID NO: 711108 - DNA, 100 bp, Homo sapiens
gctgtctggcatgggcctctccaccgtgcctgacctgctgctgccactggttttgggatttgagattgacgcggtgaactctgtccagttttcaaaccac

SEQ ID NO: 711109 - DNA, 100 bp, Homo sapiens
agaggaggaggaggcggaggtccaagcggaaaggacccttgaacatctgtgaagaaatgactattctgcatggaggcttcttgctggccgagcagctgtt

SEQ ID NO: 711110 - DNA, 109 bp, Homo sapiens
ccgaacatcagggccctccagactcaggcgccccaacactatacacagaatgggattttacatatgctggacagaaataagagaatcaagccccggccagaaagattcc

SEQ ID NO: 711111 - DNA, 100 bp, Homo sapiens
ggagctggccctgggcagggcacgaggcctctgagcctagagagtgaaggcgctgagcaacagtgtgtacaagggcgcctcaccctatggctccctcaac

SEQ ID NO: 711112 - DNA, 83 bp, Homo sapiens
tttcaatgtccattccgctgtgttgattgaggacgttcccttcacggagaaagattttgaatggccaccatgtctgggagatg

SEQ ID NO: 711113 - DNA, 100 bp, Homo sapiens
ctgtaggcctgcaggaggaggcagaactgccagccaagatcctggttgagtttgtggtgggtggttctcttcccaaagtggaagccaaattcatcaatta

SEQ ID NO: 711114 - DNA, 100 bp, Homo sapiens
gtgaatttaaaggagcagccctggtgtcacctatcagtaaaaggtaaatgagctggatggtatcccgttgatcctggacaactgcaacatcagtgacagt

SEQ ID NO: 711115 - DNA, 86 bp, Homo sapiens
atgtccttaaagcaattgagcaggctgatctactgcaggaggaactcttgcaagaagaaaggactatgagttcaactttagaggga

SEQ ID NO: 711116 - DNA, 74 bp, Homo sapiens
ccggagagttctgcatgttgattcgtatgagagaatcgaaatcccaatccatattgtacctcatgtcactatcg

SEQ ID NO: 711117 - DNA, 71 bp, Homo sapiens
gagtctcagagctgtcagaaagtatcaccttttgccatgatagcatttctttcattggacagttccttaca

SEQ ID NO: 711118 - DNA, 100 bp, Homo sapiens
agaaagccttgtaaccatcaggtagatacagcaccaacgggtgtgaacggcatgtctgtggatgagaagcctgactcccccatgtatgtgtatgagtcca

SEQ ID NO: 711119 - DNA, 99 bp, Homo sapiens
gggggaatgtgggctttgtgttcaccaaggaggacctcactgagatcagggacatgttgctggccaataagatgcttgtggttggtggcatcgaccggg

SEQ ID NO: 711120 - DNA, 83 bp, Homo sapiens
ggcggctgatttagaaggaggttcaggctacggtgagccgaagtgggaaagctcatggagcttcatggtgaaggcagtagttc

SEQ ID NO: 711121 - DNA, 75 bp, Homo sapiens
attttccccaagcactctcaggaacctggcaacaggcaccatacaggaagattacttgagagagctgctgacaac

SEQ ID NO: 711122 - DNA, 100 bp, Homo sapiens
caaaggggaggttacgcagcaaaccatccagaaggtgaggcggaaccaaccctcctggccatgggaggggccgtggtggacgagggccccacaggcgtca

SEQ ID NO: 711123 - DNA, 100 bp, Homo sapiens
gggcaggagcgcttccgcaccatcacctccacattctgaaagtcaagaagacatcatccggaatattgccaggcacctcgcccaggtcggggacagcatg

SEQ ID NO: 711124 - DNA, 75 bp, Homo sapiens
cctcggcgtgctgcgcctccgcggctgccctgcgccaggtgctggagaatctggtaaaagcaccattgtgaagca

SEQ ID NO: 711125 - DNA, 74 bp, Homo sapiens
agatcaatggaaccatgaacggtgggagggatgaaggaaattatctggacgatgctctcgtgagacaggatgcc

SEQ ID NO: 711126 - DNA, 100 bp, Homo sapiens
ccacagactgtgaaaatcttctgaagaaattattagtcctgaatccaataaagagaggcagcttggaatacatagtactctgaatcaatggagaaatgga

SEQ ID NO: 711127 - DNA, 82 bp, Homo sapiens
gacgtcttgcctgtgtcccacttgttcgcggcctataggtggctccagccccgggcctggctggggttcccagacgcctggg

SEQ ID NO: 711128 - DNA, 89 bp, Homo sapiens
cggcgctaagccgggagacaagatccgatctactgagagctgcgagtggttacccaggctgtccttacccacctggtggtccatatcct

SEQ ID NO: 711129 - DNA, 82 bp, Homo sapiens
tcccccatctacatcgatctgcggggcatcgtgtctcgaccgcgtcttctgagtcagcccgcggcgccatggctcacgtcgg

SEQ ID NO: 711130 - DNA, 100 bp, Homo sapiens
caggatttctgctgcagctactttcatacagcacgagtgcttccagaaatctgaagctcggaagaggcctactttggggataaaggattatttggtcttc

SEQ ID NO: 711131 - DNA, 82 bp, Homo sapiens
tgatattcagagccttggaagtcaacactgtcattggttctaaagagtggtgagtcagaagagacgtcaggcagcaagcgac

SEQ ID NO: 711132 - DNA, 75 bp, Homo sapiens
aggttttcctaagccatcccctggcggaaccgcccccaggaaggatatggagtaatagtactaaatcccaatgaa

SEQ ID NO: 711133 - DNA, 100 bp, Homo sapiens
ggctgaaggtctgacatgtttgatcaaggtgggagctgaggctgatcagaactatcagaactacatcttaagggcatcaaacacttggcttgttccagaa

SEQ ID NO: 711134 - DNA, 73 bp, Homo sapiens
cctgtgaccacccctgaagaaattgcacagagcatggatcattttgatgacattggtcccagtgttgtaatgg

SEQ ID NO: 711135 - DNA, 99 bp, Homo sapiens
taattcagtggtgaatcctaacaaggccaccattggtgtggggctgggcctgccatcattcaaaccagggatgtccagctcgccgctgtccaagaaacg

SEQ ID NO: 711136 - DNA, 100 bp, Homo sapiens
gtcgtctacacaggcgcgggaatcagcacggagctaggaattaagcacccactccacaggaagaagcttgttttagcagtgaaagccatcaacaccaaac

SEQ ID NO: 711137 - DNA, 97 bp, Homo sapiens
gccggatttagagccaagtcctcaaccacctcttagtagggcagaagccattaagcagatgatggatggcccaggagagaatgatcctgatttgaaa

SEQ ID NO: 711138 - DNA, 90 bp, Homo sapiens
catgtcaggcagcttatgatgccaatttgtcccatggtctcctctgagcctccggcctccataagacccaaaacagatgacacctcttcc

SEQ ID NO: 711139 - DNA, 89 bp, Homo sapiens
ccagagacctacgtggcagctgtgaaaaaagccatttccgaaggtagcacaggcggagtgcagcggaggcccctgccgctgccgtcatg

SEQ ID NO: 711140 - DNA, 83 bp, Homo sapiens
cgcgtcgtggggcgagcggcaggggcagggtggacaggaagcagctcagcccagcctgggagaggccaagggctgcctcctat

SEQ ID NO: 711141 - DNA, 50 bp, Homo sapiens
caggagtcatcggacgccagaatctgttaaacgagaagattcatcaccgc

SEQ ID NO: 711142 - DNA, 75 bp, Homo sapiens
tgtttgcttccactgcaatcgtgttatagaaggtgatggtatcttctcagtcctcagcttggcctctgagtgcac

SEQ ID NO: 711143 - DNA, 100 bp, Homo sapiens
tgaacgaggagtacgagacgaggttcctgtgcaactcttcacagctggtggaggccattgtcttgccaatgaaccacaaggagaagtttgagaacttggg

SEQ ID NO: 711144 - DNA, 75 bp, Homo sapiens
cgaagagctacagaatatgctccaaagaagagataggagcatgctgctatgtggaatgttcagctttaacccaga

SEQ ID NO: 711145 - DNA, 50 bp, Homo sapiens
caggaatgacagcatctatgaggagatgcagattttcttttacaatccag

SEQ ID NO: 711146 - DNA, 83 bp, Homo sapiens
gtggcggcgctggaagggatgtcgtctcagcagtgctcgggcgcaggccccttcccagctgcctgcctgccctagccagctcc

SEQ ID NO: 711147 - DNA, 100 bp, Homo sapiens
cctgccttccttgcagaggccatggaggacgaggagagacagaagaagctggaggccggcaaagccaaggtgtacaaagataatcaatgctgattcggag

SEQ ID NO: 711148 - DNA, 100 bp, Homo sapiens
cggagctgttcctattgggccatcttggctccaccaccctgatacactgcctctaggactgggacagatagccactgagtacctgcttcaaatcaccctg

SEQ ID NO: 711149 - DNA, 95 bp, Homo sapiens
cgcgggcactggtcctgaagggtatccctgagagcctccggggagagctgtggctcctcttctccggtggtgggcacatcaaagaggtcatcgtg

SEQ ID NO: 711150 - DNA, 83 bp, Homo sapiens
gtccttagggaggaccccagacaccggagactgggaaatggatatttggccttgacattaaaggcagagactgtggcaatgag

SEQ ID NO: 711151 - DNA, 100 bp, Homo sapiens
tcctggccctggccctgatcatcctgctgggcttcgtccagatcgggaaggatcgcccaggaccacaccgcagcgtaactgcaggcctctcagcgaaaaa

SEQ ID NO: 711152 - DNA, 100 bp, Homo sapiens
tctcttcgtgggagtcatgaccgcccagaaatacctgcagactcgggccgtggccgcctacaggttaagaaggcttttttgctctgtagcctggacgtac

SEQ ID NO: 711153 - DNA, 100 bp, Homo sapiens
ctgagaacagcctgcattggaatctacagagaggacaactaatatcctaagtgtgaacgtgaagtccccagccctgctgctgagccagttgctgccctac

SEQ ID NO: 711154 - DNA, 101 bp, Homo sapiens
ggaaaacaacttcgagggcagactctactgagatgaagaaagaaaaagaatacctgctcagctccagagacacgtaaagggacagagattgggggacagaa

SEQ ID NO: 711155 - DNA, 90 bp, Homo sapiens
cctctttgcaacatttcaggaaaacagagaaagaagtgataggagggctctgtaggtcataaagaactcccccgtgaagacgtttgctag

SEQ ID NO: 711156 - DNA, 101 bp, Homo sapiens
agaaaattcaagatgaacaaaccacatatgtgttttttgacaacaaaattcaggattgaaaaggaagatcaggccaaccccaaagaagaagtgaccaagga

SEQ ID NO: 711157 - DNA, 51 bp, Homo sapiens
ctttataaattacccagtctcaggttggcaaaagcagcttttgatgatgca

SEQ ID NO: 711158 - DNA, 99 bp, Homo sapiens
ctcagaacatgggtccgtggtcgtttgtttctccaaggtttgaaaagcagctggcctgcaagggaaactttatggtgatgttccttttatagaagaaag

SEQ ID NO: 711159 - DNA, 75 bp, Homo sapiens
ctggccgcgggctccatcagcatggctgaggctgcagagagactaagggcacttcctgaggttcattaccacctg

SEQ ID NO: 711160 - DNA, 83 bp, Homo sapiens
attttaccagatcgaatctgggccaaatagaaagagcagcccgacggccatggaggctgaagagacgatggaatgccttcagg

SEQ ID NO: 711161 - DNA, 100 bp, Homo sapiens
gctggaaaagctaccagagacgagctgccctacacgttcgcagaaatggcacctcgaaaggggaaggaaaagaaggaagaacaggtcatcagcctcggac

SEQ ID NO: 711162 - DNA, 75 bp, Homo sapiens
attccaagtaactcttatttggttatttcttatgagggtcatggatatcccctatctaaacttggaaggaccaga

SEQ ID NO: 711163 - DNA, 96 bp, Homo sapiens
gtcatggcggtcgcggggcccgcgcccggagctggcgccaggttttcctttggaatatggataaatacaccatgatacggaaactagaaggacatc

SEQ ID NO: 711164 - DNA, 90 bp, Homo sapiens
atcttccagctcatctgtgtgctggccatcatcgtacccattcccaagtcccacgaggcgcctacaacacagcagtcccctcaggatgag

SEQ ID NO: 711165 - DNA, 90 bp, Homo sapiens
gatcctctcatctcagcctccaaaagtgctggcattacagaactatttgtcaatgaagattgtaaagccaaatgtgtaacaaaggcaaag

SEQ ID NO: 711166 - DNA, 100 bp, Homo sapiens
ccagcatgtactggtgtgtggggccggaggagtcagctgtgtgtccagaacgtgccatggagacgcttaacgtgagacattatttggtgaaatgccctca

SEQ ID NO: 711167 - DNA, 100 bp, Homo sapiens
acaatcatgggaatttccaaggggattcaaacttcaacagaatgtggcaaccaggccatccggctgtccttagagcaagccctgcctcctgagccaaagg

SEQ ID NO: 711168 - DNA, 100 bp, Homo sapiens
gacaaacccaccttcatcaaaggggccaaatttgagtttcatcatggtgactatgaaaaacagtttctgcatgtactgagccgcaaggacaagactggaa

SEQ ID NO: 711169 - DNA, 101 bp, Homo sapiens
ccactctggagaagagtcagaatgggggcgtcggggaggagagtattatcactgctggaggaattttgtcaactacccacctggggatgaagctcactggc

SEQ ID NO: 711170 - DNA, 90 bp, Homo sapiens
ggaggaggaccacgcctgcatccccatcaaggtcgccccacggctgaattctcggtgataaaggcgcccactggaccctcccaacgccca

SEQ ID NO: 711171 - DNA, 96 bp, Homo sapiens
caaagagatcatagccgagtatgaaagtcaagtcaaaggtgcgtatagcagcaaaattcatcattcatgcccctcctggagaatttaatgaggttt

SEQ ID NO: 711172 - DNA, 98 bp, Homo sapiens
tgggcgtaggactctccaagccagggagaaggtgtgacgtttcttggtcataggagggagtgtgatctgacaccagaggacttaatataacattgcag

SEQ ID NO: 711173 - DNA, 90 bp, Homo sapiens
agaattaaagaaaatacgagtaaaatatggtttacaggtttttttaacatgtggggatttggaagagtcagcaaacaagccagccaacct

SEQ ID NO: 711174 - DNA, 89 bp, Homo sapiens
gcatgaggccccttctcccaggaggggaggcacggggatatgagactttctactcggaatatcctgagtgttgcgtggatgtaaaaccc

SEQ ID NO: 711175 - DNA, 98 bp, Homo sapiens
agaaggatgacaccggagtttgacgaagaggtggtttttgaggtaaagctttccagtttgaatttagatgatcacgcaaagaagaaattaattaaact

SEQ ID NO: 711176 - DNA, 75 bp, Homo sapiens
ccgccgccccggcccggcgcgcagtgaatcagaaatcctgcaccatgagaagcagtacgagccattctactcatc

SEQ ID NO: 711177 - DNA, 74 bp, Homo sapiens
gggagcggcgcggcggcgcgggaggacggggaggtttactgcatcgacgcgcggttctacgggaacgtcagccg

SEQ ID NO: 711178 - DNA, 100 bp, Homo sapiens
tagatcatgaatacacaacaaaggaggttttccggaagaacttcttcaatgactggcgaaaggccagcactccttgcccgaggacagagatggcgagcgc

SEQ ID NO: 711179 - DNA, 75 bp, Homo sapiens
aaccagagattcatctttcatgcagtgacatgttgataaaaaatgatggtcagcccaaggccaaccccactgtca

SEQ ID NO: 711180 - DNA, 96 bp, Homo sapiens
tcgcagggcggcctgcagctgggccgcggccgaggaggcagcgcgacctccgcacgagaatggatcttggagaatgtctgaaagtccatgacctgg

SEQ ID NO: 711181 - DNA, 100 bp, Homo sapiens
ggacctctatagagatgtgatgctggagaattacgggaatgtgttctcactggtgtgtaagctgctgagcacagagctacaggcggaactgagtcgcacc

SEQ ID NO: 711182 - DNA, 74 bp, Homo sapiens
ggggctgatcttcgccaaactgtggagcctcttctgtaaccaagaggcatgggcataagaatgacagaaccagt

SEQ ID NO: 711183 - DNA, 75 bp, Homo sapiens
gcttggagcacttcctattccactggattgggaaagaccatggcagatataattgaccctgcaatcctgcgcccg

SEQ ID NO: 711184 - DNA, 100 bp, Homo sapiens
agatgaggtgatggcaacggccaacttcggcaagatccagatcgggatttacgtggagatcaagcgcagcgatgttactccacaggatccgctgaacata

SEQ ID NO: 711185 - DNA, 100 bp, Homo sapiens
gtcaactcaaatgcaagtccaagaggaggaggaggcggaggtccaagcggaaagagagcagcagcctgcattcagcctgtgtccatgacagcaccgtgca

SEQ ID NO: 711186 - DNA, 83 bp, Homo sapiens
ttacaagccagcctctgggaccgagctgtgattgggttattatacccctgcattgacagacatctaggagaaccacataaatt

SEQ ID NO: 711187 - DNA, 100 bp, Homo sapiens
gacagattacgccccctatcctatccgcaaacaatacggactcagaggaagacgaagaattcctgaaggacgagtggcccgcccaaggcccctccagctc

SEQ ID NO: 711188 - DNA, 90 bp, Homo sapiens
ccgaggatcaggaaaaactatgaagaaaaactgctgtccagtacatagaaagcagtgattcagaggaaattgaaacaagtgaattgccgc

SEQ ID NO: 711189 - DNA, 100 bp, Homo sapiens
ttactgtaaatgtagagggcactaaaacattgccagatgatcagctattcaagatctctggcagtggaggaagtctctttaagaaaatagtttaaacaat

SEQ ID NO: 711190 - DNA, 83 bp, Homo sapiens
ccagaagaaactcaactggtgtcgagaagtccggaagcttgtggcgctgaaaacgaacggcagaagctcctcctggggtagag

SEQ ID NO: 711191 - DNA, 97 bp, Homo sapiens
ctgtcctgctgatgaagtctacgttcattcagggcctgctgtggaagaccagccccaaagccaagaaggatcaagaaggtggagaagaaaagaaatc

SEQ ID NO: 711192 - DNA, 74 bp, Homo sapiens
agactgccacctgctggtccctggacccagaggagacacaccttgaagaaacaacagagagccaacagaatggt

SEQ ID NO: 711193 - DNA, 98 bp, Homo sapiens
gggtcgcagttcttgtttgtggatcgctgtgatcgtcacttgggggatatgagactttctactcggaatatcctgagtgttgcgtggatgtaaaaccc

SEQ ID NO: 711194 - DNA, 83 bp, Homo sapiens
ctactcggccctcattctgcacgacgatgaggtgacagtcacgacctgcctagagctggaacgttacctccagagcgagccct

SEQ ID NO: 711195 - DNA, 97 bp, Homo sapiens
gaagagaaaaagcccaggcataaaatcatctccatattctcaggcacagagaaagaaaagagtctcatcgtggaaggcaagagggaaaagaaaaaag

SEQ ID NO: 711196 - DNA, 97 bp, Homo sapiens
attttggcattgacatttaattttagggtcctttatatagaagggagagtagtggtggccatgttcccccgtttgccttcacaaaaaccttgtgaat

SEQ ID NO: 711197 - DNA, 97 bp, Homo sapiens
ggagaccagacctactgcagccacgcgggcgagcggctgtgtggatgtcggcgaagccgcgggcgagttgatggagaaccttgtgacctgtctttga

SEQ ID NO: 711198 - DNA, 75 bp, Homo sapiens
ccagactccacactcctagcaagatgggtttccagatttccaggattctgtgcaaacactcttccagcaggctag

SEQ ID NO: 711199 - DNA, 101 bp, Homo sapiens
actcgtgcgaggaggagctcagcgggcttgggacacttgacattcagggacgtggccatagaattctctcaggaggagtggaaatgcctggaccctgtgca

SEQ ID NO: 711200 - DNA, 73 bp, Homo sapiens
cagcacgcgcctgcttcccgtctgcgcgagtccacgcagctccccagactatagggtatgaccccatcatttc

SEQ ID NO: 711201 - DNA, 100 bp, Homo sapiens
gtccaggccatgaagagtcctgaccacaatggggaggacaacttcgcccgggacttcatgggaaaaagacctcgatgaagttctgcagacccactcagtg

SEQ ID NO: 711202 - DNA, 90 bp, Homo sapiens
agcactgggctgagactcaggagacctggtttctagccccagctgtacctctaattgtaaccttgggtacatgatgttgattgatggcac

SEQ ID NO: 711203 - DNA, 78 bp, Homo sapiens
atggtgctggatgaaattagaaagttgaagctttatatcaaactacatacccagaatatctccagtacatttatttgg

SEQ ID NO: 711204 - DNA, 50 bp, Homo sapiens
gacatttcttcggcattctgcaacaggagcagcatccagttggacttccc

SEQ ID NO: 711205 - DNA, 75 bp, Homo sapiens
gcccagccagggcagggtggagagctgcagctgcagttaccaccaccctgtgaatctgcctgcacagtaccaaca

SEQ ID NO: 711206 - DNA, 80 bp, Homo sapiens
agctgatttggcctctgtgctcccctccgcaaggggatcgttttctccagagctggactggccattatggaggaggagct

SEQ ID NO: 711207 - DNA, 75 bp, Homo sapiens
caaggccatggcaaaataactggctcccagatgtcaagaatatgaacacgtggctgctgttcctccccctgttcc

SEQ ID NO: 711208 - DNA, 75 bp, Homo sapiens
gattatggacccggccgaggcggtgctgcaagagaaggcactcaagtttatggtccccatcctcatcccgtgcca

SEQ ID NO: 711209 - DNA, 100 bp, Homo sapiens
ggcggctcagttgtccatgaccctgaaggtccaggagtacccgaccctcaagcccatcatcttcgtttcggacagagcaaacagcaacaaggagctgggt

SEQ ID NO: 711210 - DNA, 100 bp, Homo sapiens
ggaaagcagggatgacaggtgtcgtctctttgagtatggccagggcagcaatggatttttgcatgaacatgaacacaaaagcaaacaggaagaagttggt

SEQ ID NO: 711211 - DNA, 75 bp, Homo sapiens
gaagagctacagaatatgctccaaagaagagggtgataaaagaaaatgtggctgaagttacccgaagttcagctt

SEQ ID NO: 711212 - DNA, 100 bp, Homo sapiens
ccactttccctactttaagcacattgccaagccaggctggaagacactggcttcatgtcctattgaccgtaaaccttttcaggcagtgtttaaattcagt

SEQ ID NO: 711213 - DNA, 98 bp, Homo sapiens
gacagttatatgcacttagaaataacaggttatggaggttttgatgactatggtggctataataattacggctatgggaatgatggctttgatgacag

SEQ ID NO: 711214 - DNA, 75 bp, Homo sapiens
tggggactgcaccaaccttcctacgtcaaagaccgctgctgcagtaggcttccagctggtctttttaccctttgc

SEQ ID NO: 711215 - DNA, 90 bp, Homo sapiens
agccgggctgagaggagcgtggctgtctcctctctccgccatgcctccagggtcgtatagacctccccctcctatgggcaaaccaccagg

SEQ ID NO: 711216 - DNA, 98 bp, Homo sapiens
cggaacccgagctggagctgaagcgcaggctgcggggcgcggagtcgggaggtgcagtacgtgattcaagggtatcacaaaagaagagagtatattgc

SEQ ID NO: 711217 - DNA, 82 bp, Homo sapiens
tccaacagaacgacctagtatttgaatttgctagtaacgtcatggaggatgaacgacagttatcctcaaaataagagacctg

SEQ ID NO: 711218 - DNA, 90 bp, Homo sapiens
gaatcttggtgtttggacataggagttggattggatgctgctggcaagacaaccattctgtataaactgaagttaggggagatagtcacc

SEQ ID NO: 711219 - DNA, 83 bp, Homo sapiens
agcaagttgatggcaaggactgtgctctgtctgagttctggcacataaagtttgcctgcaatggtactgtaattgagcatccg

SEQ ID NO: 711220 - DNA, 75 bp, Homo sapiens
acatctatgccatcacagacaccgcctacaggagtatgatgcaaggcatagaatgtcaagctaaccaggcgtccg

SEQ ID NO: 711221 - DNA, 50 bp, Homo sapiens
agcttttggaatctgaacaagggcagtctcctgggttaggcaggcctatc

SEQ ID NO: 711222 - DNA, 98 bp, Homo sapiens
tcagctcagccacagctttgcagacatccctttccaggctggcctccccaggtccgccggggccaccctacagtgcacagtgaaaccaagtatgtgga

SEQ ID NO: 711223 - DNA, 83 bp, Homo sapiens
gcaagaagcagatgcgcattttgatggacattatgatctcaaccagctgctggagcctcgaagcataacagcagatcctttgg

SEQ ID NO: 711224 - DNA, 82 bp, Homo sapiens
gcggggctgaggcggccgcggggcccgagcgcagctgataggaagatgtcttcaggaaatgctaaaattgggcaccctgccc

SEQ ID NO: 711225 - DNA, 50 bp, Homo sapiens
cttgatgataaaccagtaaatgttgcagatttggatgatgaatttgctga

SEQ ID NO: 711226 - DNA, 98 bp, Homo sapiens
cacccatccaacaactcccctcggacctcagtatgggctggaacctgacacttggcatgacagtgacttaattcagtgcacaaatgagatgaatgtga

SEQ ID NO: 711227 - DNA, 90 bp, Homo sapiens
ccggagcgccgccgccgccgccgcggacaatgagaggaggaggaagccaagaatctggtgagcgaagccatcgcagctggcatcttcaac

SEQ ID NO: 711228 - DNA, 80 bp, Homo sapiens
cctctgatctgcaaagaaggagaaagcgtgcagggtcccctggaagtgacgctgactcagccagtgaggagcgggcctgt

SEQ ID NO: 711229 - DNA, 74 bp, Homo sapiens
caggatctggagaatcatccatctgttcttaagtatgagaagattaagcacctgtctctgaaagccaaaagggc

SEQ ID NO: 711230 - DNA, 100 bp, Homo sapiens
cagcagcactgggacttccaggaggctcataaatctactgtgtggcaggtccgacacctgccgcagaacagggagctctttctgacagctggaggcgccg

SEQ ID NO: 711231 - DNA, 85 bp, Homo sapiens
ttgctctgtctgggatcgccgcacagctgctgaatgccttgggactagctggttatggatgatgaatcagatgaaaaagaagcaa

SEQ ID NO: 711232 - DNA, 82 bp, Homo sapiens
catacatctttcttcgacaaaggtcctgtgcctcctgattgctgagtgttcacctggaccttctgactaccttccctgtgct

SEQ ID NO: 711233 - DNA, 100 bp, Homo sapiens
caccgccctcaccacccctatccagacggctgcccttcaagtaccaagctccttaataagcatttatagtcagtttttggcagcaatagaatcactaaag

SEQ ID NO: 711234 - DNA, 100 bp, Homo sapiens
aaactcacaccaagtatgctgcgattagctattgaaggcctgcagatgaataatacggcagctagtccaatgtctactgcaacttcaagtagtggaagga

SEQ ID NO: 711235 - DNA, 75 bp, Homo sapiens
cagaatttactacagcatgtgatttcagcttgccacagctaccttggatggtaaactccagctctttctagctga

SEQ ID NO: 711236 - DNA, 90 bp, Homo sapiens
acagaggcagaactctgccccagctcggatggtgtatcctgagtttgaagaccagagagcttgtttgccatcaggatcctttctgacttg

SEQ ID NO: 711237 - DNA, 83 bp, Homo sapiens
tccaagttctggtacaaggcggatatttcaagagaacaaggttggatggcaagcatgtggtgtttggcaaagtgaaagaaggc

SEQ ID NO: 711238 - DNA, 53 bp, Homo sapiens
gctggggcagaagcgcgtggtcaagctcttagaacaagctctggtgattgagg

SEQ ID NO: 711239 - DNA, 97 bp, Homo sapiens
ttattcttagatccggattcaccattgttcaggatcagttcttaagagcagccccggtaactggaggaatgggagccgttttgatgagaaaaatggg

SEQ ID NO: 711240 - DNA, 96 bp, Homo sapiens
tagcagagctggtgatgtttatggcacagagttcagacttaggagtaaaacagaaaagtgaactaaacagtcgcttggaagagaagactaatcaga

SEQ ID NO: 711241 - DNA, 100 bp, Homo sapiens
tgtcattaaggaagaatttccaaatgaaaatcaagtagtgtttgccagagttgattgtgatcagcactgttttgaggttttgctgaagatattcctgaag

SEQ ID NO: 711242 - DNA, 100 bp, Homo sapiens
gatattttttgccatggtggattttgatgaaggctctgatgtatttcagatgcaagatggattctggatatactctgagtattgtaacaaccacctggat

SEQ ID NO: 711243 - DNA, 51 bp, Homo sapiens
gggaaaatgactgcatgttcccctcaagccttatgtttgatcatcggccaa

SEQ ID NO: 711244 - DNA, 99 bp, Homo sapiens
ccattcacaaggcagctcgctctgggagcctagaatgcatcagtgcccttgtggcgaatggggctcacgtcgaagaaaattcctgttccaagagaaaat

SEQ ID NO: 711245 - DNA, 76 bp, Homo sapiens
agctgagcccatattaagagatgtcagatgtccagggtgctgcagaaggacgcggagcaggagtcacagatgagag

SEQ ID NO: 711246 - DNA, 96 bp, Homo sapiens
acggagccggacccgccgcctcccggatcatgtttgagaccttcaacaccccagccatgtacgttgctatccaggctgtgctatccctgtacgcct

SEQ ID NO: 711247 - DNA, 50 bp, Homo sapiens
caaatttccatcggaatatgtaccgactagcatccacaagaatctagaag

SEQ ID NO: 711248 - DNA, 90 bp, Homo sapiens
tccatcaatcacacgtaccacctggatgttgtggacatttctcttgggaagttgtgcatctgacaggaatatagtactgtacgatatgag

SEQ ID NO: 711249 - DNA, 82 bp, Homo sapiens
ggagctggaatgactggcaacccagaaaggaatggagtctgtttagagacaacttggacaacctgtgagtgcatctcttctt

SEQ ID NO: 711250 - DNA, 100 bp, Homo sapiens
tgacagcacaggtcacagtaaggccaaaaatgtgcatactcacagagttagagagagggatggtggaactctattttaagaacctctcaaaacgaaacaa

SEQ ID NO: 711251 - DNA, 100 bp, Homo sapiens
aatggtgagatgagtcccgcagagctgctgcacttccagcagcaacagattatgtttgagaccttcaacaccccggccatgtacgtggccatccaggccg

SEQ ID NO: 711252 - DNA, 100 bp, Homo sapiens
ggaggatagactacagtgccgctggtgacgatgcctggggagcctgtggacgtggcatgtggcgtggaccacatggtgaccctggccaagtcattcatct

SEQ ID NO: 711253 - DNA, 100 bp, Homo sapiens
aaaacagaacaggaggtggtagagggcatggatatctctactcgctccaaagggtcctgatgaagaagctgttgtggatcttggcaaaactagctcaact

SEQ ID NO: 711254 - DNA, 83 bp, Homo sapiens
cggcatcagacctggcactacttgtccaagacgtactggtggcgagacaatgcagatcttcgtgaagactctgactggtaaga

SEQ ID NO: 711255 - DNA, 100 bp, Homo sapiens
tgaataaaagcattcggcagcgtcgtcgcttcactgtggctcatacatgacaatgcagatcttcgtgaagactctgactggtaagaccatcaccctcgag

SEQ ID NO: 711256 - DNA, 87 bp, Homo sapiens
tagctcaaggaaacctttccaacacagatgtccaagctgccaattggcaaccagaacgccaggttccatttaatgaagttagattac

SEQ ID NO: 711257 - DNA, 100 bp, Homo sapiens
attcaaccgtacccgccaagctgtcatcacaaaagagttgattgaaattatctctggtgctgcagctctgtggtccagtgccaagagacatttatcagag

SEQ ID NO: 711258 - DNA, 87 bp, Homo sapiens
ggcggtggcggcttggacgactcggagagccggtactccaaagattcaggtttactcacgtcatccagcagagaatggaaagtcaaa

SEQ ID NO: 711259 - DNA, 82 bp, Homo sapiens
tctccgccgcccgcaccgccgcccgcgccctcaccaggtcacaccgacaaatctgaagcgggtttgccaggggagtgtaccc

SEQ ID NO: 711260 - DNA, 83 bp, Homo sapiens
ccgagacggcgatccgggcgctcgagacttaccagagccacaagaacaagttgaaatcatcgcagaaggataaagttcgtcag

SEQ ID NO: 711261 - DNA, 89 bp, Homo sapiens
ttgggtcctccgagagcagcagcggatgtgggctctcttgatgagaagatgaagagcttggatgtgaatcaggactcggagctcaagtt

SEQ ID NO: 711262 - DNA, 82 bp, Homo sapiens
tccagatggcagccagtcagtggtggagatgacacacaataatttttggttgaagaagatagaaatcagtgtttcagaagca

SEQ ID NO: 711263 - DNA, 100 bp, Homo sapiens
agcagtacggcgtgcgcggctatcccaccatcaagttcttcaggaatggagacacggcttcccccaaggaatatacaggcatgttactaccagattcagc

SEQ ID NO: 711264 - DNA, 100 bp, Homo sapiens
gccttctggacaatctttccggtctttgagagctggatgcaccattggctcctgtttgaaatgagcaggcactccttggagcaaaagcccactgacgctc

SEQ ID NO: 711265 - DNA, 80 bp, Homo sapiens
atgaaggtccatgtaccctgtgaaaccctcgaatacattgaagccaactatggcaacatcagatgctgacctgaaagaac

SEQ ID NO: 711266 - DNA, 98 bp, Homo sapiens
cgtgtattggcttttctgggcagcagtgtcaaaccagaagagaagtaaaattcaacaaaaatttatgtgtggagttccttcttaaaagaagaaaaaag

SEQ ID NO: 711267 - DNA, 83 bp, Homo sapiens
gtcttcccaggcgtcgcggagagcaggagccttcacgtaaatgggtccagtcatgcctcccagtaagaagccagaaagctcag

SEQ ID NO: 711268 - DNA, 100 bp, Homo sapiens
actgttttggacttgtctattatgtccttgttggcctaactgtgctgagccaagtgccaatggatggcaggaatggtggcctccatgaaccagcgccgtg

SEQ ID NO: 711269 - DNA, 101 bp, Homo sapiens
ctgacttcccgtccgtgccgagcccactcgagccgcagccatgtctggggacgaggctcatccacctgcagacatggggcgcagaaagtcaaaacgaaagc

SEQ ID NO: 711270 - DNA, 101 bp, Homo sapiens
actggaccgtcttcccagtcccatcaagagaaaaccacagactctgggctcactgaaggtatttctgggaaaagccagcttctgtttgcactggtcttcac

SEQ ID NO: 711271 - DNA, 101 bp, Homo sapiens
gctctacacactggtgtctcctgcggaagggcagctgggcacgccttccagaccgaggacttttttcaggagatattgcacctttaatgcaagaaaaagta

SEQ ID NO: 711272 - DNA, 75 bp, Homo sapiens
cggggaggcagcgcgggatcccagcctcaggcgtgcgcggacggtgtgcgggttgcacactgggccacagaggat

SEQ ID NO: 711273 - DNA, 96 bp, Homo sapiens
gtccaagtcaaacgcagaaggactgcctcactgagcaaccaagaccaaaagaatgcaatggtgtaaagattccagttgatgccagtaaacctaatc

SEQ ID NO: 711274 - DNA, 96 bp, Homo sapiens
tccgagagaagctatgtttagcatcttctgtcatgagaagtggcgatcaaaattggttccagcaacagatagaaatgctttaagttcactctgggg

SEQ ID NO: 711275 - DNA, 106 bp, Homo sapiens
gggaggaaggaacgaggcaaggagctaaagcagcgtgcgttcagccctgggaggttgacggatatattcagacgttacgacacggatcaggacggctggattcagg

SEQ ID NO: 711276 - DNA, 100 bp, Homo sapiens
ccggcccagccatggccccctggcgcaaagctgacaaggagcggcacggcgtggttcagcaggagcgcagacgcccccgcgtaccagcagggccagaacc

SEQ ID NO: 711277 - DNA, 73 bp, Homo sapiens
ctgttgtctttcatgcatatggagggaggtagacaacgtgagtctcagagaggtttagtaatctctccaaggt

SEQ ID NO: 711278 - DNA, 100 bp, Homo sapiens
gaatgtgattcttcatcttccaagttgctagaacctgtctgtcaccagctctttgaattctatcgcagtggagaggagcagttgcttcaatttacgctgc

SEQ ID NO: 711279 - DNA, 95 bp, Homo sapiens
tggggcaaagggaccacggtcaccgtctcctcaggtcagaaaaagagtgcacgccagtatcacgtacagttctttggtgacgccccagaaagagc

SEQ ID NO: 711280 - DNA, 75 bp, Homo sapiens
ggagcagaggggacagaggcaccaaggacctccaagacaggtgaccacccgccggcggaagaaggaaggagaata

SEQ ID NO: 711281 - DNA, 88 bp, Homo sapiens
gtctcgtagtccgacgcctggggcgatggatccgtttacggaggactcgctgattcttgagaagagtcaaaactggagctctcaaaaa

SEQ ID NO: 711282 - DNA, 100 bp, Homo sapiens
aggaggaggcggcgaatcacttataaatggcgccgaagcaggacccgaagcctaaattccaggaggcacagacgcagtcttcagcaaggaagtgctggga

SEQ ID NO: 711283 - DNA, 74 bp, Homo sapiens
ctgatgccaacagtgtaccagcagggcgttggctatgtgcccatcacagcactctcgagtggaccctgaggagc

SEQ ID NO: 711284 - DNA, 100 bp, Homo sapiens
tacgtgttagaaataaatctgatattgcaccttcacagcaacaagacaacagcagttctgtagagagtttaaatatgaaggaatggcaggacgggctaag

SEQ ID NO: 711285 - DNA, 100 bp, Homo sapiens
agcatcgcaacgggatctgcagaacctgaactcgataccagatgacaattttagcatcccagaaggtgaagaagatctggcaaaagcaattcagatggcc

SEQ ID NO: 711286 - DNA, 100 bp, Homo sapiens
ggcctccgtgacgcggcctcctccgcgcctcgcggcatggcgtcggaggggccgcgggagcccgaaagcgagaaaactttagaaactgttcctttggaga

SEQ ID NO: 711287 - DNA, 100 bp, Homo sapiens
atcagacagtgatgagggatcagaagaagataaagctcaaagattactcaaagcaaagaaacttaccagtgatgagctggaagacccaggagaaggcgga

SEQ ID NO: 711288 - DNA, 50 bp, Homo sapiens
acaggaggaaaggccagactcacagaaggcctgttgattgcatactgtag

SEQ ID NO: 711289 - DNA, 74 bp, Homo sapiens
tttatcctcaagagtcagctggcagttttcattgctggcagaagccatatcacaggaacatcaagaacttaaag

SEQ ID NO: 711290 - DNA, 90 bp, Homo sapiens
accagtgaagacgtggccgaaatgcacaacatcctgaagaaataccaccaggtcaagtacaaaagagattttgaagaaagcaaagggagg

SEQ ID NO: 711291 - DNA, 50 bp, Homo sapiens
cgagaagaagccctactgcaacgcgtttgctggttggctcccgagcagac

SEQ ID NO: 711292 - DNA, 100 bp, Homo sapiens
ttatggctcattgtagcctcaaactcccaggctcaagcagtcctaccatgtcagccttcccagtagctgggaccacagcatttacagccgaacaatacca

SEQ ID NO: 711293 - DNA, 82 bp, Homo sapiens
ccacctgcccggtgcccgaggaggcagccaagctcgtagcctgccactccgtgcatctcacattcttgaaggtggcattgaa

SEQ ID NO: 711294 - DNA, 98 bp, Homo sapiens
cctgtcaacttcgcacttctccagttagttggagcccaggttctggctccttggcagcaatggctgtatttgaagataagtttaggccagacatggag

SEQ ID NO: 711295 - DNA, 100 bp, Homo sapiens
ccgctgctacctgcagcgccgtgtggcacgacacaaaaatcagggatccctttgctattcaccgtcagcatatgagccgtatgttgtcaggtggctttgg

SEQ ID NO: 711296 - DNA, 100 bp, Homo sapiens
cctgtgctgataacaaggataatgagggaggacccggtcagcccaaggagcaggggtccagcagctctgcggaggcatctggaacagaggaggaggagga

SEQ ID NO: 711297 - DNA, 80 bp, Homo sapiens
atgcagagttcagctatgttctcaatgggatactcaacttgattccatcaaccagacatattactgatgccacacttgcc

SEQ ID NO: 711298 - DNA, 87 bp, Homo sapiens
cagctgggaattgctgaattagaactgcagaggttcctctacagcaagtttcatgataaaattgagcctatgttggagacactggag

SEQ ID NO: 711299 - DNA, 139 bp, Homo sapiens
ccgtgatctccagcgccggcctcctcagtgcgaagaagctgcagccgcacctggccaaggagacgagttgtactgctgtcacaggaaatggacgctggattacaagcatggcagctcaggcagcagaagttgcaggaag

SEQ ID NO: 711300 - DNA, 100 bp, Homo sapiens
ttacactgctgcataatggagaacctctctacattccagtaacccagagggatcaactgtggagaagctacttcagaaagaagagatcacaaacatatga

SEQ ID NO: 711301 - DNA, 90 bp, Homo sapiens
ggtttgatactgacctgtaaatcatcctttagttccctgagtgtggcttctacggcctttacgacaagatcctgcttttcaaacatgacc

SEQ ID NO: 711302 - DNA, 75 bp, Homo sapiens
cacaggactaatagctggcaaatttctgttccatcagcgtttgtttggccctggagagtgaatttgtttcctgcc

SEQ ID NO: 711303 - DNA, 98 bp, Homo sapiens
tcagagaagaaataatggcaaataacttttccttggagagtcataacatatcactgactggcaatgatatgggaaatgatgatgccattggagggaat

SEQ ID NO: 711304 - DNA, 100 bp, Homo sapiens
cccggccctgtgactgcagccatggccacaggcttagctgttaacgggaaaggaagtgtttggattgtgagctatttcagaactgttctcaggactcatt

SEQ ID NO: 711305 - DNA, 90 bp, Homo sapiens
ggatcatatcagaaagatggcatatcagatatgcaagtctgtgaattgaacaggcctttgagagcagccagaagtacaaagaggggaagt

SEQ ID NO: 711306 - DNA, 100 bp, Homo sapiens
agaaacctcagacagatcgccggggaggcagcgcgggatcccagcctcaggcgtgcgcggacggtgtgcggcatgtgcagtctttgccaacaaaaaaaat

SEQ ID NO: 711307 - DNA, 100 bp, Homo sapiens
aactgaggagcaccaggagacgcaactcatcggttggcctttaccagagtttgatccaagccagattcgactgattgtatatcaagactgtgaaagacga

SEQ ID NO: 711308 - DNA, 98 bp, Homo sapiens
ctggatcctgggcggcctgagggacaagttggatggcttgaggactggtactaaaaggaaacgtgactgggaggccattgccagcagaatggaggatt

SEQ ID NO: 711309 - DNA, 75 bp, Homo sapiens
gagagagcctgcggaacctgcgcggctactacaaccagagcgaggccgtcggtcctgaccgccagcctgtcgtac

SEQ ID NO: 711310 - DNA, 100 bp, Homo sapiens
aagcctttaaatgcagcatctgcgatgtgaggaaaggcacctccaccaggtgattttacaacgagatgctgctctccatagggatgctcatgctgtcagc

SEQ ID NO: 711311 - DNA, 100 bp, Homo sapiens
ctgtctcaacgatacctattttctagtgctgagatcctgagacaatggaaccgaatattgtatctgacgcatcctgtaatactgaagagcaactgaagac

SEQ ID NO: 711312 - DNA, 100 bp, Homo sapiens
tcccacaagtttacggtagtggtgttacgtgccaccaaagtgacaaagggggcctttggtgacatgcacttacagattccagtctgctgttagatgatta

SEQ ID NO: 711313 - DNA, 100 bp, Homo sapiens
ggcgacagcaacagctctgccggctggaaggatgataatgaagataattcaaatgatgggacccagccatccaaaaggaggcgaatgggctcaggagata

SEQ ID NO: 711314 - DNA, 50 bp, Homo sapiens
agcaccactgcagccagaaagcgagacatttgtcttcaccgacagcccag

SEQ ID NO: 711315 - DNA, 100 bp, Homo sapiens
ctgaagtcttcaggcgagctcaccacatgctacagctggaagctctttgacatcctttggaacagaaacatcaaacagtggtaccttaccccaaagtagt

SEQ ID NO: 711316 - DNA, 100 bp, Homo sapiens
atctagaagaaacagggtccacagcagttccctatgggtcttttaaacatattgatagtggtgctgtatggaagcaaatttatatggaccttggcattcc

SEQ ID NO: 711317 - DNA, 108 bp, Homo sapiens
tacctccaggccctgaacgcggactggcacgcagactgcttcaggtcccgcggcagtgctggtggccatggttcccgtagccagaaggagttgcccacagagcccccc

SEQ ID NO: 711318 - DNA, 95 bp, Homo sapiens
cgtggcgtgtgcggtttcgacccggtcacacaaagcttcagcatgtcatgtggatttgcagatttacagaatggctgcacattaatggaaagaga

SEQ ID NO: 711319 - DNA, 82 bp, Homo sapiens
ttcggcagtccacccaccgccgccgcctcccagttgtctgagggaagtcaaaagcatgcaagcctacagaaaagcattgaga

SEQ ID NO: 711320 - DNA, 100 bp, Homo sapiens
acataacggggttcgggtgtctcgtgtgtgaacatcacagtgcttagatgagtacgaagatgatgaagcagggcagaaagagcggaaacgagaagatgca

SEQ ID NO: 711321 - DNA, 100 bp, Homo sapiens
atgaagaggttggagatgggaccacatcagtaattattcttgataaaggagaagtggctgaatgaggacatcatgctcaggaccctcaaggtcacattcc

SEQ ID NO: 711322 - DNA, 100 bp, Homo sapiens
cacgtgcacaacttcatgatggatatccagtataccaaagagactttaatttcacaactgaaagcaacaagttatcttcagaaaaaagaaattatgaagt

SEQ ID NO: 711323 - DNA, 75 bp, Homo sapiens
ctacgaccggccctggcagcgcgccacagcccgcgaagccaacgagtgcgtggggaccagttactctccacaaga

SEQ ID NO: 711324 - DNA, 100 bp, Homo sapiens
cagggaggagcagtgaaagagaagggaatgctaagaactgctgggaggatgacacaataagagctaactgccatcaagagccatcagtatgtcttcaagc

SEQ ID NO: 711325 - DNA, 100 bp, Homo sapiens
cagggatttctggaaggttctttgtctctgactgtgtgagaccctacagcttggggcctgggctcctctgaccatcctcattgagaaaggaaagtgagtc

SEQ ID NO: 711326 - DNA, 75 bp, Homo sapiens
ctgcgggcgctgggcgagcggcacaccatggacctcactgtgggcacgtctgagaatggtggatgtggtggagaa

SEQ ID NO: 711327 - DNA, 90 bp, Homo sapiens
tacgtctgcggaagtgcagctgcctcagttcttagcgcaggcagttcaattaacctccagaagatggctgaacctgcaggaataccagag

SEQ ID NO: 711328 - DNA, 90 bp, Homo sapiens
gaggaaactgaggcctggagaggttaaagagacccgttcagagtcctacagtggcaggtttcctgtacgctcagaacagcaccaagcgca

SEQ ID NO: 711329 - DNA, 95 bp, Homo sapiens
aacatcatcactctgaaagatgatctatctggttcaatagatgacctccccatggggacagaaggagctctgagtcctggagtgagcacatcagg

SEQ ID NO: 711330 - DNA, 75 bp, Homo sapiens
gggatccttccgcacactgaagagtacgtcttcgggtctacccctaatcacgcactcagaatggtccagcgtttg

SEQ ID NO: 711331 - DNA, 98 bp, Homo sapiens
tccgccctaatggaggtctccagtttcggtagtgggcagcagtcagtgacaggtgtaacctctgtggatgacagcaacagttactggaggatacgggg

SEQ ID NO: 711332 - DNA, 97 bp, Homo sapiens
cgagtcaagtatacaccacaccaccgcacaggggacaaatgctacctggaagaggccgtgatgcacctggaccacagtgaccccatcactcgggacc

SEQ ID NO: 711333 - DNA, 90 bp, Homo sapiens
cccgacgggcatgccaagaagatgagaccgggggaggcgacgctaagttgctgatcgtggcggttaatttggagtggcccctggagtcag

SEQ ID NO: 711334 - DNA, 96 bp, Homo sapiens
gaaaggactggaagttcaccttaaaaggtgagaaggactggcagaaatacgagactgctcggcggctgaaaaaatgtgtggacaagatccggaacc

SEQ ID NO: 711335 - DNA, 82 bp, Homo sapiens
aagaagagaggcccaagatggagacggcggcggctgtagcggcgtgacagctggagaagaagcaggcgctccctccattcca

SEQ ID NO: 711336 - DNA, 96 bp, Homo sapiens
ctctgtcttccacaaagcacaaagggcaagatggaagaataggcgtagttggaggctgtcaggagcctcatgcattgtgcgtcagcagcaatgttt

SEQ ID NO: 711337 - DNA, 100 bp, Homo sapiens
agaaggacaaagagatcatagccgagtatgaaagtcaagtcaaagtgcgacttcatgatagcatatcagaagagggctttcactacttggtgtttgattt

SEQ ID NO: 711338 - DNA, 75 bp, Homo sapiens
agatgcagctgatgcagtccgagagctagatggaagcttttcctccgcaaccatgtctgacaaacccgatatggc

SEQ ID NO: 711339 - DNA, 99 bp, Homo sapiens
gtgatgctggagaattacaggaatcttctctcattgggagactacctaggtggagaagcgtactgggccggcggcctgcacctctacaccccattacct

SEQ ID NO: 711340 - DNA, 101 bp, Homo sapiens
gcggaaaggatgttggcggtccctgtgacctgtggagacacggccagatctgccctccaatccacagaagagcaagagccttgaagaaacttgcaaaacaa

SEQ ID NO: 711341 - DNA, 96 bp, Homo sapiens
tcccaaagtgctgggattataggcgtgagccaccgtgcctggctgaaggtgaaaggtgtagcagtcactcggcctacacccacagcatcgaccttg

SEQ ID NO: 711342 - DNA, 100 bp, Homo sapiens
tgctgctgacgtcacatggagcacagaaatcaatgttagcagatagccagcccatacaagatcgtcccaggccagacccgatcgtctatggtccagtggc

SEQ ID NO: 711343 - DNA, 109 bp, Homo sapiens
aatcggcaactccatggtcattttggctgtgacgaagaacaagaagctccggaattctgaaaccaaggtgtatgttggtaacctgggaactggcgctggcaaaggagag

SEQ ID NO: 711344 - DNA, 75 bp, Homo sapiens
tgaagtgcagaggtttttttctggttgatccaactaatggaagaaataatggctgaaaaggaaaacaaaacaata

SEQ ID NO: 711345 - DNA, 80 bp, Homo sapiens
ccaaggtcattttcgtggagaaagccccaggcctggtctccaagtcctctcctaagaagcctcgtggacgtaacatcttc

SEQ ID NO: 711346 - DNA, 90 bp, Homo sapiens
acggctcacctgtgcgggatggaacaaaagaggtatcctgtagtgatgtccacgtatcttggagttatgggtcgagttctactacaaaac

SEQ ID NO: 711347 - DNA, 90 bp, Homo sapiens
gtaactccatgcaataaacagttcctgagtcaatttgaaatgcagtccaggaaaagcatactccaaatgcttcttccagttcatttttca

SEQ ID NO: 711348 - DNA, 83 bp, Homo sapiens
cttttagttgcttctcttccttttttctctccggtttctcatcactccaaccaggagctgtaaaattgacaagcttggcatgt

SEQ ID NO: 711349 - DNA, 110 bp, Homo sapiens
ttaattttccataaagacattctgtttggcattccagctaataagattgtcagattagaccgaacaatggaacagatagtctttcccgtgcccagcatatgtgaattcct

SEQ ID NO: 711350 - DNA, 74 bp, Homo sapiens
aactgcagagttgtgatctctttgatgagtttgacaagcttctaaccctcctttatgtgactcagagaaaggag

SEQ ID NO: 711351 - DNA, 90 bp, Homo sapiens
agaagcttcacagacctgctgctggatgatgggcaggacaataacactcagatcgaggatgctgggcagttttatgctaaatataaagaa

SEQ ID NO: 711352 - DNA, 75 bp, Homo sapiens
aatttatatagagatgtgatgttggagaactacagaaacctcgtctccctggaggtcctcaaagagggcagcggg

SEQ ID NO: 711353 - DNA, 100 bp, Homo sapiens
agctggcagcagcatctcagcccaagagaaggttggagtccccaacccggtctctagtgatggaggccccaaaaggagtggaaatcaatgcagaagctgg

SEQ ID NO: 711354 - DNA, 90 bp, Homo sapiens
ccatgggccacctcttccagaagctggccttcctggatgctctgcagaaccaggctgaggccagcagcaagatcatcggccagtttggag

SEQ ID NO: 711355 - DNA, 101 bp, Homo sapiens
cggacctctatgccatgaacttcaatcccatcatttccagaaaggacatcacagtgccagctggagatggagagctatgatgaggccatcgccaatctgca

SEQ ID NO: 711356 - DNA, 75 bp, Homo sapiens
cacagaggcagcgccacctcgcttggtctattattagcagaagatttttctgcatagttggcacgctgtacctgt

SEQ ID NO: 711357 - DNA, 100 bp, Homo sapiens
ataccatcggacaggatttctccgcctcagcccaacggggagggatcgactacaagaccaccaccatcctgctggacggccggcgcgtgaagctggagct

SEQ ID NO: 711358 - DNA, 49 bp, Homo sapiens
agagaaccagttcagactttgctggatccagacccctttgtgcggcaca

SEQ ID NO: 711359 - DNA, 98 bp, Homo sapiens
ctacctgaagaaggccttcaacctctacaaccagggcagcggcagtgatgacacggagctgcggtactcgtcccagtacgaggagcgcctggacccct

SEQ ID NO: 711360 - DNA, 100 bp, Homo sapiens
caagagtccctctaaagcagctcaaaagggcagctgcaatgactctccgcacggtattattgtcattgcaagcactattggcagctgcagagccagatga

SEQ ID NO: 711361 - DNA, 100 bp, Homo sapiens
gtccggagtaacttggccaggctggccccgagcggaactggagaaagctgaggacaggaacagggttccagtcagattcgactatgcttacaggtcctga

SEQ ID NO: 711362 - DNA, 75 bp, Homo sapiens
ccgagaactccgctcgttctgtgcgttctcctgtcccaggtgctgttgtcaagaccaatgccaatgcagagaaga

SEQ ID NO: 711363 - DNA, 100 bp, Homo sapiens
ggttccccggcccacagtgggggtgtgcaaacccgagagaactggaaaccgaaacttcattgccccttcaatgtgggaatccagccagaccctattcttg

SEQ ID NO: 711364 - DNA, 100 bp, Homo sapiens
gtagctcagacgccaggacatcccggaagctgggaaatggctttgtccagggatctgaaaccactttgcagtcgacatactcggataccagcgctcagcc

SEQ ID NO: 711365 - DNA, 90 bp, Homo sapiens
ccgaaccccagtcagaccgatctgctctgctctcgtccagctggcccagctgctacacccgcacaagcccaggctgcaagcaccccgagg

SEQ ID NO: 711366 - DNA, 95 bp, Homo sapiens
ccagagatcagttccatccgaagagttcctctcccacctgaacttgttgagcagtttggacatatttgtcaggatacgaatcaggttctcttcaa

SEQ ID NO: 711367 - DNA, 100 bp, Homo sapiens
agcgagctgagtggttgtgtggtcgcgtctcggaaaccggtagcgcttgcagcatgacctcctgccccccgaggtctgcagtctcctgaacccagcagcc

SEQ ID NO: 711368 - DNA, 83 bp, Homo sapiens
atttggaaaaaccgctatgtggtgctgaaaggggaccagctctacatctctgagaaggaggctaagtcctatcagccatggaa

SEQ ID NO: 711369 - DNA, 90 bp, Homo sapiens
caccagtccagctgaactctggctctcaaaggtgtgtccgcagccggccaggtggtatccctgaaggtgtggctgattgacgacattcta

SEQ ID NO: 711370 - DNA, 75 bp, Homo sapiens
cttcagtacttggcaagatttgatgctcttgtgctcagtgacatcattcaggtggataaattagatgcttcagaa

SEQ ID NO: 711371 - DNA, 100 bp, Homo sapiens
gccacaatgaggaactcctatagatttctggcatcctctctctcagttgtcgtttctctcctgctaattcctgaagatgtacctgtgtggtctaagctgg

SEQ ID NO: 711372 - DNA, 100 bp, Homo sapiens
aaaatctactgaggcaaatgtactacctccatcatctgttttccagaagagattcaatggctcagtaagtttcttccgcggctggaatgactacaagctg

SEQ ID NO: 711373 - DNA, 82 bp, Homo sapiens
cctcatcgagctcttcgtcaagcttcctgggtctgcaggtccagccggctggcaccctccatgtacccaggggagattccag

SEQ ID NO: 711374 - DNA, 87 bp, Homo sapiens
gaagagtgacttgtttctggatgattctaagaggtcccgagcagccccgcccaacatggacccagacccccaggcgggcgtgcaggt

SEQ ID NO: 711375 - DNA, 82 bp, Homo sapiens
acctatgcagttcgaaaactggataacactaagtttagatctcatgagtgcctccggagccagcgtggtggccatagacaac

SEQ ID NO: 711376 - DNA, 95 bp, Homo sapiens
ttccaggtcccggatagcgagggcggccgcgccggctccaggtggctattatcatggaaaactaatttttcccagagaatttcctttcaaacctc

SEQ ID NO: 711377 - DNA, 83 bp, Homo sapiens
tcatcttttagctatggcgactttgacttcctgccaaaatcctgttaccctagcaacaggggaaagtgcagtgttgcccttct

SEQ ID NO: 711378 - DNA, 100 bp, Homo sapiens
agatccgaactgggctcatcaagggcgagaagggagcactggctttgctttcatcaggccaaagatgcctttctttgggaatacgttcagtccgaagaag

SEQ ID NO: 711379 - DNA, 77 bp, Homo sapiens
agccgggagtcgctgggtgcgtggggctgcctcgccgcgtctcgccacggtatccgctgatcattgacccctctgga

SEQ ID NO: 711380 - DNA, 98 bp, Homo sapiens
ggcacgtcacttccgactagtggagtttttagccttttaacattcaaggattagttgtgctgcatggaaacaacctgttagtatttggaggtacgggc

SEQ ID NO: 711381 - DNA, 98 bp, Homo sapiens
ggaaccacaagaaaatcaaaagaaacttttgcccttatcagtaacacctgagggaacagaaagaacagcttcaaaagatgaaagacttcgggtctgag

SEQ ID NO: 711382 - DNA, 75 bp, Homo sapiens
ggggcccagctcgccgtcctgccccccttggagagaaactgaaagatgaaggcttgactattgacctgaagaatt

SEQ ID NO: 711383 - DNA, 75 bp, Homo sapiens
gagactcctgctcagtgtagcattaaggcatcattcttaacaaagaagttaaatattggtgggaaaagagtaaac

SEQ ID NO: 711384 - DNA, 101 bp, Homo sapiens
tctgagacaaaatgaagggcagaggaaaccagtagcagttctcaagagacctagccagctaagcagaaacaacacagtcactcctggcggcaaaccaaaca

SEQ ID NO: 711385 - DNA, 83 bp, Homo sapiens
ctgggagctgaggaaccagatatcttgaaaagctgccagaaaggaactgtggctgcaccatctgtcttcatcttcccgccatc

SEQ ID NO: 711386 - DNA, 75 bp, Homo sapiens
aggcaccgaggcactcagaggaggttgacatcatggacatatgtgagtccatcctggagaggaagcggcatgaca

SEQ ID NO: 711387 - DNA, 108 bp, Homo sapiens
tagaaacctaagcatgccggatctggaaaacagttgctgggcatattggattttacccatcataggcgctgttctcttaggtttcctgtaccgctactacacatcgga

SEQ ID NO: 711388 - DNA, 96 bp, Homo sapiens
gcagcgcccgcgccccgccgctgagccgtcgcggagccgcgcagccctcggagcacggttacgggcaggacttgagtggcttcggacagggcttct

SEQ ID NO: 711389 - DNA, 100 bp, Homo sapiens
gatgagagaccactctttccccaatgcttgacagaagacaagatcagtcttctcctacacttgcttgaagatgaacttgatcaccgaactgatgagagaa

SEQ ID NO: 711390 - DNA, 100 bp, Homo sapiens
tcaggcagtacgggaagaacttcttcagaattagaaaggagctgcttcccaataaggaaacagtaagaatgattgatgttggctgatattggagtgctca

SEQ ID NO: 711391 - DNA, 83 bp, Homo sapiens
gttttgcaagaataagacttgaccaagaccgactgccagtaatagggggatatgagactttctactcggaatatcctgagtgt

SEQ ID NO: 711392 - DNA, 100 bp, Homo sapiens
tgcgattgaggaagagcgagccagcgcccggagcaagcggagctcccccaagagccggaaaggtgatttggatatctactctggagataaagttggttca

SEQ ID NO: 711393 - DNA, 50 bp, Homo sapiens
tcttcctcctcctcccgcgacgataacgaaggaggcccaacttcattcaa

SEQ ID NO: 711394 - DNA, 75 bp, Homo sapiens
gggatcattgatgaggaaagcagtggaaacaatgcccaggtttgtggatgcacttagatgtttgcaatgagcact

SEQ ID NO: 711395 - DNA, 100 bp, Homo sapiens
agtgtgggcagcagccggtcgtggagaaatgcgaggtgacagagctgaatgaacctctctccaatgaagatcgaaatctcctctctgtggcctacaagaa

SEQ ID NO: 711396 - DNA, 90 bp, Homo sapiens
cacagagttagagagagggatggtgttcccagaaatgaatgctatgatcatgcgacggttcagtttgcctggagatgtagacagagctcg

SEQ ID NO: 711397 - DNA, 75 bp, Homo sapiens
caggtcccggggctgcataatgggacgaaagcctttctctttcaagtaccttctccaggcaaattccgttcccct

SEQ ID NO: 711398 - DNA, 75 bp, Homo sapiens
cacaggatggaggagggggatcccagcaaagaggttgacggatatattcagacgttacgacacggatcaggacgg

SEQ ID NO: 711399 - DNA, 100 bp, Homo sapiens
aaagccaagctcatctctgagacccggaggaggttcgaagctgagtatgtgacaggtgattgatatgcccgagcacaaccctggcaatttgggaggaaca

SEQ ID NO: 711400 - DNA, 82 bp, Homo sapiens
aaacatgtacatcaataccatgagactgcagttcgtcatgaatcatgcagtggtctctataagttatccctgtcagggctgg

SEQ ID NO: 711401 - DNA, 75 bp, Homo sapiens
aaccctggtcaccgtctcctcagccaaagtcatacactggctatcagaaaattatgctggaagaattgcagtgga

SEQ ID NO: 711402 - DNA, 90 bp, Homo sapiens
gcccgcgggccagcgcaccggtcccccagcggcagccgagcccgcccgcgcgccggttgcacagagcattgaggatcaccatcaggaagt

SEQ ID NO: 711403 - DNA, 99 bp, Homo sapiens
cagggctccagggccctcctccggccccaggcctaccccagtcacggacggtatccacaaattacccattatcaaaaacaaatagttcatcaaatgatt

SEQ ID NO: 711404 - DNA, 75 bp, Homo sapiens
tgctactgctgctgctgctccggccgccggcgacgcggggtttctgggtggagcggacccctgtgcacgaggcag

SEQ ID NO: 711405 - DNA, 71 bp, Homo sapiens
cagaacatcaagcgagccaaggacgacgggacccagccaatggagatcttcgtggatgatgagacgaagtt

SEQ ID NO: 711406 - DNA, 50 bp, Homo sapiens
atcagcttcttaccaaatacagaaggccctcgggaccaaggatcacgtca

SEQ ID NO: 711407 - DNA, 75 bp, Homo sapiens
atagttgtgaaagcccctccagaaacaagacttgaagtgcctgactcaatagagtcaaaccggcacgatgtccag

SEQ ID NO: 711408 - DNA, 83 bp, Homo sapiens
agatcatttgggagatccaagagattcagtatcactcgctcccttgatgatcttgagatgatcaagcggtgctgattcacgag

SEQ ID NO: 711409 - DNA, 50 bp, Homo sapiens
ttgccgatttcatgactaaccagtctgcgaaaaggcaccaagcacctcag

SEQ ID NO: 711410 - DNA, 122 bp, Homo sapiens
aaaatacaaactggaaaataaagattacagagaaaaaaccaacaccttcctgtgcagtcctgttggaatttcccacttcgatgtgttgttcttgtcgcacttagggacatcaatcaaggaga

SEQ ID NO: 711411 - DNA, 75 bp, Homo sapiens
caaggagataaatcaaaggaaaataccagaaagatttttagtggccccaaacggcatgatgccttcttctgtaga

SEQ ID NO: 711412 - DNA, 100 bp, Homo sapiens
agtctatggacgacgatttcgggatttctccagtgatgattctaagttagaatataacgtagatgctgcaaatggcatagttatggaaggatatctgttc

SEQ ID NO: 711413 - DNA, 74 bp, Homo sapiens
tgttgagcctttttggcctggcttgtttgcaaagaaggcaattctcaagttcaactactcagtgcaggaggaga

SEQ ID NO: 711414 - DNA, 97 bp, Homo sapiens
gcggatagcgtggagtgacggtgccaccgcggcgcgttgtggcagcactgcctgaaggtatgagaccagattctaatctttatggttttccatggga

SEQ ID NO: 711415 - DNA, 100 bp, Homo sapiens
cccagtgccaatgcatcttctgtactctgtgaggagctggtttcacctgaggacctgctggagtggctgcggcctttctgtgctgatgacgcctggccgg

SEQ ID NO: 711416 - DNA, 74 bp, Homo sapiens
agataaagctggcagtaagaaatgctaagcctacaacacagcagtcccctcaggatgagcaggaaaagctcttg

SEQ ID NO: 711417 - DNA, 125 bp, Homo sapiens
cgaacgtggtcggttggagaaaatatgtccctccggaggcacattgggaaccctgaggagtctactcttcatcttgtgttgagacttcgtggtggtgctaagaaaaggaagaagaagtcttacac

SEQ ID NO: 711418 - DNA, 100 bp, Homo sapiens
aaggaaagagcctggaaaatggagcagacctggacgagcaaaaaatcccagaagtgggatgaaatgaacatcttggcgacgtatcatccagcagacaaag

SEQ ID NO: 711419 - DNA, 130 bp, Homo sapiens
cgcaggcgtaccatccacaccttcccctgcctcaaggagctgtgcaccagcccccgggaactacagcctgtccagtgtgctgcccaacgcccccgacatggcgcagttcaagcagggagtgagatcggtt

SEQ ID NO: 711420 - DNA, 100 bp, Homo sapiens
cgctgctggagccgcgaccatgtctattatcctcccagtccacaacgctgaaccgtggctggacgaatgtttgaggtctgttttgcaacaggactttgaa

SEQ ID NO: 711421 - DNA, 82 bp, Homo sapiens
ccgcagggctcccctccttcaggaacaataccgtagcagtaggcaggacagttccaattcaacaaaaacctctttaccctgg

SEQ ID NO: 711422 - DNA, 74 bp, Homo sapiens
tgtcacatctgaaactcatctgtacctcacttagaaagttcacatcgatacaagctcagaagggtcatctcaga

SEQ ID NO: 711423 - DNA, 74 bp, Homo sapiens
ggatccaaatgtaaaagatgcaagtatgacccaagccctttgcaggattttctgccgtctcttggcaaaaatgg

SEQ ID NO: 711424 - DNA, 100 bp, Homo sapiens
tccagctccgctctcttcggctgccccaatccccggcagctctctcaggagaagatgtatggtcttatgcaaagggacttcctcacatgtttcagcaggg

SEQ ID NO: 711425 - DNA, 100 bp, Homo sapiens
gcttggagtgcctcaccgagccaggtggatagatacttctcaagacatcacacagcgtgagtcaatcaaggagggaagccacaagcagactgacaacgtt

SEQ ID NO: 711426 - DNA, 90 bp, Homo sapiens
ccactgaggagtccaacatcaccatgcagtgggaggatacccttgacaaatactgtgaccgggagtatgctgtgaagacccaccaccact

SEQ ID NO: 711427 - DNA, 140 bp, Homo sapiens
acttgctttccatgcaagccttactaacccgtttggcaagggagcattcattcagcttctgcggcagtttggaaagtttttccagaggcctcaaatacagcctcctagagctaccatcccgaacagcagtccttccattc

SEQ ID NO: 711428 - DNA, 99 bp, Homo sapiens
ccagaagacattgatgaggaagatgatgatgttccagatgaacgggaccgggttcagaagaaaacgttcaccaagtgggtcaacaagcacttaatgaag

SEQ ID NO: 711429 - DNA, 88 bp, Homo sapiens
tggtgacagcaaaaatgacccaccaatggaagcagctggcttcactgctcaggaaggaggaagaggagcgaaggcggcgtgaagagga

SEQ ID NO: 711430 - DNA, 74 bp, Homo sapiens
gagaacaagaaggtgaagtttggcatgaagttgctccttgagggcaggacagttcttatggctttatccgttgc

SEQ ID NO: 711431 - DNA, 75 bp, Homo sapiens
agccttgaaagagataaaagcggaagtttgccacacggaggaccactctctgtggcaccctggactacctgcccc

SEQ ID NO: 711432 - DNA, 75 bp, Homo sapiens
ctcgactccaaatggttgaaaacagatatacaggcgaacagtggtccaagtacaaatggctgtcagttctttatc

SEQ ID NO: 711433 - DNA, 100 bp, Homo sapiens
gtacggaccataataatcaggagtgaagtcccagggatattctgtgctggccataaaattttgagtagaaaaatccagaaatttgaaaatcagtatcgtg

SEQ ID NO: 711434 - DNA, 82 bp, Homo sapiens
tcggccgatgaagtgcagaggtttttttctgatgtgtggagacctccaggccgtgcagcaccttggtggccacagctctcca

SEQ ID NO: 711435 - DNA, 97 bp, Homo sapiens
ctgggtcagtccgccgctcaccccgcggccgcaccttcccgccttctcaggagaactacgatgacccgcacaaaacccctgcctccccagttgtcca

SEQ ID NO: 711436 - DNA, 102 bp, Homo sapiens
ggttctccatcgcgcgcacggcagcctagcgcaatgaggcgggcagcactgcgttcccatttcatcagaaccaccagaggaaggagagaaagaggatcttag

SEQ ID NO: 711437 - DNA, 97 bp, Homo sapiens
gttctggttccggtttagatagctacctgccggaacttgccaagggtacagctctgccggggggggaaaaagtggtaccattttgggcgttcttgag

SEQ ID NO: 711438 - DNA, 101 bp, Homo sapiens
gttcaatgcagacaagacggatgtgatgctgcaatacgagaattggagacccaaccagccagacagcttcttttctgctggagaagactgtgttgtaatca

SEQ ID NO: 711439 - DNA, 80 bp, Homo sapiens
ggccccagcccgtgaaaagtgaggtgagaagccctaccactgcaactgggacggctgcggctggaagtttgcgcgctcag

SEQ ID NO: 711440 - DNA, 76 bp, Homo sapiens
cctcggccccaggttctctgcagatgcagtaccagcagagcatgcaggaaagattctgaagcttggcggagagggg

SEQ ID NO: 711441 - DNA, 100 bp, Homo sapiens
ggttacagagcatctgggcttggagaccactgtgaaggtccgagtgaagctgaagaattccagcttgaggtgagtgggctactaggggagatgaactgcc

SEQ ID NO: 711442 - DNA, 97 bp, Homo sapiens
cttcggcgcgggactcaagtacaactcccggcacgagtttctgaacttctggaacaaacaggacacattggagctggagagcccctcgctgacatcc

SEQ ID NO: 711443 - DNA, 82 bp, Homo sapiens
caggctcaagcaatcctaccatgtcagccttcccagtagctggaactacagttgagtcgtttaggatctagttcacttacaa

SEQ ID NO: 711444 - DNA, 100 bp, Homo sapiens
aagccgactgctgcctggtctgcaaagaagtcctttcaagtctctaggactggactcttcctaagcaagtccggagctcttgtccctggcaaagcgaaag

SEQ ID NO: 711445 - DNA, 100 bp, Homo sapiens
gaaagtccttcaagaagtatagatgtgtccccagttgtcctcatccagggtgctattcgagtccagcctgaagggccggctccctctctaccacggcctg

SEQ ID NO: 711446 - DNA, 101 bp, Homo sapiens
ccttccaggaggaccagcaagggctctgtgtgcccaggatgcgccggcctccagtaagaagactgttagaatgccctcggtaacacagaggctgagagatc

SEQ ID NO: 711447 - DNA, 100 bp, Homo sapiens
ccaccctccgtggcaaggcgaggccccgggggcgggccggggtcaccacgcctgccccagggaaccgcacaggttggagtgcaacggtgcgatctcggct

SEQ ID NO: 711448 - DNA, 89 bp, Homo sapiens
gatgtgatgctggagaacttcaggaacctgctgtcagtggcatctctctgctgaggagttggcaaaaagaagagaagaggaaaaaggca

SEQ ID NO: 711449 - DNA, 83 bp, Homo sapiens
aagcgcaggcacaggaagctggtgacggcgatgaacgtactttaggaagaatcatcaaagtaactcaggaggtgattgactac

SEQ ID NO: 711450 - DNA, 75 bp, Homo sapiens
ttctggcagattctggaaactgtacattgaagcagagggccgttgctccagggagaactgcaaatatcttcatcc

SEQ ID NO: 711451 - DNA, 100 bp, Homo sapiens
tgcaaggtctgtcctcaggtggcagtggttcttatagccctggagtgacctactcgcccgtcagtggttataataaggcaaactttgaaagcagatttga

SEQ ID NO: 711452 - DNA, 98 bp, Homo sapiens
cacgaccagcttttcagagatgagtatgcgctgtatagaccactgcagctgtgatgcagatccatccgccctagcaaaatatgttctggctttggtaa

SEQ ID NO: 711453 - DNA, 83 bp, Homo sapiens
gcaggacttcatccaggcctacgaggaggtgcgcgagaagtacaaaggtgagcgagtgctgtgctttcatgggcctcttcttt

SEQ ID NO: 711454 - DNA, 80 bp, Homo sapiens
cgtactttgtctgactacaatattcaaaaggggaaactgactctactctgtgatgccaagacagatgggagtttccttgt

SEQ ID NO: 711455 - DNA, 100 bp, Homo sapiens
tccctctcataaagggatagcagcccctcatgcagggtatcattgcccagtgcctaagatcttttatgttcagctcactgtaggaaataatgaatttttt

SEQ ID NO: 711456 - DNA, 50 bp, Homo sapiens
atggactgaggctccaaagtatgaggagtgaacaaccaaggcgatgggct

SEQ ID NO: 711457 - DNA, 110 bp, Homo sapiens
gctggcggcggcggcggcggcggcggcggcgctgctcccgggggcgacgggtttgaagatcagcttcagcaatggttgtctgaagactcaggagcatttacggatttaac

SEQ ID NO: 711458 - DNA, 90 bp, Homo sapiens
accatgtgctaaagaatgtggaaacgcacacaggcgggagacactatattcaatcgtgctaagctcctcaatgttggctttcaagaagcc

SEQ ID NO: 711459 - DNA, 99 bp, Homo sapiens
aatcacgttattgaagacatcaagggaaaatggggtgaggaagattttgaagacaatcgtcacttatacagacaatgcagatcttcgtgaagactctga

SEQ ID NO: 711460 - DNA, 100 bp, Homo sapiens
ctcacctatgcaaagaaagggaagctattgctgggattttgaggagggatggctttccgtggctttgctacagccactcctggaagtgctgcctgactga

SEQ ID NO: 711461 - DNA, 75 bp, Homo sapiens
cacctccactccatcctgaaggctaccaactacaatggtggcaagaagaagccactgaaacagcccaagaagcag

SEQ ID NO: 711462 - DNA, 90 bp, Homo sapiens
actactgcctgatgatgagaagttccatgggggctgggccctcattgactgtgaccctagctcggcttgcccttcccctgcttgtgccgt

SEQ ID NO: 711463 - DNA, 100 bp, Homo sapiens
aaccaaccccacatccctcccggctgtagccaagaactattcggttctctacttccaacagaagctctctattggaggcatcatcattctgaaggatacc

SEQ ID NO: 711464 - DNA, 76 bp, Homo sapiens
gagcggcagggcatgaaggtccaggcgctggccaggtttgggccccatggtatccctgtgacagtatttcccaaaa

SEQ ID NO: 711465 - DNA, 74 bp, Homo sapiens
ggaatgactgaatctgatacagcttcagttaatgaaaatgggctagcaattttccagattattcaaagtatcag

SEQ ID NO: 711466 - DNA, 96 bp, Homo sapiens
gccctgagtctttgggggcagcctgcagaggctgcgatattgatgatgttaagaagttcaaaccgggttacctggaagctactcttaattggttta

SEQ ID NO: 711467 - DNA, 90 bp, Homo sapiens
acttcgagagccctgtcatcttctaaacagagcagcagcagcagagatgataacatgtttcagttttccacctatttccctggatatttt

SEQ ID NO: 711468 - DNA, 93 bp, Homo sapiens
gtcgaccctgcacctggtcctgcgtctgagaggtggtgtttgagaagggcggagtgtacctgcacaccagcgctaagaagtatcaggaccgag

SEQ ID NO: 711469 - DNA, 100 bp, Homo sapiens
gatcctcctgccttagcttccaagaatgctgaggttacaggtacaggtttgcagattccgccagcagcacagcaagctctacagatgagtggctctttgg

SEQ ID NO: 711470 - DNA, 75 bp, Homo sapiens
tcgtgtccatcgtcatctgcagcgtcctgctgctgctctccgtggtggatctgactgcagccatgagcagcaatg

SEQ ID NO: 711471 - DNA, 82 bp, Homo sapiens
cgctcaggtgctgcaggcacagcccgagaaaccgcagcactacactgctgattcctaaagaaaagcccccaatcacggttgt

SEQ ID NO: 711472 - DNA, 90 bp, Homo sapiens
aaaggagctcaactccaaccacgacggggccgacgagacctcaggtgagaagccctaccactgcaactgggacggctgcggctggaagtt

SEQ ID NO: 711473 - DNA, 101 bp, Homo sapiens
ttgactggaaacaatggcatttacagaaagagtcaacagcagtggcaacagcctcccagtgcaacgtcagcttaaagaagcagaggagccgcagcatcctt

SEQ ID NO: 711474 - DNA, 98 bp, Homo sapiens
ttctttaagggctacgggaagatcctggaggtggatctgaagaacgggagagcttgtttcatatccatatcccactgtattcctgctaatctgctaat

SEQ ID NO: 711475 - DNA, 100 bp, Homo sapiens
ctggacccctggttcgccggctcctccaatgtgggcatcaacaggtggcgctggagctctcaaacactgctgtcctgcaccagatgcggcgggaccaggt

SEQ ID NO: 711476 - DNA, 74 bp, Homo sapiens
gaccgggacctgctgctggacccggcctgggagaagcagcagcgcaagctgctggagccagttctgcttctcgg

SEQ ID NO: 711477 - DNA, 100 bp, Homo sapiens
ggtacagacaatttttgctccaccaaacacttcagatatggaagctgtggagcttctaagtaggacatccttagaaactcagaagttggatctgatggct

SEQ ID NO: 711478 - DNA, 98 bp, Homo sapiens
gatgctaatttgggaaaaagctccaggattctgacagggatgttgcgaagctcgcaatccctcaacaatctgactttcataataaccgttaccaaaaa

SEQ ID NO: 711479 - DNA, 82 bp, Homo sapiens
tggcggatcggctcacgcagcttcaggacgctgtgaattcgttcgtaatggacctgaaagtggcagcaagattatggttcag

SEQ ID NO: 711480 - DNA, 75 bp, Homo sapiens
ccctctggacatacgattaaaagatggcaagcttgcatcgagagccactgcgagtagctgctgttatgacatggc

SEQ ID NO: 711481 - DNA, 51 bp, Homo sapiens
cattgatatctgcttctaagatgaccaggttattcagcgatagttatgacc

SEQ ID NO: 711482 - DNA, 100 bp, Homo sapiens
gcacactgtgggggtgtcctggtgcacccccagtgggtgctcacagctgcccattgcctaaagaactatcatggtgaacttacttcagattgtgcgggac

SEQ ID NO: 711483 - DNA, 82 bp, Homo sapiens
taagaaagaagatgttaactttcagggaagtgccagacacagcttcagaatgtgactccttaaattcttccattggaaggaa

SEQ ID NO: 711484 - DNA, 124 bp, Homo sapiens
gagcgcgctcgctccggcgccggcctcgcctcctcgcagcagcgccatggcaaaacaacgagtggatgagaaacccagcctgggagccgtgaagctgcaggaggccccctcggctgcctcccag

SEQ ID NO: 711485 - DNA, 100 bp, Homo sapiens
atcgaggacgacttcaactatggcagcagcgtggcctccgccaccgtgcacatccgaatgggtgtatgcaacagcgttattgcaacaggctaacgaaaac

SEQ ID NO: 711486 - DNA, 100 bp, Homo sapiens
atcaacaacctcaagaagcgctttgaccacagtgaaatatactgaccattgtcagtggccttctcatgctgctactgttcctgtccgagctgcagtatta

SEQ ID NO: 711487 - DNA, 82 bp, Homo sapiens
aacagaacctgtccaggagctggcatgacgtgcaggtctctagcgcgattttttatcaagcagaaatgcatcgaacaacgag

SEQ ID NO: 711488 - DNA, 100 bp, Homo sapiens
ggcgaagcgggcgagcggtggtttggacgccggcggagacgcgggcgagaaaggagatgaagttgctggagcaggcaggttctctgaaaggctccctgag

SEQ ID NO: 711489 - DNA, 75 bp, Homo sapiens
tttaagaaagaagatgttaactttcaggtaattcatttgcacacctgttagcaagaaacagaagttgaaggactg

SEQ ID NO: 711490 - DNA, 101 bp, Homo sapiens
cccaggtcaccgccagcacgcgcctgcttcccgtctgcgcgagtccacgcagctccccaggctccccacaggtgcaggaagccgccgcccagccatggacg

SEQ ID NO: 711491 - DNA, 90 bp, Homo sapiens
gagaagagtcagaatgggggcgtcggggaggaggtatctctgatgaatatataacacctatgtttagtttttataaaagtattggggaac

SEQ ID NO: 711492 - DNA, 74 bp, Homo sapiens
aggattccaagtaactcttatttggcttcagggatgacttcttagggggcaggggaggtagtcgcccaggcgac

SEQ ID NO: 711493 - DNA, 101 bp, Homo sapiens
tgtactatcctcggtgctgtggtgcagagctagttcctctccagctcagccgcagttgtctgctggttctcagcttgaagaagattctgcagtccttattg

SEQ ID NO: 711494 - DNA, 100 bp, Homo sapiens
agacttgctaaaggagaagtctggtgtaatacaagatgctttaaagaagcccgagcgggaagaagttccgcagcaagccgcagctggcgcgctacctggg

SEQ ID NO: 711495 - DNA, 96 bp, Homo sapiens
tgtgccctagcaccccgagaaccgtcagtttgagccagatgccttttaaagatcgctgtgaatggttctatgaacatttgcattcaggacagccag

SEQ ID NO: 711496 - DNA, 99 bp, Homo sapiens
ggagaatcaatttatggtggatattttaaagtaacaaatgtggcaattattttggatctatcacctgtcatcataactggcttctgcttgtcatccaca

SEQ ID NO: 711497 - DNA, 100 bp, Homo sapiens
ctcctagtcaaagccaagacaaggacatgaaaaagaagaaaatgaaggaaagcgaggctgacagcgaggtaagaaacgttttcactatgactgcgaaaga

SEQ ID NO: 711498 - DNA, 75 bp, Homo sapiens
agagaggaccccggtacatctgaaagccgggaaatgttgatattcactgatggactccaaagaatcattaactcc

SEQ ID NO: 711499 - DNA, 90 bp, Homo sapiens
taaatggcctagcccagcaaatgatcagccttgcaaataatcacagattagctcaacacggaggtagtcacgtttcccggaaatccgaac

SEQ ID NO: 711500 - DNA, 90 bp, Homo sapiens
ctgcgacgccaaatacgtctgggcagccacggccgggggcgtctttcagagcattacggcatgtggcgtcatagtagaattaatcaaaag

SEQ ID NO: 711501 - DNA, 75 bp, Homo sapiens
ggagcaagcgggcgagggcagcgccctaagcaggaatcccttggcaccatgtcctgtgtgcattataaattttcc

SEQ ID NO: 711502 - DNA, 75 bp, Homo sapiens
cttgctctttgctcaggctcttttcccacagacaagcaagaggaggaacgacgtagaagagaggaagagatgatg

SEQ ID NO: 711503 - DNA, 100 bp, Homo sapiens
tgggcggatgttgtgaaccgggtcgcggcggccgaggctcggggaacagctggaggaaatggaagaacgccagaggcagttaagaaatggggtgcaactc

SEQ ID NO: 711504 - DNA, 100 bp, Homo sapiens
ttcaccatgaaatggatagatgaggaagacttcacagagaatgcagttgtcttgacttcaggtctgtctgttctgttggcaagtaaatgcagtactgttc

SEQ ID NO: 711505 - DNA, 75 bp, Homo sapiens
gcaaaaccatgtccaaaccaggaaatggacagggtgtgggccgaagatatgctcatgtggtgttgaggaaagcag

SEQ ID NO: 711506 - DNA, 100 bp, Homo sapiens
ttctgtgcctggaaaatatctgttaacagactgcttttacacctacccttcaggctctacacacagatgatcctctcacttgggattatgtggcaaggcg

SEQ ID NO: 711507 - DNA, 121 bp, Homo sapiens
ggagatggtgctttgtcagccctgattgagcccaagaaaaccccctgcatacacaggtcttagtaccctgcaaaggaagcctgtcgagcagcatccagtctacttgtcagtttgagtccta

SEQ ID NO: 711508 - DNA, 108 bp, Homo sapiens
cagcagatggcggatgccctgcagtacctgcagaaggtctctggagacatcttcagcaggctttatcctgtggataaacgcagagtgaacgagtttggggagtcctac

SEQ ID NO: 711509 - DNA, 98 bp, Homo sapiens
cgggctccgggaaaactacactggccaggaatactcccccagttgcaagaggcgcaggaccgtggaagacttcaacaaattctgcacctttgtcttgg

SEQ ID NO: 711510 - DNA, 83 bp, Homo sapiens
agaccaagtcctcgctggactgctcagggtgccagacctcatcacaggggcaagtgtccgagtggtgaatcagctacttacag

SEQ ID NO: 711511 - DNA, 75 bp, Homo sapiens
aaatgaacctgaacgatttcatcagtatggatcccaaggtttcccttgggggctttgaaataacaccaccagtgg

SEQ ID NO: 711512 - DNA, 74 bp, Homo sapiens
ttaccccttctcaccgaggaagagcgggagaaaggaatcagagaaagaccttcggtacgttggcaaaattttgg

SEQ ID NO: 711513 - DNA, 90 bp, Homo sapiens
acgtgctctttagctactccttttcctacaagcatctcagtctgcggacgctgtataccctcctccacttcccgctgcagccaataaagg

SEQ ID NO: 711514 - DNA, 75 bp, Homo sapiens
gagacctctacttagctcagcaattcttaccttttgatgacagtgcaattttggattgccagttcagtgagtttt

SEQ ID NO: 711515 - DNA, 98 bp, Homo sapiens
cggaggactcccggtatcttttgacaggctggcgcctcggctctggggacccgcagatttcatgcagaaagagctattggtatcattacccacatcct

SEQ ID NO: 711516 - DNA, 82 bp, Homo sapiens
cgaggatcgtgggagctaagaatgaatggacctgagtggaccctttgatcacatcagtaaacatgagcggtaccaaacctga

SEQ ID NO: 711517 - DNA, 75 bp, Homo sapiens
tcgctgatcgcctaacttctactgacgaagcttggaagttgcagaagtttgcaggcctttcagatatatccatct

SEQ ID NO: 711518 - DNA, 100 bp, Homo sapiens
gagagccggatcctttcccagaagaatgagaatgagttctttatagctccaagctctacagattcttcaaatatattgagaatagggatgttgcaaaaac

SEQ ID NO: 711519 - DNA, 100 bp, Homo sapiens
gaatatctggttattatcaggttcacgccaacagtacctcattgctctttggcgactcttattgggtgttgaaagcagcaggggcctagaagacattaaa

SEQ ID NO: 711520 - DNA, 88 bp, Homo sapiens
tataaagctctgactgatgacagtgatgaaaatgaagaagaagatgcctttaccgacccactggagaggggtctcctgaaaaccctgc

SEQ ID NO: 711521 - DNA, 98 bp, Homo sapiens
cttgagcctgtgaaggacactgacattcagcggtcagatagcatcagacctgcattgaacagtcctgtggaaaggccaagcagtgaccaggaagaggg

SEQ ID NO: 711522 - DNA, 75 bp, Homo sapiens
ttcagatagttctgttattgttcagcctttttctaaacctgccctggaggaagcactgagcatccaaaccccgcc

SEQ ID NO: 711523 - DNA, 100 bp, Homo sapiens
aagaaatcacagtgctgagtcagtgtgacagtccatatgtaaccaaatattatggatcctatctgaaggttgtcggggccaaagtggtaacgaacgcccg

SEQ ID NO: 711524 - DNA, 83 bp, Homo sapiens
ccgggtggcttacagacgctgccagcatcgccgccgccagaaactagatgatggccatttaaacaactctttgagctctccag

SEQ ID NO: 711525 - DNA, 90 bp, Homo sapiens
gtctcttctaagctgaataaagctgttttggaactgtcaggtacctcaaagcgttgggggccgtcccgctcctaaggcaggaagatggtg

SEQ ID NO: 711526 - DNA, 88 bp, Homo sapiens
tcacccgaacatcagggccctccagactcaggcgccccaacactacgacgaggacttcaaccatgagccgtgtcagaggaagggccac

SEQ ID NO: 711527 - DNA, 50 bp, Homo sapiens
tgtgtcatcatcgccacgctggtgtgcagcaggaggatgcattagcacaa

SEQ ID NO: 711528 - DNA, 74 bp, Homo sapiens
agcgaagtccacccagcgtttccgagataaggagtcaggccagggcgggatgacactcattgattctaaagcat

SEQ ID NO: 711529 - DNA, 75 bp, Homo sapiens
ctcagaactactatattcagtggctaaatggctccctgattcatgacatccacgacagcgatggcagttccagca

SEQ ID NO: 711530 - DNA, 75 bp, Homo sapiens
agcctagaatgcatcagtgcccttgtggcgaatggggctcacgtcgagctctttttcagacgccactaccctctc

SEQ ID NO: 711531 - DNA, 75 bp, Homo sapiens
gacaatgccttggtttcaacactatcggaatggaggagatgttaaagtaacccatcttgcaggacgacattgaag

SEQ ID NO: 711532 - DNA, 90 bp, Homo sapiens
gtccgccttctctgtcagctctttccccgtcagcatcccagccgtgctcacggctgaaggtgatgtggccgccctcaaccgacgcatcca

SEQ ID NO: 711533 - DNA, 75 bp, Homo sapiens
ggcaagcgctgttcaaacccatgaatgctcggtggcatggaggtgcggtggtgcgccacctcggacccagagcag

SEQ ID NO: 711534 - DNA, 100 bp, Homo sapiens
cacgtacacagcaggactgagtgaagaagaacagctcgagagagcattacaagccagcctctgggaccgagaacctgcacttgttgccaagtcttccatc

SEQ ID NO: 711535 - DNA, 50 bp, Homo sapiens
ctcagcagcaacttaatggaaactagaatcatgcagacatttgttacaca

SEQ ID NO: 711536 - DNA, 100 bp, Homo sapiens
cacacccaaccctgtggtggcgatggcaggatcatcctctttgatagaggaacaaccatgtcatcagaatcgagcaaaaaacggaagcccaaagtgatcc

SEQ ID NO: 711537 - DNA, 83 bp, Homo sapiens
aggccaacccttttggaggtgcttctcatgcaaaaggaatcgtgctggaaaaagtgagagaagaccaagaggtcggagaagag

SEQ ID NO: 711538 - DNA, 74 bp, Homo sapiens
gccaaggcagaagaaatcttggagaagggtctaaaggtgtttcatgggactcccttccggatgagctgctcttg

SEQ ID NO: 711539 - DNA, 50 bp, Homo sapiens
gagatggcattcaagtgcttaaaaatacactggccaaaagaagaccctag

SEQ ID NO: 711540 - DNA, 82 bp, Homo sapiens
cccctcaccagacagatcgctgtcaaaaccctagacaatgcagatcttcgtgaagactctgactggtaagaccatcaccctc

SEQ ID NO: 711541 - DNA, 136 bp, Homo sapiens
tgtgcaacaacctcttgaggatcgaatcttcactcccgctgtctcagcagtctacagcacgcgcttctctgaagtagctttggaaagtagagaagaaaatccagtttgcttcttggagaacactggacagctgaat

SEQ ID NO: 711542 - DNA, 73 bp, Homo sapiens
atttgggatttgcattgatgaaacaggtggagcggctgatcaaggagttctccatctacatgacaaaagatgg

SEQ ID NO: 711543 - DNA, 75 bp, Homo sapiens
ggtctcaatgttgccaaaatgtttcctaaagttcgtgaatctcaacttgaagtatttgaaaaggagcagtccatc

SEQ ID NO: 711544 - DNA, 96 bp, Homo sapiens
tggacatcgagcctgagggaggggaaaggcgcagggtcgcgtggggcaggcagtggcgctgcgggccaaggccttcggcttcaacgtgctcttcta

SEQ ID NO: 711545 - DNA, 100 bp, Homo sapiens
tggcttaacaagcagctcagcatcagaaaagatctgtaatgcccacgggtgcaaaatggccatgagactagcactacctggcagcaccatctaaacctgt

SEQ ID NO: 711546 - DNA, 75 bp, Homo sapiens
gcggcgaaggaggcagaggcacttatgcttgtcagcacaagtgcatacaccttgatagcaccaaatataaaccgg

SEQ ID NO: 711547 - DNA, 75 bp, Homo sapiens
atgcgcgcgatgctggaccagttgatgggcacctcccgggacggatcacgcagatttgcgaagccatttcttcac

SEQ ID NO: 711548 - DNA, 75 bp, Homo sapiens
atttaagcctgatctaacccctagaaacagacctctgtgagtgaaagccttcagagggaagctgctaagaagcag

SEQ ID NO: 711549 - DNA, 51 bp, Homo sapiens
agtaaaaattgaaggttatgaagatcagagggtgatgagacaggagtgatg

SEQ ID NO: 711550 - DNA, 100 bp, Homo sapiens
ccagaaccagagcaccgagatcaagatgtccctgcactcaggcctctggcgggtctgcttccttgcagagtacccaaaggcaagtggaacagctctaatg

SEQ ID NO: 711551 - DNA, 76 bp, Homo sapiens
ggcgccggcgagatgcctttgttcaccgccaaccccttcgagcaagacgtgggtttctgagtcccttcaacatgat

SEQ ID NO: 711552 - DNA, 96 bp, Homo sapiens
agtttaattgtctcagagttcttcaggctgtacaggaaatgtggtgccggcatctgcttctgatttggagcaagaggtggtggtggccttcccccg

SEQ ID NO: 711553 - DNA, 90 bp, Homo sapiens
gccctggtcttgctcggccgatgaagtgcagaggtttttttctggagatacaactcgtcaacgaatcaaattcagtgatgacagagtatg

SEQ ID NO: 711554 - DNA, 100 bp, Homo sapiens
gtgctttctgtcccagaactccagccggagctgcggcccgcaactccctcagcctggcaggtcccaggatgcttcggggcaaccccacgcatgcgcgctc

SEQ ID NO: 711555 - DNA, 100 bp, Homo sapiens
aaagccttatatgatttccgaggggagaatgaagatgaactttccttcaaggcttgcgataggcttttggctcatcgagtggaaaccaaaatgaagggaa

SEQ ID NO: 711556 - DNA, 80 bp, Homo sapiens
cactgttcctggaggaatccgagaagagcagagcggagggagccccagacacgcaggttacgggcaggacttgagtggct

SEQ ID NO: 711557 - DNA, 75 bp, Homo sapiens
aaatcctaatgataacagaactagctccaatgcagataaaagcttgggtccagattttggctatgtaactcgagg

SEQ ID NO: 711558 - DNA, 100 bp, Homo sapiens
gaaaacagaaatgctctgcccttggagaactgctaacctagggctactgttgattttgactatcttcttagtggccgagaatggatcttggagaatgtct

SEQ ID NO: 711559 - DNA, 75 bp, Homo sapiens
cttttagccgatgctgtggccgttacaatggggccaaaggagagagaagctcttcagaaacagctggatgaagca

SEQ ID NO: 711560 - DNA, 74 bp, Homo sapiens
agcagacgctttggctactgcaggcgcttactgaattatatccagatcgagagacagaagattctgaaagggtt

SEQ ID NO: 711561 - DNA, 75 bp, Homo sapiens
ggtgtgcacccccaccatccacactgccaccgtcaaggtcgtcatacaggtaaaagtttcatttgatctgaatag

SEQ ID NO: 711562 - DNA, 100 bp, Homo sapiens
gctgagcttggcgcacgggccgaccaggctgcaagatcaaggccctgcgggccaagacaaacacctacatcaagaccccagtgcggggcgaggagccggt

SEQ ID NO: 711563 - DNA, 98 bp, Homo sapiens
tccaaggacacctacagccccgacgaacatttctgggtgacactcaacaggattcccggttagctcccagcgatgccagatgggatcagcacagccct

SEQ ID NO: 711564 - DNA, 91 bp, Homo sapiens
gtaacttttgatgatcatgatacagttgataaaattgttgggtggttctcttcccaaagtggaagccaaattcatcaattatgtgaagaat

SEQ ID NO: 711565 - DNA, 78 bp, Homo sapiens
gccagccaggcggagagggagatgcaagtgtgtgttttaatagaaaagttgtcactttccaaaatgccctttagaggt

SEQ ID NO: 711566 - DNA, 90 bp, Homo sapiens
gctggttctctgggatataaataaggtcagtttaggggctggtgcaaaggatgagttgcacattgttgaagcagaggcaatgaattacga

SEQ ID NO: 711567 - DNA, 90 bp, Homo sapiens
tgattgcaagcatcttttcttctgcatggtgggtacccccatgctgtggcacggcttcagtgatgtgaaatttgaaagtaaagaacgaac

SEQ ID NO: 711568 - DNA, 101 bp, Homo sapiens
ccacgtggattctccagacgagagctctagaggacaaaatcccagtccttggcacaaactcaggaaatggaagccggagtctgttttttgtggggctgcta

SEQ ID NO: 711569 - DNA, 76 bp, Homo sapiens
gcttcagcctagagtcgtgccgcagcatggtgaacctcatggatctctgtgacctgcctgctgcctccctcaacga

SEQ ID NO: 711570 - DNA, 105 bp, Homo sapiens
gcgtgtctaggtgagtcgcggtgggtcctcgcttgcagttcagcgaccacgttcccagaggtccacttgggccagtggtactttatcgcaggggcagctcccacc

SEQ ID NO: 711571 - DNA, 100 bp, Homo sapiens
attcgtagcacgcttgcttgcatcctggaatattctcaaccagggtatcactgggatacatcagattggatgccaagcgttcctctgccggacatacaag

SEQ ID NO: 711572 - DNA, 80 bp, Homo sapiens
agcagtgaaccagcacgggggcgtccgtctccaagagagtatgaagagagtgcgtctgtagggcagggaagatggcggac

SEQ ID NO: 711573 - DNA, 100 bp, Homo sapiens
tattaaagaacactagacatccctttttaacaaaaatatttacaccagcagctccagttcataccaataaagaagatcctgctacccaaactaatttggg

SEQ ID NO: 711574 - DNA, 82 bp, Homo sapiens
ccaggaatggctaaaaatgtttcagaatttgaaagacatattggctgacctgatacctaaggagcaggccagaattaagact

SEQ ID NO: 711575 - DNA, 75 bp, Homo sapiens
ccagcctgtggttttacgatatccaaataaactgtgtcagatcatataccctcgccagcagctgctgaccctccg

SEQ ID NO: 711576 - DNA, 100 bp, Homo sapiens
tggttaaggaacaggaggaaaccattcagaggtctcagcttgactatgaagttcccagggaaaaggccttccaaaagagcagcaccggcttttcacctga

SEQ ID NO: 711577 - DNA, 51 bp, Homo sapiens
cgtgggcaccttgcgcttcttgcagtcgcagccatggcaatgacaggctca

SEQ ID NO: 711578 - DNA, 101 bp, Homo sapiens
tccaactaaaggggcggccagcccgattcctggacagccctgagcccatgacaggtacactgaggaggggacggctccgtcttcacattgtgcacagatct

SEQ ID NO: 711579 - DNA, 96 bp, Homo sapiens
ggagaataggtttggtggtccgagatccgaggcaacggtggctcctcgaggtccacggtcccggaaagggctattgcaagacacgaagtccgagaa

SEQ ID NO: 711580 - DNA, 50 bp, Homo sapiens
ttttcttatctattggaggaagctcaggatactgtcatgaagcagacaca

SEQ ID NO: 711581 - DNA, 75 bp, Homo sapiens
ttagaactgcagaggttcctctacagcaagaatgtaattgaccggaaaccataccctgatgatgaaaatttagtg

SEQ ID NO: 711582 - DNA, 143 bp, Homo sapiens
acccagattatgcttttggaaaatgagaacaaaaatttaaagaaagatttgaagcactacaaacaagcagctgagtagtgggcagcagtcagtgacaggtgtaacctctgtggatgacagcaacagttactggaggatacggg

SEQ ID NO: 711583 - DNA, 50 bp, Homo sapiens
agagaagtgcccgaggagagttaacagctacccaggtggatttagacaag

SEQ ID NO: 711584 - DNA, 82 bp, Homo sapiens
gcatcctatggctcaaagaaagatgattatgtcgttcttccctctttccaatagatgatggcttgcttgatgatggtcacag

SEQ ID NO: 711585 - DNA, 90 bp, Homo sapiens
gcgaccacacctgatggtacagtgagctacgataacaagcagtatcctggtgtgaaccagctatcctccagtataggaggattgagtctt

SEQ ID NO: 711586 - DNA, 100 bp, Homo sapiens
ttggaagtgtctcttagcagcgcgcggagaagaacggggagccagctatgacatggtgcattacggccactccaaccagctgcgccaggcacgggccatg

SEQ ID NO: 711587 - DNA, 74 bp, Homo sapiens
tttttgactgctctgctcctctatgctggacatcaaatttccagtaacagcaacaagtgggaatggagactttg

SEQ ID NO: 711588 - DNA, 82 bp, Homo sapiens
caaaattaaacaactacctgctgaaattggtgctaactttgagtacatcatcgcagaaaaaagagggaagaataacaccgtg

SEQ ID NO: 711589 - DNA, 75 bp, Homo sapiens
ggagagtgtgcggctccaggtgggctcacgcggaatgggacgcgagagataaagattctatccgacgagtagtac

SEQ ID NO: 711590 - DNA, 90 bp, Homo sapiens
tggatggctggaggtgcagggccaggaggaacatgagctggtcagtgagaaggtcggaggggccgaggggaccaagctggatgatgactt

SEQ ID NO: 711591 - DNA, 100 bp, Homo sapiens
cttatagaaaaaagattaaatctcagggaaactcttatggaggcttataccagccagtttgtatcccttgtgatgtttgcccttatgatgtgtgatgatc

SEQ ID NO: 711592 - DNA, 100 bp, Homo sapiens
catacgcattcttcgagacctctgtcagcgagttccaacttggtctgattttccaagctgggtttgtccagaggggttgcgtttatccggtttgacaaac

SEQ ID NO: 711593 - DNA, 74 bp, Homo sapiens
aacaatcaaagacaatatcaatgacaaactgacggaaaaggagagagacagtccagagcgtgagtccattcaca

SEQ ID NO: 711594 - DNA, 100 bp, Homo sapiens
gctggagagaccccgcggctgggcgttcatctaccacgctttcgtctgagatgagtgaactgagtgtggcacagaaaccagaaaaacttttggagcgctg

SEQ ID NO: 711595 - DNA, 101 bp, Homo sapiens
tggaaacagacccggcgcccagcggtagccctccttgcgcctccgattcccagccttcaaagaaaaacctcggtatccaccaagtcaggctcaagcagctc

SEQ ID NO: 711596 - DNA, 75 bp, Homo sapiens
cctgggacgtgccacagatcccatcagaggcaccccagacacaatactagagtaaaaggatggtttcttctggac

SEQ ID NO: 711597 - DNA, 100 bp, Homo sapiens
cggcgtggtcagagcgagtctcggagaagatgtggtggcttccgtttgttggtggaggaggtggcaggcctcggcggaggatgttgacaaggcagtgaag

SEQ ID NO: 711598 - DNA, 75 bp, Homo sapiens
catatttacctgaatcacatcgagccactgaaaattcagctgtcggaaaaggtaacagaagatggaactcgaaat

SEQ ID NO: 711599 - DNA, 100 bp, Homo sapiens
tgagcagtgacaattgctaggcggagacagtgcagggaagagagaccttagaaaggatcaggactggcggagtgcttgtgatttcacgtatttttgctga

SEQ ID NO: 711600 - DNA, 88 bp, Homo sapiens
gccggccagaagcgggcggcgcgggggagatgcctctgcgcttagataccttcatgaaaacagaatcatccatcgggatctaaagcca

SEQ ID NO: 711601 - DNA, 96 bp, Homo sapiens
tagtcaagcagggctacgtgaaaatccgcagcaggaagcttgggggaacagctcctgcccaggtctgtgggcactcagcatggatttcagtctccc

SEQ ID NO: 711602 - DNA, 96 bp, Homo sapiens
cgcaaaccaaggatctggggatcttcgcactatcccaaggactttctgcagggcgactgcaccaaagcgaaacagaagctgaactggaagccccgg

SEQ ID NO: 711603 - DNA, 96 bp, Homo sapiens
cggggtcttctccatcgtcttcgacgtcgtcttcttcatccagcacttctgtttgtacagaaagagaccggggctggagtgtagtggcatgatctc

SEQ ID NO: 711604 - DNA, 83 bp, Homo sapiens
tgcagctatcgtggacgtcactggccctggtggggattgacagccacgggaaggcctccggtgtggctgtctctgatggtgtc

SEQ ID NO: 711605 - DNA, 98 bp, Homo sapiens
aatgaaatcttagaatcacccaagaaggcaaagtcgcgtttaataacgtctcagctgagtctgctctgatcacccaacaagacctagctccccagcag

SEQ ID NO: 711606 - DNA, 73 bp, Homo sapiens
acaaagaaaaaaagaagaaatgaacagaataagaacattagttggagctggaagctatcaaagctcgagtcag

SEQ ID NO: 711607 - DNA, 74 bp, Homo sapiens
agaagatcttccagagaataagaagcagggtgagatgttagataacatagagttgaatgtcatgcacacagtgg

SEQ ID NO: 711608 - DNA, 105 bp, Homo sapiens
tgttcagtactgtgggtgatatttgcctttagtgcactcttctccttcacagtaaagtggctggaagatgagaatgtgcctactgctcctgatcctccaagtcaa

SEQ ID NO: 711609 - DNA, 90 bp, Homo sapiens
aggatggagaagaccagccaaagcaagtttatgttgataagttggctgaattaaaagtttctaagcatgaattgaggaacagaagaagca

SEQ ID NO: 711610 - DNA, 105 bp, Homo sapiens
tggagctggaaaacatcgtggccaacacggtcttgctgaaagccagggaaggttcctcaagccaggacctacgcacctgttgtgagtggtgttatagttctgcag

SEQ ID NO: 711611 - DNA, 82 bp, Homo sapiens
gaagaacctgtacagagaggtgatgctggagaactacaggaacgtggtctccctgggcaattgccttgcctcctattgcaaa

SEQ ID NO: 711612 - DNA, 50 bp, Homo sapiens
gaaaaggggattttgctcgcaagggaaaagcttcactctgaccatcactg

SEQ ID NO: 711613 - DNA, 75 bp, Homo sapiens
cgcagtggtcgcttcttctccttggctctacagtgccatatatgtagcaaagattccttggactgtggtaagctg

SEQ ID NO: 711614 - DNA, 100 bp, Homo sapiens
agaaggcatggagagtggtgaagtacctggagtagaacagaaaaattattatgtctgtgttcccttgggactcattggaaattgtacagtgacatcttct

SEQ ID NO: 711615 - DNA, 100 bp, Homo sapiens
cgggggagggcggagctggcgcggcccctagctttctccttctggtgtggggcccgagagggaaatctggtgctcctccagatggcctgatatgaaggag

SEQ ID NO: 711616 - DNA, 100 bp, Homo sapiens
atgaaagcctggaatggttggcaagtcgaacaaagtcagctttctccaatctttctacatcccagaggcggcgactggcggcgcgatggacctgaccggg

SEQ ID NO: 711617 - DNA, 100 bp, Homo sapiens
tccgcgcggtgcagcgcagtctcaggccgcgggacaaggacacagcaggccaggaaagatacaggactatcaccacagcctattatcgtggagccatggg

SEQ ID NO: 711618 - DNA, 74 bp, Homo sapiens
aacggggcgcacttcgacccggaagtttacctagacaaggccgcacaacctgcctgcgatacctcctgctcggc

SEQ ID NO: 711619 - DNA, 100 bp, Homo sapiens
aaccgctaccttgctctttcgagatggggctgccacgccgccggttcagctccgaggccgaaggatcctgcttatttttatggatatgtgtatttccgac

SEQ ID NO: 711620 - DNA, 100 bp, Homo sapiens
attcgcgcctcccagccccgccttctcttccagatcttcgggactgaaagtggagctgttccaaaaagaaaagaccccttaacacacactagtaattcac

SEQ ID NO: 711621 - DNA, 90 bp, Homo sapiens
cccgtggtcacatctgggttgaaggtgatcatcatggacacagttttgacagtaattcttttgggccgaaacctctgcgccatgagagcc

SEQ ID NO: 711622 - DNA, 100 bp, Homo sapiens
aagccagggggatccaggacgtccaggggaacctgggcttccaggtgctcggtccttgctggtgcagacgaagcggcgggctctggagaagattgacctt

SEQ ID NO: 711623 - DNA, 83 bp, Homo sapiens
cttcgcctcctaatccctagccactatgaaaacgccaggtcttcaagggtgtctgccaccaccatgcctgacccatttggcag

SEQ ID NO: 711624 - DNA, 98 bp, Homo sapiens
gtgattttttgcctttgttgattaactggacaaattcaggaaggattacggccaggagatacaaccagcactttctgtggtactcctaattacattgc

SEQ ID NO: 711625 - DNA, 90 bp, Homo sapiens
ccgttgactgctggtccatcggagtgattgcctacatcttactgtttctagggtctgacatgatcaccagtcccactcccaccaaagagc

SEQ ID NO: 711626 - DNA, 82 bp, Homo sapiens
cggagccgtgtggaccaggaggagcgctgctttcaactggcttctgtgtaatgtcatccaaaccacttctctccatgatatt

SEQ ID NO: 711627 - DNA, 108 bp, Homo sapiens
gcgggcgagcggtggtttggacgccggcggagacgcgggcgagtttcatgatcaacatgggagactcccacgtggacaccagctccaccgtgtccgaggcggtggccg

SEQ ID NO: 711628 - DNA, 83 bp, Homo sapiens
caagagcttccgcggtgtcattctgacctcgggggatatgagactttctactcggaatatcctgagtgttgcgtggatgtaaa

SEQ ID NO: 711629 - DNA, 83 bp, Homo sapiens
atcctgatgaagttcgagcactaatatttaagaaagaagatgttaactttcagattcatctgaaaactacattaagatgaaga

SEQ ID NO: 711630 - DNA, 100 bp, Homo sapiens
gggaagcaggagtgcatggactccaagctcctggccatgaagcagtcctctggccatacctgctccagttcctcacccctgtgcgcttcactggggccct

SEQ ID NO: 711631 - DNA, 75 bp, Homo sapiens
tggagctctacgcctcctacgtttacctgtccatgcctgctggagtatgatactgtgaccagggaagtaaaagtt

SEQ ID NO: 711632 - DNA, 75 bp, Homo sapiens
cgggatggagaaggaggaggaatcgaaaggtcccccttctgggaaagaccgagtgaagaaaggtggatcctacat

SEQ ID NO: 711633 - DNA, 82 bp, Homo sapiens
cctctgaaaaccttcctcagtttcagatagacctttggccagagcaagacataaaagattcttttcaacaagtgatactgag

SEQ ID NO: 711634 - DNA, 98 bp, Homo sapiens
gaggccctggatagtgatggccaacaccccagatgcaagcgtggattgggagatgacctgatcagagccatcaagaaactaaaggcacttggcactgg

SEQ ID NO: 711635 - DNA, 82 bp, Homo sapiens
tctgtcttcggtggactccttcggcagtccacccaccgccgccgcctcccagcctaagttcgaggcccaggcgcctccatca

SEQ ID NO: 711636 - DNA, 58 bp, Homo sapiens
gatactgagcttcttcctatttgccatgggttggatggcaagcatgtggtgtttggca

SEQ ID NO: 711637 - DNA, 100 bp, Homo sapiens
cctgaagcccaccggtccccaacgcatcatgccagggagccaagcgtcctgcccggccaaaaagcttgtggtgaaggggggcaaaaaaaagaagcaagtt

SEQ ID NO: 711638 - DNA, 97 bp, Homo sapiens
tccacccagtatttcaagagtcacttctttacttggtgcaggaaggcagtctttgctacgtacagcaaaaggaaaagaccagtgccctcagtctgag

SEQ ID NO: 711639 - DNA, 100 bp, Homo sapiens
cggcagcgcccggcccccggctcagcccccggagtgcggagccgaccaggccacaacgaagacctaccctcaaacagacattttcgtcacgataccccgg

SEQ ID NO: 711640 - DNA, 87 bp, Homo sapiens
ctcataataattcagatggagaatatatggctggacagctagctgcttatggctataaaattacagatgtatcggcaagcagtgtaa

SEQ ID NO: 711641 - DNA, 74 bp, Homo sapiens
gccagccggctccagagtctggaggctctgcgaacatcaatagatgcttatgacaactttgacaatatctcgct

SEQ ID NO: 711642 - DNA, 100 bp, Homo sapiens
taaagttctgccgggaagcaagaggcaaagagaatcggttggttactggagttggctataatcaatttggggaagtgattgttgatggtgatgttgttca

SEQ ID NO: 711643 - DNA, 75 bp, Homo sapiens
cgggccctgggctggaggtaaaaccccacggagatgcgctctgtgctgcggaaggcgggctccccgcgcaaggcc

SEQ ID NO: 711644 - DNA, 100 bp, Homo sapiens
aacaggcatcatggactgtgcgcccaaggtatgctccagaatcactgacagagagcaagttttctgtggcctcagatgtttggagctttggagtggttct

SEQ ID NO: 711645 - DNA, 73 bp, Homo sapiens
aaaatcacaaatgatttttatcctgaagaggatgggaagacaaaagggtccaagcatctcattttgaaggcct

SEQ ID NO: 711646 - DNA, 97 bp, Homo sapiens
acctggatttacctgttttctgggagcttcgaagagtcggatggcagagagcttgcgcctctttgactccatctgcaacaacaactggttcatcaac

SEQ ID NO: 711647 - DNA, 100 bp, Homo sapiens
cctgagattccaggaggaagtactggcgaagtgctccatgaagaagctcattcacacagaagacccatttaatgatgaacatcaggagaggcaagaggtg

SEQ ID NO: 711648 - DNA, 82 bp, Homo sapiens
ctggacagccgggtcctgaacgctgtgaaatgacagagcgggatgccaccagcttgtccaaagggaagttccaggagctcct

SEQ ID NO: 711649 - DNA, 100 bp, Homo sapiens
ggagggccatgtgttgggtcagcaccatcagcactctggcccccagaagcttctccacattgcccaggagctcctgcacaccgaggagacctatgtgaag

SEQ ID NO: 711650 - DNA, 80 bp, Homo sapiens
atttcagcagacagcgccatcatgaatccagctagcaaagtaattgcactgaaagccgtcatggaaatgatgagtcagaa

SEQ ID NO: 711651 - DNA, 96 bp, Homo sapiens
gccgctatggatgatcgagaggatctggtgtaccaggcgaagctggccgagcaggctgagcgatacgacggcgtccgacctccgatcatgaacggg

SEQ ID NO: 711652 - DNA, 100 bp, Homo sapiens
tcccaagtagctgggattgcaggaaccgagctgtggcctggggttccatggagcaggtggggcgcggaggaactgagctgtggcctggggttccgtggag

SEQ ID NO: 711653 - DNA, 78 bp, Homo sapiens
ctctgactctcggactgagaaacgcaagttgttgacctcctgtactggagagacattaagaagactggagtggtgttt

SEQ ID NO: 711654 - DNA, 74 bp, Homo sapiens
cgcagtggtcgcttcttctccttgtgtggaaggggagtatgtcccagtggaaggcgacgaggtcacctataaaa

SEQ ID NO: 711655 - DNA, 82 bp, Homo sapiens
gcttacaatagttgataccccaggatttggagatgcagtggataatagtaattggtggtgaagcagtattttccaatttgaa

SEQ ID NO: 711656 - DNA, 90 bp, Homo sapiens
catgatgtacagaaccaagtctcttcactactgagtcagtgctgattctctcaaatagagcttgaaggataaatcttcatttttgtttca

SEQ ID NO: 711657 - DNA, 100 bp, Homo sapiens
ctctgtgggcagtaacatatttgatatcactgtggggtggttgtgtcaaaccgattggtgacatctccatgctgtattgtcacaagcacatatggctgga

SEQ ID NO: 711658 - DNA, 100 bp, Homo sapiens
cgagtaccaagttgtgttcgtgttgttggcacaacatttcatggaactggaaggattacggccaggagatacaaccagcactttctgtggtactcctaat

SEQ ID NO: 711659 - DNA, 51 bp, Homo sapiens
gcgaagccgaaaaaggcagcagcgaaggtcttgtcggctgcagcagcagct

SEQ ID NO: 711660 - DNA, 100 bp, Homo sapiens
ctgctgctgctgtgggcgccgcctccgagccgcgcagttcctccgtgtcacaaagcagtacctgccccacgtggcgcgcctctgtctgatcagcaccttc

SEQ ID NO: 711661 - DNA, 76 bp, Homo sapiens
cgacagcaacagctctgccggctggaagatgatgattattccccaccttctaagagacaaagaccaacgagccacc

SEQ ID NO: 711662 - DNA, 100 bp, Homo sapiens
tgtgccgcaccgaggcgagcaggagcagggaacaggcccataatgaggatcttacaactagagagacctgcaaggctgggttctctgaagatgattacac

SEQ ID NO: 711663 - DNA, 97 bp, Homo sapiens
catcgtgctgaggagccaggtgtacagccttgtgcctgacaggaccgtggccgaccggcagctgatgtccagaccaagatagaacctgtctctccat

SEQ ID NO: 711664 - DNA, 89 bp, Homo sapiens
gagctcaccaactgcgtgcccggcgtgctggaccgccgcgactccgccgcgctgcgcacgcccaggttcgagaacttgtcttggacaat

SEQ ID NO: 711665 - DNA, 75 bp, Homo sapiens
gctgcatatgcccattttgctgtgtgttacagtgacctagagtcccgcagggatgtgaagagagaagaaggagag

SEQ ID NO: 711666 - DNA, 75 bp, Homo sapiens
aaatggagaatggcatgctggtgacggacagtgcagggaagcaactgcagagtttcattgtactgacaacctcag

SEQ ID NO: 711667 - DNA, 119 bp, Homo sapiens
cagctctgcgcggctttttgagcggtcccgcatcaaggctctggcaggtgctggagaatctggtaaaagcaccattgtgaagcagatgaggatcctgcatgttaatgggtttaatggag

SEQ ID NO: 711668 - DNA, 83 bp, Homo sapiens
tctttacagaggaatagtctacaaaggaagacttgtaacctggagaagaggtacattcgctgccagaaagaggtgggaaagag

SEQ ID NO: 711669 - DNA, 51 bp, Homo sapiens
gctggcctccatcactgctgagtgcggctggagtgcagtggcaccatctcg

SEQ ID NO: 711670 - DNA, 100 bp, Homo sapiens
cactgatatctcaaaaggtgatctggacaaaggaacaggtatctcagacactcttgcactcctgtaatgagcctggcactgtgatgaaacacttttcccg

SEQ ID NO: 711671 - DNA, 98 bp, Homo sapiens
gtgccgggcgccatcatggacgaggactactacgggagcgcggccgagtggggcgacgaggctgacggcggccaggtttccaaggtgctattgggagc

SEQ ID NO: 711672 - DNA, 100 bp, Homo sapiens
ggcagcgcgagatgtggaggctcatgtcgaggatctcaccatgaagtgtaacgaggaggaaaaatctcttagctctgaggccttttccaaggtttcactg

SEQ ID NO: 711673 - DNA, 90 bp, Homo sapiens
ggccaccccacctgtgactgttctaccactggctatggtggcaagctctgctcagaagcacttgcacctcctgcgccgccgccccccatc

SEQ ID NO: 711674 - DNA, 90 bp, Homo sapiens
agaaccgtcagtttgagccagatgcttgcctctgccctcgatctgccccttcttcgtattaatcaggcaaatagccccgacctgctcagc

SEQ ID NO: 711675 - DNA, 95 bp, Homo sapiens
cctgtactggctgctgctgccctgcgcgctgctggctggttgagaacttgttgcttagtaaccaagggaccattaagctgtgtgactttggcagt

SEQ ID NO: 711676 - DNA, 100 bp, Homo sapiens
gcggctcttctccaagcatgaggtgcttgaggaatccaaagccctcgtgcgctgcaacatgaagatggagctggagcaggccaacgagagggagtgtgag

SEQ ID NO: 711677 - DNA, 74 bp, Homo sapiens
gaattttgccgatttcatgactaaccagtcatccggtgaaagacagagatcacatttcaactagattcttagga

SEQ ID NO: 711678 - DNA, 75 bp, Homo sapiens
attgaatatcaagaggaggagttgttggatattaaaggactcagcaaaaagagaaagatgtattctgaagataaa

SEQ ID NO: 711679 - DNA, 82 bp, Homo sapiens
gattcaagattatttgcaacagctcacgggagcaagaacgatggcccactgcgtgaccttggttcagctgtccatttcctgt

SEQ ID NO: 711680 - DNA, 101 bp, Homo sapiens
gcctcagtacaaggagagggaaggacccacctagtaagaaaaggaaaatggaaaactgtgcacaaaaccagaagttatccaacaagaccattgaatcattg

SEQ ID NO: 711681 - DNA, 90 bp, Homo sapiens
aggggccttcgccaccacgcactgggtcgtcacggaggacgggaaaatccagcagcagtgtccgagctgcaggaggagggaatgaacgcc

SEQ ID NO: 711682 - DNA, 100 bp, Homo sapiens
cccagcaccaaaggcaaggatttggacggtttctcattgatttcagttcctgggtggagctacccatgaacagcagcaatggcaatgataatggcaatgg

SEQ ID NO: 711683 - DNA, 100 bp, Homo sapiens
cgacaccgtaactatccgcactagaaagttcatgaccaaccgactacttcagaggaaacaaatggtcattgacgagactctggatgttaaggaaatgatt

SEQ ID NO: 711684 - DNA, 82 bp, Homo sapiens
ttggactgagtcctgcaggacacaggccaagaagcttgagagaagaaaaatttcagaaaaattgtctcaatttgactagaat

SEQ ID NO: 711685 - DNA, 82 bp, Homo sapiens
ctggagagcagaagaccgaaagggagaatgcgaggccggtccctgaaccctgcaaccatttacccagtgttgccaaagctcc

SEQ ID NO: 711686 - DNA, 50 bp, Homo sapiens
accgccgccgccatcgccaccatgggtgagcatgggtttatgcgtcttag

SEQ ID NO: 711687 - DNA, 88 bp, Homo sapiens
gggacccacactggcttttaaggaggacacccggacacctggaagctgggaaatgctcatgatggagcagtccaagaagtcctccctc

SEQ ID NO: 711688 - DNA, 100 bp, Homo sapiens
ggtagattgtacttgcctgggagaaggcagcggacgcatcacttgcacttctagaagaatcctagctcgtaatattccagaagataatgctgacatggcc

SEQ ID NO: 711689 - DNA, 100 bp, Homo sapiens
agcaggtcagcgggactatgatctcctggtggtcggcgggggatctggtggcctggcttgtgccaaggagggcttcagggatgacttcttagggggcagg

SEQ ID NO: 711690 - DNA, 50 bp, Homo sapiens
cgcggccccggccggaggagacaggcacacggcacagcaggagaccaaca

SEQ ID NO: 711691 - DNA, 82 bp, Homo sapiens
tggagacttcaaagatgtattgtttctaagcatgaattgaggaacagaagaagcagagcagatgatcggagcagcatttgtt

SEQ ID NO: 711692 - DNA, 90 bp, Homo sapiens
aacaaatactactacatcccgcagtacaagaactggagagaggaagaagcccctccagatggtgctgttgccgaatacagaagagaaaag

SEQ ID NO: 711693 - DNA, 75 bp, Homo sapiens
atgccaccgctgcagggtgcagttcggggtgatgacccgtaaggacacacacctcctctacgtactggcagctgc

SEQ ID NO: 711694 - DNA, 100 bp, Homo sapiens
cgcgaggagactctcgggctttgaggtgagggagcacacgtcgcatttggaggcagagctggaaaagcacatggcggccgccagcgccgagtgccagaac

SEQ ID NO: 711695 - DNA, 100 bp, Homo sapiens
gaagatgcacatgtctgggaggataattgggatgatgacaatgtagaggatgacttctctaatcagttacgttcccagtgggaaaagctacagaaagatg

SEQ ID NO: 711696 - DNA, 103 bp, Homo sapiens
cttcatagggacagccgcccctggtgcacacaccctcgtattctcctgcccttccccagggttcccagcaccatgagggcctggatcttctttctcctttgcc

SEQ ID NO: 711697 - DNA, 74 bp, Homo sapiens
cagaaccgtcccaaaatatggcaaagaaacctattctgagaaggtagaagatagcaccatgccgattcgtcgaa

SEQ ID NO: 711698 - DNA, 100 bp, Homo sapiens
ctgaggccaaacccgccactccagaaatccaggagattgttgataagggatacccacccaccatcccagggtctacaacatccacagccggaccgtcacc

SEQ ID NO: 711699 - DNA, 50 bp, Homo sapiens
aggatattcctcatgacattgctgtctgcctctacagctttacgttccag

SEQ ID NO: 711700 - DNA, 90 bp, Homo sapiens
ggtggccaaagtggatgaggtgaagtccacaatcaagttccaaatgaagaaggatgtggatgaagcttacatgaacaaggtagagctgga

SEQ ID NO: 711701 - DNA, 74 bp, Homo sapiens
cgactatctcctgagctcctccgatgatcagaatgagtccctggaacgccagatgcgtgaaatggaagagaact

SEQ ID NO: 711702 - DNA, 100 bp, Homo sapiens
actgaagcaaaagatcagcgaggagcagcagcagctccagcaggcgctggctcctgctcaggagatgagtatgatgtatgtgccatttgtttggatgagt

SEQ ID NO: 711703 - DNA, 100 bp, Homo sapiens
gagcccctttagccatgtggatacctacggagcacgagaaatacggcgtgggtatttcagtgtctgtagacaagatggaatcatctccatttaatagacg

SEQ ID NO: 711704 - DNA, 87 bp, Homo sapiens
ttcacgagaagaaaattggcaagagtggagacaaagagatgagcagcaattctcctgcctcagcctcctgcataactgggactacag

SEQ ID NO: 711705 - DNA, 89 bp, Homo sapiens
atgcatttactgtcatcaagaactgtaatacttctggaatccagacagaatggtggacccaagtggagagattgtggaactggcgaaag

SEQ ID NO: 711706 - DNA, 95 bp, Homo sapiens
aaggagatcattgacctcgtgttggaccgaattcgcaagctgggggatatgagactttctactcggaatatcctgagtgttgcgtggatgtaaaa

SEQ ID NO: 711707 - DNA, 85 bp, Homo sapiens
ggtgagaccatcaccaagcggtgagactatcacctatcgccaagtgaattttttcagcagatcattgagtacacagaggaatacc

SEQ ID NO: 711708 - DNA, 50 bp, Homo sapiens
gcagttttgtgtccatgtgaacaactagtcttgttctgtcatccaggctg

SEQ ID NO: 711709 - DNA, 83 bp, Homo sapiens
tcctcggatcccgagcgcggggaggcagaccggggagatggccattccattctttacgggccgcctcactgactggattctac

SEQ ID NO: 711710 - DNA, 75 bp, Homo sapiens
gactccaagacaagctcagccgaggtcaccatccagtctattatcctcccagtccacaacgctgaaccgtggctg

SEQ ID NO: 711711 - DNA, 100 bp, Homo sapiens
gaaaattcaagttggtgttcttgggggagcagagcgcattatgccagtacatacaggcttctaaagccagggatggtgccagccctttcatttcaagtac

SEQ ID NO: 711712 - DNA, 100 bp, Homo sapiens
gcctcccaaagtgctgagattacagctttgctgtctgcatgccgacatgctgggctcactgggccccaaggaggccaagaaggccttcctggacttctac

SEQ ID NO: 711713 - DNA, 82 bp, Homo sapiens
tacctgcagctggcctctgtcactgactccacacaggttgttcctcaaagtcattcaagctgtactcgccgaaggagccccc

SEQ ID NO: 711714 - DNA, 74 bp, Homo sapiens
ttacatttgataatgaggaagctcaagctgctacaggttcattttcctgacgacagcagtcacaaacagcgctc

SEQ ID NO: 711715 - DNA, 100 bp, Homo sapiens
agaataaaactccagcgagatccgggccgtgaacgaaagcagtgacggaggagcttgtaccaccggtggacttagtagttttaagcagaaccatgaaaac

SEQ ID NO: 711716 - DNA, 75 bp, Homo sapiens
gatgagtttggtttccgtgtgtacaaggaaggtgccttcaaatctcttgacaaagatggcactggacaaatccag

SEQ ID NO: 711717 - DNA, 83 bp, Homo sapiens
ctgactacctgctgtacaccctcaacaaacaccagcgctttggaccatggtgaatccgggcagcagctcgcagccgcccccgg

SEQ ID NO: 711718 - DNA, 83 bp, Homo sapiens
cagacactggaaaactggatgctgcagacactgaacgaggagccagtggccacagaaagcgaggctggtgatatggacctgag

SEQ ID NO: 711719 - DNA, 82 bp, Homo sapiens
aaaggagagctccgtggagagaaggtccttctatatgatccactctttgactggaccatgaatcctttgaaagctttgtatt

SEQ ID NO: 711720 - DNA, 100 bp, Homo sapiens
cgccggcagcagccatgagcggcggcgtgtacgggggaggaggatcccttttcccccagaaattactcaatgctgaaacctctcaaagtggtattagaga

SEQ ID NO: 711721 - DNA, 75 bp, Homo sapiens
gctcaagtcagagggcttttactcctacctgtgtaccgagccagacaccatccggaagatgaagaacgatttccg

SEQ ID NO: 711722 - DNA, 82 bp, Homo sapiens
cccatttggcgtggcggccatctggatcctggactccgtcgggctccgtgcggcggagtccaaaactacttacctggaagac

SEQ ID NO: 711723 - DNA, 83 bp, Homo sapiens
tatagttaatcttggcgacattgacaatgatggctttgaagatttgttagcatcagtgacctcctggtaccaaaagacttggg

SEQ ID NO: 711724 - DNA, 100 bp, Homo sapiens
catgaactggtgaaggggccgaagaaggttgagaagatctggcagaggacggaaattaagtggagaccaaataactttgccaactacagttgattattca

SEQ ID NO: 711725 - DNA, 50 bp, Homo sapiens
cgatggcggactgggctcgggattaagcctgatcaagatgacaacctccc

SEQ ID NO: 711726 - DNA, 100 bp, Homo sapiens
gactgccccggcaactccagggtgtctggtccacgacctatcctaggcgccatgtaaaccaagaggagttcattgctattatgactggtgacatttaaag

SEQ ID NO: 711727 - DNA, 100 bp, Homo sapiens
tggttctcgaaggcccgcggcgccccgtgctgcagtactatactggcaattgctggagaagattttgcaattgttgcttctgatactcgattgagtgaag

SEQ ID NO: 711728 - DNA, 82 bp, Homo sapiens
agcgagctgagtggttgtgtggtcgcgtctcggaaaccggtagcgcttgcagcatggatgccggctccaggagcagcagtgg

SEQ ID NO: 711729 - DNA, 100 bp, Homo sapiens
gggtctccaggcccgcgaccgtccgccagtcgtcccgaggtgcgtagtttctctgaaaagcatcacccaggtcagaatgaaaggaaactctctgtgcaga

SEQ ID NO: 711730 - DNA, 80 bp, Homo sapiens
actgccgcacccttgaaaggaggcccctgccgtgtggacccgtaaaataaaatggtacaagccagctgccatgttgtgag

SEQ ID NO: 711731 - DNA, 98 bp, Homo sapiens
cgttggctggaagtgctgcgcacctacttggagctggtgctttgcgtgctggtcagcatccggaacaacagctattgtggacgatgaaaggctctctg

SEQ ID NO: 711732 - DNA, 98 bp, Homo sapiens
caagcagccaggcagtatcgggagcaggaaagccagtgttgtggaccctagcacagagatgccgaaagttcagtataaatcgaactgtaaaccatcca

SEQ ID NO: 711733 - DNA, 90 bp, Homo sapiens
cactattgaaggaactgcaaaatatattgaaacttcggagctacccttctcaggtgcagccagagagacactagcccactgatggacgga

SEQ ID NO: 711734 - DNA, 77 bp, Homo sapiens
ccatggccgccatgacgcctgctctagatgttgtgactgtgacagactcactggggtttgtacatgctggggaggag

SEQ ID NO: 711735 - DNA, 90 bp, Homo sapiens
cgagacggcggcaggacggcggcagctctgcttatgataatgtcaacaaagttcgagtagctatcaagaaaatcagcccctttgagcacc

SEQ ID NO: 711736 - DNA, 89 bp, Homo sapiens
acgacggcctcgtgctgtgaaggctattgagggcacctacattgacaagaaatgccccttcactggtaatgtgtccattcgagggcgga

SEQ ID NO: 711737 - DNA, 75 bp, Homo sapiens
cgctgcgggcccgggccatggccgccgccgatgccgagtttctccttggaccaagatgactgatggaaaactctc

SEQ ID NO: 711738 - DNA, 74 bp, Homo sapiens
aaggaaacacatttcatatactgcagaatggcccccgtgcttccaagtgtcctgaagctgccagtcagatctct

SEQ ID NO: 711739 - DNA, 96 bp, Homo sapiens
cccaaagcaaggaagggacttggccaaggctgcctgataggggctgtaaatctcaaatccagcaatcgaaccccagtggtacaggaatttgaaagt

SEQ ID NO: 711740 - DNA, 71 bp, Homo sapiens
gggagcacgtcatcgccatcgaaggtcaaaatgcagatcttcgtgaaaacccttaccggcaagaccatcac

SEQ ID NO: 711741 - DNA, 100 bp, Homo sapiens
cctacttgcctaaatgaggaatgtctttcctaccatctaaaatacgaaggtttctggctggctattcaggattatgaaactgctcaggaacacaatgaaa

SEQ ID NO: 711742 - DNA, 100 bp, Homo sapiens
cgaggcagctcttctgcaaaccctgtgaactcaggctactctttggagcccatctatggtttgtggtatgaccactcctccaacttctcctggaaatgtc

SEQ ID NO: 711743 - DNA, 104 bp, Homo sapiens
aaacatgaagagcttgaaagcgaagttcaggaagagtgacttgctgattgttggaggttcttttggtcttcgtgagttttctcaaatccgatatgatgctgtga

SEQ ID NO: 711744 - DNA, 90 bp, Homo sapiens
gccatcttcgaacttagacttccggaaggactttggcgagggccacggcgtatgcctccgaggacggggtcctgaccgaggccatgatgg

SEQ ID NO: 711745 - DNA, 89 bp, Homo sapiens
aattcaagcggtcatcgatgcgggagtatgtaggagacttgtggaactgctgataccatgggggatgtgaagctggttgcctcgtcaca

SEQ ID NO: 711746 - DNA, 88 bp, Homo sapiens
tcgaccccacacaaggaggatctaagcagcaagattgtcactgctgttccaagggcacacgcagagggatttggaattcctggagagt

SEQ ID NO: 711747 - DNA, 75 bp, Homo sapiens
ttgaacttgccagcttcctgaacttgcgatgtatgatgtatggctttggggatgaccagaatccttatactgagt

SEQ ID NO: 711748 - DNA, 100 bp, Homo sapiens
aggcctgctgaactgggtgctttatatagggaggaggtgcgccagtctgtaactcctgccgagccagtccagtactatttcacgctggctcagcaaccca

SEQ ID NO: 711749 - DNA, 75 bp, Homo sapiens
cactccagaagtagcatggaaatggagggcatcttcaaccacaaagcttatagtgatttaggatactacattatc

SEQ ID NO: 711750 - DNA, 98 bp, Homo sapiens
tacattgaacaaaagaaaaaagagttgtatttactcaagaaatcaagtacttcagtaagagatgggcctactttggggataaaggattatttggtctt

SEQ ID NO: 711751 - DNA, 74 bp, Homo sapiens
tgcatttcctcctttcgtctttacaaggtagccgtttggcgtcgtgaggaatcgtctacgaagcctgataaaaa

SEQ ID NO: 711752 - DNA, 88 bp, Homo sapiens
caatcatgggtcaccaagagaggctgagagaccagacaaaactgtgtggagttttatcctatattcataattacattgtggatggctg

SEQ ID NO: 711753 - DNA, 83 bp, Homo sapiens
acctgggctgggatccggagcaagcgggcgagggcagcgccctaagcagagagccttctccatggacgaccgcattgcctgga

SEQ ID NO: 711754 - DNA, 75 bp, Homo sapiens
gatttgttaaggattccaagtaactcttatttggtaaacgccctgcagaagatatggaagaggaacaagcattta

SEQ ID NO: 711755 - DNA, 82 bp, Homo sapiens
caggaaacaagctcctacttccagaaaaagtgctcctgggactccaggataccaggcataaacttggaggaggcagtggaga

SEQ ID NO: 711756 - DNA, 73 bp, Homo sapiens
gaccggggagaaggtcacgcacactggccaggctttggaagtgataaagcagttaaaagagaaaatgaagata

SEQ ID NO: 711757 - DNA, 75 bp, Homo sapiens
gcgaccgggagaacatagacgttggagtgcctcaagcttattgcctctcaaaaatttacagacaaacgcattggc

SEQ ID NO: 711758 - DNA, 76 bp, Homo sapiens
tacctccctctccactcccatcttcaggggcgactacgtgcacaagtctgtgtttatcattttcttccaaggcgat

SEQ ID NO: 711759 - DNA, 83 bp, Homo sapiens
gactttgcagaaaggcttcactacccttatcccggagagctgacaatgatgaatctcagctcttttaagacacttactcttcc

SEQ ID NO: 711760 - DNA, 89 bp, Homo sapiens
gaagcggccaatggcacggaggcctgcgtgatgaagttaaaggaagtagatcgtacagccatgcaggcatggagccctgcccagaatca

SEQ ID NO: 711761 - DNA, 100 bp, Homo sapiens
gctgtatgtgctcaagtacctgtttgaagtgcactttgggctggtgactgtggacggtcatcttatccgaaaggagtggagccgccaccaaaatgcagat

SEQ ID NO: 711762 - DNA, 100 bp, Homo sapiens
attacagcagccaacctatgttgccctgagttacataaatagtgtgttctaggtcagtggcttcaaagactccagttggattcattggactgggcaacat

SEQ ID NO: 711763 - DNA, 74 bp, Homo sapiens
tgccctctccttttcgtttccggaaacatgagagacaagagagacacctccaacttcgacaaagagttcaccag

SEQ ID NO: 711764 - DNA, 100 bp, Homo sapiens
gaaagcacaccaacgcaggcatttgtcttctgtccatggtgctgaagtttattcactttcaaaccactttcagtaacagcctcctgacaaggtgatccgg

SEQ ID NO: 711765 - DNA, 96 bp, Homo sapiens
tcaacctcgagtactcgcccgacgggtctgcgcaggcatggcactaagtgtcccatggcacatttggccctcatggaggcctcaaaagggcaggac

SEQ ID NO: 711766 - DNA, 107 bp, Homo sapiens
gaacaagcctctcttctttgccgacaaactttacaaatccatgaaggggagcttttggaagagtcccagatggaagcgaccaggctccggcagaaggcagaggagct

SEQ ID NO: 711767 - DNA, 75 bp, Homo sapiens
aagaagtttctaggaaaggccggacaccagcggtttccaacctagatgaggaaagccgatggacagtccactaca

SEQ ID NO: 711768 - DNA, 97 bp, Homo sapiens
acatctcttcttcaaaaatgaccagtgggcttgggaaacgctccgagacattctggatgacgccccccctggcacacaggaatacattatgttacga

SEQ ID NO: 711769 - DNA, 85 bp, Homo sapiens
tgatttgggggccttataaaatggattccaaaggagatgtctctggagttctgattgcaggtgagaatgagatggtgatcatgag

SEQ ID NO: 711770 - DNA, 100 bp, Homo sapiens
ttgtcacgggcattgcaaggtacattgagcaggctacagtccactccagcatgattttgttcagcctatatccggatcaaggaaagctctggcagctgtt

SEQ ID NO: 711771 - DNA, 75 bp, Homo sapiens
ttgagatgaaggtcaaagaaaaagttcaaaaactgaaggactctgaagctgaggcaaaatacatatctcagtgca

SEQ ID NO: 711772 - DNA, 74 bp, Homo sapiens
aacctctgaggaaaccatttctacagttcaagtatcagatgtagaaggtggtgatggactgcagctcagaaagg

SEQ ID NO: 711773 - DNA, 100 bp, Homo sapiens
gaaggttcagttggcaaaccagatatatgacttgatgttgatgcctaagaagaaccggattgccatttatgaactcctttttaaggagggagtcatggtg

SEQ ID NO: 711774 - DNA, 51 bp, Homo sapiens
gtaaactcagcacgagccattttgcaggttatcagtgagctgaatggaaaa

SEQ ID NO: 711775 - DNA, 90 bp, Homo sapiens
cgttcgggctccgtctcaggggctgaagtttgtgaggtgctggagaatctggtaaaagcaccattgtgaagcagatgaggatcctgcatg

SEQ ID NO: 711776 - DNA, 58 bp, Homo sapiens
cctgtgcttgatgtctgctggagtgacgtcagatgggcagacctggaagagaagaagg

SEQ ID NO: 711777 - DNA, 71 bp, Homo sapiens
tatacaaaggaaactcagactccagttatggctcaacccaaagaaggtgctggagaatctggtaaaagcac

SEQ ID NO: 711778 - DNA, 90 bp, Homo sapiens
ctgaggtggcagcggcaggagagtccggccgcgacaggacggactttccttatcccagttgattgtgcagaatacactgcctgtcgcttg

SEQ ID NO: 711779 - DNA, 96 bp, Homo sapiens
cagcttcagagaatggcagccatttatttgtcccgtgagatggacagagacgtatgtgcgttggtctcctaagggcacctacctggctacctttca

SEQ ID NO: 711780 - DNA, 90 bp, Homo sapiens
gtttccaagtcaggatatgtgcctttcagctttaaagagaattgaagatcttagcaaagcaatgtctcaagatggtgcttctcagttcca

SEQ ID NO: 711781 - DNA, 100 bp, Homo sapiens
cgacggtcacccgaatcgcagggagtcgccgctggagaggggctcggcgcccggcggggactgcaggagacagaagaaattctggcagatgtgctcaagg

SEQ ID NO: 711782 - DNA, 76 bp, Homo sapiens
cggcggtcttcaagctctcaggtcacggagactcaccagttggcagaattaaatgagaagaagaatgaaagactcc

SEQ ID NO: 711783 - DNA, 104 bp, Homo sapiens
tcagacgcagccgtagacaccagctccgaaatcaccaccaaggttttgtagtgcatccctgagcatgagcacagaatgaagcggcgtttggatgaccaggagtc

SEQ ID NO: 711784 - DNA, 82 bp, Homo sapiens
ggaagggcaggatgtacccctgaaaccggatgctgagtaccctgaatgaccgtctatgaccagtatttcatcaccctgtata

SEQ ID NO: 711785 - DNA, 90 bp, Homo sapiens
tgctgtccaaaagctgcaggcattattcaccttggtgctacttcttgctatgttggagacaatactaggggtctggttgctgcttacagt

SEQ ID NO: 711786 - DNA, 98 bp, Homo sapiens
actggaactgtgttcagattcacttccttctcatccttttccaccagctaaaggtgagacgtggtcttgtaacacagtggttaagaatgtgactttgg

SEQ ID NO: 711787 - DNA, 75 bp, Homo sapiens
gaacaccgcgccaggcgcgctgccgcccgacacactggccgagcgtcagcttttctttcgcaaaaagctgcttca

SEQ ID NO: 711788 - DNA, 87 bp, Homo sapiens
caactgaaagtcacgattaggactgacaataaggtatttgacctgtccaaagacgacttgatacctctataatgtaacagaaaaggt

SEQ ID NO: 711789 - DNA, 98 bp, Homo sapiens
gactttgacttttcaaaaggaagtggcagaggatctgtctggctccattgatgacctccccacgggaacggaagcaactttgagctcagcagtcagtg

SEQ ID NO: 711790 - DNA, 89 bp, Homo sapiens
catttcaacgtgcgtgtcacccacgcagacatcttcagccgctgccaggttaatttggagtggcccctggagtcagtttcctacaccat

SEQ ID NO: 711791 - DNA, 100 bp, Homo sapiens
gcgggtgcttcggcgccgccaggctcctgtatccccgtttccagagccgcggccctcagggcgtggaagacggggacagatcctgataacttaagtgact

SEQ ID NO: 711792 - DNA, 95 bp, Homo sapiens
agatggcgcttgacggaccagagcagcctcctgacaaggtgatccgggcgggccccgcaggaattttatcccctcaccggcctcacactagtatc

SEQ ID NO: 711793 - DNA, 102 bp, Homo sapiens
ccagctggaagccctgttgctgtgagaaagatcagtctaaagaaaaggagaagaaagtgaaaaaaacaattccttcctgggctaccctttctgccagccagc

SEQ ID NO: 711794 - DNA, 97 bp, Homo sapiens
aataaggacaaaagccaagaggaggacagttcgctacacagcaatgcatcgaggagtctcaggagcaggggctgcggcagaggctgctggacgagca

SEQ ID NO: 711795 - DNA, 51 bp, Homo sapiens
ctttaatcactgaccatcccaatatacagatggcagaaacggtggacacaa

SEQ ID NO: 711796 - DNA, 100 bp, Homo sapiens
catcgcgttttgccagcgataatacgcctcagttttgatgtggacaatggcacatctgcgggacggagtcccttggatcccatgaccagcccaggatccg

SEQ ID NO: 711797 - DNA, 100 bp, Homo sapiens
ctgacggagacgcagatgtggacttgaaagaagctgcagcggaggaaggcgagagaaccatggagtctggcagtaccgccgccagtgaggaggcacgcag

SEQ ID NO: 711798 - DNA, 100 bp, Homo sapiens
ttatctcaactttggtctcctgggaccactcgttgctgacagtcagaaaatcctttcccggagttcagttatgggtgtgagaggtttgcaaggatttgtg

SEQ ID NO: 711799 - DNA, 85 bp, Homo sapiens
tgctgctgctactgagccgccgccgcacgcgatcagagcctcctaagaaatatccagaagtcaagccatggatccacctgcacgt

SEQ ID NO: 711800 - DNA, 74 bp, Homo sapiens
gacaaattcagcagtcgtcatgggcaaaaagtgctttatgaacatcttactgcatgaagcctttctggaaagac

SEQ ID NO: 711801 - DNA, 98 bp, Homo sapiens
atggtttatcagacatcactttgttcttgttctgtaaacatccgagtgcccaacagacattttgctgctgctacaaaatttacattggtgcagaagca

SEQ ID NO: 711802 - DNA, 96 bp, Homo sapiens
ggctccttctcggccactgtgggcatcggattcacgcgcgagcttcggcctcggctctgtaccatgaagaagggccccagtggctatggcttcaac

SEQ ID NO: 711803 - DNA, 98 bp, Homo sapiens
actagccattgaagtatttgaagcacatttgggaagccacattttgcaggaagcggctcagccccagggcagcacatcagagacaccatggaacacag

SEQ ID NO: 711804 - DNA, 74 bp, Homo sapiens
gctgcgggagcccggcgccggagcccaaggaaaaccaattctgtgtcctcggaggaccacagcccagttgggcc

SEQ ID NO: 711805 - DNA, 75 bp, Homo sapiens
aggctggagcccgcttcctcatggcgtgtgcctaccgcatgttgccgctgctgtttctgctgggacgtctgactc

SEQ ID NO: 711806 - DNA, 98 bp, Homo sapiens
ccgcgatgctggcaacacggcggctgctcggctggtcgcttcccgcgcgggtatctgtgcgtttcagcggcgacacgctcttagaacaagctctggtg

SEQ ID NO: 711807 - DNA, 100 bp, Homo sapiens
cgagaaaggtcccactgcagccctccaagcaggttggagcaaaacgtcccactcactggaggcacctgaggacgacgggggctggtcaagtgcagaggag

SEQ ID NO: 711808 - DNA, 100 bp, Homo sapiens
gtgggagtgacccgattttccagaaagatgtagcacttaagcctcaggaacgtgtggagaaacgccagacgcccctgaccaagaagaaacgagaagcact

SEQ ID NO: 711809 - DNA, 100 bp, Homo sapiens
cagattcgcagtggtcgcttcttctccttgtgcaggtcagctctgcggacgctcggctcatggtctttgacaagacggaagggacgtggcggctgctgtg

SEQ ID NO: 711810 - DNA, 100 bp, Homo sapiens
gtgaaactacatgttcagaaaacataaccagtgcggtgcaatccaagcgaagaaaatccaagtaaacaagcaggactgcgacttgatacttggaaatgtg

SEQ ID NO: 711811 - DNA, 100 bp, Homo sapiens
ccctaaccacactatttatatcaacaacctcaatgagaagatcaagaaggatggctgcgggcctctcgggtgcttcttgtcggcttgaaaggacttgggg

SEQ ID NO: 711812 - DNA, 98 bp, Homo sapiens
ggacagccagccagcagcaggagggctcccaggccagtgccagtacttgggcttgccagtggcggattacttcaagcagtggattaatctgaaaaagg

SEQ ID NO: 711813 - DNA, 75 bp, Homo sapiens
cagacagaatgtacgaccttgttgctgttgtggttcactgtggaaggttgaatttagtattagtgacaaacagag

SEQ ID NO: 711814 - DNA, 100 bp, Homo sapiens
gaagaacttcttcagaattagaaaggagctgcttcccaataaggaaacaaatctacctgttactcgtattttggacaatcttatggagatgaagtcaaac

SEQ ID NO: 711815 - DNA, 75 bp, Homo sapiens
cagcacgctcaagagcatcctccagcaggtgaaggtctccgaattcaatcctttgacgttcaccagcgtgatcga

SEQ ID NO: 711816 - DNA, 100 bp, Homo sapiens
gtggagtttggagctcgtatggtcaacattgatggaaaacaaatcaaactgcaaatctgggatacgcaaaagcgtgatcttgctgggtcggcacagcctg

SEQ ID NO: 711817 - DNA, 100 bp, Homo sapiens
ctgggcgccaagccgcggagcctccagacggactaatagggatgccaaaggaaaaatatgatcctccagatcctcgcagaatttataccatcatgtcagc

SEQ ID NO: 711818 - DNA, 87 bp, Homo sapiens
agcgcggggtcttggtccaccttccagcacaaggagctgatggccgctgacaggggacgcaggcagatccagttcctaatggtttgc

SEQ ID NO: 711819 - DNA, 100 bp, Homo sapiens
gcccgggccggcgctccaaggcccgcccgggagggccggggccgcgctcaggtgagccctattcccagaggcaggtggtgctgaccctgtaacccaaagg

SEQ ID NO: 711820 - DNA, 100 bp, Homo sapiens
catgctgatttaatttcggaatacattcgaggccctgtgctaagttagttattgccagtttccgaggaaccgttccatatggcctgtcattggaaattgg

SEQ ID NO: 711821 - DNA, 83 bp, Homo sapiens
catcacccaggcgcggagggaagacgccctggtgctcaccaagcaaggtgtcgtgaaaactacccctaaaagccaaaatggga

SEQ ID NO: 711822 - DNA, 75 bp, Homo sapiens
cttctgctcaccaacagatgaagacagatgcaccaacgagggagacttgcagctcctctgctgaaacgtttaagc

SEQ ID NO: 711823 - DNA, 118 bp, Homo sapiens
ctgtgacctggccgatgaggaagtactgagcctgttggaggaactggcccggaaacaggaggacctgagcgtgctccgcctctcaccttccatgggccacccgctggaggtggggctg

SEQ ID NO: 711824 - DNA, 74 bp, Homo sapiens
cccaacagcagatcaaggcagtcgtcaggaactcaggatccggggtggggtggaagacaacccgtgagtattac

SEQ ID NO: 711825 - DNA, 95 bp, Homo sapiens
cttgagctgaacgtcttgcaacagtggccgcacgcataggttacctgtcctgctgccgattcctggatgacaatcagatcgtcaccagctctgga

SEQ ID NO: 711826 - DNA, 83 bp, Homo sapiens
tgggaagccaacgaccacacgcaaaatggtggagtcaatgaagaaagtagcagggatggatgtggagctgacagttgaagaaa

SEQ ID NO: 711827 - DNA, 75 bp, Homo sapiens
ggaacatcacagttcgaaaatcagaatgcactaagcactccttctacatgttgcgttctgccctaggtccaaatg

SEQ ID NO: 711828 - DNA, 80 bp, Homo sapiens
ccgccgccagagaggcccgcccaccagttcgcccgtccccctgccccgttcacaatgccctgggaggagcggggacactg

SEQ ID NO: 711829 - DNA, 98 bp, Homo sapiens
gggactgccaagagacatgttagaaggacaagtttctgggtggagcggacccctgtgcacgaggcagcccagcggggtgagagcctgcagctgcaaca

SEQ ID NO: 711830 - DNA, 75 bp, Homo sapiens
tgctgagaatttgaaaaatgaagatgatgtagacactggactattagattctgaaaaagagttccacgtcctccc

SEQ ID NO: 711831 - DNA, 75 bp, Homo sapiens
aaggccagaaggattcctgtaaggttcgagaaatggctgctactaccttaagcggtctgctacagtgtaactttc

SEQ ID NO: 711832 - DNA, 50 bp, Homo sapiens
agaggcagagcgcctcaaaaccgaaggcaacgccctgctgcggcggctgg

SEQ ID NO: 711833 - DNA, 74 bp, Homo sapiens
tgcatccccattgtgcaactgccagtctaaaaattgatatagaatcctgtgaagcagctccagctatgtgtgaa

SEQ ID NO: 711834 - DNA, 100 bp, Homo sapiens
tccaggaatgccagtgcatcttttgcacagctgtacgtggtcatctcccgggaggagagggagcagaacctgctggcgttccagcacagtgagcgcatct

SEQ ID NO: 711835 - DNA, 75 bp, Homo sapiens
ggcctcggaccagccatttcggtgtagaagtggcagcacggcagcttgctttgaccagatcaagttctttaagtg

SEQ ID NO: 711836 - DNA, 75 bp, Homo sapiens
cggggttcgggtgtctcgtgtgtgaacatcacagggtttggaaatcccttgtctccaggttgctgggattgactt

SEQ ID NO: 711837 - DNA, 121 bp, Homo sapiens
cgggattgttagatggaacacggctccatcatcacccaggcgcggagggaagacgccctggtgctcaccaagcaagggtatcaacggtttctgtacagcacagattatgacagcgtctttc

SEQ ID NO: 711838 - DNA, 100 bp, Homo sapiens
aaaggctggctaccatggagtcctgagatccagggatcccactggcagcaaagttcttatttacagaatcgttggtagctggcagtgttgtgatggcttt

SEQ ID NO: 711839 - DNA, 98 bp, Homo sapiens
gttattctcaatgcacgagagaaattaattgcttggaaagtctgccttgcttttaaggtcatacttgaaaatatacgtcccatgaagaaaaccattgc

SEQ ID NO: 711840 - DNA, 82 bp, Homo sapiens
catggcttggagcacttcctattccactggattgggaaagaccatggcagccccgacgaagacccatcatgagcaaccacac

SEQ ID NO: 711841 - DNA, 100 bp, Homo sapiens
gcggaagtgaccgtggtggcttcaataaatttggtggcttcagggatgacttcttagggggcaggggaggtagtcgcccaggcgaccggcgaacaggccc

SEQ ID NO: 711842 - DNA, 50 bp, Homo sapiens
ctacatcaagggcatcgtcaaggagtacttcttgcaagcagagctgacaa

SEQ ID NO: 711843 - DNA, 75 bp, Homo sapiens
acgtgtaatcagaaggcacagattagaggaaggaagaggtgaccaagaatatggcccaggtgaccaaagccctgg

SEQ ID NO: 711844 - DNA, 82 bp, Homo sapiens
aagaaactagagcaaataaccgttttgaaattcacttctcagaacttctggatgagttttcccagaacgtcttgggtcagct

SEQ ID NO: 711845 - DNA, 82 bp, Homo sapiens
aggcctttcctgctgagcccagcctatcttcgcagcctgctcaggtctgagttcactgacaccatcctgtccgtgcacccct

SEQ ID NO: 711846 - DNA, 99 bp, Homo sapiens
tccgcctgctacggtcctggcaagcacctcgggatcccattccttcacagggaccctagccagcttgaagctcaactagagaaaaaggaccaacaattt

SEQ ID NO: 711847 - DNA, 82 bp, Homo sapiens
ctgcggctccgtggcctgtaccctgtgtggcctcgtggagctgaaactgccgccaaccggatctgtaaggtgctggctgtca

SEQ ID NO: 711848 - DNA, 75 bp, Homo sapiens
ggacaccctggcctacgcgctggtggtccaccaccctcaggatgaggtccagcctcagggatttagagatactgt

SEQ ID NO: 711849 - DNA, 98 bp, Homo sapiens
gatgaggaaagctgtgaaagttctcaagcgttcagactgctgtgatcaacgttttcaaagggggtggcttgcaaagcaacgagctctatgccctgaac

SEQ ID NO: 711850 - DNA, 75 bp, Homo sapiens
accgcctgggggactcggaactaggccagtcaccactgcacattttgggacaatatggcaaggagaatgcagcgg

SEQ ID NO: 711851 - DNA, 100 bp, Homo sapiens
gttcagactgacaccccacatcgacaatttggaggtggcaaacagcttcgcagtcactaatgcttctgtcaccactgactaaagaagagaaaactgcggc

SEQ ID NO: 711852 - DNA, 75 bp, Homo sapiens
ggacaccagactgcacgagctgcaccggggcccgcgcagcagcaggggtacaatgactcttcttgcttttcacct

SEQ ID NO: 711853 - DNA, 50 bp, Homo sapiens
atgcccaagcatgaggacctcaaggtcaaaatgcagatcttcgtgaaaac

SEQ ID NO: 711854 - DNA, 100 bp, Homo sapiens
agatttccagccttccaagctctactgtgacttcagagacactgccaagcagccttagccctagtgtagaggtcggatcatgctaaaaggagataatatt

SEQ ID NO: 711855 - DNA, 75 bp, Homo sapiens
cggcgcggctcgttcaagatggcggagctcgaccagttgcctgacgagaataccccatgtttccccatcactcga

SEQ ID NO: 711856 - DNA, 75 bp, Homo sapiens
ggacacagtggaatctggtcatttggtgtcaatgctgtgtcaggttgatgacaacaagaaactaggagaatgggt

SEQ ID NO: 711857 - DNA, 76 bp, Homo sapiens
caggaatgcttactgttgcgtggttcgttattaacagcttggacagcttttagcagctacatgcaaagaacttcca

SEQ ID NO: 711858 - DNA, 75 bp, Homo sapiens
gcttgttatgctgcctccgcgattggatatctgacaagcaggcccttgatgagcctccctatttgacagtgggca

SEQ ID NO: 711859 - DNA, 83 bp, Homo sapiens
atgcaatggtctcaatctctggaaaaacttcttgccaaccaaaattcagaacttgctttgatgtataatgatgaatctgtgtt

SEQ ID NO: 711860 - DNA, 83 bp, Homo sapiens
ctttgatgctgtcatctgccttggaaacagtttcgctcacttgccagactgcaaaggtgtcaagctagggatgcggtccattc

SEQ ID NO: 711861 - DNA, 101 bp, Homo sapiens
cgactcttcctggtgaagcatctgatgcacgttccatccggcgctcagctgggcttgaggttaaaaagatcaagtggcatgagcagccttttggggaaaat

SEQ ID NO: 711862 - DNA, 83 bp, Homo sapiens
gttgccgtcccttcgcctccttcaccgccgcagaccccttcaagttctagtcatgggacagaatgatgctgctgaaattggaa

SEQ ID NO: 711863 - DNA, 104 bp, Homo sapiens
tgtccccagagcctcagtttgtgcaggacaccgacatggaacagggactcactggggctataatgatccagccttttatgaagaatgcaaaatggaatacctga

SEQ ID NO: 711864 - DNA, 75 bp, Homo sapiens
gtgctgcttgctgcaggctctggggagtcgccatggaagctcttcgtgggcggtcttgactggagcacgacccaa

SEQ ID NO: 711865 - DNA, 82 bp, Homo sapiens
tgtatgaccctggaaggccatgaaaatgcagagaatgctctgcccagcgacgaggatgacaaagaccccaacgacccctaca

SEQ ID NO: 711866 - DNA, 75 bp, Homo sapiens
caaagatcgtgcagctcttggcaggagtagctgatcaaaccaaggatggggtggtagatctctgtagaaatgtaa

SEQ ID NO: 711867 - DNA, 101 bp, Homo sapiens
ttcagatctccggcgaattgaaagcagtgatctctcagctcgaattacatctttacaagaggaggtgaagcatctcaaacataatctcgaaaaagtggaag

SEQ ID NO: 711868 - DNA, 100 bp, Homo sapiens
caaagattaaaacttgaagcaacccttaatgtgcatgatggttgttgacagctggagtatcagccttggaagtatatacgccaaaagaaatcttcgtggc

SEQ ID NO: 711869 - DNA, 75 bp, Homo sapiens
gctgcggcgagcggagcttcgcggggatcctgctggactgcacgaaaaactgcggataaccgtctggtccttgtg

SEQ ID NO: 711870 - DNA, 82 bp, Homo sapiens
ggaggcgcgggaggtgttcgagaacgaccccgagacggaacaagatcactcaaggtgaaggataatctactaataccagcac

SEQ ID NO: 711871 - DNA, 100 bp, Homo sapiens
ccgccgccaccacccactccggacacaggagagccttgaacttaggaattcttcgagatcctggatcagaaatcgaagacagacaataccaaatagatct

SEQ ID NO: 711872 - DNA, 98 bp, Homo sapiens
gcggaagcacagggagcagaaggagcgcaagaagattgatgaggacatgactgcccgaattagcatggctgatgtcaagttctctttccaatgtcctg

SEQ ID NO: 711873 - DNA, 100 bp, Homo sapiens
gtgctataaacactggcaatttgaacttctgaattatacaccagcagattatgctatttccttcgtgctaccatcagccgccgcctcaatgatgttgtca

SEQ ID NO: 711874 - DNA, 75 bp, Homo sapiens
gaggccaggaacgctccgtctggaacggcgcagtactatactggcaattgctggagaagattttgcaattgttgc

SEQ ID NO: 711875 - DNA, 90 bp, Homo sapiens
acaacacggtggcaagcaagtttaatcagacctgctcacacttcagaatagagaagtctctgctggatgaaccgaatcctaacagtccag

SEQ ID NO: 711876 - DNA, 101 bp, Homo sapiens
gttacagtttcgactcctctctgcaagtgaataggcccagaaaggtgatgtgatcttcgtggtggaaagctaaattttaaaaccaccccaatggatgcaga

SEQ ID NO: 711877 - DNA, 103 bp, Homo sapiens
atctggacagtggcacacagataccgtttattaaaagagctgtggctgtcatactccctgtcacaaactccagctgaactaacttggaggaggatcttccctg

SEQ ID NO: 711878 - DNA, 74 bp, Homo sapiens
gtgaatcccctgtttgagaaaaggcctaagaattttggcattgtcttctcacaagactttcaggattaagcgat

SEQ ID NO: 711879 - DNA, 82 bp, Homo sapiens
ctttctggcctggaggctatccagcgagtccaaaactacttacctggaagaccttccaccaccccctgagtatgaattggcc

SEQ ID NO: 711880 - DNA, 101 bp, Homo sapiens
agcggcccacacacagtcattcaaacagccgaggaagaacgtgcaaaacgtgaggagctagagcgaatactggaagagaataaccgaaaaattgcagaagc

SEQ ID NO: 711881 - DNA, 99 bp, Homo sapiens
caagaatttatcaaatctttagcagaggctttatcctgtggataaacgcagagtgaacgagtttggggagtcctacgaggagaaggccacgcgggcgcc

SEQ ID NO: 711882 - DNA, 100 bp, Homo sapiens
caccccagcggctgctcttcgaagtgaccagcgctaacgttgtcaaggacccgccctccaagtacgtggtggtgagagcggctgaggaggctgcgtccac

SEQ ID NO: 711883 - DNA, 100 bp, Homo sapiens
agtctccgaacagagccacacgactcccgctggctcaatggcatccgtgtcattctggaccttactcccaactaccggggtgagaactcgtggttctcca

SEQ ID NO: 711884 - DNA, 100 bp, Homo sapiens
acgccccaaaatccaacagcagttctcagacctcaagctgtcctgagagcacgtctctacatctctacctgcattctggaaaccgggagaaagccaaaac

SEQ ID NO: 711885 - DNA, 82 bp, Homo sapiens
tacctgcagaaggtctctggagacatcttcagcagggtttgccttcccggattgggcctacaagccagagtcgtcccctggc

SEQ ID NO: 711886 - DNA, 76 bp, Homo sapiens
cgggcgctgcggctctggctggtcgcacccggtggcgggatcaaatggaaatcagcatgattcttcagaggctctt

SEQ ID NO: 711887 - DNA, 75 bp, Homo sapiens
agctggagtattttgagattggagaattaagatttggaggccaatcactgccaccttttatttccctgtgggtcc

SEQ ID NO: 711888 - DNA, 75 bp, Homo sapiens
gtagcttaaagatgacaccttgcattccctatttagattcctggcaagtttgcagagattgaatgtcaccatcac

SEQ ID NO: 711889 - DNA, 100 bp, Homo sapiens
aatacttgctgaaaaggaagttttctggaatgggcaagacatctgtatagattctgcttcatccgtgagagagaataagcaacctgaaggtttggaatta

SEQ ID NO: 711890 - DNA, 83 bp, Homo sapiens
gggagatcgtgggcgagctgggcgacggcgccttcggcaaggtttacaaggtcaaaatgcagatcttcgtgaaaacccttacc

SEQ ID NO: 711891 - DNA, 75 bp, Homo sapiens
ccaccgcagcggcctcgctctttgagtgctcccggatcaaggccttggcaggtgacgcatccaaagaagacattg

SEQ ID NO: 711892 - DNA, 75 bp, Homo sapiens
ggagagcaatcgccgggacagctgcaagccattgagacccagagcagcagttctgaagagatagtgcccagccct

SEQ ID NO: 711893 - DNA, 100 bp, Homo sapiens
gggcggccgccaccgagcgtgctgagcaaccgcagcctccgcggccgagagtgcagcgagtactccaaagattcaggtttactcacgtcatccagcagag

SEQ ID NO: 711894 - DNA, 50 bp, Homo sapiens
tggttttgcactatttacaaaggtgatcagcccatgacctaaacctccag

SEQ ID NO: 711895 - DNA, 101 bp, Homo sapiens
gagaccccaagagtgttgagcagcccatcgtgcttaaagaaggggtgctttcttctgcgacctggtactcatctacctcatcaaaaagagagagttttacc

SEQ ID NO: 711896 - DNA, 100 bp, Homo sapiens
acacagagtgaacagaaaaagaggatacctctgcgatcccgggtcatctccagatgctagggttatggatactatggcgggactgagtttattgatgaac

SEQ ID NO: 711897 - DNA, 100 bp, Homo sapiens
aatgtgatggaggcaaaccagcggcagggagaagaggatgatgagcatgccaggcccctggccgagtccctgctcctggccattgctgacctgctcttct

SEQ ID NO: 711898 - DNA, 80 bp, Homo sapiens
ggccatttatgaagttttaaaggatgatgaacgaaggcagaggtaccctcacctgagtcccaagtacaaggagtcttttg

SEQ ID NO: 711899 - DNA, 100 bp, Homo sapiens
gaggacctggtgtaccagtccactgtgagattctgtcatgacctgcctggcgatcattaccgtgatttcctgtctgctgaattcctgtgctgcagtttcc

SEQ ID NO: 711900 - DNA, 82 bp, Homo sapiens
ggaccccggccaacatcagccttgcccagtatctcatcaacgccagattgcagctgagaaggcgcgaagctgctggtccctg

SEQ ID NO: 711901 - DNA, 76 bp, Homo sapiens
tggccaagaagatcatcattaaggacggaggcacggggacggcaaaacagaacagaaaggcggagataaaaagagg

SEQ ID NO: 711902 - DNA, 90 bp, Homo sapiens
ggacctcagcagcttggacacagcccactgcagagaacactctgctccagccaaggtggtgagggcagctgttcctaaacagcgcaaagg

SEQ ID NO: 711903 - DNA, 75 bp, Homo sapiens
gacacctcagggacaaagagatctggacagaatcgccggacaggctctggggtctacatcacacgcggccagctg

SEQ ID NO: 711904 - DNA, 100 bp, Homo sapiens
cccagccctcacacatggactgcccagtgcccacacctggctttggcaatgtggaagagattcctgagaatgacaggtactggctcctgtatcacccagc

SEQ ID NO: 711905 - DNA, 98 bp, Homo sapiens
gtggacacttttcttcagaagctggtcgccgccggcagacacctagctcccctgtttgacaaccctaagttggataaggagctgcgggcaatgctgag

SEQ ID NO: 711906 - DNA, 80 bp, Homo sapiens
cacatggttaaggaacaggaggaaaccattcagagctggaggaaagcaggaatgttcagaggcaaatgaagattctgcag

SEQ ID NO: 711907 - DNA, 75 bp, Homo sapiens
gaacgtgtatgcgtccgtggtggaggacatgatcctgaagactccattcagaagagagaagaggggagtgacttt

SEQ ID NO: 711908 - DNA, 71 bp, Homo sapiens
gagctgcggtctccccgccgcggctgggtggcgctccaaccccctttgaccggaactatgggaccaagctg

SEQ ID NO: 711909 - DNA, 100 bp, Homo sapiens
ctatagcagccattgtggatgagaagatcttctgttgtcatggagtgaacagcagagaatttcaaaggaccttgctaatatctgtaagacggcagctaca

SEQ ID NO: 711910 - DNA, 100 bp, Homo sapiens
attattcctcacagcctctggatgagagttggccaaggtgaacacacagtgttcatcccctcaggaggacacagcttttgaggtaccatcttggaagcag

SEQ ID NO: 711911 - DNA, 75 bp, Homo sapiens
gcctctcttcgcctcgcctcgggacccgcggtccccgctcttgctgctgtgctccattgaagtgacttgtgaatc

SEQ ID NO: 711912 - DNA, 89 bp, Homo sapiens
ttgcctccacttagtgagcggaagaatggaaggccctaacagtctgattaatgaagaagagttctttgatgctgttgaagctgctcttg

SEQ ID NO: 711913 - DNA, 75 bp, Homo sapiens
cgggaactctgaacctcaataacgaggccaagaagcttgagagaagaaaaatttcagaaaaattgtctcaatttg

SEQ ID NO: 711914 - DNA, 75 bp, Homo sapiens
ggctgcgtgcacagcgccttgttccagcagggcctgatccagcagacctactccaatgaagtccattgtgttgaa

SEQ ID NO: 711915 - DNA, 98 bp, Homo sapiens
aacagggtccgggacagggatgtctacctggtaatagaggacttgaagcagaaagcaagtgaatacgagtcagaagttgttgacctcctgtactggag

SEQ ID NO: 711916 - DNA, 96 bp, Homo sapiens
cgtccacgtggccagagggcggccacccggagccagcggagggacaggtgcgcgtggaattcatggacgacacgagccgatccatcatccgcaatg

SEQ ID NO: 711917 - DNA, 83 bp, Homo sapiens
cgtttccccctgttgcagggttttgtttatataactcaagttgtttggctaaattcttcagaggctggcgaaggttcctgcca

SEQ ID NO: 711918 - DNA, 102 bp, Homo sapiens
ctttgcacaggcaccccagttgtctgtgccaggtggcctccttggtatgccagattattctgactccactgaagtcaaatttgaagagcttaaaaatgtcaa

SEQ ID NO: 711919 - DNA, 104 bp, Homo sapiens
gcctttcagccaaatgccagactgattgtcatgctcagggaccctgtggagagggaccccagggcggggcagttcccctgcctctccagtgtacagcagcagcg

SEQ ID NO: 711920 - DNA, 80 bp, Homo sapiens
tgggaagatagaaatgtatacccagaagaaatgattgtggcattgagagaagctttgatattccctctgcagtgagccgc

SEQ ID NO: 711921 - DNA, 100 bp, Homo sapiens
aagattgagaaaaatcctgctaattgaggacgaggtggatgttatctggtggatgttataggtgcgcccacctcgtccacatgttgttaagagaccaaag

SEQ ID NO: 711922 - DNA, 74 bp, Homo sapiens
gcgtgtgtgagccctgctacgagcagctgaacaggaaagcggcgttatgacaggaagcagagtggctatggtgg

SEQ ID NO: 711923 - DNA, 100 bp, Homo sapiens
ggcacggccgctgggcccccggtggaggagcgtttccgccagctgcacctacgaaagcaggtgtcttacaggtactccaaagattcaggtttactcacgt

SEQ ID NO: 711924 - DNA, 83 bp, Homo sapiens
gtcgtgatccagaagtccagagctgaggactgcctgtttgcaggaccactgaggttcctttcacagacagaatctgtcacagc

SEQ ID NO: 711925 - DNA, 90 bp, Homo sapiens
ggcaggccctgcggcagtgccagcgtgagaaccaggagctcaatgcccacaaccaggtcacccctcctaatttctcagtgtcacaagtgc

SEQ ID NO: 711926 - DNA, 50 bp, Homo sapiens
cgagaaggtggaggatgcctgccagggagcagtttttgcaagaaaggatc

SEQ ID NO: 711927 - DNA, 80 bp, Homo sapiens
atcaaggaaccacgctctcgtctggtttgatcacaagacgggcaagaacgctgtccaactgggcgtacgagtttgacaag

SEQ ID NO: 711928 - DNA, 74 bp, Homo sapiens
gcagagtccggaagacagacaataatcgcattgctagttccaagatgagatgggattctccaacatggaagatg

SEQ ID NO: 711929 - DNA, 100 bp, Homo sapiens
ggcggcggcgcttgggctctgctcatgagcgctcagagagctcagaagtggcttttgtgatgcagctggtgaaaaagctgatgattatcattgcccgccc

SEQ ID NO: 711930 - DNA, 100 bp, Homo sapiens
ctaattggcctttaagtgaaggaaaggctttgaagcaaaagtttgatgagattttttcagcaacaagggtaagatgatcatgcaggataaactggagaag

SEQ ID NO: 711931 - DNA, 83 bp, Homo sapiens
cagatattggtgccctggaagacattagagaggagctcaccatggcaatattggatcaccccttctgtgtcattctctgagga

SEQ ID NO: 711932 - DNA, 83 bp, Homo sapiens
tttaaattggcttgctcattcttggtgcaaggaacagtgttgataaagactgctgaagaattgatgaattttagtaagggaga

SEQ ID NO: 711933 - DNA, 75 bp, Homo sapiens
tagaaaaggtattcattaaagaaaataatgggaaggaagaagtatccaagttgtcagcagaagtatataggatac

SEQ ID NO: 711934 - DNA, 100 bp, Homo sapiens
agacagcggcatacagaatgcctatgaccggcgtcgagaatttcaactggaggaggcaaaacagattcagaatctgcagaaagcaggcactcgtacagac

SEQ ID NO: 711935 - DNA, 83 bp, Homo sapiens
ccgctccgccctcccttttccctgaggagaaggcagagcccccccaggctatgaatgccctgatgcggttgaaccagctgaag

SEQ ID NO: 711936 - DNA, 82 bp, Homo sapiens
aaatccggaatgtcaatgtggaggtctctaattaacagaagatggcaaagcccagccacagcagctatgtccttcagcagct

SEQ ID NO: 711937 - DNA, 100 bp, Homo sapiens
cgaagataccaggattttgactggttgaggagcaaactggaagaatcccagcccactcatctcattccccttattccactaagctcaacaaatttcctgt

SEQ ID NO: 711938 - DNA, 98 bp, Homo sapiens
gagcgtgcggaggagtgaggccgcaggagaccttcccgacgacccctgctccggcggggaagtgagcaaggcatagaatgtcaagctaaccaggcgtc

SEQ ID NO: 711939 - DNA, 90 bp, Homo sapiens
ccttcccccgagctcatggagggcccagaggaggacattgctgacaagatcgcttgacaatatcttattgtcggagtagtggtcctgggg

SEQ ID NO: 711940 - DNA, 74 bp, Homo sapiens
ccaaggtgaagcgcgagcgcgacgagtataagcggaggcaggcaatccatggaccttgtggaacttgtgtctct

SEQ ID NO: 711941 - DNA, 100 bp, Homo sapiens
aaaagtactcatctcctggtctgacatccaaagagtcactctttgttcgaatgtgaaaacagctactattgccactgaaaggaatgggaaaccagagaac

SEQ ID NO: 711942 - DNA, 75 bp, Homo sapiens
tcctgatctccgtgtgcagtacctccgccagatccacgccaaccacgagctggttgtcttcttgcctgccctgtg

SEQ ID NO: 711943 - DNA, 87 bp, Homo sapiens
gcacttggagtccggacatctgaaacttggccctccacgcccttcaggaggagcaggccagactcaagatgaggctgtgggacctgc

SEQ ID NO: 711944 - DNA, 100 bp, Homo sapiens
cacctgtccttctacattttcgatagagacgttttccggagggattccatcatagcaaacggggattcagcgtccgatcctttggaacagggactcacgt

SEQ ID NO: 711945 - DNA, 75 bp, Homo sapiens
aagcctatgtcaagtgtcaagataaagtgagtcagctgtacatggatttaaataagcggttatcactgcctgcag

SEQ ID NO: 711946 - DNA, 75 bp, Homo sapiens
ttctcgcatgaaggagacacagaagtccatctattacatcactggagagaagagaatagttttgatagagacaca

SEQ ID NO: 711947 - DNA, 100 bp, Homo sapiens
tttccgggagactggagtcgaaggccgtgaggttgaaattatccaatgacgaaatcaaacgggcaattctaacaatggacgaacaggaagatctgcccaa

SEQ ID NO: 711948 - DNA, 100 bp, Homo sapiens
tcgctgaaggccgacgtgctgggggatgacggctccctgctgttcgagtacctgcccagaggggcccactcgctgtcccagtccgaaattgaagttcaga

SEQ ID NO: 711949 - DNA, 90 bp, Homo sapiens
caggatgaattggcagagcttgacccaggcactaatggagtcatcagaacccactgtgaggaagtgacttctccttgaggtcacccagac

SEQ ID NO: 711950 - DNA, 51 bp, Homo sapiens
tattgaacaggatctgtgtcgaggtgagccttccagatggtcaccctcaca

SEQ ID NO: 711951 - DNA, 100 bp, Homo sapiens
caccgtcaagacccccaaggacaaggaggaaattgtgatctgcgatcgagcctcggtcaaggagggtcctcactgagcagcgagtcgtcccccgtgtcct

SEQ ID NO: 711952 - DNA, 90 bp, Homo sapiens
gctccacaagatccaggagcagctctgcctggtccaggactccaacgtccagattgatttcctaaattcagtaatagtggaccttcaaag

SEQ ID NO: 711953 - DNA, 73 bp, Homo sapiens
ggcgctgcgcctagacctggtcgagtcccgagttcaggctaagtcctatcagccatggaaacaccattgctct

SEQ ID NO: 711954 - DNA, 50 bp, Homo sapiens
aaagctgccaaaagtgacatgcaggaaaggacttagaagccttacaaata

SEQ ID NO: 711955 - DNA, 100 bp, Homo sapiens
ggacgccgaggcggcgggcgccgagcagatggccctgctgtggcaccagtgaccaacgggaacacaacggtgccacccctgaacgatgatctggacatct

SEQ ID NO: 711956 - DNA, 51 bp, Homo sapiens
ctggacccggaccggttttgggaatcctacgccaacgtgaagcagtggctg

SEQ ID NO: 711957 - DNA, 100 bp, Homo sapiens
cctccagtcaccatgatgcctgtcactgggggcaccattaacatgatggagtacctgttgcagggacaatctctatgggaagcagaaggcaaggaccccg

SEQ ID NO: 711958 - DNA, 75 bp, Homo sapiens
agcaatgctgacctcggtttcctggacccattccgactcagcaggtagcatctaaaggaactggtttaaatccta

SEQ ID NO: 711959 - DNA, 90 bp, Homo sapiens
cctttactggttcaacaactacaggaaagccctcaggtcggtttggctcggccttggctgtgttggactttaacgtggacggcgtgcctg

SEQ ID NO: 711960 - DNA, 50 bp, Homo sapiens
cgcaccatggaggaggacgacagctacgaaattccgggtagatatgcctg

SEQ ID NO: 711961 - DNA, 74 bp, Homo sapiens
gcaagaggatggcctgaagtttgggctggaagtgattctcaaagttggattggtggaaacaatgaaccattgac

SEQ ID NO: 711962 - DNA, 82 bp, Homo sapiens
cgactcaacgtgagacgcaccgcccggactcaccatggaaggcaacagcccccaggggagcaaccagggagtcaaaatcaca

SEQ ID NO: 711963 - DNA, 100 bp, Homo sapiens
ggggtcagtgatggagctgcttcaggctgatttaaactgcaatattcaagatgatgctggggctttttatggtgtaaccagtcagtacgagagttctgaa

SEQ ID NO: 711964 - DNA, 98 bp, Homo sapiens
cggcgctcgccatggccgacgaaaagcccaagaaacgcttcgttaagggactcaggcagtacgggaagaacttcttcagaattagaaaggagctgctt

SEQ ID NO: 711965 - DNA, 97 bp, Homo sapiens
cctttccaaaccagacccctgtgtcatcctcaagatgcagtctcatgggcagtggtttgagatgaccctaattttcagtgcaaattcaaaggtctct

SEQ ID NO: 711966 - DNA, 104 bp, Homo sapiens
aagaatgcacattaaagccatgcccgaggatgctaaggggcaggcaagaaacctattggaattcgagacttaattaatgaagctttgcatcgagaaacgatggg

SEQ ID NO: 711967 - DNA, 80 bp, Homo sapiens
gctgggcacactggcttcacgccggctccgcctcaccagcaagcgcattcccaggaactgtggctgcaccatctgtcttc

SEQ ID NO: 711968 - DNA, 80 bp, Homo sapiens
gccgtggatctgatcagctgaggcctgagacacaggaccagggtatttgaagtataccatacaactgttttgaaaatcca

SEQ ID NO: 711969 - DNA, 74 bp, Homo sapiens
ctaccgtcaccgaagacttcagcgaggattccgagatcatcaccgaccgacctggctttcatgatgagagtgcc

SEQ ID NO: 711970 - DNA, 75 bp, Homo sapiens
acgttcggctactacttaataatgacaatctcctcagggaaggggcagcacagttgtcttgataccttggcagct

SEQ ID NO: 711971 - DNA, 82 bp, Homo sapiens
tgcaaatgccagaatgaatgctgataacattagcacaactatgaagaaatcgggagtgcactttttgactgtagattgttcg

SEQ ID NO: 711972 - DNA, 109 bp, Homo sapiens
gaaacctgtatttatcactgccttcttgggaattgcttcgtttgccattttcttatggagaactgtccttgttgagaaaagttttttgacattgatagtggaagaaatg

SEQ ID NO: 711973 - DNA, 74 bp, Homo sapiens
ctcagtttgtgcaggacaccgacatggaacagggactcactggggaaatggcacctcgaaaggggaaggaaaag

SEQ ID NO: 711974 - DNA, 82 bp, Homo sapiens
cgtacgccctcatggggaaaatctccccggtgactttcagtgccgccaagccagacgaactaggtctgaggtcacattgttg

SEQ ID NO: 711975 - DNA, 80 bp, Homo sapiens
aacatggacatgaagaggaggatccacctggagctgaggaaccggaccccggcagctggacctcaggatggaaaccagca

SEQ ID NO: 711976 - DNA, 100 bp, Homo sapiens
tttctaaacttgactcttgtggtgagagatacagatccacgggttttagaaaaacaagaattacagcagccaacctatgttgccctgagttacataaata

SEQ ID NO: 711977 - DNA, 100 bp, Homo sapiens
cgtgtgcccagaccttccctgccaaacagggcgctgctgggcggccaccaccacggagggactcctcatctactccctggacacccgcgtgctctttgac

SEQ ID NO: 711978 - DNA, 100 bp, Homo sapiens
gcagccccggctgcggaggtgacactcacggaccttagccaccgccgccgccatcgccaccatggggatggatgaatgagatttacaactatgatccaga

SEQ ID NO: 711979 - DNA, 102 bp, Homo sapiens
tgcagtggcacctgcgcgaagctggccaaagcctgcccagacggctcacctgtgcgggatggaacaaaaggtaagaatgattgatgttggctgatattggag

SEQ ID NO: 711980 - DNA, 121 bp, Homo sapiens
tgttcgagaagtacacggccagcgtgaccgttggcagcaaggaggtgaccctgaacctctacgacacggccgacaatgcagatcttcgtgaagactctgactggtaagaccatcaccctcg

SEQ ID NO: 711981 - DNA, 51 bp, Homo sapiens
gatttttattgcaaggcgctctctcttagattgattatggaagattcccac

SEQ ID NO: 711982 - DNA, 89 bp, Homo sapiens
gaggacgatttcctggggggcatggagtgcaccctggggcaggaccctgatgcttggtgtgacctgagtaaatttgacctccctgagga

SEQ ID NO: 711983 - DNA, 100 bp, Homo sapiens
agacatcaccatcatgtttgaggtggtcttttggtgccttaatgaagagtcggattttgaagcagccttcagcgtgggagccactggcgtcataacggat

SEQ ID NO: 711984 - DNA, 97 bp, Homo sapiens
agaggctcatctacagtggcaagcagatagatttaccgcattgtttctcagaagcaaatgtcagacagacgcgaaaatgacatgtctccaagcaaca

SEQ ID NO: 711985 - DNA, 102 bp, Homo sapiens
gcacgggataccttgccacggctgcatgactttgctgagatcctcaccatggagaaggaagtggcccagagccttctcaatgcgaaggagcaggtgcaccag

SEQ ID NO: 711986 - DNA, 83 bp, Homo sapiens
gagaacaccgacatcagtgagaaggaggctggctgcagagaccatgcttttgttaggagtgataaacccaaactgttcagagg

SEQ ID NO: 711987 - DNA, 51 bp, Homo sapiens
acaaccttcccagaaagtccaagctcgtggacgtgttcctcatgatccggc

SEQ ID NO: 711988 - DNA, 80 bp, Homo sapiens
tttgtgattcaggagggattggagccatttcctgaaagtgactattttaccccacagggagaattccgtgtagacaaagc

SEQ ID NO: 711989 - DNA, 98 bp, Homo sapiens
cagttattggcaggctgccatgacaaccaggcaatgctggatagataccgaattcttatcacaaagtgaagctgtggtctaccaatctagacaactca

SEQ ID NO: 711990 - DNA, 82 bp, Homo sapiens
gcgagaggtgcggcgaaggaggcagaggcacttatgcttgtcagacagccctcagcgcctttttccaggagaccaacatccc

SEQ ID NO: 711991 - DNA, 100 bp, Homo sapiens
cgctgctggagttccgcgacaccatcttcgacaacatcctcaaggtgcagagaatgtagaaagagtgttggttactgttatccaaggagcagttgaatat

SEQ ID NO: 711992 - DNA, 100 bp, Homo sapiens
caagaatccaaagaaaacaaaatggtggtatcatggtatgaacgctgccgtccgtgccgtggtgcgcatgggtatctacgtgggggccaaggtgtacttc

SEQ ID NO: 711993 - DNA, 74 bp, Homo sapiens
gtttaacaaagccacgaataacctataatggtgaaagatatgatcctgagcccaaatcaaaatgggatgaggag

SEQ ID NO: 711994 - DNA, 75 bp, Homo sapiens
caaagagcccctcatcgagctcttcgtcaagctgtgtcagcgtgttatgatgccgtcccgtaccaacctggctac

SEQ ID NO: 711995 - DNA, 82 bp, Homo sapiens
gatccagcaaggtcggcagagcaaggggcttacgcagaaggacctggccacggtgacctccttcagcacaccccccacccca

SEQ ID NO: 711996 - DNA, 99 bp, Homo sapiens
caaaaagcagctggacagcacaattggaatccaccctgtctgtgcagaggtggagccgccaccaaaatgcagattttcgtgaaaacccttacggggaag

SEQ ID NO: 711997 - DNA, 102 bp, Homo sapiens
gcccggatgagtacgataccgaagcgggctgtgtgccccttctccacccagaggtacaccaggggttggaaaaaccacactaggcaaagaacttgcgtcaaa

SEQ ID NO: 711998 - DNA, 83 bp, Homo sapiens
gttcctgccgtctgctcttctgcctcttgatctccgccaccgtcttcaggccagatactcaggagaaggaagtcagagcgatg

SEQ ID NO: 711999 - DNA, 100 bp, Homo sapiens
cagttttttgatgctgaggagctcctggtcgatgaagaggatgatgtttttggtgaaggtcctggcagtcagtaacttttgaaaggcagcctgcctcctt

SEQ ID NO: 712000 - DNA, 90 bp, Homo sapiens
cggcgggcatcgcagtggcgcagccccatggctgggggttatggagtgatgggtgacgatggttctattgattatactgttcacgaagcc

SEQ ID NO: 712001 - DNA, 50 bp, Homo sapiens
ccgcctcctcctcctcagtaacgcgggtatgggctacgtgagttcgtggt

SEQ ID NO: 712002 - DNA, 100 bp, Homo sapiens
cagaagggacagtttgtgccagctctccagagagaaaaggagctcctgcccaggggactggacatcaagcaggaggagctgggggacctggtggacaagg

SEQ ID NO: 712003 - DNA, 100 bp, Homo sapiens
tggggaactgaaagatcagatagcagagctgaatcatgaggttctgcaccagtattgtggctcaagactccagaggccacatttaccatggtcggaattt

SEQ ID NO: 712004 - DNA, 90 bp, Homo sapiens
ggacgtccggagctacagggcggagatttcatctcgaaacctggcggtgggtcatgataactgggtacgtggagttctgttccattctgg

SEQ ID NO: 712005 - DNA, 83 bp, Homo sapiens
ccgggtggtggttaaaccatgttaaggaggattttacagagggtgatgctgtggagtcttcaaaaagcccgaccactctggat

SEQ ID NO: 712006 - DNA, 100 bp, Homo sapiens
cggggccacgctgcgggcccgggccatggccgccgccgatgccgagagttgtggaaagtaaaaatgtagccctaccaaaaggaactattgtactggcttc

SEQ ID NO: 712007 - DNA, 95 bp, Homo sapiens
gcgctcctgagaccctccagcgctgcctggaggagaatcaagagctccgaggaaactactttgcttcgcactttttcatgggaggagagaaattc

SEQ ID NO: 712008 - DNA, 75 bp, Homo sapiens
gcggagactgcatcaggctctcggtgaaaggtgtagcagtcactcggcctacacccacagcatcgaccttgtgaa

SEQ ID NO: 712009 - DNA, 90 bp, Homo sapiens
atcggcaaggggaattttgcaaaagtaaaattggcaagacatatccttacaggcagagagatgccttcaattaagttgcagagttctgat

SEQ ID NO: 712010 - DNA, 74 bp, Homo sapiens
cgtttcccagtgtgccaggcccacggcatggaggagcaggacttggagcgaaggttcgagctgctgagccgcga

SEQ ID NO: 712011 - DNA, 90 bp, Homo sapiens
actggaagagaacgtctccgagtccctcaactctctacgctttgcctccaagaatcaggaaacccaggcccaacggcaggtggatgcaag

SEQ ID NO: 712012 - DNA, 51 bp, Homo sapiens
gccccctgaggccccagaactatcttttcgagtccatgttgtacttagatg

SEQ ID NO: 712013 - DNA, 101 bp, Homo sapiens
tcatcgagttcaaagcgtttgtgagctgcctcgcttcttggacacttaatgattgttggcaagaaatgtgctgctgatctgggcctgaataagggttatcg

SEQ ID NO: 712014 - DNA, 100 bp, Homo sapiens
gggatcttgtggctgctttggacccccgtgctcctgcagggacactctgtctacggacccttgtggccctggccaacgtcaacattgggagcctcatctg

SEQ ID NO: 712015 - DNA, 74 bp, Homo sapiens
ggccggagaccgctggggacagacaggagggccctcctggacccgggagcggaccctggtggcggtgaagcccg

SEQ ID NO: 712016 - DNA, 75 bp, Homo sapiens
ctaaattctgtggatgatgttttctcacccagtcatgttgaaaacaatcctcgaacaggaaatcttggtgcacta

SEQ ID NO: 712017 - DNA, 82 bp, Homo sapiens
atctacccggagaagcaggagccctactcggcaggtgatgtgtccaatctagatcccaacttctcatttgaaggcaccaaac

SEQ ID NO: 712018 - DNA, 100 bp, Homo sapiens
gcacccccagtgggtgctcacagctgcccattgcctaaagaagaatcagagatcattgatttcttcctgggggcctctctcaaggatgaggttttgaaga

SEQ ID NO: 712019 - DNA, 82 bp, Homo sapiens
accaaaagtggcatgatcctttgcagaaatgactacattaggaactgtggctgcaccatctgtcttcatcttcccgccatct

SEQ ID NO: 712020 - DNA, 96 bp, Homo sapiens
ttcacacagctgcttccattggccagtatgaagtggtgaaggagtgtgtgcagcgttgactggattgttgctgacatcttggccatcaggcagaat

SEQ ID NO: 712021 - DNA, 88 bp, Homo sapiens
ctgccatcatggagggttatccagcacctggaggatacctgctacctgcttgaagaaaatttgcctacacgttgtggattttgtcata

SEQ ID NO: 712022 - DNA, 71 bp, Homo sapiens
ctggagggcgccccggaaaccatggggaaatcctcattgacgattcaatttgttgaaggccaatttgtgga

SEQ ID NO: 712023 - DNA, 74 bp, Homo sapiens
ctccactagtccccccagttggagatctatcatgcaacagatgagtgaccaccgctacgacaaactcactgtgc

SEQ ID NO: 712024 - DNA, 75 bp, Homo sapiens
tcagcaagaagcagagacttacagaacttggtggacttgctttgtgaagagacagttcatgaacaagagtctttc

SEQ ID NO: 712025 - DNA, 98 bp, Homo sapiens
acccttccagatgatttttgagtggaaaggaccatgctagactttccccagcatgtatcctctgacaaagaagtacgagcagcaagtacagaagcaga

SEQ ID NO: 712026 - DNA, 83 bp, Homo sapiens
aagaatgatcaggatacttgggactacacaaaccccaatctcagtggacaaggcgcagttgtgtagcagttgagtaatgctgg

SEQ ID NO: 712027 - DNA, 95 bp, Homo sapiens
ccacccgggagtttgaggaggttgtgactgttggcaagagtagcaagatgctgcagcacattgactatagaatgagatgtatcctgcaagatggc

SEQ ID NO: 712028 - DNA, 75 bp, Homo sapiens
ggaaaatggtctgctctgcgaatcgacccaacatgagtgaagtttcctgcaagaaacgggacgactatttggaat

SEQ ID NO: 712029 - DNA, 83 bp, Homo sapiens
cgagagccggacaatggcaaggaggagcaggaacggagccttcacgtaaatgggtccagtcatgcctcccagtaagaagccag

SEQ ID NO: 712030 - DNA, 100 bp, Homo sapiens
ggctggtgttccttgactggagacaacctgcagcctcctggcaccaaagtcacaagcacctcttcggcaaagcccacctccctctctcgcttgattcccc

SEQ ID NO: 712031 - DNA, 100 bp, Homo sapiens
agaacgtccactgcgggccggcgaaagctggtgaggctgggctgcggtggagcctcggcagagggaacggccaccagcttgggctccccacggagggcag

SEQ ID NO: 712032 - DNA, 82 bp, Homo sapiens
cagtaccaagacccgacacaaggcagcttcccacagcaggttggacagttcacagcactccttgctcaagacccctccccag

SEQ ID NO: 712033 - DNA, 83 bp, Homo sapiens
cttttgtcaattaggtcacttcaacctcttattggaagattatccaaaaggtacaatgactcttcttgcttttcacctaagtt

SEQ ID NO: 712034 - DNA, 75 bp, Homo sapiens
tgtgtgcaatactcctcacgagactactgttttccaaagtgaagttgcagtcactctgccgaggcccggacgagg

SEQ ID NO: 712035 - DNA, 75 bp, Homo sapiens
cggctcacctgtgcgggatggaacaaaagaatttctagaaggaggagttggccatgttgaaatgttatttcgctg

SEQ ID NO: 712036 - DNA, 82 bp, Homo sapiens
agtccaagtatgagccccggagccacatgatggacgtccaggtaagcggaagggtacagccaatgcccgaatgccagagaag

SEQ ID NO: 712037 - DNA, 75 bp, Homo sapiens
ggctgagcttgcaagaggatcaacatgccttatgaagtgtaacagaacagactttaccacctgaaactgctgctt

SEQ ID NO: 712038 - DNA, 75 bp, Homo sapiens
ctctgcgaaagaggaaggggcgccaggagcttgggtttatgaaggcgagcgtgccatgacaaaggataacaacct

SEQ ID NO: 712039 - DNA, 50 bp, Homo sapiens
caacaccaaaaagctttctgctagggacagcaaatcacccaccttgaggt

SEQ ID NO: 712040 - DNA, 94 bp, Homo sapiens
ccagcagcagctggaggaggtgcggcagaaccggcagagggctgacgaggatgtggaggaccacttgatccttatcactgcttttggcacactc

SEQ ID NO: 712041 - DNA, 98 bp, Homo sapiens
gggctagagctggagtcgtgagcgcgcgcccgccccgctctgggaggaccgcgagacatatctgaagagatggattaagaatgctttggattaaggat

SEQ ID NO: 712042 - DNA, 50 bp, Homo sapiens
ggaaatgtgtcatcgaaagccagcatcagcgagagctttctaactgtcaa

SEQ ID NO: 712043 - DNA, 76 bp, Homo sapiens
aattgaagcaagagatttctgaatgaaaaatggctactggacaggatcgagtggttgctctcgtggacatggactg

SEQ ID NO: 712044 - DNA, 75 bp, Homo sapiens
ctcaagtgatctttgataagaatgattcagattttgaagctaaagttaagcagaagatgcaagtggaccaggagg

SEQ ID NO: 712045 - DNA, 100 bp, Homo sapiens
gcaggcgcgcctggccgcgaacccggaccctaagaaggttcgtcacaaggcatcgcagaaggtttatgctatgaagcttcttagtaagtttgaaatgata

SEQ ID NO: 712046 - DNA, 96 bp, Homo sapiens
cttacaattctaaaaccatgacctgtgttggatggcaagcatgtggtgtttggcaaagtgaaagaaggcatgaatattgtggaggccatggagcgc

SEQ ID NO: 712047 - DNA, 100 bp, Homo sapiens
ggcgccaggacatggagctcgagaacatcgtggccaactcgctgctgctgaaagcgcgtcaagatttccaagtctcctcaaaaggaaaagtctctataag

SEQ ID NO: 712048 - DNA, 50 bp, Homo sapiens
cggagtcgtccggagccgctgcgcgtaagactttgaccccgacgcaggct

SEQ ID NO: 712049 - DNA, 74 bp, Homo sapiens
aactctcatctccggccctctcggcgtccgccagcgatggcacaggtcagcccaaggccaaccccactgtcact

SEQ ID NO: 712050 - DNA, 82 bp, Homo sapiens
cagtccttccaccggaagtgtccgatcggaatcagccctgtccgagagcctgtgcctactacactggcacaagtggatagag

SEQ ID NO: 712051 - DNA, 82 bp, Homo sapiens
atgcatccaacgtcaagtacaccatgcacaaggtcttccagtttctgaacctaggtacaaggattccttgaaagaagacatt

SEQ ID NO: 712052 - DNA, 97 bp, Homo sapiens
aagccgcgggagatcatggacgcggcggaagttgaaatcacaaagattagacacctttttagataggtgttcttcagcaccactgacaacacggttc

SEQ ID NO: 712053 - DNA, 97 bp, Homo sapiens
attaaaacttgaagcaacccttaatgtgcatgatggttgtgaaatggagttgttttttccttcaagtggaggttgtgggccggcaaacactgctaaa

SEQ ID NO: 712054 - DNA, 83 bp, Homo sapiens
ggcggaagtgctcaaaggtctcacctgcctgctgctgctcttcgcacagaagagggatggagaaggaggagacaacccgggag

SEQ ID NO: 712055 - DNA, 100 bp, Homo sapiens
ctgagatcgatgacaagctcaacaaaattaacgatcgttggcaacatctttttgatgtcatcggatcaaggggatatcattttcaatgcccaatacccag

SEQ ID NO: 712056 - DNA, 82 bp, Homo sapiens
gagcatactttggaccctgttttcagaaagcagagcctgccttctggtacaagatgcctgtggaatgttcggtgaagtgcac

SEQ ID NO: 712057 - DNA, 101 bp, Homo sapiens
tggcccccggtgcaagaggcgcaaacaagccaatcccaggaggaaaaacgatagctttccaatgattagacgaattgattctttctgtgactcatcagttc

SEQ ID NO: 712058 - DNA, 75 bp, Homo sapiens
tgggagcactggaagtacgggcagttgcagtgttggagctaaaattgtagctctgaagaaagcaaatggtgatgc

SEQ ID NO: 712059 - DNA, 80 bp, Homo sapiens
aggggataggcacggacgcaacacttttggaacttagacgctagctactgcagcactggggtgtcagttgttggtccgac

SEQ ID NO: 712060 - DNA, 98 bp, Homo sapiens
cctcatcttcgaggtggcggagggcggcttcctggacatcgacgtggagggcgccctgcgtccggcagaggaggcgagcatcccgctcaggtgatgag

SEQ ID NO: 712061 - DNA, 100 bp, Homo sapiens
ctgccgctgccgctgccgcacctccgtagctgactcggtcaatgagctgaaggagaaaggcaacaaggccctgagcgtgggtaacatcgatgatgcctta

SEQ ID NO: 712062 - DNA, 98 bp, Homo sapiens
ggcgccgcgggctccgcgcccggccggacccgggcccgagtcaccacgttctgcgcttttccgagtcggacatatgagcagcgtggagctggatgatg

SEQ ID NO: 712063 - DNA, 75 bp, Homo sapiens
ttcatcccactattattttggcacaacaggaagatatcaaagctcagctctttgaaacatccagcaagacaggcc

SEQ ID NO: 712064 - DNA, 75 bp, Homo sapiens
cgctgtgacagagacaacaccgagtatgagaagaatactcccccagttgcaagaggcgcaggaccgtggaagact

SEQ ID NO: 712065 - DNA, 100 bp, Homo sapiens
ggcagcgtggttcaggactatgactcgtcagcctctcgccatctttattcaaaccagaggagttcacgcccctggatccaacccaggagcccatttttcc

SEQ ID NO: 712066 - DNA, 100 bp, Homo sapiens
cagttggatcttgctcagtctctgtcagaggaagatcccttggactggactcgggccatatccgtggtgccgtcaacatgcctttcatggacttcctgac

SEQ ID NO: 712067 - DNA, 89 bp, Homo sapiens
ctcctgagtagctgggattgcaggttgcctgtggctggagaaaggaatgtgctcatcaccagtgccctcccttacgtcaacaatgtccc

SEQ ID NO: 712068 - DNA, 82 bp, Homo sapiens
gtctgagcatttcctcctgacggctgtacttgagcagtcacctggcacagcccaagaagatgaaaggattgttcttgttgac

SEQ ID NO: 712069 - DNA, 100 bp, Homo sapiens
gtctcgaggaggccgcgggagcccgccggcggtggcgcggcggagacccggctgggcagcctgcttctgcaaagtggtacgatcgaagggactatgtctt

SEQ ID NO: 712070 - DNA, 100 bp, Homo sapiens
ttaaatgccctcaagtcgacaggggatgggaccctaggttgctatcaagatcatagataagacccagctggatgaagaaaacttgaagaagattttccgg

SEQ ID NO: 712071 - DNA, 82 bp, Homo sapiens
tggtgtaaacaacgattctttggagattgcaagactggaggaagataaagaagaactacgtaaccagctgcttaatgttgat

SEQ ID NO: 712072 - DNA, 75 bp, Homo sapiens
ctgagcttgtggcagaagggagtttgaaaatctgaacacagttgctgagtgtctgttttctctggtcaacggtga

SEQ ID NO: 712073 - DNA, 100 bp, Homo sapiens
cggaagtgcagctgcctcagttcttagcgcagttttgccgacggatggggcaaaagaagcagcgaccagctagagcagggcagccacacagctcgtccga

SEQ ID NO: 712074 - DNA, 90 bp, Homo sapiens
caaggtgttcttgccccatgcacctggttctacttcaagatgagctatcatgtggagagctctgattatacaaaaccaggagacattgac

SEQ ID NO: 712075 - DNA, 100 bp, Homo sapiens
cgacgctgctcaaaacctcgctccggaaaggggacacctggagaagaatttggattggtttcctcggatgcgagccatgtccctcgttagcaatgaaggc

SEQ ID NO: 712076 - DNA, 83 bp, Homo sapiens
tcctgctgggcttcgtccagatcgggaaggccggcccgctggggctggaggcacgggcccatcaacgtgaaccattacgccag

SEQ ID NO: 712077 - DNA, 50 bp, Homo sapiens
ataaaatagaacttccaactactgactccaattccagggtttcagaaccg

SEQ ID NO: 712078 - DNA, 83 bp, Homo sapiens
ggaaaagccaacctgaatctcagctccaccatggcagcggaggaggaaatggcaggtcctaatcaactctgcattcgccgctg

SEQ ID NO: 712079 - DNA, 74 bp, Homo sapiens
cctgctgtctttgagcttcctgagagagggacactaccctcgcttagattgctgaagggatggcatacattgag

SEQ ID NO: 712080 - DNA, 75 bp, Homo sapiens
gacaaagtgaaagcgggagattccctcatggttatgatcgccatgaagatggagacggagtctcactctgttgcc

SEQ ID NO: 712081 - DNA, 101 bp, Homo sapiens
ctgtccctggctccctcattaccgtcgccagcggagcgaacccgagagcgtggagcgggctgggccaggttatcaatactctggctgaccatcatcatcgt

SEQ ID NO: 712082 - DNA, 90 bp, Homo sapiens
ttacaacaaaccagatgtcagtctgcagggaccctgatgctcccataagacagaaaatgccccttgatgatctggatagagaagatgaag

SEQ ID NO: 712083 - DNA, 100 bp, Homo sapiens
atggctgcttagtgacgtcatttcgggagttagtactgggctagtggccacgctgcaaggtacagagtgaagacagtgtcctcctgtttgttattgcatg

SEQ ID NO: 712084 - DNA, 83 bp, Homo sapiens
atgacccagacccggacgacccccattgctgagccagcggagctgcttgtcgagcaaaagatgtgataataccagcaaagcca

SEQ ID NO: 712085 - DNA, 75 bp, Homo sapiens
ggcccagagaattgcagccctcaccaaggctgaggatgctgagctttctgactttgaggaatgtgaggagacggg

SEQ ID NO: 712086 - DNA, 80 bp, Homo sapiens
aatgtttggagaccagaatgatgatactctggcaactgcctttcccgcagaagtcaaagacttgaccaagagaatccgca

SEQ ID NO: 712087 - DNA, 96 bp, Homo sapiens
aagcacctcatgcaagcgagggacctgggactgctcacagccagtactgaccaagtgccaggaagaggtcagccacatccctgctgtccacccggg

SEQ ID NO: 712088 - DNA, 75 bp, Homo sapiens
ggaggagcggacgtcggcttctccccgcgggagcccccagcatgggttcttgagcacgtgcccctgctgctgtat

SEQ ID NO: 712089 - DNA, 75 bp, Homo sapiens
tatatatgtcccgactgaggatgatgaggctgaggcacacattgactatgaagataacttccctgatgacagatc

SEQ ID NO: 712090 - DNA, 80 bp, Homo sapiens
tcatcagcccggcctacctcttcctctggcccgaagccttcctttatcgctttcagatggtgatggaatttcctgataat

SEQ ID NO: 712091 - DNA, 75 bp, Homo sapiens
cgctggccgcctcgatgcaggaggacgaacagaaagccttgagccgggccatgcttctcacatcttacctgcctc

SEQ ID NO: 712092 - DNA, 95 bp, Homo sapiens
agacacaatctattctgctgattcacaattatggagactgtattgaagagggcagtaaagccgcggcggtcgacaagttactggctggagatgag

SEQ ID NO: 712093 - DNA, 98 bp, Homo sapiens
aagccgagaaggagaacaccccgagcgaggccaaccttcaggaggaggagctagcaccctttcaacctgtacaattccacagctagtggaaatccaaa

SEQ ID NO: 712094 - DNA, 98 bp, Homo sapiens
cagagctgtgcctcccagcaccacagtccttctgcagtccctcgtccagccacccccagtggacaagctgtgccgaggttgtctcccaagaaaaaacc

SEQ ID NO: 712095 - DNA, 100 bp, Homo sapiens
ggcggcaatagggaaagtgaggcagctgcaaggagggcggcgggactgcactcgagtgtccagacctgctcgatgagtaaacatcagtctccaaagataa

SEQ ID NO: 712096 - DNA, 100 bp, Homo sapiens
gagggcgtgggggatatgacaaggatggaagaggtcctatgacaggatcaagatacaactgtacagggctaaattttgggaaggtggatgttggacgcta

SEQ ID NO: 712097 - DNA, 75 bp, Homo sapiens
ctgttacaccaaaagtggcatgatcctttgcagaaatgactacattagctggcagacacaccaaaatctgaaaga

SEQ ID NO: 712098 - DNA, 100 bp, Homo sapiens
ctccggccgcctggctccccatactagtcgccggtgacttaagagattaaaattaatttggttgctgttggttctgaacaaataatgagttcttttattt

SEQ ID NO: 712099 - DNA, 100 bp, Homo sapiens
agcagatggcggatgccctgcagtacctgcagaaggtctctggagacatcttcagcagggtctgatgctgagtcggctgggccacaagagcttggcccag

SEQ ID NO: 712100 - DNA, 90 bp, Homo sapiens
cgcagatcctgagacccggacagtggcagtgaaacaggtgtggatgtggaagcagccaagcgggcagaagaggaattgctccttcatgac

SEQ ID NO: 712101 - DNA, 97 bp, Homo sapiens
cattgttaagcacaagttcacgaaagcctacaaaagtgtggagaggttccttcaggaggatcaggttgtggcagcactgcctgaaggtatgagacca

SEQ ID NO: 712102 - DNA, 75 bp, Homo sapiens
ttggtccactatgaaggctacttagaaaaggacggctccttatttcactccactgggggcccctgaagccactga

SEQ ID NO: 712103 - DNA, 102 bp, Homo sapiens
gggcctgtcctggggcccgttccatgggagtgtccagaccagagcctcatcccccaggcaggcggagccggaatagcacatttcaaacctacaagaaagaag

SEQ ID NO: 712104 - DNA, 142 bp, Homo sapiens
tgcttctcttttcccgttgaaggtgctaccgctgacgacacccctggtggatggcgaggatgagagaaactatccaactctggccaatattgaaaggaagaagaagttaaaacttgaaaaggagaagagaggagcagtattg

SEQ ID NO: 712105 - DNA, 139 bp, Homo sapiens
cgactctgcaaggagtgtagctaccttgtccggaacagccagaccagcaagcatgactactccctctccctgagctccatttatcttaaagaaattggacagcatatgaagacaggacatcacatatgaatgcacgata

SEQ ID NO: 712106 - DNA, 75 bp, Homo sapiens
taaagaagttgccaaatttgaagcagaacgatcaaaagccaagtggcaaacgaaatggcaaaatgctgacctgaa

SEQ ID NO: 712107 - DNA, 83 bp, Homo sapiens
caattccccccgcaccaaattgcatcgtttcccagcgtgagtgcatctccatccacgttggccaggctggtgtccagattggc

SEQ ID NO: 712108 - DNA, 50 bp, Homo sapiens
cgaggcagctctgagccgcgcgggagtgcatccgccccaacccttttccc

SEQ ID NO: 712109 - DNA, 98 bp, Homo sapiens
ctgggggctgaagagcgcgccgccctctcgtcccactttccaggttggtctccgccagctggacatgtccttgctctgccaactgtacagcctctacg

SEQ ID NO: 712110 - DNA, 100 bp, Homo sapiens
gcgggtcttgggtcctccgagagcagcagcggtcacccctcctaatttctcagtgtcacaagtgcccaacatgcccagctgtccccaggcctattctgaa

SEQ ID NO: 712111 - DNA, 75 bp, Homo sapiens
tcactgagcccctggaacagagcgagagtatctgccggtggtggtgtgcacattgagccccggtatagacagttc

SEQ ID NO: 712112 - DNA, 88 bp, Homo sapiens
tcaaagtagggccacaggtacagacttcagtacatctggctctgaagcaccgacaaggcaagaatcacaagatgcgcatcattgcctt

SEQ ID NO: 712113 - DNA, 100 bp, Homo sapiens
gatggggatctgcacagcgatggtcctgggcgaatgaggaagtttcgatggaaaaacatagcttcagcgcctgctcctggtcatcactaaccagatttac

SEQ ID NO: 712114 - DNA, 100 bp, Homo sapiens
gtggttgtcttctccgacccaaaactttcagatctgtcagcgcatattaaatttcctattgactacccctattcaccacctaccttcagattcttgacca

SEQ ID NO: 712115 - DNA, 90 bp, Homo sapiens
gggaacgcatgggaatggacttcagactggtggactgttcatcattctgttgaagaaacgcttaacccaagtggagactgctgcacggac

SEQ ID NO: 712116 - DNA, 100 bp, Homo sapiens
tttctccaaagacattggacacttggatgatttgctgccgctgacgtttttagatttcatccagtaatccatggctgtgtactgaatagtattccccgct

SEQ ID NO: 712117 - DNA, 74 bp, Homo sapiens
gaagatctattaagtgcaaaagtttgtgacttgaagtggatacataaggaagaatacaagcgattgagtgaagc

SEQ ID NO: 712118 - DNA, 90 bp, Homo sapiens
caagaggcgtttgaacccgcagagagggcctgggagcacaatgctgagcgagacgaaaccagacagagggtcaagtttacagatgaccgt

SEQ ID NO: 712119 - DNA, 100 bp, Homo sapiens
ggagccggcagcggcgcgggaggccgtgcggcaatcagccatgactgcctttgcactgtccatgctctcagcccaccacctcctccccctgccattgcag

SEQ ID NO: 712120 - DNA, 100 bp, Homo sapiens
ccaaattgctcaactaagaccaagtcctcgctggactgctcagggtgccagacctcatctgagcatttgtcctgtgctttcacattctttctgcatggag

SEQ ID NO: 712121 - DNA, 73 bp, Homo sapiens
ccccctgaaccccaaggccaacagagagaagatgactcagaaaggagaacctgactgctgtgcactctctctg

SEQ ID NO: 712122 - DNA, 97 bp, Homo sapiens
ggaaggtggagccaccagcctctccttggtgtcagctgtgatgcatgtttaaaaggaaattttcgaggtcgcagatataagtgtttaatttgctacg

SEQ ID NO: 712123 - DNA, 98 bp, Homo sapiens
gttgcagttggctattatatctatgtaactttcctgggatacagtgatccgagtaaatagttccagattggttcgagtcacccaggtggagaatgagg

SEQ ID NO: 712124 - DNA, 51 bp, Homo sapiens
gaggattccagggtcgaacactcgcctctgaagagccaatccattcaggat

SEQ ID NO: 712125 - DNA, 83 bp, Homo sapiens
acaggctctctccgctcgattttgtcaccgttatgtgggaagcgaatccagtttttcgttggaatatacgttgcacatttatg

SEQ ID NO: 712126 - DNA, 75 bp, Homo sapiens
ctttttgtgtgttttatcatctaaaatccaatccctcggctttaatccagtgtgaccagttgaggaaggagctgg

SEQ ID NO: 712127 - DNA, 74 bp, Homo sapiens
ggccgatgaagtgcagaggtttttttctgggttggatgggctgtctgagcgctgtgcccagtacaagaaggacg

SEQ ID NO: 712128 - DNA, 88 bp, Homo sapiens
gtctccgccgctgcgggcccgctccgacgcggaagtggactcccgaaaaattgaccaggaagggaaaatcccagatgaaactttggag

SEQ ID NO: 712129 - DNA, 75 bp, Homo sapiens
aaaaatttaaacaagaatccactgttgctactgaaaggccagaatggtacttggctcaagtacttatgtggattg

SEQ ID NO: 712130 - DNA, 96 bp, Homo sapiens
gcaagattgccacttgatgccgccaaacgatgtacgaactgagctgctacttacctcaagaaaaagacctgaaaatttctgtctatgattatgaca

SEQ ID NO: 712131 - DNA, 75 bp, Homo sapiens
tgatgaagtccagaaatctggaaacatgatacaatctgcaaatggcaaatcctgatcctaactgttgtcttggag

SEQ ID NO: 712132 - DNA, 88 bp, Homo sapiens
tcgaggcctacagaacctagcctatcagctggggctggatgagtctgttccaggagctctgagtcctttggccattccaaatgctgct

SEQ ID NO: 712133 - DNA, 100 bp, Homo sapiens
gttcacccaacataactttcaagaggaccctatgtactcggaactgggcttatcttgtacgctttatccaaagaaatatatgtgattagcgcagagacct

SEQ ID NO: 712134 - DNA, 82 bp, Homo sapiens
aataggacggaaacgccgaggaacccggctgaggcggcaggtgtccctacctgcaccggacgacgggggacacagaacgcaa

SEQ ID NO: 712135 - DNA, 80 bp, Homo sapiens
ggcagggaggatgacggagctgcagtcggcactgctactgcgaagacagctggcagccgcggcgagtcctttgcacatgt

SEQ ID NO: 712136 - DNA, 51 bp, Homo sapiens
cctcctgagcagctgggactacagatgccggagaccccaactggggactca

SEQ ID NO: 712137 - DNA, 141 bp, Homo sapiens
ctccggagtgaccagcgacggctgaacgcagcccgccctccccaagtcgacgccgcaacccggggaaagcagtgtactaatggtcacttgatgtgcgctggctgttttatccacctactagcagatgcccggctgaaggag

SEQ ID NO: 712138 - DNA, 97 bp, Homo sapiens
gcactcactctacgtggagttgggccctgcaggaaggacggacttcaggggcagagacgagttgtactgctgtcacaggaaatggacgctggattac

SEQ ID NO: 712139 - DNA, 100 bp, Homo sapiens
cctgtgagtcagcctgcagcctcgtcagactcggagacgtctgacagtgacgatgaggtcaagatgcaaaaaggtgagcgccagatggccaaaaggttcc

SEQ ID NO: 712140 - DNA, 101 bp, Homo sapiens
gaattctatgatgcccctgaagatgtgcacctagggggcggctaccccgtggggttttgacctgtagcagagaaccaattctggagaacagcctcacttct

SEQ ID NO: 712141 - DNA, 96 bp, Homo sapiens
ggtggcagtggaggagtgtgacagggatgatgaagaagacctgctggatggaatttctgctgaagattttttgcgtgttccggaacctgatgaaga

SEQ ID NO: 712142 - DNA, 100 bp, Homo sapiens
cttcaaaacgcactcattcagtttgctactagaatctgtgtttgtggatatcctcgacaacatgtaagaaaatataaaggtataagtagcaggataccag

SEQ ID NO: 712143 - DNA, 107 bp, Homo sapiens
catccaacgaggaggacgacagcgacgatgacgatgtcctggctccttcaggggccaccgcagctggcctgaccgccgctgcctacagagtcacactcaatcctccg

SEQ ID NO: 712144 - DNA, 80 bp, Homo sapiens
ggaatatcgagagcgtcatgaacccgagctatagagaaaggagatgagacagagtttcactcctgttacccaggctggag

SEQ ID NO: 712145 - DNA, 82 bp, Homo sapiens
cttctgcaaggtccggctgctggatggaggggattttgtcagcttgtcgtcaaggagctgagagaagataatatcattttaa

SEQ ID NO: 712146 - DNA, 74 bp, Homo sapiens
attcggaggctggtgtccagggtctcagcgcgggggacgactcaggattgtaagtggaaaatgtatatggagat

SEQ ID NO: 712147 - DNA, 100 bp, Homo sapiens
cccgggagcgcgatgtggagcgcttctttaagggctacgggaagatcctggaggtggatctgaagaacgggtgtgatgaatgcagactctgctaccattt

SEQ ID NO: 712148 - DNA, 76 bp, Homo sapiens
gcatttcagtcactggtttgcagagtccaggaaagaccacagcaagattctttcattcgtctcctcctagcctggg

SEQ ID NO: 712149 - DNA, 140 bp, Homo sapiens
ccaaaaagaaatacttcagcacttgtaagaactggtataaaaagtccatctgtggacagaaaacgtgtcagcggtgcccactgtgctggccatgaagaatggggacgtggtggacaagtttgtgggcatcaaggatgagg

SEQ ID NO: 712150 - DNA, 101 bp, Homo sapiens
cggcgcgtaggtcgcggggagctccgaaccgccggcgcccggccatggcggtctccagatcctgtctcagaaagaagagtgggagagcaggactcagcacc

SEQ ID NO: 712151 - DNA, 82 bp, Homo sapiens
caaggtcgccctcaaggccatgatcaaaacaagaacatgtgatcatccaggccgagttctatctgaatcctgaccaatcagg

SEQ ID NO: 712152 - DNA, 71 bp, Homo sapiens
gtttttatcagaaaaggatcggaaaagaattttggacttgtcttacaaggaccggcactggcatgaagcct

SEQ ID NO: 712153 - DNA, 100 bp, Homo sapiens
cttttctctgctcagtaacggcactgcggctggcgtggcagatcaggattccaagtgggttgaagagaagcagctgctcatcagaacaaaccaagacttg

SEQ ID NO: 712154 - DNA, 101 bp, Homo sapiens
agttgcctagtcgcggctacggcgtcatggaggagatccggcggcagggcaagctgtgcgacgtgaccctcaaggtactaggttttgacaagcttgcatca

SEQ ID NO: 712155 - DNA, 82 bp, Homo sapiens
gttcagaagagccaaggaataaacatgcaatgaacccaaaaggatcactttgggaagcagtgacatccaacctgtatcaagt

SEQ ID NO: 712156 - DNA, 100 bp, Homo sapiens
ccagaaaacttaattctagatgctgagggttaccttaaattggtaaagtgaacagagttatctgtgacattccatcaggcacctatgtaacgaaatcata

SEQ ID NO: 712157 - DNA, 75 bp, Homo sapiens
cagctgcaggacaacggcaggacgtgtaaggcaggagagaacattgaaagtattctctaagctatttgaagagag

SEQ ID NO: 712158 - DNA, 103 bp, Homo sapiens
ccgggggtcgctggctctgctgctgccgccggcgaaggaggaggcgttgccgggcacggatgggcagaagcctttgcaggtatcagaagttcacatatcaaat

SEQ ID NO: 712159 - DNA, 96 bp, Homo sapiens
cggagccgcgccccaccccgccagctccagagccacgtacggtccatggctaatgaaacacagaaggttggtgccatccattttccttttcccttc

SEQ ID NO: 712160 - DNA, 82 bp, Homo sapiens
atcggtgctacggtggcctgtgggagaaggaccagaagtttgccgcgtccaggattgcattctggtgccaggagaactgcgt

SEQ ID NO: 712161 - DNA, 60 bp, Homo sapiens
gatgagctgatcttaatcaaaaagtgtgatgaatgcagactctgctaccattttggctgt

SEQ ID NO: 712162 - DNA, 100 bp, Homo sapiens
ctgaagcccttcttactgcgcaccctctctgaagcacaaaaagttaatcactttcccaggcctgcacagctgaccacagttgggaaacgttgctgtcttt

SEQ ID NO: 712163 - DNA, 100 bp, Homo sapiens
gctgagagtcgggaacaggtaccggctgggccggaagatcggcagcggctccttcggagacatctatctcgggatcgtgggactttaccagatcggtttg

SEQ ID NO: 712164 - DNA, 75 bp, Homo sapiens
gccggaaggacaccaagatgcggatccgggcctttccgatgttaaggacatgttcacttccagatctctcaaagc

SEQ ID NO: 712165 - DNA, 75 bp, Homo sapiens
cccgccgctgcctagcgcgcggggggcgccccccagcccggaggctggcatgactcacatcgtgcgggaagtcga

SEQ ID NO: 712166 - DNA, 90 bp, Homo sapiens
cggaggccctgcctgccacccctgccaccacagcgttgctgggccaggagggtcacggagactcaccagttggcagaattaaatgagaag

SEQ ID NO: 712167 - DNA, 100 bp, Homo sapiens
ataggccactacatgaaagactgccctaaaaggaaaaggtcacggtctagatcacattctcgatccagaggaaggcgatactctcgctcacgcagcagga

SEQ ID NO: 712168 - DNA, 75 bp, Homo sapiens
cagttacccgctggccctggtccggacccgcatgcaggcacaaggggttgtgtccactgtggtccccgactctgc

SEQ ID NO: 712169 - DNA, 74 bp, Homo sapiens
tgcagctcaacttctaccagttcctcggggtgcagcagtagtttatgccaacgtgacttcattcatacagatga

SEQ ID NO: 712170 - DNA, 83 bp, Homo sapiens
ggaggggattttgtcagcttgtcgtcaagataacgaaggaggcccaacttcattcaataaggagcctgacggatttatcccag

SEQ ID NO: 712171 - DNA, 82 bp, Homo sapiens
cagaggggccactgctgggccctgaggctgcaccaagtggcgaaggagccggctccaaggcattgaagttgatatcgatgtg

SEQ ID NO: 712172 - DNA, 101 bp, Homo sapiens
ttggatgaagctaccaagtatgccctggaaaggaaaactttcggaaagctacttgtagaggggtttaaagccaatttgtctctcttgaggaggcctggaga

SEQ ID NO: 712173 - DNA, 100 bp, Homo sapiens
gttttaaatgtatttgcaaacctggattccagctggcatcagatggacgttattgcaaaggctgctttgctggctctgcaagaaaatggactagacgcaa

SEQ ID NO: 712174 - DNA, 98 bp, Homo sapiens
ggagcgcgagagcttcgagcggactcaggcagaggcaaggctggcagcaaaacgggctgcccgggcagaagcaagagatatacgcatgagagaactgg

SEQ ID NO: 712175 - DNA, 83 bp, Homo sapiens
aacacctctacctcctgcgaggcctcccgggctccgggaaaactacactggccaggaggctactcacagtcgaactacaactc

SEQ ID NO: 712176 - DNA, 51 bp, Homo sapiens
ccctcttctgcagcgtcctcaccaaatttggagcaagaggtggtggtggcc

SEQ ID NO: 712177 - DNA, 75 bp, Homo sapiens
ggctttgaagatggctccgtgggccagcaagagtgagccatggagctacgtgtggggaacaagtaccgcctggga

SEQ ID NO: 712178 - DNA, 98 bp, Homo sapiens
cttcccaccaccttaaaccactggatggaccccttcgaggacacgctgcggcggctgcgtgaggccttcaactgagggcgcacgcggccggccgagtt

SEQ ID NO: 712179 - DNA, 95 bp, Homo sapiens
aagcagcttaatgaggaactccagcggcgctcttcagcattagattctcgctgaagtctgttaattctactttttgagtacttatgaataaccac

SEQ ID NO: 712180 - DNA, 75 bp, Homo sapiens
gctccgtggagatcgtcccgcgcctgccggtatcagaagcatgtgcacacgtatcgcattctgcctgatggagaa

SEQ ID NO: 712181 - DNA, 100 bp, Homo sapiens
ttcttctgaattgtgctgccttggccaaaagaggggttggtgccatctacatccgtcgccggccccgtgtgcgtgtggaggccctgcagagtggaggggg

SEQ ID NO: 712182 - DNA, 101 bp, Homo sapiens
tgcggcagaggcggcggcggcgccccgctccgggtgaggttgccggggccgtgcgcgctgtgatcctggtggagggattgaaatgtctgagttcatccgag

SEQ ID NO: 712183 - DNA, 83 bp, Homo sapiens
gcgccacgcgcgcctcgggcctgggcgcagaggatcggccgggcgcggcgggaaggagccctcccaggcccaatacttcaaag

SEQ ID NO: 712184 - DNA, 83 bp, Homo sapiens
cgcaacgccgagcgcaccgacatctgcctgctcaaagacgaagttatacggaagcgtctcctcattgatggagatggtgctgg

SEQ ID NO: 712185 - DNA, 96 bp, Homo sapiens
atcgtgaccgagaccgtgaccgagagcgtgaccgagagcgcgaatatcgtcatcgttagaagtctccatgcagtaaacagacccagcagaacctgc

SEQ ID NO: 712186 - DNA, 50 bp, Homo sapiens
agacagaatccctgctaccaattttggtttcagtaacctcttcactcctg

SEQ ID NO: 712187 - DNA, 73 bp, Homo sapiens
ggaggagatgaaagctttgtatgaacaaaaccagtctgatgtgaacggcagagtcgaaacaaacaatgagggc

SEQ ID NO: 712188 - DNA, 74 bp, Homo sapiens
ggcttctctgaggcggcgagagatggtcaggtctggagctcgaccgggccaggggccgttgacatttagggatg

SEQ ID NO: 712189 - DNA, 101 bp, Homo sapiens
cgagctgaccctaggcctccaccctggcaggaatcccaatttgcctccacttagtgagcggaagaatggtgcaaaacgaattctagagcttgaccagttta

SEQ ID NO: 712190 - DNA, 76 bp, Homo sapiens
agccctggtgccaggtgtccatccccgtgctgaggttgagcaatgtttaaagcgtttgaaaaacatgaatttggag

SEQ ID NO: 712191 - DNA, 99 bp, Homo sapiens
aaggagtttgggaaaaaccgcgaagtcatggggctctgtcgggaagggcggcgactggcggcgcgatggacctgaccgggctcctgctggacgaagaag

SEQ ID NO: 712192 - DNA, 100 bp, Homo sapiens
cggagccgcagccgcccagaccgcgcagcgcgggaggcaggttccgcacgttatcttacagactggagagagtgctagtgaatgcttttgtcttcaatgc

SEQ ID NO: 712193 - DNA, 76 bp, Homo sapiens
gagggtgtacaaatacccctttgaattaattatggctgaatgccatatggcagccgagagaactccctcctctact

SEQ ID NO: 712194 - DNA, 87 bp, Homo sapiens
ggcggcagcccgtcggccgccgccaactacctgctctgtaccaactgccggaaagtgctgcggaagattgacgtgagtgaattcaga

SEQ ID NO: 712195 - DNA, 100 bp, Homo sapiens
aaccttcatcccttctgtggcagttaggagactgaatcaaggtccagagaaggtggaggaatcctgatactgagcgccgcttacaaacacgcagatggca

SEQ ID NO: 712196 - DNA, 82 bp, Homo sapiens
ctaaatgggagaagaggaatgttccctgacaatttcgttaaggtgtgttccagagaacaagccttcagacatttgctatatt

SEQ ID NO: 712197 - DNA, 50 bp, Homo sapiens
gagaaatggagcccttctccaagagaggaaaatatgatgttcccaagtgg

SEQ ID NO: 712198 - DNA, 97 bp, Homo sapiens
gtccttgaagatggcatatgtctcgaagaggtgcacccccaatgacccggagcccagtgcctcagctcctcaggagaagctgtcttcagaagtggaa

SEQ ID NO: 712199 - DNA, 90 bp, Homo sapiens
gagtaaacaacaatgttttaacaatagatcaagctagtgacttgagcaggttgttgccctggatgcccaaaatattgtagctgtttcatg

SEQ ID NO: 712200 - DNA, 100 bp, Homo sapiens
cttccgcaacctggagaacgccaagcgcttcgccatcgacatagtcttctcacaagactttcaggattaagcgattcctggccaagaaacaaaagcaaaa

SEQ ID NO: 712201 - DNA, 83 bp, Homo sapiens
ccgccgcctcgggaccggctgtatgattaggccacaatcttcaatgagtaaacatattcctgaaggagggagccccaggaaca

SEQ ID NO: 712202 - DNA, 100 bp, Homo sapiens
gtgatgtccctctgaaaactgaggaatttgaagtgaccaaaacagcagatgacgtccggttgtttgccttcgtgcgcttcaccaccggggatgccatgag

SEQ ID NO: 712203 - DNA, 90 bp, Homo sapiens
gatgactacaaacataggatgttttggcgagagatgtattcagtggaggaagctggtgtggcaaaacatgttggagatgccctcaaagaa

SEQ ID NO: 712204 - DNA, 81 bp, Homo sapiens
acagcctggagaagagcgaccagctcactaagaacatggcagccctgaagcagcttcctaggaacaaggtccccaacatgg

SEQ ID NO: 712205 - DNA, 80 bp, Homo sapiens
cggcccctaatgagattggaggagtacagcatccagggcattgtggatgcctaccgccaagccctgccccaagttcgcct

SEQ ID NO: 712206 - DNA, 100 bp, Homo sapiens
ggcgctggtcgtatccggggcagcggagcagggcggccgagacggccctggcagagatttgtgctacggatgctgtagatgatatggaagaaggtcttaa

SEQ ID NO: 712207 - DNA, 83 bp, Homo sapiens
gttcgttcgtttccagcctcaggaatttatggtcgcctttttgaatgaggatggtgctgctccactggtgcctgctgtggctc

SEQ ID NO: 712208 - DNA, 51 bp, Homo sapiens
cgtggccaagaccaagaacaacctgcgagacggtcatctgttccagccggg

SEQ ID NO: 712209 - DNA, 50 bp, Homo sapiens
atgtgttcccgcgtctactacatggggtgcacagagcgttttgtatgtag

SEQ ID NO: 712210 - DNA, 109 bp, Homo sapiens
agcaacttgctggatgtgaatcagatcatcaaggacttggcctccatggtgtcagagcaaggagaagctgttggtgagaagccctaccactgcaactgggacggctgcg

SEQ ID NO: 712211 - DNA, 98 bp, Homo sapiens
gcacctatgcaggggtggtcaacagccagctcagccagctgcctccgcactccatcgaccaggcccgtggaacacagagcattcctaatgacagtcct

SEQ ID NO: 712212 - DNA, 75 bp, Homo sapiens
gagaaacctgggtgaactttcacggacaacctcagaggacaacgaagtgttcggctttttagaccccgagaagaa

SEQ ID NO: 712213 - DNA, 75 bp, Homo sapiens
ctggagaagggatggaaatacttcaacaagtttcaggtttagctgtgcctcccagtgactataatgacaaggaag

SEQ ID NO: 712214 - DNA, 98 bp, Homo sapiens
gcacctgcgcgaagctggccaaagcctgcccagacggctcacctgtgcgggatggaacaaaagggccaattcctgtccccccagcagcatggcatcgt

SEQ ID NO: 712215 - DNA, 98 bp, Homo sapiens
cccttcaatggtggcgggtcgccggagctctgatcgccgggaacccttgccgctgctgtcctgcgaccccaagcagcaacagaagaaccttgaaggct

SEQ ID NO: 712216 - DNA, 121 bp, Homo sapiens
gcttggtgacctcatggagctgtacaaggtgattggacgatcagccacagacaagcaacaagaacttctgacatatctgaagagatggattaagaatgctttggattaaggattgtggagc

SEQ ID NO: 712217 - DNA, 75 bp, Homo sapiens
gaatacacctcaatgtctctggtcagagtggtgctgggaacaactgggccaaggggcactacacagaaggcgcgg

SEQ ID NO: 712218 - DNA, 74 bp, Homo sapiens
gaaatcgaggagctgcggctctaccccccggatgatgcggctgactaagcctactttattcaccaatatcccag

SEQ ID NO: 712219 - DNA, 121 bp, Homo sapiens
atttccttaatctatttaatcacaccctgacctgctttgaacataaccttcagatacaaagggttctgctggaattggaaatgaaaaatattcaggatgttcttgctcaaaacttaagtgg

SEQ ID NO: 712220 - DNA, 75 bp, Homo sapiens
tcgccgtccccgctctccatgaagcagttcctggacttcgaattctgcttggtcagaatcgtgatggcattgtgt

SEQ ID NO: 712221 - DNA, 82 bp, Homo sapiens
ctcggaaaccggtagcgcttgcagcatggaaggaagcagccaccctcgccatggcctccccgcccgcctgcccctcggagga

SEQ ID NO: 712222 - DNA, 97 bp, Homo sapiens
aaacaattcctcctgattatagattagaagaggtcaagggtgtgggccgaagatatgctcatgtggtgttgaggaaagcagacattgacctcaccaa

SEQ ID NO: 712223 - DNA, 110 bp, Homo sapiens
attcttttcctgccatggggatatgacattagccaggtgacaattgtggcaattaataaagacccagaagctccaattttccaagtggcagattatggaatagttgcaga

SEQ ID NO: 712224 - DNA, 98 bp, Homo sapiens
agctcatcttaggctgtgctgtgaactgtgaacagaagcaagacattgggtttgcctatcacagatgaacaaatccaggagatgaaatcaaacctgga

SEQ ID NO: 712225 - DNA, 75 bp, Homo sapiens
tggaggagtccctgaagatctatgctcctctgtacttgcggcgtcttcgacatcttcggaacattgctgcccgga

SEQ ID NO: 712226 - DNA, 96 bp, Homo sapiens
accaaatactcaaggtcactacagaattagcccaagcagattcctcccaggggagggatgctgtgcacactgtggaaggctatcattgactttcga

SEQ ID NO: 712227 - DNA, 95 bp, Homo sapiens
cgagatgtctcgctccgtggccttagctgtgctcgcgctactctctctttctggcctggaggctatccagcatggaattgtcagccacttgaaga

SEQ ID NO: 712228 - DNA, 98 bp, Homo sapiens
agcctcatcacccggctgctggagggttacctacctgggcaaagtctccaccactggcatgcagtttttgtcaggctgcacagaaaagccagtcattg

SEQ ID NO: 712229 - DNA, 83 bp, Homo sapiens
acgccgagcgcaccgacatctgcctgctcaaagatgaccttcctgaacttcaggcagttcaaagtgatcctacccaatctggc

SEQ ID NO: 712230 - DNA, 82 bp, Homo sapiens
cgggcgcagtctttaaccatggcgtccctcttcaagaagaaaaccgtggatgatattatcagacgcgacacagcctcttgaa

SEQ ID NO: 712231 - DNA, 100 bp, Homo sapiens
ctccttgaccagcatcttggctgaccttgagtgcagctccccctataagcctcggcctccacagatctgacaaagttcccaaagatgtcacttgtgacct

SEQ ID NO: 712232 - DNA, 75 bp, Homo sapiens
gattccgcagtccccccgttccctggaggtcctgtggaatggagaccaggcacctggatgagatgaagtcggcca

SEQ ID NO: 712233 - DNA, 75 bp, Homo sapiens
caagaggcaaaggggaggttacgcagcaaaccatccagaaggtaaatacgagttcacagtataccagcaaaagta

SEQ ID NO: 712234 - DNA, 99 bp, Homo sapiens
gacttggttaaagtcattgaggactttccagcaaagggtttggtaaaggctccagtgtggtggcctatgaaggacaatcctggcacgactactgcttcc

SEQ ID NO: 712235 - DNA, 82 bp, Homo sapiens
gcggatctcaccgccgctcaggccggcccgctggggctggaggcacgggcccatcaacgtgaaccattacgccagcaagaag

SEQ ID NO: 712236 - DNA, 82 bp, Homo sapiens
gatcgtcgagatgtctacttcgaagactggcaagcacggccacgccaaggagcctcatggatgggttgtggatttggtaaat

SEQ ID NO: 712237 - DNA, 74 bp, Homo sapiens
cttagtcttaagcacagagtgctaaaggaagtagaagcgaaagatgtgccggatggggtgaaagagctgtcaga

SEQ ID NO: 712238 - DNA, 82 bp, Homo sapiens
aggtcctgccgtccatgcggaagatcgtcgccacctggatgctggaggaacttgctactaccagcaccatgccctaccaata

SEQ ID NO: 712239 - DNA, 83 bp, Homo sapiens
cccgtctacatcagaagcagtggcggaagagtgatacaagaggtacttctcatcttctacctggttaccgcctaatacagcat

SEQ ID NO: 712240 - DNA, 109 bp, Homo sapiens
cagagcctaagagaactatggcaacatcaggtgactgtcccagaagtgaatcgcaggtgaccaagaatatggcccaggtgaccaaagccctggacaaggccctgagcac

SEQ ID NO: 712241 - DNA, 82 bp, Homo sapiens
tctggaaaatccgcaagaccatcatgcagacttcccaagtaagaagcggaagaggagccgctggaaccaagacacaatggaa

SEQ ID NO: 712242 - DNA, 75 bp, Homo sapiens
cccccatccaggcggtctgaaaacagagtggttgtctctgggcgagagaggctggctgaggatcgtgaccagcac

SEQ ID NO: 712243 - DNA, 87 bp, Homo sapiens
ctgggttctattttccctcctcaaactgactttgcagccacggagagtacaacagggtctggattcccgatcctgaagaagtttgga

SEQ ID NO: 712244 - DNA, 75 bp, Homo sapiens
gggccagagcgtggttgctgaccagttgaaaggacctcgactggattttgatcctgacattgttgcagctcttga

SEQ ID NO: 712245 - DNA, 97 bp, Homo sapiens
cccattcggatggtcagctgcaggaaggctcgcctatccaggcctggcaactcttcgtcaatgagggcgttgacccggacgacacctataatgagac

SEQ ID NO: 712246 - DNA, 75 bp, Homo sapiens
cccggtctcacttcgctcctgggcagctgcgcggagaactggggattacctcaacctctcttggaactcaatgac

SEQ ID NO: 712247 - DNA, 108 bp, Homo sapiens
agcaaaaccactttccctgaaatccgacactactgattctagtcaagttttaaccgtgattggagataccacaaagaagaacgagtatggattaccagggcaccaggc

SEQ ID NO: 712248 - DNA, 83 bp, Homo sapiens
cgaccccgaggaggaggattcgcaagccgagaccaaatccttgagtttcagggatttgtcttggctgttactatgacacggga

SEQ ID NO: 712249 - DNA, 96 bp, Homo sapiens
gtttggcactgaatcttcatctggataacgcagatgaacaagcagcccagatcagaagggaacttgatggccggctgcaattggcagataaaatgg

SEQ ID NO: 712250 - DNA, 100 bp, Homo sapiens
ttgaagcaatgcttgaggctccttacaagaaggtattaatctctggagaagacacatccacagttagcactttcttcagatgctgacgctcggtgaacag

SEQ ID NO: 712251 - DNA, 95 bp, Homo sapiens
catatgttaaagcacacaggtgtaaagccacatgcatgccaggtggtgattattccttgtggcattaccaatgcactttctgaagaagacaaaga

SEQ ID NO: 712252 - DNA, 100 bp, Homo sapiens
gtggcagaagcggtgcaagtactcggagacagcgactgcgattgcttacgagcagcacgggttctttgagcaggtgcaggtgatggtcctaccagtgtgt

SEQ ID NO: 712253 - DNA, 50 bp, Homo sapiens
ctcagcacgattttcccgagagttcacagatagcctgggctggaagctct

SEQ ID NO: 712254 - DNA, 100 bp, Homo sapiens
attttatggagcattttttgtagaaaacaggatttcaatatgtacagaattcatggatggtcccaatattgaagcccatggatcttatggtagaagcgag

SEQ ID NO: 712255 - DNA, 100 bp, Homo sapiens
gttcgacagagcagattgttgtccaggcaggacagattcagcagcagattgctctccccagtctttatcagaccctctgctttgaagatgcagctctgtg

SEQ ID NO: 712256 - DNA, 90 bp, Homo sapiens
caccaatgccgtgggcatgggccgcgctgagcaggtcatctttgtccgaggtgtggccgacgacgatgccctcgctgaggagcgcatgcg

SEQ ID NO: 712257 - DNA, 75 bp, Homo sapiens
caggaacgaatctctcaggctgcatcaggatgaatgatgacccaagtatggaaacttaattcagtgcacaaatga

SEQ ID NO: 712258 - DNA, 74 bp, Homo sapiens
cactacgcctttcaggacgagaaccacctgttgggccggtgcacaaacagcgtggtcaagtatgagctgatgcg

SEQ ID NO: 712259 - DNA, 50 bp, Homo sapiens
ggctgccgaaggtcctcgccagagtcccctttacttggtaaatcacggcg

SEQ ID NO: 712260 - DNA, 74 bp, Homo sapiens
agaccaggacttaataaagcacaacttgttgagcgaaaactagaagctgaacttcttcaaatagaggaacgaca

SEQ ID NO: 712261 - DNA, 100 bp, Homo sapiens
aacaacctgctgatgagggaggtgcccctgcgttgtaccatccgcctgtgggacacctaccaggtacagcacgtgggagccagaagagcacatcttggac

SEQ ID NO: 712262 - DNA, 90 bp, Homo sapiens
tactcagcaagctcgagttaaagttggatgtgctggaacagttaatagaagatgaaattgcaaccattcttaaatctacattgaaaggac

SEQ ID NO: 712263 - DNA, 75 bp, Homo sapiens
ctggaatctgatcctccacttcagagaacaggggtaagaatgattgatgttggctgatattggagtgctcattca

SEQ ID NO: 712264 - DNA, 75 bp, Homo sapiens
ggtgcagccccgggccaggccgcggccggggcaggagcgcagaaacctctgtagaggagcaggatgcaaccgaca

SEQ ID NO: 712265 - DNA, 139 bp, Homo sapiens
gccgcccgagcgctcgagaaagtcctctcgggagaagcagcgcctgttcccggggcagatccaggttcaggtactccaaagattcaggtttactcacgtcatccagcagagaatggaaagtcaaatttcctgaattgct

SEQ ID NO: 712266 - DNA, 83 bp, Homo sapiens
cttcgcctcgcctcgggacccgcggtccccgctcttgctgttccccacactgcttaatggccacatgccagtgccaatcccca

SEQ ID NO: 712267 - DNA, 90 bp, Homo sapiens
tcctctggcaggatgaggcgtgcaggcctggaattaaacaaccaccatgtcgagcaaaaaggcaaagaccaagaccaccaagaagcgccc

SEQ ID NO: 712268 - DNA, 74 bp, Homo sapiens
agtcggtgctccggggaggtcacctgacgaggaggtgttggagcgggccggagagaagtagagtgggctgcgag

SEQ ID NO: 712269 - DNA, 98 bp, Homo sapiens
gattataggcgtgagccaccgtgcctggctgaagacgaagttatacggaagcgtctcctcattgatggagatggtgctggagatgatcggagaattaa

SEQ ID NO: 712270 - DNA, 100 bp, Homo sapiens
cgtgctgctcgacgtgctgtgcttactggtcgagtggttcgcctccagcacacagagctacatccttcgggacctggacgacacctcagtggtggaagac

SEQ ID NO: 712271 - DNA, 101 bp, Homo sapiens
accaaattaagtcattttcgagaatgacagagcgggatgccaccagcttgtccaaagggaagttccaggagctcctggtgggcatcgttgtggagaatgac

SEQ ID NO: 712272 - DNA, 48 bp, Homo sapiens
ggctctctaaatggattcagctccagcatttgcaggaccagggatgct

SEQ ID NO: 712273 - DNA, 94 bp, Homo sapiens
gacgccatgtcgggttattcgagtgaccgagaccgcggccgggaccgaggatgatcaagcggtgctgattcacgagagtggaagcctccagagc

SEQ ID NO: 712274 - DNA, 100 bp, Homo sapiens
aatcaaccagagggaagaaaatgcaaactgaaacctgggaaacagtgcagcaaagtggaagatgctttctacaaaggtgaactcaggctgaatgaggaaa

SEQ ID NO: 712275 - DNA, 100 bp, Homo sapiens
tgcatttcaacatcagcctctggtcttgacacatctgctctctctgttcaagggaattttgatctaaatagccgtgcagtcggaggtccttgtgcatgaa

SEQ ID NO: 712276 - DNA, 118 bp, Homo sapiens
ctgatccaggctgggacttttcaagaggggatcccttccgtttaaacatctccctctttcaggggacaagatgccaactggcaagcagctagctgacattggctataagaccttctct

SEQ ID NO: 712277 - DNA, 51 bp, Homo sapiens
agagcttggcagaggtgttcgaaaaatttgtattgaacgatgtcttgagag

SEQ ID NO: 712278 - DNA, 101 bp, Homo sapiens
agggacagccttcagtgacattaatctgcaggagaaggaaattagttacttccagttccctggagagctcctgatgaggatgctgaagatgatgatcctgc

SEQ ID NO: 712279 - DNA, 100 bp, Homo sapiens
cgtccagtaaagaagataacctcaatcatggccataccgagcagtgaaattggagcgatttgaaattccaatcaaggttcgattaagcccagagccatgg

SEQ ID NO: 712280 - DNA, 90 bp, Homo sapiens
agtttgagccatcggatctaagatccaaaaggtttctaagcatgaattgaggaacagaagaagcagagcagatgatcggagcagcatttg

SEQ ID NO: 712281 - DNA, 88 bp, Homo sapiens
ttgttggtccttctctaaacgaccatctgaagcatctgcttacaagcgttactataacaacagtaccaaggtggctgtgaaaaccctg

SEQ ID NO: 712282 - DNA, 95 bp, Homo sapiens
ttatctcgaaagcctatcagcatagttaagagtgatcagcagctggactgtgccttggacctaatgaggcgcctgcctccccagcaaatcgagaa

SEQ ID NO: 712283 - DNA, 75 bp, Homo sapiens
tttcctgcgctgttccacctcattcaacttcagggaccctccattttccatatccaggaaaatgtgatgcgccac

SEQ ID NO: 712284 - DNA, 96 bp, Homo sapiens
cccaagtggacaggatctgactgctcaacagcacccagtcagcttgaagagtttcaaatggaccctaccactgagaaatcaagatggcagtctact

SEQ ID NO: 712285 - DNA, 100 bp, Homo sapiens
cttggatatgacccatatgccaacccacctaactacggaaaacctgatcccaaaattattgaaaacactcgaagggtgagccgtctcctgattttgggag

SEQ ID NO: 712286 - DNA, 101 bp, Homo sapiens
gtctctcctcatgctagtagctgccttctgctctccagcgctctcagcaccaagtactccaaagattcaggtttactcacgtcatccagcagagaatggaa

SEQ ID NO: 712287 - DNA, 98 bp, Homo sapiens
atggagacatgaccaacaggaagttccgccatgacaaaagggtttacttgggtcttgctggtggatgccctccttactccccaatatatacgtcttgg

SEQ ID NO: 712288 - DNA, 50 bp, Homo sapiens
cgcacgtgtaccctgggcgcaggggtagagttggctttgtgggacacagc

SEQ ID NO: 712289 - DNA, 90 bp, Homo sapiens
gatgaaatcacagctacatatttgttattggggagaaaatcttcagaggtcccaagctctttaaggagcccagtagtaaatcaaacaagc

SEQ ID NO: 712290 - DNA, 82 bp, Homo sapiens
tgtcacgctgcctttggcagcctaccagcactacatcctggccaaggcatgttatttgaaagcaattgagacgcaaccgaac
